United States Patent Application Publication US 2005/0228172 A9 - sequence listing, part 19

SEQ ID NO: 62328 - DNA, 1056 bp, Homo sapiens
tggaaagtatattaattacattactatttaaaaagcagaaattgcaaataatctcttactagtctgtgaaatttctcttcttggattcttgctttagccaagaacttgacaataaatatatgctaaatggacacaggaataactgatataatttgacatgaattcttagaacagttgtatgagacagcaagcaataaatgctaaattgaattgagtcaagtaccaaatcatattactatttaagataatttttctcaaaaatattttttgaatatcagaaagatccaaaagtattttatatcttctattaatttccatttaaaaaaacagagatatcaacacaaacggatatctacataataattgcaattatacatgaaataataaattaagtgggtcattaagttagtcaaaatatgtgaggaaaaagactatttcaaaaaagttaaattacataaacagacattaggcaatgcactctaatgaaatattgacggtgattaataacaactctgagagacacattttcttatcttctcatctttacacttcactttcttctgtcacaacagttacaaatgattagctcagcagtcatttctctattaactaacmaaatgtatgaaaagatagagacacacactgtcaatatttcgaacataatcttacagatacaaacatttacttaacacaaaagttgtgaaagtaataccaaaggaaaagataaatagccttgacttcatagaaattaagttgccttgcatcaaaaaaactttattaaaatagaaaacaagtaactaatgctatagagataaatataaacagtgaaactgttaaaattttaatatgcaaagagctcttagaaggccacaaagaagactaacacatccacagaggaaaatggacaaacaatataaatacccaatttaagaaagaaaaagaataataataaataaaaggaaaaatgattaatggcgctgaatatcaaggaaatgcacaataaagttataacataacctaagaagtagttaaaactttttaaaaacaaaaatatat

SEQ ID NO: 62329 - DNA, 1056 bp, Homo sapiens
tggaaagtatattaattacattactatttaaaaagcagaaattgcaaataatctcttactagtctgtgaaatttctcttcttggattcttgctttagccaagaacttgacaataaatatatgctaaatggacacaggaataactgatataatttgacatgaattcttagaacagttgtatgagacagcaagcaataaatgctaaattgaattgagtcaagtaccaaatcatattactatttaagataatttttctcaaaaatattttttgaatatcagaaagatccaaaagtattttatatcttctattaatttccatttaaaaaaacagagatatcaacacaaacggatatctacataataattgcaattatacatgaaataataaattaagtgggtcattaagttagtcaaaatatgtgaggaaaaagactatttcaaaaaagttaaattacataaacagacattaggcaatgcactctaatgaaatattgacggtgattaataacaactctgagagacacattttcttatcttctcatctttacacttcactttcttctgtcacaacagttacaaatgattagctcagcagtcatttctctattaactaacaaaatgtatgaaaagatagagacacacactgtcaatatttcgaacataatcttacagatacaaacatttacttaacacaaaagttgtgaaagtaataccaaaggaaaagataaatagccttgacttcatagaaattaagttgccttgcatcaaaaaaacttwattaaaatagaaaacaagtaactaatgctatagagataaatataaacagtgaaactgttaaaattttaatatgcaaagagctcttagaaggccacaaagaagactaacacatccacagaggaaaatggacaaacaatataaatacccaatttaagaaagaaaaagaataataataaataaaaggaaaaatgattaatggcgctgaatatcaaggaaatgcacaataaagttataacataacctaagaagtagttaaaactttttaaaaacaaaaatatat

SEQ ID NO: 62330 - DNA, 1056 bp, Homo sapiens
tggaaagtatattaattacattactatttaaaaagcagaaattgcaaataatctcttactagtctgtgaaatttctcttcttggattcttgctttagccaagaacttgacaataaatatatgctaaatggacacaggaataactgatataatttgacatgaattcttagaacagttgtatgagacagcaagcaataaatgctaaattgaattgagtcaagtaccaaatcatattactatttaagataatttttctcaaaaatattttttgaatatcagaaagatccaaaagtattttatatcttctattaatttccatttaaaaaaacagagatatcaacacaaacggatatctacataataattgcaattatacatgaaataataaattaagtgggtcattaagttagtcaaaatatgtgaggaaaaagactatttcaaaaaagttaaattacataaacagacattaggcaatgcactctaatgaaatattgacggtgattaataacaactctgagagacacattttcttatcttctcatctttacacttcactttcttctgtcacaacagttacaaatgattagctcagcagtcatttctctattaactaacaaaatgtatgaaaagatagagacacacactgtcaatatttcgaacataatcttacagatacaaacatttacttaacacaaaagttgtgaaagtaataccaaaggaaaagataaatagccttgacttcatagaaattaagttgccttgcatcaaaaaaactttattaaaatagaaaacaagtaactaatgctatagagataaatataaacagtgaaactgttaaaattttaatatgcaaagagctcttagaaggccacaaagaagactaacacatccacagaggaaaatggacaaacaatataaatacccaatttaagaaagaaaaagaakaataataaataaaaggaaaaatgattaatggcgctgaatatcaaggaaatgcacaataaagttataacataacctaagaagtagttaaaactttttaaaaacaaaaatatat

SEQ ID NO: 62331 - DNA, 2138 bp, Homo sapiens
tggcgattgcgtgaactacagctaaacatgtgatgacaatacctaaagtaaatgatgcattgtgatgaactctagcaaaccaaaataaatgaagtttcatatatgttaaatatgtgacaactaggacaatgtttctgtggcagaccttctcacatggctccccagagtccctgcttcctggtattcacagcctcatgtggttgcctctccttgaatatgggctgaacctagggacttgcttctaatgaatgtgaatatgaaatatggcaaaagtgatgagatgtcacttctgagattagataagaaaggagtgttctttgtgccttgctagcattctctctcccttgccatctgttcgctggctttgataaagcaagatgtcatgttaaacagccccatgtgacaaggagctgagggggcctccaatcaacagccagtgaggaatgaaggctctcaggccagcagcccacagcgtcctgaattctgccagtaaccatgtgagtgagcttaaaagcagagtttcccagtcgagccgttagatgagaacacagtcctggccaatgccttgattgtgagatgccgggagacagagaacccagataggatattcccagatttcaacccacagaaactatgagataataaatgtgttttattttaagctgttaagttgtaagaaaattagttatgaagtgatagaacttacttatgaagtaacagaggatatataacctccttcttccataaaaagctcttccagaaaagtatttgctgtcactttaagtttagcaggatgcatttacatctacagagaatgaagaacactgatttcagaaatctcaaagagcagagaaagccaccttgttttgctcacctcattattgctggagaagtctgtaagtggtggttatagygaacggaaccctgaacttggagtcaaaatacctgattctgccatgagctcaatgtcagttaatctctctgggacttgcattgctatttgataaaatggggtgaaggtgcttgctggaaattacatctgaaattttttccagcatgatgtacacagagagtatcctcagcagcactgggatctactaaacctgttactgttcactgatatacaactccattagctgtttcacaagaaacatctcagttaggaactgtcgctgcctaattagtataaaagattggcctttcccccttaaaatggattacaacccaaaatagggatcaaatgagccatagcattgagttaccaccttgctagggccctacctcaggccaacctgattctaacaatgacccagtgggaggctggaagtcagaatggatctcctccccaccccagcctccatgcctacagaccatgccttcatcggagagttcatttaaccctctgagacacaatagtatgtacaaaagatgtcctcagttataagttatatgctatgctacaaatcacatttccagaccacatcaaggctgatggaaaaagaactatctcactagaaaaccacgtatggctaagaagtaaaatatctaaaaagccatatgttttttaacagtcttacatcagcagacacaaacaagagtcttgtggtaaatcacaggcactttaatgattgtgagagtctaactctgcagttctgagtgacagaaacactatctgagacagtagccttaaatgacaatattctttttaaggtggaaaataatttggcaaagatttagggagatctataaactatttgtaatctatctgggaaagatctaataaaaagctaaaattagttccttatgattttcacaggctcacaactggagagtcatccaataattcaccaggagggagtggtaatttgcttttgcttctatgcatgaacatatatgccttttcaatgaagagacagctcggcatgtgactttgaggctcactatctgttaaccatgtcatttgtgttattttggcaggagatgtttcgactgtcttattaatctaaatagttctacagtggaaataaagacaacacacacacacacacacacacacacacacaaagcacacatacacacaaacaatgtctgcattgtttcttaagtgaaccatatcctttcatctttcaactctttag

SEQ ID NO: 62332 - DNA, 2138 bp, Homo sapiens
tggcgattgcgtgaactacagctaaacatgtgatgacaatacctaaagtaaatgatgcattgtgatgaactctagcaaaccaaaataaatgaagtttcatatatgttaaatatgtgacaactaggacaatgtttctgtggcagaccttctcacatggctccccagagtccctgcttcctggtattcacagcctcatgtggttgcctctccttgaatatgggctgaacctagggacttgcttctaatgaatgtgaatatgaaatatggcaaaagtgatgagatgtcacttctgagattagataagaaaggagtgttctttgtgccttgctagcattctctctcccttgccatctgttcgctggctttgataaagcaagatgtcatgttaaacagccccatgtgacaaggagctgagggggcctccaatcaacagccagtgaggaatgaaggctctcaggccagcagcccacagcgtcctgaattctgccagtaaccatgtgagtgagcttaaaagcagagtttcccagtcgagccgttagatgagaacacagtcctggccaatgccttgattgtgagatgccgggagacagagaacccagataggatattcccagatttcaacccacagaaactatgagataataaatgtgttttattttaagctgttaagttgtaagaaaattagttatgaagtgatagaacttacttatgaagtaacagaggatatataacctccttcttccataaaaagctcttccagaaaagtatttgctgtcactttaagtttagcaggatgcatttacatctacagagaatgaagaacactgatttcagaaatctcaaagagcagagaaagccaccttgttttgctcacctcattattgctggagaagtctgtaagtggtggttatagtgaacggaaccctgaacttggagtcaaaatacctgattctgccatgagctcratgtcagttaatctctctgggacttgcattgctatttgataaaatggggtgaaggtgcttgctggaaattacatctgaaattttttccagcatgatgtacacagagagtatcctcagcagcactgggatctactaaacctgttactgttcactgatatacaactccattagctgtttcacaagaaacatctcagttaggaactgtcgctgcctaattagtataaaagattggcctttcccccttaaaatggattacaacccaaaatagggatcaaatgagccatagcattgagttaccaccttgctagggccctacctcaggccaacctgattctaacaatgacccagtgggaggctggaagtcagaatggatctcctccccaccccagcctccatgcctacagaccatgccttcatcggagagttcatttaaccctctgagacacaatagtatgtacaaaagatgtcctcagttataagttatatgctatgctacaaatcacatttccagaccacatcaaggctgatggaaaaagaactatctcactagaaaaccacgtatggctaagaagtaaaatatctaaaaagccatatgttttttaacagtcttacatcagcagacacaaacaagagtcttgtggtaaatcacaggcactttaatgattgtgagagtctaactctgcagttctgagtgacagaaacactatctgagacagtagccttaaatgacaatattctttttaaggtggaaaataatttggcaaagatttagggagatctataaactatttgtaatctatctgggaaagatctaataaaaagctaaaattagttccttatgattttcacaggctcacaactggagagtcatccaataattcaccaggagggagtggtaatttgcttttgcttctatgcatgaacatatatgccttttcaatgaagagacagctcggcatgtgactttgaggctcactatctgttaaccatgtcatttgtgttattttggcaggagatgtttcgactgtcttattaatctaaatagttctacagtggaaataaagacaacacacacacacacacacacacacacacacaaagcacacatacacacaaacaatgtctgcattgtttcttaagtgaaccatatcctttcatctttcaactctttag

SEQ ID NO: 62333 - DNA, 599 bp, Homo sapiens
cctggggacttgttgaaaagcagattcctaggtgctgagccaaatctacgaacacatatacagatgatttaaatacaatgataatactgagaacctttgtcctaaaaagtagggctaaccttctgattaagaaatgatattgtgcagtactgggaggagaagatgaagaacatgaagatcagagctaggaagcgctgaggagaaattagtcttggcttgaggtggacttggaagaaagcagaatttgaattagcaaagcctaggggagtcctaaaagaggctggggagaggatgaagggtaatttagagtgagtcatggcagctggggagaggagagtgtgtactgtacctataaaagagactgtccagctgggaacggtggctcacgcctgtaatcctaacactttgggagaccgaggtgggcggtgggcagatcacctgaggtcaggagttcgagatcagcctggccaacatggcgaaaccctgtctgtactgaaaatgcaaaaattaggcgggggtggtggcacatgcctrtattctcactcagctacttgggaagctgaggaaggagaatcgcttgaacccaggagacggagttt

SEQ ID NO: 62334 - DNA, 990 bp, Homo sapiens
atacttttacagtgtagctatgttattatatagcttaacatggaaatgaaatttaagttgatcagatagtcaaatttcaattataaatatcaaacaacatgctaatatacaactacaaactaatgttaaagttgaagacaaaccttaaataaaaataaccagtaaaaaatagttcctgtgctaacaatgaaaatgttttttaatagtaatttgaaaaaacaaaagcaaattatggattgacttgagaaaaaaagtgamatggatggcagaatcctgagacactttggcaatacagcctcagcaatgataaagattattgtactgagaggaaatgtactgaggctctcttgactggggaacaatccctgtgctgtgggttagccgtacagagaagagcatctgcaggttctgttacattttggcatggagtccctgaaggcgagtctaaagcctattaacagagaagaggttatagaaactccccaggtattgcacagaggtttcccctaaactagactgatctaagtaaagattattataataaagatttattatttattattataataaagattattaaagcctttcctttctaaagcattcctggatacaggtgcaatgccacatccagtcacaatggcgacattaactcaattagctctcaactctaactgcccgctggaatcactggacaactggaatgaccaccatgctcttgccctccccacttctcactactgtccaccctcctccaatatgatgtaactggtcagtggcaaagcacaagcatcagtatttttcaagtataaagctccccatgtggttataataggcaggcagggttaagaacactcattttttcccatgtggagagactttaggcttaatattccaagcctgtttctcagaaggttcttctgatcattttaggagaagaaactgggcgagaacagcacagactcttctgaagccagtatgtctgtaacaagt

SEQ ID NO: 62335 - DNA, 990 bp, Homo sapiens
atacttttacagtgtagctatgttattatatagcttaacatggaaatgaaatttaagttgatcagatagtcaaatttcaattataaatatcaaacaacatgctaatatacaactacaaactaatgttaaagttgaagacaaaccttaaataaaaataaccagtaaaaaatagttcctgtgctaacaatgaaaatgttttttaatagtaatttgaaaaaacaaaagcaaattatggattgacttgagaaaaaaagtgaaatggatggcagaatcctgagacactttggcaatacagcctcagcaatgataaagattattgtactgagaggaaatgtactgaggctctcttgactggggaacaatccctgtgctgtgggttagccgtacagagaagagcatctgcaggttctgttacattttggcatggagtccctgaaggcgagtctaaagcctattaacagagaagaggttatagaaactccccaggtattgcacagaggtttcccctaaactagactgatctaagtaaagattattataataaagatttattatttattattataataaagattattaaagcctttcctttctaaagcattcctggatacaggtgcaatgccacatccagtcacaatggcgacattaactcaattagctctcaactctaactgcccgctggaatcactggacaactggaatgaccaccatgctcttgccctccccacttctcactactgtccaccctcctccaatatgatgtaactggtcagtggcaaagcacaagcatcagtatttttcaagtataaagctccccatgtggttataataggcaggcagggttaagaacactcattttttcccakgtggagagactttaggcttaatattccaagcctgtttctcagaaggttcttctgatcattttaggagaagaaactgggcgagaacagcacagactcttctgaagccagtatgtctgtaacaagt

SEQ ID NO: 62336 - DNA, 1026 bp, Homo sapiens
tgcattcaaaatttagttcaggagcagcgaggagtgatgtttacttgtccctttgcttgagagacctggggtttctcccaccacccagggtgcattatgaggctggagtgggaggaccatctgtacttaattgaggaaggaatagtaacctattgcctgatctgctattggtgacatttgccctgttcactagggaacagctctttaaagggtttcaagaaatagctaccaacagccttaatttaacagctgtgctgaactattgcggaacatccagatgtggagctgtctgtgggaaatacaatccgtccaaaggaggagataatggttccccttgtgggcccagccttcccgagctttcgagaacttagtgtctaccctgtctttgtttaaggcagttatcagcctaattactcatatgcaagccaacagctgttttcccagttgagagtcattttatactatattgcctcctttacacttatttgtcatattaggaaaaatattgaggggcagaagtgtttgcagctgtacatttaaaacatctcatgtagcactaaagtttgataatgagatgaactgaacttcatttcattatagtgactttttctttctcttttttcttcctcactttagctgtcaccttcactatggtgtcagtccttgggttctacttatggagactcatattattttgccagaaagcctaagaacgagtttagctattaaaagtaactctacttctgaagtcatattttattcccctgcaatagtttcaataccagggcaagtaaacagtgattaaacaaaaaatggcggcaattatctttgcgggctttgctgtacacataaaatctcaaagaaggactgaattctttgacyaattgaaatgatccccaaatttgaagagaagccatttatttcctggtgtactttagacttcatcttcagaactgccgtttttattaattgtccaattcagaattcaaagatagtactgttctgcttaggaattcaaagcaaact

SEQ ID NO: 62337 - DNA, 1115 bp, Homo sapiens
acaatttcacaggaaatgaaagctttttgaatgcagggactcatttaacttattaattgctatatatctggagactagaaaagtacatatatagaaaatttccaaagagtaattgttgaataaatacatggcacgtagtagatgtcaataaatgttggtttaatttttccttccttgcctaccttaagcccaatttcttcttggcaaagtattaccttgtacrctttgaagatcgttgtctttcatatggaaagtggaagtaaaataaatactcacttcttctcatttctccctttcaacatcacatcatctgggccaagactaatctttctttatggtctttttccatacacagtagagtaacgaggacatttttgttttcatcagtgtgtttcaaaactctaacttattctgggttttaatatttttgtaatgaattttctggttagaatacttctttattttcttcctttgaaatgtgcctcttccatcattcgtgcattctcagataacccctggtatagctacactgatttctttatgtctccccccttttcttcttttatgggattatttataattgaattgtcagaatttattttcttgcagattcctatccttttttttcttttgagattgttttcctttttgaattaccctcttcttttaagttcatgaacatagagtcatgctttttgtgaatattttaaagctgttttccagtgcacatgactacaccctgtgtatatccttcctttgattttatgtcaatgtttatacaccaaaaatcagcccttctttttttttcaatgttgttcaaagtagaaatccccatagtagcttccaaaaaatgaacttattagtgaaaaaattcaatcatgtatcagatgttctactttaagaggaatgagacttccagaggacttcattatatatgagggcttcaatacgcttttgtgtcttttatatattatttacacccctgtgtccctgtatgttgattgcaatatccaaatgtgccaactggtctaatatgctaactcctgtaacagcaattgctattgcttttctcttattttaccctctttattctcactcagataacttccaaatgc

SEQ ID NO: 62338 - DNA, 573 bp, Homo sapiens
tttccatgtgtatacatttccatgtataattatgtttaaatcatatgaatatggttatatttgtctctaacctcaaaaacagtcagtgcatatggttcaagttcacaaattttagttgagatggaggaaatgctttttcagtctttagttcagatggagggagtttctaaccctcctaactttttttgccttctctgcattccactccacaccttcagcctgtgataggtcagtaatttattttttggtggtttggaaggaggcactggcccgatgatcccttctccttcatctcctctttctttttgtgtgggctgccctcagaaagccagaattctgtgttgctcttccaagctataagacctatgggaagtttggatctaaccatagcttccagagcctgacatgcctaaaattaataaaagaagtattgaattactcttctgcttgattcttgtctgtctgtccattcatttcaaaccaggtaccacaaacatttgtggtaaatattaaaaacaacaytatatgctacagaaaaataaggagaagggatgatttttgattggtaaatat

SEQ ID NO: 62339 - DNA, 855 bp, Homo sapiens
tccctgtcccttaaatattagagtgaaccatatcaaatagtgaatatttaacaatctttgacctgaaaaaaacagcaattccatataattcaatccaatattatttttgtctgtgtaaattagactgtaaggtgatggtgacaataatggtggccgttagttcaattatttctcaccatctgaacctacttctagatttagagagtaaggaatcagagaattaattaaactaatgggtatactgggctgtataaatcaattttrttccttagtttcagatatcgagtagcttaaacgggagtacaaaggatttatttgaaatattactgaaaactcattgattcctgaaataggatagaaagagaatggacattgagggtaagtgagggatgtctgtttttgcaagagaaccttatggcttaaaaagcatttcaatataagtggcgtcatttattctttaacctgtgcaggtaggtattagcccactaacccatcccgaaacccattttacagaagagtaactgttcctgttcttaattgcaagccagagttagatgcaatgtactcatccctcagcatactcaggagattggttccaggacccccacgaacacccaaatctgtgcatactcagagccttccctgcagaacctacagataagaaaaattggcccttcatatacgtggctttcacatcctgtgattactgtatttttgaacagtctgtagttttaaaaaatccacatataggtggaccctcgcagttcaaactgatgttgttcaagggtgaactgtgcaattaatgttgaagtaattaattgacaaaggataagacccactgtcgaagcctgaccc

SEQ ID NO: 62340 - DNA, 855 bp, Homo sapiens
tccctgtcccttaaatattagagtgaaccatatcaaatagtgaatatttaacaatctttgacctgaaaaaaacagcaattccatataattcaatccaatattatttttgtctgtgtaaattagactgtaaggtgatggtgacaataatggtggccgttagttcaattatttctcaccatctgaacctacttctagatttagagagtaaggaatcagagaattaattaaactaatgggtatactgggctgtataaatcaattttgttccttagtttcagatatcgagtagcttaaacgggagtacaaaggatttatttgaaatattactgaaaaytcattgattcctgaaataggatagaaagagaatggacattgagggtaagtgagggatgtctgtttttgcaagagaaccttatggcttaaaaagcatttcaatataagtggcgtcatttattctttaacctgtgcaggtaggtattagcccactaacccatcccgaaacccattttacagaagagtaactgttcctgttcttaattgcaagccagagttagatgcaatgtactcatccctcagcatactcaggagattggttccaggacccccacgaacacccaaatctgtgcatactcagagccttccctgcagaacctacagataagaaaaattggcccttcatatacgtggctttcacatcctgtgattactgtatttttgaacagtctgtagttttaaaaaatccacatataggtggaccctcgcagttcaaactgatgttgttcaagggtgaactgtgcaattaatgttgaagtaattaattgacaaaggataagacccactgtcgaagcctgaccc

SEQ ID NO: 62341 - DNA, 1075 bp, Homo sapiens
  misc_feature (1)...(1075): n = A,T,C or G
caaacagaggggtccggagacttgcattctagtcctgactctgactttaactgaacaaaagagccaagttatggcttgtgtttccttttcctcctctgtaaaatggatgatttggagcccatgcctccttccttgttttgacaagtaaatcctttttttttttttttntttttttttntntgagacggagtcttgctctgttgcctaggctggagtgcagtggtgcaatctcagctcactgcaagctctgcctcccaggttcacaccattctcctgcctcagccttcagagtagctgggactacaggtgcccgccaccaygcacaggtaattttttgtatttttagtagagacggtgtttcaccgtgtcagccaggatggtctcgatctcctgacctcgtgatctgccctcctcagcctcccaaagtgcagggattacaggcgtgagccaccgtgcccggccaccattattctttagaactttctgccaatcttcccaacaatgctgtgagtcaacaggggtgtgtccatcttacagatgtggaaccaagactcagaatgcttggactcagaatcatagaatctcagggtcatcatgatccttagagaatgttagttcagtggttctcaaccttctgagaccctttgttcacactctctccttcaatcctactctctcagtggggagtgggggagaatgcttggcctctctttgttgactcttgagagtgtggcagaaaaagtcagctgctatggtagctgatgagttataaagcaggctctgcgatcacatatagatgcaggaatggtgagaaacagcataggatagcaataagaattcaggagcttttagttgatccactgtgttcatggccacgccagcaggaggtacgagttcccaggttcagtaaagccatctatccatcactgagtctccccgcagatgatgttattctccactgtctgcgcaaacgttttcaggttctatcttcattcttcttgtgattttaggactgtcaaatttgcttaatatcctctttctaattctgttaactggattctatttcacatacaga

SEQ ID NO: 62342 - DNA, 1670 bp, Homo sapiens
cccttaccgtttgtggcctagtgctccgtccagctttcttacaaagtaagcatagttgggattgggtttttgtgctatgcagcttcatctactttggcaaataacaccttgaggcttatttgcaaggatctttcccaagtcacaaaggatagcagcacagtgcagtggttagaaatgcacgttttttattattccttttacacaagttcaactcccagttctgttgcttcttacttgggaccatagaaaaagcatctaagctttctacacatcggtatctttgtttacatatggtgataataataaaacctgcttcatagaggagatgctctgtggaattgcccagtatagggcttagcataatgaaagcattcagtaagtgctactactattgtttactattattgtccagcatttactagagtcactaactaaaccatctggtcccagttctgatatgtttttctcccaggaaggctttgccaacacagccctcccaccctagtctggattgagtattcttccttggtgtattccgcagcccgtgttcttcccccataagagtgaaaatcacccaggcttgaaggaagggactatgtctgctttgtttattgtatctgacatagaacctggcacacagaatgtggacactcaaaacatatttgttggatgaataaatgaatgactataaggaaagcttgaggtcctcgccatattgaagaacccaagaaacaatcaggcaccaaaggctctattaaaggaaacggagggtacagtggcagcacagtgatgagaaggggtggcaggaccattacgcatgtcttcctacccctaaatcgcatctgtgccttttatattgtatcatgttagatgagggtctctcctgcctgtgagagtggttagctccccttccacggtcatccaaatggttttctttcgagaactagcaattacttcagtccttctctcaygcaatcacagcagctgacccgaagccccttgctccagatgcatggaaaagcctgctaggctggagaacttcttactttctttcaacctgtcaaaaatgacagctgtgtatcactttggggagagttgagactggcacaaaactcatcccctgatgtgtcataattacatttctggctttattacacttcttagtatgtagtttgggtctggacactaggatggggtggccatgctgatgtgatgtcctgagctgagagacctcagggtacatgagggctttgtgaaggtctttatgatggaaaaagtgtagcgtccagatagatggatagcaagggagaccctacagaagttcatctgaatctgtcctaatacttctgagtcggatatcctcttctttcttggcatctcaactgagctttgctcttctaattcatcttagaaagtgaaaataacaatttcatgtcactttttgtctaccacatgggcaaagctatttttttaaatgataatacatagtgtttgtaaagatacggaaaaagcagaagcccttttaagctacttgagaaatataaattagcacagctatgtgttccaatacattttttcattactcagaactagcataagcctttagcaaaatcatcaatgataaaacacgcgcttcccttaccccagtgctggagacgagaattcctgca

SEQ ID NO: 62343 - DNA, 940 bp, Homo sapiens
gcatttcctgacacctatgggtatttggatacacttcctgggggacttcattatcatgttgcattttctcctttaaactgatgtttgattaagcccctggcttttaaatttggtttcccttgcttagaccatctggggacatttgtattcctcattcagaattttgaattcccaatccaggggtcagtgccctgtgctatttggccaatcctccacgaacaggggaattcagactagatggatggaagaatggatatatcatcacctggacctcataaattactagattagagatcacagttgggcccagaaatgtacgccttattcttcaacactttatttttgtttccactttctacagcttgtcttggcagaataatttttagcagaattattcttgattgactgtcaactttattttaagccagtatcttatccatgcctagagcaaaagttatataatgtttcgctaggataactgggagttcagctattggaattcaacaattaataatgaaagtatcaagtcatgagattttccattctctatagggtctcctgtttgtctgactttgaactttgaagattttttagtagacaccagatttcacacttgagtgggttcctgccctcaggtttaaccaatatgctttttctctcagctatagcagatactgttctattttatttgaattcaagtaaaatagggtttggttgggtgtacacattcatcctatgggycttttgttctttttctactatttttaaaggaatatccatatttttgtacggttttatcacagagacaactgcttaagagtaaggattagagcgtgaatcaagggaaagccacaggttctatgaaaactgaaccaccaaacatgattctaggaaatcctttggattccaagcacaattgcatttaactcctttacatgca

SEQ ID NO: 62344 - DNA, 423 bp, Homo sapiens
attcacccacatagacacacagtttgttcttgcacaatgatgtttatactatgtcgttgaatggttctgtatggatttttycccatttaacaaatgggagatcttcctatgtttggatcttctattttgctgtttgtttcagatggctgaataccacaccactgtaaaattataccacaatcattcccctattggaaacaatgtcactgtccatgttcttgttcgctattacaaaaattatcacttgaaatcctgtgacaaatggagaccttctttagggtacagtacaagaagtggtattgatgagtcaaaagacatacacattttcaatttttatagattttgccaaatggccctgaagaaagagaatcaatttatgttcccatgagtggatgaatatctatttggccttacctataattt

SEQ ID NO: 62345 - DNA, 646 bp, Homo sapiens
cgatggctttaagtattaatcatggcttctgattcaaacccagcctttgaggatactcttcgaggtaagaaatttatcaagagaaatttcatgccctacccttggcagtaaattttttttgctatgctacatttaacaatgagatggctactaactcataatcagtaatatatcatgtcattgtaagtactcaagtacttattgaccatgtttcagatagtttttcagaaatagtaatgccattaaacctccttacctgcttttctcatgccgtatatctttgccagctgacaaggagtaggggttcagtttgaatctggaatagatctttttctcagcaaaggtgataaaactactacctccatgttttaatgaactttyttatagttcaggctctcatgtgtgaaatttttaccaaaactacagatatgagaaacagctaatctttgacaaatgtttcttagatttgcttaatctaagaatattctttaacattttttcataattatttttgtacttttaaaaagcaacctttttcattatttagacaatatcatgtaattaacttttttaattaaagcagccgggtatggtggccaatgcctataatcacagcactttgggaggctgaggtgggtggatggct

SEQ ID NO: 62346 - DNA, 857 bp, Homo sapiens
ctctggtttgaagtctttcaagtctgttgcaactatattccctggcccaagttatctataaccttggtcatctgggagcttgttagcaatacagaatctcaggcacatcccagatgtactgggcttctcagagaaacagccccaattgggtagtttgggtaataaagttttggctttcacaatataggctggccaactcgacccaaaacagatgatggtgcacatgcctggagacccaggaggacctgtggtgcagatgaagtctgaggacactctgctggagaagtctcccttgcttgggcaagagaagtgggggagtcggattttttattctagataggccttcaactgattgaaggaagcccacccagattatggaaggcagccatctttacccagagttcaatgattttagtgttaacctcatccaaagacamccagcaagttaacacataaaattaaccatcacaccagatctgctgaatctgaatctacattttaaaaggatttgccaggtgactctgcataatccagtttgaaaattgcatttttctacaacccttagagagtgtaaaaatctacatggtaattcagtaactcagaaacaaggcttgatttgctgctttaacttgagaacttttctagcatttactgatctggaggtagggatgcctacagaaatcctcgccctcccttctaggtaaaggaccctcccctttgttctcacgtgaacctcactaagcttctaacctggtttactgaattagtggcttgtgggtcttccctgtctacaccaaactctccgagagcatctacatcttattttctacctccacagagacagcctttattggcgg

SEQ ID NO: 62347 - DNA, 921 bp, Homo sapiens
caaatatgaaacatctgctttttatttgcaatcatttatttgtaactatttgcaaatatgacacatttgcttttattaatgcagatacgtgagccttaaccccctacctaatttacttctgtaatgatacttcattgccaccactgagcatgtgtatrtgtgtgtgtgtgtgtgtgtgtgtgtgtgtgtgtaaaaaaaaaaaaaaatttttttttttttttttttttttagtggaaacatggaattggtgggtaggcaggcaagttggttttttggtttacctcagttggccatggccccaaaatttaagagccaccgttttagattattttgcatttcctcctctgtattgctggtctaagaatagaaaatacttttattttctactttggccttaaacttaaattaatgataccctacatagtatttttcttctgtagcaaacagtgctagatgactaagcattgaaacaattttgatgaacactagacagttaaataaaagtctgcctttaatttgcttgcttttgaatggctagaagcatcatctatgccatagtgatcttttaatttactttaatttgggatatcacaggcttttttttttttttttgagatggaattttatttgctcttgttgcctaggctggagtgcaatgacgcaaatctcggctcactgcaacctctgcttcctgggttcaagcgattctcctgcctcagcctcccgagtagctgggattacaggcatgtgccaccatgcccggctactttttgtatttttaatagagatggggtttcaccatgttggtcaagctggtctcgaagtcctgacttcaggcaatccacctgcttcggcctcccaaagcgctgggattataggtgtgagccactgcacccggctgggatatcacagtttttattt

SEQ ID NO: 62348 - DNA, 921 bp, Homo sapiens
caaatatgaaacatctgctttttatttgcaatcatttatttgtaactatttgcaaatatgacacatttgcttttattaatgcagatacgtgagccttaaccccctacctaatttacttctgtaatgatacttcattgccaccactgagcatgtgtatatgtgtgtgtgtgtgtgtgtgtgtgtgtgtgtgtaaaaaaaaawaaaaatttttttttttttttttttttttagtggaaacatggaattggtgggtaggcaggcaagttggttttttggtttacctcagttggccatggccccaaaatttaagagccaccgttttagattattttgcatttcctcctctgtattgctggtctaagaatagaaaatacttttattttctactttggccttaaacttaaattaatgataccctacatagtatttttcttctgtagcaaacagtgctagatgactaagcattgaaacaattttgatgaacactagacagttaaataaaagtctgcctttaatttgcttgcttttgaatggctagaagcatcatctatgccatagtgatcttttaatttactttaatttgggatatcacaggcttttttttttttttttgagatggaattttatttgctcttgttgcctaggctggagtgcaatgacgcaaatctcggctcactgcaacctctgcttcctgggttcaagcgattctcctgcctcagcctcccgagtagctgggattacaggcatgtgccaccatgcccggctactttttgtatttttaatagagatggggtttcaccatgttggtcaagctggtctcgaagtcctgacttcaggcaatccacctgcttcggcctcccaaagcgctgggattataggtgtgagccactgcacccggctgggatatcacagtttttattt

SEQ ID NO: 62349 - DNA, 921 bp, Homo sapiens
caaatatgaaacatctgctttttatttgcaatcatttatttgtaactatttgcaaatatgacacatttgcttttattaatgcagatacgtgagccttaaccccctacctaatttacttctgtaatgatacttcattgccaccactgagcatgtgtatatgtgtgtgtgtgtgtgtgtgtgtgtgtgtgtgtaaaaaaaaaaaaaaatttttttttttttttttttttttagtggaaacatggaattggtgggtaggcaggcaagttggttttttggtttacctcagttggccatggccccaaaatttaagagccaccgttttagattatttwgcatttcctcctctgtattgctggtctaagaatagaaaatacttttattttctactttggccttaaacttaaattaatgataccctacatagtatttttcttctgtagcaaacagtgctagatgactaagcattgaaacaattttgatgaacactagacagttaaataaaagtctgcctttaatttgcttgcttttgaatggctagaagcatcatctatgccatagtgatcttttaatttactttaatttgggatatcacaggcttttttttttttttttgagatggaattttatttgctcttgttgcctaggctggagtgcaatgacgcaaatctcggctcactgcaacctctgcttcctgggttcaagcgattctcctgcctcagcctcccgagtagctgggattacaggcatgtgccaccatgcccggctactttttgtatttttaatagagatggggtttcaccatgttggtcaagctggtctcgaagtcctgacttcaggcaatccacctgcttcggcctcccaaagcgctgggattataggtgtgagccactgcacccggctgggatatcacagtttttattt

SEQ ID NO: 62350 - DNA, 921 bp, Homo sapiens
caaatatgaaacatctgctttttatttgcaatcatttatttgtaactatttgcaaatatgacacatttgcttttattaatgcagatacgtgagccttaaccccctacctaatttacttctgtaatgatacttcattgccaccactgagcatgtgtatatgtgtgtgtgtgtgtgtgtgtgtgtgtgtgtgtaaaaaaaaaaaaaaatttttttttttttttttttttttagtggaaacatggaattggtgggtaggcaggcaagttggttttttggtttacctcagttggccatggccccaaaatttaagagccaccgttttagattattttgcatttcctcctctgtattgctggtctaagaatagaaaatacttttattttctactttggccttaaacttaaattaatgataccctacatagtatttttcttctgtagcaaacagtgctagatgactaagcattgaaacaattttgatgaacactagacagttaaataaaagtctgcctttaatttgcttgcttttgaatggctagaagcatcatctatgccatagtgatcttttaatttactttaatttgggatatcacaggcttttttttttttttttgagatggaattttatttgctcttgttgcctaggctggagtgcaatgacgcaaatctcggctcactgcaacctctgcttcctgggttcaagcgattctcctgcctcagcctcccgagtagctgggattacaggcatgtgccaccatgcccggctactttttgtatttttaatagagatggggtttcaccatgttggtcaagctggtctcgaagtcctgacttcaggcaatccacctgcttcggcctcccaaagygctgggattataggtgtgagccactgcacccggctgggatatcacagtttttattt

SEQ ID NO: 62351 - DNA, 1324 bp, Homo sapiens
agagcttatctcattaatcattttatattgattacatgttgaactgatatatcggattaaaaatgcatgtcatacaattaatttccccatttttgttttgctttgttttacttttttaatgtggctactagaaaatttaaaattacatctatggtttgcattatatttctactgaacagtgctagtctaaagtgttgataaaggaaaagtatcaactaaagaataaatatgaggccgggcgcagtggctcatgcctataatcccaccactgtgggaggccaaggcgggcggactacctgaggtcaggagtttgagaccagcctggccaacatggcaaaaccccgtctctactaaaaatacaaaaattagccgggcgtggtggcacatgcctatagtcccagctactcgggaggctgaggcaggagaactgcttgaacctgggaggtggaggttccacygagccaagatcgtgccactgcactccagcctgggcaacaagagcgaaactccataaaaaaaaaaagaaagaaagagagagagagagagagacagaaagaaagagagagagagaaagaaagaaagagagagagagacagaaagaaaaagaaagaaagaaagaaagagaaagaaagaaagaaaagaaaagaaaaaggaagaaattgcaaggagaaaacataaagacatgtgagagatgtctacggtatgtgaggtctgaacatgaatggatccagattcaaacaaaccatgtaagaaaaaaaaaaaaaaaagaccaggaaaggagaaaaaaaaaataggctgggcatggtggctcacgcctgtaatcccaacactttgggaggccgagatggttggatcaccggaggtcaggagttcaagaccagcctggccaacatggtgaaatcctatctctactaaaaatacaaaaaattagccgggcatggtggtgggcgcctgtaatcccagctactccggaggctaaggcaggagaatcgcttgaacccaggaggttgcagtgaactgagattgcaccactgcactccagcctgagcaacaagagtgaaactctgtctcaaaataataataataataaataaataacaccaacaatgatcttttatggtagtgtgcaatcaggaaataaatgccagatataagggggaaaaaatgtgtcatcatacttttttttaatcttcttggggccaggcacagtggttcacacctatcatatcaatactttggaaggtcaaggcaggaggactgcttgagcccagcctgggcgtcacagggaggccctgtctctaacaaaaatgtttttaaattagca

SEQ ID NO: 62352 - DNA, 1324 bp, Homo sapiens
agagcttatctcattaatcattttatattgattacatgttgaactgatatatcggattaaaaatgcatgtcatacaattaatttccccatttttgttttgctttgttttacttttttaatgtggctactagaaaatttaaaattacatctatggtttgcattatatttctactgaacagtgctagtctaaagtgttgataaaggaaaagtatcaactaaagaataaatatgaggccgggcgcagtggctcatgcctataatcccaccactgtgggaggccaaggcgggcggactacctgaggtcaggagtttgagaccagcctggccaacatggcaaaaccccgtctctactaaaaatacaaaaattagccgggcgtggtggcacatgcctatagtcccagctactcgggaggctgaggcaggagaactgcttgaacctgggaggtggaggttccactgagccaagatcgtgccactgcactccagcctgggcaacaagagcgaaactccataaaaaaaaaaagaaagaaagagagagagagagagagacagaaagaaagagagagagagaaagaaagaragagagagagagacagaaagaaaaagaaagaaagaaagaaagagaaagaaagaaagaaaagaaaagaaaaaggaagaaattgcaaggagaaaacataaagacatgtgagagatgtctacggtatgtgaggtctgaacatgaatggatccagattcaaacaaaccatgtaagaaaaaaaaaaaaaaaagaccaggaaaggagaaaaaaaaaataggctgggcatggtggctcacgcctgtaatcccaacactttgggaggccgagatggttggatcaccggaggtcaggagttcaagaccagcctggccaacatggtgaaatcctatctctactaaaaatacaaaaaattagccgggcatggtggtgggcgcctgtaatcccagctactccggaggctaaggcaggagaatcgcttgaacccaggaggttgcagtgaactgagattgcaccactgcactccagcctgagcaacaagagtgaaactctgtctcaaaataataataataataaataaataacaccaacaatgatcttttatggtagtgtgcaatcaggaaataaatgccagatataagggggaaaaaatgtgtcatcatacttttttttaatcttcttggggccaggcacagtggttcacacctatcatatcaatactttggaaggtcaaggcaggaggactgcttgagcccagcctgggcgtcacagggaggccctgtctctaacaaaaatgtttttaaattagca

SEQ ID NO: 62353 - DNA, 968 bp, Homo sapiens
ttgtgttgctataaggtagtacccaaggctgggtaatttattaaaaaaaaaagtttacttggcttacaattctgcaggctgttcaagaagcatgacattggcatttgcttggcttctggtgaggtcctcaggctgcttccactcatgtggaaggggaaggggagctagtgtgcagagatcccatggtgagagaggaaacaagagaagcaggaggtgccaggctctttttaacaaccaattcttgtgggaactgagtactcactcaccccccgacccccagggaggacattcatctattcatgaggatccacccacagaacccaaacatctcacattgtgctctacctccaacactggggatcaaatttcagcatcagctttgggcgacaaacatccaaatgacagcaaacccartatcttattgttacatgttcagaccattttcagtttttcttttgagacagagtcttgctctgtcacccagactggagtgcagtggcaccatcttggctcactgcagcctccacctcctgggttcaagtgattgtcatgccacagcctcctgagtagcttttattacaggtatgtgccaccatgctgggctaatttttgtatttttagtagagacagggtttcaccattttggccaggctggtcttgaactcctgccctcaagtgatttgccttcctcagcctcccaaaatgttgggattacaggcataagccaccatgcccggcccattttcagtgtttcttttttcttttctttcttttcttttctttttttttttgagacggagttttgctcttgttgcccaggctggagagcaattctgcgatctcggctcactgcaacctccaacgcccaggttcaagcaattctcttgcctcagtctcctgagtagctcggattacaggcatgtgccaccatccacacttggctaattttgtatttttagtagagatgg

SEQ ID NO: 62354 - DNA, 533 bp, Homo sapiens
cagtgggtccacaaagacagggtgaacaaatagctcctgacagttctttccttccactgcacgctgtgactctcaggctgcccttgcagacctctgcggaggcacaatttacatgttgtgaatcwcgtcagtttcatacaggacttcagagtccctctgtcttgagagctgaaacatcatgtatttaaaaaatggaaagatcaatgctaatggcctgaggattttgccgggcttggttcttctccttgcctctactctctggaaagccatcattaaaaactcaagatatttgccaaacactgtgccagtcctgttctaagcactggggacagaagaacaagtaagaaagtcacagccctgcacttctgtgcaggagtctagttggggtcagatggtaaagaggcaatcacagggcagagtgatccagaggcaactgacagtgaaatccatggagagaaacgctcctgtcactacacatggtatggactccccagcagtcagcggcactcgggtctgggaagagctgccagagg

SEQ ID NO: 62355 - DNA, 638 bp, Homo sapiens
tccaaagattgaccagtcctaaggccctagggaaaagtacgtgtccaagcattaggcaactgaagattgaccaagcagggtagcaagagggaatagtctccttccagaataaaaacaaagcccagtcacccatgtttggaagtaggttaaatttaatagmtaccatttactcagaatttactatgttctaagcactgttctgttttgcatatattatctcaattattaggttgctgtaataatcttgtgatagaagtattacagattttattttgcagtgagaaaactaaggaatagagatatttaactaatttacccaagtcataaacctagtaagtgatggagacagttctgtaacttagatccgtctgcatccaaagcctatgcttgtaactactccaccactaccaacctactgaggagggtgggtttccaagtggggagaaatagtagaaccagtcagctcagattctcactgccaaggttctgcttccctttggatctcattaatagccactgccacctcctctgggttactctcggtggtcaaactttctctttcgcattctgcccaaacagaatcctgaacatacctcttatggctacaaccaagccataaggctggaaaagactttact

SEQ ID NO: 62356 - DNA, 668 bp, Homo sapiens
agcaggcagctcatcccatcactctccttccatctagtgtgatatcaactgaagatcagccatctgtggaaatccaatagacatataacatggatatgtcaagtaaatcaatctccaattgacctggaccagccatttctgtttctcaccctgagcaagtgccacacaggagctggctgacagtgcactccacaatgtcatgaccttctagcaggctgtcccaggttccagttcactgtgccaggctcttctccctggggtgccagagcagctttggggtatgtgcatggcctgacggcagtctgagtgtcaccaagggaaacttcatgccaaaagctatgctaagttatgtcagtgtccttagcaggctcaggggacactaacctcactgccaagagcaagcaactcagcacttgcccatgaggggttgagccacagatctagaaatctctggtcttttctcaggggtctctaatcccctgggcaggaagcttaaagcctgagttctcagcactggtattaaggctgcccttccccagctgcctggctctgggttaatcccaacccaaccaccaagagacaagaacttcatttcccccatgataggctgtgagtccttgccaggacatgagtccttattcctgtcagwctcttctcagggctggatc

SEQ ID NO: 62357 - DNA, 577 bp, Homo sapiens
ccatttgtaaaagcaaggcaggggtgaggtgatttctggggctccttttggctctgacatttgaggattttgtatactttttttttttttgagacagagtcttgctctgtcacccaggttggagtgcagctcaatgcaaattccgcctcccaggctcaagcaattcttatgtctcagcctcctgagtacctgggattacaggcaggcaccaccacccccagctaatttttttgtattttcagtagagacggggttttgccatattggccaggctggtcttgaactcctgayttcatgtgacccacccatctcagcctcccaaagtgctgagatgacaggtgtgagctaccgtgcctggccaattttgtgtgctttaatgcccttttctgctggaagagttggcaccaggtttggtgatctctttcccccacacggctctgcctcctgccagtcccagaggggaccctgtccttgcatttcacaggattctgctgttgcaactgaaattccagtaggtcaaagtgaaatttctcatacactttaacatgaagataaatgatcacagtatggcccttta

SEQ ID NO: 62358 - DNA, 477 bp, Homo sapiens
tacccccaccaatgccattcctgaatctttccctctatcctactaaatgagctggagtccaaggagtcaagcagactacttctctacttgggataggtaaagatgctcgtctcagatggaggtattttttttttttttttgagatggagtttccattcttgtcacccaggctggagtgcaatgacacaatctcagctctctgcaacctctgcctcccaggttcaagcgactctcctgcctcagcctcccgagtagctgcattacaggcatgcgccaccacacctggctaatcttcatatttttagtagagatggggttttgccatgttagttaggctggtcgcaaactcctggcctcaggtgatccacccaccttggcctcccaaagtgctagaattacaggcgtgagccacagcgcccagccacatggmggtatcttaataagcttctttcatttttccaatcatgggctgaacca

SEQ ID NO: 62359 - DNA, 649 bp, Homo sapiens
aagttttcgttgttcagtaaatgggctataccccaaaagacccagatacagcagtgggggagggaggtataaacaagctccaggtctctttcaggccatgaaactctaggtagttatggtaccttgaagacacagacaatgactttcaaccttaaaacctaaatgttgactctgatcaaggaggggaggggcactggttttcccttcccgcagccaaagtctctgagcttcacatccttctcctataaaatggaaataatactaagcatcatggmtacttgttagtcttccatcatgtcaagtgctttatctgcattacataggtagtcttcaaaatgatgctatgagaagattcccatcactactcacatttacaggtaggaaaagtagggcttgaggaggtcagaactgacccacagtgaatataaaagggtgcagctgctgtgaaacacaatatagaggtttctcaaaagattaaacatagaactaccatacgatgcagcaatcccatttctggatatataaaaagttgaaatctggaactcaaagagatatctgcactcccatgtccattgcagcattattcacaaaagctaagatacagaaacgacacagacatccatcaacagatgaatgcagaaagaaactg

SEQ ID NO: 62360 - DNA, 649 bp, Homo sapiens
aagttttcgttgttcagtaaatgggctataccccaaaagacccagatacagcagtgggggagggaggtataaacaagctccaggtctctttcaggccatgaaactctaggtagttatggtaccttgaagacacagacaatgactttcaaccttaaaacctaaatgttgactctgatcaaggaggggaggggcactggttttcccttcccgcagccaaagtctctgagcttcacatccttctcctataaaatggaaataatactaagcatcatggctacttgttagtcttccatcatgtcaagtgctttatctgcattacataggtagtcttcaaaatgatgctatgagaagattcccatcactactcacatttacaggtaggaaaagtagggcttgaggaggtcagaactgacccacagtgaatataaaagggtgcagctgctgtgaaacacaatatagaggtttctcaaaagattaaacatagaactaccatacgatgcagcaatcccatttctggatatataaaaagttgaaatctggaactcaaagagatatctgcactcccatgtccattgcagcattattcacaaaasctaagatacagaaacgacacagacatccatcaacagatgaatgcagaaagaaactg

SEQ ID NO: 62361 - DNA, 446 bp, Homo sapiens
tgtcttcacagaggcacccagagaccctgtggtgaggagaggcctgagcaagtgcgccccatggcagggwagggccctggtggcctgggcttgggggttccctgcagccttcctggctgacgtgcctcctggcctctgaggtgggcatggtggatgccagtgcgccacagggagagtgaagcgtgtgacagacgatgccatccccgggtggcgcagcagccaggactcgactgtttgcaagatccagccgtgcacagagaggcatggggccggccacgtccactagtctcactcagccctgagcacaggcccagcctctcccgaagcctcctcctggcctggctcttgtctgtctgctggtcattgtgcagagaccacaggcagcaggtgacgaatggctggtgtcaagtcctgtcatgccaacggggtcctgggggaaatgcaag

SEQ ID NO: 62362 - DNA, 446 bp, Homo sapiens
tgtcttcacagaggcacccagagaccctgtggtgaggagaggcctgagcaagtgcgccccatggcagggaagggccctggtggcctgggcttgggggttccctgcagccttccyggctgacgtgcctcctggcctctgaggtgggcatggtggatgccagtgcgccacagggagagtgaagcgtgtgacagacgatgccatccccgggtggcgcagcagccaggactcgactgtttgcaagatccagccgtgcacagagaggcatggggccggccacgtccactagtctcactcagccctgagcacaggcccagcctctcccgaagcctcctcctggcctggctcttgtctgtctgctggtcattgtgcagagaccacaggcagcaggtgacgaatggctggtgtcaagtcctgtcatgccaacggggtcctgggggaaatgcaag

SEQ ID NO: 62363 - DNA, 1000 bp, Homo sapiens
cacctgcttggcggcgtttagacgactcatccagcacaggcccccagagacagaagcagatgggagatctcggggactggggtgggggtgayagcgagaggcccaggtctcctttcggggtgatgaggtgtttggaaactagagagggggtggtcgcactgctgggtgaacggctcactgccactgaatcgccccctttacagaggttgaattctgcctcgataacataaaaaaggcaggcgcgagtgttaggtggggagcagcgggaagggacaggaggtgggtgagctccgtcaccctgacctgatctagatctttccacgcaagcccctccttctgtggctgcctcgaggacccgtgaaagtgactggaccccggtcctgctggccctcggctcccgcccccgccccgcaccctgtcgttggctgcggaaacagaagcctctaaggagaccagaacttttaagtacaggaaaaatgacttcagattcctcacactggttgcaaacagatcagcacaagaagtagcaaaatgctttctttcaaaagaaaccaaagtcttggggggaaaagtcgtaaggaaaacacttatttaattgatcagcattcagagaagtaattattatgttttaagtggccaacgggtcctttctaattgacgcggcggatcctttcagagacgcagccacagaactgccgctgctgttcctcccccctaaagacctgaagttgtttaggtttgaaagaacacccccataacccccgccccgctgaccgtgtgcagcagaaaggtacattggggggggtggtaattaacatggcatcttgttatttggaactggtaactgcacggagctcgcaaacaaagtcgggttggaggccgaagccccctcgacgcgctccttaactcctctcgggcgtgggcgcctctgcccgaaggacaagtaggaattagaaccccaggtgtttctgggagttccgctggagcccgaagtggggca

SEQ ID NO: 62364 - DNA, 1254 bp, Homo sapiens
cggctgtgaaccaggcaagcctgtgggaaagcactgcccgtggcggtgatggctcagcgcgtcccgttcagagagagagagatggagggagagaaaggagaccccatggcaggaggcctgggaagctgggtggacagtgcaggtggacgggcagagggatgacagagggtctcacctgcagaactaggtggtactggttctggagggatgggccatggcgaggagccccagctcatgagggatgatatgtacaggccgaagccctgcgttccacagctggggcagctgcaacgttgtcgaggcagtggggagagggcagggagactatacagccctcattcaactttatgcccatcttgactcctctgagcctggcacagacttcctccctgggctggcccagagctccctttgggccgcaggagaccaacagcgttactctgagaggcgcacaaaaactgctttctcttgacctccatttctgttagctttgtgtagcctcaagtaattaattctggtacattcctgtacttaacaaacagaattttctgggggtggggctgcctggggtgtgcagattcacctgtgcacgttcaggcagaaaacggtgggatcctgttccactttcaaggcgtctcgtttatcgcgagtgaacgcaagtgcatcccatcctcggtttgcttctcttttctggaaaatgctttgtgcttttccaggcttcartcccgggaaggacacacactggacacatccctccggggactctcttcagaagagggaggacccccgcacactcaatcagtgctgccaactggcagggacagcctcgccactggcgcttctgttttgtcttaaagatctcgctttcccggagcggaacaacatttacttggatgtgactgtgaagcctgggatactgcgaagagcccacggtgtgatacagagacttggaggaagagcaaactcgacccactcgggtgtaggtcacagtggtgttggcacttgtcgtgatggaaaaagagagaacgccggctctaaagcccctggtggcccagcacctgtccccacaggagctcttgcccaggaacaggtcctgctcaggagacccggccaccccctgcaagaagctcttcacagccacctctttcttctgatatttgaagaggagctaaagggttagggctggcggagacgggcagcctgggcagccagctgtggacttgggtctttgcattttaccaaaccaggtcccgg

SEQ ID NO: 62365 - DNA, 1254 bp, Homo sapiens
cggctgtgaaccaggcaagcctgtgggaaagcactgcccgtggcggtgatggctcagcgcgtcccgttcagagagagagagatggagggagagaaaggagaccccatggcaggaggcctgggaagctgggtggacagtgcaggtggacgggcagagggatgacagagggtctcacctgcagaactaggtggtactggttctggagggatgggccatggcgaggagccccagctcatgagggatgatatgtacaggccgaagccctgcgttccacagctggggcagctgcaacgttgtcgaggcagtggggagagggcagggagactatacagccctcattcaactttatgcccatcttgactcctctgagcctggcacagacttcctccctgggctggcccagagctccctttgggccgcaggagaccaacagcgttactctgagaggcgcacaaaaactgctttctcttgacctccatttctgttagctttgtgtagcctcaagtaattaattctggtacattcctgtacttaacaaacagaattttctgggggtggggctgcctggggtgtgcagattcacctgtgcacgttcaggcagaaaacggtgggatcctgttccactttcaaggcgtctcgtttatcgcgagtgaacgcaagtgcatcccatcctcggtttgcttctcttttctggaaaatgctttgtgcttttccaggcttcagtcccgggaaggacacacactggacacatccctccggggactctcttcagaagagggaggacccccgcacactcaatcagtgctgccaactggcagggacagcctcgccactggcgcttctgttttgtcttaaagatctcgctttcccggagcggaacaacatttacttggatgtgactgtgaagcctgggatactgcgaagagcccacggtgtgatacagagacttggaggaagagcaaactcgacccactcgggtgtaggycacagtggtgttggcacttgtcgtgatggaaaaagagagaacgccggctctaaagcccctggtggcccagcacctgtccccacaggagctcttgcccaggaacaggtcctgctcaggagacccggccaccccctgcaagaagctcttcacagccacctctttcttctgatatttgaagaggagctaaagggttagggctggcggagacgggcagcctgggcagccagctgtggacttgggtctttgcattttaccaaaccaggtcccgg

SEQ ID NO: 62366 - DNA, 1349 bp, Homo sapiens
  misc_feature (1)...(1349): n = A,T,C or G
caggccctcagacacctgccggggccgggccacgccatcgcctctccaagtggcaacgttcaccaggagatggagaagccgacaaaggatggaacaacattgctgccgactcccggacccctggcgaccactgagcatcctgcacaaacagccgtgctggactcacccataaatcctgctcaacaagctcttaacaatgaaataccctactattagccgagacaaccacttactcagaacaaatactattcagagcggagctcaaacgcattcccctctgatcatcggttcctggcctgggtacttcaatctctctatttatgaaacaataayggaattctatttagtgcagcgcggagttcactgcctctgataagtttgcgttccaacgttgcccctggccatcgcgccttcctattacctccttgtcccggttcacagacggatgaatcatcacccagatagcaatacaacctttacccacatattatcatcaaagccggcattcacggtgttttcaaaggttacgtgctgacacacgggtggcctgggatgcggtgctggtcccgctgacctggacagggtctcgctgcttctcaggtggagagggaacccctgggctgcttggctttctgtaggcttcactgagggccccctcgccccgacttaggatcctctacagaagcaggttcattgctggtaactctgcccaaatgtgcagtttttcactcaacacgtgtctgagccccggccaagtgccaggagctggggtggaatatagggtcaatagggtgcagtccctgccctcatgggcgatgtccctgtgaaaggcacctggatgtgttcccttgtcctagtaattaactgcagaaagacagccgaactgaggctcctcaagagtccgaggtcatgcccggagcggagtgcctccgtgagggtcaacccacagaagacgaacaggaaaagaccagtgcctcttcccctccttccacagggctgctcacgcttcttggctgccggaaacccacccaggccattcgaagatacaagagtttcatcgcttggcaatgggactggcctcctgagcccccaccgatgtgctggtggagaacattcagcctgggctccccattcttcccttcgcgccaattccgtgacccctgtctcgctgggccacctccacccccaaacctccaccccacaggaagggaggtgggttcctcgctatctggcccttcccttcaggagagcaggcagaccgtcctttccccttcngtctggacaagccactctcgtctggacaagccactctcacccggacagcgcggtcaagaatgaaggtcacggtg

SEQ ID NO: 62367 - DNA, 1349 bp, Homo sapiens
  misc_feature (1)...(1349): n = A,T,C or G
caggccctcagacacctgccggggccgggccacgccatcgcctctccaagtggcaacgttcaccaggagatggagaagccgacaaaggatggaacaacattgctgccgactcccggacccctggcgaccactgagcatcctgcacaaacagccgtgctggactcacccataaatcctgctcaacaagctcttaacaatgaaataccctactattagccgagacaaccacttactcagaacaaatactattcagagcggagctcaaacgcattcccctctgatcatcggttcctggcctgggtacttcaatctctctatttatgaaacaataacggaattctatttagtgcagcgcggagttcactgcctctgataagtttgcgttccaacgttgcccctggccatcgcgccttcctattacctccttgtcccggttcacagacggatgaatcatcacccagatagcaatacaacctttacccacatattatcatcaaagccggcattcacggtgttttcaaaggttaygtgctgacacacgggtggcctgggatgcggtgctggtcccgctgacctggacagggtctcgctgcttctcaggtggagagggaacccctgggctgcttggctttctgtaggcttcactgagggccccctcgccccgacttaggatcctctacagaagcaggttcattgctggtaactctgcccaaatgtgcagtttttcactcaacacgtgtctgagccccggccaagtgccaggagctggggtggaatatagggtcaatagggtgcagtccctgccctcatgggcgatgtccctgtgaaaggcacctggatgtgttcccttgtcctagtaattaactgcagaaagacagccgaactgaggctcctcaagagtccgaggtcatgcccggagcggagtgcctccgtgagggtcaacccacagaagacgaacaggaaaagaccagtgcctcttcccctccttccacagggctgctcacgcttcttggctgccggaaacccacccaggccattcgaagatacaagagtttcatcgcttggcaatgggactggcctcctgagcccccaccgatgtgctggtggagaacattcagcctgggctccccattcttcccttcgcgccaattccgtgacccctgtctcgctgggccacctccacccccaaacctccaccccacaggaagggaggtgggttcctcgctatctggcccttcccttcaggagagcaggcagaccgtcctttccccttcngtctggacaagccactctcgtctggacaagccactctcacccggacagcgcggtcaagaatgaaggtcacggtg

SEQ ID NO: 62368 - DNA, 1052 bp, Homo sapiens
tgggagaaagatttatattcctttgggcatcatgaggccaggagatcaagaccatcctggctacacagtgaaccccgtctctataaaaaacaaaaaattagccgggcgtggtggcgggcgcctgtagtcccagctactccggaggctgaggcaggagaatggcatgaacctgggaggcagagcttgcagtgagccgagattgcgccattgcactccagcctgggtgacagagtgagagactccatctcaaaaaaaaaaaaaaaaaacacacacacacacaccaaaaaaaaaaaaccaaaacaaaaactaacaatcaccataatatccatagaattcagaaaaaaattcaatttggtttttcacggataaaaaatgtaaaatggtattgggcagtaatttggctgtaacatataacttgggtgatagtcttttaagtgattttggatcactgattttttggaattcggcatagtaacactactactgaatagtctatggtgatccattttcaaccctctcttatgttggtagattattcagaggatcaggacaggaggcaagccaaagtcatattaaaatttaacattataaattatataacaaaaatttttgacctcattaacctgtgactaaaaagtaaattcacttttatttctcaagtcctgacagctgggctcattgagtagactgccgatttttcattttcttgctgtttttctgtcaccaagtaatttctaagaaacactgtaagtatttatacattccacaaatttatcctggtgtttatttgacatatccaccaactttcctcgaaaactcagaaccgctgaggcgcaagaactttgccactctcctctttcagtcttaagaaaaaacagactgtgggtctttggaataatttgctgaattcctacagaaaacaaaagtgtattacagtgcagaaaatggaaatgttaagctagatattagctatcactgcttctacagcccttaggccatgtgcttccctagaagagcctcttsgtcttctctctttaacttctagcctagat

SEQ ID NO: 62369 - DNA, 516 bp, Homo sapiens
cagaaccgcagcctgggctccgacgcccccgccgcccacccttttagctcggaggatcggggaggcacggacctccggcggcagcggagggcggcggcgaaacgccgggggcgcgtgggttagcactgagccgccgccccagcccgcctcgccccggggcccgcgcgcacccgccgccccccagcccgctgcgctcacccggctcttgcagcggtggtgccggccggggtacgagtaggtccggtccacggtgagcgccgtgtcgctgcccggcatctccgcgctccggccgcgaactttcccgtcttctggggctgccgcgccgcgagccaccggcygtgctcgggatcaccctgggagccgcgggcgagggggcggcgcggctgctgcagctgttgcctctggtgccaacacccgcgcggccgccctgcgccgccgccgccgcggggtgggggaggcggggcaggaggcgagagtctcctcccccttcccttctccccgcctctcccgcgcccc

SEQ ID NO: 62370 - DNA, 683 bp, Homo sapiens
cagaatcttcgttcaagggtaagaagttcagccttattctgtgggaactgggtagctgttggaaattcttgaacagggaaatgatagcatgggaatggaagtttaaggagaaggtatatctgacatcagggtgaagcagcgattgaagatgggcaaaacacactggcttcttagaaggccactgtaaagacagaatagcctaattatccttcagaaggagactaagtaaataaatgatggtacatcatccaatagaatattaggtaactggaatagaaatgaggcagccctctatgaatagctttggaagcaaatctaacawacatggttcagtggaaaaaaagcaatgtgcaggataatatatatggcattccaccatttatgtaaaaacaatatatgttatgtgcttctacatgcacgacatatatctgggaggataaataagaaactagggaaacagacaagaaattgatgccaagagaggggaaccaggtagctagaaggcagagatggagagagatctaattttcactgtgtatacttttgaaacttgaatgtttatactgtgggcatatattaactattcagaaagtaaaattttttaaaaaatgttttttagagatagggtatctgttgcccaggctggggtgcagtggcacaatcatagctcactgcagcctcaa

SEQ ID NO: 62371 - DNA, 1120 bp, Homo sapiens
  misc_feature (1)...(1120): n = A,T,C or G
cgttcaatacctgaaggcttttacaagtcttcgtggccttggtatgtaagtcagtatcactgacattttttcctattaatcactttagctgaactctatntcaggtctaaagtctaggccaaccttgtccaatccacggcccagcatggctttgcaatgcagcccaacacaaattcgtaaactttcttaaatcggtatgagattttttttttttttttttgagacagtctcactctgtcacccaggttggagtgcagtggygcaatctcggctcactgcaacctccacctcctgggttcaagtgattctcctgcctcagcctcccgagtagctggaactaaggcacatgccaccacacccagctaatttttgtatttttagtagagatggagtttcacaatgttggccaggctggtctcaaactcctgacctcaggtgatccgcccacatcggccccccaaagtgctgggattacaggcatgagccaccacgcctggccagtatgaggttgttgtttttttttagctcattggctatcgttagtgttagtgtattttatgtgtggcccaagacagttcttcttattccaatgtagctcagggacgccaaaagattggaaacccctggtctaggctgctcctatgatatgccacccagaatgtgctaggctttgccatcgtattaatgtcaaaatctcagtggctataaaagaaaggcttattccatgcaaatgctagaaagttggctgtgagtcagtgaggggacccaggttacggtggggcctctaccgtctggacgttctctaaaagacagagaactcattacactgaccctacctaacttctaggggacaggggagtataatcctattacatgcccacgaggtaaaatatcatgttagtgacatgtgtagtacctttcttaattgttaaaaactctctgaggtaggttctactattattactattttataaactagtcacagagaagttaagtaaattgcctgggggcacacagccagtaaccggcagagccaggctggaaattctggctgtctgtctccagtgcctacctgcctaaaaatgactgaatacttttattgtgaatcaggcactgtgct

SEQ ID NO: 62372 - DNA, 1120 bp, Homo sapiens
  misc_feature (1)...(1120): n = A,T,C or G
cgttcaatacctgaaggcttttacaagtcttcgtggccttggtatgtaagtcagtatcactgacattttttcctattaatcactttagctgaactctatntcaggtctaaagtctaggccaaccttgtccaatccacggcccagcatggctttgcaatgcagcccaacacaaattcgtaaactttcttaaatcggtatgagattttttttttttttttttgagacagtctcactctgtcacccaggttggagtgcagtggtgcaatctcggctcactgcaacctccrcctcctgggttcaagtgattctcctgcctcagcctcccgagtagctggaactaaggcacatgccaccacacccagctaatttttgtatttttagtagagatggagtttcacaatgttggccaggctggtctcaaactcctgacctcaggtgatccgcccacatcggccccccaaagtgctgggattacaggcatgagccaccacgcctggccagtatgaggttgttgtttttttttagctcattggctatcgttagtgttagtgtattttatgtgtggcccaagacagttcttcttattccaatgtagctcagggacgccaaaagattggaaacccctggtctaggctgctcctatgatatgccacccagaatgtgctaggctttgccatcgtattaatgtcaaaatctcagtggctataaaagaaaggcttattccatgcaaatgctagaaagttggctgtgagtcagtgaggggacccaggttacggtggggcctctaccgtctggacgttctctaaaagacagagaactcattacactgaccctacctaacttctaggggacaggggagtataatcctattacatgcccacgaggtaaaatatcatgttagtgacatgtgtagtacctttcttaattgttaaaaactctctgaggtaggttctactattattactattttataaactagtcacagagaagttaagtaaattgcctgggggcacacagccagtaaccggcagagccaggctggaaattctggctgtctgtctccagtgcctacctgcctaaaaatgactgaatacttttattgtgaatcaggcactgtgct

SEQ ID NO: 62373 - DNA, 1120 bp, Homo sapiens
  misc_feature (1)...(1120): n = A,T,C or G
cgttcaatacctgaaggcttttacaagtcttcgtggccttggtatgtaagtcagtatcactgacattttttcctattaatcactttagctgaactctatntcaggtctaaagtctaggccaaccttgtccaatccacggcccagcatggctttgcaatgcagcccaacacaaattcgtaaactttcttaaatcggtatgagattttttttttttttttttgagacagtctcactctgtcacccaggttggagtgcagtggtgcaatctcggctcactgcaacctccacctcctgggttcaagtgattctcctgcctcagcctcccgagtagctggaactaaggcacatgccaccacacccagctaatttttgtatttttagtagagatggagtttcacaatgttggccaggctggtctcaaactcctgacctcaggtgatccgcccacatcggccccccaaagtgctgggattacaggcatgagccaccacgcctggccagtatgaggttgttgttttttttwagctcattggctatcgttagtgttagtgtattttatgtgtggcccaagacagttcttcttattccaatgtagctcagggacgccaaaagattggaaacccctggtctaggctgctcctatgatatgccacccagaatgtgctaggctttgccatcgtattaatgtcaaaatctcagtggctataaaagaaaggcttattccatgcaaatgctagaaagttggctgtgagtcagtgaggggacccaggttacggtggggcctctaccgtctggacgttctctaaaagacagagaactcattacactgaccctacctaacttctaggggacaggggagtataatcctattacatgcccacgaggtaaaatatcatgttagtgacatgtgtagtacctttcttaattgttaaaaactctctgaggtaggttctactattattactattttataaactagtcacagagaagttaagtaaattgcctgggggcacacagccagtaaccggcagagccaggctggaaattctggctgtctgtctccagtgcctacctgcctaaaaatgactgaatacttttattgtgaatcaggcactgtgct

SEQ ID NO: 62374 - DNA, 1120 bp, Homo sapiens
  misc_feature (1)...(1120): n = A,T,C or G
cgttcaatacctgaaggcttttacaagtcttcgtggccttggtatgtaagtcagtatcactgacattttttcctattaatcactttagctgaactctatntcaggtctaaagtctaggccaaccttgtccaatccacggcccagcatggctttgcaatgcagcccaacacaaattcgtaaactttcttaaatcggtatgagattttttttttttttttttgagacagtctcactctgtcacccaggttggagtgcagtggtgcaatctcggctcactgcaacctccacctcctgggttcaagtgattctcctgcctcagcctcccgagtagctggaactaaggcacatgccaccacacccagctaatttttgtatttttagtagagatggagtttcacaatgttggccaggctggtctcaaactcctgacctcaggtgatccgcccacatcggccccccaaagtgctgggattacaggcatgagccaccacgcctggccagtatgaggttgttgtttttttttagctcattggctatcgttagtgttagtgtattttatgtgtggcccaagacagttcttcttattccaatgtagctcagggacgccaaaagattggaaacccctggtctaggctgctcctaygatatgccacccagaatgtgctaggctttgccatcgtattaatgtcaaaatctcagtggctataaaagaaaggcttattccatgcaaatgctagaaagttggctgtgagtcagtgaggggacccaggttacggtggggcctctaccgtctggacgttctctaaaagacagagaactcattacactgaccctacctaacttctaggggacaggggagtataatcctattacatgcccacgaggtaaaatatcatgttagtgacatgtgtagtacctttcttaattgttaaaaactctctgaggtaggttctactattattactattttataaactagtcacagagaagttaagtaaattgcctgggggcacacagccagtaaccggcagagccaggctggaaattctggctgtctgtctccagtgcctacctgcctaaaaatgactgaatacttttattgtgaatcaggcactgtgct

SEQ ID NO: 62375 - DNA, 696 bp, Homo sapiens
  misc_feature (1)...(696): n = A,T,C or G
cgagtgatggctccattattaatccaccaaaccatgtttaaagctatttacttcataatattaggtccaaaccatacttggctcttctggatggaggctgaaaatgaacattgtagrtgcaaacaatctctctctctcttttttttttttttttagggggagtctcactcttcttgcccaggctggagtgcaatggcatggtctcggtgcactacaacctccacctcctggattcaagcatttctccttcctcagcttcccaagtagctgggattacaggcatgcaccaccacacctggctaattttgtatctttagtagagatggggtttcaccatgttcgtcaggctgatctcgaactcctgacctcagatgatccgcccaccttggcctcccaaagtgctgggattacaggtgtcagccacagcgcccggccaggtgcaaacaatctctaatggaacatgtttgagaccaaagggaatgattttcgtatgtcttcattgagctcgccagtgcatggcttgggttcttgtagattcattcatttttgaagacatgggttaacatgttcaaagcctgtgcaaaattctgtgatttttttgaaaaaacagtgacacatgaataagnttgagttaggaggatcctgtggaatgacagttatagtaactaactatagccaactgtgacctacttctaa

SEQ ID NO: 62376 - DNA, 696 bp, Homo sapiens
  misc_feature (1)...(696): n = A,T,C or G
cgagtgatggctccattattaatccaccaaaccatgtttaaagctatttacttcataatattaggtccaaaccatacttggctcttctggatggaggctgaaaatgaacattgtagatgcaaacaatctctctctctctyttttttttttttttagggggagtctcactcttcttgcccaggctggagtgcaatggcatggtctcggtgcactacaacctccacctcctggattcaagcatttctccttcctcagcttcccaagtagctgggattacaggcatgcaccaccacacctggctaattttgtatctttagtagagatggggtttcaccatgttcgtcaggctgatctcgaactcctgacctcagatgatccgcccaccttggcctcccaaagtgctgggattacaggtgtcagccacagcgcccggccaggtgcaaacaatctctaatggaacatgtttgagaccaaagggaatgattttcgtatgtcttcattgagctcgccagtgcatggcttgggttcttgtagattcattcatttttgaagacatgggttaacatgttcaaagcctgtgcaaaattctgtgatttttttgaaaaaacagtgacacatgaataagnttgagttaggaggatcctgtggaatgacagttatagtaactaactatagccaactgtgacctacttctaa

SEQ ID NO: 62377 - DNA, 696 bp, Homo sapiens
  misc_feature (1)...(696): n = A,T,C or G
cgagtgatggctccattattaatccaccaaaccatgtttaaagctatttacttcataatattaggtccaaaccatacttggctcttctggatggaggctgaaaatgaacattgtagatgcaaacaatctctctctctcttttttttttttttttagggggagtctcactcttcttgcccaggctggagtgcaatggcatggtctcggygcactacaacctccacctcctggattcaagcatttctccttcctcagcttcccaagtagctgggattacaggcatgcaccaccacacctggctaattttgtatctttagtagagatggggtttcaccatgttcgtcaggctgatctcgaactcctgacctcagatgatccgcccaccttggcctcccaaagtgctgggattacaggtgtcagccacagcgcccggccaggtgcaaacaatctctaatggaacatgtttgagaccaaagggaatgattttcgtatgtcttcattgagctcgccagtgcatggcttgggttcttgtagattcattcatttttgaagacatgggttaacatgttcaaagcctgtgcaaaattctgtgatttttttgaaaaaacagtgacacatgaataagnttgagttaggaggatcctgtggaatgacagttatagtaactaactatagccaactgtgacctacttctaa

SEQ ID NO: 62378 - DNA, 748 bp, Homo sapiens
atgccttctggggagaagcaggggattccatttttaaaagaccctttactacactcctctcaggggataggatgcctgaaagttcatgtgcacccatataaaaccactgattttttcctgtggtctaaagagacttgcatatgtctaactctgcgcagtctcagagttgataagttaagagccaacccatgaagaacctcagaattagaatggtatatgtgaggtccaagccctcctggggaaccttagaattagggtagtatatgtgaggtccaagccctcctctccacagggagagaagatgagtactgggaatttctttcctgattttatagcacagtgtcagagcagggtgcatgcctgagtgtgcctcagcttttcatatcggttcaatgtggatgtttactcagtgcctggtaggtagaagtccctcacttcatctctgagtttctctcagagggaattgatccatgagtagatatttatctggtgcatttgggggtggagggagacccaggagcttcctagtctgctatgttgctaattgtcttcttggtcatcttttaaaaccatttctgtgaaattatagcctccttactcccttaccctgmgtctggatgtttctgaagatgactgatctctacagtgagaaggccctgggaattgactgactcactctctctgtctctctctctctctctctcacacacacacacacacacacacacacactcatatacatacacac

SEQ ID NO: 62379 - DNA, 1420 bp, Homo sapiens
aagggaagattcttccctgaagccttcagagggagtatggccctgctgacacctggatttcagacttccagcctctggaactgtgaagggacacatttctgttgtttaaaactcctgaagctttttgtttgtttgggttttgtttattatttgctatagcagccacaggaaacaaatagagacaccaagcatgggagtggccatcctctctaggtcaatgttaatggcaggtgatgtcagcgtggaactgggctccctcatgtcagtggggatgatggactgacggactcctagtttaggaaaggcaggtacctacatctgactttcaggtcccaagtagaggtaattatcacaatgagcaacagggtgagagagacaatcagcgtgccttaacccacagggacctgtaggatctgtaacccacactgaccactgtaggtgatggtattcccagaggccaaatagatgagaagctatgtagattgttgcttggtttacataatcagaaaatcagccatggttatgggaaattgtgacccctcgctcagctttcagatctacatcaaggcccattgattgaaggggaggctgattctttaagacaaaaccctgcagtgtactcacaagtatcttcaggaaatagttctctaaattttcccaaagggacttatgactatttccagggtgactgtgaaccagggaaaaggaaatatctggatccctcaaagccaagtagatatgagatctgaattaacaccaatatcaggggatgtaaaactccatgatggtcctcaggttggagtgtggaccattggagaacaagtgataggggtcttggcctgattcctgaatgtagaacacactcacttatgcatctgtttgttgacctgggcagttagacccattacagtaggaagktctgagtggaagcctgttttgtcaagatcagacacaagaattgcagagataaacacagctgttgaagacttgaagaacatagggccagtggcccctataatattcccattcaattcacctgtctgtctctaaataagaatcgaatcttgacagatgatagtggactaccatcaatatcactagatgctaggtggactttcgtgtctttacaggaacgggtcagtaccgcctctgctccttgggatgtggttattcgtttcatgaatgttttcttcttagcattcatatgaaaggaacatgaaaagcaggttgctttgttatggcaggacaacagggtatctgcactgggtagactcggtgcagtgtcaactctccttttctctgtcctaagatagtccatagagaccgtgcttatattggtatttccagaaacatcacactgttcctctacatgcataacatcatgttcattggcttggtgatcagggagtgtcaggcaccc

SEQ ID NO: 62380 - DNA, 1420 bp, Homo sapiens
aagggaagattcttccctgaagccttcagagggagtatggccctgctgacacctggatttcagacttccagcctctggaactgtgaagggacacatttctgttgtttaaaactcctgaagctttttgtttgtttgggttttgtttattatttgctatagcagccacaggaaacaaatagagacaccaagcatgggagtggccatcctctctaggtcaatgttaatggcaggtgatgtcagcgtggaactgggctccctcatgtcagtggggatgatggactgacggactcctagtttaggaaaggcaggtacctacatctgactttcaggtcccaagtagaggtaattatcacaatgagcaacagggtgagagagacaatcagcgtgccttaacccacagggacctgtaggatctgtaacccacactgaccactgtaggtgatggtattcccagaggccaaatagatgagaagctatgtagattgttgcttggtttacataatcagaaaatcagccatggttatgggaaattgtgacccctcgctcagctttcagatctacatcaaggcccattgattgaaggggaggctgattctttaagacaaaaccctgcagtgtactcacaagtatcttcaggaaatagttctctaaattttcccaaagggacttatgactatttccagggtgactgtgaaccagggaaaaggaaatatctggatccctcaaagccaagtagatatgagatctgaattaacaccaatatcaggggatgtaaaactccatgatggtcctcaggttggagtgtggaccattggagaacaagtgataggggtcttggcctgattcctgaatgtagaacacactcacttatgcatctgtttgttgacctgggcagttagacccattacagtaggaagttctgagtggaagcctgttttgtcaagatcagacacaagaattgcagagataaacacagctgttgaagacttgaagaacatagggccagtggcccctataatattcccattcaattcacctgtctgtctctaaatawgaatcgaatcttgacagatgatagtggactaccatcaatatcactagatgctaggtggactttcgtgtctttacaggaacgggtcagtaccgcctctgctccttgggatgtggttattcgtttcatgaatgttttcttcttagcattcatatgaaaggaacatgaaaagcaggttgctttgttatggcaggacaacagggtatctgcactgggtagactcggtgcagtgtcaactctccttttctctgtcctaagatagtccatagagaccgtgcttatattggtatttccagaaacatcacactgttcctctacatgcataacatcatgttcattggcttggtgatcagggagtgtcaggcaccc

SEQ ID NO: 62381 - DNA, 599 bp, Homo sapiens
ggctattgataactggggagggaaaagcctatcaacgggatgctgcatgttggtagaaggtgggggaaaggagggatataagaggagatattaaagcctggatatgaattgtgcttcgaaattcttctatcggggaattgtggacaattggtcgacaattccgccatagaagacagaacagctacttgtcttgtggattctggtcaacttccgtattctttggagagtgattggcttagatgggacttccccaggagaagatgctaaatcaaggatcaaagtgcaagcagttaatttatggaacaatggtaggagagtagggaagtgaracaggaaagtgagaaggtaagcttaaggagagtgtcatcagccagctaccaccctgagggactgggagttaatccctctggggaagatctggcagccagtgtggaaaacactcactcaaagtcatcccacctgaggggcaaggtgagcagcaactcttttgagtcatgagtagaggactattcatggggacatgaattccagcaatactgtgcgtaggctccaaaacagcaagggggcgtcaggaagaaaaaaaaatcctcggtaaagaa

SEQ ID NO: 62382 - DNA, 1110 bp, Homo sapiens
gatgatggcagcttttggggagagttaagagatgcttgaaaaggagccagagtgtggaagaaaaaagatgtttagagttgggttttcaaaaccaaagtcttcatcatggccaacaaactatgggaaggtggcaaatgtgtgtaaaaagaccttttcattttcttgagttctttagaaaattggagagttttgtttggtttatttatttatttatttttgagcagcttaataatagaaattgcctcagggatggcgtctgccattgcttttcaaatgcaatactgttctccctccggggattgtgctgcagaggctcctggagtgaatattgcaaaagccactaataatactccttctcaggtaacattttctggtataaaatatcttggcttaatatagtctaaaaacattgaagtgtaatgtggccaacacgataactttctgaaatacaatactattgtccttacttctgtcttggtttctgtggtgtcagaggcccaaaatgaatcaagatgacaaatccttagctaaggcaatgtagaagccaccatggtactgtacaggaattatagtctcttatttttcccgggasagaaagcatggagtaatgtaaagaacactggatgagtgtcaggattcagcttcaggaggggaaagccaatagacttgggcccagcacttaaccactgtgcgccttatctcttaattggaaggaattgggctacagggtcttaggggtccttctaaataagaagttttcaattctaaggtttcttctgtctggagaggagcatatcatgatggattggtctctggaatcaacaggcttggttttgaactaagagatcttcgaccagttgcttacccacccgtggcctcatttttcttatataaaagatggggatagtgatattacttgtatcagtttggatatgcagctgctgttgatttgttgattcagctgctccacaggaacccacgctctttttgatgacttcaccatctttaatttcatcttcatgtttgttgcctcatcttataaaaaggcaccagcctctccaggtattaagtcttcattcccatcagaaagcagggggtgggagtgggagg

SEQ ID NO: 62383 - DNA, 669 bp, Homo sapiens
catgtttgcctgcctgtctttctccctttttcgtgcctctatctccaagaaagatgaatagagatagaggcagagaggctggatgtggtggctcacacctgtaatcccagcactttgggaggccgaggcgggtggatcacgaggtcaggagttcaggaccagcctggcccaaatggtgaaaccccgtctctactaaaaataccaaaattagccgggcctgctggcagatgcctgtaatcccagctgcttgggaggctgaggcagagaattgcytgaacatgggaggtggagtttgcagtgagccgaaattgtgccactgcactccagcctgggcgacagaacgaaactccttcacaaaaaaaaaaaaaaaaaaaaaaaaaaaaatcattgttttctccagtaaccggctggcctttctcatcttgtcaaagctatttttttttttcaccttaacaagttaacataaggctcccattcagtagatcagaatctcccagtagatctaaaagttgcttcctgctggagcaaactttctcctgttctttatttttccttgaatcctaaagacaagctgagcacagttctcagtgttgtcctgcctctgtttctagagaatgatggctgtgaccaattcagagtcatgtcagtcaacagcacaaagagtacaaa

SEQ ID NO: 62384 - DNA, 669 bp, Homo sapiens
catgtttgcctgcctgtctttctccctttttcgtgcctctatctccaagaaagatgaatagagatagaggcagagaggctggatgtggtggctcacacctgtaatcccagcactttgggaggccgaggcgggtggatcacgaggtcaggagttcaggaccagcctggcccaaatggtgaaaccccgtctctactaaaaataccaaaattagccgggcctgctggcagatgcctgtaatcccagctgcttgggaggctgaggcagagaattgcttgaacatgggaggtggagtttgcagtgagmcgaaattgtgccactgcactccagcctgggcgacagaacgaaactccttcacaaaaaaaaaaaaaaaaaaaaaaaaaaaaatcattgttttctccagtaaccggctggcctttctcatcttgtcaaagctatttttttttttcaccttaacaagttaacataaggctcccattcagtagatcagaatctcccagtagatctaaaagttgcttcctgctggagcaaactttctcctgttctttatttttccttgaatcctaaagacaagctgagcacagttctcagtgttgtcctgcctctgtttctagagaatgatggctgtgaccaattcagagtcatgtcagtcaacagcacaaagagtacaaa

SEQ ID NO: 62385 - DNA, 1341 bp, Homo sapiens
ccgcactggctttttctggaaccacacgatcaagagggtttggctaccgaaatgcctagaaagcttcaggaccaggcgctctcctgaaaagctatttggtcaagtgagtggtttaggtgggcatgcgtgtatatgtgggcgtgtgtgggtgtgtgtccatgaaagtggccatgtctgtgtgcgtgtgtgcatgtaagagtgcctgagtgggtgagtgttgaccatgtgcatacgtgggtgtgtgcaggtatgtacggtgtgtgcacatgtgggtgtgggcatgcatgtgtatgggtgtgtgcacaggtgtgtgggtgtgcgtgtgggggtgtgcatgcaggtatgatgtgtgtgcacaggtgagtgtgcaagcgtgtgcaggtatgcatgggtgtgaggtgtgcacgtgtgtgtgggtatgtgcctgtgtgtggatgtgcatgggtgtgtgccggcatgcatgggtgtggggtgtgcacagacaggtgtgtgcatgggtgtgcatgtgtatgggcacgtgcacgtgtgtgggtgtccatgtaggggtgagcatgtgtgtatggatgtacgtgtgcacaggtgggtgtgcaagtgtgtgtgggtgtgcacagtgcaggggtgtgtgggtgtaggtgtgcacatgcctgatggtggacaggaacctcaggttccttcctactgctctttctggccccactagtggatccggagtagaaaccagccagagagaagcgcacaggggaagcacagccatcacttagcaaaatcacttagtgaaatctgggggaaaatgagagtgggctgaaggcaaaatcagtgtgctctttcagctggagaacatagcaatcaggggaataggggcatggaacagcccagaaactggatacacagagctgcgcagcygtcatatgccccaggaggaggagggcggcgggtgtgttcacgcaccacgtgcagccctggctgctctgctgctggagtccattcgggctgctgtgacaacacgcctaagcctgagccacttgtcaacaacagacatttattgctcacagtcctggaggctgcaagtccaagaccagggtgctggcggatgtggcgtcccatgaggcagccctctgcttccaagacggcgcctcttgacaaggctcagggtggacagagcgagggagctccctggagcctcttctacccgggccactcatgccattcgtgagagcacagccctcgtgatctactcacctcccaaaggtcccacctgttaacaccatcacattgggtattaggttccaacctatcaattttgggggccactaacactcaggctacagaaactactaatgc

SEQ ID NO: 62386 - DNA, 1829 bp, Homo sapiens
cgctctaaagtttctaaggcaacctgagcgcggaaaagcttamttggtgctccagaagcaggaattgtaacactgctttatcattagttttcttccgtctttccagcaaaccaatcctgttatatcctttacatttctcatagtttctccttcacgctttactttccgatactgatttataactattgaatttcggttaagtaagagagctatcaagtacgaattatctatgccaagactcccgctggggtgggtgagaaaaaatgaggtttctacgtttggggaacgtggcgtctagttgggaagacacatctatgaacaggagatttcagtaatttgttatatggtctaattaaaccagtgcgctgagttgctaatcactgaccacatttattcaatttaacaaccaactttgaaccctttctatttgcccggcgctaagctaaactctggggaatccaagatgagtaaggcaggtaggcgtcaactctctaggatctaacatcctgtgtagtgatgacggaagaaaattgtcctctaaactttattacagatctaaacctctgtgtttggaaaatatgcgtctgtctcacaatgactgaaatgcccttttaaaacattagcatgaatagacaaaggaggaagcaggtaggcattaaaataatggggcaatctagttgatctttagaatatgcatcagattcttaaggagagatacttaagagaggaaccaggaaggaactgtagtagggataatggagatcaaattcatctttacaataattttgcagccaactgatcttctatggtgacatttcccagtggagagagttctggttctgagtaggcaagtaagactccaacattctcatgacagccatcctcactttttaaaataatggtcttaccatatatgtagatgaagccaaatattgattgacagatacagggatcaacagttacagccttaatagctgaaactattcaattagtgggtgtgactaaaacttgtgagaatagtaataaggataaaactgtgattgtgtctacctattgtcagctagccaaataataatgaaagagatgagtgtacatatttacagtctataagactacatataatatattttgaaacaaaatttgcatcctgctatttatagtttggtttctgctcatgaatcaaaacgtggcaaaatcctaaagagaaaaatggatattaatcagagagcttttattgtatgtataaaaagtggtgaaaacagaattcagtcccacagtgtgactttagtactcagattctgctgcttcagaaaatacatttgtataatatatcaaaataacatctcttgagatattaaaaagcagctgtttctaaatatttagaattctttttcacctcagtccccaactctgcttctcatgtttgtctcctcagagtcacagcatgatttctgcagcctcctgagttttattttgcttaggacaagaaagaaattataaatggatttatttataatcaatttttttaactttgtgaagggatttgcaattggaaaattttatagcaaaacaaggaccttctcttttactgaaaagttaaaatgttgaagtacgtttaatggctgtaatcagaagcaaactctggagcaaatttttggagataattggcaatggaacattttaagacaacaaatagcataaatggcctaatgtgttttggaaaagatccaattagtatcatgtagaggcagaaatgactgtagaagtgcacagtgtgaccatgttagacctcattaaatgtcaatgaagcataccaatattctatttgc

SEQ ID NO: 62387 - DNA, 1119 bp, Homo sapiens
gcatatgaaactaattatagtataaggtaggatgaactaaatgtgcaacagagacttaaacagttctgtgggactaggggaagaagtaattgactctgaaggataaggaaaatctaaaggagggaaaggcagatgaataggattccaatagacaaaaaaagggggcattttttggagaaggtggagtcttgaggtccttagacactggtttgagaaactgcacagcaaattatcctgggaaagagaaggggcactttgtatgagagggctagaatcttcctttgaatgttattcagttggcattagtgagtttttgaaagttaaaccacacagattcaaacaatttgaaaaagaaatgatcactctagtttttgtagcctcttttagaataaaaaaaatcttgctatttagcatttcatatttaggctttcacattgccagcagattaatttacctaaaatgcacatccaaccatgccagttttctgtttaaaagcattcaatgactttatagcacatgccagatgaagtattagttcctgagttgagaagaggtttttgctctccatgatcagtcactttcatacagcctattgaaccttattgcatcattccatgcctccaagtcttcaccaggaaatactaayttcttgcaatttgcaacatggagctcgctaattcctatctaattttccagatatgatggctctggtaagttctattttatgcagaaaatcaatattaccttttggtcaagtctttaatataattattttccaaatagtcacttttctagctagaggatcttttataactgtatctgaaatttggagttgagactaatgcttattctgttatttagattaaggctaagtctaagccatttggatatcttcttttgtgaaggttctttcaagtcttttgccaatgtttcaaattgtgtttatgccgtctccttattgcttttctttactgcatgtatttttttttcttcaacttttattttaagttccaggttatatctatgcaggatgtgaaggtttgttacataggtaaatgtgtgccagggttgtttgctgcacagatcaacccatcacctaggtaatcagcccagcatcca

SEQ ID NO: 62388 - DNA, 1119 bp, Homo sapiens
gcatatgaaactaattatagtataaggtaggatgaactaaatgtgcaacagagacttaaacagttctgtgggactaggggaagaagtaattgactctgaaggataaggaaaatctaaaggagggaaaggcagatgaataggattccaatagacaaaaaaagggggcattttttggagaaggtggagtcttgaggtccttagacactggtttgagaaactgcacagcaaattatcctgggaaagagaaggggcactttgtatgagagggctagaatcttcctttgaatgttattcagttggcattagtgagtttttgaaagttaaaccacacagattcaaacaatttgaaaaagaaatgatcactctagtttttgtagcctcttttagaataaaaaaaatcttgctatttagcatttcatatttaggctttcacattgccagcagattaatttacctaaaatgcacatccaaccatgccagttttctgtttaaaagcattcaatgactttatagcacatgccagatgaagtattagttcctgagttgagaagaggtttttgctctccatgatcagtcactttcatacagcctattgaaccttattgcatcattccatgcctccaagtcttcaccaggaaatactaatttcttgcaatttgcaacatggagctcgctaattcctatctaattttccagatatgatggctctggtaagttctattttatgcagaaaatcaatattaccttttggtcaagtctttaatrtaattattttccaaatagtcacttttctagctagaggatcttttataactgtatctgaaatttggagttgagactaatgcttattctgttatttagattaaggctaagtctaagccatttggatatcttcttttgtgaaggttctttcaagtcttttgccaatgtttcaaattgtgtttatgccgtctccttattgcttttctttactgcatgtatttttttttcttcaacttttattttaagttccaggttatatctatgcaggatgtgaaggtttgttacataggtaaatgtgtgccagggttgtttgctgcacagatcaacccatcacctaggtaatcagcccagcatcca

SEQ ID NO: 62389 - DNA, 1119 bp, Homo sapiens
gcatatgaaactaattatagtataaggtaggatgaactaaatgtgcaacagagacttaaacagttctgtgggactaggggaagaagtaattgactctgaaggataaggaaaatctaaaggagggaaaggcagatgaataggattccaatagacaaaaaaagggggcattttttggagaaggtggagtcttgaggtccttagacactggtttgagaaactgcacagcaaattatcctgggaaagagaaggggcactttgtatgagagggctagaatcttcctttgaatgttattcagttggcattagtgagtttttgaaagttaaaccacacagattcaaacaatttgaaaaagaaatgatcactctagtttttgtagcctcttttagaataaaaaaaatcttgctatttagcatttcatatttaggctttcacattgccagcagattaatttacctaaaatgcacatccaaccatgccagttttctgtttaaaagcattcaatgactttatagcacatgccagatgaagtattagttcctgagttgagaagaggtttttgctctccatgatcagtcactttcatacagcctattgaaccttattgcatcattccatgcctccaagtcttcaccaggaaatactaatttcttgcaatttgcaacatggagctcgctaattcctatctaattttccagatatgatggctctggtaagttctattttatgcagaaaatcaatattaccttttggtcaagtctttaatataattattttccaaatagtcactttkctagctagaggatcttttataactgtatctgaaatttggagttgagactaatgcttattctgttatttagattaaggctaagtctaagccatttggatatcttcttttgtgaaggttctttcaagtcttttgccaatgtttcaaattgtgtttatgccgtctccttattgcttttctttactgcatgtatttttttttcttcaacttttattttaagttccaggttatatctatgcaggatgtgaaggtttgttacataggtaaatgtgtgccagggttgtttgctgcacagatcaacccatcacctaggtaatcagcccagcatcca

SEQ ID NO: 62390 - DNA, 1119 bp, Homo sapiens
gcatatgaaactaattatagtataaggtaggatgaactaaatgtgcaacagagacttaaacagttctgtgggactaggggaagaagtaattgactctgaaggataaggaaaatctaaaggagggaaaggcagatgaataggattccaatagacaaaaaaagggggcattttttggagaaggtggagtcttgaggtccttagacactggtttgagaaactgcacagcaaattatcctgggaaagagaaggggcactttgtatgagagggctagaatcttcctttgaatgttattcagttggcattagtgagtttttgaaagttaaaccacacagattcaaacaatttgaaaaagaaatgatcactctagtttttgtagcctcttttagaataaaaaaaatcttgctatttagcatttcatatttaggctttcacattgccagcagattaatttacctaaaatgcacatccaaccatgccagttttctgtttaaaagcattcaatgactttatagcacatgccagatgaagtattagttcctgagttgagaagaggtttttgctctccatgatcagtcactttcatacagcctattgaaccttattgcatcattccatgcctccaagtcttcaccaggaaatactaatttcttgcaatttgcaacatggagctcgctaattcctatctaattttccagatatgatggctctggtaagttctattttatgcagaaaatcaatattaccttttggtcaagtctttaatataattattttccaaatagtcacttttctagctagaggatcttttataactgtatctgaaatttggagttgagactaatgcttattctgttatttagattaaggctaagtctaagccatttggatatcttcttttgtgaaggttctttcaagtcttttgccaatgtttcawattgtgtttatgccgtctccttattgcttttctttactgcatgtatttttttttcttcaacttttattttaagttccaggttatatctatgcaggatgtgaaggtttgttacataggtaaatgtgtgccagggttgtttgctgcacagatcaacccatcacctaggtaatcagcccagcatcca

SEQ ID NO: 62391 - DNA, 1322 bp, Homo sapiens
gagtccatttaagacattctgccaagggagaagccatccactgtggttgcctggcttcagagcactctcactggtcagcagtccctgactcctatgacctccagtgctgtgtagatgatagtttcatgaatagcacttttaacatctatgttgcattaggtattataagtaatctagagaygatttacaggaggatgggcataggttaagtgtaaataccataccattttatttttatatcagtgacgtgagcatctgcagattttggtatccttgggggtctgggaaccaatgcactgcagatactaagggacaactctacagtgtttgatttattgagctttctgagatattcagccttttcctgtcttcacacttgtttttccctctattatttagggtaatcctgatgaaaatcaacaaaatacacatgaagagacagcactgagaggtaatgtgctaactggtctttgtgattacaggcacttcagatttccctcttgcctactcattgtgagatgcagcccagccctgcaacaagactgccacagtcgtatcctggctcacccctaactagcggtttgactttgagcacatcactgcctcctccgtgcctcagtttcctcttctgttgaatggggatgatcacagcactacctcaccatttgttgtgaggattaaatagattcaaatatgtaagacacttacagtaatgctttgtacacagaaggcactattattttttattaatccctatttttccttcccaacttcatctcccaatatcccataaccatgctgatttccttacaactcccccagacctcctggactaagtgagatttggaagagtatactcagggcagtcaagaaggactgattctgctaatttaggatttgtcaagttgggttagtttgaaatatacctctgtactcctctcaggaaatgctggatagtgtagatttagtatcagataatagtaataatggtggcagactctgatgtttcctccttcccttgtgatctcagtagtcttgtaccattcatacatcaaatgacttagcaactaacaatcacgtaatattttttaagcttttcttatgtgcccagtagtgagccaagagttttttttcctatttttaacatactattgacagctccatgaggtgggtttatattttgttaaaataatttgccatgtccacttccccagtagactgtgacagtggcatatacatctgtgtgtgttattcagtttgtatctctaggacttgacagaggacccaatacagagtgggtgctccagaaatgtggacttgga

SEQ ID NO: 62392 - DNA, 850 bp, Homo sapiens
atcaccagctcctgagggctgccagctcagcaaaatttcttctgcaaatgtgcacttttgttttgagagtaggagggggtagggaaggcaaggatttgggagcagatggtgatttggggtatattttggacagccaatagacctcttacttaaagaaatgtagggaaaggcaaagggaagaacagaaacccaggagtcatggatttaaaaagggagatagatgctaataaaaacaattttgcctagaatcctgtcaactgctctacggaccagcttgaattaatgaacatctctgcttccccaagtcactgcagctcctctaatgtcctgtcatccaatccccacccattttccacttaagaagcaaaaagaaatgaaggaataaatagcctgagacagaaaaaaggaagaatttttattcatgtgcctatctcctctctctttctatttccagttctattttacgtttcaatccctaggatttgccttttttaggataactacattgcatcccccaggaacaccaaggccaatgcccttgtacaaaaccttcgttcatctgcactatatgtggttctggttgatgaaccttaaaagagaggaaatagagctagaaaaggtctgaagaagggcagatraaatgatcagagggatttttaaaaagggtgctatgtgagagcagattaaaatgattacctttctacatgctgacctctacaaaaagataaagggcatagataaggtaaacacaaactggatgggtagagcctacagtgccatggccatgggaaaaccacagaagctagcaggtagagaggtgcgtagttggtagatgctacatagcagagag

SEQ ID NO: 62393 - DNA, 1533 bp, Homo sapiens
aaacaaagtccgagaaactgttacagcacaaagagcctaaggagacataaataaatgtaatgtggtattctaggtaagatcctggaacagaaaaatgacatgagggaaaaacttaggaaatctaattaaaatatggattagaccaatattgattaattgtgacaaaatgtgccttactaatgcaaaatgttaacagtgggaggaattgggcacatgtgaactctactatctttgcaatgtttgggtaaatattaaactctttagaaattagaagttcattttttaaaaatctaaaatagaaaataaatatgtsatttttatgtttaagtggcttatattagttttatgtagttttcttcaaatataattttgaaatgaaattgaacatctcttcctcattagtgaatgtcattttcataatggggaaaaagaaggaaaggaagaaaatatccccacaaattcacaagagcttagaggtgatgaaaccttagatcccacatttcaagttagaggaaaaacctctctgaattcctgagttttagtggccagttatttctcccagttctcctaacccaaaatagcttcccctcatttccaataccactcatcctgtcctctttgttattcttctcatttaatcaattcagattattgcagtgaggatgttaaatggaagtcctagactggcatctcttttacccataagtaaggtagagccgtaaggatccctgctgtatgcaccattttcctgggtgcttcagccttgacccacacaggacgagctcctaatgagaaacactttaagcctccctcactcattcatccctgtcctctctcctgagactgccaacaagagaaacaattagggccaattgtggtggtggttggctgcctttcaaaatagaaaccatctcaaaatccatgtaagggcttgccttactttcagcttccttacagactgcagtgacatttggtgacaatgctgagaattacccagattatccatggaagcctgtaatagtccaattaccaacacttgtttgcaatcttattgtgagctttctctgaaatcagaaaaggatatgctgcaacaggcatagaggtggagggtgagacgaggaagaaaaaagaaaactgttctgagaatgaaattgttttcatcagtgactcaaggctctaaaagattaggtgactaccagaagccctgatgtgtgctttaataaccttaaccattgtggggaaatggcttttccacagactatgaaatctcatagcaagcttgtgtccattatatgtttcctattatatattgacttgaggaaaactttctgttgttttttgttttgtggtttttttttttaagtagaccctgtgttttgtcttcatgagatagataataccaaagcattctagaaagtttaaaaaaaagctgaaaactaatgtgtttgtctgttacctagtttaacactttgaacaggtttttcttgctttgcaattaaggaataatgacccaattcagatttaactgaaaag

SEQ ID NO: 62394 - DNA, 490 bp, Homo sapiens
agccatgacaggctacagtcacaactgggacttttagttgtgtaatagaaagccctaaccaaattggcataaacaaaaaaagaggaaatgtagtgagtgggtcatgtcactaaaaatctcagaagtgttccaggtacagctaggtattttcatctcatctttctgttcttcattccccagggttagcaattttcagcttctgtagcagcttgaagctaggatctccttacttcccaagatatcctgtaaaagttccagaaaccacatttattgaccattcctaagtcatggatccatccctgatgctagcagtcctccagactacatagacttagagtaaggggggagtgaatcyccagtgggaagtcaggatgccattaccaaaaggaggaagaaatagaagcaaagcagccaacattcaaaatgtccactacacagacacttcacccaaccatggcccaggtaaagatatgttctcctgactcttaca

SEQ ID NO: 62395 - DNA, 833 bp, Homo sapiens
gaagacaatcacatgggtggtgaaacrtacaaatattttaacttttcttcaataagggaaacatttttacaatgatataccaatttccttatcaggaacattaagatgttgaagataatgctagtggagtggggcacaatggaaactgtcataacaaattacctggaaaacaattgccttaaaactgttcacagcctttgaccaaagaatttcattttggggattgtatcattaagaaattatcagaaatatggttaaagacttatgcccaatgatgttcttcacagtgagaatttgaaactgaaacacaagaaaaagcctatgaatccaataataagggaatggttaaatacagtgtggtggataggaagcagcataggctagcagctaaaagcatgattttgagtcttaccacctggattcaaattctggctctgtcatgtaactgtcatgtaactctgccctgtaactttggaacctctccaggctctacttttttcatctgtacaaaggggacgataagagtatctaacatatagggctgttatgtggcttaaatgggttcatacaggtctacacttccaaaatcttcaaagctctaaacaactaaaggttttatgtaacttaaatagcaacaaaacatcagtgaactgacacagatctactttattccatttactgtgactgtatttggcagatataatcaatgttaatccctttccacagttttacctttcttgcagaatctccaagattctctttatgaattaataacaatcttacacatttgaaaaagactaattttgaagtcaaagctaactagagagcaggta

SEQ ID NO: 62396 - DNA, 833 bp, Homo sapiens
gaagacaatcacatgggtggtgaaacatacaaatattttaacttttcttsaataagggaaacatttttacaatgatataccaatttccttatcaggaacattaagatgttgaagataatgctagtggagtggggcacaatggaaactgtcataacaaattacctggaaaacaattgccttaaaactgttcacagcctttgaccaaagaatttcattttggggattgtatcattaagaaattatcagaaatatggttaaagacttatgcccaatgatgttcttcacagtgagaatttgaaactgaaacacaagaaaaagcctatgaatccaataataagggaatggttaaatacagtgtggtggataggaagcagcataggctagcagctaaaagcatgattttgagtcttaccacctggattcaaattctggctctgtcatgtaactgtcatgtaactctgccctgtaactttggaacctctccaggctctacttttttcatctgtacaaaggggacgataagagtatctaacatatagggctgttatgtggcttaaatgggttcatacaggtctacacttccaaaatcttcaaagctctaaacaactaaaggttttatgtaacttaaatagcaacaaaacatcagtgaactgacacagatctactttattccatttactgtgactgtatttggcagatataatcaatgttaatccctttccacagttttacctttcttgcagaatctccaagattctctttatgaattaataacaatcttacacatttgaaaaagactaattttgaagtcaaagctaactagagagcaggta

SEQ ID NO: 62397 - DNA, 833 bp, Homo sapiens
gaagacaatcacatgggtggtgaaacatacaaatattttaacttttcttcaataagggaarcatttttacaatgatataccaatttccttatcaggaacattaagatgttgaagataatgctagtggagtggggcacaatggaaactgtcataacaaattacctggaaaacaattgccttaaaactgttcacagcctttgaccaaagaatttcattttggggattgtatcattaagaaattatcagaaatatggttaaagacttatgcccaatgatgttcttcacagtgagaatttgaaactgaaacacaagaaaaagcctatgaatccaataataagggaatggttaaatacagtgtggtggataggaagcagcataggctagcagctaaaagcatgattttgagtcttaccacctggattcaaattctggctctgtcatgtaactgtcatgtaactctgccctgtaactttggaacctctccaggctctacttttttcatctgtacaaaggggacgataagagtatctaacatatagggctgttatgtggcttaaatgggttcatacaggtctacacttccaaaatcttcaaagctctaaacaactaaaggttttatgtaacttaaatagcaacaaaacatcagtgaactgacacagatctactttattccatttactgtgactgtatttggcagatataatcaatgttaatccctttccacagttttacctttcttgcagaatctccaagattctctttatgaattaataacaatcttacacatttgaaaaagactaattttgaagtcaaagctaactagagagcaggta

SEQ ID NO: 62398 - DNA, 833 bp, Homo sapiens
gaagacaatcacatgggtggtgaaacatacaaatattttaacttttcttcaataagggaaacatttttacaatgatataccaatttccttatcaggaacattaagatgttgaagataatgctagtggagtggggcacaatggaaactgtcataacaaattacctggaaaacaattgccttaaaactgttcacagcctttgaccaaagaatttcattttggggattgtatcattaagaaattatcagaaatatggttaaagacttatgcccaatgatgttcttcacagtgagwatttgaaactgaaacacaagaaaaagcctatgaatccaataataagggaatggttaaatacagtgtggtggataggaagcagcataggctagcagctaaaagcatgattttgagtcttaccacctggattcaaattctggctctgtcatgtaactgtcatgtaactctgccctgtaactttggaacctctccaggctctacttttttcatctgtacaaaggggacgataagagtatctaacatatagggctgttatgtggcttaaatgggttcatacaggtctacacttccaaaatcttcaaagctctaaacaactaaaggttttatgtaacttaaatagcaacaaaacatcagtgaactgacacagatctactttattccatttactgtgactgtatttggcagatataatcaatgttaatccctttccacagttttacctttcttgcagaatctccaagattctctttatgaattaataacaatcttacacatttgaaaaagactaattttgaagtcaaagctaactagagagcaggta

SEQ ID NO: 62399 - DNA, 2005 bp, Homo sapiens
tattattgatatattttttattctttcttttgtcatactaaatctggtatatattttacccttacaagacacctcaaatgctcaatagcccacatgtacctactggctactctattagcatagcttagagagatatagagactaccattgactttttaaaaacagtttattttgaactaattataggttcacaagatgacgagaaaagaggagtaaggccctggatacccttcattctgtttccagtaatactgatatcttacataactgtagtacaataagaaaaccagaaaatttattctggtctgtcattgccttttaaacacagccttttctaccctatatacctagatttctctgagctcacaagttgaataaggtctttcttctcctatggaaataaatgaataataagagagataggctaaagctatttcattccagtttgctttctcctagagtgtatagcagatgtcaccttccacttataaaataaagatcttttccatctacccactgcagtgtattatactcttccttattttagatagttttgcttttgctaatgtggtaacaagatcctgggatatagaaaaagtcactcttttctatagctctcacacatacattggtttgcacagagaagatgctcagtgagtatttattgagctagattcttgacataatccaactgttatgtgaaaggcatttgttattcacattttcaagctactcaactgttgcatgcctgaaaggaaaatgacataacctttgaataagtttgatggattgcttttctcaggcaagaaagattgtactttgatttacagggcacacgtaaattagccagtacggaatattttatcaatctaaagatacaagttctttgcttaactttgttttaattagaattaagtctttgaatacttgttatccattccatggatagttttattgactttaacatctctacacttcaaaaagagaaaagcagagatgcaaagacctcctaggcaaactagcctatatgattattccgctaataattggtgcatagatacaaaccattgctttatcatcccaattcctgcagcctagatatgtttaaacagctccaaaagctacacatagattaaaacccaagtacctcagctctgtgattagctgtatgtctagattctgggcaaggccttgactacaggagacacaaaaaatgcatgttgaataaatgaatgaataatgttgtcattcatgctatcactgagtatgcgtaggatctaaggatagattgtctgagctggaggatattggttgtctatagagagcttccagagtagacattcatcaagaaatgtcaccagttgagcaatattaccctgcaacagccctccagaggctgtgcaaaaaaccctgagatatctagagctaatccctatcactttcattctttttacccaggaatatctttaagtcagagcttggagttctgattattgctgtgtttcaggagtgctcaaagtctacacaataaatatcaacatgtctttatatcctttcttaccatttatctaaatataactcccacctrccagctagcacctcctttatcctttgacagaaaccagggaatcaccgattgttctctttcacttatttccccacatccaatttaatgtccaatcattttcattctgactctaaaacatccctgcaatctgtctacttctctttcatggggccaccactcatctccaacttgaaagattacaggggtgcccacagtgcctcatatttccaatctttaagctgtccatttgaagggtgcaaatgtgatcatgtcacttccctgtttcaaacccttcagtgtcttctcaccagtaactgagctacatcttcagtctgtcttcaaaagcctggaattgtctggatgcagtctgcctctctaggttcatctctcccactgtctgttcccgtactatactcacactgaacttccttcagatct

SEQ ID NO: 62400 - DNA, 676 bp, Homo sapiens
tgacacggtgactgcaagcctctattgtatggaataaatcctatagatgcgtcctaaaatgatgcttgcagagaaaattccaatcaataacacttttccaaattgtagcttttcatcttaaagcctaatatttacctgcaggctttagcacaatgctcttttactagttttttttccccctctgtcttcccttacaagcatgccatttgcactttcaaatacaatattatgcaaaatacttcaytaaatgtcttttatttttagtttatcccctataatttgccctcataaattaaaactatgggaagatgtgatttttgcctttttattggcagtctgctcagtttggttttttgtttgtttattttaacagtccttactttattctgcatggggacaccgtggtttgcgtcagagagcttgctgcccttgctggttcagggagatccacaaataccactttcttagaaatgtgtgcaccagtcataatctgtggttacaaatactgcttgagacatcaaacgtgaggatcagcaatgatagaggtggccaagaaacattcataatcacactcacatctagaatattgctgcccttgctagttcagggagatctacaaatatcactttacagatgccatgggttccatctatattagtctctgcaatggagatta

SEQ ID NO: 62401 - DNA, 1687 bp, Homo sapiens
aaaaatggtgtcccaatgttgctttgatgtttaattttcctgaccgtttgtgaacatgttgtcacttatttattggtcatttgcttttcatgttccatgaaaccaattcatatcctttgcctctttttatgggttatttgtgttttttattttcaccaatttgtaggagctttttgctatggatagtcacccttttccataagcattacaaaccagtttttttctccagtcaatcatttatgttttggattttattttagatgcaataatccttttcccattttatagggtcaatcatgtgaggaaacccctcatttaaaatatattgtrccccagtgtgtgtaggagattggttccaggacacccacatagaccaaattcaggcatattcaagacctccagtcggccctgtggaactcacttatgagaaaagttgaccctccctatatgcaggtttttaatctgggaatagcgtattttctacctgtgtttggttgaaaaaaatctgcttgtaagtgggcccacatagttcaaacctgtgttgttcaagggtcaactgtatggaatctaaaagggagaagtggcctgctccaagttgcatgttcagttaaatgcagagcagagatagacacggatcctcacctaggccccctttccttacccagtgctgccttcgggaagctgctcttcccactctgctcttattccaccacactccatctgtgtgtgttcacagcaaatggaatcaatttgaaaacacaggacagcaaagtgtaataaaatatcataacacaaaaacagctcacatgccttgagcacgtttttttttttttttttatgctgcccttttataataacccaaacacctaagcagtgcttggggaagagactgctgtcccactggagcataggcagggtaccagagacagagcagatggctgaggggcattcctggctgggaattctgccagcaaacattggtgaggaggtgcaaagctagtctgaataagacagccaggagactaatatgttcagatggcataatgccttttcacaaactgctgggctgtttattcgtagcagaaggaaataaggcttttaaaaagctctacctaacaccttaaacatcatattacagtggaaatcactaccctttaagagagtggatgtagtaggaaaacatttcctgaaatatcatcacatgtgctaaaagtatatgtttttgaaaacaacaaaaacatccaaatttttattctatgtattgagatattgagccccttgatttctgtatgcatgatttgcagcactgtttaatacatgcctgcagctggataccaaaagaaatgtagtatggtgaccatgagtttctgtgtttaatagcacattgagaaaaatggaagtcagatggcccatttctgctgtatcactctattaggtttctgtatggctttggggaaggcagtcaaagcattaatgtttgttcatgcctggccattgcaaacacatattgatgcaaagtgaacaacaaacactgggaaattttagcttagatgagacatgtttttcagaagtttgtctggatgactaaggcagtgattttcaaccaggatggtgggaggtgggtggagaagatattttaaaatgacacatttcacccaggattctgataatccctttataaggcatc

SEQ ID NO: 62402 - DNA, 1687 bp, Homo sapiens
aaaaatggtgtcccaatgttgctttgatgtttaattttcctgaccgtttgtgaacatgttgtcacttatttattggtcatttgcttttcatgttccatgaaaccaattcatatcctttgcctctttttatgggttatttgtgttttttattttcaccaatttgtaggagctttttgctatggatagtcacccttttccataagcattacaaaccagtttttttctccagtcaatcatttatgttttggattttattttagatgcaataatccttttcccattttatagggtcaatcatgtgaggaaacccctcatttaaaatatattgtaccccagtgtgtgtaggagattggttccaggacacccacatagaccaaattcaggcatattcaagacctccagtcggccctgtggaactcacttatgagaaaagttgaccctccctatatgcaggtttttaatctgggaatagcgtattttctacctgtgtttggttgaaaaaaatctgcttgtaagtgggcccacatagttcaaacctgtgttgttcaagggtcaactgtatggaatctaaaagggagaagtggcctgctccaagttgcatgttcagttaaatgcagagcagagatagacacggatcctcacctaggccccctttccttacccagtgctgccttcgggaagctgctcttcccactctgctcttattccaccacactccatctgtgtgtgttcacagcaaatggaatcaatytgaaaacacaggacagcaaagtgtaataaaatatcataacacaaaaacagctcacatgccttgagcacgtttttttttttttttttatgctgcccttttataataacccaaacacctaagcagtgcttggggaagagactgctgtcccactggagcataggcagggtaccagagacagagcagatggctgaggggcattcctggctgggaattctgccagcaaacattggtgaggaggtgcaaagctagtctgaataagacagccaggagactaatatgttcagatggcataatgccttttcacaaactgctgggctgtttattcgtagcagaaggaaataaggcttttaaaaagctctacctaacaccttaaacatcatattacagtggaaatcactaccctttaagagagtggatgtagtaggaaaacatttcctgaaatatcatcacatgtgctaaaagtatatgtttttgaaaacaacaaaaacatccaaatttttattctatgtattgagatattgagccccttgatttctgtatgcatgatttgcagcactgtttaatacatgcctgcagctggataccaaaagaaatgtagtatggtgaccatgagtttctgtgtttaatagcacattgagaaaaatggaagtcagatggcccatttctgctgtatcactctattaggtttctgtatggctttggggaaggcagtcaaagcattaatgtttgttcatgcctggccattgcaaacacatattgatgcaaagtgaacaacaaacactgggaaattttagcttagatgagacatgtttttcagaagtttgtctggatgactaaggcagtgattttcaaccaggatggtgggaggtgggtggagaagatattttaaaatgacacatttcacccaggattctgataatccctttataaggcatc

SEQ ID NO: 62403 - DNA, 674 bp, Homo sapiens
cagccttccaaagtgctgagattacaggtgtgagccaccaagcccaaccttttttcagtttttattatcctttttttttgtcatttcttattttatatcttgtccattctcacttattcattgaatgaattagaaagcagttgttctttctgttattcaaaaggaatttyttgaaacatttatttacattctaattgacaaaatgtcttgaaaacaggtcatgctagtcttccaacttttctttttcgaagttgttttagcattgatataatctgtagtgctgtttaactttttgaatatacagaatacaatataatcagtcttttctactaattatatattatatcagtaaatattcttgagttttgtcctgggatgcagttaagttacttagaaacagtttgatcctttctggatcttgcttttaagatgtgttaagtggtactggaccaatgctcagtccagagttaaatattcttcattactgagtcaacaccctctgcatactctactctgtgctccgtgaatcatgaggttttccattctggatggtgggaacagacactgttacatgtcctgcatgagtactattacctctaattctcttaggtgattctcctctcaggtagtttcttcaagtgcatgtgttatcagtactcactgaatacttgagg

SEQ ID NO: 62404 - DNA, 1528 bp, Homo sapiens
tgagagagcaggcaagtgctccacagtcctcaaacacagagcttttagtaaactatagcttagacctaatgccaaaatggggcttccttctccttcccttggaattgacaataacctaggataagcttgatttgactttatgtcagtcataaaagtgtgatttgcagagaatctctggaaagtatgtggagaagacgcaccgagcaggagttataaaagaacctgcagttctgagctgccgatgcatataaaagtgggcacaaattgcattatgggagatttaatgttggtataggatgcactgtcatgcaggaaatggctaatagagtacccagaaaccaaacttgggactgrgagttgagtgaagagatagttttaaaaatatctttattatcagggaagagctgtagtctaagtgtagagaaagggaaaaccaattagacagactattaataccgaatgtttccatcattaacactcattgtgttgctgcttctcaaaaagccatttgtgacccaaaagttggtcagcaccaatacctttagatcatgctaaaaatagaagtgaacctaacttcctgagagcttactacatgcatttttaatagctagatcatgtagggaaatcagcatgtctattattaaaatagaaaagctgagtgttagaacactaatttggagcaggaagattatacaagacaaattctgaacatgaagatgataattttcccttgagcaggaaaataatttaatagaactcaatgcattaatagacctatagtagaatgttaaaaagaaattctagcagtgagaatggggaagacctacgggaatattcagagttgagctataaatcatctggatacagaggatccacaacacttgctccagagcttagagcagcaggagaaatcactgaacgaaaaggagagagaaaaaattcaaagagattacccttgtcagaaaaggggcacatgtttgtttgtttttttaactaaattttaaaaaaactatagatatgcaggtttctccagatattgttatgccattacccctccaaagaaggcactgcagaatttaaagccatgagttccttatatagaaaaactcttgataatccttattttggaaaacaaagttcaagaaaaaatgtgaaaaattaattaaatgtgtgaacaattattcaaaatgtgtttagcacctttcatatgaaaagcattgtgttggagagtttgtgggatttaatattgtagaaaatgtgatgtccttgccctcaaaaagctgttgtactacaggaaatgaaatggaattatttataatgaaactggtaagtaatgagagccatatatgcagttgaccctaagagctaacaagtgtgaagctgggcaggatgcttttccctaatggctgcagaattacagtagagaaggtggtatttggtatctcaggtggtgggtatagcttgattaactttacacaggagtagagaaacttctttttctctgggtagatacccaggagtgggattg

SEQ ID NO: 62405 - DNA, 1903 bp, Homo sapiens
catctgaaagtatgtttttgcccagtattttagtttgtttgcagtaggtacagtcgctattagtacctttcttgtgacataaatccatatggcatacaaaaaatctttttcctctggtttcttgaggacaggaactatcgctctcctcctccctttttctacttctcctccttcactgtcttctttattatcttcatagctaccaccgagggagctctttctgcaagcttgtcactgttctatgcagtatttcatttagttcttataacaattctacaaggttgagtattgttttacagataagggacccaaggctcatatagaaataaaatgctcaaggtctcattgcaatatgtagcagagatgaaattcaagcctaagactttctcattccaaagccttaacagttacactagtagctctcattcactgatcacaagatattacatttatgaggatatacccagcagggttcttttaaacaaaataattaattaatgttaaaaattgacaaaatagtatatctttatggtgtacaatatgatgcttggatatatgtaaacattgtagaatgcctaaattatgttaattaacacatgcattatctcacatagctttttgcactgagaacatttaaaacatactcttttggcaatttttaagtagaccgtatatttttagtagccatagtcaccatgctgtaccatcagagttcttgattggaaatgatgaaagccaactcgatcagcgggtattgggttcattcctagaatcaacaagagtagggagaacctggcttgaaagacgggcaggaatgaagcggggccaggtggcaggaaaggcgccagggmcctgctccaggacaccgcgcccaggctgctgctgccattgcccttgcatgtttggccagtcccttgcacagcgggtgctgcagctgccactgccagagtgaactctgaactgctctgcctctttgcaattgttggtctagagtgagggctccagttgtctgtggcccagaggtcatgtgtcccagagaacaagcacctcaccttagggcttctgtggagggaactggggccctgccttctatcaagacatctacagtgatgaatttcccaagcacatgaaggtggtttagatgctgggaggccaagaagacaacagttgatggtcactccaaggatcatatacatatttgtagaatgactggtcagcttgaggctggcttctcttttagacttacaaggaaaagaaaaaaaattttttttaggtttgctttcttcttttctgacaaagccagcccagcacttacctcactttttcttctctttttaaagtgcttctcatgttgcaacattgtaagaaagcaatcccataaaaccaaagtcctcacattctttcagctacttttgtctctattatgttacaatagttagatttcaaaaatggtagctaccatatccttggcactgaaacaaagtactttacacacatgaccttgtttagtctttgcaatagccctaggaggtgtggtgattaatagtcttagcagctctcctttatacatcaggaccctgatactcagagaggattcaagatcctagctactaaacagtgcagctgaatttgtgacatgttttccttttgtttattttttttgcttaattttttttgagaaattaaaaaaattcagaaaagtccaaggaaaaatagaatagacacctgtatttctatcaacaagaattaactatgttaatttatatttgtcttctagctttcctttttaaagagataaaacattagaaagacagttatggttttttttcgtcatctcttttcctcttccggtgcactttcaaatacttttgcataatatatttatacattagtagccaatgca

SEQ ID NO: 62406 - DNA, 1903 bp, Homo sapiens
catctgaaagtatgtttttgcccagtattttagtttgtttgcagtaggtacagtcgctattagtacctttcttgtgacataaatccatatggcatacaaaaaatctttttcctctggtttcttgaggacaggaactatcgctctcctcctccctttttctacttctcctccttcactgtcttctttattatcttcatagctaccaccgagggagctctttctgcaagcttgtcactgttctatgcagtatttcatttagttcttataacaattctacaaggttgagtattgttttacagataagggacccaaggctcatatagaaataaaatgctcaaggtctcattgcaatatgtagcagagatgaaattcaagcctaagactttctcattccaaagccttaacagttacactagtagctctcattcactgatcacaagatattacatttatgaggatatacccagcagggttcttttaaacaaaataattaattaatgttaaaaattgacaaaatagtatatctttatggtgtacaatatgatgcttggatatatgtaaacattgtagaatgcctaaattatgttaattaacacatgcattatctcacatagctttttgcactgagaacatttaaaacatactcttttggcaatttttaagtagaccgtatatttttagtagccatagtcaccatgctgtaccatcagagttcttgattggaaatgatgaaagccaactcgatcagcgggtattgggttcattcctagaatcaacaagagtagggagaacctggcttgaaagacgggcaggaatgaagcggggccaggtggcaggaaaggcgccagggacctgctccaggacaccgcgcccaggctgctgctgccattgcccttgcatgtttggccagtcccttgcacagcgggtgctgcagctgccactgccagagtgaactctgaactgctctgcctctttgcaattgttggtctagagtgagggctccagttgtctgtggcccagaggtcatgtgtcccagagaacaagcacctcaccttagggcttctgtggagggaactggggccctgccttctatcaagacatctacagtgatgaatttcccaagcacatgaaggtggtttasatgctgggaggccaagaagacaacagttgatggtcactccaaggatcatatacatatttgtagaatgactggtcagcttgaggctggcttctcttttagacttacaaggaaaagaaaaaaaattttttttaggtttgctttcttcttttctgacaaagccagcccagcacttacctcactttttcttctctttttaaagtgcttctcatgttgcaacattgtaagaaagcaatcccataaaaccaaagtcctcacattctttcagctacttttgtctctattatgttacaatagttagatttcaaaaatggtagctaccatatccttggcactgaaacaaagtactttacacacatgaccttgtttagtctttgcaatagccctaggaggtgtggtgattaatagtcttagcagctctcctttatacatcaggaccctgatactcagagaggattcaagatcctagctactaaacagtgcagctgaatttgtgacatgttttccttttgtttattttttttgcttaattttttttgagaaattaaaaaaattcagaaaagtccaaggaaaaatagaatagacacctgtatttctatcaacaagaattaactatgttaatttatatttgtcttctagctttcctttttaaagagataaaacattagaaagacagttatggttttttttcgtcatctcttttcctcttccggtgcactttcaaatacttttgcataatatatttatacattagtagccaatgca

SEQ ID NO: 62407 - DNA, 1066 bp, Homo sapiens
gatgtcaagtgatccatctgccttggcctcccaaagtgctgcaattataggcgtgagccactactcctggctgagcttttgactcttaagactatgcatttgttggtatgcaggcatttaattttatttttcctattacttggccagtttttctcttcatagagtactaccacttttggggggaaaagtaaagattcaaattcataaattttatgaataaataatttatttttaatttttattaattttttttttaagagatgggttyttgctctattgccaggctggactgaacccctggctcaagcgatcctctcatcttggcctcccaaagtgctgggattacaggtatgagccaccacacctggccagtgatttcttagtaggcatttaatatttcctccctaagtgctgaatctcagatggaaagcattcttcatatttgatagactgtttcagataacttttatcaacaagtatataatacttaaaattgtatataatacttttaatgtaaaattttacatttaggttagagtagtttaaatactggatctcaggagtataaaaatagtgaagaagactggatttggaaagtatggtctagaattgcttatttactagtttatttagagacagggtctcctcactctgttgctcgggctggactcgaagtcgggagctcaagtgatcttcttgcctcagcctcccaagtagctgagactatacctgtgcccctgtacgcagctatggaattcatacttttgaagccattttagatcaaggtgttgtctccagaaaaagaattcaaactcttgctgaaatgaaagtgttttgttaggggtgataactcaattgttatgcccattttgagagtttgatttggtgaactcactgtcccccttagacattaagatggtgggttttggggccaggcacagtggctcacgcctgtaatcccagcactttgggaggccgaggtgggcggatcacatgaagtcaggagttcgagaccagactgagcaacatggtgaaaccctgtctctactaaaaatacaaaattagc

SEQ ID NO: 62408 - DNA, 645 bp, Homo sapiens
aagtaagactccatgtcctgtgcacattatgaatgatgtaaggcaacttaacaattgtcagctatttcttttcattgttcttattttgggaaatgggtgaaatgtcagtaagttgttggaagaaaaaacatacccttttagatcaatatgacatttgcaatgattagacctgattacagttgaaaatgttgctatggttacacattgtcgacatagtgttctgtaatttagatggacaacttttagggtttagagcatatagtcttttattttgttcagtatccatagttggcagagtagtttttaaattaggaaattatcttaatatcaaattctgtactggaagttttaatatttcaaattatattttccccttgactataaaatattatatattagttgtgaaaaatatagaaaatacagaaaagaaaaaaattaaattgcatataattccaccctctagagaaggtggctaatatttggatgttttaggttaatgtgtatatacgcacatttttatgtagttgagatagtctatacgtatatttttttrttttactttttctagtttaaattataaacattttcccatgtctttagaaattcttcatgaaatattttctacggctagatcttaattcctat

SEQ ID NO: 62409 - DNA, 2349 bp, Homo sapiens
tctgaggtcaggagttcgagatcattctggccaacatgatgaaaccctgtctctactaaaaaaatacaaaaaattagctgagcatagtggcggacacctgtaatcccagctactcgtgaggctgaggcgggagaattgcttgaacccggaaggtggaggttacagtgagccgagatttcaccatcgcactccagcctgggcaacaagagcaaagctccatctcaaaaaaaaaaaaaaaaattgcataaatatgttaaatcacctggcaaatgattttcttcccctggtgtctatgtgttccatactattgtaggctctttaactggtaaaacagctaccccaattcagagatccagtacttaatgcatcacatttccagagttatgagaaaacagctaaacctgtgagttagactcactttgtttccccacggaggaaataaaaacccacgatttgaaacctttggaaaacataggaaatgcaacatttggaagtataacatagaaacaagagataatcatacaatgcttccaaatgaagtctcacgttggatttgctggtttttaagacagattcccctcttctggacagctgtgatggccaagatagaagttcatttgctatgtttccagggactattctctttgatgtatacaggatttatggggtctaaaaagaacatacaattataaagtgttcatatttgagagaaaactgcaatgatcagaaggattgagccagttttagcataaaaaattaggactacattaatgatgaggttgactatacacagtttggagtgagagagttactctacccagtatcactgacatgttggaatgccagatgaaactgaaacagaaaaattgtcttggggtctaaaagacgtctgatgtgctgatgtctgttcagtcttctgcactcatgggcgtaaactctcaaagagcaccactgggtcttagtccgtggcataaagactattctcaatgtagatattgtcttctgcttggacttccttttcaactgcattttgcaaagctttaatttgaaggctgctaaatgaaacactgtagaaagagttgttgaagaataacatgagtaagaaaaaaagcagaccacttctcacatataagctgcacttttgtttatgatcaggcaatatcaggtattcgagactccaggagccccgttcacacaaagtataaaataaatagtgccttccagagttgtaaaaggtgtggctcttattattaagttgaagaaaagtctgtttaataagcatgtagacaatctaagaagtattcaaaaactcagactggtctctttgaaactcgcataatagaatacaaaaatggaaaatctaaaaatacagagctctgacatcaaactaagtggctgaatcaagatgcatattttcaaatgtggctaagcattggatgactggtgcttttccaactgtagcttgtgatcctttagagagggttgttaaatctacttagccatctacatcctatattcaagataaaaacagaacagagaaacattgaatatagttaaatagtactgtttcacaagtatacactggatcatagtgttaaaaatcttcctgtgctggatgcagtagctcatgcctctaatcccagcattttgggaggccatggcaggaggatcccttgaggccagcgtgagcaacatagcgagaccccgtctctacagattttttttttaattagccaggtgtggtggcttgtgcccataatcctggctacttgggaggctgagacagragaatcacttgaacccaggaggtagaggttgcagtgagccgagatcacaccactgcactccagcctgggctggagactctgtctcaaaaaaagaaatcagtagaaacagtggaaatacaagtgagggaagaaagtagacttagttttaacttacgtgtagcattttgatgtaactggttatttttatatatttgtatatagtgactatttgttaccaaagcctgcccccaaaatatggaacttgtcttcattcagctgcagatgaaacacatgtccacacatttaaagaactgtgaaaaacaaagctccactatggtccctaaacaggtcagtcatacatgtgtgaagacacttagtttaagtgtcaatgagctcaaatgactcagtgtgatataactgccgagaagataatgtcatgaagaagtgttcataatttgttagtgtgggtttttttttttttggctttttttatactttacacatttctcttccattccagaaatatttatgagcacagattcgtgagattgagtcctttatatgctatgtgatgtgaccttac

SEQ ID NO: 62410 - DNA, 1002 bp, Homo sapiens
gcacctttcaatacatctgcttttyttttggaaggaggggtatgtctccaaggccctctcctgtcacagtttctagctgggcaatgaccaagattgacagttcaggaagttaactccacctagggacagtctgtcattggtgtgctagggtacagttccagcctgaggctcttgtttcttgtttgacttatgctcactctcatgttgatttctgactccagccaaggtcacgactactccaattgtcacaactgttccaaccgtcacgactgttcgaacgagcaccactgttccaacgacaacgactgttccaatgacgactgttccaacgacaactgttccaacaacaatgagcattccaacgacaacgactgttctgacgacaatgactgtttcaacgacaacgagcgttccaacgacaacgagcattccaacaacaacaagtgttccagtgacaacaactgtctctacctttgttcctccaatgcctttgcccaggcagaaccatgaaccaggtaaaacagatgtgtttggaagcccaaaggccttctaatgaggagctgcggaccatccagggcattgtatcaaggtagaaggacagtctagagtgaggggtcttacctgggtttcaatcagggtctcctcagggtttgtgatcctccccaactcccaagttgtatgcgtcttttgcaccaatgagcatttttggagtgaggggacccattgctttttgtcaattctcaaagaaattgattattaaccaaaaatagctggaccacggatgtagaacatctaacagggatactgtggatctgactcagctaggtatggctttatgatgaaaacacagggaatgccagagaaccaaggtcagataaatgagatagtgtcctcacgaagagctctgaagagagatcatttagtccattctgaaagcagaccttgatttcagagaagttaacatttactgttttctatctaccaggcaccatgcctcatgca

SEQ ID NO: 62411 - DNA, 1002 bp, Homo sapiens
gcacctttcaatacatctgcttttcttttggaaggaggggtatgtctccaaggccctctcctgtcacagtttctagctgggcaatgaccaagattgacagttcaggaagttaactccacctagggacagtctgtcattggtgtgctagggtacagttccagcctgaggctcttgtttcttgtttgacttatgctcactctcatgttgatttctgactccagccaaggtcacgactactccaattgtcacaactgttccaaccgtcacgactgttcgaacgagcaccactgttccaacgacaacgactgttccaatgacgactgttccaacgacaactgttccaacaacaatgagcattccaacgacaacgactgttcygacgacaatgactgtttcaacgacaacgagcgttccaacgacaacgagcattccaacaacaacaagtgttccagtgacaacaactgtctctacctttgttcctccaatgcctttgcccaggcagaaccatgaaccaggtaaaacagatgtgtttggaagcccaaaggccttctaatgaggagctgcggaccatccagggcattgtatcaaggtagaaggacagtctagagtgaggggtcttacctgggtttcaatcagggtctcctcagggtttgtgatcctccccaactcccaagttgtatgcgtcttttgcaccaatgagcatttttggagtgaggggacccattgctttttgtcaattctcaaagaaattgattattaaccaaaaatagctggaccacggatgtagaacatctaacagggatactgtggatctgactcagctaggtatggctttatgatgaaaacacagggaatgccagagaaccaaggtcagataaatgagatagtgtcctcacgaagagctctgaagagagatcatttagtccattctgaaagcagaccttgatttcagagaagttaacatttactgttttctatctaccaggcaccatgcctcatgca

SEQ ID NO: 62412 - DNA, 1002 bp, Homo sapiens
gcacctttcaatacatctgcttttcttttggaaggaggggtatgtctccaaggccctctcctgtcacagtttctagctgggcaatgaccaagattgacagttcaggaagttaactccacctagggacagtctgtcattggtgtgctagggtacagttccagcctgaggctcttgtttcttgtttgacttatgctcactctcatgttgatttctgactccagccaaggtcacgactactccaattgtcacaactgttccaaccgtcacgactgttcgaacgagcaccactgttccaacgacaacgactgttccaatgacgactgttccaacgacaactgttccaacaacaatgagcattccaacgacaacgactgttctgacgacaatgactgtttcaacgacaacgagcgttccaacgacaacgagcattccaacaacaacaagtgttccagtgacaacaackgtctctacctttgttcctccaatgcctttgcccaggcagaaccatgaaccaggtaaaacagatgtgtttggaagcccaaaggccttctaatgaggagctgcggaccatccagggcattgtatcaaggtagaaggacagtctagagtgaggggtcttacctgggtttcaatcagggtctcctcagggtttgtgatcctccccaactcccaagttgtatgcgtcttttgcaccaatgagcatttttggagtgaggggacccattgctttttgtcaattctcaaagaaattgattattaaccaaaaatagctggaccacggatgtagaacatctaacagggatactgtggatctgactcagctaggtatggctttatgatgaaaacacagggaatgccagagaaccaaggtcagataaatgagatagtgtcctcacgaagagctctgaagagagatcatttagtccattctgaaagcagaccttgatttcagagaagttaacatttactgttttctatctaccaggcaccatgcctcatgca

SEQ ID NO: 62413 - DNA, 1002 bp, Homo sapiens
gcacctttcaatacatctgcttttcttttggaaggaggggtatgtctccaaggccctctcctgtcacagtttctagctgggcaatgaccaagattgacagttcaggaagttaactccacctagggacagtctgtcattggtgtgctagggtacagttccagcctgaggctcttgtttcttgtttgacttatgctcactctcatgttgatttctgactccagccaaggtcacgactactccaattgtcacaactgttccaaccgtcacgactgttcgaacgagcaccactgttccaacgacaacgactgttccaatgacgactgttccaacgacaactgttccaacaacaatgagcattccaacgacaacgactgttctgacgacaatgactgtttcaacgacaacgagcgttccaacgacaacgagcattccaacaacaacaagtgttccagtgacaacaactgtctctacctttgttcctccaatgcctttgcccaggcagaaccatgaaccaggtaaaacagatgtgtttggaagcccaaaggccttctaatgaggagctgsggaccatccagggcattgtatcaaggtagaaggacagtctagagtgaggggtcttacctgggtttcaatcagggtctcctcagggtttgtgatcctccccaactcccaagttgtatgcgtcttttgcaccaatgagcatttttggagtgaggggacccattgctttttgtcaattctcaaagaaattgattattaaccaaaaatagctggaccacggatgtagaacatctaacagggatactgtggatctgactcagctaggtatggctttatgatgaaaacacagggaatgccagagaaccaaggtcagataaatgagatagtgtcctcacgaagagctctgaagagagatcatttagtccattctgaaagcagaccttgatttcagagaagttaacatttactgttttctatctaccaggcaccatgcctcatgca

SEQ ID NO: 62414 - DNA, 1002 bp, Homo sapiens
gcacctttcaatacatctgcttttcttttggaaggaggggtatgtctccaaggccctctcctgtcacagtttctagctgggcaatgaccaagattgacagttcaggaagttaactccacctagggacagtctgtcattggtgtgctagggtacagttccagcctgaggctcttgtttcttgtttgacttatgctcactctcatgttgatttctgactccagccaaggtcacgactactccaattgtcacaactgttccaaccgtcacgactgttcgaacgagcaccactgttccaacgacaacgactgttccaatgacgactgttccaacgacaactgttccaacaacaatgagcattccaacgacaacgactgttctgacgacaatgactgtttcaacgacaacgagcgttccaacgacaacgagcattccaacaacaacaagtgttccagtgacaacaactgtctctacctttgttcctccaatgcctttgcccaggcagaaccatgaaccaggtaaaacagatgtgtttggaagcccaaaggccttctaatgaggagctgcggaccatccagggcattgtatcaaggtagaaggacagtctagagtgaggggtcttacctgggtttcaatcagggtctcctcagggtttgtgatcctccccaactcccaagttgtatgcgtcttttgcaccaatgagcatttttggagtgaggggacccattgctttttgtcaattctcaaagaaattgattattaaccaaaaatagctggaccacggatgtagaacatctaacagggatactgtggatctgactcagctaggtatggctttatgatgaaaacacagggaatgccagagaaccaaggtcagataaatgagatwgtgtcctcacgaagagctctgaagagagatcatttagtccattctgaaagcagaccttgatttcagagaagttaacatttactgttttctatctaccaggcaccatgcctcatgca

SEQ ID NO: 62415 - DNA, 608 bp, Homo sapiens
attctgagtaatcaaataaagattcagcaaccatttataagaatattgtatcactgatcattagagaaatgcaaatcaaaaccacaatgagtaccatctcacaccagtcagaatggctaatactaaaacgtcaaaaagtaacaagtgctgatgaggttgcagagaaaaaggaacacttatacactgttggtgggagtgtaaattagtttccgctattgtggaaaactgtgtgactattttttgaagacctaaaaacagaaccatcattcaactcagcaatcccattactgggtatatacccaaagaaacataaattgctgtatcataaagatatatacacacatatgttcattgcaayactgttcataataacaaagacatggaatcaacctaaatgcccatcaatgacagattggataaagaaaatgtgggctgggcacggtggctcatgcctgtaatcccagcactttgggaggctgaggcaggtcaatcacctgaggtcaggaattcgagaccagcttgggcgacatggtgaaaccccatctctactaagaaactacaaaattagtagtgcatgcctgtaatcccagctactcgggaggctgagg

SEQ ID NO: 62416 - DNA, 1297 bp, Homo sapiens
tttcatcaaatcaagtgacacagcagtcttccatgtgtcaggaaggggaagatgatgtaacataaataaaacccagaattgtctaccttattgtagcattgttacctaatatataaatatatagcattttctatgtgacaggctatgagattaagacatatctatatctatttatctaatctttctattcactttattctcacaaagctcctaagtgataggtaatactagaatcccttcttttcaaataaaaaaaagaaacaaaaaccccctgctaatttaatttttttaaacacttatttcaatagatcacataaaatctttttattttcaatatagtccttgtggcagtggcaaccatgagagtgtgcctcttagatcttctacagcaggaagtctaatgggtcaagagctcttacctctgtggtctgaaatcaattgctaggtttgcactgaagccaaattttccaggagctgctcccatccagcaggaagacaggcctgttcctgggagatgccaggactcttctgatggtctgctttgtgtttttttgtttgtttgtttgtttgtttttgagatggagtctcgctctgtcacccaggctggagtgcagtggcacgatctcggctcactgcaacctccacttcccaggttcaagcgattctcctgcctcagcttcccgagtggctgggactataggcgtgcaccaccacacccggctaatttttgtatttttattagagacagggtttcaccatgttggctaggctggtctcgaactcttgacctcaggtgatctgcccgcctcagactcccaaagtactgggattacagrtatgagccaccacgcccagccggtttgctttggtttgaggaccctccagtggtcttgcagacttttcctttgattacacaacagtaaaagttgcttctcccggtccctcctttttccttccttcctgcctgcctaccttcctcctttctttttcccttttcttcactcagaatcagacatgcataatagtcctatggctctcctagcatctcccaactccccatgtttctttcatcagtatttaccctaacaaatatttttcatatttaatcctatcttggcttctgctctttggaggatccagactaacacagggctagtgtattctatatgtgactctgtgtatatatgataataatttgtaatttgtaatacttttgactttaactaatttaacttgtataaaaataatgtatacacataatataaaagttcagtggaacagaaaaaggcttataaca

SEQ ID NO: 62417 - DNA, 586 bp, Homo sapiens
tcaaaactaataaccttttgggaaatctatrtaaataattttccaagtaatttctgaaattctgtgtttctgggaattctatacaattttgaataggacattcattaaaataaaacatacatactgaaaaaggcacaaataataaatgtcacatagactaatttttataatttgaacacagttgtgtaatcagaatccatattatatattgataaaattattttataattaaaatatttatttgtattaacacatctttccaagtgtaaaattacctttgttttggcaattatattttaaagtcaaaagcaaatgctcttcaaaggcaaaataattaaattgctaaaatatagtaagtatacctgcactttcatagtcttgccaaatgcataattgggaaaggtgctttgtgtcagagttaagtgtttgctttagaagtcaatgactaaaatctttttaagatttatcacttgttatctcagaagaaaaatctaccatttctataaggccttatcaaataagctgtaagctatataacacatgtattaacatatagtaatataaataatgataaaaatatgcttat

SEQ ID NO: 62418 - DNA, 588 bp, Homo sapiens
aactacatttttcacttacatctcaatatttgtcctctggagaagcaatgtgagctgagggaaggaggcatccaagacaggaaagaaaaatatcaaaaaattttataggcaatatcaatcactgggtaaagkaataggttctgaatcaacatatatgagctgtgtaacactgggaattttttttcacacctctatactccactttccttatctttgaaatgatctcatagtgatatttaccacatagagcacttgtgagtatgaaatgagtttatatttgtcagtgcataaaacagtatctggcatgtaacaattgctcaaaaaaaaaaaaattggctattaccgggttaattttggtgagaacagctattttgctacaaatataggtaacaatagttaacttcatatatctgaaagaagtcactgttatttttccaaaaattaaaacacctatttttatgtaagatagaatatttaattcagaagactaatcttagctattttgtaagatatatcgccttttaagaataaccaagaggacaatgctttagaaataaatcctattttataaatcttttaaattgaaga

SEQ ID NO: 62419 - DNA, 1633 bp, Homo sapiens
  misc_feature (1)...(1633): n = A,T,C or G
tagtgatgacggttagagtcaagaggttctttagttattaggagttgtttttctgtttttttattttttaagaaggctttaaagttgcataaagattttcagattttaaaggagccagttccaaaaagagaaaaaagaacaattaatgacaaccatgatgacaaataaggatgacagtgactaataccatatttgatgatatgccaggcaccattcaaagcatttcacatatagtttcttatttaaggataagtgcaaatgaatggcatagtgtcattacaattaagtcaggaagtctattacaaaaacgttgatgtctgaaaaaaagaaaaccttactttaggttattttttgaaaccataaaagcaaataaaaaataggtcaataggcacccaaggacaatggtgccattttggaggacacaaaaagccaaaaccgcgtgctgtttaatcttcttttcctcaaggaggtgatttggcggctgtatgganctacnngcatnagaccnnnnnnnnnnnnnnnnnnnnnnnnnnnnnnnnnnnnnnnnnnnnnnnnnnnnnnnnnnnnnnnnnnnnnnnnnnnnnnnnnnnnnnnnnnnnnnnnnnnnatctagtgcatttctatcttaccatgcagcacctctttcctaacttgtgagatcaattcttccatctccttttccttgtgtgttctttgttgtcctggtgactctcagctatcagcacttcaagcacccacttggcagtgggacacatgtggatttcctccccagtctctctcttctttcctgttacgtttttggatctcaggtttagaaagctgaatgaatcatactacccaattcagggtacattacattatgatatttcttcctttttttctcttcttcctttccaacctccctcccatggccsttccctcctctctctcttcttttgccttatccttcatatccattctccttctggcatagttaaccactgatgcacatgcttgaattttcctgtgtccataaatacatgcagtatttttgtgtgcatgatttaaaattttacacagaagctatagtgcttattaacattcttgttttttatacacagctctatgttttaagatgtattttttgttactctgtgaaaatctagtcctgagtctccaaatgctgcatactattgcatattctgtatctactggctttcatatatcctttctgccaaaatgggcctggtgtccttcaacatgctatgcatgccctcatatgaatctgtgttagccgggatatctttctgttcgcttctttcatgacatattcagctaactggttagttcggaaggaaactaacacatgaacttgttctgaaatattaatatggataaacataaaaaatggaaatttggaaagagctcactcttaaatcatcattctccacttgcaaattgtggaaatttgggcaagttatgtaagctcccttgagcctcagcctctctgtcaatcataggtaataaaacctatcgaacaaaattgctgaaagaagaaaagagataatgtatgtagataatctggtacaatttctggaatatggtaggcactcagtgagattgtagctattacacattagctattgcagctaaa

SEQ ID NO: 62420 - DNA, 1633 bp, Homo sapiens
  misc_feature (1)...(1633): n = A,T,C or G
tagtgatgacggttagagtcaagaggttctttagttattaggagttgtttttctgtttttttattttttaagaaggctttaaagttgcataaagattttcagattttaaaggagccagttccaaaaagagaaaaaagaacaattaatgacaaccatgatgacaaataaggatgacagtgactaataccatatttgatgatatgccaggcaccattcaaagcatttcacatatagtttcttatttaaggataagtgcaaatgaatggcatagtgtcattacaattaagtcaggaagtctattacaaaaacgttgatgtctgaaaaaaagaaaaccttactttaggttattttttgaaaccataaaagcaaataaaaaataggtcaataggcacccaaggacaatggtgccattttggaggacacaaaaagccaaaaccgcgtgctgtttaatcttcttttcctcaaggaggtgatttggcggctgtatgganctacnngcatnagaccnnnnnnnnnnnnnnnnnnnnnnnnnnnnnnnnnnnnnnnnnnnnnnnnnnnnnnnnnnnnnnnnnnnnnnnnnnnnnnnnnnnnnnnnnnnnnnnnnnnnatctagtgcatttctatcttaccatgcagcacctctttcctaacttgtgagatcaattcttccatctccttttccttgtgtgttctttgttgtcctggtgactctcagctatcagcacttcaagcacccacttggcagtgggacacatgtggatttcctccccagtctctctcttctttcctgttacgtttttggatctcaggtttagaaagctgaatgaatcatactacccaattcagggtacattacattatgatatttcttcctttttttctcttcttcctttccaacctccctcccatggcccttccctcctctctctcttcttttgccttatccttcatatccattctccttctggcatagttaaccactgakgcacatgcttgaattttcctgtgtccataaatacatgcagtatttttgtgtgcatgatttaaaattttacacagaagctatagtgcttattaacattcttgttttttatacacagctctatgttttaagatgtattttttgttactctgtgaaaatctagtcctgagtctccaaatgctgcatactattgcatattctgtatctactggctttcatatatcctttctgccaaaatgggcctggtgtccttcaacatgctatgcatgccctcatatgaatctgtgttagccgggatatctttctgttcgcttctttcatgacatattcagctaactggttagttcggaaggaaactaacacatgaacttgttctgaaatattaatatggataaacataaaaaatggaaatttggaaagagctcactcttaaatcatcattctccacttgcaaattgtggaaatttgggcaagttatgtaagctcccttgagcctcagcctctctgtcaatcataggtaataaaacctatcgaacaaaattgctgaaagaagaaaagagataatgtatgtagataatctggtacaatttctggaatatggtaggcactcagtgagattgtagctattacacattagctattgcagctaaa

SEQ ID NO: 62421 - DNA, 1633 bp, Homo sapiens
  misc_feature (1)...(1633): n = A,T,C or G
tagtgatgacggttagagtcaagaggttctttagttattaggagttgtttttctgtttttttattttttaagaaggctttaaagttgcataaagattttcagattttaaaggagccagttccaaaaagagaaaaaagaacaattaatgacaaccatgatgacaaataaggatgacagtgactaataccatatttgatgatatgccaggcaccattcaaagcatttcacatatagtttcttatttaaggataagtgcaaatgaatggcatagtgtcattacaattaagtcaggaagtctattacaaaaacgttgatgtctgaaaaaaagaaaaccttactttaggttattttttgaaaccataaaagcaaataaaaaataggtcaataggcacccaaggacaatggtgccattttggaggacacaaaaagccaaaaccgcgtgctgtttaatcttcttttcctcaaggaggtgatttggcggctgtatgganctacnngcatnagaccnnnnnnnnnnnnnnnnnnnnnnnnnnnnnnnnnnnnnnnnnnnnnnnnnnnnnnnnnnnnnnnnnnnnnnnnnnnnnnnnnnnnnnnnnnnnnnnnnnnnatctagtgcatttctatcttaccatgcagcacctctttcctaacttgtgagatcaattcttccatctccttttccttgtgtgttctttgttgtcctggtgactctcagctatcagcacttcaagcacccacttggcagtgggacacatgtggatttcctccccagtctctctcttctttcctgttacgtttttggatctcaggtttagaaagctgaatgaatcatactacccaattcagggtacattacattatgatatttcttcctttttttctcttcttcctttccaacctccctcccatggcccttccctcctctctctcttcttttgccttatccttcatatccattctccttctggcatagttaaccactgatgcacatgcttgaattttcctgtgtccataaatacatgcagtatttttgtgtgcatgatttaaaattttacacagaagctatagtgcttattaacattcttgttttttatacacagctctatgttttaagatgtattttttgttactctgtgaaaatctagtcctgagtctccaaatgctgcatactattgcatattctgtatctactggctttcatatatcctttctgccaaaatgggcctggtgtccwtcaacatgctatgcatgccctcatatgaatctgtgttagccgggatatctttctgttcgcttctttcatgacatattcagctaactggttagttcggaaggaaactaacacatgaacttgttctgaaatattaatatggataaacataaaaaatggaaatttggaaagagctcactcttaaatcatcattctccacttgcaaattgtggaaatttgggcaagttatgtaagctcccttgagcctcagcctctctgtcaatcataggtaataaaacctatcgaacaaaattgctgaaagaagaaaagagataatgtatgtagataatctggtacaatttctggaatatggtaggcactcagtgagattgtagctattacacattagctattgcagctaaa

SEQ ID NO: 62422 - DNA, 855 bp, Homo sapiens
tcgagaatttagaataaaattctccgtgtcttttacttttctttggtgagttggttagctaattagcttaaagctagttcgagcagatgctgtataactcccagattcccctgtaggatagagatactcactcccctagctgccaagaatgttgaccctgctgaaagctcatagcggaattcctcccaagaaatcacccttagttgaataaagctgcttcatccaaggttatgtctctcccagggacagtccacttccagtgactggtcagtgtaggtatgtaaaggccagcctgcttgttccatttaggatgtctcagaaaggccatctcaacctcaaatctctccatggcattgtttgagaagtccaatattggcatcsctttgcaggttaacctctccctctgtgcaattctgctctgtgtgtgtgtgtgtgtgtgtgtgtgtgtgtgtgtgtgtgtgtgtgtctcaaatgtgttattcctgataacattctccaatacacaactacatataaaactccatctcagagtctatttccctgacagcttgacctaggacaattagtacaatagtgacccatggagccactaaaatagattttgaaactgaattcccaaatagctggtaggtaatgattatgagtggagtagtaataggccccagccactagtgttgaattgttaaaacttttactgatagtgaacgggagtgggatctgtggtgaaaggaaatacactggcaggtgtaatatcccaggcatgtgggaggttcagggcaagtgataatgaaaagcgtactgcgttggatgatttctgctaaggactaggagtgcattaaagaaagttaacttaaa

SEQ ID NO: 62423 - DNA, 1036 bp, Homo sapiens
gtgtccccacacaaatctcatcttgaattgtagtttccacaatccccacgtgtaatgggaggaccctggtgggaggtaactgaatcatggggatggttacctccatgctgttctcatgatagtgagttctcacgagatctgatggttttataaaggacttctccccctcttcaatctgcacttctccttgctactgccatgtgaagaaggacgtgtttgcttccccttccatcaagattgtaagtttcctgaggccctgctgaactgtgagtcaattaaacctctttcctttataaattaccccatctcaggtgtgtctttattagcagtgtgggaatggactaatacactgaagtactcaaatccagtagatctatttattagaaggcattttaagactctatggtttcaaatatgagtcccaatcaaagtcacaagggtagtctctcagaatctgtaatcaacaggcttcttacatgggcaactgtatatttaacaatggttaatagttttcctgagcaatgtggctaaaggcaaacatactgtttgtacatgtcttagatcttatgtgtaaataactgttgcttatatatttcaaacaagaacccttacacatcctaacaaaacatcactccaaagaactaatcaactttgagatttagattaccccaaataaggatccctgttaggatcacaggaggtggtaataagaaagaatgaaacttcatccctagtctctacaggactatactacagttactcaataagcattgttggtttctcttgggagcccagtgtgagggcaccaaatacacatcatcagagtcccagactgtggctgtccgtaattgaacactcttgacctaagcatcagagggatttaattctgtgccatccaaggagcagcaacttaaaactactcgtatttggcttctctgatkttgactaggggagttgtttattggttagttgttggtgattggttgcttttttcctttctttgttttggtttgggttttttgttgttgttgtgctg

SEQ ID NO: 62424 - DNA, 1343 bp, Homo sapiens
gactttggtggtagtgtctttttttttgtttttctttcaaataaaaaattaagtacatgatctcaatcactgagatccaacctcaaaattctctgattcagtcattaactctataaggcattactataaagtaatgaaacacaagccacatctgaaaattgttctcacctgtaatatcttacaaatattctgtacataaaatgtacggaatggattcagcccatttatatggtaggtttggaaatatggatttgtaaatacttcttgctaggcttacaatatccgtaaataccatataaatatatttctttcctcattaagaaatttgcatcaaaagctcttgagtacaatataccatttgttccattagtgagtatgaccaatttaatggttttatttaatgtagggaatgtgagagtagaaaaaagatagtgcaggtgtattcattttcttcccttacagaattaatgtttcttttagctcaatcatctgttccacggcagagaaagaacttgattctctctcacatctggatgtctttatcctgatgaaaactgtaattaatactgcaacccaaactcccattttcacggggacccagtgctcttagttgtttcctggtggtgccactcgcctagcagtccctggtgaagggggaagcaggagctcagaggaggcataaagagccttcccagtcagtgtcgctctagtgcccttgagccccttgtgtccctcactgtcatgagaacgcagctctggcctggagaggatgacaaggttgggcaggtttttcttctgtgagtctcctcgctcatcagggaaacatgactctccagtccctctgaaacacttgcaggtgtgtaaggtgaaaagtccggraggtgagcaggactagaaagcacccgagatcaaggcatacagaaaaggggagtgaaagggcaagaagtgccagttcacaggcttgtaatcaaaacaaaaatcttctccaggttgagactttgacagctctggcactttgttcactgaggctgcaccctttgatcctgctgggtgagctgtggtgggcactgagatgtaccaggtctcggactctgagacaaaaactgaggggtctgcaaccctttctgggcctttatttttgtcggttaaaaggcagaaaactatctaaggaagccattagctttttttgaaataaaaatataaccttttcttcagttatgaaagtaacatgctccttatagaaaattctgtaaatacagaaaaatgcaaagaagaaaatagaaatcacccagagataaacattgttactattgtgaagtgttttcttccatcatctatttccc

SEQ ID NO: 62425 - DNA, 2127 bp, Homo sapiens
tgctgacttgagtcacagagccctgtaataaacaggctactcaggggtgtcagtcccctccacacatctggttgagacagttccatctagttctgatcagttttattaaataagcttgtgctgtggggctgttttttcctttgtgaactggcatttccagaatgggttaccacgctggtggtggccctagctgatgggcttgaaggggaggcattcatcttgtcccatcgcggctcacttagctgagacctctgcaggagcttacacgcgggccagcagaatcgcaagtagttctcccaccacccgaggttttatcattgctaagctactgcaagattattgtaattgaaatggttctcaggcttctggggttctttctctctatctctctctctctctctctttctctctcttttttctagcctgtgactcacatttttttctaaggcattgtatcagtggcctttgcaggctgctcaagggatccagacttttgcatttattgaacatgtcaggcattcattaagtactgcaccatcagggagaatttccctgctattaagcgtcgactccagccaaatcagattcacctgggcgtttctcaaagaaaagcctgtcagcatgataatggtttgaacagggctgagctgtatggttgaagtgcgacagggcagaagacaggctgtggtgaccccagagttggtctgtaactcacagaggaatcacacagtggagaggcttcggaaaatcagaaatctgactgtcacaggtagcggggcaagctgcctgatgatgcacttcaggaaggctcagcaggagggtggggaggatggaaaaacccgtaactgagcagctagaaaattaaggcaaggaaaccgtaagtctgccctccagactgccacggttttatgtttgagactgaggtcactcccccagggaaaacaagaggaactgagaggtgagagtaggggagaaacacccctcactcaccccttgaataaaaactttggtgtcagtagcatcctgtactaatgtttattgagcatttattgtgtatcatacttcattccaagaagtgaagatatattctttaatttttacaactattctatgaagtacgcatatctatgttttacaggtgaggaaactgaggccgggaagttaaatggcttgccctaggtcacccagctagtaaggtggaggagctaggattcagggccatgccacgcctccagataccacaaccttagtggctttactatgtggttttccattccactgggctgacacccaagaagccacaggtactcactgtggcccatgcccagctttctgtcaaacattcctcaagttcaagggcaatgccttttcccctcctcccctgcccccaaaacgtgtcctccaaatggcccagctgagaaagcggggaaatttctagaaatatttgcataaactttgggtgaaagtggaaaccccaccaacacccatcctccatcctccccactctgctgcctatgtctgccaggctgaggatcctcaccccggtgcgggacggccatgtggccattcagagttcttcctacccccatccaactttgcagtgctgttggttgcttcagagcttgaggatctctggacagayaggatttgctctcaggtttcacattgcttccttccttcaggctggacaattagaaatgggtaggagggtagtaaaatggatgcgatgaactattccttccaggcaggcagcccaagctgttggccctcttctttccatttggacttggagcaagtccttcagtggggttagttactaggagccatgtcagctgaccctcactcctttaagactttcccaccttcatgctcacctgtacataagttctttgtcactttctgatgaagtctgagcctccaaattccaaagctaaagtgtagttagcccctaccatttcctgtttagacagggcaagatggcacccagcagaggagagagcggacatatatgtggacaatgcccttatcccctggggggcttgcataacaagggcgaaagccctccctctttctcaaagtcatgctgaggctggacctcaataactgagaaagaagagtgatggggag

SEQ ID NO: 62426 - DNA, 2127 bp, Homo sapiens
tgctgacttgagtcacagagccctgtaataaacaggctactcaggggtgtcagtcccctccacacatctggttgagacagttccatctagttctgatcagttttattaaataagcttgtgctgtggggctgttttttcctttgtgaactggcatttccagaatgggttaccacgctggtggtggccctagctgatgggcttgaaggggaggcattcatcttgtcccatcgcggctcacttagctgagacctctgcaggagcttacacgcgggccagcagaatcgcaagtagttctcccaccacccgaggttttatcattgctaagctactgcaagattattgtaattgaaatggttctcaggcttctggggttctttctctctatctctctctctctctctctttctctctcttttttctagcctgtgactcacatttttttctaaggcattgtatcagtggcctttgcaggctgctcaagggatccagacttttgcatttattgaacatgtcaggcattcattaagtactgcaccatcagggagaatttccctgctattaagcgtcgactccagccaaatcagattcacctgggcgtttctcaaagaaaagcctgtcagcatgataatggtttgaacagggctgagctgtatggttgaagtgcgacagggcagaagacaggctgtggtgaccccagagttggtctgtaactcacagaggaatcacacagtggagaggcttcggaaaatcagaaatctgactgtcacaggtagcggggcaagctgcctgatgatgcacttcaggaaggctcagcaggagggtggggaggatggaaaaacccgtaactgagcagctagaaaattaaggcaaggaaaccgtaagtctgccctccagactgccacggttttatgtttgagactgaggtcactcccccagggaaaacaagaggaactgagaggtgagagtaggggagaaacacccctcactcaccccttgaataaaaactttggtgtcagtagcatcctgtactaatgtttattgagcatttattgtgtatcatacttcattccaagaagtgaagatatattctttaatttttacaactattctatgaagtacgcatatctatgttttacaggtgaggaaactgaggccgggaagttaaatggcttgccctaggtcacccagctagtaaggtggaggagctaggattcagggccatgccacgcctccagataccacaaccttagtggctttactatgtggttttccattccactgggctgacacccaagaagccacaggtactcactgtggcccatgcccagctttctgtcaaacattcctcaagttcaagggcaatgccttttcccctcctcccctgcccccaaaacgtgtcctccaaatggcccagctgagaaagcggggaaatttctagaaatatttgcataaactttgggtgaaagtggaaaccccaccaacacccatcctccatcctccccactctgctgcctatgtctgccaggctgaggatcctcaccccggtgcgggacggccatgtggccattcagagttcttcctacccccatccaactttgcagtgctgttggttgcttcagagcttgaggatctctggacagacaggatttgctctcaggtttcacattgcttccttccttcaggctggacaattagaaatgggtaggagggtagtaaaatggatgcgatgaactattccttccaggcaggcagcccaagctgttggccctcttctttccatttggacttggagcaagtccttcagtggggttagttactaggagccatgtcagctgaccctcactcctttaagactttcccaccttcatgctcacctgtacataagttctttgtcactttctgatgaagtctgagcctccaaattccaaagctaaagtgtagttagcccctaccatttcctgtttagacagggcaagatggcacccagcagaggagagagmggacatatatgtggacaatgcccttatcccctggggggcttgcataacaagggcgaaagccctccctctttctcaaagtcatgctgaggctggacctcaataactgagaaagaagagtgatggggag

SEQ ID NO: 62427 - DNA, 433 bp, Homo sapiens
tttccgcatatccagacacttcctgtttgcagctcgatgtgctgatgagatacttttaacacgaatcctgagggcagtggaccttagaaaaattatcatctacaattgtrtgttaaattgctaagtaattaagatgtaagatctagaaaatcacatacaatttatttccaacagctgaaattagaactttctaaataaaagctaaccatacaacccaagggtttaacaagtcagagtctgtttgggaaagccagcgtgtgtgtccccgagaggtggattgcaatcagtaataaaggcatgagtccagccctgtcagatctgtctgacagcccctactgcactctgtcagaatctccgcatggggatgggtcaggttgcagatggtgacagcatcatccgaaagtctatgagaaagtgaaggtaacacaaagcc

SEQ ID NO: 62428 - DNA, 433 bp, Homo sapiens
tttccgcatatccagacacttcctgtttgcagctcgatgtgctgatgagatacttttaacacgaatcctgagggcagtggaccttagaaaaattatcatctacaattgtgtgttaaattgctaagtaattaagatgtaagatctagaaaatcacatacaatttatttccaacagctgaaattagaactttctaaataaaagctaaccatacaacccaagggtttaacaagtcagagtctgtttgggaaagccagcgtgtgtgtccccgagaggtggattgcaatcagtaataaaggcatgagtccagccctgtcagatctgtctgacagccccyactgcactctgtcagaatctccgcatggggatgggtcaggttgcagatggtgacagcatcatccgaaagtctatgagaaagtgaaggtaacacaaagcc

SEQ ID NO: 62429 - DNA, 1013 bp, Homo sapiens
atgtgctggcctcacaagtgcagacgcagtgtcaggcaaattcaggctcgattctggactcagggactcygtgatcccccacctgtctccacctggagctcagctctgccttccttagcagtgtggatcccgggggtcatgggatcactgctgtctgcaccgggcctccttctcctctcctttgagttaggcgaggacagagggtgatgtttatgggatctgttttaaaaaagaaaggtttcctagtcatgtcaacaaaggactggatccagaggggccagggcaaggccctgaagcagagacaactggtggggatggattacaggctctgctggtcgcctgtgcccagggctggagggtgctgcaggtggaggaaaagtaccaagggaagaagtggcaatttcccaccctgcaggggagcacggcggctggtggtaacgcagggagcacggcggctggccgtaacgcagggagcactacagctggcggtaatgcagggagcacggcggctggcggtaacgcagggagcactacagctggcggtaatgcagggagcacggcggctggcggtaacgcagggagcacggcggctggcggtaacgcagggagcactacagctggcggtaacgcagggagcactacagctggcggtaatgcagggagcacggcggctggcggtaatgagtgcttgagccggaatcagaactgcacctgcagaaagctcagtgcttgttcacttcatcaccacgacgaagacacctgtgaaacttctggaagctatctgttaaaccagatccttataagttcagaaatgtaaagggaaggagacccttacagagaaccaatgggttactaagtaacagtaacaaataaccaaagctgattaagctgattctcacgggcaaggcttccctgtcgccgtaaatacacaccaattagcttttccagagaggcccgggatccacttgggatggctttcagtgtcaagagagggtggagacacatcacagaga

SEQ ID NO: 62430 - DNA, 1013 bp, Homo sapiens
atgtgctggcctcacaagtgcagacgcagtgtcaggcaaattcaggctcgattctggactcagggactctgtgatcccccacctgtctccacctggagctcagctctgccttccttagcagtgtggakcccgggggtcatgggatcactgctgtctgcaccgggcctccttctcctctcctttgagttaggcgaggacagagggtgatgtttatgggatctgttttaaaaaagaaaggtttcctagtcatgtcaacaaaggactggatccagaggggccagggcaaggccctgaagcagagacaactggtggggatggattacaggctctgctggtcgcctgtgcccagggctggagggtgctgcaggtggaggaaaagtaccaagggaagaagtggcaatttcccaccctgcaggggagcacggcggctggtggtaacgcagggagcacggcggctggccgtaacgcagggagcactacagctggcggtaatgcagggagcacggcggctggcggtaacgcagggagcactacagctggcggtaatgcagggagcacggcggctggcggtaacgcagggagcacggcggctggcggtaacgcagggagcactacagctggcggtaacgcagggagcactacagctggcggtaatgcagggagcacggcggctggcggtaatgagtgcttgagccggaatcagaactgcacctgcagaaagctcagtgcttgttcacttcatcaccacgacgaagacacctgtgaaacttctggaagctatctgttaaaccagatccttataagttcagaaatgtaaagggaaggagacccttacagagaaccaatgggttactaagtaacagtaacaaataaccaaagctgattaagctgattctcacgggcaaggcttccctgtcgccgtaaatacacaccaattagcttttccagagaggcccgggatccacttgggatggctttcagtgtcaagagagggtggagacacatcacagaga

SEQ ID NO: 62431 - DNA, 713 bp, Homo sapiens
ttatttttaccataaaaattaaaaaaattgtaattgcatttttaaatatttcattgcttttgaattttcaatcataaaagtttatctccactcctatgttagggtggaatcaatcacatgcttctggcaaattaagatctctcataaatttacagttctttctatttttatgtttttatagacagggtctcactctgctgcctaggctgcaatgcggtggcacgaccatggctcagtgcgtcctcaactcctgggctcaagtgatcctcccacctcggcctcctgagtagctgggactacagttgcacaccaccagatccgactaatttgcagttctgtccggcgtacagtgtgagatgggaatcaacttttgtcttcatccagatggtaaattaaatgttatttatgaaaaatccattgcttaaggtagtgatctgagaagcgaastttaccaatggctcaatagcgatttgagaagcgaactttaccgatgactcaatgcgtgttttactttggtcctgggctttctactctcacctcatgtctggtctgtatggcgggtctgacaccgtgggatgcagagatacaaatctgcctgcctgtcgcctcctctcatggaaacggtgcatagctcgcctttcatgatttataaagtcaaagcctttttaacttaggtaactattattaaaggtaaagtgttgtcaaaattacag

SEQ ID NO: 62432 - DNA, 2109 bp, Homo sapiens
  misc_feature (1)...(2109): n = A,T,C or G
aacatgtgcccgccacttggaagacaaagaaactgctctaccctcagagaaaatctgcctgggtgctgtcttcccctcagagattctctcccaacctcataacatctcttttcatcctcctgccacaaggaagctagatgcattgtttacattttcctaagagttaagcattaagttcatagtgtaaattactctccttcctttctgatatgctgaaaygtatccttctgcatacagtcttatgtgtgcctgtggtaatgaagactctgacaatgaagtgtgcccctggaatacatcgtcttcgttaataataaatacctgaagacacaatagcttagttcattaaatatatgcatataggtctgttattttaaagggaatagacctttagcagaaatttatttaaatacccttgcattgaatggactgtatgctccttttgagaggtttgtaaatgcatttgaagcagtaatgcataaaggcttgacactggatcctaccacatgaagcctaaaacaattggtcacattcagctcttcaaatatatttttggcattaacaatagtctgagtgatttagttaaccattcaaggttgcatttcagtaaagcttgaataatcattgcttaaattaagaactgtcagatacctgtaagctcagcactttggaaggccgaggtgagtggatcacttgaggtcaggaattcgagaccagcctggccaacatagtaaaaacccctctctactaaaagtacaaaaattagccgggcatagtggcacatgcctgtaatcccagctactcaggaggctgaggcaagggaatcacttaaacctgggaggtggaggttgctgtgagctgagattacaccactgtactctagcctggacaacagagtgagactctgtctcaaaaataaaataaaataaaataaaatataaattaaaaaaaatactatcagataaagatgaagaagagaccaaacccagattaaataataaagggaaggaatgaagaagtaaaagcaagtgaaaggttcacaggatgaaaaatgtatagaaagcataatgaggccaacgtcttattgaggagagctgtgatactgaacaagactgacccttatattgattgcaaactgtattaaaattactcagaaaagaaaactgcatatggtgtacctatctcaccgtccagatggtaagtggtgcagccgggatttcagtacagatctgagttgagaagccgtggtcttgtcactatatgcaaaacctcctctgccatatgcataggaaaaggcatttcccctggctttttcttttcttttcttttcttttcttttagttttctttgttttagggaacaaaataataccttggggaccttctctccaccaaactaacataaatatttagctttcctaaatgtcaattgggacaaatggtgaaccatgaatatttccactggtaggtgactgacagcccaggcagggccttgacgcagaggctgaccagactgtccttgaactcctaggagccgaggtgacgtacatgaacatgaccgcttacaacaagggccggctgcagtcctccttctggatcgtggacaaacagcacgtgtatatcggcagtgccggtttggactggcaatccctgggacaggtaagctttctacgttatgtaaactcaatgttctgtcaccctcaaagcgaccaccttcataaagcacgctactgcagataaggatcctaaaacctacagcatttattattcttaactgtagttttaagaggctcatcttccttttatgtgaaaggataaacctttgcttgtcaggatcatcttacaaaaaaaagtaaaaactgttattgcttcaatgcttttgtaattcataggctgctcccagattcctgagagcaggttgctatgtaattgacatcacccagacctatattttcaggatgatattacatcatctatgagacagggggaaacacaaaaattcagtaaagagtaatatgtcttaggatagtaatcatttgggttatntctttaatctaagatgaagatgtatctttctcttaacaatgattaactgcaatatgttgaaatacat

SEQ ID NO: 62433 - DNA, 2109 bp, Homo sapiens
  misc_feature (1)...(2109): n = A,T,C or G
aacatgtgcccgccacttggaagacaaagaaactgctctaccctcagagaaaatctgcctgggtgctgtcttcccctcagagattctctcccaacctcataacatctcttttcatcctcctgccacaaggaagctagatgcattgtttacattttcctaagagttaagcattaagttcatagtgtaaattactctccttcctttctgatatgctgaaatgtatccttctgcrtacagtcttatgtgtgcctgtggtaatgaagactctgacaatgaagtgtgcccctggaatacatcgtcttcgttaataataaatacctgaagacacaatagcttagttcattaaatatatgcatataggtctgttattttaaagggaatagacctttagcagaaatttatttaaatacccttgcattgaatggactgtatgctccttttgagaggtttgtaaatgcatttgaagcagtaatgcataaaggcttgacactggatcctaccacatgaagcctaaaacaattggtcacattcagctcttcaaatatatttttggcattaacaatagtctgagtgatttagttaaccattcaaggttgcatttcagtaaagcttgaataatcattgcttaaattaagaactgtcagatacctgtaagctcagcactttggaaggccgaggtgagtggatcacttgaggtcaggaattcgagaccagcctggccaacatagtaaaaacccctctctactaaaagtacaaaaattagccgggcatagtggcacatgcctgtaatcccagctactcaggaggctgaggcaagggaatcacttaaacctgggaggtggaggttgctgtgagctgagattacaccactgtactctagcctggacaacagagtgagactctgtctcaaaaataaaataaaataaaataaaatataaattaaaaaaaatactatcagataaagatgaagaagagaccaaacccagattaaataataaagggaaggaatgaagaagtaaaagcaagtgaaaggttcacaggatgaaaaatgtatagaaagcataatgaggccaacgtcttattgaggagagctgtgatactgaacaagactgacccttatattgattgcaaactgtattaaaattactcagaaaagaaaactgcatatggtgtacctatctcaccgtccagatggtaagtggtgcagccgggatttcagtacagatctgagttgagaagccgtggtcttgtcactatatgcaaaacctcctctgccatatgcataggaaaaggcatttcccctggctttttcttttcttttcttttcttttcttttagttttctttgttttagggaacaaaataataccttggggaccttctctccaccaaactaacataaatatttagctttcctaaatgtcaattgggacaaatggtgaaccatgaatatttccactggtaggtgactgacagcccaggcagggccttgacgcagaggctgaccagactgtccttgaactcctaggagccgaggtgacgtacatgaacatgaccgcttacaacaagggccggctgcagtcctccttctggatcgtggacaaacagcacgtgtatatcggcagtgccggtttggactggcaatccctgggacaggtaagctttctacgttatgtaaactcaatgttctgtcaccctcaaagcgaccaccttcataaagcacgctactgcagataaggatcctaaaacctacagcatttattattcttaactgtagttttaagaggctcatcttccttttatgtgaaaggataaacctttgcttgtcaggatcatcttacaaaaaaaagtaaaaactgttattgcttcaatgcttttgtaattcataggctgctcccagattcctgagagcaggttgctatgtaattgacatcacccagacctatattttcaggatgatattacatcatctatgagacagggggaaacacaaaaattcagtaaagagtaatatgtcttaggatagtaatcatttgggttatntctttaatctaagatgaagatgtatctttctcttaacaatgattaactgcaatatgttgaaatacat

SEQ ID NO: 62434 - DNA, 2109 bp, Homo sapiens
  misc_feature (1)...(2109): n = A,T,C or G
aacatgtgcccgccacttggaagacaaagaaactgctctaccctcagagaaaatctgcctgggtgctgtcttcccctcagagattctctcccaacctcataacatctcttttcatcctcctgccacaaggaagctagatgcattgtttacattttcctaagagttaagcattaagttcatagtgtaaattactctccttcctttctgatatgctgaaatgtatccttctgcatacagtcttatgtgtgcctgtggtaatgaagactctgacaatgaagtgtgcccctggaatacatcgtcttcgttaataataaatacctgaagacacaatagcttagttcattaaatatatgcatatargtctgttattttaaagggaatagacctttagcagaaatttatttaaatacccttgcattgaatggactgtatgctccttttgagaggtttgtaaatgcatttgaagcagtaatgcataaaggcttgacactggatcctaccacatgaagcctaaaacaattggtcacattcagctcttcaaatatatttttggcattaacaatagtctgagtgatttagttaaccattcaaggttgcatttcagtaaagcttgaataatcattgcttaaattaagaactgtcagatacctgtaagctcagcactttggaaggccgaggtgagtggatcacttgaggtcaggaattcgagaccagcctggccaacatagtaaaaacccctctctactaaaagtacaaaaattagccgggcatagtggcacatgcctgtaatcccagctactcaggaggctgaggcaagggaatcacttaaacctgggaggtggaggttgctgtgagctgagattacaccactgtactctagcctggacaacagagtgagactctgtctcaaaaataaaataaaataaaataaaatataaattaaaaaaaatactatcagataaagatgaagaagagaccaaacccagattaaataataaagggaaggaatgaagaagtaaaagcaagtgaaaggttcacaggatgaaaaatgtatagaaagcataatgaggccaacgtcttattgaggagagctgtgatactgaacaagactgacccttatattgattgcaaactgtattaaaattactcagaaaagaaaactgcatatggtgtacctatctcaccgtccagatggtaagtggtgcagccgggatttcagtacagatctgagttgagaagccgtggtcttgtcactatatgcaaaacctcctctgccatatgcataggaaaaggcatttcccctggctttttcttttcttttcttttcttttcttttagttttctttgttttagggaacaaaataataccttggggaccttctctccaccaaactaacataaatatttagctttcctaaatgtcaattgggacaaatggtgaaccatgaatatttccactggtaggtgactgacagcccaggcagggccttgacgcagaggctgaccagactgtccttgaactcctaggagccgaggtgacgtacatgaacatgaccgcttacaacaagggccggctgcagtcctccttctggatcgtggacaaacagcacgtgtatatcggcagtgccggtttggactggcaatccctgggacaggtaagctttctacgttatgtaaactcaatgttctgtcaccctcaaagcgaccaccttcataaagcacgctactgcagataaggatcctaaaacctacagcatttattattcttaactgtagttttaagaggctcatcttccttttatgtgaaaggataaacctttgcttgtcaggatcatcttacaaaaaaaagtaaaaactgttattgcttcaatgcttttgtaattcataggctgctcccagattcctgagagcaggttgctatgtaattgacatcacccagacctatattttcaggatgatattacatcatctatgagacagggggaaacacaaaaattcagtaaagagtaatatgtcttaggatagtaatcatttgggttatntctttaatctaagatgaagatgtatctttctcttaacaatgattaactgcaatatgttgaaatacat

SEQ ID NO: 62435 - DNA, 2109 bp, Homo sapiens
  misc_feature (1)...(2109): n = A,T,C or G
aacatgtgcccgccacttggaagacaaagaaactgctctaccctcagagaaaatctgcctgggtgctgtcttcccctcagagattctctcccaacctcataacatctcttttcatcctcctgccacaaggaagctagatgcattgtttacattttcctaagagttaagcattaagttcatagtgtaaattactctccttcctttctgatatgctgaaatgtatccttctgcatacagtcttatgtgtgcctgtggtaatgaagactctgacaatgaagtgtgcccctggaatacatcgtcttcgttaataataaatacctgaagacacaatagcttagttcattaaatatatgcatataggtctgttattttaaagggaatagacctttagcagaaatttatttaaatacccttgcattgaatggactgtatgctccttttgagargtttgtaaatgcatttgaagcagtaatgcataaaggcttgacactggatcctaccacatgaagcctaaaacaattggtcacattcagctcttcaaatatatttttggcattaacaatagtctgagtgatttagttaaccattcaaggttgcatttcagtaaagcttgaataatcattgcttaaattaagaactgtcagatacctgtaagctcagcactttggaaggccgaggtgagtggatcacttgaggtcaggaattcgagaccagcctggccaacatagtaaaaacccctctctactaaaagtacaaaaattagccgggcatagtggcacatgcctgtaatcccagctactcaggaggctgaggcaagggaatcacttaaacctgggaggtggaggttgctgtgagctgagattacaccactgtactctagcctggacaacagagtgagactctgtctcaaaaataaaataaaataaaataaaatataaattaaaaaaaatactatcagataaagatgaagaagagaccaaacccagattaaataataaagggaaggaatgaagaagtaaaagcaagtgaaaggttcacaggatgaaaaatgtatagaaagcataatgaggccaacgtcttattgaggagagctgtgatactgaacaagactgacccttatattgattgcaaactgtattaaaattactcagaaaagaaaactgcatatggtgtacctatctcaccgtccagatggtaagtggtgcagccgggatttcagtacagatctgagttgagaagccgtggtcttgtcactatatgcaaaacctcctctgccatatgcataggaaaaggcatttcccctggctttttcttttcttttcttttcttttcttttagttttctttgttttagggaacaaaataataccttggggaccttctctccaccaaactaacataaatatttagctttcctaaatgtcaattgggacaaatggtgaaccatgaatatttccactggtaggtgactgacagcccaggcagggccttgacgcagaggctgaccagactgtccttgaactcctaggagccgaggtgacgtacatgaacatgaccgcttacaacaagggccggctgcagtcctccttctggatcgtggacaaacagcacgtgtatatcggcagtgccggtttggactggcaatccctgggacaggtaagctttctacgttatgtaaactcaatgttctgtcaccctcaaagcgaccaccttcataaagcacgctactgcagataaggatcctaaaacctacagcatttattattcttaactgtagttttaagaggctcatcttccttttatgtgaaaggataaacctttgcttgtcaggatcatcttacaaaaaaaagtaaaaactgttattgcttcaatgcttttgtaattcataggctgctcccagattcctgagagcaggttgctatgtaattgacatcacccagacctatattttcaggatgatattacatcatctatgagacagggggaaacacaaaaattcagtaaagagtaatatgtcttaggatagtaatcatttgggttatntctttaatctaagatgaagatgtatctttctcttaacaatgattaactgcaatatgttgaaatacat

SEQ ID NO: 62436 - DNA, 2109 bp, Homo sapiens
  misc_feature (1)...(2109): n = A,T,C or G
aacatgtgcccgccacttggaagacaaagaaactgctctaccctcagagaaaatctgcctgggtgctgtcttcccctcagagattctctcccaacctcataacatctcttttcatcctcctgccacaaggaagctagatgcattgtttacattttcctaagagttaagcattaagttcatagtgtaaattactctccttcctttctgatatgctgaaatgtatccttctgcatacagtcttatgtgtgcctgtggtaatgaagactctgacaatgaagtgtgcccctggaatacatcgtcttcgttaataataaatacctgaagacacaatagcttagttcattaaatatatgcatataggtctgttattttaaagggaatagacctttagcagaaatttatttaaatacccttgcattgaatggactgtatgctccttttgagaggtttgtaaatgcatttgaagcagtaatgcataaaggcttgacactggatcctaccacatgaagcctaaaacaattggtcacattcagctcttcaaatatatttttggcattaacaatagtctgagtgatttagttaaccattcaaggttgcatttcagtaaagcttgaataatcattgcttaaattaagaactgtcagatacctgtaagctcagcactttggaaggccgaggtgagtggatcacttgaggtcaggaattcgagaccagcctggccaacatagtaaaaacccctctctactaaaagtacaaaaattagccgggcatagtggcacatgcctgtaatcccagctactcaggaggctgaggcaagggaatcacttaaacctgggaggtggaggttgctgtgagctgagattacaccactgtactctagcctggacaacagagtgagactctgtctcaaaaataaaataaaataaaataaaatataaattaaaaaaaatactatcagataaagatgaagaagagaccaaacccagattaaataataaagggaaggaatgaagaagtaaaagcaagtgaaaggttcacaggatgaaaaatgtatagaaagcataatgaggccaacgtcttattgaggagagctgtgatactgaacaagactgacccttatattgattgcaaactgtattaaaattactcagaaaagaaaactgcatatggtgtacctatctcaccgtccagatggtaagtggtgcagccgggatttcagtacagatctgagttgagaagccgtggtcttgtcactatatgcaaaacctcctctgccatatgcataggaaaaggcatttcccctggctttttcttttcttttcttttcttttcttttagttttctttgttttagggaacaaaataataccttggggaccttctctccaccaaactaacataaatatttagctttcctaaatgtcaattgggacaaatggtgaaccatgaatatttccactggtaggtgactgacagcccaggcagggccttgacgcagaggctgaccagactgtccttgaactcctaggagccgaggtgacgtacatgaacatgaccgcttacaacaagggccggctgcagtcctccttctggatcgtggacaaacagcacgtgtatatcggcagtgccggtttggactggcaatccctgggacaggtaagctttctacgttatgtaaactcaatgttctgtcaccctcaaagcgaccaccttcataaagcacgctactgcagataaggatcctmaaacctacagcatttattattcttaactgtagttttaagaggctcatcttccttttatgtgaaaggataaacctttgcttgtcaggatcatcttacaaaaaaaagtaaaaactgttattgcttcaatgcttttgtaattcataggctgctcccagattcctgagagcaggttgctatgtaattgacatcacccagacctatattttcaggatgatattacatcatctatgagacagggggaaacacaaaaattcagtaaagagtaatatgtcttaggatagtaatcatttgggttatntctttaatctaagatgaagatgtatctttctcttaacaatgattaactgcaatatgttgaaatacat

SEQ ID NO: 62437 - DNA, 2109 bp, Homo sapiens
  misc_feature (1)...(2109): n = A,T,C or G
aacatgtgcccgccacttggaagacaaagaaactgctctaccctcagagaaaatctgcctgggtgctgtcttcccctcagagattctctcccaacctcataacatctcttttcatcctcctgccacaaggaagctagatgcattgtttacattttcctaagagttaagcattaagttcatagtgtaaattactctccttcctttctgatatgctgaaatgtatccttctgcatacagtcttatgtgtgcctgtggtaatgaagactctgacaatgaagtgtgcccctggaatacatcgtcttcgttaataataaatacctgaagacacaatagcttagttcattaaatatatgcatataggtctgttattttaaagggaatagacctttagcagaaatttatttaaatacccttgcattgaatggactgtatgctccttttgagaggtttgtaaatgcatttgaagcagtaatgcataaaggcttgacactggatcctaccacatgaagcctaaaacaattggtcacattcagctcttcaaatatatttttggcattaacaatagtctgagtgatttagttaaccattcaaggttgcatttcagtaaagcttgaataatcattgcttaaattaagaactgtcagatacctgtaagctcagcactttggaaggccgaggtgagtggatcacttgaggtcaggaattcgagaccagcctggccaacatagtaaaaacccctctctactaaaagtacaaaaattagccgggcatagtggcacatgcctgtaatcccagctactcaggaggctgaggcaagggaatcacttaaacctgggaggtggaggttgctgtgagctgagattacaccactgtactctagcctggacaacagagtgagactctgtctcaaaaataaaataaaataaaataaaatataaattaaaaaaaatactatcagataaagatgaagaagagaccaaacccagattaaataataaagggaaggaatgaagaagtaaaagcaagtgaaaggttcacaggatgaaaaatgtatagaaagcataatgaggccaacgtcttattgaggagagctgtgatactgaacaagactgacccttatattgattgcaaactgtattaaaattactcagaaaagaaaactgcatatggtgtacctatctcaccgtccagatggtaagtggtgcagccgggatttcagtacagatctgagttgagaagccgtggtcttgtcactatatgcaaaacctcctctgccatatgcataggaaaaggcatttcccctggctttttcttttcttttcttttcttttcttttagttttctttgttttagggaacaaaataataccttggggaccttctctccaccaaactaacataaatatttagctttcctaaatgtcaattgggacaaatggtgaaccatgaatatttccactggtaggtgactgacagcccaggcagggccttgacgcagaggctgaccagactgtccttgaactcctaggagccgaggtgacgtacatgaacatgaccgcttacaacaagggccggctgcagtcctccttctggatcgtggacaaacagcacgtgtatatcggcagtgccggtttggactggcaatccctgggacaggtaagctttctacgttatgtaaactcaatgttctgtcaccctcaaagcgaccaccttcataaagcacgctactgcagataaggatcctaaaacctacagcatttattattcttaactgtagttttaagaggctcatcttccttttatgtgaaaggataaacctttgcttgtcaggatcatcttacaaaaaaaagtaaaaactgttattgcttcaatgcttttgtaattcataggctgctcccagattcctgagagcaggttgctatgtaattkacatcacccagacctatattttcaggatgatattacatcatctatgagacagggggaaacacaaaaattcagtaaagagtaatatgtcttaggatagtaatcatttgggttatntctttaatctaagatgaagatgtatctttctcttaacaatgattaactgcaatatgttgaaatacat

SEQ ID NO: 62438 - DNA, 506 bp, Homo sapiens
ctcatgagcggcttagcactatcccctcggtgaagactgagttttcagttcatgcgagatctgattgtttaaaagagtgcagcacttcctccaccttgctccctctcttgccactgatgtgcctgcttccccttcaccttctgcctggattgtaagctccctgagaacctcaccagaagcagatgccagcaccacgcttcctatacagcctgccaaaatgtgagccaattaaacctcttttctttataaattacccagtcttgggtcctttaaagcaacgcacaaattaactaacacaattgcctttacttattctcccrtaagtggtcttcatttattttcacacttccattcagtttatttttgcaatcataggtctgtttaactcatgaaatctctttaagtcttctttctaaaatacaaagtcttaggccggttgcggtggctcacgcctgtaatcccagcactttgggaggctgaggcaggtgggtcatgaggtcaggaga

SEQ ID NO: 62439 - DNA, 515 bp, Homo sapiens
cagcaaaagcgctccagatgcggaactctccaggacagtgtcctgtaccacggccagcccctgcaggacatttaggtgacggcggctcgcttctgcctaaaaagcrtattgctgagtttctctttttgttagaaaagtctttctcaacattgatcccaaatctgcctccaacccttccattgttgatccaagttctagaacacagatactttttttccttgttatctctgttttttatttttatttttaatttccataggtttttggggaacaggtggtgtttggttacatgagtaaattctttagtgatgattcgtgagattttgctgcacccatctcccgagcagtatacactgaacccaatttgtagtctcttatcccttacccgcttccctccctttcctcctgagtccccaaattctattgtcattgttatgcctttgcatcctcatagtttggctcccacttatgagtgagaatgcctgatgtttggttttccattcctgagttacttc

SEQ ID NO: 62440 - DNA, 693 bp, Homo sapiens
agataaacatagaattgccatatgatcaagcattccactcttatacccccaaaagcagaaaatagagactccaagaaatctgtacatccatgttcacagcagcagtatttacaaaaaccaaaaagtggacmccatcaaaggtgtcagtggccaccactgacagatgagtggataaacaaaatgtgatctatacatacagtggaatattattcagccataaaaaagaatgaaattctgttacatgctgcaacatggctgaaccctgaaaatattataagtaaaaaaaaaaaaaaaaaaaaaaccagaaaaggacaaatattggatgattccacttacataaagcacctggagtagtcaaatgaatagagacagaaagtcaattcgaggttaccaggggctggggcaggggaacatggggagctattgttaaatgggtacagtttctgtgtgggatgatgaacaagttctgaaaatactggtgatagttacacaactttgtgaatgtactttatgccactgaaccgtacactcaaaaatggttgaaaacgtaaatttcatgttatatatattttaccataattttttttttaaagcaacaccacaaattagaagagtcagagctaatggcttcacctttggatacctcaaccttcccaatctacagaataggagaaaaataccgtaccacctccg

SEQ ID NO: 62441 - DNA, 576 bp, Homo sapiens
tttgttcttacttctggctgaatttgccattatttatttaacaaggtttcctgaagcttatcaacgtttctaaatgataatgacactcactcactctctctctcaccaaaaattggaaaaaatggtcccagtttgacaaatcaaaacctcttcacaatacgggaatcaaccttaaagaaggcccccttcacttggcttcagaggccctactctatcttggttttcctcctaaactcacagacttctctttggcaaatgcctctaagagattcttctttgatcaacatccaagtgttggagggggggcgggggcagccccttattccttctcttccttcactcactcttgtttcaaatacactccgataacaattcccacatactcatctctagcactgatctttccccaaagctccaggtttgaattctcaactgtcaatgtgacatctccayttacatgtttaacaggaatctctgacatgggttggatgtgtgtcccctccaaatctcatgttgaaatgtgatccccagtggttgaggtggggcctggtgggaggtgactgggttatgggggtg

SEQ ID NO: 62442 - DNA, 683 bp, Homo sapiens
tagtatgtcttggagaaacagcacttttcgccttargaatctggctgttaggattcataattagatatgaaatactttgtaagtcttgaaagattgtcccatattcgcatatgcttatcaactggcataagggactcttttttcttttttgctttctttttttttttttttttttttttaaaggcaaagtcttgttcttgctctttcgccaggctggagtgcagtggcaagatctcggctcactgcaacctccgcctcccaggttcaagcaattctcctgcctcagcctcccaggtagctgggactacaggcgtgcaccaccacatccagctaatttttgtatttttagtagagacgaggtttcaccatattgtccaggatggtcttgatctcttgacctcatgatccacctgcctcggcctcccaaagtgctgggaatacaggcgtgagccgctgcccccggcctactctttttttcacgatcatgtctgaagcacagtgctctctaattttgctagtttacctcttgcacatttccatgtctctgggaaggaggactggaaagtgtctgggcagaccctcataggccactggctttgcacttactgtagagagctgaatgaatttgctgcgtgttttcctgaaacatgaatgtcggttggtcacttcagcagcactcaaag

SEQ ID NO: 62443 - DNA, 683 bp, Homo sapiens
tagtatgtcttggagaaacagcacttttcgccttaggaatctggctgttaggattcataattagatatgaaatactttgtaagtcttgaaagattgtcccatattcgcatatgcttatcaactggcataagggactcttttttcttttttgctttctttttttttttttttttttttttwaaggcaaagtcttgttcttgctctttcgccaggctggagtgcagtggcaagatctcggctcactgcaacctccgcctcccaggttcaagcaattctcctgcctcagcctcccaggtagctgggactacaggcgtgcaccaccacatccagctaatttttgtatttttagtagagacgaggtttcaccatattgtccaggatggtcttgatctcttgacctcatgatccacctgcctcggcctcccaaagtgctgggaatacaggcgtgagccgctgcccccggcctactctttttttcacgatcatgtctgaagcacagtgctctctaattttgctagtttacctcttgcacatttccatgtctctgggaaggaggactggaaagtgtctgggcagaccctcataggccactggctttgcacttactgtagagagctgaatgaatttgctgcgtgttttcctgaaacatgaatgtcggttggtcacttcagcagcactcaaag

SEQ ID NO: 62444 - DNA, 683 bp, Homo sapiens
tagtatgtcttggagaaacagcacttttcgccttaggaatctggctgttaggattcataattagatatgaaatactttgtaagtcttgaaagattgtcccatattcgcatatgcttatcaactggcataagggactcttttttcttttttgctttctttttttttttttttttttttttaaaggcaragtcttgttcttgctctttcgccaggctggagtgcagtggcaagatctcggctcactgcaacctccgcctcccaggttcaagcaattctcctgcctcagcctcccaggtagctgggactacaggcgtgcaccaccacatccagctaatttttgtatttttagtagagacgaggtttcaccatattgtccaggatggtcttgatctcttgacctcatgatccacctgcctcggcctcccaaagtgctgggaatacaggcgtgagccgctgcccccggcctactctttttttcacgatcatgtctgaagcacagtgctctctaattttgctagtttacctcttgcacatttccatgtctctgggaaggaggactggaaagtgtctgggcagaccctcataggccactggctttgcacttactgtagagagctgaatgaatttgctgcgtgttttcctgaaacatgaatgtcggttggtcacttcagcagcactcaaag

SEQ ID NO: 62445 - DNA, 683 bp, Homo sapiens
tagtatgtcttggagaaacagcacttttcgccttaggaatctggctgttaggattcataattagatatgaaatactttgtaagtcttgaaagattgtcccatattcgcatatgcttatcaactggcataagggactcttttttcttttttgctttctttttttttttttttttttttttaaaggcaaagtcttgttcttgctctttcgccaggctggagtgcagtggcaagatctcggctcactgcaacctccgcctcccaggttcaagcaattctcctgcctcagcctcccargtagctgggactacaggcgtgcaccaccacatccagctaatttttgtatttttagtagagacgaggtttcaccatattgtccaggatggtcttgatctcttgacctcatgatccacctgcctcggcctcccaaagtgctgggaatacaggcgtgagccgctgcccccggcctactctttttttcacgatcatgtctgaagcacagtgctctctaattttgctagtttacctcttgcacatttccatgtctctgggaaggaggactggaaagtgtctgggcagaccctcataggccactggctttgcacttactgtagagagctgaatgaatttgctgcgtgttttcctgaaacatgaatgtcggttggtcacttcagcagcactcaaag

SEQ ID NO: 62446 - DNA, 467 bp, Homo sapiens
tctcggcctttcacatcccagccagcgccggggcagggcctggctttggcagttgaaggggcaggagggatctattctgcggtgggggtgctgcccatgctggtgttatctgcaaggtgcctgaggtcagggcatcacagctgctgtgctagtgcccacgtttactstctgcggctcctccttacctcaatgccacccaggcaccagagagcgtccttgccgagcactaccaggacctgcggaggaagcccttctaccctgccctcatccgctacatgagctctgggcctgtggtggccatggtacggcagggcaggggtggtggaagggcctgtgggtaaagggcgtgtgggtgtgtctttccccccagcaaagggaggggccctggattgagcccaggggcccttggtgttccccacttctccccaaccattatctctcgctgcaggtctgggaagggtacaatg

SEQ ID NO: 62447 - DNA, 702 bp, Homo sapiens
ccgctcccgcccgttgtccccgcagtccccgacgggagcgccatggcccagccgccgcccgacgtggagggggacgactgtctccccgcgtaccgccacctcttctgcccggacctgctgcggtgagcggggcctgggaagcgagcgcagccttggtgcggggtccggtccgcgggcgccggcgcccccacgtggtccccgagggctcgcgtgttaggaaacctgtcttgcctggctcctttctttyttctttcttttttttttttttgagacggaatctcgctgtgtcgcccaggctggagtgcagtggcacgatctccgctcactgcaaactctgcctcccgggttcaagcgattctcctgcctcagcccggctaatttttatttttagtagagagggggtgtcaccgtgttggtcaggctcttttcgaactcctgacctcaggtgatccacccgcctcggcttcccaaagtgctgggatttacaggcgtgagccaccgcgcccggcccaacctggcctctttcttaacagaaaattttaggttgaaatcatttttccggaagacccagaaggcccaggaatgccaggttttgcccagcagctcttcattttcctgcaaacgccttggtgttcacaagagaaggcagcccgggcaaaggtcgatcctccccggtcacctgccctcactcggctaatgggc

SEQ ID NO: 62448 - DNA, 985 bp, Homo sapiens
catccctgtccaggagaaagaggcagccgttaactcagagaggagcaggagggccagcaccgtgccaatagagctcctggccccgaccgccggtcagcaggcaatgatgaggacacctgtgagccaccaccactgagacacgtgcacacaggtgatgcaggcacccatgtgtgcacaggggaacatgtacacacaaaggttcacacgtgatggtaaagcccaggtgcccagccacgcgycttcctagctggtatttactgggcacctccacaaagcctccttgtgcctgcctgttctttagggcctgacagctaagagtggtttctacatttttttttcttcttttttttgagatggagtctcgctctgtcgcccaggctggagtgcagtggcacaatctcggctcactgcaagctccacctcccgggttcacgctattctcctgcctcagcctcctgagtagctgggactacaggtgcccgccaccacgcccagctaatttttttgtatttttagtagacacggggtttcactgtgttagccaggagagtctcgatctcctgacctcgtgatccgcccgcctcggcctcgcaaagtgctgggagtaattacaggcgcaagccacagcgcccggccaaggtttctacatttttaaagggtgggggaagaatctgtgacagggactgcatgcggctgcaaagcctcacatattcactgccagccctgcacgggaaacgtttgctggcccctgcttgtggcctagaccactgtgcagtgtgcctgccttggagggcattgctaaatggaccaaaaacatttcaggattgcacagtgggcagccaggacaaccagtgccccacggaaagataggagatgccaaggctgcacactctgcttctctccaggagctggcagggcagtgtggtctctgagggaggcacaaggtagctctttagcaacaggttttcttttatttttttctttt

SEQ ID NO: 62449 - DNA, 985 bp, Homo sapiens
catccctgtccaggagaaagaggcagccgttaactcagagaggagcaggagggccagcaccgtgccaatagagctcctggccccgaccgccggtcagcaggcaatgatgaggacacctgtgagccaccaccactgagacacgtgcacacaggtgatgcaggcacccatgtgtgcacaggggaacatgtacacacaaaggttcacacgtgatggtaaagcccaggtgcccagccacgcgtcttcctagctggtrtttactgggcacctccacaaagcctccttgtgcctgcctgttctttagggcctgacagctaagagtggtttctacatttttttttcttcttttttttgagatggagtctcgctctgtcgcccaggctggagtgcagtggcacaatctcggctcactgcaagctccacctcccgggttcacgctattctcctgcctcagcctcctgagtagctgggactacaggtgcccgccaccacgcccagctaatttttttgtatttttagtagacacggggtttcactgtgttagccaggagagtctcgatctcctgacctcgtgatccgcccgcctcggcctcgcaaagtgctgggagtaattacaggcgcaagccacagcgcccggccaaggtttctacatttttaaagggtgggggaagaatctgtgacagggactgcatgcggctgcaaagcctcacatattcactgccagccctgcacgggaaacgtttgctggcccctgcttgtggcctagaccactgtgcagtgtgcctgccttggagggcattgctaaatggaccaaaaacatttcaggattgcacagtgggcagccaggacaaccagtgccccacggaaagataggagatgccaaggctgcacactctgcttctctccaggagctggcagggcagtgtggtctctgagggaggcacaaggtagctctttagcaacaggttttcttttatttttttctttt

SEQ ID NO: 62450 - DNA, 985 bp, Homo sapiens
catccctgtccaggagaaagaggcagccgttaactcagagaggagcaggagggccagcaccgtgccaatagagctcctggccccgaccgccggtcagcaggcaatgatgaggacacctgtgagccaccaccactgagacacgtgcacacaggtgatgcaggcacccatgtgtgcacaggggaacatgtacacacaaaggttcacacgtgatggtaaagcccaggtgcccagccacgcgtcttcctagctggtatttactgggcacctccacaaagcctccttgtgcctgcctgttctttagggcctgacagctaagagtggtttctacatttttttttcttcttttttttgagatggagtctcgctctgtcgcccaggctggagtgcagtggcacaatctcggctcactgcaagctccacctcccgggttcacgcyattctcctgcctcagcctcctgagtagctgggactacaggtgcccgccaccacgcccagctaatttttttgtatttttagtagacacggggtttcactgtgttagccaggagagtctcgatctcctgacctcgtgatccgcccgcctcggcctcgcaaagtgctgggagtaattacaggcgcaagccacagcgcccggccaaggtttctacatttttaaagggtgggggaagaatctgtgacagggactgcatgcggctgcaaagcctcacatattcactgccagccctgcacgggaaacgtttgctggcccctgcttgtggcctagaccactgtgcagtgtgcctgccttggagggcattgctaaatggaccaaaaacatttcaggattgcacagtgggcagccaggacaaccagtgccccacggaaagataggagatgccaaggctgcacactctgcttctctccaggagctggcagggcagtgtggtctctgagggaggcacaaggtagctctttagcaacaggttttcttttatttttttctttt

SEQ ID NO: 62451 - DNA, 1685 bp, Homo sapiens
tcaccatattggccaggctggtctcgaactcctgacctcatgatccacccacctcggcctcccaaagtcctaggattacaagcttgagccaccacgcctggccacattctttcaatacttggaaacaaatgtaatttttactcttctgcctgaaaattctaatttagtgagtattgaagatactatgcctcttaagagtagcagaaggtattaaaaaggaaatgtaaacataagaaaaggagtagtcataaattcaaaggtggaacacatatctacaaacatcacatactcattacaatataattattttaatcagtgggattacagaaaatagtaaaagcaactaaactatataagattattctacatgctttacatacattatgtagtttaagtctgacacaaactctgtgccaattgtctatttacagaattaaaataaaaaataaaaaacccgataaagaagttaagcaatttcccaagcttcagagcagaaaattggtaactgaggacagatatatcatatttcagaatcttccatcttaatttctaagctttatcaccagccatctccaactgtaattatgtaattcttatactttaaaaaaggaccaggaaagatctattttaaatattcttctctaaagtattattgttattaacttgcatgtctgaatcacatgtatgaggtggaatacttytacctgaaattaaaaatcttaataaaaaatacataattcctataacataaattccagatgaaagcatctataggattggtgaacttaatggctcaatgaaatcttcaaggactcgaatttttcttttctgccatgcttacagttgctgagtggattgtacagttcaggatttatttgaagacatagaaacaagggaattcaaattactataattgacttagtctagtcagaattgaccctgaattacctaggagaagggtggactcccaaacaaaatccattagcaaggatgaacaagagagggcttttgggtaggtagccaatagtttatgctacaaaagtctagattaacttcaccaattaaatacaaagtaaaatggcttcaaacaagtaaatcagattacttgggtttaagttatacttttcattttgttatttggaactaaatagtccacacctaagacagtgtttctctatgttgacatctatggaagtgctcaagttctaccaatttaggattttctatttactaatgaacaaaatttgtctattatgaaaaaaatgttgactgttttgtattagcaaaataaatatcaccttttaatgaaaacttttccagatacttggagatcattcattcattgagaaggaaagagattaaaggctatgcagctgacagttgagttgcagaatacagtgagtagtggaggaatcaacactgcctgggtttctccttgatatgatttggctgtgtccccacccaaatctcatcttgaattgtagctcctataatcctcatgtgtcatgggaggcacctagtgggaggtaattaaatcatgggggtgggttttttccatgatagtgaataagtctcacaagatttgatggttttataaagaggagttcccctgcacacactctattacctgctgccatgtaagacatgcctttgctcctccttcaccttcaaccatgattgtgatg

SEQ ID NO: 62452 - DNA, 1685 bp, Homo sapiens
tcaccatattggccaggctggtctcgaactcctgacctcatgatccacccacctcggcctcccaaagtcctaggattacaagcttgagccaccacgcctggccacattctttcaatacttggaaacaaatgtaatttttactcttctgcctgaaaattctaatttagtgagtattgaagatactatgcctcttaagagtagcagaaggtattaaaaaggaaatgtaaacataagaaaaggagtagtcataaattcaaaggtggaacacatatctacaaacatcacatactcattacaatataattattttaatcagtgggattacagaaaatagtaaaagcaactaaactatataagattattctacatgctttacatacattatgtagtttaagtctgacacaaactctgtgccaattgtctatttacagaattaaaataaaaaataaaaaacccgataaagaagttaagcaatttcccaagcttcagagcagaaaattggtaactgaggacagatatatcatatttcagaatcttccatcttaatttctaagctttatcaccagccatctccaactgtaattatgtaattcttatactttaaaaaaggaccaggaaagatctattttaaatattcttctctaaagtattattgttattaacttgcatgtctgaatcacatgtatgaggtggaatacttttacctgaaattaaaaatcttaataaaaaatacataattcctataacataaattccagatgaaagcatctataggattggtgaacttaatggctcaatgaaatcttcaaggactcgaatttttcttttctgccatgcttacagttgctgagtggattgtacagttcaggatttatttgaagacatagaaacaagggaattcaaattactataattgacttagtctagtcagaattgaccctgaattacctaggagaagggtggactcccaaacaaaatccattagcaaggatgaacaagagagggcttttgggtaggtagccaatagtttatgctacaaaagtctagattaacttcaccaattaaatacaaagtaaaatggcttcaaacaagtaaatcagattasttgggtttaagttatacttttcattttgttatttggaactaaatagtccacacctaagacagtgtttctctatgttgacatctatggaagtgctcaagttctaccaatttaggattttctatttactaatgaacaaaatttgtctattatgaaaaaaatgttgactgttttgtattagcaaaataaatatcaccttttaatgaaaacttttccagatacttggagatcattcattcattgagaaggaaagagattaaaggctatgcagctgacagttgagttgcagaatacagtgagtagtggaggaatcaacactgcctgggtttctccttgatatgatttggctgtgtccccacccaaatctcatcttgaattgtagctcctataatcctcatgtgtcatgggaggcacctagtgggaggtaattaaatcatgggggtgggttttttccatgatagtgaataagtctcacaagatttgatggttttataaagaggagttcccctgcacacactctattacctgctgccatgtaagacatgcctttgctcctccttcaccttcaaccatgattgtgatg

SEQ ID NO: 62453 - DNA, 1133 bp, Homo sapiens
aaacaacatttagaaattattataaatttgcaactgctaaattgggtgaacatgggttaaattcataagtatataacagtaagtttcattcagaattaactttgcttttcagtcacatccaaaatggattcgattctatgtttgggtctttgaatcatttagcaggaaagaataagaaacagaactattaaaactaatttacatatttgtatataaacattcataaaattgctaactggaatcgttagggaccaagcattaaagtataggaataacaccattaatctgggttatttgatgtgatgcccatttggacaggcagcacttggagaagttggcttttgctactggtttcaactttagttttccatcttccttgagtgacttggaggtgaaagtatacaaagaataaaaaaaatttaagtaaatattttaggaagagaagcataattttataaatggatgtttctctctgtaagatcatcattttataatgccaaattcccatcttctgctttgcaatatgttacttggggattttttatgttrttgactctatacttactatagtggcacctctaatatctgaataacttgcctaacaaggaacatctgagatagttagttctatgtaatcaaagaaacgtacaaaataaggatcaaaacattatgctattactttacagtatattacatgatgcacccaaagatagtaaatatttatctgtatatttattcataatctgatctgagaagactctgttgctcctgataagaaacatatcttaaagttaccaagaaagggccaggcgcggtggctcatgcctataatcccagcactttgggaggccgatgcgggtggatcacaaggtcaggagatcaagaccatcctggctaacaaggtgaaaccccatctctattaaaaatgcaaaaaaaaattagccaggtgtggtggcgggcgcctgtagtcccagctgctcgggaggctgaggcaggagaatagcgtgaacccaggaggcagagtttgctgtgagctgagatcacgccactgcactccaacctgggcaacagggtgaaactccgtctcaaaaaaaagaaaacaaaattaccaagaaagataacccgcatgctta

SEQ ID NO: 62454 - DNA, 620 bp, Homo sapiens
acaaaaatagggtaattttctccctggatctttggtggttatgttagaatcctcagcaatacagtgaattcataattctctttttagggaattataactgctgcatggaatccatgtctctataatttctggacattccctaaatatacatgtttatgctgaagaattttttttgttttgacaagagtctaactctgccacacaggctggagtgcagtggtgcagtcttagctcactgcagcctccacctctgaggctcaaatgattctcatgcctcagcttcctgagtagctgggattatagtcttgcactgcaccaccatgcctggctcatttttgtgtttttagtagaaacatggtttcaccacgttgactatgctggtcttgatctcctggcctcatgtgatcctcccgcctcagtctcccaaaagtgttgagattacaggcataagcaatcragcctggatgaagtctcttattaagcttcttttattaaatctacttctaggtatttgattaattttgatgctatttaaattattttttgttaatttcattttaaatttttatttgctaatgtataaaaatgaaattgatttttgtatatatattaatctttca

SEQ ID NO: 62455 - DNA, 594 bp, Homo sapiens
ttcacctgtcttactgatcaaatggatcactgcagtcattaaagtggattgctagattgcaaaacattcccagtattgatactttttactttttacwatgttagtctcctttaaatatagaaaatactcattccacaaactgtgcatactatattttattatcaaaatgagtatattataatacaagcaataatattattaacaaatgtttcacagtacgtttagaaaaagagtttcatacgtatcttctgatttggagccaaacaaatttggagagagaaacataaaacaattttgcaagccatataatcttttagttagagtgctgagagcactctagagactgaacttacactgcagttccaagtctttcattactgaagaaagaaattttactttctaatagttttgtatttttgctgctgacctgattacaaagggtttacaaataataaaccttctttcaaaaataataaatctgttgtatgtttctgcatctcaaaagtgttcattattttgtgacatcagatagaatagccagtatcccaaagcttcgatcttgaagtattttattctatgattcatttctgaaaa

SEQ ID NO: 62456 - DNA, 1454 bp, Homo sapiens
aagagaatagggtgaagatgagttcagaattagagactgatttctaactatcttttcctacacagaatttttatgtggagaccaggaaattactccagatcccaaacacggaacccaatacgttctgaatctgcctttgttagactaagggtagcaaagttgccgtggataacagacttgtggcattgtgagctacccagaaggaaaacttgtcttccaaaacgtagaaagtgagagagcagattggaagaagcctggaagatccttggctagcttarccagtttgctgccacctttaaatatttaaaattgttttgagtacaacatgtgggagaagtagtcttaggagcaggacttcgtgccatcttacttcatgctggattgatactaagacactcatagttattttttacgtcttctattttaatttctcatgtgtgccttcctgttggtttagaagatgcctaatatgtcacctagctaagatattttgaccccagttttatctcattttaaaaactttttggcttttaaggaagtatagacttaggtgacatttttatttataaatgcctgcagttgtaacagaattcttctgaagacatgtaatcatccagcgtggcaacatagacccatctctacaaaaatcaaaattaaaattaaaaattagagtagtggtgtgcaacagtggatccggctactcaggaggctgagatgggaggatcacttgagcccaggaggttgagtctgaagtgagctatgattgcaccactgcactccagcctaggtaacagagcaagaccctgtctcaaaaaaaaaaaaaaataaataaataaataataaactagaaaaagatatgtaatcatcaatctcactaagtatacatttcttcattcttataatgattcttttatttttagtgtgagcccacttgaaataccagttgtacttttctcctttatattcacacatactctcttctgttctctatagtcacaccttgggaatcatttgatttccataaaaattattaatttttgtatccttgtttgcttattcaaatccttgaaataaactgtaaatggcaaaatagacatgatatacttcttgatagattctgaatgtcaacatcatgatgaaatttccaacaatgtttattttctttcacatccaatgacaaggccttatctctgtctcacctcacagcccccacctctgctcccaaggacttgacagtcattactagggaagggaagcctcgtgccgtcattgtgagttggcagcctcccttggaagccaatgggaaaattactggtaagcatctccactttctctcccagcatagctctcccttgtcctataattgcttaccccctacatgagctgctcctgcctttcgtgtggcattattctgtccctacatctcagctgactccatgaccctttttgattgt

SEQ ID NO: 62457 - DNA, 712 bp, Homo sapiens
ttaattgagggagaaaatctgttcaagtgaaaatccaacaagaaagacatttcacatagaggatactgtccactagactataagggaatgcactattttcttttgcatttgcaaaacaatgggggcaggaagagccatgttttgggaaaagtacacaaaggatattctgttacatgtccctgaggatggtgacagagtttctaggtcaccgaaaataagggataatttgagaggaacacttctatgccttgcctttttccctttgcatctgtacctgagagcccaaacctgaagccattctgcacccamgtgagtaacatctagtatctctctgccaggctagttaacctaactgtgttttacctcaatccaatttctactccattgaccttcagactgagactctgacatgttatatcagaagtcatttagtactaaacaaaaataatgttctcattgttttggttatatggagtcataaatgtatcttcggtaagacaggcttttgggaggggggtacaaaatgagaaagtctttgtaattagaatccttcactaaatgaagacatggaaatcacttcaaagaaaaatttaaaaagaaaaaaaagctcaacgacctgaagtgccaatacattttcttgttcgtctttcttctacaggcatcttaggtttttcaaagaaatctatgttgataatacttctaaagaccttaa

SEQ ID NO: 62458 - DNA, 521 bp, Homo sapiens
ccctcctcttaccacacctccaccctttgcaaatttctctgttcttagtgatcttaagattttccaaaaactgatctcctttgtcagctgtgttagcattttgtgcattggctacagtcttcagataaagcagaaaagttcaattaaacccatatcttttcaattaatcatccctcaaagggcagaacaaggttgatgacctatagcctctcctgttagccccaaattgtgtatatattrtaccatatactaggtaagtggcctgggaaaatcaatttatactctttatgactctgtttcctcatctatgaaaaagcaaaagaaataatgatacctacttcatagagtaattatgaagatttaaggaagtaatgcatagggcacattgagaagagttcctggctaataaaaaatacttagtatgtgtgaactattataaactgggtcaacttattttcttcgtgtccttttccactgttcatactactcaaatagaataattcagcatttcataaatatgc

SEQ ID NO: 62459 - DNA, 852 bp, Homo sapiens
agcaccctacaaatgtgaaaaagcaagagatatgtttcttaccattgtgagggtaaatggatgattttctaatgcagatacactgggacaatgtagagtaatatactaaaaagcaacaaacagataagttttaaatgaccaattaagaatttcaactatttcaatgatgctatgtttgctaaattccaaaaattacataaggataaaggctatttaaaaagttgctgaccactgactcacctgaccaggtcttgctttaaaattttctttgaccattcggatttccatgacatctgagggatgacttatgaccgaaatgatggtgactggcttattgctccggatatacctgtaaagtctttcggcacagtacaggcacaaaggtccagaaatccaaagccaagtctaagacaaatttttgaaaatatacttcaagaaatactcatattgtagaaatctacaccctgcccaattgcttattgcatacattacagtaatagtattttaatttgtattttaaataagaaaacataacaaatgartaaaaaataatagatgctcactatcattcaaacaaacaaaagtataaaataaaacagaaagtaatatcaagaccctaccctcaatctcatgctctgggtgtaactatccatgaacaaacaagtatatattctttcatacacctttctatgcctacagatatgtaatgtatatacacaatatatttaataaaagaataaaggagagttaacaatctccgataaatctggggataattttagaaataaggtaacagtctaatgtttattaaataagaaaaccctagatttttaatgtacataatgtatatgc

SEQ ID NO: 62460 - DNA, 852 bp, Homo sapiens
agcaccctacaaatgtgaaaaagcaagagatatgtttcttaccattgtgagggtaaatggatgattttctaatgcagatacactgggacaatgtagagtaatatactaaaaagcaacaaacagataagttttaaatgaccaattaagaatttcaactatttcaatgatgctatgtttgctaaattccaaaaattacataaggataaaggctatttaaaaagttgctgaccactgactcacctgaccaggtcttgctttaaaattttctttgaccattcggatttccatgacatctgagggatgacttatgaccgaaatgatggtgactggcttattgctccggatatacctgtaaagtctttcggcacagtacaggcacaaaggtccagaaatccaaagccaagtctaagacaaatttttgaaaatatacttcaagaaatactcatattgtagaaatctacaccctgcccaattgcttattgcatacattacagtaatagtattttaatttgtattttaaataagaaaacataacaaatgagtaaaaaataatagatgctcactatcattcaaacaaacaaaagtataaaataaaacagaaagtaatatcaagaccctaccctcaatctcatgctctgggtgtaactatccatgaacaaacaagtatatattctttcatacacctttctatgcctacagatatgtaatgtatatacacaatatatttaataaaagaataaaggrgagttaacaatctccgataaatctggggataattttagaaataaggtaacagtctaatgtttattaaataagaaaaccctagatttttaatgtacataatgtatatgc

SEQ ID NO: 62461 - DNA, 557 bp, Homo sapiens
ccaagatagccacayacatatgttcaaggtaatttctagtatgggatggagccaagagttgaaagaaagcataactttatttttagcttgaagaatgtattgtaaatatttaggcacatagtatgtgggtatgtgggcctcttgacctgggccctgcaaatgttaaggacaggcacaaacagaatggaaaattttggaaaaattgtgaactccttgctattccaagtgttcaagaacagattaggcaacctctaggctggtgttgttttctttctcctcctccttcttcttctttttaaccttttaaaatataaccttctggggacctaaaaggcaaagttgtaatttcaaattctcattcccctctgtggtctgtgctggaacgcagccgcatgaaacctgacaccgagctcccacactcagatctgcagctcagggcttgccctcactgtcttttcaccccacccttgactacatcccacactatgtgggactttgtatatgtgtgttcaatattgaaaattttacctaagcataaaaaattccatcaccgaaaa

SEQ ID NO: 62462 - DNA, 684 bp, Homo sapiens
ttctcctgcctcagcctcctgagtagctgggattacaggcgcccgccaccacgtccagctaattttttgtatttttagtagagacggggtttcactgtgttagccaggatgatcttaatctcctgaccttgtgatccgcccgcctcggcctcccaaagtgctgggattacaggcatgagccaccgcgcccggcctatatatggtatcttttttactcaattttttttctaatagtagttcaacttactacattgatttcaccaaccctctagggtcacaaaccactgtttgaaaaccactggaacatttgaatatataatatcctacgtgagagaacctgagtgccaggacagaatactcaggccagttcatgcagagtaaatactaaatccacatcaagtttgaattatcactccttcccttcttgcatgaaacaaaaccaagactgcttctcygtggtttccttttttgaatttatcctctacgtaaccagagccatcctcagatgataaatgtttagtgatgtgtgttattcaacagatgtctaagctgttgaaatcccctatgaatacttaattctgtagctttaagtatctcaagagctcatcctggaattttcctctctggccctccttcagtcaaggggctctgaattgatacccaaggtctttgcttatttattat

SEQ ID NO: 62463 - DNA, 1340 bp, Homo sapiens
taactgaaccagattctttcctagagaatagactttctatataaaagatcagcaatacctgcaagcctgttttcataaacaaatgtaatggattgaaatatagcctgtccagaaatttccacttcataacacatgacaccgtaagctgcgtggtaagcttcgcaaatattattggctgacaggctctttggcacagagaaatgtctctttgttttcctgattctggaatgggatatgtgggctttgtttacttgcttttgagagcaaatagatagtagaggatagtaaactaatatggcatttgtaaatctgcctaaaactgtttcttgacgtagatcatgtctgacacttaagcctggcacttcgtatgtactcagtaagtgttattgtcaagctattattrcttttcaattaattatgtagatttagaccacccagactcagctgatctgaggttaagttcaagcctggtaagagatgactaaacagaaaccaagtgtttcttcttggtttcccctcctcccagctcctggtaaccattgtactttctgtctctatgaatttgacaatgtaggtatctcatataaatgaaattatacaatatttgcacaatgtgtctgtcttatttcacttagatgattcagtcatcaaaaagagaagcaaagaagaaataagaattagatatacatttaaaacccatatgaggagccaggcctggtagctcagcctgtaatctcagcactttaggaggcccaggtgggcatttcacctggagttcgagaccagcctggccaacatgattaaaccccatctctactaaaaatagaaaaattagctgggtgtggtggtgtgcacctgtaatcccagcaggtactagggaggctgaggcacgagaattgtttgaagccaggaggcagaggttgcagtgagccaaggttgtgccactgcactccagcctgggcaatggaacgagactctgtcatcttaaacagataaaaattttaaaaaacccaaaacaaataaacaaaaagaaacaagcatttgaacctacttaatttttgacttaattttctaaaatactcttctgacagccaaaaaatgaagttcagattaagcccttagagggcgagatctttttattctgccttattagaagtattattattgtcacacacaatgctcttaacatcactatttctcaaaaaattagttggtgtatgacactgcatttctgatgggcaaatgtacacatcattagtgacaggagcctatgtgacttagtaacattgtcttttccagtttaaaaaaaatgctctcacaaattgtagagcccctctcaa

SEQ ID NO: 62464 - DNA, 739 bp, Homo sapiens
caacatgtcattcattttttcttgttcatcttctgccctgtttctaccatgtccctcacccctagtttctttctttctttctttctttttttttttttgagacagagtgtcactctgtcacccaggcaggagtgcagtggtatgatcttggctcactgcaacctctgcctcccaggttcacgccattctcctgcctcagcctcccgagtagctgggactacaggcgcccgccaccacgcccggctaattttttttttgtatttttagtagagacagggtttcaccatgttagcaggatggtctccatctcctgacctagtgatctgcccgcctcggcctcacaaagtgctgggattacaggcttgagccaccaygcctggccccctttttttttttaatcccttctgagttattttatacatatataagaaaatgatgaacacagataatgttttacaaatggtgtcataatatacacactgtactgatctccctttctctatttgctatatatttagagaccttactatgtcaaggacataaagagctttcttggtttttgttttttcaaaatagctctataggttttcgctgtatgaatagaagacagcattttaatggtattttataagttgtgttgctgaattgtaaatttcctcagaagtactagtatctttttacaatatatagtctatcaatggttaccctcacttaaactgtaagatgtttggggaaactt

SEQ ID NO: 62465 - DNA, 751 bp, Homo sapiens
tgcattgacccacttctctacgtaggtttgggaagaagctcttccatggttcctgtgagagcccctttcagatgggaaaattaaaagtgggagaaagagggaagaaccactggtccagtccctcccggtcttcacatgttcacaattagtacacatatttttcctctttccctatccaatctaatttctcctcaccctcagctaccccttttgttggtcacagtggtttatctgacagggtgaacttaactctcactcctgaagtgtcctaataaaagccgtagtaaccgttatctttcaggctagaaatgttgcccttgtccatttattgttggaattaggtgaaggaataccataagtcactcacgtgagtaacccaagctccatacacattgctacctgtatccattgtaaaacagcaacactaccttctcttgggatgatcaggttttattgcctctgaaaagctggtaatttattttctcgctgactgattcctaaagtgcccaggtggcatcattagctttgcagtaacttgaatatcgtgctgagtcctggtaagagtgtacctcagttgggtaccaaaaccaggctctctaatcctgcagcatccaaaattgaagggatgggaagcacaaaatatccagaaggtcactgggaataatggtaagcaggcctcttctgcttctatgccttggttcccaaatctgtgtattcttccttttgaggacatwgtgccatatagtggtct

SEQ ID NO: 62466 - DNA, 2448 bp, Homo sapiens
ggttgttgttgtttatcttgcatgcagtcttgttcttttaaaaaattcaatttctgtttgtcagttagggtcactctttgttacttgcaactaaataaacctaaatgacatagaagaaaaagtaagaacaattttttttttactgtaagtattgtttcttagatatttttagtctactccaaagataaagaacataattacattgcaatgtgtctaaactatctaccaaagcatgtaatagtttccttcccttcctagtgtttcatcagaagttcaaagatcaaaacaaaatggtaactgccaagtactccgtatcataaagaagatgctatatcatccatgcggccagtgtcaaaccactgtgaaaataattctgcctgcgttacccagtatgcctgcctccagactgtatacgggagttgatgaacttggagtgtggggaatatttcagagacagttttcagtgttttgtgaatggaacatacacacgcacacatacatgcatacacacacaggtgtacacacatacacacaaaaagcgcggtagttttttttctatcaccacaggcaaagagaacacgctttagaagtacttcttagagagcttttaaatgttctctggaatttgggagacagaaagactagtatatatctgtattatatatggcatataggataacatatgtagcaaaaatagatatagatacatagatatacgagagagcaaataaattagaaagttatttatctagaaattgtagattgagtaaataataactattctacactcatataaggacactgttcagctattaatattaaaattatggtacatttatatttattaatagataaatactcgtaaaatatttgtaactaaaaacatcagctatttgtgcttcatattcataatgtatgtatacaaataataattatagaaaaataatggaggacaacaaactaaaatgatagtataaattatctcttgtttttttctcacataattattctctttttgattttgcttatccaaatttttaaatttttaatttttctgtataaatattatgtgtaaaataaacatggctacttttcaaagtaatcaaartttttaaaataatctgtatttttttataccagcagcacaaaagtgtatcaacacagagtaaggattaaagttttctgaatcctaatctgaaacattgcttctgatacataaaatcatagtgcatgtgaagctttggaattaaacagactaggcttggtttatggctctcaattttttaaggagtttgggaaacaccaacctaaggcttcacttaaaagttttaaaaatctaattaaaaaaaattcattcctcacaaagtatttggaactcctaaggatgtcattgacatcctaaatagttaaaatattgagtagttttaaggtatatttgtggatttaaatgtcttattgaatgtgctaacttgcagcagggtcttttatgtgttcagaaaaatataagaggatagaatttcagtttatactgaagtaatgaccacaaatgctttaaatgaatgcattaataaatccaaaataatcaggacattcattccattaaaatgtcttttaaatacctttttaaggaaatgattagccttaacataacaattgtttaatactagctattgtgaaaagaaacatgtggctcttgctaaaattaaatgtcataagttgttttgagtctctcagttttctgaattgaaaattttaaattacttttaataaataaccctgaaaatgtaatgccattccaaaatcacacttggcttttatattgatttgttgcatatttccttagagatacaaatcgacttgttgatgttttctgtttattcttgaggatcagtaacagtgtattcaacttgcagctttttcatagatacaaacaggaaggttgccaattaggttggaattttctgtgaaataggtgaggatttacaaggaactggaataaaaccagctgtgttcactaggagacaccactgggtgtggcttttgtctcaggctatattcaaaattaaactgaaatataataaccacaaacccaaattactagcatttgacaaaataagggggtaatttaagttttgtaactaaataaaaaggaagcatagtctgaagaacaagaaatatttatatgtgaaaatcctgtacataaaatgaaaatatttcatatcacttgtgtaattcctaaagaataagatgacatgttactaacatactaaaaattattttcatcaagactgaataggctttatatgacaattttatagggacaggaggcaggaaattctgggcagaagagggcagttccttggcaagggcgaagagcctgaaaccacccactaaagtgagaactgacattcctgttttcctgctcgaatgttatcttttcctaaacca

SEQ ID NO: 62467 - DNA, 2448 bp, Homo sapiens
ggttgttgttgtttatcttgcatgcagtcttgttcttttaaaaaattcaatttctgtttgtcagttagggtcactctttgttacttgcaactaaataaacctaaatgacatagaagaaaaagtaagaacaattttttttttactgtaagtattgtttcttagatatttttagtctactccaaagataaagaacataattacattgcaatgtgtctaaactatctaccaaagcatgtaatagtttccttcccttcctagtgtttcatcagaagttcaaagatcaaaacaaaatggtaactgccaagtactccgtatcataaagaagatgctatatcatccatgcggccagtgtcaaaccactgtgaaaataattctgcctgcgttacccagtatgcctgcctccagactgtatacgggagttgatgaacttggagtgtggggaatatttcagagacagttttcagtgttttgtgaatggaacatacacacgcacacatacatgcatacacacacaggtgtacacacatacacacaaaaagcgcggtagttttttttctatcaccacaggcaaagagaacacgctttagaagtacttcttagagagcttttaaatgttctctggaatttgggagacagaaagactagtatatatctgtattatatatggcatataggataacatatgtagcaaaaatagatatagatacatagatatacgagagagcaaataaattagaaagttatttatctagaaattgtagattgagtaaataataactattctacactcatataaggacactgttcagctattaatattaaaattatggtacatttatatttattaatagataaatactcgtaaaatatttgtaactaaaaacatcagctatttgtgcttcatattcataatgtatgtatacaaataataattatagaaaaataatggaggacaacaaactaaaatgatagtataaattatctcttgtttttttctcacataattattctctttttgattttgcttatccaaatttttaaatttttaatttttctgtataaatattatgtgtaaaataaacatggctacttttcaaagtaatcaaagtttttaaaataatctgtatttttttataccagcagcacaaaagtgtatcaacacagagtaaggattaaagttttctgaatcctaatctgaaacattgcttctgatacataaaatcatagtgcatgtgaagctttggaattaaacagactaggcttggtttatggctctcaattttttaaggagtttgggaarcaccaacctaaggcttcacttaaaagttttaaaaatctaattaaaaaaaattcattcctcacaaagtatttggaactcctaaggatgtcattgacatcctaaatagttaaaatattgagtagttttaaggtatatttgtggatttaaatgtcttattgaatgtgctaacttgcagcagggtcttttatgtgttcagaaaaatataagaggatagaatttcagtttatactgaagtaatgaccacaaatgctttaaatgaatgcattaataaatccaaaataatcaggacattcattccattaaaatgtcttttaaatacctttttaaggaaatgattagccttaacataacaattgtttaatactagctattgtgaaaagaaacatgtggctcttgctaaaattaaatgtcataagttgttttgagtctctcagttttctgaattgaaaattttaaattacttttaataaataaccctgaaaatgtaatgccattccaaaatcacacttggcttttatattgatttgttgcatatttccttagagatacaaatcgacttgttgatgttttctgtttattcttgaggatcagtaacagtgtattcaacttgcagctttttcatagatacaaacaggaaggttgccaattaggttggaattttctgtgaaataggtgaggatttacaaggaactggaataaaaccagctgtgttcactaggagacaccactgggtgtggcttttgtctcaggctatattcaaaattaaactgaaatataataaccacaaacccaaattactagcatttgacaaaataagggggtaatttaagttttgtaactaaataaaaaggaagcatagtctgaagaacaagaaatatttatatgtgaaaatcctgtacataaaatgaaaatatttcatatcacttgtgtaattcctaaagaataagatgacatgttactaacatactaaaaattattttcatcaagactgaataggctttatatgacaattttatagggacaggaggcaggaaattctgggcagaagagggcagttccttggcaagggcgaagagcctgaaaccacccactaaagtgagaactgacattcctgttttcctgctcgaatgttatcttttcctaaacca

SEQ ID NO: 62468 - DNA, 2448 bp, Homo sapiens
ggttgttgttgtttatcttgcatgcagtcttgttcttttaaaaaattcaatttctgtttgtcagttagggtcactctttgttacttgcaactaaataaacctaaatgacatagaagaaaaagtaagaacaattttttttttactgtaagtattgtttcttagatatttttagtctactccaaagataaagaacataattacattgcaatgtgtctaaactatctaccaaagcatgtaatagtttccttcccttcctagtgtttcatcagaagttcaaagatcaaaacaaaatggtaactgccaagtactccgtatcataaagaagatgctatatcatccatgcggccagtgtcaaaccactgtgaaaataattctgcctgcgttacccagtatgcctgcctccagactgtatacgggagttgatgaacttggagtgtggggaatatttcagagacagttttcagtgttttgtgaatggaacatacacacgcacacatacatgcatacacacacaggtgtacacacatacacacaaaaagcgcggtagttttttttctatcaccacaggcaaagagaacacgctttagaagtacttcttagagagcttttaaatgttctctggaatttgggagacagaaagactagtatatatctgtattatatatggcatataggataacatatgtagcaaaaatagatatagatacatagatatacgagagagcaaataaattagaaagttatttatctagaaattgtagattgagtaaataataactattctacactcatataaggacactgttcagctattaatattaaaattatggtacatttatatttattaatagataaatactcgtaaaatatttgtaactaaaaacatcagctatttgtgcttcatattcataatgtatgtatacaaataataattatagaaaaataatggaggacaacaaactaaaatgatagtataaattatctcttgtttttttctcacataattattctctttttgattttgcttatccaaatttttaaatttttaatttttctgtataaatattatgtgtaaaataaacatggctacttttcaaagtaatcaaagtttttaaaataatctgtatttttttataccagcagcacaaaagtgtatcaacacagagtaaggattaaagttttctgaatcctaatctgaaacattgcttctgatacataaaatcatagtgcatgtgaagctttggaattaaacagactaggcttggtttatggctctcaattttttaaggagtttgggaaacaccaacctaaggcttcacttaaaagttttaaaaatctaattaaaaaaaattcattcctcacaaagtatttggaactcctaaggatgtcattgacatcctaaatagttaaaatattgagtagttttaaggtatatttgtggatttaaatgtcttattgaatgtgctaacttgcagcagggtcttttatgtgttcagaaaaatataagaggatagaatttcagtttatactgaagtaatgaccacaaatgctttaaatgaatgcattaataaatccaaaataatcaggacattcattccattaaaatgtcttttaaatacctttttaaggaaatgattagccttaacrtaacaattgtttaatactagctattgtgaaaagaaacatgtggctcttgctaaaattaaatgtcataagttgttttgagtctctcagttttctgaattgaaaattttaaattacttttaataaataaccctgaaaatgtaatgccattccaaaatcacacttggcttttatattgatttgttgcatatttccttagagatacaaatcgacttgttgatgttttctgtttattcttgaggatcagtaacagtgtattcaacttgcagctttttcatagatacaaacaggaaggttgccaattaggttggaattttctgtgaaataggtgaggatttacaaggaactggaataaaaccagctgtgttcactaggagacaccactgggtgtggcttttgtctcaggctatattcaaaattaaactgaaatataataaccacaaacccaaattactagcatttgacaaaataagggggtaatttaagttttgtaactaaataaaaaggaagcatagtctgaagaacaagaaatatttatatgtgaaaatcctgtacataaaatgaaaatatttcatatcacttgtgtaattcctaaagaataagatgacatgttactaacatactaaaaattattttcatcaagactgaataggctttatatgacaattttatagggacaggaggcaggaaattctgggcagaagagggcagttccttggcaagggcgaagagcctgaaaccacccactaaagtgagaactgacattcctgttttcctgctcgaatgttatcttttcctaaacca

SEQ ID NO: 62469 - DNA, 653 bp, Homo sapiens
gataacatgacttttataaacrctgacaaagattattcacctggccaaacgtcagctgagattctgaaccttctcctaggcacttctatgcacttccttgtaaacttcagttttagcaaagaacccagctaaatcagtttaccagaaaccccatccttgctatttgatcatccttgatatctaatgcagttcctcattttccaacatcccttaggttgttctgatcaccctggctagtcttagaaagaatcctgtttgaatcatttagccagaatcccccttaccctgatccactgacctccaccccactgtactctttggttataagttcctaactgcccatgctgtattcagtgttgagcccagtctgtctctccccgacacccacaacccgccaggcagtggtcctacccttatgatgatcctgtgtaaagtcttccttaccatgctttaacaagcaacattaaataatttttttaacactactctccttatttcttctgttttctactgtagttttaagttagatctatttttgatcttcctccaatctgtttcttaaactgataatattccatattacaatcttttgtcattcaaagaagttcctcccacattacaattataagctttgtatttaaacacacattttt

SEQ ID NO: 62470 - DNA, 653 bp, Homo sapiens
gataacatgacttttataaacgctgacaaagattattcacctggccaaacgtcagctgagattctgaaccttctcctaggcacttctatgcacttccttgtaaacttcagttttagcaaagaacccagctaaatcagtttaccagaaaccccatycttgctatttgatcatccttgatatctaatgcagttcctcattttccaacatcccttaggttgttctgatcaccctggctagtcttagaaagaatcctgtttgaatcatttagccagaatcccccttaccctgatccactgacctccaccccactgtactctttggttataagttcctaactgcccatgctgtattcagtgttgagcccagtctgtctctccccgacacccacaacccgccaggcagtggtcctacccttatgatgatcctgtgtaaagtcttccttaccatgctttaacaagcaacattaaataatttttttaacactactctccttatttcttctgttttctactgtagttttaagttagatctatttttgatcttcctccaatctgtttcttaaactgataatattccatattacaatcttttgtcattcaaagaagttcctcccacattacaattataagctttgtatttaaacacacattttt

SEQ ID NO: 62471 - DNA, 1328 bp, Homo sapiens
  misc_feature (1)...(1328): n = A,T,C or G
ttgagagtcgtttagaaaagtgcaaggtcacatatagctgtagggtagggctttttctccgagctgtgcatcaggacgttttacatcttagagatgctgtcttaaggtctttaggctgaaaggatggtagtcagcctatctcgccacaacttacaaggattcyccaccttcccttgggagcccagcgttatctcataaccagttatcaaaaagttgacagtttttgaaatcaggtggcaatatactttagttgaaagtgtgctggactagggcgaacttggctgatctcttagttctttgactgcctaactgtataagtgcagatcaaatgtttaatctctctgagtctcagtttttccatctataaaatggtcataaggccagtatgnnccgcacgcctgtaatcccagcactttgagaggctgaggcaggaggattgcgtgaagccaggagttcaaaaccagcctgggcaacatagtgagaccctgtctctataaaaataaaaattaaaaaagtagccaggcgtggtggtgcatgcctgtagtcccagctacttcagaggctgaggcaggagggttgtttgagcccaggagtttgatgatgtagtgagctatgattgcaccaatgcattccagcttgggcaatggagcaagatcctgtctctaaaagaaatttaagaagaataataaataaacttgaaaaaatggtcataaaaatatctgtgcagtgtatttcaaaaggttatgaggatcaaacaaaatgatacatgtaaaaagaatgttacaaagcagaaatgtatgctgggtaggggggagaggaagggacaggatggggatggggatgggactaaacttagggggtctgccgtgtcccagggactgtgctcattttctgacaggagcaatattattaccgactgtgacagcagctcccactaagcctgcaccttagctgcagatccttagcagggcagagagacaaggctgtatttgtatcaggtttgtcgtctgggttgtgactctcgacttgcccaggattcttcctggtcctgaccgagttgtctttgctctccatttcaggaagatgagagactgcttaggcgccaccactagtaccatgagtccctgcactggttaaagccatcgccacaacctggacaggcagcaaggtaagcagagaggccagtccaggcgagctcctgggatgtgagtgcatttccgccccaactgctgcccggaaaaatcccaagtgcacaaacaagtcaaggcagcgcatcagggtccctcctacccgagctccaggacccagaggaagctgggtccccttca

SEQ ID NO: 62472 - DNA, 1328 bp, Homo sapiens
  misc_feature (1)...(1328): n = A,T,C or G
ttgagagtcgtttagaaaagtgcaaggtcacatatagctgtagggtagggctttttctccgagctgtgcatcaggacgttttacatcttagagatgctgtcttaaggtctttaggctgaaaggatggtagtcagcctatctcgccacaacttacaaggattctccaccttcccttgggagcccagcgttatctcataaccagttatcaaaaagttgacagtttttgaaatcaggtggcaatatactttagttgaaagtgtgctggactagggcgaacttggctgatctcttagttctttgactgcctaactgtataagtgcagatcaaatgtttaatctctctgagtctcagtttttccatctataaaatggtcataaggccagtatgnnccgcacgcctgtaatcccagcactttgagaggctgaggcaggaggattgcgtgaagccaggagttcaaaaccagcctgggcaacatagtgagaccctgtctctataaaaataaaaattaaaaaagtagccaggcgtggtggtgcatgcctgtagtcccagctacttcagaggctgaggcaggagggttgtttgagcccaggagtttgatgatgtagtgagctatgattgcaccaatgcattccagcttgggcaatggagcaagatcctgtctctaaaagaaatttaagaagaataataaataaacttgaaaaaatggtcataaaaatatctgtgcagtgtatttcaaaaggttatgaggatcaaacaaaatgatacatgtaaaaagaatgttacaaagcagaaatgtatgctgggtaggggggagaggaagggacaggatggggatggggatgggactaaacttagggggtctgccgtgtcccagggactgtgctcattttctgacaggagcaatattattaccgactgtgacagcagctcccackaagcctgcaccttagctgcagatccttagcagggcagagagacaaggctgtatttgtatcaggtttgtcgtctgggttgtgactctcgacttgcccaggattcttcctggtcctgaccgagttgtctttgctctccatttcaggaagatgagagactgcttaggcgccaccactagtaccatgagtccctgcactggttaaagccatcgccacaacctggacaggcagcaaggtaagcagagaggccagtccaggcgagctcctgggatgtgagtgcatttccgccccaactgctgcccggaaaaatcccaagtgcacaaacaagtcaaggcagcgcatcagggtccctcctacccgagctccaggacccagaggaagctgggtccccttca

SEQ ID NO: 62473 - DNA, 550 bp, Homo sapiens
caaatttattgtatagcaaaattcatttattttcactcccactagtaaattattaaaacgctggtcatgccctgcactttcccagcgttagataatttcattacttttaagcttagccagtttgaaatgttatcactcattccaaacttttttgtgggctgggcgcggtggctcacgcctataatcccaacagtttgggaggctgaggcgggcagatgacttgaaatcagaagttcgagaccagcctgggcaacatggtgaaaccccgtctccactaaaaatacaaaaattagccgggcgtggtggcgcatgttgtaatcccagctacttgagaggctgaggtgggagaatcgcttgaacccaggaggcagaggttgcagtgagccaagatcrcaccactgcactccagtctgggcaacagagagaaactctgtcttaaaaaaaaagaaaacttttttgtgtttcgtgctgtttatatttcttctatgaattttctgttcatgctcttttctattttactatttaccttttatctgtaaactacagttca

SEQ ID NO: 62474 - DNA, 550 bp, Homo sapiens
caaatttattgtatagcaaaattcatttattttcactcccactagtaaattattaaaacgctggtcatgccctgcactttcccagcgttagataatttcattacttttaagcttagccagtttgaaatgttatcactcattccaaacttttttgtgggctgggcgcggtggctcacgcctataatcccaacagtttgggaggctgaggcgggcagatgacttgaaatcagaagttcgagaccagcctgggcaacatggtgaaaccccgtctccactaaaaatacaaaaattagccgggcgtggtggcgcatgttgtaatcccagctacttgagaggctgaggtgggagaatcgcttgaacccaggaggcagaggttgcagtgagccaagatcacaccactgcactccagtctgggcaacrgagagaaactctgtcttaaaaaaaaagaaaacttttttgtgtttcgtgctgtttatatttcttctatgaattttctgttcatgctcttttctattttactatttaccttttatctgtaaactacagttca

SEQ ID NO: 62475 - DNA, 550 bp, Homo sapiens
caaatttattgtatagcaaaattcatttattttcactcccactagtaaattattaaaacgctggtcatgccctgcactttcccagcgttagataatttcattacttttaagcttagccagtttgaaatgttatcactcattccaaacttttttgtgggctgggcgcggtggctcacgcctataatcccaacagtttgggaggctgaggcgggcagatgacttgaaatcagaagttcgagaccagcctgggcaacatggtgaaaccccgtctccactaaaaatacaaaaattagccgggcgtggtggcgcatgttgtaatcccagctacttgagaggctgaggtgggagaatcgcttgaacccaggaggcagaggttgcagtgagccaagatcacaccactgcactccagtctgggcaacagagagaaactctgtctwaaaaaaaaagaaaacttttttgtgtttcgtgctgtttatatttcttctatgaattttctgttcatgctcttttctattttactatttaccttttatctgtaaactacagttca

SEQ ID NO: 62476 - DNA, 550 bp, Homo sapiens
caaatttattgtatagcaaaattcatttattttcactcccactagtaaattattaaaacgctggtcatgccctgcactttcccagcgttagataatttcattacttttaagcttagccagtttgaaatgttatcactcattccaaacttttttgtgggctgggcgcggtggctcacgcctataatcccaacagtttgggaggctgaggcgggcagatgacttgaaatcagaagttcgagaccagcctgggcaacatggtgaaaccccgtctccactaaaaatacaaaaattagccgggcgtggtggcgcatgttgtaatcccagctacttgagaggctgaggtgggagaatcgcttgaacccaggaggcagaggttgcagtgagccaagatcacaccactgcactccagtctgggcaacagagagaaactctgtcttaaaaaaaaagaaaacttttttgtgtttcgtgctgtttatrtttcttctatgaattttctgttcatgctcttttctattttactatttaccttttatctgtaaactacagttca

SEQ ID NO: 62477 - DNA, 723 bp, Homo sapiens
acacattattcaactataatacacactggttaagggaaaataaaaacttagcctactcagcataagtgaacactaggcaaaaagtagcaattatatttttcaatcagcaaagtgtaaacatattaaaaggaaatcatgttgaaagcatgctctacctgaaaagaacacattagtgtttcatccacactcatcatggcacctgcattgtcaaactctccrcaataattgggcgcagaaaacagagtgaccaactgcctctttgcaaaaaattcatatccatcttcaaccaccttgaagagaaaattttttcaatataaataggtgcaaatattaggtgagtaaaaccatgtttcagtttcccattgagcctgatatcttgtgttccagaaacactttgtataaataagcaatacctacccaccaaaatcaacaaggagaatctgtgctcacacacatgctcttaagtgtacatgtaaaattcaaaatcaatacctgatgggctctacatataagatccaaatcatgcttatggagaaattttgcaaccacttctgcaccaaatgtgaaggacactcctctgtcattttcaccccagcctaagacatctttatcggggtcagaccacaaaagatcacaaagaagaccttgatctggtacatcagttggtcgcataattcgccgaatctgctccatagattgaagatctggtgataaacctattca

SEQ ID NO: 62478 - DNA, 695 bp, Homo sapiens
tgtaaatttttagagttttgcagtctaagatttgcagttcagctatttaaggcagcaactgccacattatagaactgacatttattaaggatcttttatgtaccagacatgttgaaatccattgtctaaatcatcacaacaaacctataaaggtaattattatatctattttacagatgcaaaaagatgcccagaaaagttaaataacttgctcaaattcttacagctagttatatgcagagccaggttttaaattcaaggctatttgattttaaggagaggagttctgtaacattatttaaaatctataagtagttcagaccaggcacgatggctcacatctgtaatcccagcactttgggaggccaaggcaggtggatcacttgaggccaggagtttgagaccagcctgggcaacrtggcaaaaccctgcctctactaaaaatacaaaaattagccaggcatggtggcacacacctgtaatcccagctactctggaggccaaggcatgagaattgcttaaacctgggaggtggaggttgcagtgagcaagccgagatcatgccacagcactccagcctgggcgacagagcaagactgtctcaaaaataaaaataaattaaaaaaatatatgtatagtagtatacatacaaaatatatgtagttcagtcaataaatacttgtcccttgggagat

SEQ ID NO: 62479 - DNA, 582 bp, Homo sapiens
ggaaaaactcacccccataattcagttacctcccaccaggtccttcccatgacacatgaggattatgggagttaatattcaagatgagatttgggtggggacacagccaaaccatattagtggtggtctagaaccaaatccacaatatctccaaggtatgcctgtaattatagtaatagctttctttattccctaaggccacagtgtaaaactcatccttatattgtccagctgcatcctagattccacagaatcttaaacgatcattattcacacaaacaagattcaaatgtaccctaaattttattttaattatgaacccagacactgtgaaacacacatcaggccatctgagcagtattgtcccgtaccacagaaataactgctcttggtgattgtcagaaaatttgattacttttctattgactttatgtagaaccataaaaattttgaaaaattaattaatatctcagtattcatttagctcrcttccacaattgaaactgctcctaggcagctccttggctagagcatgatcagtgacaacagtatcacctaggtacactttagtgacactaatgg

SEQ ID NO: 62480 - DNA, 730 bp, Homo sapiens
catatgaaacaatgagaaatgatggaatataaaactctggattgagtatatgctcagcagacatttagaaaagggagaggtcactagagattgatacagtcagagaagtcttatgaaggaggtggtactgaaattgatctttaaaacactgtctggatatagttataaaaggagatgaacttgctatatccccgtctatttctcacattaaccctgtgaggttaatctctttccataaatgaggaaacagctcaggcagattaagtcacttaccaaggtcacacaattgaggactatctaacacaggagagctgtgtaggtctctcctctacacagcacatctgttctgtaatgtctggattgctgcgtatcagaataatagccaaagctggccttttctggtctggtccctgcaccgtattagcctcatctcccaccatctctccatacggcctcagcttcagccacaccttgtgttttagaaagrttcctagcgggaaacacatggcacacttaaaaaggtttaactgaaaataatgaggaattattcttagaaaagtggatatctagggaaaccaacaaaggctggcaaggcacctagggactagcaagaacaagaagccattactaccccaggactgaagaggcaagaggaataaatactgataacaaagtctggagtgcactgacacaatggagtggggccaggcaacaggagcaatagctttac

SEQ ID NO: 62481 - DNA, 968 bp, Homo sapiens
ttgtatgtaaggttcctctgtttttcctcagaaataaactgaggacaaaataatgtaagatcgggtagtctggtatcaacctctgcattctgtctcccaatgcagaggctggagttttaacattactgtgttgtcaggggccattttagtattgttctttagaaactggggatggctgcaaaacttcactccaacagaaccaactgttgtaatgagctatagagatgttaggaacagacaagcaatgaagaacatgaaatattccactgtttagcagtggaatcaccttctttattatcatccttaacatagaagagagtgaaaattctagaccttaccaactgtagtagtgaaagttaagacagagtaagagacagagaaaaagagagagacagagacagaaggtaagggcggctgctagtggcagtaacaaatttaattcaagtcrttggttaaccacttcattaactgtgagttcctcactgtccttcctttctcttctgtctctatgacaagtccaggttatggtatattatatggtatttttcactattgtgctttttacttcaaaggccagaaatcagaactgacagtttaacaaaagaccatgttaaatgtgtcaggtagcacgggagaatgttcccttacttatctgaaagccagcccaggagctgcctgggcaattggtgaattatccaaggtgtttgcttttcattttggccacactattgtttaggaataatgataattcccttacatctgagagtccacataatgtaatgaatagactctgggctctggtgccaagtagatctaacttcctatctctaccactttctacctacatgaggttggagtttgcttaaaaatctccgaacttctgtttcctcatctgtgaaatggagacactataactaccatacacaattttttgtgaagttttaaagaataacacatgtcaagggctt

SEQ ID NO: 62482 - DNA, 639 bp, Homo sapiens
ctagccgtaggaatggaaaccccagcattygggctgagggggctcttccttcccctccccccacgtttttcaaatttattttgccaggcggggactggtgacggtcaaaagggagcagttggcactgaatgtcaccctgaaggtaaaatgaaagacaaaagatgaacgcatgcttgctttccgtttgcagcggctgcggcggcggcaggagcagcaggatttaaaggggaaaaaaatcacacgcatatgcacacatatatacacacccagaggcgtcaattatgcaaacgcaataatgcaatcaaatcatgacagtgccgggaattttttttagaaaaatatagatatttatttttaaaaagagaaacgcatgcaaacagaatcgtgcacataccacgtaaccacccgaggagaacctggcagcctctctcttcttctgccaagttatcattgagaaaacagacaggcatcatgacgtcctgggtcacagggagtgcggaccgacgctaccaagagaaaagggaggcgccttggcgctccggctagccgtgggcgcccctctgcccctcgcagcccggctcggtgagtgcacagccgctcgggacgcggaccccgggtgccaggccgccccgcgcccgg

SEQ ID NO: 62483 - DNA, 492 bp, Homo sapiens
atactccctctcttctgtatttaatgctgcaagtaacatatgttctttttaaaataaggtttttctttgataygtgcagattcgtctacattcttggttggccctccaatcacctctggcacacaagtgtccagggctgattggattaagggatgcagtatgtgactctcaagtacaggcacaattaaccacaggatcaattctgtaccatgttctaatctgaacagctaagctagctagccccaacaattggatgttctaattatcactgaaatagttgagtaaaatactgaagttggtaatattttccattatataatatcaaataacagtttttactttcacccatattatactgaattactgttttaaagttaaagaggtttttttgtttgtttgtttgttgttttttgccaaaaaccttttgtgtaatggagggcaagagaaagttgttccatgtgatatgtaaaacacctaggatttaattgaatg

SEQ ID NO: 62484 - DNA, 1771 bp, Homo sapiens
  misc_feature (1)...(1771): n = A,T,C or G
tcctaaatgcatttttggactctgtaactcttgattgactgatggagaaaattggatccttgcaatttctaaatgtctgtgtttattttggagcaagtgctgtgttgcagctccaggcagggaacagtctgttttgcccacatttaccttcctactttatcctagcctangagcaggggtcaacaaacttttcctgtaaagagccagagagtaaatatttcagcttcgccgttcgtatgcaactactcgactttgctattataacacaaaagaggtgacagacaatgagtaaatgaatggatgtggctgcgttccaataaaactttatatacaaatacaagtgtcaggccaattttgcgcaccttctatgatggtatatctcaacattcctgcatcaaaagaataatctgcaaagcttttaaaataaacacactcaccagcaaatgtgttttaaaaaacacctctgaaaatccttataatctgacaaacttggaaaacctggggaaaacaatgaaccctactgtgtcctcgcactaggggtacctcacagagatgtgaggcaggaatcaaaaatcacatttcttgatagctaggatttctgtgatttcatagggccacatgactcatctaaggactgactattaggtttctcaaaatacacagctgtgtttttcttatgtcagggaagaccaacaatggataaagtcatcacttccccatttcattaaggaaaaattaatgaagagccaagaaaagcccaagaaaagttttggattttccacttggatctgctactttaaagaatgcagtcacactaattactgttcttcttgatgtataattttctgcaaaagataatctctttgtcagattaagattttgaaaatttagaattcaactacatgacatgaaaccacgtgtagagcagaaacacttaaatctgaccaaagagacagctgttatctgcagtgataggctaggatttccaatgtgagatttatctattaaaaataaaattacaactgtaatttttgaaggggttttctatatgcattctaggcctgtcctagtccaatttagctagttatatagtattttaggtaagactgcctctccttttctttttgcatgagtgattttgtttaataatttcagtaaactcaatcaaagaagaaaacgtatcctattaattggccataattctcccacacaaatctttgggtataactatcatagatgtagatgtgtrtagagcctggtttaatttcttaacctcaatgatattaacattttcgactagaaagttttttgttgcagagggggctgtcctgtgcatggcagggtgcttggcagcatcccctagcctccacctgctagattcttgtagcaccctcaangttgtgacaatcagaaacacctccagatactgccaaatatctctggggtgaaaggtgggtggggaggcataatcaccgcagttaaaaaatcactgatgtagagagtgtatatatatatatatatatgccctaagaaaagcggagaatagagaccgttttccagtcatcttatgttaagttactgccctcaaatattttcctgaaatagataagcaaaataagagctcgttcaagctataattattcaggcaattgactcaattctcctctttactttacatgtgagagcaccaacagtgatacttagctctcctgggcaaactgtgcagggtgtcaatgcttcaggaacacctgagaaccatcatttgtgggat

SEQ ID NO: 62485 - DNA, 1771 bp, Homo sapiens
  misc_feature (1)...(1771): n = A,T,C or G
tcctaaatgcatttttggactctgtaactcttgattgactgatggagaaaattggatccttgcaatttctaaatgtctgtgtttattttggagcaagtgctgtgttgcagctccaggcagggaacagtctgttttgcccacatttaccttcctactttatcctagcctangagcaggggtcaacaaacttttcctgtaaagagccagagagtaaatatttcagcttcgccgttcgtatgcaactactcgactttgctattataacacaaaagaggtgacagacaatgagtaaatgaatggatgtggctgcgttccaataaaactttatatacaaatacaagtgtcaggccaattttgcgcaccttctatgatggtatatctcaacattcctgcatcaaaagaataatctgcaaagcttttaaaataaacacactcaccagcaaatgtgttttaaaaaacacctctgaaaatccttataatctgacaaacttggaaaacctggggaaaacaatgaaccctactgtgtcctcgcactaggggtacctcacagagatgtgaggcaggaatcaaaaatcacatttcttgatagctaggatttctgtgatttcatagggccacatgactcatctaaggactgactattaggtttctcaaaatacacagctgtgtttttcttatgtcagggaagaccaacaatggataaagtcatcacttccccatttcattaaggaaaaattaatgaagagccaagaaaagcccaagaaaagttttggattttccacttggatctgctactttaaagaatgcagtcacactaattactgttcttcttgatgtataattttctgcaaaagataatctctttgtcagattaagattttgaaaatttagaattcaactacatgacatgaaaccacgtgtagagcagaaacacttaaatctgaccaaagagacagctgttatctgcagtgataggctaggatttccaatgtgagatttatctattaaaaataaaattacaactgtaatttttgaaggggttttctatatgcattctaggcctgtcctagtccaatttagctagttatatagtattttaggtaagactgcctctccttttctttttgcatgagtgattttgtttaataatttcagtaaactcaatcaaagaagaaaacgtatcctattaattggccataattctcccacacaaatctttgggtataactatcatagatgtagatgtgtatagagcctggtttaatttcttaacctcaatgatattaacattttcgactagaaagttttttgttgcagagggggctgtcctgtgcatggcagggtgcttggcagcatcccctagcctccacctgctagattcttgtagcaccctcaangttgtgacaatcagaaacacctccagatactgccaaatatctctggggtgaaaggtgggtggggaggcataatcaccgcagttaaaaaatcactgatgtagagagtgtatatatatatatatatatgccctaagaaaagcggagaatagagaccgttttccagtcatcttatgttaagttactgccctcaaatattttcctgaaatagataagcaaaakaagagctcgttcaagctataattattcaggcaattgactcaattctcctctttactttacatgtgagagcaccaacagtgatacttagctctcctgggcaaactgtgcagggtgtcaatgcttcaggaacacctgagaaccatcatttgtgggat

SEQ ID NO: 62486 - DNA, 960 bp, Homo sapiens
tatttgttaaatctatcatttttaaaagcagtagttctgcttttagaattagttatcattggccgggtacggtggctcacatctgtaatcccagcactttgggaggccgaggcaggcrgatcacctgagttcaagaccagcctggccaacatagtgaaaccccttctctactaaaaatacaaaacaattagccaggtgtggtggtggtcgcctgtaatcccagccactcaggaggctgaggcaagagaattgcttgaacccaggagttggaggttgcagtgagccgagatcgcaccattgcactccagcctgggcaacagagagggactccatctcagaaaaaaaaaaaaaagttatccttcaggctggacacggtggctcacacctgaaattctagcactttgggaggccaatgcgggcggatggcctgagctcaagagttcgagaccaggctgggcaacatggcaaaaccccatctctactaaaaatacaaaaattagccaggcgttgtgttgcacacctgtaatcccagctactcaggaggctgaggcatgaaaatcgcttgaacccggaaggcggaggttgcagtgagccaagatcatgccactgcactccagcctggacaacagagcaagactctgtctcaaaaaaaaaaatcatttaaatgatagttatctgctgaagaaaaacacaaaatattggacaataattattagatattttgagtaatagtgcacagtaattgagtaatagtgaaattaaaagtttaaatttctactctccttagcatctgagaatgatttctctatcatttctacccacgtccagagaggaaaaatctatcagttctcatcctgtgagattctccccataaataacatttcatcataaaagtttatctctaagacaaaaagatgaatcatgttaatttctttaatagaagcttatgtgacatgcatg

SEQ ID NO: 62487 - DNA, 960 bp, Homo sapiens
tatttgttaaatctatcatttttaaaagcagtagttctgcttttagaattagttatcattggccgggtacggtggctcacatctgtaatcccagcactttgggaggccgaggcaggcagatcacctgagttcaagaccagcctggccaacatagtgaaaccccttctctactaaaaatacaaaacaattagccaggtgtggtggtggtcgcctgtaatcccagccactcaggaggctgaggcaagagaattgcttgaacccaggagttggaggttgcagtgagccgagatcgcaccattgcactccagcctgggcaacagagagggaytccatctcagaaaaaaaaaaaaaagttatccttcaggctggacacggtggctcacacctgaaattctagcactttgggaggccaatgcgggcggatggcctgagctcaagagttcgagaccaggctgggcaacatggcaaaaccccatctctactaaaaatacaaaaattagccaggcgttgtgttgcacacctgtaatcccagctactcaggaggctgaggcatgaaaatcgcttgaacccggaaggcggaggttgcagtgagccaagatcatgccactgcactccagcctggacaacagagcaagactctgtctcaaaaaaaaaaatcatttaaatgatagttatctgctgaagaaaaacacaaaatattggacaataattattagatattttgagtaatagtgcacagtaattgagtaatagtgaaattaaaagtttaaatttctactctccttagcatctgagaatgatttctctatcatttctacccacgtccagagaggaaaaatctatcagttctcatcctgtgagattctccccataaataacatttcatcataaaagtttatctctaagacaaaaagatgaatcatgttaatttctttaatagaagcttatgtgacatgcatg

SEQ ID NO: 62488 - DNA, 960 bp, Homo sapiens
tatttgttaaatctatcatttttaaaagcagtagttctgcttttagaattagttatcattggccgggtacggtggctcacatctgtaatcccagcactttgggaggccgaggcaggcagatcacctgagttcaagaccagcctggccaacatagtgaaaccccttctctactaaaaatacaaaacaattagccaggtgtggtggtggtcgcctgtaatcccagccactcaggaggctgaggcaagagaattgcttgaacccaggagttggaggttgcagtgagccgagatcgcaccattgcactccagcctgggcaacagagagggactccatctcagaaaaaaaaaaaaaagttatccttcaggctggacacggtggctcacacctgaaattctagcactttgggaggccaatgcgggcggatggcctgagctcaagagttcgagaccaggctgggcaacatggcaaaaccccatctctactaaaaatacaaaaattagccaggcgttgtgttgcacacctgtaatcccagctactcaggaggctgaggcatgaaaatcgcttgaacccggaaggcggaggttgcagtgagccaagatcatgccactgcactccagcctggacaacagagcaagactctgtctcaaaaaaaaaaatcatttaaatgatagttatctgctgaagaaaaacacaaaatattggacaataattattagatattttgagtaatagtgcacagtaattgagtaatagtgaaattaaaagtttaaatttctactctccttagcatctgagaatgatttctctatcatttctacccacrtccagagaggaaaaatctatcagttctcatcctgtgagattctccccataaataacatttcatcataaaagtttatctctaagacaaaaagatgaatcatgttaatttctttaatagaagcttatgtgacatgcatg

SEQ ID NO: 62489 - DNA, 1038 bp, Homo sapiens
aaagtaaacacatacaggtttccaaatatagtatttaagggttccgtatctgtgggttctgtatctatagggtttgtgtctgtggatttaaccaactgtggattgaaaatatttggrtgtaaaagtgtctgtagtaaaacatgtttggactctttttccatgccattattgcttaaatagtacaatatgacaactatttacaaagcattacattgaattatgtattaaaagtaatctagagatgatttaaagtatacaggaggatgtgtggaaggatatagaatattatgccattttatatcagggacttgagtttccacagatttcggtatccccagggctcttgaaccaacccccaaggatatccagggacaactgcacatagaaatgaaatactgttgggggaagtattaccttctactataattgtaagcaattcaacactatattctaaaattaaaaatatacagatcctttgactaggccatttcatacctgggaaactatctcattaaaatataagcatggataagtaaaaacatacacagcaggcaaaacctagaacaaggtcaacagccatcaataggagaacacctgaagagttatagcatagccatgccatattctattttttttttttttttttttgagacggagtcttgctctgtcgtccaggctggtgtgcagtggcacatctccgctcactgcaagctccgcctcctcggttcacgccattctcctgcctcagcctccctcgtagctggaactacaggcacctgccaccgtgcctggctaattttttgtatttttttagtacagacggggtttcaccgtgttagccaggatggtctggatctcctgacctcgtgatccacccgcctcggcctcccaacgtgctgggattacaggcgtgagccactgtgcccagcatattctacattattatgctgtcattaataaaatcaaatagagctacatcaggtggcttgaagacttttcattatgtatggtttcattagaaaagcaagaggcaagcaa

SEQ ID NO: 62490 - DNA, 1038 bp, Homo sapiens
aaagtaaacacatacaggtttccaaatatagtatttaagggttccgtatctgtgggttctgtatctatagggtttgtgtctgtggatttaaccaactgtggattgaaaatatttggatgtaaaagtgtctgtagtaaaacatgtttggactctttttccatgccattattgcttaaatagtacaatatgacaactatttacaaagcattacattgaattatgtattaaaagtaatctagagatgatttaaagtatacaggaggatgtgtggaaggatatagaatattatgccattttatatcagggacttgagtttccacagatttcggtatccccagggctcttgaaccaacccccaaggatatccagggacaactgcacatagaaatgaaatactgttgggggaagtattaccttctactataattgtaagcaattcaacactatattctaaaattaaaaatatacagatcctttgactaggccatttcatrcctgggaaactatctcattaaaatataagcatggataagtaaaaacatacacagcaggcaaaacctagaacaaggtcaacagccatcaataggagaacacctgaagagttatagcatagccatgccatattctattttttttttttttttttttgagacggagtcttgctctgtcgtccaggctggtgtgcagtggcacatctccgctcactgcaagctccgcctcctcggttcacgccattctcctgcctcagcctccctcgtagctggaactacaggcacctgccaccgtgcctggctaattttttgtatttttttagtacagacggggtttcaccgtgttagccaggatggtctggatctcctgacctcgtgatccacccgcctcggcctcccaacgtgctgggattacaggcgtgagccactgtgcccagcatattctacattattatgctgtcattaataaaatcaaatagagctacatcaggtggcttgaagacttttcattatgtatggtttcattagaaaagcaagaggcaagcaa

SEQ ID NO: 62491 - DNA, 281 bp, Homo sapiens
ctgcatattcgtgtttgcattaataaaacaaaaatgtgtattggacttgaaaggtgttttgatggtaggtaaacacatttatttttcacctgattctgttttctgtactcacgctgccaaaaaggcagctgagagaatggtgcttgcatgagggggaattaaaaactcagagtttctttcacagcactacctttagaacgagaatayagggttaatttaattaagtgacaaaacgtccaatgttggagtttagaaaacagacccaagaccaaagaagagag

SEQ ID NO: 62492 - DNA, 281 bp, Homo sapiens
ctgcatattcgtgtttgcattaataaaacaaaaatgtgtattggacttgaaaggtgttttgatggtaggtaaacacatttatttttcacctgattctgttttctgtactcacgctgccaaaaaggcagctgagagaatggtgcttgcatgagggggaattaaaaactcagagtttctttcacagcactacctttagaacgagaatatagggttaatttaattaagtgamaaaacgtccaatgttggagtttagaaaacagacccaagaccaaagaagagag

SEQ ID NO: 62493 - DNA, 535 bp, Homo sapiens
tcaaaacgccccaccattgccttgaggaataaaagaaattaggctgcttgcttgtccttttaaaggttttcccatcgtggtcaggtaagggccgccatccatctcttagcccactcacactgttcctgttgaactttgggaggcagcccacctggcaggggtctgctacatgccatttcaagtgcaccactttataaataggaagattgggatagaaaatcatgaattcttacatggactttctccaatcttaaagggaaatrgaggtgaacaaaggcatattaaaaataatgaaggcagctgggactaatggcattgctcctgtgtctttcaagatctttattactaattcagataagtggaaacccgtagcccaaatctgctatcccgccttttcttccaagtggctgtaataacgaagccagggctcacacatatcaagggccccaccagtcctttttcctagcaatggttatgggatcccattgccagcctgcatgatttgttctcaagacatcctgaacacaatgctggg

SEQ ID NO: 62494 - DNA, 535 bp, Homo sapiens
tcaaaacgccccaccattgccttgaggaataaaagaaattaggctgcttgcttgtccttttaaaggttttcccatcgtggtcaggtaagggccgccatccatctcttagcccactcacactgttcctgttgaactttgggaggcagcccacctggcaggggtctgctacatgccatttcaagtgcaccactttataaataggaagattgggatagaaaatcatgaattcttacatggactttctccaatcttaaagggaaatgraggtgaacaaaggcatattaaaaataatgaaggcagctgggactaatggcattgctcctgtgtctttcaagatctttattactaattcagataagtggaaacccgtagcccaaatctgctatcccgccttttcttccaagtggctgtaataacgaagccagggctcacacatatcaagggccccaccagtcctttttcctagcaatggttatgggatcccattgccagcctgcatgatttgttctcaagacatcctgaacacaatgctggg

SEQ ID NO: 62495 - DNA, 501 bp, Homo sapiens
cagaaagtctaagctataattttatactatacagcacaaattacagaaaacgttcagctacacatacaacatggatgaattttacaaacttaacattaagagagaaaagcaagacatataacaagcttaatttaagcaagagtttatagtgtatgatgctttttatataaggttcaaaaagacactaacctaacctyattgataatagatatatacataggtgataaaaccaaacagaaaagcaagcaatcaattaccatgaaagccgggatagtgattacctctaggggtaagggagaggtagtaatagaagggattctgaaggccgggcgcagtgaggggctcattcctgtaatcccagcactttgggaggccaatgagggtggatcacttgaggcctagagttcaagaccagaagtgatcctgaagagctgccattattctactttttgaccacagtgtttattacacagcttatattttgtagttattcatcaattt

SEQ ID NO: 62496 - DNA, 501 bp, Homo sapiens
cagaaagtctaagctataattttatactatacagcacaaattacagaaaacgttcagctacacatacaacatggatgaattttacaaacttaacattaagagagaaaagcaagacatataacaagcttaatttaagcaagagtttatagtgtatgatgctttttatataaggttcaaaaagacactaacctaaccttattgatwatagatatatacataggtgataaaaccaaacagaaaagcaagcaatcaattaccatgaaagccgggatagtgattacctctaggggtaagggagaggtagtaatagaagggattctgaaggccgggcgcagtgaggggctcattcctgtaatcccagcactttgggaggccaatgagggtggatcacttgaggcctagagttcaagaccagaagtgatcctgaagagctgccattattctactttttgaccacagtgtttattacacagcttatattttgtagttattcatcaattt

SEQ ID NO: 62497 - DNA, 1073 bp, Homo sapiens
attaactttaaaatcagatagaaagaaataaaaggtaacatttcttactattgaaaaatctattttattttaattactattaaaattgtcaccagaaccagatgaccagatgagttctagctaactttatatatgtcaaaaaataactatacatgtaattatatattttatatattaaatatgcacttaatagctttatattttagagcaattttaggttcacagaaaaattgagcagaaagtactgagagttctcatgttccccctacctccagaaatgcacaacctgccccactatcaacatcccacagtggtaccatttgttacaaccaataaagttacatgaacacataattatcactgaaagttcatagtttacattagagtttactcttgttgtacattttatcagtttgaacatatatatagtgacatatacccaccattacagtattatacaaaatagtttcactcccctaaaagtataaacaaatctaaagctatgcttagaggaagacttacagacttaaaatggatatttttaaaagaggagaggctaaaatcaatgagtccaatatacaactctaaaaaacagtaaattaaactcaaagataaaagcggatattaatcaagtaggaaaagtcaacatttgatgatcatttatttatttagagacagagtcttgctaggccacccaagccggagtgcagtggcaagatcttggcycactgcaacctctgcctcccaggttcaagtgattctcctgcctcagcctcccgagtagctgggattacaggcacgcgccaccacacccagctaatttttgtatttttagtagagacggggttttactatgttgaccaggttggtctcaaactcctgacctctggtgatccgcccgcctcggcctcccgaagtgctaggattacaggcgtgagccaccactcttggccccaacatttgattatttgtgatcctttgatgattattcttaaccactgatctttccactgtctcatggttttgcctattccatgtagttggaaccctgcagcatgtagccttttcagatt

SEQ ID NO: 62498 - DNA, 508 bp, Homo sapiens
ttagtcattcccatgtatattgtggttgtgtgcacctgcatgtgttattttattttatttttttgagatggagtttcactcttgtcacccatgctggagtgcaatggcgtgatctcagctcactgcaacctctgcctcccgggttcaagtgattctcctgtctcagcctcccgagtagctgggattacaggcggctgccaccatgtccagctaatttttttttttttttttttttaagcagagatggggtttcaccatgttgaccaggctggtcttgaactcctgacytaaggtgatccacctgcctcggcctcccaaagtgctgggattataggtttgagccaccacgcccagctgtgttatgttttaacacatgtgctatgtcgctaagtggttggaaatatgaaaatgagttgatgtgttcttataataagacatctgctttagtatacattattagcatgctcttccactttggaatttttattttatattttcacttaggcaa

SEQ ID NO: 62499 - DNA, 531 bp, Homo sapiens
atatggtttggctctgtgtctccacccaaatttcatctcgaattgtaatcgccatgtgtcaagggaaggacctggtgggaggtgattggatcatgggggtggtttccctcatgctgttcttgagacggtgagggagttctctggagatctgatggttttaaaagtggcagtttcccccgtgctctcctctctctcttctgccaccatgtaagacatgccttgcttccccttcaccttccaccatgattgtaagtttccttaggcctccccagccatgtggaactgtgaatcaattaaacctcttttgtttataaattactcagtctcaggtagtatattcatagcagtgtgagaacggactaacacatctgtttaatggatcttgatattcctatccattttataaacaagaaagttgagcacaaaagtattataaactcatcaaattgcatacattaaatgggtatagctttctgtatgtcagctatacttcagtaaagtggtttaaaaattatagamtattacatgtca

SEQ ID NO: 62500 - DNA, 531 bp, Homo sapiens
atatggtttggctctgtgtctccacccaaatttcatctcgaattgtaatcgccatgtgtcaagggaaggacctggtgggaggtgattggatcatgggggtggtttccctcatgctgttcttgagacggtgagggagttctctggagatctgatggttttaaaagtggcagtttcccccgtgctctcctctctctcttctgccaccatgtaagacatgccttgcttccccttcaccttccaccatgattgtaagtttccttaggcctccccagccatgtggaactgtgaatcaattaaacctcttttgtttataaattactcagtctcaggtagtatattcatagcagtgtgagaacggactaacacatctgtttaatggatcttgatattcctatccattttataaacaagaaagttgagcacaaaagtattataaactcatcaaattgcatacattaaatgggtatagctttctgtatgtcagctatacttcagtaaagtggtttaaaaattatagaatattacawgtca

SEQ ID NO: 62501 - DNA, 713 bp, Homo sapiens
ttgcacaccatatataaaacaattgctgctattttggctcatattgttgtggaatacaagtatttctaagacccagagatttcccccccatggcatttcccccttttaacattcaatgcagttgcccaaattcagactctcattatcattaatattgattgttggttagttttctggaacacgtttgtatagtgacatcagctgatttcaagtcctgttgggagcatctttgtcaatagtaaagttggatatcgtaagacggctgtccttgaatatcttcattagcagtttttcagtttttaattagtatctaaattagatttcttattgttacaactcaccacagatgtgccatacttgtgcagaaacttaccaggtatttttacctttggtttccaaagcacataatactaaatggtgtgattgctgctttggatgctgggtttttttttttttwaaaaaaagtcatgtaaaagggtacatggcatataaaactgtggagtagataaatgtggctagagtccatcactaagacaatcgaatatctttggttggcagtgcattcattctatagaatattttaaatcagattgcatttataggggactaaaccctttaaaaactattaagtatatgttaattggtctctaagacattgtattgtgcttttagtaaactgttaatttggaccaggaaagcactgtattgatatc

SEQ ID NO: 62502 - DNA, 713 bp, Homo sapiens
ttgcacaccatatataaaacaattgctgctattttggctcatattgttgtggaatacaagtatttctaagacccagagatttcccccccatggcatttcccccttttaacattcaatgcagttgcccaaattcagactctcattatcattaatattgattgttggttagttttctggaacacgtttgtatagtgacatcagctgatttcaagtcctgttgggagcatctttgtcaatagtaaagttggatatcgtaagacggctgtccttgaatatcttcattagcagtttttcagtttttaattagtatctaaattagatttcttattgttacaactcaccacagatgtgccatacttgtgcagaaacttaccaggtatttttacctttggtttccaaagcacataatactaaatggtgtgattgctgctttggatgctgggtttttttttttttaaaaaaaagtcatgtaaaagggtacatggcatataaaactgtggagtagataaatgtggctagagtccatcactaagacaaycgaatatctttggttggcagtgcattcattctatagaatattttaaatcagattgcatttataggggactaaaccctttaaaaactattaagtatatgttaattggtctctaagacattgtattgtgcttttagtaaactgttaatttggaccaggaaagcactgtattgatatc

SEQ ID NO: 62503 - DNA, 1383 bp, Homo sapiens
aatacatttttgtattattacaatgaaagggtttgaactacaattacaaagttgcacaagaatatggtcatttaagagcttgattaatttttgttttttaaattgtaattgttttttgtcttagaggacttcataattaattttcaatttaagtgatattctttggaggcatcacccacagattacaaaatgttatttctctattttatagccattaaggaaatatttggaattttgaatgagtgtctacaaagagaaaagttgtgaatcactactgaccctcaggaaatgaatgaggctagttgtagaaagcttcatgcagatagaaattataaatcactttcttattttccaggttatagaaatgctctttaagaccaactggagatgtcagtatgactcatgtatattttacagaagtcaatttgatatagaaaccaaattgacatagaattcaattatacactcacacatacagacacacrcaagtgtgtgtgggtgtgtatcttttattacttacaaaaagctatttattaaagtttactttcataaaaagacaaagtccggttcctttgtcaccacagacagtgttttcaaatgaatcctatcgttttagcagactgtatgatgttttcataacatcgtagttaaagatgcaggctttggtacagccatatgatggataccacccagaaatagaagaggaggggatgcttgatttaggcaacaacatggatggttcttaaatgcacttttctaaatgaaagacaccaaattcaaaaggctgtacactgtatgtcacacttcatgtgacattatgggaaaggtaaacataccaagatctgtggttcccaagggctggttgcctctcaagggagcaggagctgtctaaaaagtggccacacaagggaatttttagggtgatagaactgttctatgtggtactttgatgcatatttgatgcattttttacaccacaaggataaacttaaccacgtgcaaacttttattacagtttttgatagctttactgaggcataactgacataaaaagacctgtacacttttcaccatatacaaacattaactcaagatagattaaagaagaaaacctaggaaacaccattctgaacatcagcctttggaaagaatttatgactaagtcatcaaaagcaatggcaacaaaaccaaaaattgacaagtgggacttaattaaactaaagagcttctgcacagcaaaagaaactataaacagagtaaacagacaacatacagaacgggagaaaatattcacaaactacatatacaacaaagttcttatttccagaatctataaggaactttaacaattgaacaagcaataaataaagaactcctttaaaa

SEQ ID NO: 62504 - DNA, 1383 bp, Homo sapiens
aatacatttttgtattattacaatgaaagggtttgaactacaattacaaagttgcacaagaatatggtcatttaagagcttgattaatttttgttttttaaattgtaattgttttttgtcttagaggacttcataattaattttcaatttaagtgatattctttggaggcatcacccacagattacaaaatgttatttctctattttatagccattaaggaaatatttggaattttgaatgagtgtctacaaagagaaaagttgtgaatcactactgaccctcaggaaatgaatgaggctagttgtagaaagcttcatgcagatagaaattataaatcactttcttattttccaggttatagaaatgctctttaagaccaactggagatgtcagtatgactcatgtatattttacagaagtcaatttgatatagaaaccaaattgacatagaattcaattatacactcacacatacagacacacacaagtgtgtgtgggtgtgtatcttttattacttacaaaaagctatttattaaagtttactttcataaaaagacaaagtccggttcctttgtcaccacagacagtgttttcaaatgaatcctatcgttttagcagactgtatgatgttttcataacatcgtagttaaagatgcaggctttggtacagccatatgatggwtaccacccagaaatagaagaggaggggatgcttgatttaggcaacaacatggatggttcttaaatgcacttttctaaatgaaagacaccaaattcaaaaggctgtacactgtatgtcacacttcatgtgacattatgggaaaggtaaacataccaagatctgtggttcccaagggctggttgcctctcaagggagcaggagctgtctaaaaagtggccacacaagggaatttttagggtgatagaactgttctatgtggtactttgatgcatatttgatgcattttttacaccacaaggataaacttaaccacgtgcaaacttttattacagtttttgatagctttactgaggcataactgacataaaaagacctgtacacttttcaccatatacaaacattaactcaagatagattaaagaagaaaacctaggaaacaccattctgaacatcagcctttggaaagaatttatgactaagtcatcaaaagcaatggcaacaaaaccaaaaattgacaagtgggacttaattaaactaaagagcttctgcacagcaaaagaaactataaacagagtaaacagacaacatacagaacgggagaaaatattcacaaactacatatacaacaaagttcttatttccagaatctataaggaactttaacaattgaacaagcaataaataaagaactcctttaaaa

SEQ ID NO: 62505 - DNA, 838 bp, Homo sapiens
tacraattatttagccaatcttgtttcctggttttgctggcattttccccatggtgcacatcagtaaatgttcatgtaattatgagagatgatagaatagaaaccctctgtgcacactgaataattagattaaaactctcaactaaaacactatgaccacttgtatttttacccttacagttagttcccttcacatctaaggggagcaatgaaaaaaagacatgttgtaactttgggaaataaaagatctgttcctctattattctgttattcttgttttaacgcacttgttcattatctgatcaaacaattattgagtgtttaatgagtcctaggggctatgctggaccccgaagataaaaacaggaagacttggtacttgtcataggggacaatcaagcaaggactcacaaaaatcattattataatagctacaatttgtatagtgcctaccacaggccaagcattgttttaatggctttatatattaacttacttaatcttcacaataaacttatgaaaaagttactattagtatttccactttactaaggagaaatatgaggcacagataggttactgtgcaaggttccacagttagaaagtggcagaaccaggattcaatgccagatggtttagctccattgactgtgcccttagccactcactataacaaacattagagatgctatgggaaataagtaaaatttacatatggtagaatgctacccaaggcagggaatggacatctctatcttggatgggagctggagagaaaacacttcatcatggtaatgatacttgaaatgactgcagaacaagaggaagtggcccatcc

SEQ ID NO: 62506 - DNA, 1206 bp, Homo sapiens
gacccactttgtataagtatataragagaaaatgaaaatgagtttgcaaatcatgcttagcataagtctgagaacttgcttactgtttgttattccattaggaattttatttgaattgttgcttcagtctcaccccacctctctgttggttttcaaagatgagttcagaatgattgaacttaatgtttaatggcttcaattgtgagggcagctaagtggctatatacttaaagaacaagagtaataaacatactttccttcatttgctgttctgccatactattagtctaccaaaaaaagtttaagttttaagtgacgagtaacaaattgatgacatgcactcttgactaattaggtgaatccctcattctatatggtacttgagctttaataagaaaaataatatcagcataataacaataacctgatattatccatttaaagtatctacttcactgccattgaatatagcaattaggaggacaggtcctaatgacaatatttagctagtaccgtttcagtgatataaacctttcaaatctgctcatcatcacctcttcttcctgagaataactttttttctcagtattaattaactattccaaaacttagtaagcttctcattcaccttattcagttagttttgcttactaataatcataacccattctcttttcagaatacaattcatagatttgctgtatagatttgctttctcaccctccagctgctctcaattcagttccagtcagtttgagattattggatttagtgaggaggctacactctgaatctcatcttttccctaaggcactcaaagcctttctagccctttttctttctctctctttcttttctttctttctttctttctttttttttttaacaacttaaggccttaaaatactttgtttttgcaaaatttcagcagccataatttctatactatgatcttgtatttcttcatgcatcctggccaatcctctcctggctcatctccttcaggcaacatgaaagtgtgttttttcaaattctaattctattaaaagaggaagaacctctgccttctagactaccataagcaagtgttttatcaaatgttttacactgcataacataaatcagcatttttttcagccttctatattagttttcctaggccaacactgtatattttatgttgtgttacatcatcactccaattct

SEQ ID NO: 62507 - DNA, 1206 bp, Homo sapiens
gacccactttgtataagtatataaagagaaaatgaaaatgagtttgcaaatcatgcttagcataagtctgagaacttgcttactgtttgttattccattaggaattttatttgaattgttgcttcagtctcaccccacctctctgttggttttcaaagatgagttcagaatgattgaacttaatgtttaatggcttcaattgtgagggcagctaagtggctatatacttaaagaacaagagtaataaacatactttccttcatttgctgttctgccatactattagtctaccaaaaaaagtttaagttttaagtgacgagtaacaaattgatgacatgcactcttgactaattaggtgaatccctcattctatatggtacttgagctttaataagaaaaataatatcagcataataacaataacctgatattatccatttaaagtatctacttcactgccattgaatatagcaattaggaggacaggtcctaatgacaatatttagctagtaccgtttcagtgatataaacctttcaaatctgctcatcatcacctcttcttcctgagaataactttttttctcagtattaattaactattccaaaacttagtaagcttctcattcaccttattcagttagttttgcttactaataatcataacccattctcttttcagaatacaattcatagatttgctgtatagatttgctttctcaccctccagctgctctcaattcagttccagtcagtttgagattattggatttagtgaggaggctacactctgaatctcatcttttccctaaggcactcaaagcctttctagccctttttctttctctctctttcttttctttctttctttctttytttttttttttaacaacttaaggccttaaaatactttgtttttgcaaaatttcagcagccataatttctatactatgatcttgtatttcttcatgcatcctggccaatcctctcctggctcatctccttcaggcaacatgaaagtgtgttttttcaaattctaattctattaaaagaggaagaacctctgccttctagactaccataagcaagtgttttatcaaatgttttacactgcataacataaatcagcatttttttcagccttctatattagttttcctaggccaacactgtatattttatgttgtgttacatcatcactccaattct

SEQ ID NO: 62508 - DNA, 1321 bp, Homo sapiens
atttttatttttattttttgttgttacatactgcaagcaacctaagtgctcatcaaactcatttttttttttgtccctatagttcactcaattttcccataggtcatctatcagacatttgtttttagttattatcaactatgtcactaataagttttttttttttttttgagatggagtcttgctctgtcacccaggctggagtgcaatggcgagacctcggctcactgcacccctccgcctcccaggttcaagtgattctcctacctcagcctcctgagtagttgggattacaggtgctcaccaccatgccaggctgatttttgtatttttagtagagacggggtttctccatgttggtcaggctggtctcgaactcctgacctcaggtgatccgcccacctgagcctcccaaagtgactagaaagatatttgaaaaaaaatcagcttaatattaatagaaaagaatgtttacttcttataatgacaacatagtaattatgaacacaccttcattgttgaaagtttatgtgtctaataatggttaaatatgtattttcattagcgcttccacaaaagctctctgatagcatttaatatgttttctaaataaactccaattacagattttcatgagatgcaagatagtctagttttgccaaagaagaggaaatttagcaatgtttactatgatgaagaagagaagtcttccaaagtctgcaaaacacttcataacctcagtctacaatggccagtgagctcagcagtatctttatatatgtacagtggtactgtttacaaagatgtgataatttatatattttattacgatacattgaaatgcatatttgatatcttcacacaggattaaatacatcaactttattttaagattaatccgggaaagagtattatcattgtggaagatgagtggaactaaaatctattttaatgttctgtgaaaacattattaaaaaatccatcattagttgcattctccctcaaatcactaagytcagttaaaatacattaagcttactttaaaatccataaagtattttaaaaggttttttttccctggcaccaggcaaaagtgagatgtatttattttaatctctcctaaacacaagtacctaatccatcatttgggctcatgtattcctgaaaatattattttgttgaataaagtgtcatttcaaagtgtatgtttcaattatttcctagaatcataggaaaatctttctcagtcctacctgggcttttaaattgttttgtttgcatatttttcaagtgtggtaattttttttattacttcttgtaa

SEQ ID NO: 62509 - DNA, 1321 bp, Homo sapiens
atttttatttttattttttgttgttacatactgcaagcaacctaagtgctcatcaaactcatttttttttttgtccctatagttcactcaattttcccataggtcatctatcagacatttgtttttagttattatcaactatgtcactaataagttttttttttttttttgagatggagtcttgctctgtcacccaggctggagtgcaatggcgagacctcggctcactgcacccctccgcctcccaggttcaagtgattctcctacctcagcctcctgagtagttgggattacaggtgctcaccaccatgccaggctgatttttgtatttttagtagagacggggtttctccatgttggtcaggctggtctcgaactcctgacctcaggtgatccgcccacctgagcctcccaaagtgactagaaagatatttgaaaaaaaatcagcttaatattaatagaaaagaatgtttacttcttataatgacaacatagtaattatgaacacaccttcattgttgaaagtttatgtgtctaataatggttaaatatgtattttcattagcgcttccacaaaagctctctgatagcatttaatatgttttctaaataaactccaattacagattttcatgagatgcaagatagtctagttttgccaaagaagaggaaatttagcaatgtttactatgatgaagaagagaagtcttccaaagtctgcaaaacacttcataacctcagtctacaatggccagtgagctcagcagtatctttatatatgtacagtggtactgtttacaaagatgtgataatttatatattttattacgatacattgaaatgcatatttgatatcttcacacaggattaaatacatcaactttattttaagattaatccgggaaagagtattatcattgtggaagatgagtggaactaaaatctattttaatgttctgtgaaaacattattaaaaaatccatcattagttgcattctccctcaaatcactaagttcagttaaaatacattaagcttactttaaaatccataaagtattttaaaaggttttttttccctggcaccaggcaaaagtgagatgtatttattttaatctctcctaaacacaagtacctaatccatcatttgggctcatgtattcctgaaaatattattttgttgaataaagtgtcatttcaaagtgtatgtttcaattatttcctagaatcataggaaaatctttctcagtcctacytgggcttttaaattgttttgtttgcatatttttcaagtgtggtaattttttttattacttcttgtaa

SEQ ID NO: 62510 - DNA, 1771 bp, Homo sapiens
tgcatcaatatacgcactgttatcatacaattaaatatatgatgattagaggacagaattccgaggtgagcaggtatatattctacctgactgactttccaactgagcaaatgtttctcttggcctgaacacagaccttcatttattttcattgtgagtcattttcctagaagtcactgttgcataaatggtgcttccctgacttccgatcaactcagacagccaaaatcagtaagtgtacaaatgagctcaacaggaacattttttcccaagatatttcctgtcaattttctcatcctggaatgtgaaatggtcttttcctaaagatccccagatagtagtcatggaattaatctttattatctgtcagtattgtatttattactcatataaccctgtattccagatctcccttgaatgtggtgggaagatctcattcaccctgtgatctgacagcttctgtttttccttctactcttttcacccaaaggcagaacctgaaaggatgccaagaacttctagagaaatgcagaaaaaaaattaaaaaccactacacaaacttgagggccagacagagatattagtacagccaaaaaacaaaagtattttgttattttattataaacatttcttattacattttatttctcataaaattacagaacaaggggtgagggcaaaagactgaattgttgactaaccaactctggaatgtactattattggtaactgctagtttcccattttgtgggcattggtagtaactaaaattttcagaataaccaataatttgactgagtttagttaattaaaaaaaactttagataggaagttaaaaacataagcagattggtgaaattgtgtgaactattgattcatttgaatcatacaatgcctgatttagaagcagcttcagagatcatgtctcaatcttattttacaaatgaagaaaatgggtcccaagggaccaaagggaatggcttgtccactgtcaaatactcatattattttaggcaaacatgtatctcttgccctataattaatctcaaacttaggaatatctctattctcacagagttcgagtctcagttacacagtaagaactggaaagtctactggtctgaatgattttgaatcacctaaatatcacctaatatttaccagagtgcctgacacataatcaatgcccagtgcttaaggtgtagttgagtgttgaatgaatgcattataataaaagctcttcagaagaactgctatgaatcattgtcacatgatgtatttgctgaaggcagagctccttaactggtggggaggatcatcaatttggaaactgagggcatgcgctttcttttagatgctgcctaagacaaatgatgttacttcaaagtggtaaaaaaaaaaaaaattaaataaagaaaaaagtacatcataaataaaacagattgctaacaaattagtaattatgtcaaacaaataaagctgcccagtgttatgctttaractcatttgacccttttcaaaaaattaaaaagagaaaaagaggaggcagaatgaggaaatacagtaacccacagaggcatttctagctctgaatctccatctaatttgctttttacaaactattcagcataaattgtctctttcagcatattgaaggatgaaaacacatgctaataccaataaattggatctgagtttggaaaatttatgtgtgcatataaaaactatttgcatacatccccagatggagaagtcaacagagcatgaacct

SEQ ID NO: 62511 - DNA, 1771 bp, Homo sapiens
tgcatcaatatacgcactgttatcatacaattaaatatatgatgattagaggacagaattccgaggtgagcaggtatatattctacctgactgactttccaactgagcaaatgtttctcttggcctgaacacagaccttcatttattttcattgtgagtcattttcctagaagtcactgttgcataaatggtgcttccctgacttccgatcaactcagacagccaaaatcagtaagtgtacaaatgagctcaacaggaacattttttcccaagatatttcctgtcaattttctcatcctggaatgtgaaatggtcttttcctaaagatccccagatagtagtcatggaattaatctttattatctgtcagtattgtatttattactcatataaccctgtattccagatctcccttgaatgtggtgggaagatctcattcaccctgtgatctgacagcttctgtttttccttctactcttttcacccaaaggcagaacctgaaaggatgccaagaacttctagagaaatgcagaaaaaaaattaaaaaccactacacaaacttgagggccagacagagatattagtacagccaaaaaacaaaagtattttgttattttattataaacatttcttattacattttatttctcataaaattacagaacaaggggtgagggcaaaagactgaattgttgactaaccaactctggaatgtactattattggtaactgctagtttcccattttgtgggcattggtagtaactaaaattttcagaataaccaataatttgactgagtttagttaattaaaaaaaactttagataggaagttaaaaacataagcagattggtgaaattgtgtgaactattgattcatttgaatcatacaatgcctgatttagaagcagcttcagagatcatgtctcaatcttattttacaaatgaagaaaatgggtcccaagggaccaaagggaatggcttgtccactgtcaaatactcatattattttaggcaaacatgtatctcttgccctataattaatctcaaacttaggaatatctctattctcacagagttcgagtctcagttacacagtaagaactggaaagtctactggtctgaatgattttgaatcacctaaatatcacctaatatttaccagagtgcctgacacataatcaatgcccagtgcttaaggtgtagttgagtgttgaatgaatgcattataataaaagctcttcagaagaactgctatgaatcattgtcacatgatgtatttgctgaaggcagagctccttaactggtggggaggatcatcaatttggaaactgagggcatgcgctttcttttagatgctgcctaagacaaatgatgttacttcaaagtggtaaaaaaaaaaaaaattaaataaagaaaaaagtacatcataaataaaacagattgctaacaaattagtaattatgtcaaacaaataaagctgcccagtgttatgctttaamctcatttgacccttttcaaaaaattaaaaagagaaaaagaggaggcagaatgaggaaatacagtaacccacagaggcatttctagctctgaatctccatctaatttgctttttacaaactattcagcataaattgtctctttcagcatattgaaggatgaaaacacatgctaataccaataaattggatctgagtttggaaaatttatgtgtgcatataaaaactatttgcatacatccccagatggagaagtcaacagagcatgaacct

SEQ ID NO: 62512 - DNA, 1771 bp, Homo sapiens
tgcatcaatatacgcactgttatcatacaattaaatatatgatgattagaggacagaattccgaggtgagcaggtatatattctacctgactgactttccaactgagcaaatgtttctcttggcctgaacacagaccttcatttattttcattgtgagtcattttcctagaagtcactgttgcataaatggtgcttccctgacttccgatcaactcagacagccaaaatcagtaagtgtacaaatgagctcaacaggaacattttttcccaagatatttcctgtcaattttctcatcctggaatgtgaaatggtcttttcctaaagatccccagatagtagtcatggaattaatctttattatctgtcagtattgtatttattactcatataaccctgtattccagatctcccttgaatgtggtgggaagatctcattcaccctgtgatctgacagcttctgtttttccttctactcttttcacccaaaggcagaacctgaaaggatgccaagaacttctagagaaatgcagaaaaaaaattaaaaaccactacacaaacttgagggccagacagagatattagtacagccaaaaaacaaaagtattttgttattttattataaacatttcttattacattttatttctcataaaattacagaacaaggggtgagggcaaaagactgaattgttgactaaccaactctggaatgtactattattggtaactgctagtttcccattttgtgggcattggtagtaactaaaattttcagaataaccaataatttgactgagtttagttaattaaaaaaaactttagataggaagttaaaaacataagcagattggtgaaattgtgtgaactattgattcatttgaatcatacaatgcctgatttagaagcagcttcagagatcatgtctcaatcttattttacaaatgaagaaaatgggtcccaagggaccaaagggaatggcttgtccactgtcaaatactcatattattttaggcaaacatgtatctcttgccctataattaatctcaaacttaggaatatctctattctcacagagttcgagtctcagttacacagtaagaactggaaagtctactggtctgaatgattttgaatcacctaaatatcacctaatatttaccagagtgcctgacacataatcaatgcccagtgcttaaggtgtagttgagtgttgaatgaatgcattataataaaagctcttcagaagaactgctatgaatcattgtcacatgatgtatttgctgaaggcagagctccttaactggtggggaggatcatcaatttggaaactgagggcatgcgctttcttttagatgctgcctaagacaaatgatgttacttcaaagtggtaaaaaaaaaaaaaattaaataaagaaaaaagtacatcataaataaaacagattgctaacaaattagtaattatgtcaaacaaataaagctgcccagtgttatgctttaaactcatttgacccttttcaaaaaattaaaaagagaaaaagaggaggcagaatgaggaaatacaktaacccacagaggcatttctagctctgaatctccatctaatttgctttttacaaactattcagcataaattgtctctttcagcatattgaaggatgaaaacacatgctaataccaataaattggatctgagtttggaaaatttatgtgtgcatataaaaactatttgcatacatccccagatggagaagtcaacagagcatgaacct

SEQ ID NO: 62513 - DNA, 669 bp, Homo sapiens
aggacccatttgtgaataagccaggttaatcaactttgtctatgctagaagaagatcacctgcacgagatcacaaatgctggtagctttaaaagtatgtttgagacaacttcaaatatccatgcattctagrctaaagaaaaggtgcaatatcctgagactgccacaaaagcagtgaaaagcctgcttccatttccaacaacctctatctttgtaaattaaggttctctgcagtggcagcaaccaaaaagacattatggagtagactagtcataagcacatgcttcagccgtcactgcctcccatcactccagataggaccatctagttcagaaaacaaactcagggttcccactgattctacatcatggtgagttgtataatcatttcattatatattgtaatataagaataatggaaataaagtgtgcaataaatgtaatgcacttgaatcatttcaaaaccttcccaccctcccccagtctgtggaaaaaattgtcttccacaaaactggtcagtccccagtgcgaaaaaggttggtgactgctatattagagcatgctgactaccaacctaacttcttaaaagcataaacttgaaagtttaaaaacatacaatgtatgcacacatactttcatataaatcatgtgctgagcctggttcatttata

SEQ ID NO: 62514 - DNA, 1332 bp, Homo sapiens
tctgagttaagcttttcagtagtaagccacacacagtgtcagcatgaaataattatatatatatatgaattatatataaagaactagttttagaaatatatatatatatatatatatatatatatatatatatatatatatatatataaagaactagttttagctggtgactctgagcttggaagacacctagttctgataactggggataaacagaataatagtttgtattagcactcaactggatttttcattgttcaatagacattgactgttctgggtgctggaaatccagtagtgaacagaaaaaawttttttatctacatcaagtcatattaatgtagtaacatacattgtctaagaagaatttatagataaatatatagattatatatatatatatatacatgtgtgcatatgttgtgtatgtgtgatcagaaagaaacttttgcccttacatgcacacaaacacacacaaatcattttcagctaaaaaatctttgtgccttcagaggattttcggagtaagaatcttagcagaagtacagtttccaaaacaaagtccagaaaatagtttttatttctcccatttgtcagttaggcaaaagaacagtaaggttttgggcaaagggatggaaaaggaggatttgatgatattgtgccagtgaacatgcttcaaagaaaactaactcagaggctttatttgtttcttattgctgctgtaacaaatcaccacaaacgtatgtgtgtaatagcaggaaattgaatcacttatagttctggaattcaggagttacaaaatcaacatgtcagcagggctgcgttctttctggaggctccaggggaaaatctatttccttgcctttccagtttctagaagctgcttgcattttttggcttgtggtgcctcccttacataatacagacctctgcttctgtggtcatatctttttgactctgaccctcctataaagactctcttataaagccccttggaaatatgtagatcccagcctataatccaggataatcttatctcaaggtccttactttaagtacatattttgggagactcattattctgtctagcatagagactgatgtattggatgaaatattcaggttctgacttgcacatttactgcaagtttgtaggacaaattttggatactacctcagaagtctcaggtaccctaaaagcaaaagaaaatccattcttcaaatcaccctttgtttgtgtagctgtggatgactttgcaatcagggaataaattctgtttcatcatgagcagagaggtcatcaacattcatgagttaaagtcaacagatgca

SEQ ID NO: 62515 - DNA, 1332 bp, Homo sapiens
tctgagttaagcttttcagtagtaagccacacacagtgtcagcatgaaataattatatatatatatgaattatatataaagaactagttttagaaatatatatatatatatatatatatatatatatatatatatatatatatatataaagaactagttttagctggtgactctgagcttggaagacacctagttctgataactggggataaacagaataatagtttgtattagcactcaactggatttttcattgttcaatagacattgactgttctgggtgctggaaatccagtagtgaacagaaaaaatttttttatctacatcaagtcatattaatgtagtaacatacattgtctaagaagaatttatagataaatatatagattatatatatatatatatacatgtgtgcatatgttgtgtatgtgtgatcagaaagaaacttttgcccttacatgcacacaaacacacacaaatcattttcagctaaaaaatctttgtgccttcagaggattttcggagtaagaatcttagcagaagtacagtttccaaaacaaagtccagaaaatagtttttatttctcccatttgtcagttaggcaaaagaacagtaaggttttgggcaaagggatggaaaaggaggatttgatgatattgtgccagtgaacatgcttcaaagaaaactaactcagaggctttatttgtttcttattgctgctgtaacaaatcaccacaaacgtatgtgtgtaatagcaggaaattgaatcacttatagttctggaattcaggagttacaaaatcaacatgtcagcagggctgcgttctttctggaggctccaggggaaaatctatttccttgcctttccagtttctagaagctgcttgcattttttggcttgtggtgcctcccttacataatacagacctctgcttctgtggtcatatctttttgactctgaccctcctataaagactctcttataaagccccttggaaatatgtagatcccagcctataatccaggataatcttatctcaaggtccttactttaagtacatattttgggagactcattattctgtctagcatagagactgatgtattggatgaratattcaggttctgacttgcacatttactgcaagtttgtaggacaaattttggatactacctcagaagtctcaggtaccctaaaagcaaaagaaaatccattcttcaaatcaccctttgtttgtgtagctgtggatgactttgcaatcagggaataaattctgtttcatcatgagcagagaggtcatcaacattcatgagttaaagtcaacagatgca

SEQ ID NO: 62516 - DNA, 617 bp, Homo sapiens
tactagatactaaaaaattgctctgcaaattggttttagtaatctattcagacaatagggtctaagaatttccctttctaagtatatttgccaacacatgttattttaagaatttaaaatgttttagcagtctgataggtgtgaaacattatctcaatgttkttacataaatttcaacaatttccagaaaagtcgagcatcttattaatttcttgattggtcagtccaatctggtctcttctggaaattgcctgcttgaatcttttgtctacgtttctattagttattgtcattttctgtgttaatttgtaggaattctttataaatttgaaatactgatcctaggttgtttatatatgttgcaaatatctacccccagtcagtaacttcactaccttagtttataggatttttggttgaacagcactttttttttttttttagagatagactctctctctgtcacccaggcagagtgcaatgatgtgattatagctcactgcagcctcaaactcctgggctcaagcaacctttcccttttcagccttttgagtagccaggactacagatgtgttctacgattcctggctaatttctaaatttttggtagagacagg

SEQ ID NO: 62517 - DNA, 617 bp, Homo sapiens
tactagatactaaaaaattgctctgcaaattggttttagtaatctattcagacaatagggtctaagaatttccctttctaagtatatttgccaacacatgttattttaagaatttaaaatgttttagcagtctgataggtgtgaaacattatctcaatgtttttacataaatttcaacaatttcyagaaaagtcgagcatcttattaatttcttgattggtcagtccaatctggtctcttctggaaattgcctgcttgaatcttttgtctacgtttctattagttattgtcattttctgtgttaatttgtaggaattctttataaatttgaaatactgatcctaggttgtttatatatgttgcaaatatctacccccagtcagtaacttcactaccttagtttataggatttttggttgaacagcactttttttttttttttagagatagactctctctctgtcacccaggcagagtgcaatgatgtgattatagctcactgcagcctcaaactcctgggctcaagcaacctttcccttttcagccttttgagtagccaggactacagatgtgttctacgattcctggctaatttctaaatttttggtagagacagg

SEQ ID NO: 62518 - DNA, 617 bp, Homo sapiens
tactagatactaaaaaattgctctgcaaattggttttagtaatctattcagacaatagggtctaagaatttccctttctaagtatatttgccaacacatgttattttaagaatttaaaatgttttagcagtctgataggtgtgaaacattatctcaatgtttttacataaatttcaacaatttccagaaaagtcgagcatcttattaatttcttgattggtcagtccaatctggtctcttctggaaattgcctgcttgaatcttttgtctacgtttctattagttattgtcattttctgtgttaatttgtaggaattctttataaatttgaaatactgatcctaggttgtttatatatgttgcaaatatctacccccagtcagtaacttcactaccttagtttataggatttttggttgaayagcactttttttttttttttagagatagactctctctctgtcacccaggcagagtgcaatgatgtgattatagctcactgcagcctcaaactcctgggctcaagcaacctttcccttttcagccttttgagtagccaggactacagatgtgttctacgattcctggctaatttctaaatttttggtagagacagg

SEQ ID NO: 62519 - DNA, 668 bp, Homo sapiens
cctggggaaatgtttggtttgagtactgaagtacaagtaggagttaacctaaaaaaggtggtggacttcaggaatacatagtagttccatcatgtgcaaaggctctgtkgcaggaggagggaattttatatgttttcaagaaattgcaagaaggtcaaggtggctgtaacctagagaaagggtatatgtgttgggggaggggtcaagaaaaggctgatgatttagtcagagcccagacagtatagtgccttttaagtaatgttaagaatttttatccttattctaagagtagcgagaagccagcgaaggattttcagcatatgatgggagatgactggtgtagtgtaaagagctttttaggccagtttcaagactattaataatgcccttatgaggcgtgagtgtagcctgactagggaattaggatttttaggaactcaaatggatttagagaatgaggaagaaggcaacatggaggatgatgcctgggtttgtagcctgcacagctgaatgaatgataaaacctaattttggaaaaggaatctcagggttttggcttttgttagaggaatcttttctatacagaacttaaactcttttgtggtgatctgtactttaatcataattctggataatggccagttttctttatttgcctctgttattgt

SEQ ID NO: 62520 - DNA, 668 bp, Homo sapiens
cctggggaaatgtttggtttgagtactgaagtacaagtaggagttaacctaaaaaaggtggtggacttcaggaatacatagtagttccatcatgtgcaaaggctctgtggcaggaggagggaattttatatgttttcaagaaattgcaagaaggtcaaggtggctgtaacctagagaaagggtatatgtgttgggggaggggtcaagaaaaggctgatgatttagtcagagcccagacagtatagtgccttttaagtaatgttaagaatttttatccttattctaagagtagcgagaagccagcgaaggattttcagcatatgatgggagatgactggtgtagtgtaaagagctttttaggccagtttcaagactattaatartgcccttatgaggcgtgagtgtagcctgactagggaattaggatttttaggaactcaaatggatttagagaatgaggaagaaggcaacatggaggatgatgcctgggtttgtagcctgcacagctgaatgaatgataaaacctaattttggaaaaggaatctcagggttttggcttttgttagaggaatcttttctatacagaacttaaactcttttgtggtgatctgtactttaatcataattctggataatggccagttttctttatttgcctctgttattgt

SEQ ID NO: 62521 - DNA, 655 bp, Homo sapiens
cagtataaaatatttttacgttaagactgcctgctgccagattcatctgaatgcttacatttagtagttcaaacataatacagcttctaatggtatagattttttgactatattgtgataaagggtgggagagttaatataaatctgaaacaaaactgtaaatgaataatgtctatctcaagtacatgtaaaatgtttctcatcttcttatctaattggagtggaaaacacatattcaccaactcaatgatcacattacatgtacatragattgcagctgtgattgtggctaccatttggttaagactgtggcaatttatagtcatttccagaactcatctgttttctgcagtggccagattggaaaatgaagtagagatatgatgcagacaaccagccatgcatcttttaggtctttattcatggcactaatctataccatcttcctaaggatgaaatattatttttatgtattatcttccctgaagtgttggggaagggtcagaggttttcttttgccttttatcattgtactaggtcttacttaacaatctaagatctcaatggcaagcggggaggggcatattttaattgctgtatatacccatttcaaatatatacttgcggattgaagaattgaatattaggtggatcc

SEQ ID NO: 62522 - DNA, 655 bp, Homo sapiens
cagtataaaatatttttacgttaagactgcctgctgccagattcatctgaatgcttacatttagtagttcaaacataatacagcttctaatggtatagattttttgactatattgtgataaagggtgggagagttaatataaatctgaaacaaaactgtaaatgaataatgtctatctcaagtacatgtaaaatgtttctcatcttcttatctaattggagtggaaaacacatattcaccaactcaatgatcacattacatgtacatgagattgcagctgtgattgtggctaccatttggttaagactgtggcaatttatagtcatttccagaactcatctgttttctgcagtggccagattggaaaatgaagtagagatatgatgcagacaaccagccatgcatcttttaggtctttattcatggcactaatctataccatcttcctaaggatgaaatattatttttatgtattatcttccctgaagtgttggggaagggtcagaggttttcttttgycttttatcattgtactaggtcttacttaacaatctaagatctcaatggcaagcggggaggggcatattttaattgctgtatatacccatttcaaatatatacttgcggattgaagaattgaatattaggtggatcc

SEQ ID NO: 62523 - DNA, 655 bp, Homo sapiens
cagtataaaatatttttacgttaagactgcctgctgccagattcatctgaatgcttacatttagtagttcaaacataatacagcttctaatggtatagattttttgactatattgtgataaagggtgggagagttaatataaatctgaaacaaaactgtaaatgaataatgtctatctcaagtacatgtaaaatgtttctcatcttcttatctaattggagtggaaaacacatattcaccaactcaatgatcacattacatgtacatgagattgcagctgtgattgtggctaccatttggttaagactgtggcaatttatagtcatttccagaactcatctgttttctgcagtggccagattggaaaatgaagtagagatatgatgcagacaaccagccatgcatcttttaggtctttattcatggcactaatctataccatcttcctaaggatgaaatattatttttatgtattatcttccctgaagtgttggggaagggtcagaggttttcttttgccttttatcattrtactaggtcttacttaacaatctaagatctcaatggcaagcggggaggggcatattttaattgctgtatatacccatttcaaatatatacttgcggattgaagaattgaatattaggtggatcc

SEQ ID NO: 62524 - DNA, 660 bp, Homo sapiens
tccacttctggtcattatactgtgattaggggcagagtcaaaagtcacacacatagacacatgcagcagcttagttctctgagaaatggatcttgctctttgtgctggtacttcaagagatgtttactataggaaagttgtgagctcttgtttctagctacaccatcagtactcactaggcayacaaaagtagaaaatacttaatgggaagaaaatgaaaaaatgcagtgggcctatgtatctatctactttatctatctatctatctatctatctatctatctatctatctatcgaatcttttgctagtgttatacatcaaagaaatctcttctatgacattgaggttaaagagctgtcattaattgtagcatagaaagctaaactcctgaatatctcttacacaattcagatatatcaacttttctcagtatatagttgcatcagtgtttagcttgtacattcaaaaacatgtaacgctttctgtctgtgtgcatgtgtgtgtgacactaatcactttgctattacaaataacatgtttaaatttttgttttgctcatggtatttatctccttaaggtgcttaatatatagtgttttctctttcttttttcttttattttcttgccagaagtattttatcagtggtccctattgtttt

SEQ ID NO: 62525 - DNA, 660 bp, Homo sapiens
tccacttctggtcattatactgtgattaggggcagagtcaaaagtcacacacatagacacatgcagcagcttagttctctgagaaatggatcttgctctttgtgctggtacttcaagagatgtttactataggaaagttgtgagctcttgtttctagctacaccatcagtactcactaggcacacaaaagtagaaaatacttaatgggaagaaaatgaaaaaatgcagtgggcctatgtatctatctactttatctatctatctatctatctatctatctatctatctatctatcgaatcttttgctagtgttatacatcaaagaaatctcttctatgacattgaggttaaagagctgtcattaattgtagcatagaaagctaaactcctgaatatctcttacacaattcagatatatcaacttttctcagtatatagttgcatcagtgtttagcttgtacattcaaaaacatgtaacgctttctgtctgtgtgcatgtgtgtgtgacactaatcactttgctattacaaataacatgtttaaatttttgttttgctcatggtatttmtctccttaaggtgcttaatatatagtgttttctctttcttttttcttttattttcttgccagaagtattttatcagtggtccctattgtttt

SEQ ID NO: 62526 - DNA, 599 bp, Homo sapiens
tcaaccataatttgaaatatagctatggatattaccatctccattgaaactttcttgctggtagaagagctgttttgtctccagagaaaattgagaggctgtcaagcaattccactacatggtacaacccatctctaccatctctgaaagtctgatttcttgttttgaatactgtatttaaattagatgacaggttttgcattgtaaattgagggaacaaattcttgtgcaaccaaatgtcaatcttatttccagagctagagcccaaaatgtaaattccactatgtattttgaatgccctttgaataaaaaaagtttagcaaaagcatttggtccagatgtaaagaaatgcttcttaatgtgtctccaggtgggatgttaatccgtcaagtgttttgacctagggcaggtcaccacataaagtamgtcaagtttttcctttctatagtcagagaggtgacatggatgctctctggagggccccttaaactttacgttctctttaaatctatcatgtattttgtactcccatacacacacacacacacacacacacacacttacacacatacacatatttacctctgtcttactcaggg

SEQ ID NO: 62527 - DNA, 1433 bp, Homo sapiens
  misc_feature (1)...(1433): n = A,T,C or G
tatccaaacttgctcccttatacagttgggccaggcaataatataaagctaagggaggaaagagaaaaaaaggggtcatgtttaattttagccatgggcaatgctatatcaccaagccaagaaaataatctgaaaacaaatccaaatgtacatggaatccatgagccaagtggttcacgcaaaagctaggtcaccaaaactgagaagagtttccaatgacaagtcaggtgacaccaggccaaaatcaagagttaagtctagcatccaagtggcagaggagaagaaagggctctaacccagtgtagttggaaagccaggccctacccctaccagctatgtgagtttgatcacatttcttaacctccctgtacctcagcctccccatctataaaatggaaacaataatagtactactctcatgaggccattttaagttttcagtgnnnnnnnnnnnnnnnnnnnnnnnnnnnnnnnnnnnnnnnnnnnnnnnnnnnnnnnnnnnnnnnnnnnnnnnnnnnnnnnnnnnnnnnnnnnnnnnnnnnnaaaggtcctgaaaaaaatttttgcagtttggctggaaatgttcatgcttgatttcaacacatttacagagcattcacaggaaataattgcaagttcacacaatatgctctgtgggtgtgattcggatcagctctcaagagcacggaatgaaggctttcagccatttaggcaaagaaacattaaaataatgataaaaggatcccactgcaattgaagggagtgaaaaagaattagatagtaaggcacacattttatcttccttgggatcaaaagctgctgggcacaccagtggatctgaattctattatattgagaagtattcttagggttttaaggatttgagccatgttagttttgtttgttgaatcctggtcatagtaacatttcacttcatgggggaataataggaggtagcagggaaggctcacagaatggagcttactctttatgagaaaaaaatgtgctaaagatttgagactttattgttaccaaatgtggaagaaagtatttttatgatgccagtcttgtctcctgagacctctgagytgctaaacattgatctaaacactgtgagggctgaacaggaaaatgcgagatgggacccttaccttaacattcatatgagctgttttggggggtaaaacatgcttctgtggaaggactaaatgcaagttaacacaaattaaagtgtgcccagcctaagaaacagaaatctgaaaacctgaacacagaagaccaaaatcttagagtatataaaacagtgatttgcatagccaatgatcaaatataggatatactaaaaatgtaaatatatgcttcaatttattaataatgatagcttgcatctgtgttgcccttgactgttttcacagcattttcacatacttatt

SEQ ID NO: 62528 - DNA, 732 bp, Homo sapiens
aaactgttcagactgtactctgatatgtaatgtaatttcccacatttccctctcaatggttagctgggagcctggcgtctctatgcatttaggcatttcacacaggctggtccacctggcttattcatgaaatcgccagcagagggagsaatgatgagtagtctcctaccacccgacactggaagttcgcgagtgcttggatctgagtatcttttgtcatgtgggcttgtatctgagtatcttttgtcatgtgggcaagcatgcaccctgcatgctgttcttgaaagtgagctattaatcacgttgctctgaaaagggctgggaaaagagagatggattgttgatcatcttttcgttttaaaccatgtgttaaagttagatctctgttcactgccctgtgtgccttacacaaagccaagtaagaattatggcagaagctggaagtacaaagtggaagtctaccaaacctatcctgacttattttaatgcagctttaataaaaattcctcaaatgggacaaatgctaaactagtcctgggtcaacaggcataagccagtgctggcccagggatgaggagaatgatattcactctagttaaggacaagcaacctcttttctttaccacatcttatcccttcacatttgaaactttcttctctgccccagatggatctcttctctaagtcaagcatccttatttctttcctctgttcatcatatgaggtggatcc

SEQ ID NO: 62529 - DNA, 732 bp, Homo sapiens
aaactgttcagactgtactctgatatgtaatgtaatttcccacatttccctctcaatggttagctgggagcctggcgtctctatgcatttaggcatttcacacaggctggtccacctggcttattcatgaaatcgccagcagagggaggaatgatgagtagtctcctaccacccgacactggaagttcgcgagtgcttggatctgagtatcttttgtcatgtgggcttgtatctgagtatcttttgtcatgtgggcaagcatgcaccctgcatgctgttcttgaaagtgagctattaatcacgttgctctgaaaagggctgggaaaagagagatggattgttgatcatcttttcgttttaaaccatgtgttaaagttagatctctgttcactgccctgtgtgccttacacaaagccaagtaagaattatggcagaagctggaagtacaaagtggaagtctaccaaacctatcctgacttattttaatgcagctttaataaaaattcctcaaatgggacaaatgctaaactagtcctgrgtcaacaggcataagccagtgctggcccagggatgaggagaatgatattcactctagttaaggacaagcaacctcttttctttaccacatcttatcccttcacatttgaaactttcttctctgccccagatggatctcttctctaagtcaagcatccttatttctttcctctgttcatcatatgaggtggatcc

SEQ ID NO: 62530 - DNA, 1900 bp, Homo sapiens
tattcgtgccttcagcctgaaacattttttagttcaagtcttcaagttctgcaaaggcattagtaatctaatgattatttcaataagtattaaatgcttacatcgacagagatgttttcattaatctcacgttgtagctaacctctgcaatgttattaagggagcttaagtagacagaacaagtccttccatgtagtaaatgcattttaaatctctatagccaaatgcattctcattaaatcattattttaggggctctattgagtgcctaatgtagcaagaaaaacagagagctagaagtgcaccagcctcattggtttcccctctctgcacttgtatagcccctctaatctgcaccacacaatttgacacacagatatgtgccatttcaattgctggctagttatgtcgtttgcaataggcttgtaccccaaggcagttatcaccttgggatcagggatcatgctttttaaattaaaaaagcgtagaattaaagatgtgggagagacaatagtaatcataattcaatcttcctgtttcacaaatgaataaactgagatccagaccaaacaaataacttgtcttatttatctttaagtgccatggtacattacaatgacttggctcagaagtgttcacgggcaggtgtggtggttcagtctgtaatcccagcattttggaaggccgaaactcgaggatcgcttcaaagcaggagttcaagaccagcctaagcaacagagcaagaccctgtctctatcaaaaagaaaaaaaaataaaatttagccaggcatggtggcatgtgcctatagtcccagagagttggaaggctaaggcaggaggatcactttagcccargagttctagattgcagttgagctaggatcctgccactgcactccagcctgggtgacagagaaaaaccttttctctataagaaaaaaaaaaaaaaagaacttctgtttggtaaggacttgaagaaagaaattagaaaagaaaactgggaagaaaaggaagtttcctgtgtcctgattttgttacagtaggtagctagtcaggtatctgcagaaaaggagagggctccccacacacacatgccaggaatgttggatgacaatcaggtgatggtcaggctgtggttaactgtttctctaaaataataattgctcacagccggcaccagggaaaggcaggctcctactagatagaaaacacctgaaactgaccagcagctttccaataagatctcaggagtaggtgagaagtaaggcaagatcccggaagtatgccaatatatataaaaccccaagtcaagaggtcaaactgtgcacttggttcctcaagtcgtctgcttgaccctcttccaagttgtactttccttcttttctttccttccttttgttactgttctaaagcttttcaataaactttcactcctgctctgaagcctgcctcggtctctcctgccttatacccctcagttgaattctttcttctgagggggcgaagagctgaagttgctgcagacctataagaattcgcggctggtaacttggagtaactcggaataactcggatcttttccaccgctagcgtttgagaggctttaagtggagtgttctagaaaacaatctaaagtctacaccactttcatgtgtctctaacacatggtttcttaacatgcactccatgaagcactgaacatggttctgtattaaacaagtttggaaagggctaatactgtgcacccatcttaaacacatatttttcatagaacacctattaacattctgagaagaatgaaacaagtgtttctcaggactcactttagaaaaaattctttctagtcccaggcatattctacctaagaatatttcccaaaacaatttttcatgtttgccca

SEQ ID NO: 62531 - DNA, 640 bp, Homo sapiens
acatgcctatttctaaacaacctattatagttttgcctaggtcttaaacagatatcaaattaatayattggaaggagataaatttctccctgcctcaaacactgtgtattcacattaggagagatgactgcaggagaagagacagtcaagacatttgtggatctttagtttggcattcagtgggacattgatttaaacttctcatttttttttctcaagaaaaaaaatttaacaagaagaggcaaaactactaaatttaaaattgcatttaaaaatgccatcctcaaataaacaaaaacaaagctgtaggcaaatggattttctaaacactttgcctcaaatcacatctagctgagaagaaaatgggagaagttttagcataaaatataattatttgggagccaatacgatgcagaaaacaaaggttaagtaagaaaggacattctgagccagaatagtaataagtagaagtagcaagtcagtgtatttcagcaagaatacatatgatttttttttaagggacaggctctcgctatgttgctgaagctggacttgaactctgggctcaagcgagcctcctgcttcaacctcctgagtagctgggactacaggcatgtgccactgcacccagctcttgtat

SEQ ID NO: 62532 - DNA, 640 bp, Homo sapiens
acatgcctatttctaaacaacctattatagttttgcctaggtcttaaacagatatcaaattaatatattggaaggagataaatttctccctgcctcaaacactgtrtattcacattaggagagatgactgcaggagaagagacagtcaagacatttgtggatctttagtttggcattcagtgggacattgatttaaacttctcatttttttttctcaagaaaaaaaatttaacaagaagaggcaaaactactaaatttaaaattgcatttaaaaatgccatcctcaaataaacaaaaacaaagctgtaggcaaatggattttctaaacactttgcctcaaatcacatctagctgagaagaaaatgggagaagttttagcataaaatataattatttgggagccaatacgatgcagaaaacaaaggttaagtaagaaaggacattctgagccagaatagtaataagtagaagtagcaagtcagtgtatttcagcaagaatacatatgatttttttttaagggacaggctctcgctatgttgctgaagctggacttgaactctgggctcaagcgagcctcctgcttcaacctcctgagtagctgggactacaggcatgtgccactgcacccagctcttgtat

SEQ ID NO: 62533 - DNA, 640 bp, Homo sapiens
acatgcctatttctaaacaacctattatagttttgcctaggtcttaaacagatatcaaattaatatattggaaggagataaatttctccctgcctcaaacactgtgtattcacattaggagagatgactgcaggagaagagacagtcaagacatttgtggatctttagtttggcatwcagtgggacattgatttaaacttctcatttttttttctcaagaaaaaaaatttaacaagaagaggcaaaactactaaatttaaaattgcatttaaaaatgccatcctcaaataaacaaaaacaaagctgtaggcaaatggattttctaaacactttgcctcaaatcacatctagctgagaagaaaatgggagaagttttagcataaaatataattatttgggagccaatacgatgcagaaaacaaaggttaagtaagaaaggacattctgagccagaatagtaataagtagaagtagcaagtcagtgtatttcagcaagaatacatatgatttttttttaagggacaggctctcgctatgttgctgaagctggacttgaactctgggctcaagcgagcctcctgcttcaacctcctgagtagctgggactacaggcatgtgccactgcacccagctcttgtat

SEQ ID NO: 62534 - DNA, 1082 bp, Homo sapiens
ggaatcaccataaatgcaacagctacaaatgcagcctgagagaggagcactgtattgacaaatcaaatatgtgggcagcattaccacaactgatgcagttttcaaaaatagcagacaacttgataaaattctaaaccaaacaatgcacagccttctttaaatttatacagtagtgattccaaaataaaaacctagtgtattagaaccttgcaaagaagttttgtttatatcaaaaacagaagtggtctctgttatcagatgattrtaaatatgattgtattagggttctccagagtgacagaactaataggatatatgtttacataaaagggagtttagtagtgagaatgggctcacacgatcacaaggcgaagtcccaggatacgccgtctgcaagctggggaagaagccagtagtggctcaatctgagtcccaaagccttaaaagcagggaagccaacaatgcagccttcagtatgtggctgaaggcctgagagcacctggaaaccactggtgtgagtccaagaatccaaaggctgaagaacctggagtctgaaaatacgtacacttgaaaatatgtaaacctcctttgtgaaaagcatccagcacaggagaaaaatgaaagctagaagacctagtaagccacgttatctcactttcttccatctgctttgtttttgctgcactggaagctgattggatggtgcccacccacacggaacgtgggtcttgctctcccagtccactgactcaaatgtcaatctcctctgacacacccggaaacgatactttaccaggtctctaggcatccttcaatgcaatcaagtagacacctaatattaaccatcacaacagttttcacttttacgaatgccaagtacaataatcaaaagttgcgaggatgtgggatggttatgtatagtgcaggactgtcctgctctgtccatctcaatgccagtcatagtgcaccccaatcattatgacaaccaaaattttcctgaaaatttccaaaactctaggtggcagaactccgctctaaataaatccactcaggatttggattctgctctggtgtaaaatgca

SEQ ID NO: 62535 - DNA, 916 bp, Homo sapiens
tacccttctgtggtacaccattctaattcaccagaagtaaatgttttaaccattggcataccaccatgtgtcatgtgccctcagggttccatctaccatcagtgatggagtttttattgcttgctgggtcacaagtgatcagttccaaagtatcatgttagcatctgctttctggtagcaacccaggcaccaactgttgcagttcaagtcccatatgaaggagactcggagatggagatttgcattcaggaattactcttaatattatcactagcgcagggagcaagtagctgtgatgtggtcataacaaaggcctcagtcaattccacaagaagctctgatgctaggatgggccctgcagagtatacccaaattaagacaaggaattcaagcttttctgcttttgcattgaccagtcattggttgtgggtgtggattcagacaagtcaacactcttcagttgagggcaataatcaggtgaattcacctgcaagctgtttgctactagtatttctaacaggatgcttagtgcttcagcactgaagatgaaggatcgttggcacactcagtatttactacaatatatattcagaattgtgttattttcctgacaagttttgcgtgtaaaagttgttgtatctatatccctacaccagcattcttggttagtattgtctcattatatctttattctgtccatatacaaatttttcattctcttggcttttatttgcatctcttttaaatagcataccttaaaagtgatctatgtcatcctcaaaaaccacaaattttattatcttttcatgtccgtatcctaggactcactcacctttcatactggtgctatgtgaatattttatagatattaaggctgatttgttatggagacwctctcttttttcttttctcttag

SEQ ID NO: 62536 - DNA, 1737 bp, Homo sapiens
tgaatcaccatagaaatatctcttgaacccaagcatcaaaaaaaaaagctactcatggcaatcggattacttttgtttcatgggccctctgactcatgtgcctccctgcttctcgaaagaagggtacctggaattacattcatatgcaggaaactagaaaatcaatatggaatatggagattttcgctgaaaaattaattttactcaaatatttagagaaacattttgaatttttatactctccaaatgctttgccacacatgcatataaataaactaatcataagccattttctccattttgattggtaaatattttttatttttagtttgttttgtagatatcttaaaagtataagtttgaagcataagctttcatgacgccagtataagtgcacaagacatttgagaatgtaaagataagaaataattaagactatgaaaggtatggaattgctcctgatgtaactcttaaagactttgacaacaaggaatgcaaaagcattatcaaagtataccaagatatttgatagaaaacatattcaaatgtttaccttaattgtgtatttattgaaatgaaaataaattccagttccaattttgctaaaaaccctgaagtatgacaacctaaatatgtcaccttcatgtcattcttcaagactaattatttagcatgttttttgccttctttagcaaagaaatactgagcaagtatatttattctaatattagagcctgacttacaaaattgtcattttatcatatatgatatcaaggttgaaattgcacttagttactacaaaacaaaatggtgaatgtttgcaatgcacataaaagataaccaaattgaagcacatatgagagttaatraagacaagaggatgcttaaagtttcaagaagccaagagcaggatagctacaagaaattggaatcatattggaatcaaacattgcattaacaatactgactgcaaaaggatcaatatctcagatttctaagggcacatgattatgaaaacacaatttcagaccaaagaaaaatagccaaaatatatattgctatattattcaaaggttaacctgttttccaaactttaaaaatattctcaggaatatatttcctcaaaacaataaagagatccaaaataatagtaatattagatatagaccccgacaatttctttctagaggggaagaaaaacaagcatcaagttgacagttgagtagcaaggtgagcatgcatgcaatcaattgaaatgagaaaaggtcaggaacccctagaaaaaacatagacttatgtatgttttttctattagatagatactattagtaatcaaatggtgtcatagcttaagacaaaaagaaaattagaataacaattgaaaactccagaaaaataaaattttactttaaataatccttcaattatacatcaaacatactatggtacaattttggattgatgaatgccagtttaaaaagttccgtctgactcattaatctggaataacagattaagtatattttagctacatcctcttttctgctcttttaatttcaccttttaggataaattaatatttacaaaattacaatagtgtaaatgttattcggtagttttccctttagaataaacttatagaaaaaagagagaaaattgaattgcagttactgatgataatgtaaacattatacaatttttcaatgttgttgaaacagtattacaaacagtagctga

SEQ ID NO: 62537 - DNA, 639 bp, Homo sapiens
acatttgagggaaaattgattaatacctactttgtaaaggaaattttgacagctccatataggtctcccaaattctttttgaaatgttagtgatctgagaagtccaaatgactgaatagccacagtaccccactaagcttttttatccccccacagaaaaattaaaacttaggggttgcttacccaaaacagcaataacattactagaaaacaataacagcagttaccttttactgagtgctgctatggtttgaatgtgcccctcaaaaagtatgtgttggaaacttaatcctcaatgcaacagtgttgggagatgaggcctcatgggaggtacaagtcatgagggctctgccctcatgaatggattaatgcttagtatagtcatcggagactcagaagagagggagggtgggaggaggatggtgagggttgagaaattaacaagtacagtatacactatttgggtaatggttacattaaaaggcccaggccaccactaagcratgtatccgtgtaacacaactatacttgtacctcttaaatttatacaaatcgtaaaaaaataaaagggcttaagactgcaaggaactcttgggcacaccttgcatgcttgcttgctctctcttcctccccgactta

SEQ ID NO: 62538 - DNA, 416 bp, Homo sapiens
atgatcttggctcactgcaacctccgcctcccgggctcaagcaattccctgcttcagcctcccgcgcacctgggattacaggcacccaccaccatgcccaactaatttttctatttttagtagagccggggtttcaccatcttggccaggctggtcttcaactcctgaccttgtgatccacccgcctyggcctcccaaagtgctgggattacaggcctgagccaccgcgcccgaccaagagtcacctgtttgaaaccccaagaggaaaagtttgaactgatgctaaagaaatttaggtcaaaatagaaaaaaaactctatgaccacaaaaaaaaaaatcgcaaaacatgggaactatgacagtgggccaggtgtggtggctcacgcctgtaatctcaacatttgggaggccaaggc

SEQ ID NO: 62539 - DNA, 1324 bp, Homo sapiens
cttccttgtttcttttacatgatttgtaatttttttgtttaaaactgaacattttaaatgttatgtaagaaaaaaaggaataaaagaaaaaaaggtaggaaagaaaataaaaatactctccaggtctttcctggttggttctgggttggggcacacctctaatatttaatyggggcatttacaagtttgccttagctttctctttcttcttgcactttgtgtaaggactagtcaaagttgaaagcctgtggtcttatcaggtcttttccaaccatgcatcctaccctgggtatgtgtaggttccctgttatatgtgagaactttttaaagcattgattccaaaacaaaattctcattcccagcttttccttctagtttttggtgtgtttattattgcctcaattgttcttttttgtcccaggaatcagtgctagttcttttgcctctcaatgtttttgaggaacacttccctgccctgagagaattctgagttaggtaaaacataggaaagcccttgtccttcagaaaacccacacagaagtcaaaacaaacaaaattccttgagaacaaggaccattctgctttctctaggatccaggaaacagaacccactgagaatgcaggctgccatcttcaagattgccatggtactggagagggatgtggggcaaggctaaattgcaatgccaccaatcttttctatcctttttcagtggtcttttttctgattaagtgtgcacctggttgctgtaaacaattaactgtcttccagaaatctgctaaagttgactataacagtttttgccagataatttttgtttttgctttgggaagggatggccctggacagttcctaatccaccatttttcctgatgtcactcttagacattattttttaggaccctggaatgtctagagtagaaaggctcacacttattagccttaaatgtagacatacatacattctttccaaaatagttttggaaacatccttaacaattctatcaatctcttttacccatttctgaagaaatgccagaattatcttccaacaagtagattaggaggatgagaaagtggaattagttaagaaggggtcccaacttttggtagggaaaatagggaatacacttgtgcctttaagtggatagaggaagaggaggctatctggtagtgaagggatagatcaggtttggatttgctggggtcctgaggtgtctgtgtggtacacaaagggaaatgtctagagggcagtggttttatattgaagtctatggacagagggagagagagagagagagagagaatacactagggactgag

SEQ ID NO: 62540 - DNA, 1324 bp, Homo sapiens
cttccttgtttcttttacatgatttgtaatttttttgtttaaaactgaacattttaaatgttatgtaagaaaaaaaggaataaaagaaaaaaaggtaggaaagaaaataaaaatactctccaggtctttcctggttggttctgggttggggcacacctctaatatttaattrgggcatttacaagtttgccttagctttctctttcttcttgcactttgtgtaaggactagtcaaagttgaaagcctgtggtcttatcaggtcttttccaaccatgcatcctaccctgggtatgtgtaggttccctgttatatgtgagaactttttaaagcattgattccaaaacaaaattctcattcccagcttttccttctagtttttggtgtgtttattattgcctcaattgttcttttttgtcccaggaatcagtgctagttcttttgcctctcaatgtttttgaggaacacttccctgccctgagagaattctgagttaggtaaaacataggaaagcccttgtccttcagaaaacccacacagaagtcaaaacaaacaaaattccttgagaacaaggaccattctgctttctctaggatccaggaaacagaacccactgagaatgcaggctgccatcttcaagattgccatggtactggagagggatgtggggcaaggctaaattgcaatgccaccaatcttttctatcctttttcagtggtcttttttctgattaagtgtgcacctggttgctgtaaacaattaactgtcttccagaaatctgctaaagttgactataacagtttttgccagataatttttgtttttgctttgggaagggatggccctggacagttcctaatccaccatttttcctgatgtcactcttagacattattttttaggaccctggaatgtctagagtagaaaggctcacacttattagccttaaatgtagacatacatacattctttccaaaatagttttggaaacatccttaacaattctatcaatctcttttacccatttctgaagaaatgccagaattatcttccaacaagtagattaggaggatgagaaagtggaattagttaagaaggggtcccaacttttggtagggaaaatagggaatacacttgtgcctttaagtggatagaggaagaggaggctatctggtagtgaagggatagatcaggtttggatttgctggggtcctgaggtgtctgtgtggtacacaaagggaaatgtctagagggcagtggttttatattgaagtctatggacagagggagagagagagagagagagagaatacactagggactgag

SEQ ID NO: 62541 - DNA, 1324 bp, Homo sapiens
cttccttgtttcttttacatgatttgtaatttttttgtttaaaactgaacattttaaatgttatgtaagaaaaaaaggaataaaagaaaaaaaggtaggaaagaaaataaaaatactctccaggtctttcctggttggttctgggttggggcacacctctaatatttaattggggcatttacaagtttgccttagctttctctttcttcttgcactttgtgtaaggactagtcaaagttgaaagcctgtggtcttatcaggtcttttccaaccatgcatcctaccctgggtatgtgtaggttccctgttatatgtgagaactttttaaagcattgattccaaaacaaaattctcattcccagcttttccttctagtttttggtgtgtttattattgcctcaattgttcttttttgtcccaggaatcagtgctagttcttttgcctctcaatgtttttgaggaacacttccctgccctgagagaattctgagttaggtaaaacataggaaagcccytgtccttcagaaaacccacacagaagtcaaaacaaacaaaattccttgagaacaaggaccattctgctttctctaggatccaggaaacagaacccactgagaatgcaggctgccatcttcaagattgccatggtactggagagggatgtggggcaaggctaaattgcaatgccaccaatcttttctatcctttttcagtggtcttttttctgattaagtgtgcacctggttgctgtaaacaattaactgtcttccagaaatctgctaaagttgactataacagtttttgccagataatttttgtttttgctttgggaagggatggccctggacagttcctaatccaccatttttcctgatgtcactcttagacattattttttaggaccctggaatgtctagagtagaaaggctcacacttattagccttaaatgtagacatacatacattctttccaaaatagttttggaaacatccttaacaattctatcaatctcttttacccatttctgaagaaatgccagaattatcttccaacaagtagattaggaggatgagaaagtggaattagttaagaaggggtcccaacttttggtagggaaaatagggaatacacttgtgcctttaagtggatagaggaagaggaggctatctggtagtgaagggatagatcaggtttggatttgctggggtcctgaggtgtctgtgtggtacacaaagggaaatgtctagagggcagtggttttatattgaagtctatggacagagggagagagagagagagagagagaatacactagggactgag

SEQ ID NO: 62542 - DNA, 688 bp, Homo sapiens
tgatctgataaatggggagggttggtaatattagacagtttgacatgtccgtcatctctgatctgcaaaattctgatagaaacctctcaaaaacagaaaaaaaaaaacttagtgacagtcaagagggaatgtggactctaaaacactatgaatgcaataartagtctgaaatgaaattaaaaagaacaaaacaaataaatttaacaaaagaaatgcaagatgtatactttgaaaaatacaaaaacatcgttaaaaaaaattaaagaaagccgggagtggtggctcacgcctgtaatcccagcactttgggagggtgaggcgggtggatcacgaggtcaggagttcgagactagcctggccaatatggtgaaaccccgtctctactgaaaatacaaaaattagttggtgtggtggcatgtgcctgtagtcccagctgcttgggaggctgaggcaggagaatcgcttgaatccgagaggcggaggttgcagtgagccgagattgcgtcactgcactccagcctgggcgacagagcaggactctgtctcaaaaaacaaaaaaaaacaacaaaaaaaattaaagatgacctaactaaacggaaaggctttctgtgttcatggatcagaagacctaatattcttaagatggcaataatccccaaactgatctacagattcagtgcaatcccaa

SEQ ID NO: 62543 - DNA, 554 bp, Homo sapiens
tgaagcagattagaaaaggaagaagttaacaatactgtgggggtggggaaaagttctatgagaaaagaaataaaatgaaagaggaccatttagatcagcagtaaataacatttgcataataaaaataatacaaatagaagtttttctatttaaaaaatacaatactatatagttactgggacagtggaatatgaagtgtaagtgattgcctgtcataaagaagttcataggtggatgttgtcttagtacatttgtgttgctgtaaaggaatacctgaggctgggtcattcacaaagaggattatttgggttacaattctgcaggctgtacaagaagcatggcattggcatctgcatctgcggaggatctcagackgcttccactcatagtggaagtgaacaggagcagttgtgtgcagagaccacatggtgagagacaggaagagagaggggaggaggtggcaggctcttttcaacaatcagttctgggggttgaagagggactaagagagtgagaacttatgaaggagacagctgcaccaagacattcatgag

SEQ ID NO: 62544 - DNA, 570 bp, Homo sapiens
aaccttgcaagaagaagaaatgtgcatagaggtttaaaagaggatggtaatttctaagaaacgtgagtattttcttatgattgaaaaatggtgttcacaaaggagatggcagaagatggaacaagtaagctaaaccagtgtcaarttttaaaagtctgaaatgccaggataaaattgttgaagtttaggtaaacaagatgttagccaagacttgtaagcaggaactaatatgatcaagtttgattttcaaaagctaaaagtagcaacagtatatattttctgcccctggcatttattgactttgagtacatgctgtaaatttggatgccctttcacactgataccagctatattctagtaagtggttagccactttataggtcctaatggtgcttacttctcagtccgtttgcctgatgaacagcataatgcatctgtccaaagtaaaacattccatatgacattgtgtagggccatgttgatcagtctgcaaccattgccttcccagtgggcaacatctatacaattctgcaagaccttcttcagcagcctttgtagtctttcgttgtg

SEQ ID NO: 62545 - DNA, 617 bp, Homo sapiens
cctctctctttcttctgactatctgctattgcctttcactggcccaactcagatactccatctaagtcagcaggctaggaaataagggcgtacaagattcagcggtcgtccttccttgttttatagaagaaaagaaagaaaaggatcttgggcgggcaaatggataaaaatccaacagaaatatcatcttttaaaattgtattcttgtttcaytctagaatcatatattcagccaattaaagagatcaagaatgaagaagatcttaagcatctatctaaaactatatgtcaattttgtcttttacatcttgtccattgacattagacagctgacaatcatccatttcctaccagtaaccactattataagacatctgcaaaatggaggttcgtgctcatcagtcagttaatgtgaattggcaatggagaagctcaacagaacacaacagtctctaaataataatttggaaaagactgcacaagatgatccaatttcactgttaaagatgctgcccaattcattactcaactccagggcacagaaaatgacaagcattttcatagatccagttcctgacacagtatcaacaaatattaaaagcccactaaatatttgt

SEQ ID NO: 62546 - DNA, 742 bp, Homo sapiens
tcatttctttaaattacagcaatgataccctgataatttaagaatcaaaagaatgagtttggcatatccaaccatctatgcacctctgagcaagttacctaaattctctgtcacccaatttcctttcttataaaatgagattgtaattcttgccataaagcaacattgtgagggttaagttaaaaataattgtgttgataagcactatattctcacattattattattattattattattattattattattattttagagatgaggtcttgctatattgcccaggctggtcttgaactcctggcctcaagtgatcctccacctcagcctcccatgtagctggaactatacgcacatgcctcttcacctagcttatacctcatatattccaaacccttacaaatcagtggcttwggtgatagtgctgatggtgagaataacaatgtgataaagcctttatgccccacttttcagatttccacgtgttatgcgagcggaatacttcagttctctccatccacccatgggagctacctgcaacttagctgatatacaagaagaaactcgactattcagctcaatctcttcttccttccctcttttgggagctaaccttcctccaaaagatcgttctcatcttccccatgctataaacatccaggaccaggccccatggaagaggctgtgattgtcatcctgtcccactgaatagtggtaattatgtttaagtaggggtgagaat

SEQ ID NO: 62547 - DNA, 553 bp, Homo sapiens
tgaatcatatgccttagaacttactctttttgttatatttgtaaacattttaaatatattaattatacttactcaaagttaaaataactcagagttaaaaaaatacctgttcatatttggcccaaattagagaattccccaaaatgttatgtaatttatttataatgaaatcttatatttatctagtgttttcaaatcactttcttatatattaggtaactggagatttataatgacccagtgaaaagtagagaagcaattatcatttctgttttaaatatgaagaaattctgtcttaaatgatgccatccaagactttatacattctaaccccaaacgatcttgtgtgagttttcaaaaacttacaagacttgtaaaaattatagttagtccttgataagcactagaaaaataaggattggaatggccagyatttttgaaatttcccccatctctgcttgttacatgcagtgatatacatgctgactcagaaccatctaaactgaaaaaggtaaattgaaatttaggaaaatcgctatatttttttaaattg

SEQ ID NO: 62548 - DNA, 565 bp, Homo sapiens
cacacacacacacacacacacaaacacacacacccctctagaaattatcwgtctgcattgatcgccattagaggacagcagaaatatatatatatagaatttcatacaattttgaatttcattctaaattcatatatatgtatgtatggagagagagattatctgctaaataatatgtatgtggtactaaatatatattaatagtatacaaatatatatttctaaacttaattgcctttggattctctcatttttctctaatataacaatctggttaaaataaataatgtaatgggcacatatattcccagtaatcttggtctaggtattgcacagactgatctcatatctaaattcttccttcaataaaatgtaagaaatgactaatgatgtaacaagctcagttaatagtctccccacaaaaataccatattgaacattttgttgatcaagataaatcttcaacaatctaaaatgttcaaaaggaggaactaagaaataaaaactcttccagtcttggtctgaggcagtactttctgtgtagtgccatttactttcgcttttg

SEQ ID NO: 62549 - DNA, 995 bp, Homo sapiens
tgcataaacatacatatgtataccacacatatagatttatgaatgaatgaaaatrtatatgctcatgtgtgtctataactgtatatattaacttcaaagacccatcaatacagagaattgacctactggtaaatgcacagaaatatatcacacccagcaggtcaacaacaaataagacaaagagatacccattttctgtgacatggtttgtcttcattttctgagtttaagtaactgttacaaaataatctgtttgctctttgtgaagatggccatcttgacagaataaaatgggacaggtcctgcctggagcagaagctgtgtgccaccttggtgacagtgatcttaattgatatttgtgcccaggggcggctcctctctcctcctcctcctcccagctaagaaactgcacttcacacaatagaacagtgtagggtaggatgctttgtcttggggcagtgtgggccaagtgccgggcactgaattctggggccacgtgatttcctgtgtgccctgctgacatgactgccccaccagcctgtcctgctgtcccttctaacaggtgcccctccgaggaccctcctaggaggaagagcttttggactgcctccaaggtctcaggcactcaccctccacatctgaaagttatcagaactggcatctcacgaatcctccctgcactcttcctgctctgcgcagggcagggcagagcctataagaaataaagtactttgttacgtataatttaatcctcaaaggtatagaaggttgggccccagatgaagaaaagttagatggaagcagtagctgagtcagatggctgaatatctgctctggaatttctacatccatttggagttctcataatttgatccccccattagcactacctgtgggggaatggcactcttttttaaactgcatgttggacaattcctgtaagtatttcctctagagaactttgcttttttctggttaatccttgtaggatgatg

SEQ ID NO: 62550 - DNA, 1220 bp, Homo sapiens
tttttcaggggttccttttctgagccagtactcctagcttgaatatcacctaacccagagagtggtagctagccctttctttgtgtcctttcctcctgccttgaccatgaaggaggaaggttcatatcttggccattagaaagttaattgctccattgtccatcagctgagccccaggtggtgattatgaatgatgccagagaatgggataaggcaaacctcaaccagggagctaagaaagcttgagatggtataatgaagagtgttctgttgacctaatcaattgattccttctattaaccattattttgggcccttactttatgccaggaactctgctaggcacagggaatatgaagaagtatcaggccccttaaagaattcataatttaggaaagggaatgtataagatgaataatgtaacactgtctgataggggatgagcaacttagcataaagggaggagagggaagatgatcagggaaagctttattcatttattcaacagtattttttgggtgcctattgctgtcctaggacttattcaaggcactggggctacagcagtgagaataagacaggttaggtttttttgtttctttgtttgttcctctcacgaagcttacattgtagaggagggagacaggcaaaatgcaacaagatgcttgacttgcatcttcttactggcacttcagcttgagaaaagaggaagttcaaagaggacagagcttgaggcggcagggccaggtggagagactaagaacttggtgaagcccagtaatcatttgagagtttcgttccaagtacagaacctaaatcaaactggcttaagtaaaagggaaacgtctggctcatggaatttagtawtctagagagtagctggctttgggctcagcttgcggtaagagttaagatggtatcaaagagaccctgtgtctctccacctcttcatctcagctctgatctggcccatagtggcctcattctctagacaactatggataactcccacctcatgtccttagctctgggagctctggtggagaagagagaatcttacttctctcttgatggtataagcaagtcttttccagcacatggctctgagggatcacacgcccagctcttacgtggaatgggatgctctaatgggccagtcctgagtcacatgccttctgctggagccaagagtatctctccaggagaaaatccgtgcgtac

SEQ ID NO: 62551 - DNA, 518 bp, Homo sapiens
ggatcctgggcagtcaggagggcatttaccaacgagtctggacttatcttccaaaatgtaacacaaatgttaacaacttattcagccacattggggcataccaggcaggaatctattagaatgcataccatattctctatgtttgtctgttctgccagcctgtgtacttaggccaggggcattgtgatgctgacatattaacacatctctggcacctagccctatctgcagcacataagccatcccagaacagctgcatttactttttaataaattaaattgaacagaattgacaayataaacattgagacccatccatgttgtctagtccagattccaaacatagaggaatctgactggtcatgccatttccctttgaaacaattatttttttggagcagggttatggagagttaaggtgacctctgatgttccgacctctttcaccctgagatatcgcaagattcaactgtctcattgggaagagcagatggtggagggaactggggtagagcagc

SEQ ID NO: 62552 - DNA, 518 bp, Homo sapiens
ggatcctgggcagtcaggagggcatttaccaacgagtctggacttatcttccaaaatgtaacacaaatgttaacaacttattcagccacattggggcataccaggcaggaatctattagaatgcataccatattctctatgtttgtctgttctgccagcctgtgtacttaggccaggggcattgtgatgctgacatattaacacatctctggcacctagccctatctgcagcacataagccatcccagaacagctgcatttactttttaataaattaaattgaacagaattgacaatataaacattgagacccatccatgttgtctagtccagattccaaacatagaggaatctgactggtcatgccatttccctttgaaacaattatktttttggagcagggttatggagagttaaggtgacctctgatgttccgacctctttcaccctgagatatcgcaagattcaactgtctcattgggaagagcagatggtggagggaactggggtagagcagc

SEQ ID NO: 62553 - DNA, 742 bp, Homo sapiens
taggattgtccccattttacagatgatgccattgaggcctaaggagagcaagttactttggccaagttcacacgaccctgcagccaggatttggcccaggcctatcagacacctctgtccccctttgctgcctctttcatctcacaaattggggtaactttcaacaggcaccccagagttggaagggactgtcctccctgcctgcagaatctgctgtggtatctcttgratgaggccatgcagcccccacctggctccacgttcattcttgtcctgatcctcaagcactcagggcctcgcctctctgcccaagccccttcctcaccatgccagctacttccatccccacttgactgggtgcttctcttcctcactcagccagactcttgcagctggcacccctgagtcccccactctttgccttcaccccttctcccagcctgctggatcagcttatgttgcggtagagccgtccctggtcacaggaaggagggaataatgacagcaaaaacaatagctctgtggcaggctgagcatacaccgtgccctgcctcactgaattctcccaggtgagtactgtcattatttccatttgacagtgcagggaatgaggctcagggaagggaagtgtcttgcccaggggcacacagatagtaaatggcagaggtgggaatggaaccccggaccgtggctccagagtccacatgcataaccagtgatgatgtggggagtctggaagctg

SEQ ID NO: 62554 - DNA, 852 bp, Homo sapiens
aaacatgcagagaatgagactggatttttaaaaatagccagaattttgatgcacgtaagacattcacttaaaacaccaaaagtttagaaaataagtacacctcagaatagaagtacttctttgtctctccttaaataatcaaaattgtattgcaaatttgggtactttcggccmttttattttgagaagactgtttagttgttgttagtgaaatcaaaagaaaaatagaaaataaataaaagtgatttaataaaaaggtatgctttgctggtttcctttaggttactggttgtttatttttctcttgtctcacatataatgaatctctttcactgtttaaaggtatcatattgataacaatgaaagactatttactgaacttattgatgtaattttgctcataattactaaatataaaaaaattaaaatattctcacagcattctaaagtaaaaatatttggaatgatttttacttacattatcatagatatatctgtgtagatatatcttattctatttattttatctaaaataatttattttgatattatttataaacaatattctattgcattagtatacaatgcaatacagattgcattgatttttaccctctagaaaagttcagaaagattttaaaacataagtagcctactccatataaaatttaagtacacatgggcaacaacagaaattggagactattagttgcagggcagagggagagaggcaagggttgaaaaactaattattgggtgctaagcttaatacctgggtaatgagatcttttgtacccaaacttcagtatcatgccatataccctaggtaacaaacctacacacgtaccctca

SEQ ID NO: 62555 - DNA, 1334 bp, Homo sapiens
tttttagtcatttatatttctccagaaaattatacatttaaaggcatgttttatttttactactataaagctacattcaatattctgttaaatgtgtaaacaattcttgtaaatactgtttttcatttgtagttttggtatgatttttgttttcctattgttacggkctgtatattttataaaatgaatgtctttgattctgttatctattgctgtgaaacaaattactccaacacttagtggcttaaaagaacaaacatttagtatctcatgcaatttctgaggcaaggaaatctaggggcagcttggctggttcaacatctctcacaaagtcacagtcaagcttttcttcctgggctgccattgtctcaaggcttggctggggctggagaatccactgttaagctcactcacttggataccgacagagctcaattccttgctagctcttggctggaggctacattttctcttccttccttccttccttccttccttccttccttccttccttccttcctttctttctttctttctttctttctttctttctttctttctttctttctttctttctttcagacagagtctccctctgttgcccaggctggagggcagtggtgcgatctcggctcaccgcaacctcctcctccggggttcaagcaattctcctgcctcagcctccagagtagctgggatgacaggcgcccgccaccacgcccagctaattttttgtattttcagtagagacgggatttcaccatgttagccaggatggtcttgatttcctgacctcatgatccgcccacctcggcctcccaaagtgctgggattacatgcgtgagccaccgcgcccggctggaggctccatttttttttttaccgtgcagtcctctccatagaactgttcacaatatagcaacttgtttttcactcctttccccttctcactcctcttttccagcaatagatcagagagagagagagcgacaaagacacaaagagacagagagaacaagagagctcaacgtggaaattatactctttcaaagtctaatcttagaaatgacttaccatcacttccacatctgctattgttcaaacagactaaccctggtatagtgcgtgtgggaggagacttcacaagagtgtgggtactcggaggcaggcagggtcattgagggtcatcttggaggctggtcaccactgatcctggttatatacatattttatatatatattatatatattttatatattatatgtattacatatattttgtatatataatttatatgtaatataatatatataaaatatatataatttatata

SEQ ID NO: 62556 - DNA, 1862 bp, Homo sapiens
tgatgtctggtgaaatgcacaaatttggtttagattagagatggaaagttagtgaaggagaaaaggctttagtaagttagatttctttagggtgggagaataggcaagtcacttaaaccttctgaatctccttttccttatttgtgtggcaggatgcttttcttttctccactccctcacagcttcctcgtaccaagatatgatagctgaatgagatatttggcaaggcagagaaaagagatggagacgcttagcctaattaatgtgctacacttatgccaagaagggattctatgcttacctagcagataatttaccctgaaactggactaggcaggtcacctttttcttcattttattcttgcatatgcaagatctaattatccagacgtatccacagagagaggaaccagatgaaatgaggaaagcacggttcaccttcaagagaaagaagtaggactctggggttttaagccgaggcatgaaatgtaccgattaatagcgtcattttggaaacacaggtctcaggagttttgggaaggttagtatgagcttgtcagcattgcttatgaataacagtgagattgctgctttgcacctgatctcagtcagacctcagaggctcagccactggggctggttatgcagcaggaatatatccatgcgaccagcagggtgtaagaagtccaggccaggacgggcgcagtggctcatgcctgtaatcccagcactttgggagaccaaggtgggtggatcacaaagtcaagagatcgagaccatcctggccaacatggtgaaatcccgtctctactaaaaatacaaaacttagctgggcctgggggcgcgcgcctgtagtcccagctactcaggaggctgaggcaggagaatcacttgaatccaggaggcagaggttgcaagtgagccaagattgtgccactgcactccagcccaggtgagagagcaagaatccgtctcaaaaaaaaaaaaaaaaaagaaaaaagaaaaaagtccaggccagactccatctcaggctcactggttccaatgtgttccatccatacctcagtggctcttgatttagggaaaaaagcacatcctgctatttaatttgcaaaaattaaataactacttgatgtgtcttttgtgcagataatacccacaaaatattagtttttgccctttttcccttataattttaacatacttattttctttacttgtctcatgttttctttcagagattctaactctctttgctaaatggatataggaataaatactcttaaaatacattttttattgtattgatgtggaaaatgtagaaaagcacaaagggatttttttaaaactctgcaatatcatccaccagtcataatcattattaagatgttttcacagatattcccagcttttattctataaataagactctcatgattcacttatccctcacttgtctaactattttatactttttgacgcactaagattctaaaatgaaccataaaagctggcacatatttatagtaatcagttttcttatttaagaggatgagatagatgagtgtaaataatcttgctatacacaaaattgtttctgctactctgaagacaaggtgttcttacatctcggtctttgagcatatatgtaataaagttttgtgtaaggttgcagactttgtctttaatacaaaggaaaacaacaggtatagccttcatataaattatctcatttaatccataccgtgattttatgagattggtactgttaccttcatgttactgatgagggacctgagccaggagaggcaaaatatctcagtcaaagtagcccagctgctaaawgattctgcctttgaaaa

SEQ ID NO: 62557 - DNA, 763 bp, Homo sapiens
gctgtcaaagagatctttcctcgtgtattcactgacctctcctcactagaaatcctgtaaaaagacaacaacttcagaaaaaaattgaggaaaagtggcatatgttagcttccgtttctagtttaagaatcaaggccaaagacagagcaatggacagagagacatcacagcaggatataggacaagttcctgaaggcccaggagcccatcattgcagccacttttcctggaatagcatgctcctgacaggcagagcagagcaggtttagaagaggtgctagcaagctaaggtacacagaccagctcctggctcccatcagtttttacaaataaagttttattagaaaacattcacatccatttctttacacgttggctgcttctatgctacaatagcagaggtgatagttgtgagagagaccatctggtcagtaatactctaaaattactttctggccctccactaaaaaattatgccaagcrtaagcattgataccaaactgcttaagccccaatctcttaaaactcatggcataaactttgtgtgccttgaattctttctctagagcatgggattattacagaattcaccttgtagtgacagaggcaggaggcagagaaatcctaggccgacagggatgggttcctggtgaaaccccatcttcaagccaaagacagtttaaagcctgaaggtcaagctacaagtcaaatccacagactggattgagaacccgtcttcctgtttggtgtgctttccttggat

SEQ ID NO: 62558 - DNA, 763 bp, Homo sapiens
gctgtcaaagagatctttcctcgtgtattcactgacctctcctcactagaaatcctgtaaaaagacaacaacttcagaaaaaaattgaggaaaagtggcatatgttagcttccgtttctagtttaagaatcaaggccaaagacagagcaatggacagagagacatcacagcaggatataggacaagttcctgaaggcccaggagcccatcattgcagccacttttcctggaatagcatgctcctgacaggcagagcagagcaggtttagaagaggtgctagcaagctaaggtacacagaccagctcctggctcccatcagtttttacaaataaagttttattagaaaacattcacatccatttctttacacgttggctgcttctatgctacaatagcagaggtgatagttgtgagagagaccatctggtcagtaatactctaaaattactttctggccctccactaaaaaattatgccaagcgtaagcattgataccaaactgcttaagccccaatctcttaaaactcatggcataaactytgtgtgccttgaattctttctctagagcatgggattattacagaattcaccttgtagtgacagaggcaggaggcagagaaatcctaggccgacagggatgggttcctggtgaaaccccatcttcaagccaaagacagtttaaagcctgaaggtcaagctacaagtcaaatccacagactggattgagaacccgtcttcctgtttggtgtgctttccttggat

SEQ ID NO: 62559 - DNA, 1182 bp, Homo sapiens
aaacaaaaattatgtaaaatacattaaaaatatccagatagatagatagatgatagatagatagatataagaatataacgagaaagtataatgtcatttgaatctcagtggaaagaagagagaatagggtacaagcaatatttcaccatttttcttgttgttgccaaagtgaacaaagattattaagtcacaaattcacagagacctctgaacccaaaacaggctaaacagaaaataaattaaccactagtaatattataataaaacttgagaattatctaaaaatcagcagattaaaaaatgtgtatcataaaaataacaattaggttgacagtgactttttaatagaagcaatgaaagccaaaacacaagagaattgtttatataaattgatgaaagaaagcatgctattctataattcagtatagaaaacaatcattcaagaataaatgtaaaataacaatttattatttacatacatgctctaaggaaattaataaaagatgactttcaggcattgggaaaatattgcagatggaagttcagaaagggtaggaagaaatgaaaagtaaaaaaatagtaattatgcggctaaatctaaatgaatactgcctttataaagaaaaacactaataacaataataatgtctccttgggattaagatctctaatattaaaatttatgcaacagtattatatatatgagataaggagtaaccatagcatatatggaaataatttaaatatatagattaatgttaacttttggtaaatcaaaaggtgtttgttttaatctatagaataatcatgataacattagtaaagtaacttacataacaagcaaatatgggagaaaatggaataaataaaattttataactaatttttaaaaggacaagaaaagtgtcatagagaagatgggatatatagaactcttaaaattgtagacatagatgcgarcataggaataattacatgaaatatccctgcctccactaaatgacaacaattcacaaattagataacaaaacacaactacatgttagcttcaaaagatacatattaaatagaggggtacataatagtagaaagtaaaaggattaaaataattatatatgatgcaaacactaatgaaaagtaagctgaagtagctgtgtaaataacaatgcaaatttcttaaaa

SEQ ID NO: 62560 - DNA, 572 bp, Homo sapiens
ttcagatgatgtaaaaagaaaaaaagagacctgttgcttattagctgtgtgagcttcagtaaggcatttaattattctgggactcaggtcccccatttataaactagacattataatatctaccttatcagataattatgagaaagtgtttatacaaatatttgcaagttctaaaatatacaaatgtgaattcatgttattatctttggcttttcacatagccgaagggtttatttctgttctgattcaattataaaaagaataaatccacatgtagcaaacgtacacacasagctgagccagggtctacccaaaagatatatgtatattattaaataaggctcctgatagcaagtcactcatatttttcagtctctgtaatgagggaccaaaatcaaatgccttttggatccaggagaagagcataagggtatgaatgcccaatgtatagtgacaggatacagtgaaaaaaaatgaaaagaaaaatgtgttcttcataaagaaaatcaagtttaattttacagttaatgtgctggcaaacacacacatctgccccctgccagtgtgtggct

SEQ ID NO: 62561 - DNA, 1280 bp, Homo sapiens
attcacactcatggacaaaaagtcttccaaggaaggaacgtgtcttacacccaaaaatgaccaaacctgtgagaaaaggtctgcgtttgatacatgaagggatggatacacaaacatcacagttacggcagcgtaacaggaaagcagttctgagacagcgacggtgagcctggacccacacgaaagaacgtgccacagaccggctggtacggggagaaagcattaactccagagaagggaaagcctgaattaactgtaaattaacagccataaatactctttaataactaagtatttcagacatttggtgacgcagcctagcacagagaaaagcatttaattccaagttcacaggtagcaaacctgaagttcaggaagagaactcgttttaagagtgcctcaaaacctgcactgcggagagaagccctgtcagcagggccagccacaaacgaacccccggacacaggagcacgggggaccacggactacaaagccaccaccaaaaccctgaaatgtcaagatgggagaggaggatggagagaggggtggggtggggagcattctagggggcggcgtggagcacagtggggaatctaaaacagggcctggcctgggagcgatgtcgtcacgttttgatttttcacttcatttctcccaatgtctctggagaaagccacttcaaaccccaaatgttggcttactagattttggaagcagataatatttgaatagaagtgggtaatatttcaagaatataaagagaaacwtatatttaaaagtaaatgttttaaatggcaggcaatatttcaaataaagttttattcctcactactcagttgtttggtgaattcaattcagtgcatagtaccagacgaggagcattaactccatccatatgaaagcagccccccctccacaaacacccatgcacattaacacatgtgcacaccaatgtacatgcacactaacacgtgcacacatgtgagcagtaacctgcatgcacctgtgcaccccaacataatgtagacatgtgcacactaacatacatgcacacacagagacaggcacacatacacacatgacacaatgtgacagccttgcttgggttaatgaagtctcattctagaaagtttgtttttgtttttatttttaaacgatttcaacctttattgtaggttcacagttacatgtgcaggtttgttacatggatatactgcatgaggctgaggtttggggtacaaatgatcctgacatccaggtactaagcatagtacccaata

SEQ ID NO: 62562 - DNA, 1280 bp, Homo sapiens
attcacactcatggacaaaaagtcttccaaggaaggaacgtgtcttacacccaaaaatgaccaaacctgtgagaaaaggtctgcgtttgatacatgaagggatggatacacaaacatcacagttacggcagcgtaacaggaaagcagttctgagacagcgacggtgagcctggacccacacgaaagaacgtgccacagaccggctggtacggggagaaagcattaactccagagaagggaaagcctgaattaactgtaaattaacagccataaatactctttaataactaagtatttcagacatttggtgacgcagcctagcacagagaaaagcatttaattccaagttcacaggtagcaaacctgaagttcaggaagagaactcgttttaagagtgcctcaaaacctgcactgcggagagaagccctgtcagcagggccagccacaaacgaacccccggacacaggagcacgggggaccacggactacaaagccaccaccaaaaccctgaaatgtcaagatgggagaggaggatggagagaggggtggggtggggagcattctagggggcggcgtggagcacagtggggaatctaaaacagggcctggcctgggagcgatgtcgtcacgttttgatttttcacttcatttctcccaatgtctctggagaaagccacttcaaaccccaaatgttggcttactagattttggaagcagataatatttgaatagaagtgggtaatatttcaagaatataaagagaaacttatatttaaaagtaaatgttttaaatggcaggcaatatttcaaataaagttttattcctcactactcagttgtttggtgaattcaattcagtgcatagtaccagacgaggagcattaactccatccatatgaaagcagccccccctccacaaacacccatgcacattaacacaygtgcacaccaatgtacatgcacactaacacgtgcacacatgtgagcagtaacctgcatgcacctgtgcaccccaacataatgtagacatgtgcacactaacatacatgcacacacagagacaggcacacatacacacatgacacaatgtgacagccttgcttgggttaatgaagtctcattctagaaagtttgtttttgtttttatttttaaacgatttcaacctttattgtaggttcacagttacatgtgcaggtttgttacatggatatactgcatgaggctgaggtttggggtacaaatgatcctgacatccaggtactaagcatagtacccaata

SEQ ID NO: 62563 - DNA, 1424 bp, Homo sapiens
cacgcgggggttgggctcaggagccctgtgtggtgaacagtgccgtgtgcagcgcaggggtcagactcaggagccctgtgtggtgaacagtgccgtgtgcagtgcggggtcagactcaggagccctgtgtggtgaacagcgctgtgtgcatgcgggggtcgggctctggagccgcgtgtgtgatgaacagtgccgtgtacagcgcaggggtcagactcaggagccctgtgtggtgaacagtgccgtgtgcagcgcaggggtcagactcaggagccctgtgtggtgaacagtgccgtgtgcacgcgggggttgggctcaggagccgtgtgaggtgaacagtgccgtgtgcagtgcggggtcagactcaggagccctgtgtggtgaacagtgccgtgtgcagcgcaggggtcagactcaggagccctgtgaggtgaacagcgccgtgtgcatgcgggggtcgggctctggagccgcgtgtgtgatgaacactgccgtgtgcagtgcggggtcagactcaggagctctgtgtggtgaacagtgccatgtgcagcgcaggggtcagactcaggagccatgtgaggtgaacagtgccgtgtgcacgcgggggttgggctcaggagccgtgtgtgcggtggcgacagtgccgtgtgaacgtggaagtcgggctcagcgagcgggaaggcagtaccccccggagcatggccacaggcggagccaaaggccatcgcaaggccaccaggatccgagcctggcagcrctggaagggcttccagtagaatctgcacagagcagcaagaagtgtggccctcgggggagggtaggtggaggcggtgcccacccttgagagcaaatgtccaaaggcctgggccccttgggtgtgggcagaagccacactgggacccctgaagaaggaccaggccttggtgaggaacattaggaggccgaggccccaggatgggacagacacttgccacgctctctggcttcccgcgtggggaacacggcagataccagcaacatttcccaaggactctgtttacgtttcaaataaacagctgaacctggagataggcacagcatgttagaaataattgttcttgacttacgataggctttgaataaaaggctgggtcctctgcgactctgctctgtgggagaattgtgtgtctacacagaaaggtcttcaacgcaggacagcaagtgacaactgcgtcgcagcagagtccacgacagtacagcgccaccagggctgcgtgcataaaaacatgcgggaatagccctctgtgaagcactttttcattactggtttataaacagagagtccacctagacacaggactatcatgcttcaaattaaggtgaatccctgaagacgtcagataggttcaaaaatttggggtttaaaaacagctttatgtctccct

SEQ ID NO: 62564 - DNA, 1424 bp, Homo sapiens
cacgcgggggttgggctcaggagccctgtgtggtgaacagtgccgtgtgcagcgcaggggtcagactcaggagccctgtgtggtgaacagtgccgtgtgcagtgcggggtcagactcaggagccctgtgtggtgaacagcgctgtgtgcatgcgggggtcgggctctggagccgcgtgtgtgatgaacagtgccgtgtacagcgcaggggtcagactcaggagccctgtgtggtgaacagtgccgtgtgcagcgcaggggtcagactcaggagccctgtgtggtgaacagtgccgtgtgcacgcgggggttgggctcaggagccgtgtgaggtgaacagtgccgtgtgcagtgcggggtcagactcaggagccctgtgtggtgaacagtgccgtgtgcagcgcaggggtcagactcaggagccctgtgaggtgaacagcgccgtgtgcatgcgggggtcgggctctggagccgcgtgtgtgatgaacactgccgtgtgcagtgcggggtcagactcaggagctctgtgtggtgaacagtgccatgtgcagcgcaggggtcagactcaggagccatgtgaggtgaacagtgccgtgtgcacgcgggggttgggctcaggagccgtgtgtgcggtggcgacagtgccgtgtgaacgtggaagtcgggctcagcgagcgggaaggcagtaccccccggagcatggccacaggcggagccaaaggccatcgcaaggccaccaggatccgagcctggcagcgctggaagggcttccagtagaatctgcacagagcagcargaagtgtggccctcgggggagggtaggtggaggcggtgcccacccttgagagcaaatgtccaaaggcctgggccccttgggtgtgggcagaagccacactgggacccctgaagaaggaccaggccttggtgaggaacattaggaggccgaggccccaggatgggacagacacttgccacgctctctggcttcccgcgtggggaacacggcagataccagcaacatttcccaaggactctgtttacgtttcaaataaacagctgaacctggagataggcacagcatgttagaaataattgttcttgacttacgataggctttgaataaaaggctgggtcctctgcgactctgctctgtgggagaattgtgtgtctacacagaaaggtcttcaacgcaggacagcaagtgacaactgcgtcgcagcagagtccacgacagtacagcgccaccagggctgcgtgcataaaaacatgcgggaatagccctctgtgaagcactttttcattactggtttataaacagagagtccacctagacacaggactatcatgcttcaaattaaggtgaatccctgaagacgtcagataggttcaaaaatttggggtttaaaaacagctttatgtctccct

SEQ ID NO: 62565 - DNA, 1424 bp, Homo sapiens
cacgcgggggttgggctcaggagccctgtgtggtgaacagtgccgtgtgcagcgcaggggtcagactcaggagccctgtgtggtgaacagtgccgtgtgcagtgcggggtcagactcaggagccctgtgtggtgaacagcgctgtgtgcatgcgggggtcgggctctggagccgcgtgtgtgatgaacagtgccgtgtacagcgcaggggtcagactcaggagccctgtgtggtgaacagtgccgtgtgcagcgcaggggtcagactcaggagccctgtgtggtgaacagtgccgtgtgcacgcgggggttgggctcaggagccgtgtgaggtgaacagtgccgtgtgcagtgcggggtcagactcaggagccctgtgtggtgaacagtgccgtgtgcagcgcaggggtcagactcaggagccctgtgaggtgaacagcgccgtgtgcatgcgggggtcgggctctggagccgcgtgtgtgatgaacactgccgtgtgcagtgcggggtcagactcaggagctctgtgtggtgaacagtgccatgtgcagcgcaggggtcagactcaggagccatgtgaggtgaacagtgccgtgtgcacgcgggggttgggctcaggagccgtgtgtgcggtggcgacagtgccgtgtgaacgtggaagtcgggctcagcgagcgggaaggcagtaccccccggagcatggccacaggcggagccaaaggccatcgcaaggccaccaggatccgagcctggcagcgctggaagggcttccagtagaatctgcacagagcagcaagaagtgtggccctcgggggagggtaggtggaggcggtgcccacccttgagagcaaatgtccaaaggcctgggccccttgggtgtgggcagaagccacactgggacccctgaagaaggaccaggccttggtgaggaacattaggaggccgaggccccaggatgggacagacacttgccacgctctctggcttcccgcgtggggaacacggcagataccagcaacatttcccaaggactctgtttacgtttcaaataaacagctgaacctggagataggcacagcatgttagaaataattgttcttgacttacgataggctttgaataaaaggctgggtcctctgcgactctgctctgtgggagaattgtgtgtctacacagaaaggtcttcaacgcaggacagcaagtgacaactgcgtcgcagcagagtccacgacagtacagcgccaccagggctgcgtgcataaaaacatgcgggaayagccctctgtgaagcactttttcattactggtttataaacagagagtccacctagacacaggactatcatgcttcaaattaaggtgaatccctgaagacgtcagataggttcaaaaatttggggtttaaaaacagctttatgtctccct

SEQ ID NO: 62566 - DNA, 754 bp, Homo sapiens
agctgccaaggctgaaaacacagacgaatgcacgatgtgccccatgtagacgtgttcacagaatcgagagtgtggggagacgtgcaggcatgtaccgtgtagacgcgctcgcagaatccagagtgtggggaaacgtgcaggcgtgcaccgtgtaaatgcactcacagaatccagagtgtagggagacatacaggtgtgcaccgtgtggacgcgctcgcagaatccagagtgtagggagacacgcaggtgtgcaccgtgtggacgcgmtcgcagaatccagagtgtggggagacgtgcaggcgtgcaccgtgtggacgcgctcgcagaatccagagtgtggggagacgtgcaggcgtgcaccgtgtggacgcgctcgcagaatccagagtgtagggagacgtgcaggcatgtaccgtgtagacgcgctcccagaatccagagtgtggggaaaagtgcaggcgtgcaccatgtggacgcgctcgcagaatccagagtgtagggaaacgtgcaggcgtgcaccgtgtagacgcgctcgcagaatccaaagtgtggggagacgtgcaggcgtgcaccgtgtggacacgctcgcagaatccagagtgtggggagacgtgcaggcgtgcaccgtgtggacgcgctcgcagaatccagagtgtggggagacgtgcaggcgtgcaccgtgtggacgcgctcgcagaatccagagtgtggggagacgtgcaggcgtgcaccgtgtggacgcgctcgcagaatc

SEQ ID NO: 62567 - DNA, 732 bp, Homo sapiens
cctccagattcctccaaatgacagaaatgtctttgtctttttaaaggctcaatagtattccattgtgcatctatatcagcacattttatccattcacctgttgttagacatctagaatgattctatatcttggctactataaataatgctgcagtgaacataggaatgcagacatctcaacacactgagtgcaattcctttggatttgtgccaagaagtgggacggctggatcacatggtagttctatttctattttttttaggaacctgcatactgttttcataattgctactctaatttacattcccaccaacagagcactagggttcccttttctccccctcctcaccaacacttgttttcttttggttttcagtaacagccatcctaacaggtgtgaggtgatatcccactgtggtcatatgtggcttttcctgatttaacaaaataacaggtaacctcactgatgagaattttgagcatctaatcactgtgatgaacttctgcttacagatttgctaaaggcagcayctcgccatttcagatgctgtttgtcataaccacagacatgctctcgctccccaggaagtcaccagcaggggaatcacagtccagctttaattaattgcctttacttctttctgccgtcagccatgatgtgcaagcaagaaggctctttttctctcattaaagaaagttcttcattacttgttcttttgagtcttaaggga

SEQ ID NO: 62568 - DNA, 574 bp, Homo sapiens
  misc_feature (1)...(574): n = A,T,C or G
acgtataatgaaaccgatgttttttcctcatccaccttgtaaggaatcaaagttgaactaaaagacattayggtgggatttgctgtaagttgtttcacctaaagtcacagttcccgcgaaccaatcaaggacattgaggacttgctgcatagtgtgtgggttcatctgtggctcagctcgtgtgggccatggggttcccaggcatcagtcagatgttcttctggggatgcctggaggcatttctggatgagagtctcatgataattttttgcctcagtgaagcagacctctccccnaggggggatgggctcacgcaatcccctcaaagacctgactagaatgaaggacaccttccaccaagtctgagagaattcctgcttcatggcctccgatgtcagctcttcctgggtctccagcctgcaggcttcagactggaacttcacagttggctccctgggcctcccgctggccgacacactctgcagatcttgggactcgtcaccctccatgcgcgagtgagccaatcccttgaaatctccttctctctacacgtgcacagcctattagtttctct

SEQ ID NO: 62569 - DNA, 2057 bp, Homo sapiens
atccccaagcggccgtcagagtccctatgagttatcttgtcgcctccatgctctttaatctcgttaatgtcaggacgtttttatcctttgctttctggaggcagtcacaggttggttggggccaaagattacaaacaaggatgttttatgaagctactcagcaggttggggaatagctgggtttggctgtaggataagcgagttgtaggcgtcctgcccactggttcaaacatcagttcgagagcagggaggggcggtagaaataactgcagagccccccgggcagcacctttgaaggctgtgatgtcagctcaatacatgtgcaaggccgtgtccataaaatcagccacaacaggcctgtgtatttttgtggctatggcttgtgtagagctagtaacgacggtcaccatctcagaatacagcagctgccagtgtcagattacttcccataggacgtcatcgcgaggcagcttgtttctactgctggacccctgcttggtatgagtgttattcctccactctgttcatggggccactgagaccaagagcttagtgacttggtgaatggcacggccatggaggacgccaagctctcccgcccgcaccccggtgatgttatggctgaaacgtgtctcccaaaaagtgtgtgatggagcccagcgcctccagacatgaccttatttggaaatagagtcttgggggaaaccaagtcggcacatttctgttaagtcacctgacttacrgtgctcgttatgcagccgcagcagactgccgcgttccacaggaacacttccccagctcagactcacattcgtcagggaccctctgttcccctggagggcggagctgcacgggaggcatcagggagggtgaggaagaggcgtggccgggcctgggcctctggacgcaggggacacacgcggtccaggccctgagtggacagagaggacgctggtggggtgtcgggaaccctagctggggccgagtttcttcagctgaaaatcagtcacgtgtctgacatccactgcatatgacgaggccactggccacacgtagcctgtgagcatgtggtgtgtggacagtgtgaccgggcacccagatttcaggttttaactgattttcattaattaaaattacattgctggccaggcgtgatggctcatgcctgtaatcccagcactttgggaggccgaggtgggtggattgcttgaggtcaggaatttgagaccagcttggccaatgtggcaaaacccaatctctactaaaaatataaaaattagccaggcgtggtggcaggtgcctgtaatcccagtgactagggaggctgaggcagaagaatcacttgaacccaggaggtggaggttgcagtgagctgggatcgcaccactgcactccagcctgggcgatagaacaagactgtctcaaaaaaattacatggctgcatgtgacggccccagtggacgtgtggtcactgacccgggggtgcttcttctccacgttctgtgattctgctttcctcagatgaggagggccctgctcaggctgatgccacggaggggttagaaatcagtatttcgggaacacatgtcagtgctcgcagctggctgggtgtggacagacacctcggggtgaccgctgagtatattttgtggccccagcacccgtggcaggcagaactcacgcctcctgatctttctcagctgctaaacgctgctgtagaacaggcaggttgtgtggaattgaacttttaaaagtgcctttgggcaataaggataatttcattctcctctgcggccttctgtaaatccttcagagaggaagaaataaacctattatggtcctgccttcctgctccagccagagccggtgcggcaagcgacgtgtgctcagccttccagaggccgtggctggtctggatttaatgcactatcctgcctgtgactgtggcgggtagaatgctgtcaacgttaggggtgagcgcctttttcgaacacagattgtctgcctttaggaaagtcacacgtggattctaccctggaaggttgatgatttgtctt

SEQ ID NO: 62570 - DNA, 656 bp, Homo sapiens
ctccctacagtcagggacttcgggcaagtccgtctgtgggtgtgttttcttcccaacttggctgggttttttgttattttttcaatcgtattgttcatctcttcttactgattatcgagcacatatttattcattttatgcacatataaatgtagtatgtaaatatatcatttctatatgtgatctattaaaacattgcacaaatatgaagatacaaacttcatatacttttactaatgatcccctttgtctgccttgtatattgaatataatttcayatttgtcatttatcttttgaatgtttttagtgcagatattttcacgtttctgtcaatgtattaccgacttttttggtgaagcatcatacccagaaaacccttgtttctggaaatttcaacatttcctgtgtgtctgcttgtgaggagtcagcgggcaggacccggcctccttctccctgggtctcagcagggagcactggctggcctgtgagtcctggggaacagatgctccttctgtggggtccccgggccggccgaccgacggcaccgcaggccagcactgggcaccccgggagcggcctggcctggcccatctcactcactcggtgctgagcactccggagtggggggtcagctttgctcctcagggctgcaggc

SEQ ID NO: 62571 - DNA, 656 bp, Homo sapiens
ctccctacagtcagggacttcgggcaagtccgtctgtgggtgtgttttcttcccaacttggctgggttttttgttattttttcaatcgtattgttcatctcttcttactgattatcgagcacatatttattcattttatgcacatataaatgtagtatgtaaatatatcatttctatatgtgatctattaaaacattgcacaaatatgaagatacaaacttcatatacttttactaatgatcccctttgtctgccttgtatattgaatataatttcatatttgtcatttatcttttgaatgtttttagtgcagatattttcacrtttctgtcaatgtattaccgacttttttggtgaagcatcatacccagaaaacccttgtttctggaaatttcaacatttcctgtgtgtctgcttgtgaggagtcagcgggcaggacccggcctccttctccctgggtctcagcagggagcactggctggcctgtgagtcctggggaacagatgctccttctgtggggtccccgggccggccgaccgacggcaccgcaggccagcactgggcaccccgggagcggcctggcctggcccatctcactcactcggtgctgagcactccggagtggggggtcagctttgctcctcagggctgcaggc

SEQ ID NO: 62572 - DNA, 656 bp, Homo sapiens
ctccctacagtcagggacttcgggcaagtccgtctgtgggtgtgttttcttcccaacttggctgggttttttgttattttttcaatcgtattgttcatctcttcttactgattatcgagcacatatttattcattttatgcacatataaatgtagtatgtaaatatatcatttctatatgtgatctattaaaacattgcacaaatatgaagatacaaacttcatatacttttactaatgatcccctttgtctgccttgtatattgaatataatttcatatttgtcatttatcttttgaatgtttttagtgcagatattttcacgtttctgtcaatgtattaccgacttttttggtgaagcatcatacccagaaaacccttgtttctggaaatttcaacatttcctgtgtgtctgcttgtgaggagtcagcgggcaggrcccggcctccttctccctgggtctcagcagggagcactggctggcctgtgagtcctggggaacagatgctccttctgtggggtccccgggccggccgaccgacggcaccgcaggccagcactgggcaccccgggagcggcctggcctggcccatctcactcactcggtgctgagcactccggagtggggggtcagctttgctcctcagggctgcaggc

SEQ ID NO: 62573 - DNA, 656 bp, Homo sapiens
ctccctacagtcagggacttcgggcaagtccgtctgtgggtgtgttttcttcccaacttggctgggttttttgttattttttcaatcgtattgttcatctcttcttactgattatcgagcacatatttattcattttatgcacatataaatgtagtatgtaaatatatcatttctatatgtgatctattaaaacattgcacaaatatgaagatacaaacttcatatacttttactaatgatcccctttgtctgccttgtatattgaatataatttcatatttgtcatttatcttttgaatgtttttagtgcagatattttcacgtttctgtcaatgtattaccgacttttttggtgaagcatcatacccagaaaacccttgtttctggaaatttcaacatttcctgtgtgtctgcttgtgaggagtcagcgggcaggacccggcctccttctccctgggtctcagcmgggagcactggctggcctgtgagtcctggggaacagatgctccttctgtggggtccccgggccggccgaccgacggcaccgcaggccagcactgggcaccccgggagcggcctggcctggcccatctcactcactcggtgctgagcactccggagtggggggtcagctttgctcctcagggctgcaggc

SEQ ID NO: 62574 - DNA, 1478 bp, Homo sapiens
ttagacagtacccactcgactccagccacaacacatgcaaaacactgctgcccttccccatccacacaagccagatggggccccagactctcacccccacctggcagtaacaagccatcagtcacttctaagccagagcagtatcaaaggaaccagctgcaacagaaggttccagtgagataagtaagacccagagtcttctgacatagtacgaaatgtgcacctctttcaatagaaaatccctgtcatgccaagaagcagcaagatcacaaagtggatgaaacaaggcaagccatagatgccaacatccagcatagaggtgctatcatagagtgacctcacagggacttaaagcagccacagtaaagatrcttcaagggcaatggcaaacataattgaaacaaatgaaaaaacacaaagcctcagcaaagaaattgaaatcctcaagaaagaaatagaaaatacaaggaagtaaacaaattttggactgaaaaatcaaataataaaacaagtttggatatttgcaaggacaatgatgacagtcatgaattaaggattgatgagtatgatggattctgtgctactgaagccccccaaaagaaataaatatatatgcccacccatctttgaattccataaaaggaaatttctagaaaagtatttttgaaatctctacatttggaaagttatttcaaattctcctcccaataaaagatgtgttatttagtggaatagcagcaagttttcaggatgatgttaatgttccctttcattttgtacacgtgccaaaatgcatcagtacgtaatcatcagccttccaaactgtgttcacacatttcccgtgctaatatttcacccacataacttcatttccctgcctttgattcttgcaataacacatctagcacttgtgagcatgcaccgtcaggctgaaaaagaggcttgtatcctgttaggcattactgaatattggaatagcctcctaatgcctttccgcccttccgaaaaaatccactcctatttatccagcactggtttggacatgaaatgtcctcaattaaatattattaacgtctcagttcctaaataatgaatttacattttctggtactcttttgcctttaaagcccctttgacaggcattgtctcgtgttttggccacagacactatggggtggggaagatgagtgttatcacacatgctagcaggtgaaaagattgaggctaagatttcatatctgccattgtttagctacatcactaaccaatgtcagatccagcccagaaagttattgttttgagtttggggcaatgcttttttccaaatttttatacttccttcttattctttatctaagcaagcaagagcccaccttctgcccctgactagacccggctatgtggcacgattccagtgggattcactttctgccccatccacgggtcttggcctttctcacctccacccatgtactcag

SEQ ID NO: 62575 - DNA, 1478 bp, Homo sapiens
ttagacagtacccactcgactccagccacaacacatgcaaaacactgctgcccttccccatccacacaagccagatggggccccagactctcacccccacctggcagtaacaagccatcagtcacttctaagccagagcagtatcaaaggaaccagctgcaacagaaggttccagtgagataagtaagacccagagtcttctgacatagtacgaaatgtgcacctctttcaatagaaaatccctgtcatgccaagaagcagcaagatcacaaagtggatgaaacaaggcaagccatagatgccaacatccagcatagaggtgctatcatagagtgacctcacagggacttaaagcagccacagtaaagatacttcaagggcaatggcaaacataattgaaacaaatgaaaaaacacaaagcctcagcaaagaaattgaaatcctcaagaaagaaatagaaaatacaaggaagtaaacaaattttggactgaaaaatcaaataataaaacaagtttggatatttgcawggacaatgatgacagtcatgaattaaggattgatgagtatgatggattctgtgctactgaagccccccaaaagaaataaatatatatgcccacccatctttgaattccataaaaggaaatttctagaaaagtatttttgaaatctctacatttggaaagttatttcaaattctcctcccaataaaagatgtgttatttagtggaatagcagcaagttttcaggatgatgttaatgttccctttcattttgtacacgtgccaaaatgcatcagtacgtaatcatcagccttccaaactgtgttcacacatttcccgtgctaatatttcacccacataacttcatttccctgcctttgattcttgcaataacacatctagcacttgtgagcatgcaccgtcaggctgaaaaagaggcttgtatcctgttaggcattactgaatattggaatagcctcctaatgcctttccgcccttccgaaaaaatccactcctatttatccagcactggtttggacatgaaatgtcctcaattaaatattattaacgtctcagttcctaaataatgaatttacattttctggtactcttttgcctttaaagcccctttgacaggcattgtctcgtgttttggccacagacactatggggtggggaagatgagtgttatcacacatgctagcaggtgaaaagattgaggctaagatttcatatctgccattgtttagctacatcactaaccaatgtcagatccagcccagaaagttattgttttgagtttggggcaatgcttttttccaaatttttatacttccttcttattctttatctaagcaagcaagagcccaccttctgcccctgactagacccggctatgtggcacgattccagtgggattcactttctgccccatccacgggtcttggcctttctcacctccacccatgtactcag

SEQ ID NO: 62576 - DNA, 1478 bp, Homo sapiens
ttagacagtacccactcgactccagccacaacacatgcaaaacactgctgcccttccccatccacacaagccagatggggccccagactctcacccccacctggcagtaacaagccatcagtcacttctaagccagagcagtatcaaaggaaccagctgcaacagaaggttccagtgagataagtaagacccagagtcttctgacatagtacgaaatgtgcacctctttcaatagaaaatccctgtcatgccaagaagcagcaagatcacaaagtggatgaaacaaggcaagccatagatgccaacatccagcatagaggtgctatcatagagtgacctcacagggacttaaagcagccacagtaaagatacttcaagggcaatggcaaacataattgaaacaaatgaaaaaacacaaagcctcagcaaagaaattgaaatcctcaagaaagaaatagaaaatacaaggaagtaaacaaattttggactgaaaaatcaaataataaaacaagtttggatatttgcaaggacaatgatgacagtcatgaattaaggattgakgagtatgatggattctgtgctactgaagccccccaaaagaaataaatatatatgcccacccatctttgaattccataaaaggaaatttctagaaaagtatttttgaaatctctacatttggaaagttatttcaaattctcctcccaataaaagatgtgttatttagtggaatagcagcaagttttcaggatgatgttaatgttccctttcattttgtacacgtgccaaaatgcatcagtacgtaatcatcagccttccaaactgtgttcacacatttcccgtgctaatatttcacccacataacttcatttccctgcctttgattcttgcaataacacatctagcacttgtgagcatgcaccgtcaggctgaaaaagaggcttgtatcctgttaggcattactgaatattggaatagcctcctaatgcctttccgcccttccgaaaaaatccactcctatttatccagcactggtttggacatgaaatgtcctcaattaaatattattaacgtctcagttcctaaataatgaatttacattttctggtactcttttgcctttaaagcccctttgacaggcattgtctcgtgttttggccacagacactatggggtggggaagatgagtgttatcacacatgctagcaggtgaaaagattgaggctaagatttcatatctgccattgtttagctacatcactaaccaatgtcagatccagcccagaaagttattgttttgagtttggggcaatgcttttttccaaatttttatacttccttcttattctttatctaagcaagcaagagcccaccttctgcccctgactagacccggctatgtggcacgattccagtgggattcactttctgccccatccacgggtcttggcctttctcacctccacccatgtactcag

SEQ ID NO: 62577 - DNA, 1478 bp, Homo sapiens
ttagacagtacccactcgactccagccacaacacatgcaaaacactgctgcccttccccatccacacaagccagatggggccccagactctcacccccacctggcagtaacaagccatcagtcacttctaagccagagcagtatcaaaggaaccagctgcaacagaaggttccagtgagataagtaagacccagagtcttctgacatagtacgaaatgtgcacctctttcaatagaaaatccctgtcatgccaagaagcagcaagatcacaaagtggatgaaacaaggcaagccatagatgccaacatccagcatagaggtgctatcatagagtgacctcacagggacttaaagcagccacagtaaagatacttcaagggcaatggcaaacataattgaaacaaatgaaaaaacacaaagcctcagcaaagaaattgaaatcctcaagaaagaaatagaaaatacaaggaagtaaacaaattttggactgaaaaatcaaataataaaacaagtttggatatttgcaaggacaatgatgacagtcatgaattaaggattgatgagtatgatgrattctgtgctactgaagccccccaaaagaaataaatatatatgcccacccatctttgaattccataaaaggaaatttctagaaaagtatttttgaaatctctacatttggaaagttatttcaaattctcctcccaataaaagatgtgttatttagtggaatagcagcaagttttcaggatgatgttaatgttccctttcattttgtacacgtgccaaaatgcatcagtacgtaatcatcagccttccaaactgtgttcacacatttcccgtgctaatatttcacccacataacttcatttccctgcctttgattcttgcaataacacatctagcacttgtgagcatgcaccgtcaggctgaaaaagaggcttgtatcctgttaggcattactgaatattggaatagcctcctaatgcctttccgcccttccgaaaaaatccactcctatttatccagcactggtttggacatgaaatgtcctcaattaaatattattaacgtctcagttcctaaataatgaatttacattttctggtactcttttgcctttaaagcccctttgacaggcattgtctcgtgttttggccacagacactatggggtggggaagatgagtgttatcacacatgctagcaggtgaaaagattgaggctaagatttcatatctgccattgtttagctacatcactaaccaatgtcagatccagcccagaaagttattgttttgagtttggggcaatgcttttttccaaatttttatacttccttcttattctttatctaagcaagcaagagcccaccttctgcccctgactagacccggctatgtggcacgattccagtgggattcactttctgccccatccacgggtcttggcctttctcacctccacccatgtactcag

SEQ ID NO: 62578 - DNA, 1478 bp, Homo sapiens
ttagacagtacccactcgactccagccacaacacatgcaaaacactgctgcccttccccatccacacaagccagatggggccccagactctcacccccacctggcagtaacaagccatcagtcacttctaagccagagcagtatcaaaggaaccagctgcaacagaaggttccagtgagataagtaagacccagagtcttctgacatagtacgaaatgtgcacctctttcaatagaaaatccctgtcatgccaagaagcagcaagatcacaaagtggatgaaacaaggcaagccatagatgccaacatccagcatagaggtgctatcatagagtgacctcacagggacttaaagcagccacagtaaagatacttcaagggcaatggcaaacataattgaaacaaatgaaaaaacacaaagcctcagcaaagaaattgaaatcctcaagaaagaaatagaaaatacaaggaagtaaacaaattttggactgaaaaatcaaataataaaacaagtttggatatttgcaaggacaatgatgacagtcatgaattaaggattgatgagtatgatggattctgtgctactgaagccccccaaaagaaataaatatatatgcccacccatctttgaattccataaaaggaaatttctagaaaagtatttttgaaatctctacatttggaaagttatttcaaattctcctcccaataaaagatgtgttatttagtggaatagsagcaagttttcaggatgatgttaatgttccctttcattttgtacacgtgccaaaatgcatcagtacgtaatcatcagccttccaaactgtgttcacacatttcccgtgctaatatttcacccacataacttcatttccctgcctttgattcttgcaataacacatctagcacttgtgagcatgcaccgtcaggctgaaaaagaggcttgtatcctgttaggcattactgaatattggaatagcctcctaatgcctttccgcccttccgaaaaaatccactcctatttatccagcactggtttggacatgaaatgtcctcaattaaatattattaacgtctcagttcctaaataatgaatttacattttctggtactcttttgcctttaaagcccctttgacaggcattgtctcgtgttttggccacagacactatggggtggggaagatgagtgttatcacacatgctagcaggtgaaaagattgaggctaagatttcatatctgccattgtttagctacatcactaaccaatgtcagatccagcccagaaagttattgttttgagtttggggcaatgcttttttccaaatttttatacttccttcttattctttatctaagcaagcaagagcccaccttctgcccctgactagacccggctatgtggcacgattccagtgggattcactttctgccccatccacgggtcttggcctttctcacctccacccatgtactcag

SEQ ID NO: 62579 - DNA, 1520 bp, Homo sapiens
aacccaagctacttgggaggctgaggcaggagaatcacttgaacctgggggtggaggttgcagtgagccgagattgtgccactgcactccagcctgggcgaaagagtgaaactccatgtcaaaaagaaaaaagaatagcttaaaacaacagccaagaaagttagaatccccatatgtttggattcctctaaaaaacaaagataacgtcttatcatatgtccctgagttgctttttaacaacctggacccccaccaaatggaaaatgctgtccactggcacataaacctacaattagggaaaactgaggactgaactctgactgctgttctttgttctaaatttcttcctgaggaacctaaggaaagtcacgctcacaggtcagacctcaacattcctttccactgacctctagattttagatgaagttttatttcctgaatcaattacaaatcaaaaaatctttaaatccacctatgatttgtaagttcttgcttcaagatatctcatctttggggggccaaaccaatgtataacttccatgtattgatttataattttgcctgtaagttctgatttcctaaaattgactcctgcctttaaaaattcttacttgtaaaccatcagagaggttgggtcttaagtgtgagctggccaattctccttgcttggtgccctacaaataaactcccttctttctctcacttccaaacatggtgtagatgtttggctttcctgcaccgactgagtgggtccaggttcagtttgctaacaatttagtggtgacccagatgggatgaaaatcctgagtggacatctcacccaaggcacattggcccctggccacagccacccttggatcccattagcagctgccgtagccattctactcagggaaagatccatgtgtttggctgccatccctggcccatgatgctttcacctttgcacattagaaacagacatttggcttggaagacatctttggtaagtggcaaattcatatgtgatggcatcaaggtgttttccctgcaaacacttggttctgcttcatcagagcattcagtttgagggtggagatataccctagggagtcgaagggattgagaccttgagaaacttcatttgattttgatttgcttaaaatctgtttgacttgcttaaaactgtttagagactggccaaggcactaaggttttatcacctatggtttcgtcatctaaaatggaaaacacaagttttagtcctccttatagcccattggggtrtattctgcaaaactgggccatttttagtttcagcccatttaaaaaagaagaaaaaaatgagttcttattacagcactacctagccatgatattccctgggagctgaggaaaggtggccagaaaacgggtgtttaaattatgttacaatttttcaattaaaattgttttgtaaacacaaagttgaatgaaataaaattctatatatacaagcttgtatgcttttgtaccaaagcaaaccaattcataaaaaacat

SEQ ID NO: 62580 - DNA, 572 bp, Homo sapiens
gaaatgctaatgctagttaatggttttgcctttatattaataaacaagtgatgcctatgcctcttgtractgacctgaaaacatcaacattacaactgcataaatatcctactttgtttaaagtatatcatttttcagaaatattgactgcttaagtgatgatttaaatagttactgtgcttataacttaataataattttttaaaacctgattttaaaatgagcaaaggatttagatagatatttctccaaagaaaaattgaaatggcccataagtacatgaaaagatgctcagcatcattagttattagggaaatgcaaatcaaaaccacgatgagataccacttcatacccagcagggtggctagcatcaaaaagacagaaaataacaagtgttgtcaaggacatggaaaaactggaaccttcatgtattgttggtgagaatgttaaatggtgccaccactttggaaaatagtttggcagttcctcaaaacataaatatatgacctagcaagtccattccgacatatatacacaagagaattgacaacataagtctacacaaaaaacta

SEQ ID NO: 62581 - DNA, 937 bp, Homo sapiens
taaggaaactttatatcattactataaatggaaatccagtatcatttgccaaaatagaagataaatataaaaatatataacattaccagacgatgttgttaaattgtagctagatactgttgctagctgagaattctgaatcagagctggcctttgctctgttcaagagggagagagagagagttgagatgttttaaggaaatactagcagcaaactgagtctttcttctctatgtaatctaaagaattaaaagagaatttaaataggacaaagtgactatgtgtgtcaatgtgatttgattcctgtatatgaactttctaaaaccactctttatagaaccctaaagaaaatgccctatggaaaatgtcctacgccttatggccctatgaaagatgccagccttagctcatttgcacgtggatatgcttttttgagtgagagagaaaggggttakgttgcggttaacactaaagaaattctaataatcctgtcaatgccattgtctttgaacatcatcactcatgtgtttccaggtggtagagggcaaggaaatgctgtcctaaatctagcaattgcctcagagtcatgaactggaaaaaaagtgtcctaaaaaattagtcatccatacacatgggcattacatctgaaccatctttccctctctggtgctgtttatttggatggagttggcttcctggcttcagagagctgttttttggtaccagatctctttgacatgctctctggaatgtttgtatcagatgctgcctccaatgttttaatcatccagacactcctccaatgaaaggaagatgatttgaatatctggtctacaaacctaacctataattatgctgagtatctgactgcctttgatattcctaaacttatattgcactccaagaaacattttcctttcagaagcacacagtcatg

SEQ ID NO: 62582 - DNA, 937 bp, Homo sapiens
taaggaaactttatatcattactataaatggaaatccagtatcatttgccaaaatagaagataaatataaaaatatataacattaccagacgatgttgttaaattgtagctagatactgttgctagctgagaattctgaatcagagctggcctttgctctgttcaagagggagagagagagagttgagatgttttaaggaaatactagcagcaaactgagtctttcttctctatgtaatctaaagaattaaaagagaatttaaataggacaaagtgactatgtgtgtcaatgtgatttgattcctgtatatgaactttctaaaaccactctttatagaaccctaaagaaaatgccctatggaaaatgtcctacgccttatggccctatgaaagatgccagccttagctcatttgcacgtggatatgcttttttgagtgagagagaaaggggttaggttgcggttaacactaaagaaattctaataatcctgtcaatgccattgtctttgaacatcatcactcatgtgtttccaggtggtagagggcaaggaaatgctgtcctaaatctagcaattgcctcagagtcatgaactggaaaaaaagtgtcctaaaaaattagtcatccatacacatgggcattacrtctgaaccatctttccctctctggtgctgtttatttggatggagttggcttcctggcttcagagagctgttttttggtaccagatctctttgacatgctctctggaatgtttgtatcagatgctgcctccaatgttttaatcatccagacactcctccaatgaaaggaagatgatttgaatatctggtctacaaacctaacctataattatgctgagtatctgactgcctttgatattcctaaacttatattgcactccaagaaacattttcctttcagaagcacacagtcatg

SEQ ID NO: 62583 - DNA, 1184 bp, Homo sapiens
gaagaactgtaattctcatttcaatattttttttaaaggaaagaagttctgtgtgtgtgtgtgtgtgtgtgtctgtgtgtctgtgtgtgtgtgtttctgtgtgtgtgtgtgtgtgttttcccacagagacatcctttctggagcttctctcctttcccttatacagttggactggaggatctctggacttgctaccattttgccacctctctgcaatgttgtatctttttccttctgtctctaattttgtttgtttttctgtttctcagtaggattcctttgaccttcattttccaaactgtgtcttaatttttctctccctgatatcacatttttacatttcaggaactctctctgattctctaaatgcttctttttaaaaatctgtatctccgaaggaacttttcttaaagttctttgagaaaattaaatttagagtttttgaagcttttatctgcagcttacattgcctctgttttcttcaagtttggtatgctttttgtttctttttggtctcttaattrtacgttaaaggctccccaaaatccctggaaatcttttgctgcctattcatactcatgagtgaagtcgtgaaaatagtgatatgaagttctctgtgtagagaagggcttgctaattaggctatttcccacatggttactgggtgtgcacctaggagccagtacctgcatctcttccagttgatttcaattctccaggtaggaattcctccatctcttatgtaaggatgtaagctgtggactggcagctttctggaggtctagtaagggaagataacttcattaacaatgtttgatacataggctaacaacataggctaacatggaaccctgattttcactgcagtttgacaaccttatatttaactgtttctggtggcctgagaacataccattgacgctccagtcttctatgggtgggagtacagtggatggccctcagaaatcactcccttgtttgagtcgaagagagaacccagaagagtctagctgccccttattaaaaatggtcaatctttatcttttcacatttaacctgacagtcagatatataaagtgtccccagtttttacacattttgaaaattccgtgccataaaaaaatacttccttcccagcagttcccagctatttacaaaaactttatgtgagttctagtatcttc

SEQ ID NO: 62584 - DNA, 906 bp, Homo sapiens
aaacttttgagtttctttcctaaaatacttcctcatagcttatggaataaaggccagcctccttaacatgacccctaagttaagtccatagaggatgtcactgtcagtatctttctcagcttcattctgacatgtctatgatattcttcctttctctccctcatctctaatttcgctgagttaaatcttattctttcttcagataccaacttacatatcactttttaaaatgtattttgtggctgggcacgttagctcatgcctgtaatcccaggactttgggaggccaaggcaggtggatcacttgaggtcagaaatttgagaccagattggccaacatggtgaaacctcatgtctactaacaatacaaaaaaaaaaacaattagccagacatggtggtacatgtctgtaatcccagctacttgggaggctgatgcaggaaaatcacttgaacccgggaggcagaggttgcagtgagctgagatcacaccactgctgtccagcctgggtggcagaatgagaccctgtctctaaataaataaataaataaataaataaataaataaataaataaatattaaacatttaaaaaaatgtatttcgtgagatctccagtttgggtctggtgacatatctctgtgctcccatggcatgttgtcctcccctgtcatagaccttattattgtgtgttataatcctctgtatcttgtactggactacacattacagcagagcagtgatagtgtctatcctctttcctttgtatytccagaggctagcatagtgcctgttgcataatgtgtactgagtaaatattttataaacaaataaatacatgttgcttcaaaatactaatgtcttgactgcagtagccctcaaaaacctgtgtttattgctcttaatttt

SEQ ID NO: 62585 - DNA, 765 bp, Homo sapiens
tcttccagcccccaccggacagtaagctctgtgagggcaaggaccatgtggatttttacttccttatatataccaagttcccagcacagtgcatgatacagagtaaatactctaaatattcacctcctggtttttcacatgtcctctccctcttaccagaggggaatttctgctttacaggctcccttacccttgtgcatatcagctgttgtttacaaggccctgagagatcatagcctcccagttcatcagaaaaggcctgagcgtcagtcctcatttgggtttagctgagacacagaaaaaaatagcttcaatagaaagtagtctaagataagctccaaatgaacatcatcaattgatttatcaaaggtggcaggaagggcatttggacctttagttttaactttatgtattcagccatatttcacaaaaactgatgtcttttgataggtttaagatctgttgctacttattttacccttaatttcttatctttggggtgtgattaaataaaaatgaagagaatacaggacagtgctgatggcgtataagcttctatgtagccagatgccttcccaggggccagatttcagtctttcctgtatttgtgaggctcttttcaatgtgatttccrtttaatataaattgtaaaattctattcaaatgaaaggttgttgttattgtaccaataggtatattattaaagtacaacaggactcagtgccactgatctgagatggagaaggttttttttctgatgaatgg

SEQ ID NO: 62586 - DNA, 1335 bp, Homo sapiens
  misc_feature (1)...(1335): n = A,T,C or G
ttcctatggtaatagttacagttgctcatctcagtcacaaagagcatggtcctgatgggaaaggagtagagtgtttgatccctttctggaaagtgtgttttgtttgggttctctgaagtaggctgcatctacttccctgacagtttcccaaaaccgtcagctttgtttataagcaggatgagtgaaataagagaatcaggtctggcatccccccataatacwctcaagacacacacacacatacacacacacacacacactgcaatttgaagtgtacttcccacaaaacacacagctcatgttaggcaccagtcattccttgagtctaggactttgcccaggctttacatttcacaaccgtcctttggcagcaaagcaaacagcagttggatcttgtggggccaagcagaaatctccttccccaaccgtaccattccatattaatatcatttctcctttgaactcttagcacttgctctctgtactactcatttgagaggtaattatgcacatctcttgttctgttatttaaatctggtatttaacctcttctctgttagtgtctttatctccctacaggatcatagcaaattgaatataaagaaaggtagatattaacatgatttcctgtacgtagtaaatctgttccttagttnnnnnnnnnnnnnnnnnnnnnnnnnnnnnnnnnnnnnnnnnnnnnnnnnnnnnnnnnnnnnnnnnnnnnnnnnnnnnnnnnnnnnnnnnnnnnnnnnnnnttactaaaaataaaaaaattacccaggcccggtggcgggtgcctgtaatcccagctactcgggaggctgaggcaggaaaatggcatgaacccgggaggcggagcttggagtgagccaaaatagcgcccctgcagtttggcctgggtgaaaaagggagactccccccctaaaaaaaaaaaaaaaaaaaaaaaaaagaactatagattaaatataatcatttaattttacacaaccaagaagcatttttatccaattatttaagtaacctaagtacaattaagtgcctgctgtgttacaaggttaggctctgtgaaggtgtgccctgcaaaaactattagggaattccattaggcaagacaaagtatatattcagacgcttaaagataggaatatttattacttcaattgggtgttataatcggtctcttatctttttaaataatatatactttcctttgtattgatgccaagaagcttataggacacctaaatgaaaacttttaaaatgcaaaatgttttatatatgtaagagtatggatatttgaaaatgtctagttaatgctttgagtttgttttgatg

SEQ ID NO: 62587 - DNA, 1335 bp, Homo sapiens
  misc_feature (1)...(1335): n = A,T,C or G
ttcctatggtaatagttacagttgctcatctcagtcacaaagagcatggtcctgatgggaaaggagtagagtgtttgatccctttctggaaagtgtgttttgtttgggttctctgaagtaggctgcatctacttccctgacagtttcccaaaaccgtcagctttgtttataagcaggatgagtgaaataagagaatcaggtctggcatccccccataatactcwcaagacacacacacacatacacacacacacacacactgcaatttgaagtgtacttcccacaaaacacacagctcatgttaggcaccagtcattccttgagtctaggactttgcccaggctttacatttcacaaccgtcctttggcagcaaagcaaacagcagttggatcttgtggggccaagcagaaatctccttccccaaccgtaccattccatattaatatcatttctcctttgaactcttagcacttgctctctgtactactcatttgagaggtaattatgcacatctcttgttctgttatttaaatctggtatttaacctcttctctgttagtgtctttatctccctacaggatcatagcaaattgaatataaagaaaggtagatattaacatgatttcctgtacgtagtaaatctgttccttagttnnnnnnnnnnnnnnnnnnnnnnnnnnnnnnnnnnnnnnnnnnnnnnnnnnnnnnnnnnnnnnnnnnnnnnnnnnnnnnnnnnnnnnnnnnnnnnnnnnnnttactaaaaataaaaaaattacccaggcccggtggcgggtgcctgtaatcccagctactcgggaggctgaggcaggaaaatggcatgaacccgggaggcggagcttggagtgagccaaaatagcgcccctgcagtttggcctgggtgaaaaagggagactccccccctaaaaaaaaaaaaaaaaaaaaaaaaaagaactatagattaaatataatcatttaattttacacaaccaagaagcatttttatccaattatttaagtaacctaagtacaattaagtgcctgctgtgttacaaggttaggctctgtgaaggtgtgccctgcaaaaactattagggaattccattaggcaagacaaagtatatattcagacgcttaaagataggaatatttattacttcaattgggtgttataatcggtctcttatctttttaaataatatatactttcctttgtattgatgccaagaagcttataggacacctaaatgaaaacttttaaaatgcaaaatgttttatatatgtaagagtatggatatttgaaaatgtctagttaatgctttgagtttgttttgatg

SEQ ID NO: 62588 - DNA, 1335 bp, Homo sapiens
  misc_feature (1)...(1335): n = A,T,C or G
ttcctatggtaatagttacagttgctcatctcagtcacaaagagcatggtcctgatgggaaaggagtagagtgtttgatccctttctggaaagtgtgttttgtttgggttctctgaagtaggctgcatctacttccctgacagtttcccaaaaccgtcagctttgtttataagcaggatgagtgaaataagagaatcaggtctggcatccccccataatactctcaasacacacacacacatacacacacacacacacactgcaatttgaagtgtacttcccacaaaacacacagctcatgttaggcaccagtcattccttgagtctaggactttgcccaggctttacatttcacaaccgtcctttggcagcaaagcaaacagcagttggatcttgtggggccaagcagaaatctccttccccaaccgtaccattccatattaatatcatttctcctttgaactcttagcacttgctctctgtactactcatttgagaggtaattatgcacatctcttgttctgttatttaaatctggtatttaacctcttctctgttagtgtctttatctccctacaggatcatagcaaattgaatataaagaaaggtagatattaacatgatttcctgtacgtagtaaatctgttccttagttnnnnnnnnnnnnnnnnnnnnnnnnnnnnnnnnnnnnnnnnnnnnnnnnnnnnnnnnnnnnnnnnnnnnnnnnnnnnnnnnnnnnnnnnnnnnnnnnnnnnttactaaaaataaaaaaattacccaggcccggtggcgggtgcctgtaatcccagctactcgggaggctgaggcaggaaaatggcatgaacccgggaggcggagcttggagtgagccaaaatagcgcccctgcagtttggcctgggtgaaaaagggagactccccccctaaaaaaaaaaaaaaaaaaaaaaaaaagaactatagattaaatataatcatttaattttacacaaccaagaagcatttttatccaattatttaagtaacctaagtacaattaagtgcctgctgtgttacaaggttaggctctgtgaaggtgtgccctgcaaaaactattagggaattccattaggcaagacaaagtatatattcagacgcttaaagataggaatatttattacttcaattgggtgttataatcggtctcttatctttttaaataatatatactttcctttgtattgatgccaagaagcttataggacacctaaatgaaaacttttaaaatgcaaaatgttttatatatgtaagagtatggatatttgaaaatgtctagttaatgctttgagtttgttttgatg

SEQ ID NO: 62589 - DNA, 1335 bp, Homo sapiens
  misc_feature (1)...(1335): n = A,T,C or G
ttcctatggtaatagttacagttgctcatctcagtcacaaagagcatggtcctgatgggaaaggagtagagtgtttgatccctttctggaaagtgtgttttgtttgggttctctgaagtaggctgcatctacttccctgacagtttcccaaaaccgtcagctttgtttataagcaggatgagtgaaataagagaatcaggtctggcatccccccataatactctcaagacacacacacacayacacacacacacacacactgcaatttgaagtgtacttcccacaaaacacacagctcatgttaggcaccagtcattccttgagtctaggactttgcccaggctttacatttcacaaccgtcctttggcagcaaagcaaacagcagttggatcttgtggggccaagcagaaatctccttccccaaccgtaccattccatattaatatcatttctcctttgaactcttagcacttgctctctgtactactcatttgagaggtaattatgcacatctcttgttctgttatttaaatctggtatttaacctcttctctgttagtgtctttatctccctacaggatcatagcaaattgaatataaagaaaggtagatattaacatgatttcctgtacgtagtaaatctgttccttagttnnnnnnnnnnnnnnnnnnnnnnnnnnnnnnnnnnnnnnnnnnnnnnnnnnnnnnnnnnnnnnnnnnnnnnnnnnnnnnnnnnnnnnnnnnnnnnnnnnnnttactaaaaataaaaaaattacccaggcccggtggcgggtgcctgtaatcccagctactcgggaggctgaggcaggaaaatggcatgaacccgggaggcggagcttggagtgagccaaaatagcgcccctgcagtttggcctgggtgaaaaagggagactccccccctaaaaaaaaaaaaaaaaaaaaaaaaaagaactatagattaaatataatcatttaattttacacaaccaagaagcatttttatccaattatttaagtaacctaagtacaattaagtgcctgctgtgttacaaggttaggctctgtgaaggtgtgccctgcaaaaactattagggaattccattaggcaagacaaagtatatattcagacgcttaaagataggaatatttattacttcaattgggtgttataatcggtctcttatctttttaaataatatatactttcctttgtattgatgccaagaagcttataggacacctaaatgaaaacttttaaaatgcaaaatgttttatatatgtaagagtatggatatttgaaaatgtctagttaatgctttgagtttgttttgatg

SEQ ID NO: 62590 - DNA, 646 bp, Homo sapiens
gagtacaaaaaaagcatggaatctgtaaggagcaaacaagtctctttcggctagaacatcagtaggaagagcagggtccaaagcaggtgggggaaatagagaagaagctaatgaggaaagcaagggccagatcttttaaggttttacatgctctgtgaagcagctggaacttaattctgagtgaagcaggaagtcaatgatggattttaagcaggagggtgatatgatccgatttacatttgctccatggggctattcaaaacactyagcagcccagaagtcttggcactgacccatcagaagagatgtagacagggtcctgaaggcgtctgtttcttctaggcattcacccattggttgttggagatctgaagtgtcccagggaagaggtagggctgtctagaggacaggggccccgggacagtgtactttctgctaatcatttaccaatgcatggattatatctaaaaatctacatatgagaaagatgaaggaatgctacacaagcaaaagtcacctttttttggatgacaaaattcatgctcttgttgagaagtaatgttttgacaaccagtatgactgtcctggggcataacagctaagcgtgtgtcctaatgtctgcacagaacatataagccaggataat

SEQ ID NO: 62591 - DNA, 841 bp, Homo sapiens
cacttgacaatccacactcccagccctcccctcgctttcagggtttcacagggaagcagctctactcaaaggagaaaaagcagagtggacacaggggatcactctggtggcttcaggctgcatcagctaagctcatcaggaccatgtttcccaaattatcttccccacatggtttccagttggccctgtcccctgtccacaagaaatactatgcacatgtttggaaggcaggagacaggcagcatctgtgcctgttggcctctgaaggtcatagctgggcaacaggcatggggcagctttgtctgctggtccaccatgttggcatgggcaccatctggtgtgtggtttctccagctcccaccggatctcttyctccagcctccccaggtcctggaccaagaacacgtggagctccgtggtgagcggtgtcaacctccctgcaggtcacgggtcatggtagaaggagtgagggacaaacaaaggttccaaggtgtctgtgtgggtcccagctcatgggttctattttatccttagatttcactttgtcctcactttcatccacatccaagtcctctgtgcctccctgaccagctgacataaaggcacttcagcctcagcgctagagtgagaggcagcaaagagcctccacaggctgcttctccagccccacaattgcataagatctagcccctcttaaaacaaaaacaaacccacctttttcttttctttttctgtgagagcaactcagcaaaataaaattccagtttattattaatgttgtgaacaacattgtttcacacatacatcaaacaggccaaaataaatacataaatgaacagca

SEQ ID NO: 62592 - DNA, 470 bp, Homo sapiens
aaagatggccctgggccctcctgagtcacggggttcagggcacatgtgtgtgtgttcatgtgtgcttgtgtgtgtgtgtgtgtgtgtgtgtgtgtgtgtgtatgtgaaggtgagatacgggtcagagcaggaggagatcagggcagaccccggaggaaaccacaaggtccttcactgrccacagtgatgcagagatggcctgcagaggtctggaggggccattaagagaaaaggctggacaatgaccttgaaaccacaccagcacacaaccataaaacaactagttctattaagtgtttctgtgagcctggctctgttctagaactttataagtatcttactgagtccttacaacaatctcagaggggaattactataattaattcattctgcaggaagggaatccaacacattaggctaagttctctgctgaaggtcaccgggctggtgtgaggccgaggaggctttga

SEQ ID NO: 62593 - DNA, 470 bp, Homo sapiens
aaagatggccctgggccctcctgagtcacggggttcagggcacatgtgtgtgtgttcatgtgtgcttgtgtgtgtgtgtgtgtgtgtgtgtgtgtgtgtgtatgtgaaggtgagatacgggtcagagcaggaggagatcagggcagaccccggaggaaaccacaaggtccttcactgaccacagtgatgcagagatggcctgcagaggtctggaggggccattaagagaaaaggctggacaatgaccttgaaaccacaccagcacacaaccataaaacaactagttctattaagtgtttctgtgagcctggctctrttctagaactttataagtatcttactgagtccttacaacaatctcagaggggaattactataattaattcattctgcaggaagggaatccaacacattaggctaagttctctgctgaaggtcaccgggctggtgtgaggccgaggaggctttga

SEQ ID NO: 62594 - DNA, 470 bp, Homo sapiens
aaagatggccctgggccctcctgagtcacggggttcagggcacatgtgtgtgtgttcatgtgtgcttgtgtgtgtgtgtgtgtgtgtgtgtgtgtgtgtgtatgtgaaggtgagatacgggtcagagcaggaggagatcagggcagaccccggaggaaaccacaaggtccttcactgaccacagtgatgcagagatggcctgcagaggtctggaggggccattaagagaaaaggctggacaatgaccttgaaaccacaccagcacacaaccataaaacaactagttctattaagtgtttctgtgagcctggctctgttctagaactttataagtatcttactgagtccttacaacaatctcagaggggaattactataattaattcattctgcaggaagggaatccaacacrttaggctaagttctctgctgaaggtcaccgggctggtgtgaggccgaggaggctttga

SEQ ID NO: 62595 - DNA, 1049 bp, Homo sapiens
ttttcagagaaatattattcataacagccaaatttatacacaatccaaatgtccatcaacatgagaatggataaatacacaaattatggcatattctataatgggatactatgcagaaatgaaaatcaactaaaactgcccccaacagcaggagtaaactttacaaatataaggttgagttaaagaagtcagacacaatacaataagaaaaagaggagaagcatttagggatcccactcactgttctgtctggccacaatataattggaagaggcacttcctaacctctcccacacgattagagaacagtaatgatattactgagtacctgtcctggtgttcaaggagcagttcctagcttccctgtttggtgtttgtactctgcctgttctctcaagatctacttcgactcttcctacattgtcaaactccgttttagaggtatgcacattttcttggtccattgcaaaccccaaattggctacagcattccacacattttctctttaatttggccttattgactgtgctctgacctaaactcaggtgctcaggttcccttcccagatctgcagcccccacagagcctattgacttccttctatagactacggggggaaaagtttataatatttaagtggccctgtgttaagcaggctatgcgctaagaactttacaaacactggcttctctgcagccaatgcratgaaataggtcctctcagatccttctttttctgataataaaatagatgtacagtggccaagtgctcaagtcaaaggtcacatgtaactggcagagtcaaagctccaatgtctcactctgatggccctgctctgtactgtataggattcttagcatgaggagaaagctgttagtaacaaaaaaccctgcgctactctcagggggtactttcagagctacattcagacagcattatcaattcttcccgccagagcagaatctggacgcgtgggtctggcagcagttcagtgtgcacttgttactggtaagagcactggatttggaatctggtaaacttcagttta

SEQ ID NO: 62596 - DNA, 1049 bp, Homo sapiens
ttttcagagaaatattattcataacagccaaatttatacacaatccaaatgtccatcaacatgagaatggataaatacacaaattatggcatattctataatgggatactatgcagaaatgaaaatcaactaaaactgcccccaacagcaggagtaaactttacaaatataaggttgagttaaagaagtcagacacaatacaataagaaaaagaggagaagcatttagggatcccactcactgttctgtctggccacaatataattggaagaggcacttcctaacctctcccacacgattagagaacagtaatgatattactgagtacctgtcctggtgttcaaggagcagttcctagcttccctgtttggtgtttgtactctgcctgttctctcaagatctacttcgactcttcctacattgtcaaactccgttttagaggtatgcacattttcttggtccattgcaaaccccaaattggctacagcattccacacattttctctttaatttggccttattgactgtgctctgacctaaactcaggtgctcaggttcccttcccagatctgcagcccccacagagcctattgacttccttctatagactacggggggaaaagtttataatatttaagtggccctgtgttaagcaggctatgcgctaagaactttacaaacactggcttctctgcagccaatgcaatgaaataggtcctctcagatccttctttttctgataataaaatagatgtacagtggccaagtgctcaagtcaaaggtcacatgtaactggcagagtcaaagctccaatgtctcactctgatggccctgctctgtactgtataggattcttagcatgaggagaaagctgttagtaacaaaaaaccctgcrctactctcagggggtactttcagagctacattcagacagcattatcaattcttcccgccagagcagaatctggacgcgtgggtctggcagcagttcagtgtgcacttgttactggtaagagcactggatttggaatctggtaaacttcagttta

SEQ ID NO: 62597 - DNA, 605 bp, Homo sapiens
ttatgattttggtgcttctctgtagcattggagacatagaaggagactgcctcctgctggggtcagtattttctgcatcccatgaacggaagtgagaacagccttgggagctaatgccgaaggtgggagaatctgatgccctcagtctccagtgaactaaagtaagagtcttactactttcagtgcttgggaactgctgcaatacatgggctgctccaacttatttccttaaacctccactcaccagattttcagatgctgcacaggtggaatggtggatsaagttctaaatgtcacatgactgtcttgtttagttatatgttgggtgtagcccgtggagtactcaggccctaaagaaacccttttggatgaataaacatcccagagtccttatgctagttctacctgtgaggtgtttgctacggtctgaaagtttatgtaaccccagcactcatatgttaaaattctaaaacccccaatccccttgatagtatttggaggcagagcctttggaaggtaattaggtcatgggggaaaaggccttatgaatggggttagtgctcttataaaagaggccagaggccaggtatgaaggctcatgcctg

SEQ ID NO: 62598 - DNA, 1089 bp, Homo sapiens
ctctagggctctgcaatccatagggcccacttaggagtcatcatccttgaataaagccaagaaggttactcaattcattttcatactaaacaaattgaatctttaatcacagggcaattatcagcaagctgttcttttgcaattactgcctccatccatgaaagcatttttttaactgtgatatctaaaaataaattctaaagtctcccccagaagaaacttatagcttacatttactttgtagcatatattttatttgtctccacttcagcaacttgtttctctaaaaaatccattttgaatatttagggaaaaggtgttttctgyctcggtgaaacatgattttcccaaatatttttttttaaaaaaactaatttttcttattattctgaatttccaaaattttcttgcacatcataactctgctgaaatgctgagtaatttatatgatttaaaactgggggctgagtgcagtggctcacacctgcaattccagtactttgggaggccagggcaggaggattgcttgagcccaggaatttgagaacagcctggacaacacagtgatactccatctctaaaaagattagcataaattagccaggcatcatggcatgtgcctgtagtcctagctactgaggaggctgaggtgggaggatcacttgagcccaggacgtggaggctgcactgagcagtgaccatgccactccactccagcctcagtgacaaagggagacactgtctcaaaaaattttttaaaaataaaatttggaacattaacaataatatgaaattatactggtggtttgaagctgttccccctaaaaaactgtcaagtgaatcaccactttttattctgttttaaagaggacacagcaatgaggaaatgggtttatttgtaacagaaaggtttaattagaccccaagagtagaattctgaacaaggatgagtttcccttttcttattaaatattgacaaattgtaattgtacatatttatggagtgtacccccatgtttattgcagcattattcacaatagccaagttctggaatcaacctaagtgtccatcaactgatgaacagatga

SEQ ID NO: 62599 - DNA, 1089 bp, Homo sapiens
ctctagggctctgcaatccatagggcccacttaggagtcatcatccttgaataaagccaagaaggttactcaattcattttcatactaaacaaattgaatctttaatcacagggcaattatcagcaagctgttcttttgcaattactgcctccatccatgaaagcatttttttaactgtgatatctaaaaataaattctaaagtctcccccagaagaaacttatagcttacatttactttgtagcatatattttatttgtctccacttcagcaacttgtttctctaaaaaatccattttgaatatttagggaaaaggtgttttctgtctcggtgaaacatgattttcccaaatatttttttttaaaaaaactaatttttcttattattctgaatttccaaaattttcttgcacatcataactctgctgaaatgctgagtaatttatatgatttaaaactgggggctgagtgcagtggctcacacctgcaattccagtactttgggaggccagggcaggaggattgcttgagcccaggaatttgagamcagcctggacaacacagtgatactccatctctaaaaagattagcataaattagccaggcatcatggcatgtgcctgtagtcctagctactgaggaggctgaggtgggaggatcacttgagcccaggacgtggaggctgcactgagcagtgaccatgccactccactccagcctcagtgacaaagggagacactgtctcaaaaaattttttaaaaataaaatttggaacattaacaataatatgaaattatactggtggtttgaagctgttccccctaaaaaactgtcaagtgaatcaccactttttattctgttttaaagaggacacagcaatgaggaaatgggtttatttgtaacagaaaggtttaattagaccccaagagtagaattctgaacaaggatgagtttcccttttcttattaaatattgacaaattgtaattgtacatatttatggagtgtacccccatgtttattgcagcattattcacaatagccaagttctggaatcaacctaagtgtccatcaactgatgaacagatga

SEQ ID NO: 62600 - DNA, 1089 bp, Homo sapiens
ctctagggctctgcaatccatagggcccacttaggagtcatcatccttgaataaagccaagaaggttactcaattcattttcatactaaacaaattgaatctttaatcacagggcaattatcagcaagctgttcttttgcaattactgcctccatccatgaaagcatttttttaactgtgatatctaaaaataaattctaaagtctcccccagaagaaacttatagcttacatttactttgtagcatatattttatttgtctccacttcagcaacttgtttctctaaaaaatccattttgaatatttagggaaaaggtgttttctgtctcggtgaaacatgattttcccaaatatttttttttaaaaaaactaatttttcttattattctgaatttccaaaattttcttgcacatcataactctgctgaaatgctgagtaatttatatgatttaaaactgggggctgagtgcagtggctcacacctgcaattccagtactttgggaggccagggcaggaggattgcttgagcccaggaatttgagaacagcctggacaacacagtgatactccatctctaaaaagattagcataaattagccaggcatcatggcatgtgcctgtagtcctagctactsaggaggctgaggtgggaggatcacttgagcccaggacgtggaggctgcactgagcagtgaccatgccactccactccagcctcagtgacaaagggagacactgtctcaaaaaattttttaaaaataaaatttggaacattaacaataatatgaaattatactggtggtttgaagctgttccccctaaaaaactgtcaagtgaatcaccactttttattctgttttaaagaggacacagcaatgaggaaatgggtttatttgtaacagaaaggtttaattagaccccaagagtagaattctgaacaaggatgagtttcccttttcttattaaatattgacaaattgtaattgtacatatttatggagtgtacccccatgtttattgcagcattattcacaatagccaagttctggaatcaacctaagtgtccatcaactgatgaacagatga

SEQ ID NO: 62601 - DNA, 1089 bp, Homo sapiens
ctctagggctctgcaatccatagggcccacttaggagtcatcatccttgaataaagccaagaaggttactcaattcattttcatactaaacaaattgaatctttaatcacagggcaattatcagcaagctgttcttttgcaattactgcctccatccatgaaagcatttttttaactgtgatatctaaaaataaattctaaagtctcccccagaagaaacttatagcttacatttactttgtagcatatattttatttgtctccacttcagcaacttgtttctctaaaaaatccattttgaatatttagggaaaaggtgttttctgtctcggtgaaacatgattttcccaaatatttttttttaaaaaaactaatttttcttattattctgaatttccaaaattttcttgcacatcataactctgctgaaatgctgagtaatttatatgatttaaaactgggggctgagtgcagtggctcacacctgcaattccagtactttgggaggccagggcaggaggattgcttgagcccaggaatttgagaacagcctggacaacacagtgatactccatctctaaaaagattagcataaattagccaggcatcatggcatgtgcctgtagtcctagctactgaggaggctgaggtgggaggatcacttgagcccaggacgtggaggctgcactgagcagtgaccatgccactccactccagcctcagtgacaaagkgagacactgtctcaaaaaattttttaaaaataaaatttggaacattaacaataatatgaaattatactggtggtttgaagctgttccccctaaaaaactgtcaagtgaatcaccactttttattctgttttaaagaggacacagcaatgaggaaatgggtttatttgtaacagaaaggtttaattagaccccaagagtagaattctgaacaaggatgagtttcccttttcttattaaatattgacaaattgtaattgtacatatttatggagtgtacccccatgtttattgcagcattattcacaatagccaagttctggaatcaacctaagtgtccatcaactgatgaacagatga

SEQ ID NO: 62602 - DNA, 1089 bp, Homo sapiens
ctctagggctctgcaatccatagggcccacttaggagtcatcatccttgaataaagccaagaaggttactcaattcattttcatactaaacaaattgaatctttaatcacagggcaattatcagcaagctgttcttttgcaattactgcctccatccatgaaagcatttttttaactgtgatatctaaaaataaattctaaagtctcccccagaagaaacttatagcttacatttactttgtagcatatattttatttgtctccacttcagcaacttgtttctctaaaaaatccattttgaatatttagggaaaaggtgttttctgtctcggtgaaacatgattttcccaaatatttttttttaaaaaaactaatttttcttattattctgaatttccaaaattttcttgcacatcataactctgctgaaatgctgagtaatttatatgatttaaaactgggggctgagtgcagtggctcacacctgcaattccagtactttgggaggccagggcaggaggattgcttgagcccaggaatttgagaacagcctggacaacacagtgatactccatctctaaaaagattagcataaattagccaggcatcatggcatgtgcctgtagtcctagctactgaggaggctgaggtgggaggatcacttgagcccaggacgtggaggctgcactgagcagtgaccatgccactccactccagcctcagtgacaaagggagacactgtctcaaaaaattttttaaaaataaaatttggaacattaacaataatatgaaattatactggtggtttgaagctgttccccctaaaaaactgtcaagtgaatcaccactttttattctgttttaaagaggacacagcaatgaggaaatgggtttatttgtaacagraaggtttaattagaccccaagagtagaattctgaacaaggatgagtttcccttttcttattaaatattgacaaattgtaattgtacatatttatggagtgtacccccatgtttattgcagcattattcacaatagccaagttctggaatcaacctaagtgtccatcaactgatgaacagatga

SEQ ID NO: 62603 - DNA, 1089 bp, Homo sapiens
ctctagggctctgcaatccatagggcccacttaggagtcatcatccttgaataaagccaagaaggttactcaattcattttcatactaaacaaattgaatctttaatcacagggcaattatcagcaagctgttcttttgcaattactgcctccatccatgaaagcatttttttaactgtgatatctaaaaataaattctaaagtctcccccagaagaaacttatagcttacatttactttgtagcatatattttatttgtctccacttcagcaacttgtttctctaaaaaatccattttgaatatttagggaaaaggtgttttctgtctcggtgaaacatgattttcccaaatatttttttttaaaaaaactaatttttcttattattctgaatttccaaaattttcttgcacatcataactctgctgaaatgctgagtaatttatatgatttaaaactgggggctgagtgcagtggctcacacctgcaattccagtactttgggaggccagggcaggaggattgcttgagcccaggaatttgagaacagcctggacaacacagtgatactccatctctaaaaagattagcataaattagccaggcatcatggcatgtgcctgtagtcctagctactgaggaggctgaggtgggaggatcacttgagcccaggacgtggaggctgcactgagcagtgaccatgccactccactccagcctcagtgacaaagggagacactgtctcaaaaaattttttaaaaataaaatttggaacattaacaataatatgaaattatactggtggtttgaagctgttccccctaaaaaactgtcaagtgaatcaccactttttattctgttttaaagaggacacagcaatgaggaaatgggtttatttgtaacagaaaggtttaattagaccccaagagtagawttctgaacaaggatgagtttcccttttcttattaaatattgacaaattgtaattgtacatatttatggagtgtacccccatgtttattgcagcattattcacaatagccaagttctggaatcaacctaagtgtccatcaactgatgaacagatga

SEQ ID NO: 62604 - DNA, 660 bp, Homo sapiens
attatgggtgtagtccttactgccatcattttatttactactgacgagaatcctcccagttagctattattttattttgcagatgtagaaactgaggttcagacagctagttaaaaagtgcaataatcagtgtatctatctggcattgtgctgcatgccagaagaatcaagggcagactgacccatggataaaaaatgacgccagaattggctagttttagggctcaaggagggctctgctgaagtttgatctgcttttccctttgccaaaagacctttacatcaaagcaaggagataaatctactcttgcagcagctctagccacaatgaattggtacaaagagaggaggaagagaggctgagaggaaggggacacccttgcaaacttttagccttttaaccagaatcaaaacttcagtcactggatacagatctttgcataaatttagtaaagttcattctgtgagccatatccaaccacatccttatttgctctagtgaccgcacacccaagtcttctggcttcagtacatcctaatccttctcttccatgtgcacgagaacctactgagaccaaagttgctatgwatgtcaaaacattagctggtataaaatcactttgaaaatttaagatagaagatggcataggataatgaaat

SEQ ID NO: 62605 - DNA, 689 bp, Homo sapiens
tgacctcaattagctcagctcccagctgcaggttatctattcatcaaatgtcacagttaacctaagcagctgcttccataacccaaagctccctaccctatatttttttcagtactttgtaatctcatattgtaattctataccaaagaagaagaagaaaaaaaaaaccttgtagaaccaacccttaattgtactgattttatggttagaagaaacagcacaggagataaaggaacaagaagggaagaagtcacgatgataaaaatttactctagtgmaacaaatggaaaaatatttaagcatgacaaagaaatcacaaaattgttcctttagttagggtcagcagtcattgccctcggtgatgaatgttgaggcttccaggcaaaggttctcagctctgtctcaggcacagaccgtccatctcctctaaagatggatgtggccctgtcaggctggatgacatttcacagtcccttcaagcctcatgatgccatggttctgtgaacagcgagctacagttcaaagttgaatgaccacgaaaaagtcatctgatgagaaatcggaatgccacgaataatattgaaatgaaaaggaaagcttgatcttgaaaaagttccaataaccctcaaagccaaacagaatttccctggatgttggtccaactttaacatctgccaaagagcaattta

SEQ ID NO: 62606 - DNA, 754 bp, Homo sapiens
aattcagcacactcttttatttgatgcaatataagaaactctaaaaaaaacaaaaacaaggcaacaaaagcaaaaggtgtttttttgttggtttttaaatcaggcattaagagaagcactaagtttcaaaacttacatctgaaccgacatttctcatggtactttgtaggacaggtttagtcacggaaagttttccattcactgggctattcgctgaaggggctggtaccacattcaccacgtgattagggagctgtgtgactcccccagcaacagcaaggactggctgagcagagggcagaactccaggtgcttgaagttgtaccacagtaggctgagacagcaaaaccgtctggcctgcgttagaaaaaagaaaaggaatcaaagggtacacaactactgtggcaggggaagcagcttataattaggtcttttctgcagacgtaatgggtaagatcaacaccaagggattggacaccatcaattaaaacattggatcaatagcagcacacgcttatggtgactttgttatgtttttaatgtgaccaactaaattcatctctttgagttatcattaacaatatactttaatatactttcttatttatctttctcaactaaacagctatcaaatttgctgtaatccctagatttctaagaattaacctctgaaatttattagygctaaaaggatttgtcttattataaataacaaatcttttacactgaatatggagagtcatgtattctaaat

SEQ ID NO: 62607 - DNA, 827 bp, Homo sapiens
ctcacgcatgttccgcacactcattcagactggagccatttagacgtgccagttaacttaacatgcacatctttgagatgtgggaggaaactggagtacccacaggaaactcatgcagacttggggagagtatgcaaactccacacagacagtgaccttggctgggaattgactttttttttgtcatcagtgttatcacaaaatgacattgcatgaaccagcattgtttgaagacttgctgtattctgattttttttatctttcatctttgagtcattagcaccaaatatagttcttggaacataataggtatttactacatgaataaattaatggatgaatcattcattctgggaaatgttgtcaacatagtgcagtgatggaattccaatcctgaatccaaatcctgactttcttagttatttagagcataaacttgggcaaactgtttaaactctttgagcttcaacttcctttgagccttcatttccttagtacatagtaggtactcaaaagtggtagctactgttaaaatatactgtatttgcatcttagaagagcatttaacattcttgtgatatctttatggtcaagatgggaaattttgayctaggtggtatttcagttaattcataagtagataaacctacgtttttacagatttagaaggagctttttattttaataacaactcagtacaggatattgatggcatgctgatactttcttggaagaatttcttttgctaatgaggagcctaaaagttcttgattgattagtaggtaagtgtttttaaaggaattgatataaattattcagctggatcc

SEQ ID NO: 62608 - DNA, 1220 bp, Homo sapiens
actgtaccaataggatgagagggctagtttgcaagatgggagccaatgcaaaaacatatgatcatctattattcatttatttgggtatgtcttttttggaattcttggtctataaaaacttgaataattactttaagtataatcttataaataaaaaataattaaagaaatatcagaaaatgcaagtcaaaatgagacgataaatggtaaccatatttcttatcactattaataactttttaatrtataattctgttctttactctgagattggggtggagaaaataatgaacactggagaaacacacacaatgtctgccttcgacaccaacctggaaaaaacagcatagtttcagttaacccagacgaaatggtagaaactgcaaggttacattaagaaacacaaacacatacacgcccacaaactataatatgaattagtaaggataatactatagaagatacggcaaaaaaattaagaagatactattacaaagaaacaaatctgtggagagggagaattttaactgaatattcagttatttgatacagacaaagagaaagtaaaactgatatatctagaaaccaaactattggctaaatgttagatctgtttcacaacacagagaaaatgtatcaaagaagttttagatttacatttcaaaatgactggggctctgagccaaggacttcaggacaattgtctgttttgggggtggggttggacagggtttgttgcccaggctgtagtgcagtggcacacacatggcttactgcagcctcaacctcctgggctcaagcaatcctccaacctcagcctcctatgtagctgggactacaggcacataccaccacacctggctaattttacaaaattatcatagaaacagagtctcactatgtttcccaggctggcctccaactccctggctcaagcaatcctcctgcttcagcctccaaaagtactgggattacaggcatgggccaccacacccagcccagttgtctaaagaaaggctgaggcaggctaagtgccaagtaggtaaacataaagtagagaagagaataaacttttatcttgatacagtttatgaaccagaaggtctggatctgctttccatggcttctaggatccccatagcactgtgctgatcaggaatggtctcatagtacttcctgaattttgattaagggagtcacaggtaagggatggaagctag

SEQ ID NO: 62609 - DNA, 1220 bp, Homo sapiens
actgtaccaataggatgagagggctagtttgcaagatgggagccaatgcaaaaacatatgatcatctattattcatttatttgggtatgtcttttttggaattcttggtctataaaaacttgaataattactttaagtataatcttataaataaaaaataattaaagaaatatcagaaaatgcaagtcaaaatgagacgataaatggtaaccatatttcttatcactattaataactttttaatatataattctgttctttactctgagattggggtggagaaaataatgaacactggagaaacacacacaatgtctgccttcgacaccaacctggaaaaaacagcatagtttcagttaacccagacgaaatggtagaaactgcaaggttacattaagaaacacaaacacatacacgcccacaaactataatatgaattagtaaggataatactatagaagatacggcaaaaaaattaagaagatactattacaaagaaacaaatctgtggagagggagaattttaactgaatattcagttatttgatacagacaaagagaaagtaaaactgatatatctagaaaccaaactattggctaaatgttagatctgtttcacaacacagagaaaatgtatcaaagaagttttagatttacatttcaaaatgactggggctctgagccaaggacttcaggacaattgtctgttttgggggtggggttggacagggtttgttgcccaggctgtagtgcagtggcacacacatggcttactgcagcctcaacctcctgggctcaagcaatcctccaacctcagcctcctatgtagctgggactacaggcacataccaccacacctggctaattttacaaaattatcatagaaacagagtctcactatgtttcccaggctggcctccaactccctggctcaagcaatcctcctgcttcagcctccaaaagtactgggattacaggcatgggccaccacacccagcccagttgtctaaagaaaggctgaggcaggctaagtgccaagtaggtaaacataaagtagagaagagaataaacttttatcttgatrcagtttatgaaccagaaggtctggatctgctttccatggcttctaggatccccatagcactgtgctgatcaggaatggtctcatagtacttcctgaattttgattaagggagtcacaggtaagggatggaagctag

SEQ ID NO: 62610 - DNA, 952 bp, Homo sapiens
taaaacttaaataagtactacatctgagttaaaggctaattagttttattataaaaagtcttgggctgggcatggtggctcatgcctgtaatccctgcactttgggaggctgaggcgggmggatcacttggggtcaggagttcgagaccagcctggccaacatggcgaaacccggtctctacaaaaataaaaaaattagctgggtatggtggcgggtgcctgtagtcccagctacttggagactgaagcaggagaattgcttgaacccaggaggcagaggctggactgagccaagatcacgccactgttctccagcctgggcgacaaagtgagacactgtctcaaaaaaaaaaaaaaaaaaaaaaagaaagaaaaaaaaagaaaagtcttcactgtagagttatttaaaaatagaaacccctctcttgtttcagtccagggttgatttactgatgactgcttcacagagacactgtacatgtgtatgcgttgggagtcagccctattctcgtgacttaagaagtggtataacagccaactccccttaaacacatgctctcatttcttcttcctgatctaaaattcccaccataaaaatcacagataaaacagagtcaggggaggaagggtggatgggaatttgtctttcaagtcattaataatgtatttattattggaacattggaggcggtctcttcactatgtcttaatcagttgacgtgccactggactgttaggtaagaagttgatgctttggaaagtcagggtcagaataacatttataagaagcaagtttcaaagagaaatcacaagggggtgatggttgctgtgcaccagcatttggaacttggaacaaggcagggtaggtccacacatgggtaatgagcctcaccaagtgaaaatcgcacagacttcccaaagaaggaaggcaaccaagccaactttatatgca

SEQ ID NO: 62611 - DNA, 528 bp, Homo sapiens
actgaaggaaagcagacctgcaggaggtccatgagccagagttccaggcttgggacagctatgaagttttgggcctggctgtggtctgggcccccagccatcaggcctgattcaaagccatcaggccccttcttctatacgcattttaagggaatctttagcttcttttctgtggaaagttcccatagagttatcagagcttagaccctgtccaatgctggaaaggaarcttgaacaattttatcttagtttaggttcccccataagaaggccccgaggcaagtattcaatgttaacttgagacatggtcccagaaagcaggtagaggagtgagaaagtgagacacagaagagatggtaatcaatacagggtgcatgatcaggccagttactattgttagcaactggaagttaattacataagggaatctcaggaaatgctctaggaaatgtgcctcagaaagatgagagggctgaagtatttggcccatctatgcagcaatttcagtcagccattactgagggttgc

SEQ ID NO: 62612 - DNA, 1444 bp, Homo sapiens
atccaagaaataagggttattatagtaatttcactatgtggtatatatgtatgtgtggttggcagttggtaggtgcgaaatagactatagctgttattatatttgtatattttgtatatttgtatattctatttgtataattctatattgtatgcgttagagtctacgagccttggaagcaggtgctgtatcttatttcctttgtgtcccctatggcatctttgttgtgatgggcatcataatgcccttattgttgaacacaaaagtgtaatttagtgaataattaccttcccaaaaatttcatatctaagttgctttaaactgttcatttccttagcatttttaaacagtatttctttttctaaaggcagtgattctgtaggatcttttagtaccctgtaggatactaaagatgtgaagacatttacaaaatagtgaaagtactaataatttcattgcagatcagccgatggcataatcagggactgcctcatggtcagtattcagtagagaatgccatcttgatcaagaatggccagcagtggccactgctgattgacccacataggcaagctcacaaatggatccgtcagatggaaggatccaggctgcagaagctctccattgaagacagcaattataccaaaaaaattgaaaatgctatgaagacaggagggagtgtcctcctgcaggtaagtgggcagtatggcctaatttcccttgcagctgatacatatgttgtatgcactgagcataaaggctaaaagttttcagtgacagataactgtcagggaaaaaataataacagacatacacacatatatacttacagacagagagtgagttttcaatgctcagttctcttacagctgtctttcactggagtccagatatttaataaaacttaaatttatttaaattttaatttttgtgggtacatagtaggtgtatatagttatggggtacataagatgttttygaaacaggcatacaatgtgtaataatcacatcatggagaatggggtatccatcccctcgagcattatcttttgttacaaacaatcgaattatactcttagttatttttaaatgtacaattaaattatgattgactatagtcaccctgttgtactatgaaatactaggtcttattcattctttctaactcaacctttaaatgttttattgctgcttttttttttcaaccaatttgttttaagatgatttttcttatttttgtctattgggtttttcagaatctccttgagacattagctccaggcttaaaggcaattctgaaaaaggatatctatcagaaaaaaggacactatttcataagggttggtgatgctgagttcgaatacaattcaaattttaggtaatgtgccacagctaaattgagtcaaatgtctatgctttttaagataaataatattgaatgcct

SEQ ID NO: 62613 - DNA, 1444 bp, Homo sapiens
atccaagaaataagggttattatagtaatttcactatgtggtatatatgtatgtgtggttggcagttggtaggtgcgaaatagactatagctgttattatatttgtatattttgtatatttgtatattctatttgtataattctatattgtatgcgttagagtctacgagccttggaagcaggtgctgtatcttatttcctttgtgtcccctatggcatctttgttgtgatgggcatcataatgcccttattgttgaacacaaaagtgtaatttagtgaataattaccttcccaaaaatttcatatctaagttgctttaaactgttcatttccttagcatttttaaacagtatttctttttctaaaggcagtgattctgtaggatcttttagtaccctgtaggatactaaagatgtgaagacatttacaaaatagtgaaagtactaataatttcattgcagatcagccgatggcataatcagggactgcctcatggtcagtattcagtagagaatgccatcttgatcaagaatggccagcagtggccactgctgattgacccacataggcaagctcacaaatggatccgtcagatggaaggatccaggctgcagaagctctccattgaagacagcaattataccaaaaaaattgaaaatgctatgaagacaggagggagtgtcctcctgcaggtaagtgggcagtatggcctaatttcccttgcagctgatacatatgttgtatgcactgagcataaaggctaaaagttttcagtgacagataactgtcagggaaaaaataataacagacatacacacatatatacttacagacagagagtgagttttcaatgctcagttctcttacagctgtctttcactggagtccagatatttaataaaacttaaatttatttaaattttaatttttgtgggtacatagtaggtgtatatagttatggggtacataagatgtttttgaaacaggcatacaatgtgtaataatcacatcatggagaatggggtatccatcccctcgagcattatcttttgttacaaacaatcraattatactcttagttatttttaaatgtacaattaaattatgattgactatagtcaccctgttgtactatgaaatactaggtcttattcattctttctaactcaacctttaaatgttttattgctgcttttttttttcaaccaatttgttttaagatgatttttcttatttttgtctattgggtttttcagaatctccttgagacattagctccaggcttaaaggcaattctgaaaaaggatatctatcagaaaaaaggacactatttcataagggttggtgatgctgagttcgaatacaattcaaattttaggtaatgtgccacagctaaattgagtcaaatgtctatgctttttaagataaataatattgaatgcct

SEQ ID NO: 62614 - DNA, 673 bp, Homo sapiens
gaattgttaatgtgcattctctccttgtatgcaaagctacaggaaaggccacttataataagagccttctgggtaagcaagtaattggcaaaggaaactagaagactttagccatccttaggctggtgcttttaacttcttcccaggaattctgacggactgactccttaccaagcggtgctgactcttaaacctgttggtcgctgtgtcctccccactgtgcagggctgcagagtctctcatcaaattattactccttagaattctctcttctgtggccgggcgtggtggcgcacgcctgtaatcccagcactttgggaagctgaggtgggtggatcacctgaggtcaggagttcgagacaagcctgaccaacatggtgaaactcctgtctcaatgaaatacaaaaaaaaaaaaaaaaaaaattagccaggtgtggtggtgcatgcctgtaatcccagctacatgggaggctgaggcaggagaatcgcttgaacctgggaggcagaggttgcagtgagctgmgatcgcaccattgcactccagcctgggcgacaagagtgaaactctgtctgaaaaaataataataataattctctcttccattaataaaacagtttccaaagtatgttcctcaaaacatttccatggtttaataggtatcactcaaaaaag

SEQ ID NO: 62615 - DNA, 673 bp, Homo sapiens
gaattgttaatgtgcattctctccttgtatgcaaagctacaggaaaggccacttataataagagccttctgggtaagcaagtaattggcaaaggaaactagaagactttagccatccttaggctggtgcttttaacttcttcccaggaattctgacggactgactccttaccaagcggtgctgactcttaaacctgttggtcgctgtgtcctccccactgtgcagggctgcagagtctctcatcaaattattactccttagaattctctcttctgtggccgggcgtggtggcgcacgcctgtaatcccagcactttgggaagctgaggtgggtggatcacctgaggtcaggagttcgagacaagcctgaccaacatggtgaaactcctgtctcaatgaaatacaaaaaaaaaaaaaaaaaaaattagccaggtgtggtggtgcatgcctgtaatcccagctacatgggaggctgaggcaggagaatcgcttgaacctgggaggcagaggttgcagtgagctgakatcgcaccattgcactccagcctgggcgacaagagtgaaactctgtctgaaaaaataataataataattctctcttccattaataaaacagtttccaaagtatgttcctcaaaacatttccatggtttaataggtatcactcaaaaaag

SEQ ID NO: 62616 - DNA, 820 bp, Homo sapiens
tttttagtaaagaagggttttcaccatgttggccaggatggtctcgatctcttgacctcatgatccgcctgcctgggcctcccaaagtgctgagattacaggtgtgagccaccacacctggccagaaactagccattcttgttgcctcttgttttctctttggttgattgcccaaactcggtgggaaatggtgtggtagggtgagtactgtgaragatggtccatgacttaggtccagacattactgcaaaagcttcacctgcatcagtaagaatatggtacacagactgtggtatatactaatttcattattcccagcaatggtcatatcaagctgaaatactgtgtttagttctagatgccacatttttaaaaggcttgtttcaaactaaaatgtgtccaagggcaagaatcaaagatagtgagggctctaaaaatcatatcataagaaaaaagcagttgaggaaaatgggaatgtttagcccacaaaacagaagagtttataatggaaacctgagagctcccttaaatatttgaagggaatagatttattatctatactttctagagaagtgctttttcaaaaggtgagttgcaatctattagtgggttgagaaataaatgtcattggtcatgatcagtttcatatgtttaataaaatagaatacaatacaaaatatcagaataaatcacgtaaaataatggcacacttgttattttttgaaaattgattttaatattctatgtgtatagtgggtcatactgtaaatgtattccttatcatggaatggttgcttatcatatgcctgtaaaaaaaata

SEQ ID NO: 62617 - DNA, 690 bp, Homo sapiens
tgtaatcccagctaccctggaggcttaagcagaagaaccgctggaacccaggagaagaaggctaccatgagccgagattgcaccattgcactccagcctgggcgacagtgagactctgtctcaaaaaaaaaaaaaagaaagaaagaaagaaakaaaaaaaaaagaaattaaggatacacagaagaaaaggcatggtctgtgccctgaaggagcttacagttaagcagagaagttgcacgatttggaagtagtaaggtaaattgagtcagattttgaaaggcaatgtagagctgttagaagtttattcgcacaggtagccaggcacagtggctcatgcctgtaatcccagcactttgggaagccaaggtggcagatcactggaggtcaggagttcaagaccagcctggccaacacagtgaaaccccatctctactacaaatacaaaaattagccagatatggtggcatatgcttgtaatcccagctactcgggaggctgaggcaggagaatcgcttgaatccgggaggcagaggttgcagtgagccgagatcgtgccactgcagtctaggctgggcaaacagagccagactccgtctcaaaaaagaagtttattcagacaggtaatgtgagagagaactagtgatggtgaaggaagagggctagctggagtgggtaaagactggagaaagg

SEQ ID NO: 62618 - DNA, 599 bp, Homo sapiens
aaacaaacaaaaaagcagtaaggctgcttagttcactgagggttttgtattatttgggcctataaatgttagacttacccaaactctacgaagcaaaaagacaagttattttctactttacygaacagtaaggcatcactagagcaggtttatctctaaggactgaatactttaaactgtgaatccagattataattattagaattattttcattacatctttcctcttggcctccttatttcttaatccctcaatataaactctatagacacgtaaaactctggttctacctcatttgtgtaataaggaaacagagttagataattactcttctaggtccctttccagctgtaacattccaacaactgggcagtaaaaaaggttatctacagaagcacaggaaagtgaaagaaactgttaaaaactggcagtgttcacttcagtaggaaaatggcattaattgtgctttgaacatggcaagtctcctctttgaagacacatcccatccttaaaaaacaaatactaaacaggctctggttattacagctaagtgatagaaacaacaatccctgccttttgattccccaacttcaaactt

SEQ ID NO: 62619 - DNA, 721 bp, Homo sapiens
gtatcttattattatatgaacgatcacatgaaagaatttttagggtaaagggaaacattttaattttttttctgggagtgatatctgtaagatggctggctagtgatgcctagcgttcatcccctgcacacaaaaggaccaacacaatgaataaacagcaaagatctgaccgaaatgttgaagagagtggagagctggagcgcagtgggcgagtgaagatatacctgtggtgaggggaaatccaggagggcggcatggaggcaccctgcctctgtagcctcacattctgcatctgaatcagatctgtccggagtcaggcaggactttccattatraggaaaagtgaagcagaagatctccaccagcccctgttgctgctgcaaacatttataatccttactacaggagaatcccacagtcctcacaagccctagaccaggtttggagagctgccgggaactcaggcggctgcatcacccaagattaggagcacaaggtatacacttcccacccctcacccaccaccgtctgtgagacaagctgctgcagcacagtgccatcttgagactgcagccaacttttagagtacatcctcctctgggggccgaaagccactgcacctgcccagcactggggctccatcttcattcaaccaagcccagatggttggctaaatggcacagcactagctgcgtggagcctgggctgtgatgctggtcct

SEQ ID NO: 62620 - DNA, 769 bp, Homo sapiens
tatgaaaatttttctcctttaaaagggactgaattttagacaagtttgagaaatactgcacagtgcctccaatgataacaacagcctttgttgagcccgtaatcaatggtaaaccctgtgcagcggctcctttcgctcctccagtagctaggcatcccctttttccaaaaaaaggagagcaaagctaagagacaaaatgsctggccggtgccacacaggccaggaggccaagatacaaatgccagtctgataccaaagcccatactcttaattttataaggctctccctgtgggaggcattgttctaggcagtgcagggatgagagtggaatgtggttgtaaaaattaactccaatattcctggtcagttagtttgtaacccacgagaggatataacacatatatacatgtaactaataaagattggactgtgactactgctagaaaccaagtgctaggaagtgcctaggaacagatgaaaaggcaagttttagcttaatggattgggttcgaagagggtaggatcactcatttttaaaccaacgtttgattgagcttctatttggtgcaaggaattgtgctgagcactgtcctgccttcaaagagctctactagggcagacagatgaatgaatggacaatgacatatgcacaggatggggaacctcctggcgggggatgttctcctctccacctcaggctggttagggaagcacttgagcagtagcagagagggaaggtgtattagttcattctcgcattgctataaa

SEQ ID NO: 62621 - DNA, 612 bp, Homo sapiens
gtaggtacctataaatattggctaaatgagtgaattattgaatttcataggtgaaagaaaaaatccacaaaggcaggggtagtagcagtggggttgagaacagtgaagaggtagggagaaatttaggagggattgtggatgacaggacctgggattgctgaatgtggggggaagggagagaggagtaaagggctactcttaggtgtctgagctccagcatagggtcagtggggggccatttcagcagctaggagactggtttgaactatgtccggctgggtgtggtgtctgttgcatgtaatcccagcactttgggaggctgaggtagaagcattgtttgagctcaggagttcaaagccagcctgggcaacatagtgagactccatctcyagttaaaaaaaaatagccaggcatggtgatatgcacctgtagtcccagctactcaggaggctgatgtgggaggattgcttgagcttaagagattgacactgcagtgagctatgattgtaccacagcactccaacctaagtgagaccaggatcgaaaaaaaaaaaaaaagtgagatcctgtctcaacaaaaccaaaaacaaaaaaaacaaactatgtctggag

SEQ ID NO: 62622 - DNA, 919 bp, Homo sapiens
cattcccaccgttcctctagattccattagtcttattcacagataagtcagaccttcagagacctgaacatatggttttggcctctggctggctagctctattgaacaaggctgagcagttatgccactggcctccctctttatgtacttatcattaagagaattaaggatgaggttcagtgtgtcaggcaaatttccactttttgaatacttgcgtggcaacctcccagatagcccccagcaatccttgcgtgttagtaagtcatgcctttgtgtagtcacctcccatatagaatagggctgacctgtggagctataagatataccagacatgatggaatgtgacttctcaatctaggtcatgaaaggaattgtggcttccactatgtcctttcctatactgcccactcaggaggaagtcagctgccatgttgtgaagacactcaaacagcacaatggagaggtccatgtggtgaagaactgagaccacctgctaacagccagcagtgtgagctcacttgccagctrtgtgagtgagccatcttagaagtacatcctccagctccaactgttgtcagcttttttgggatatcactttcatatctctaaataacaagcttatattgctacttttttctgttttagacattgtctatttattttccacttttccatttttgtagtgagaaacaaaaattaccacaaaacttagtaggttaaaacaataaacatttattatctctcacagtcactttcttcatctcctctcaatatattatagtgtaaatctgatcaacatatatactgatatacagtcacatgccacataacaatgttttggtcagtgatgaaccacacagaccacagtggtcccataagattgtaatgaagctgaaaaattcctattgcctaatgaggt

SEQ ID NO: 62623 - DNA, 912 bp, Homo sapiens
taggaatattctaaacaaatagggttaattcattcagcagatttttattgagctatgtacaagagaatgttttagactgaaagttataaaatgaagttcttgtcttctatgagcttatagactagaggagctgaaatatttcaatgaaaaaaagtaatgttacgtgctcagttaaaaactcacacaaataccaaattccataagcactatagttaatcagagttctttcgtcatgtaaataacaattttatatagttttaaagtaaagaatgggaactggattgctttaatatatggttttagagaagcagagaatgtcagatgtgcctctcctctatgaagtgcctagcactctccatccagcctctcctcaggacctggggctcactaagtgaaaccctgagatttagaagctttgctttatattgaacccaactttgtccacagttggcgcacaggattgctagaacagagctattattcctcttccccagaatggacttccaacactggaggacaggaattgtgtccccccaccccagacatctttccttttctgaactgagcacacccttactgctatgagtggctcctaacagatcctggtttcatattcccaccacatcaagggtgcttcccctgagtacccttttctgattgatagaccttgtaagcatggctccagaaccgaaaagctcacactaggtttaggggaaccagtgacaagtaagcagaacagtcccctccactgtgctagccagagagagcaggcctttacaaatgtaatccccgatcacatttatttcctgatggccacatcacagccttggtcaagaatctcargtgtttctcacaagctgttttctaccacgtcatctccatcttgttgggtgaggatttggggtagggatg

SEQ ID NO: 62624 - DNA, 607 bp, Homo sapiens
cctaaagagatgaaatttgcctgtgttaacatctcttttgcatcatttgactaaaacaatcacatctccccacaaatgacamccccttccctgtgcacatatgtaaccacagtgcactgcagctggtagccaggctggggaggccccttaaggccacctttggagctgcacccagctgcacctttggagctgcacccatgtggctctctattgacaagaatgtctaatgccaggtgtggagctaaactctaccattagcaaaacagctgctggatggtcctttggacaattttttgagcttctggcaggctagataaaaacctgcttatgtcatgaaaacaagcaggagaaggttggtatacactgtgaaaggaaaggtaggggaatactccactgtcactctgtttcaggattagggtgtgagcattcagaatttctaacaaaagcactctatagatctctaatccctgccttgtttctcctgggttaagtgttgtaacgtgaagctctactccacccatgtctgtgggtaaagtttagccagtaattatcatctgaattcagatctcatgttttttagtcaggacaagtgatggaaaatgctact

SEQ ID NO: 62625 - DNA, 585 bp, Homo sapiens
ccagtgaaacgactaggagttgaagacttgcccacacagtcaatggaaaagaggagagagaattcagctccctatgcgaggcttgtggggcaggaaggcttcttatgagatagagctgcatccttccttctgcgagagcaagcctgaacctatgtttgcagcagacttaaggagagtggtcctcagaggggtcagagcaaggcaagccactgggaaggaggcaaaggcttggcaggggagctggagccccaggaagcttagcatggatgttggaataagggtcagargtagcacaaattggctcctcagctgtgttgacacacaggagccggtggctccaggctctcccctctgtgtctccagattccagtttctcccagctgatggagcaggcactgtctgacagatttgggacaacttcaggaattcagttaattgacaattatatcaaatgtttattttaaaaaataataaaacattcacataatgttgtcacaattttgggtgggaaaaaagcatgtgtatctctatatctctgtgtactagaaaacaacaaagggatataaaattaaataataaccagta

SEQ ID NO: 62626 - DNA, 585 bp, Homo sapiens
ccagtgaaacgactaggagttgaagacttgcccacacagtcaatggaaaagaggagagagaattcagctccctatgcgaggcttgtggggcaggaaggcttcttatgagatagagctgcatccttccttctgcgagagcaagcctgaacctatgtttgcagcagacttaaggagagtggtcctcagaggggtcagagcaaggcaagccactgggaaggaggcaaaggcttggcaggggagctggagccccaggaagcttagcatggatgttggaataagggtcagaagtagcacaaattggctcctcagctgtgttgacacacaggagccggtggctccaggctctcccctctgtgtctccagattccagtttctcccagctgatggagcaggcactgtctgacagatttgggacaacttcaggaattcagttaattgayaattatatcaaatgtttattttaaaaaataataaaacattcacataatgttgtcacaattttgggtgggaaaaaagcatgtgtatctctatatctctgtgtactagaaaacaacaaagggatataaaattaaataataaccagta

SEQ ID NO: 62627 - DNA, 704 bp, Homo sapiens
ctccagacaaacatttcttgttctttttttgtggcactagctaaacttccyctcctcttctccacccactgcctcctagagtcaaaaagtgggggtggaacatcgctgagtattgtaggtctgggagagtgaccagaggtagctttagcatgtggtgcccaaaagagagtccattataactgctcacactgagtgaagggacatagaggggaagaggaagcacagggctgggcaggcagaaattttgtgtcattctccaaagcgacggaaagtccttgatcatgaggttttaagaaaaaggaacctactacccccatgcaatagtacattgttttcccctgggagttttactttatatcacctttattgggatttaggtttacttgaatcagttccttcaaaacacacacacacacacacacacacacacacaaaatctcaaaacagacatgagatcatagccatccgttttaacattgctgccctctattagcgtgtacttgaacactgagtataacaaaggaaacaagagtacctagtcagttccacctatatcagcccccagctgattgctcatacctctttccaagtttcacatagatgagcccagtgatctccaaacttacaggtccatccctttcctaaggtccaagacaagaaaggtttgatttaggaatactccagtagcctgaatggcttggcac

SEQ ID NO: 62628 - DNA, 704 bp, Homo sapiens
ctccagacaaacatttcttgttctttttttgtggcactagctaaacttcctctcctcttctccacccactgcctcctagagtcaaaaagtrggggtggaacatcgctgagtattgtaggtctgggagagtgaccagaggtagctttagcatgtggtgcccaaaagagagtccattataactgctcacactgagtgaagggacatagaggggaagaggaagcacagggctgggcaggcagaaattttgtgtcattctccaaagcgacggaaagtccttgatcatgaggttttaagaaaaaggaacctactacccccatgcaatagtacattgttttcccctgggagttttactttatatcacctttattgggatttaggtttacttgaatcagttccttcaaaacacacacacacacacacacacacacacacaaaatctcaaaacagacatgagatcatagccatccgttttaacattgctgccctctattagcgtgtacttgaacactgagtataacaaaggaaacaagagtacctagtcagttccacctatatcagcccccagctgattgctcatacctctttccaagtttcacatagatgagcccagtgatctccaaacttacaggtccatccctttcctaaggtccaagacaagaaaggtttgatttaggaatactccagtagcctgaatggcttggcac

SEQ ID NO: 62629 - DNA, 1022 bp, Homo sapiens
caacacttgggtgtgtatggccaacactgtccagggaagaggacctaacttggctatctcctttctggtgcttggaagatacatcaattaaggattaagtatggctgcataaaatacaatgctgactcccatgacttaacccagtggaggatcatttttctcacatggaagtctggtgatagaccatatggggctgctactaccagagatccagccaccttccatgtttctgctttgctgtcgttggctgtcatcctcagtttgcctcatggtaacaagatggctgttattcctctagcttctgtgtattcaggtaggaagaagaataaatgaagtacaagaaagaagaaatggcatttatatttggaagagaaaacatttccaaaaattctttttttttttttttttttttgcgatggagttttgctcttgttgcccaggctgaagtgcaatgatgcratcttggctcaatgcaacctccacctcccagcttcaaatgattctcctgcctcagtctcctgagtagctgggattacaggcgtgcgccactatgcctggctaattttgtatttttagtagagacagagtttcaccatgttggtcaggctggtctcgaacccctgacctcaggtgatccacccgccttggcctcccgaagtcctgggattacaggcatgagccactgcacccggcccatttccaaaaattctaagcagacttcttacatgtcgttgtccaaaactgtgtcagcaggagctattaaaaagaaaataaaaacaaccatgggaaatagataagcagttgtgcagaaattttgtccccgttgatccattttccaaccttctccattctttctgcttgtggaagctgatctttatggattgcattattgtgctcccagacctttggcttacaggcaggagactggagggaataaagggagagaggtcagggtatatttcttcctcagctctttccatgcaaggttacccaggggtggctgtgccctcaaacaatgatca

SEQ ID NO: 62630 - DNA, 2206 bp, Homo sapiens
tggaacccagagacatttgattctctccccaggattatatttatgattttaaggttgtttctaatgggccatgattgagaaaaaacagaaaaaaataattttttcatggagttcccttccccctacccaatacacacacacatgcacaaacactgcaaatgggaaaaatgttcgaaatagcggcagactctaattacccaggttggaagagggccaggatattggtcagtggattctctctcttctccccccgccccctcccccagtttcttttcttctcccttctgtcatctttctccaaccatcaggtgggtgggtgggttgctggctggctgctgcttggcaaacagaaatagtttaggagcaagtgttcttggggtatgttcactgaaggatgaaccagagcaacaaagaatgatttttctctcgacattcagccaatttacatccaaggagagcaggtggggagatgtgatgcataaaggacgcagaaatttaaatctgagtgagtgatagtaagactttccaaagtgaagagttggaatgtagaaattaaataatcttggagaaatataagcaggatgggaagtgtttgacccaaagagcaatagaggatgcacatatctatctctgcagacaataaataagtccattctgatggatgcaggaatgaatgtggatgcttcaaaagaaaatgaattccactgtgagacgggcaagagggtaattaaaacccatgaagttgaagacaccagaagttgagcaactaaagtgggccaggtgtgtttaattaagtggttatttcttgttcggtgataagtccttatgttagcaacatcacattgtgtgtacaaaaaaawttcggttcgcagattaattcagtcatcaaagatactccaagtgagtgttacgatttgtaatatggatttcaaagctgcagtctgttgatgttcagacagtttaagaggatttgctcaataagcagagatttgtcttgcaacaagactgtctgggccacctacagaagaaagcaagttacactcctcagatttgcctttgaagaattctagcaactggctgtctcacacctacccttgcacatgcgttgctggtttcgttcagctacatgatccctttgctgtaactaggatggtctcctcaccaccaccggcaccagtctgcctgattctggtcagtgtatcttggctgatggtttttctctttttcttcaatcttggccaacgtgcgtacataatttttctctgggcttctcttttggagaagcctataaaacatttccattctgggatgacagaaactcctgcttgggagggagagatctcaaagattatctactggaatgcactatgcattacacagtgcagcgaaagggcacagccttcgaagcgtgagctccactcactacattagctatatagtttaggcatttcattgagtcataaatagtcactatctcatttattcctcactagcaatccaataggagaaaaataaagcacagaaagattaaataacttgccggggttctgtaaagtaagtaattgatccggaattataaccaaaatctatctgactcccacgcccaatgcctgctgttcctcttgtcattttggctttgggcaagttattttcattctcattaccttctgggccacattcatcaaatgtagatgaggattagagactatgcacattaaacacctagtacaatgcctgacagtatgaggtgtttcctaaatgctcattagattgttcttagttttcatgtgtctagttcacttttttagtttggtgtgtgggctggcagcatcagcttcacctgaaaccttgttagaaacacaggaactttggctggccccagacccacagaatcagaatctgcattttaaccagatgcccaggtgagatctgtaggcactttaaagtttgagaaacactgggctggcctatgcgtctgtatccactaaaaatgaaatttgctacctttttttctttactctttatttagaaataatttcacacttactgaactatgtcagtagtacaaagaatcctggtttctttagtggagaatggtatttataatttaaaagacatgtgccaggtgtgcccaaaaccataggattcattccagcttcccctctttctgtagctcccttctctgatggtgaaaaactgtctccat

SEQ ID NO: 62631 - DNA, 2206 bp, Homo sapiens
tggaacccagagacatttgattctctccccaggattatatttatgattttaaggttgtttctaatgggccatgattgagaaaaaacagaaaaaaataattttttcatggagttcccttccccctacccaatacacacacacatgcacaaacactgcaaatgggaaaaatgttcgaaatagcggcagactctaattacccaggttggaagagggccaggatattggtcagtggattctctctcttctccccccgccccctcccccagtttcttttcttctcccttctgtcatctttctccaaccatcaggtgggtgggtgggttgctggctggctgctgcttggcaaacagaaatagtttaggagcaagtgttcttggggtatgttcactgaaggatgaaccagagcaacaaagaatgatttttctctcgacattcagccaatttacatccaaggagagcaggtggggagatgtgatgcataaaggacgcagaaatttaaatctgagtgagtgatagtaagactttccaaagtgaagagttggaatgtagaaattaaataatcttggagaaatataagcaggatgggaagtgtttgacccaaagagcaatagaggatgcacatatctatctctgcagacaataaataagtccattctgatggatgcaggaatgaatgtggatgcttcaaaagaaaatgaattccactgtgagacgggcaagagggtaattaaaacccatgaagttgaagacaccagaagttgagcaactaaagtgggccaggtgtgtttaattaagtggttatttcttgttcggtgataagtccttatgttagcaacatcacattgtgtgtacaaaaaaatttcggttcgcagattaattcagtcatcaaagatactccaagtgagtgttacgatttgtaatatggatttcaaagctgcagtctgttgatgttcagacagtttaagaggatttgctcaataagcagagatttgtcttgcaacaagactgtctgggccacctacagaagaaagcaagttacactcctcagatttgcctttgaagaattctagcaactggctgtctcacacctacccttgcacatgcgttgctggtttcgttcagctacatgatccctttgctgtaacyaggatggtctcctcaccaccaccggcaccagtctgcctgattctggtcagtgtatcttggctgatggtttttctctttttcttcaatcttggccaacgtgcgtacataatttttctctgggcttctcttttggagaagcctataaaacatttccattctgggatgacagaaactcctgcttgggagggagagatctcaaagattatctactggaatgcactatgcattacacagtgcagcgaaagggcacagccttcgaagcgtgagctccactcactacattagctatatagtttaggcatttcattgagtcataaatagtcactatctcatttattcctcactagcaatccaataggagaaaaataaagcacagaaagattaaataacttgccggggttctgtaaagtaagtaattgatccggaattataaccaaaatctatctgactcccacgcccaatgcctgctgttcctcttgtcattttggctttgggcaagttattttcattctcattaccttctgggccacattcatcaaatgtagatgaggattagagactatgcacattaaacacctagtacaatgcctgacagtatgaggtgtttcctaaatgctcattagattgttcttagttttcatgtgtctagttcacttttttagtttggtgtgtgggctggcagcatcagcttcacctgaaaccttgttagaaacacaggaactttggctggccccagacccacagaatcagaatctgcattttaaccagatgcccaggtgagatctgtaggcactttaaagtttgagaaacactgggctggcctatgcgtctgtatccactaaaaatgaaatttgctacctttttttctttactctttatttagaaataatttcacacttactgaactatgtcagtagtacaaagaatcctggtttctttagtggagaatggtatttataatttaaaagacatgtgccaggtgtgcccaaaaccataggattcattccagcttcccctctttctgtagctcccttctctgatggtgaaaaactgtctccat

SEQ ID NO: 62632 - DNA, 2206 bp, Homo sapiens
tggaacccagagacatttgattctctccccaggattatatttatgattttaaggttgtttctaatgggccatgattgagaaaaaacagaaaaaaataattttttcatggagttcccttccccctacccaatacacacacacatgcacaaacactgcaaatgggaaaaatgttcgaaatagcggcagactctaattacccaggttggaagagggccaggatattggtcagtggattctctctcttctccccccgccccctcccccagtttcttttcttctcccttctgtcatctttctccaaccatcaggtgggtgggtgggttgctggctggctgctgcttggcaaacagaaatagtttaggagcaagtgttcttggggtatgttcactgaaggatgaaccagagcaacaaagaatgatttttctctcgacattcagccaatttacatccaaggagagcaggtggggagatgtgatgcataaaggacgcagaaatttaaatctgagtgagtgatagtaagactttccaaagtgaagagttggaatgtagaaattaaataatcttggagaaatataagcaggatgggaagtgtttgacccaaagagcaatagaggatgcacatatctatctctgcagacaataaataagtccattctgatggatgcaggaatgaatgtggatgcttcaaaagaaaatgaattccactgtgagacgggcaagagggtaattaaaacccatgaagttgaagacaccagaagttgagcaactaaagtgggccaggtgtgtttaattaagtggttatttcttgttcggtgataagtccttatgttagcaacatcacattgtgtgtacaaaaaaatttcggttcgcagattaattcagtcatcaaagatactccaagtgagtgttacgatttgtaatatggatttcaaagctgcagtctgttgatgttcagacagtttaagaggatttgctcaataagcagagatttgtcttgcaacaagactgtctgggccacctacagaagaaagcaagttacactcctcagatttgcctttgaagaattctagcaactggctgtctcacacctacccttgcacatgcgttgctggtttcgttcagctacatgatccctttgctgtaactaggatggtctcctcaccaccaccggcaccagtctgcctgattctggtcagtgtatcttggctgatggtttttctctttttcttcaatcttggccaaygtgcgtacataatttttctctgggcttctcttttggagaagcctataaaacatttccattctgggatgacagaaactcctgcttgggagggagagatctcaaagattatctactggaatgcactatgcattacacagtgcagcgaaagggcacagccttcgaagcgtgagctccactcactacattagctatatagtttaggcatttcattgagtcataaatagtcactatctcatttattcctcactagcaatccaataggagaaaaataaagcacagaaagattaaataacttgccggggttctgtaaagtaagtaattgatccggaattataaccaaaatctatctgactcccacgcccaatgcctgctgttcctcttgtcattttggctttgggcaagttattttcattctcattaccttctgggccacattcatcaaatgtagatgaggattagagactatgcacattaaacacctagtacaatgcctgacagtatgaggtgtttcctaaatgctcattagattgttcttagttttcatgtgtctagttcacttttttagtttggtgtgtgggctggcagcatcagcttcacctgaaaccttgttagaaacacaggaactttggctggccccagacccacagaatcagaatctgcattttaaccagatgcccaggtgagatctgtaggcactttaaagtttgagaaacactgggctggcctatgcgtctgtatccactaaaaatgaaatttgctacctttttttctttactctttatttagaaataatttcacacttactgaactatgtcagtagtacaaagaatcctggtttctttagtggagaatggtatttataatttaaaagacatgtgccaggtgtgcccaaaaccataggattcattccagcttcccctctttctgtagctcccttctctgatggtgaaaaactgtctccat

SEQ ID NO: 62633 - DNA, 2206 bp, Homo sapiens
tggaacccagagacatttgattctctccccaggattatatttatgattttaaggttgtttctaatgggccatgattgagaaaaaacagaaaaaaataattttttcatggagttcccttccccctacccaatacacacacacatgcacaaacactgcaaatgggaaaaatgttcgaaatagcggcagactctaattacccaggttggaagagggccaggatattggtcagtggattctctctcttctccccccgccccctcccccagtttcttttcttctcccttctgtcatctttctccaaccatcaggtgggtgggtgggttgctggctggctgctgcttggcaaacagaaatagtttaggagcaagtgttcttggggtatgttcactgaaggatgaaccagagcaacaaagaatgatttttctctcgacattcagccaatttacatccaaggagagcaggtggggagatgtgatgcataaaggacgcagaaatttaaatctgagtgagtgatagtaagactttccaaagtgaagagttggaatgtagaaattaaataatcttggagaaatataagcaggatgggaagtgtttgacccaaagagcaatagaggatgcacatatctatctctgcagacaataaataagtccattctgatggatgcaggaatgaatgtggatgcttcaaaagaaaatgaattccactgtgagacgggcaagagggtaattaaaacccatgaagttgaagacaccagaagttgagcaactaaagtgggccaggtgtgtttaattaagtggttatttcttgttcggtgataagtccttatgttagcaacatcacattgtgtgtacaaaaaaatttcggttcgcagattaattcagtcatcaaagatactccaagtgagtgttacgatttgtaatatggatttcaaagctgcagtctgttgatgttcagacagtttaagaggatttgctcaataagcagagatttgtcttgcaacaagactgtctgggccacctacagaagaaagcaagttacactcctcagatttgcctttgaagaattctagcaactggctgtctcacacctacccttgcacatgcgttgctggtttcgttcagctacatgatccctttgctgtaactaggatggtctcctcaccaccaccggcaccagtctgcctgattctggtcagtgtatcttggctgatggtttttctctttttcttcaatcttggccaacgtgygtacataatttttctctgggcttctcttttggagaagcctataaaacatttccattctgggatgacagaaactcctgcttgggagggagagatctcaaagattatctactggaatgcactatgcattacacagtgcagcgaaagggcacagccttcgaagcgtgagctccactcactacattagctatatagtttaggcatttcattgagtcataaatagtcactatctcatttattcctcactagcaatccaataggagaaaaataaagcacagaaagattaaataacttgccggggttctgtaaagtaagtaattgatccggaattataaccaaaatctatctgactcccacgcccaatgcctgctgttcctcttgtcattttggctttgggcaagttattttcattctcattaccttctgggccacattcatcaaatgtagatgaggattagagactatgcacattaaacacctagtacaatgcctgacagtatgaggtgtttcctaaatgctcattagattgttcttagttttcatgtgtctagttcacttttttagtttggtgtgtgggctggcagcatcagcttcacctgaaaccttgttagaaacacaggaactttggctggccccagacccacagaatcagaatctgcattttaaccagatgcccaggtgagatctgtaggcactttaaagtttgagaaacactgggctggcctatgcgtctgtatccactaaaaatgaaatttgctacctttttttctttactctttatttagaaataatttcacacttactgaactatgtcagtagtacaaagaatcctggtttctttagtggagaatggtatttataatttaaaagacatgtgccaggtgtgcccaaaaccataggattcattccagcttcccctctttctgtagctcccttctctgatggtgaaaaactgtctccat

SEQ ID NO: 62634 - DNA, 2206 bp, Homo sapiens
tggaacccagagacatttgattctctccccaggattatatttatgattttaaggttgtttctaatgggccatgattgagaaaaaacagaaaaaaataattttttcatggagttcccttccccctacccaatacacacacacatgcacaaacactgcaaatgggaaaaatgttcgaaatagcggcagactctaattacccaggttggaagagggccaggatattggtcagtggattctctctcttctccccccgccccctcccccagtttcttttcttctcccttctgtcatctttctccaaccatcaggtgggtgggtgggttgctggctggctgctgcttggcaaacagaaatagtttaggagcaagtgttcttggggtatgttcactgaaggatgaaccagagcaacaaagaatgatttttctctcgacattcagccaatttacatccaaggagagcaggtggggagatgtgatgcataaaggacgcagaaatttaaatctgagtgagtgatagtaagactttccaaagtgaagagttggaatgtagaaattaaataatcttggagaaatataagcaggatgggaagtgtttgacccaaagagcaatagaggatgcacatatctatctctgcagacaataaataagtccattctgatggatgcaggaatgaatgtggatgcttcaaaagaaaatgaattccactgtgagacgggcaagagggtaattaaaacccatgaagttgaagacaccagaagttgagcaactaaagtgggccaggtgtgtttaattaagtggttatttcttgttcggtgataagtccttatgttagcaacatcacattgtgtgtacaaaaaaatttcggttcgcagattaattcagtcatcaaagatactccaagtgagtgttacgatttgtaatatggatttcaaagctgcagtctgttgatgttcagacagtttaagaggatttgctcaataagcagagatttgtcttgcaacaagactgtctgggccacctacagaagaaagcaagttacactcctcagatttgcctttgaagaattctagcaactggctgtctcacacctacccttgcacatgcgttgctggtttcgttcagctacatgatccctttgctgtaactaggatggtctcctcaccaccaccggcaccagtctgcctgattctggtcagtgtatcttggctgatggtttttctctttttcttcaatcttggccaacgtgcgtacataatttttctctgggcttctcttttggagaagcctataaaacatttccattctgggatgacagaaactcctgcttgggagggagagatctcaaagattatctactggaatgcactatgcattacacagtgcagcgaaagggcacagccttcgaagcgtgagctccactcactacattagctatatagtttaggcatttcattgagtcataaatagtcactatctcatttattcctcactagcaatccaataggagaaaaataaagcacagaaagattaaataacttgccggggttctgtaaagtaagtaattgatccggaattataaccaaaatctatctgactcccacgcccaatgcctgctgttcctcttgtcattttggctttgggcaagttattttcattctcattaccttctgggccacattcatcaaatgtagatgaggattagagactatgcacattaaacacctagtacaatgcctgacagtatgaggtgtttcctaaatgctcattagattgttcttagttttcatgtgtctagttcacttttttagtttggtgtgtgggctggcagcatcagcttcacctgaaaccttgttagaaacacaggaactttggctggccccagacccacagaatcagaatctgcrttttaaccagatgcccaggtgagatctgtaggcactttaaagtttgagaaacactgggctggcctatgcgtctgtatccactaaaaatgaaatttgctacctttttttctttactctttatttagaaataatttcacacttactgaactatgtcagtagtacaaagaatcctggtttctttagtggagaatggtatttataatttaaaagacatgtgccaggtgtgcccaaaaccataggattcattccagcttcccctctttctgtagctcccttctctgatggtgaaaaactgtctccat

SEQ ID NO: 62635 - DNA, 1168 bp, Homo sapiens
actggttactgctgttaaaataaatctgcttgaaagagtcagtggcaaatgcaattctcaatttgcatttgtatacatttgataacacaacaattttaaaagataaatcattttctctcttcaaatgaaaattgcaggttctggagagtgtagtgtaatgtaagcaagataactgactaggcacacctagactcatccctttcatgaaaaaggaccaaggcaatgagtaataaattggactggagtatttgagaaagagcatttgagtgcaccaggaaagtggcgaggtccctgtggagcgtgaaagctcacaatgacagcatagagaggagagtgaggcatccttcctcagatgccttatttttcctgcctggaccagcttggagccagaagggatttatccttgtgaggaaaatgtaatcagaagaccctccaacagccttcatcaacaccamaggtacctgaagcccctactacaggaaaatcccatcgttcttacaagctctgagcacagtttggggagctgcctggaattcacatgactgcattgctctagattaggagcacaggtgtgtactcctcacctgtccatgacccaggctgctgatcacagtgccatattaaaactggagccaatgctggagttcccccattctaggggccattagccactgtgtcttttcagccttgaatctctgctgtcattccccaggcctaaatgggtagctggaataccacaattctgactgcccagagtctgggcccaggaatgctgtgactccagtcctgcacagtagggataccaactccaagccaggagaaccactatgtgctcccactcccagctggaaaaatggcccaggggacccacacttgagtcagctgagcagccacatgcccacacccctagacagagacatatcccaatcaaactgccccaagtgaacatactcctaagccaaccaagcagccatgaccacatgacccttgacaagagaaccagccaggtggatcttcccctggaaaacctgcctgtaaaccagccaagcagcccatataccaattcccctgactgcaaacccagaccagcagacctgtttctgtcagacacacccgcaagccagacaagcagtcacaggcttgcacacctggccaaaggaacagccca

SEQ ID NO: 62636 - DNA, 487 bp, Homo sapiens
catgaaaatgctgaatctagagaaactttgtcataattacctacctacttgaaagtacaaactacgtaatttgcctttaagtgttcttaaattaatataaataatgaagtatgctcagaatactcaagtactggtacatcaaattgaaaacaattaaaattaagatggatttgttagtattgtgactattattgattaaaatggtaatgataaataaggagaaatgttaagtacaacagggarttggtaatatttcttcaaagtaatcattttgctgtgactacccaattattagtacatttaatgtgttattcagtgcaattaattacccactttgcttctgggaaggcactaggaaaaaattgctttctgcctggagtggaaaagccactgcttctggagtgatgtgtgatgaagaccacgctctttgcggatgtggctcctagcaactctgatagaagctgcacatgcccttagggaagaaggg

SEQ ID NO: 62637 - DNA, 1746 bp, Homo sapiens
tggagaggtggatgcatgtgctcaatatgtgacttccaaactaatatatttttcaaacttaattttttttcctaattcacatggttcagaagatactgaaaggtctatcaagagggtacaggaaaaaatttttaaaggtactaaaaggatatataaagtgaaaatgtccctttcatcctatcccagataaagactacaggttgtcctcttatatttattctgcccttctttctttagaaacaaaatctccaattttagctatactcatgaatgctcagctaaggagggcgtttcctagttgtgtccaagtcactgagttctggccagtgggaggtgagtggaggccatgtgcttaacgttcagtggctctcctagagggcgtggatgtgcctttcactttctttactccccctttcttattggctggattgcagaggtgatggtgagccatcctcctccctgcagaggaaggcaacactgtagtgatggcagagccacacaatggaatgatcctgagtccctgacacttcgtcaccattatacctgccctgctttgtgagacagaattgaaatgctatcttgtttaagccttgcattttggggtcacttcttatgacagacagcctagtctgtctgctaattgatataatctctgggctattcagctcaccttcctggaggcaaccaatgtaaccatattgctggattcttccagggatatttcatgcataaactaacaaatgcatacaggcatgcatgcatgaatgcattcatatgtacataaacacatatatccaaccatgcatgtagccccctctccattttcacataaatgatgctgtaccaaacagctacactttaaagaggccaagcttggtttggaggaggattgctggtaatggccctcagctcagcttctccttttcttgctgacaaggtgagctctctctccaaatatacaccacctcctagcaaaccacaaaccctgcagctactgaacccgctttcctctgaggcagtttattactcaagcacaacgctcagcgccttcttaccccttcccccctaaaaaagaggtttattgaaatgttctagccacagaatagcctccctgtaaacaattccaatgcattttccaccccgtttttcatctttctggggtctctgagtgacaggggttggtactccaggcggatgtccaggggatccccctcctcccccaggagggcttgacccagccctgccatggcctctggaagccctggatgtggatgtctcctaaagaatgaagctgattgctgacggtctctgtaatggcctctttcctctctgctcatcttctccccaacagccacgttcccatcctgggtccaatgccctgaactgatgttgtaagagaaaagcacagtagattggacagtatctccaccaaattctactctttctaaaagggagggagaagtctgaaatccactcaggttggcaggggaaggaaaaggtgtatgtgtgggagggggaatggggtgagtcttagagctgggagatgctacagatgaccatctcttgtgsggccttggccatcataatatcaccaaatgtccttactcctctgcttgtctgaatcctgcctagctcaaaactcataccgtccactctagatagcctccctgtccaaggtggcaatgtctgtctgtctgtttttccttctctctctcatacacacaaacacacacacacacacacaca

SEQ ID NO: 62638 - DNA, 509 bp, Homo sapiens
tgagaaaatgaactatataacttcatcctttttaagtcttataaaattattatacatgaggactttattttaaggttccagtaaaataggtagtttayattatgtgacttctagataaataaataccataaaaccctcaaattttctgctagaaataataaaaataaatacttttccaagctctcaattttactacctcttagaactcaaaatatatcttaaaacttagtgaaaaatggctataaactttccttgattttgtgattttgatttgaaagtaccttaatgaagtggcataagcatttgattttccctattttacttagtgaacatttcaatggattttttaaactgctgaatagctctgaaagaactaaggttctttattttcaaaagcaaaatgctcttccctcactttaatagacactcatacaattaaaaagcaagcacagccatctagatgagcaatcagcagcaaagggaaaagttattacaaaattgctaattat

SEQ ID NO: 62639 - DNA, 676 bp, Homo sapiens
tcatgttccttctccaaccttatgctggagataaaagagtatgtatcatgagcaacttaaacaagagccttccacctacatacagtgtatgcagcagagaaagcatgttgcttcatggaaatcctccatctcattctgtattccactgcaatctggaattctggcagttgagtttacatgagcatttatgcatgtacacatatttgggaataaacaaattggcattcccctcactcacctccctcagagaatcagaattgcccatgaaaaaagacctatatctattgtcatttggkaatttccttaacgaaagcaactttctgcccagtcattttgctgagtcacaccactctgtaattctcaatattatgcaatacactccagtttctttttaatgaatttccttgaatgtctgctggcagcagagaaacaccgaatgttagagtaaagattaacacatgaaaaagagaccaaaataaatgaaacagaaatttggcataaacatagaccattcaggaagccaacaaaacaaacaatccaaaaacacctttaacaattttatcagtataccagagatatgaaagaaggttcatttacaaaacaagagcatatgcctatttttgttatttttttaaagcaatgctagaatgccatttggatgatggaaaaaaaatga

SEQ ID NO: 62640 - DNA, 940 bp, Homo sapiens
atttgttggtttaagtttcataaacttccttatattatgtgtaattttgcaggtgagaagatcagctcattgttcatttattcactccctgtcacaatttaattaattttatgattggcgtcagacatctacacaaagttggagtgaaactctgaagaattaatcctgtttaggtgagaagtatcataaaatacaggttttccatgatgttcattaaaaatttaatgtatatcttggtatgatgtttcacataatctatgatatactattcagacacacaatattctgctgtcttttcttataatttcatcatgatttgagcattatattgacataattttagaaatcttttttctcagttttgaaatttaggtgaaaataktaaatattttgaaaagaaattgttgcctcaggcttgaactagcacatttggagcctctgtaaactagagttaggtttattttttgttttctcctcctctgtttttgtgacttttaaagtgttatttactaagtaaaatgtttatcatattttccattgtgttttctaatactgcctctacttcatgttcataaatgcccccatgtcctgcctctagacttatattgatatctgattcaaattaaaccataaattccagaggcacaaaatatagaaattatgattcattgttagtttaaatgtattattgttgacattaacatgagcaacttggacaatatattttccattgaggaaacctaaaaaatatacattgtctctttacattggaaagaggtagaaatcaaacataattttaaactaaataaagtgtgggtttagtattgtgaaactattgtttcattatgaaatgggttttggtaagatctctatttaaataagaatagtaatgagaataattcaatagtatatgaaggacatttgtttgacagggtcaaaa

SEQ ID NO: 62641 - DNA, 630 bp, Homo sapiens
ctagtgcctttgccatcctgcagccttggggatcaggggcagggaaaggatgctgacagtcagagggtagtcttgggaggtcagcttagtgatcagtgctactcacagcctaaaagtatggcaacccatccttcatcatggtagtaggggaagtctggagaggagaaagcaccagttaggagatgcctcctccatgttaagaatcattcccttccgtgtcatccctcccttcygtcctctgtgtcctgggaatgtacctgggggcagataccagggatcaagctcaggtggcacctctgaaacaagacgtggcatagctccgcaattagattcggacagttctccctgaactcgaagggcctcagctagctcagcagtcatgggtcgaggggttcggaagtgggtcttgaggggagccacgttgttgaatcgaacaccagacaggcagcctgagaaacctggggtgttgtagcgctggatcttccggtcaatgactcctgtctctgagagagaggcggcccagaagagggacttggacccaaaggccctgccactctcactgtccacaggtttcccactcatccttcccactgccctcagccattcccagggccttcactttccttgagg

SEQ ID NO: 62642 - DNA, 448 bp, Homo sapiens
tgaagtgcctcggctcactgcaacctccgcctgccgggttcaagcaattctcctacctcagcttcccgagtagctgggactataggtgtgcgccaccagccccagctaatttgtatttttagtagagatggggtttcgccatgttggtcaggatggtctcgatctcctgacctcgtgatctgcccgcctcggcctcccaaagtgctgrgattacaggcatgagccactgcacccggccaccttgcaattctttctacctggaatgctgttctcccaggtcttccctggctagcttaaatggcaccctttttgagaacccttccctggcttcctgtcacatcactctttcctttgtagcatttctcactgtcttcatagcctgggattccttgtttattgtctgactccactctagtgtaagctccttcagcttgtctgtgatcactgc

SEQ ID NO: 62643 - DNA, 714 bp, Homo sapiens
tggatcccaggctgggagcctccccagtagaagtgctgctcctcatttcggccaatccaaaagctgtaggggtagcctcctggggaagaggtgcaggcagcttccaggccctgtccctccattagcctctgggctcctctcgcccttccagcgagttcagacccctccttgaatcttccaacccaaggccccagctggctctctggcttccttctcccaggcccccattggtgtctcctccagttccgccacctccctgaccccagccctaacctgcagtgttgagcagccgggaattgtagcaggagaactcgatccactgttcacaatgctgggaagcattggcaagggcactgacttcctcccaggatgcattccagtactggatagcccccaggaatggccgctccatgctggaacctgtcactcgagttgtccacagcctgtcatgccgcacaactgtccacgctckgttctctggcagacaagaggggacagagctttggctggagttgggcattctctacccatctccctgcccacctccaccaccgctgctgcaactcagagccactgaacgtggccagcagctccattccacctctgccctgggcactctgcattgtaggctggaaataagatagctggaatgggtaaggaagctgggatatactttttttttttttttttttgagatgaagtctcgctctgttg

SEQ ID NO: 62644 - DNA, 2070 bp, Homo sapiens
cccatctgggtggacttagatggagccttcccacccagaaacagaggtctggtcaggttggcccccacttacccccaaagaaatatgaggtccctgtccggatcagcaacgggtatgagaccctgacctctgccccttccacatcatcaatgctgataactgcatggttttcctgtgccacaaaattcacctcgtgccaaaagccgtcattcagtcggtaccctggacaagaatggatgatggtgtgggtggagggaagcagcaactagggtagaagaatgttctgagtggggaagcagcagccccactgtgtcccagtagcagcctgtgtgcccccgtgattacacttctcacacccagtggagacctctctgaatgtctcttcattatccatgacccagcaactgccacagagtctgcacagttataaacgagtaaccaaatctccaggggccttctggaactggagaataccaggactcccaggcttcccccttctccaagaatacttagtccctcagattcgcctcctcactgcctctagccactcccaccttttcccagtaccctggggcctcctgccctgcccccttcactcctctcccctctccagaatgtaaaggcctcagtcyaggcctacaactttcctgggatcctctacacttctcttctcttcttgtgcctcccccgaaacgccctcaccagcagcgaactgaagcttctttcggccgctctgcgcgatggacacgttgacctgcccttcgctgagcgtcagctccacgtggcccagcccgtcccccagacgggagaaaaggagaagcccggtgaggtcccaggtgcggaagcgaaatgagactgccaggcggccacggcgtgggaaaccgggcacttgaacgaagttgtgagggcctccgaagttgatagggtgcggtaccgggtccaggcaacgaaaagccaccttaccctaggggcaaaagtgaagacgcatcaacacccgtgagccgcctctgcctcagctgggaattcagttttcacaccggtctaagaccctggtcaccgccctccttcggtgttggcgggggtgagatctccaaccatgacgtgacctcttcccctccaagctcgtccatctgtggagggggccccaacccagtcggccctcggaactctgctcgcttgctctcgctgatctccaccgtctgcgattcgaccgcttctctccttccagtatcgagaggcaattttggaccacagacctggctcctgccagcttcccaacagagctccagagtcggagagggttgaggggggcatatcagagaagccatcggttcaagtccctactcagccaccgtgcagctgcacgacccctggacaagccactccctgtgtctgcgccttactttcttcatctatgaactaagaaggtgattggacccgaccactgcttcttaactaggggcctgcgtggctcatgcacctcaggtgagacccgctcccctcccaacttgagcatctggctggggacagagggattctccgcttttatctgatgttcaatatctcttcccgctccacctctttgctttccacgacgctttgatatcctgtcctcccagacccccctgcccactggcctcgaaggtgatccgggaatggcgccgcacggccaggtctgcgatgttgacgcggttgaagattacgttttctatgcagccgcggaagttatgccgataggccaggttcttccgcgcggcgcccaccagacctccgatgaacatctgcgggaggcgtggggaatgaggcctcttgggcacaggagggcgcctgcctttctcgcgcgtccccgccgtatgctttcccaaatgccaggtggggttttgtaaaagacttaaaacacacatttccccagtgtcggtactaaagctcgctaggcctttcaaggcttcagttcaagctctgactccaacacaaatcggctgcacgcccttgggcaagtcaattagcctgcctgggattcttatctgcagatggggtcagggtctttaacaactccacaaagttgtggga

SEQ ID NO: 62645 - DNA, 2070 bp, Homo sapiens
cccatctgggtggacttagatggagccttcccacccagaaacagaggtctggtcaggttggcccccacttacccccaaagaaatatgaggtccctgtccggatcagcaacgggtatgagaccctgacctctgccccttccacatcatcaatgctgataactgcatggttttcctgtgccacaaaattcacctcgtgccaaaagccgtcattcagtcggtaccctggacaagaatggatgatggtgtgggtggagggaagcagcaactagggtagaagaatgttctgagtggggaagcagcagccccactgtgtcccagtagcagcctgtgtgcccccgtgattacacttctcacacccagtggagacctctctgaatgtctcttcattatccatgacccagcaactgccacagagtctgcacagttataaacgagtaaccaaatctccaggggccttctggaactggagaataccaggactcccaggcttcccccttctccaagaatacttagtccctcagattcgcctcctcactgcctctagccactcccaccttttcccagtaccctggggcctcctgccctgcccccttcactcctctcccctctccagaatgtaaaggcctcagtctaggcctacaactttcctgggatcctctacacttctcttctcttcttgtgcctcccccgaaacgccctcaccagcagcgaactgaagcttctttcggccgctctgcgcgatggacacgttgacctgcccttcgctgagcgtcagctccacgtggcccagcccgtcccccagacgggagaaaaggagaagcccggtgaggtcccaggtgcggaagcgaaatgagactgccaggcggccacggcgtgggaaaccgggcacttgaacgaagttgtgagggcctccgaagttgatagggtgcggtaccgggtccaggcaacgaaaagccaccttaccctaggggcaaaagtgaagacgcatcaacacccgtgagccgcctctgcctcagctgggaattcagttttcacaccggtctaagaccctggtcaccgccctccttcggtgttggcgggggtgagatctccaaccatgacgtgacctcttcccctccaagctcgtccatctgtggagggggccccaacccagtcggccctcggaactctgctcgcttgctctcgctgatctccaccgtctgcgattcgaccgcttctctccttccagtatcgagaggcaattttggaccacagacctggctcctgccagcttcccaacagagctccagagtcggagagggttgaggggggcatatcagagaagccatcggttcaagtccctactcagccaccgtgcagctgcacgacccctggacaagccactccctgtgtctgcgccttactttcttcatctatgaactaagaaggtgattggacccgaccactgcttcttaactaggggcctgcgtggctcatgcacctcaggtgagacccgctcccctcccaacttgagcatctggctggggacagagggattctccgcttttatctgatgttcaatatctcttcccgctccacctctttgctttccacgacgctttgatatcctgtcctcccagacccccctgcccactggcctcgaaggtgatccgggaatggcgccgcacggccaggtctgcgatgttgacgcggttgaagattacgttttctatgcagccgcggaagttatgccgataggccaggttcttccgcgcggcgcccaccagacctccgatgaacatctgcgggaggcgtggggaatgaggcctcttgggcacaggagggcgcctgcctttctcgcgcgtccccgccgtatgctttcccaaatgccagrtggggttttgtaaaagacttaaaacacacatttccccagtgtcggtactaaagctcgctaggcctttcaaggcttcagttcaagctctgactccaacacaaatcggctgcacgcccttgggcaagtcaattagcctgcctgggattcttatctgcagatggggtcagggtctttaacaactccacaaagttgtggga

SEQ ID NO: 62646 - DNA, 2070 bp, Homo sapiens
cccatctgggtggacttagatggagccttcccacccagaaacagaggtctggtcaggttggcccccacttacccccaaagaaatatgaggtccctgtccggatcagcaacgggtatgagaccctgacctctgccccttccacatcatcaatgctgataactgcatggttttcctgtgccacaaaattcacctcgtgccaaaagccgtcattcagtcggtaccctggacaagaatggatgatggtgtgggtggagggaagcagcaactagggtagaagaatgttctgagtggggaagcagcagccccactgtgtcccagtagcagcctgtgtgcccccgtgattacacttctcacacccagtggagacctctctgaatgtctcttcattatccatgacccagcaactgccacagagtctgcacagttataaacgagtaaccaaatctccaggggccttctggaactggagaataccaggactcccaggcttcccccttctccaagaatacttagtccctcagattcgcctcctcactgcctctagccactcccaccttttcccagtaccctggggcctcctgccctgcccccttcactcctctcccctctccagaatgtaaaggcctcagtctaggcctacaactttcctgggatcctctacacttctcttctcttcttgtgcctcccccgaaacgccctcaccagcagcgaactgaagcttctttcggccgctctgcgcgatggacacgttgacctgcccttcgctgagcgtcagctccacgtggcccagcccgtcccccagacgggagaaaaggagaagcccggtgaggtcccaggtgcggaagcgaaatgagactgccaggcggccacggcgtgggaaaccgggcacttgaacgaagttgtgagggcctccgaagttgatagggtgcggtaccgggtccaggcaacgaaaagccaccttaccctaggggcaaaagtgaagacgcatcaacacccgtgagccgcctctgcctcagctgggaattcagttttcacaccggtctaagaccctggtcaccgccctccttcggtgttggcgggggtgagatctccaaccatgacgtgacctcttcccctccaagctcgtccatctgtggagggggccccaacccagtcggccctcggaactctgctcgcttgctctcgctgatctccaccgtctgcgattcgaccgcttctctccttccagtatcgagaggcaattttggaccacagacctggctcctgccagcttcccaacagagctccagagtcggagagggttgaggggggcatatcagagaagccatcggttcaagtccctactcagccaccgtgcagctgcacgacccctggacaagccactccctgtgtctgcgccttactttcttcatctatgaactaagaaggtgattggacccgaccactgcttcttaactaggggcctgcgtggctcatgcacctcaggtgagacccgctcccctcccaacttgagcatctggctggggacagagggattctccgcttttatctgatgttcaatatctcttcccgctccacctctttgctttccacgacgctttgatatcctgtcctcccagacccccctgcccactggcctcgaaggtgatccgggaatggcgccgcacggccaggtctgcgatgttgacgcggttgaagattacgttttctatgcagccgcggaagttatgccgataggccaggttcttccgcgcggcgcccaccagacctccgatgaacatctgcgggaggcgtggggaatgaggcctcttgggcacaggagggcgcctgcctttctcgcgcgtccccgccgtatgctttcccaaatgccaggtggggttttgtaaaagacttaaaacacacatttccccagtgtcggtactaaagctcgctaggcctttcaaggcttsagttcaagctctgactccaacacaaatcggctgcacgcccttgggcaagtcaattagcctgcctgggattcttatctgcagatggggtcagggtctttaacaactccacaaagttgtggga

SEQ ID NO: 62647 - DNA, 1524 bp, Homo sapiens
cacccgcactgccacgctcccacctgggctggctgggcccctgtcctgggccacccgcactgccacgctcccacctgggctggctgggccgctgtcctgggccaccctcactgccacgctcccacctgggctcttgctgccaaggggatgtgcttggaggtggcactgcatcagccctgcccctggcagccgaggatggcccctacaggcccaccgccccagtgctgcctgtggcacccttggcagcagcagcgcacaggcacggggcagatggtgccragaatgccacagggccctgggattgggagtccgcagcccggccagttctccagccaaagcaaacagggtaatgctgctgaccggaccatcccagctgataaaggctgctctgtatctcattaattaagatctggaagcagagcagagcccatgagaggctggctgggggcgggggacgacatggaaattcccaggactgacccggcagctcccaaacacagatctccggggctgctgcaggctggccccagactgaaggtggggacacaacccgggcttcttcctgtctgcactgcccaagggcagggagacagcgctggcctcaagggactgaccctgagcagccgtgagggcagatgcaggtctgagctgtgtccctctggggtccccctagacatctgggacttcttcccagccattccaggggtctggcatcatcttttcagaaggccactaaaaggatcccctagggtcattctcagagcccgactagaggcagcagcaggcggcggatctcatggagccccaccaaccccctagctcccacccagagacctctccctccttctgaacttctcagatgggactccacctcctcctggaggctctgtgctggtccccatggattctgtctgcaccccacacacactcctgggcaggccaggtctacacagctttgctctctgggcccagcccaccacgtaagggcaggggccacctagagcccatgccagcgccagcctgagaggaggcagcgtgtcccctcacggggtcgtgccctccgactccaaccccctgcctggagagccaccgattcagtttcacctatgctgtcacctccccttcccgggctcagccacaggcgccccatgtgccctcttcgggcatcacataaacattcccaggtgacggccacagcccagctgtggtgaggggactggacagtcacagtggggctggtccctccctcttgggtccagaccttggagacggtgggggcagccagtggaccgtgtgtgaccccagaaccgagcacccccagatgtcctcacagcaccaacgaatactgaggttttggctacccagcccggtgggcgcagtttccaatgggggggcctcggaggcctcggaatccagagggcagcgggcgggatctcggccagtaacagcaagaatctgttttccaaaataaacatcgggacacgtgctcctacaaagggtttctgtgcccagctgagaacaagg

SEQ ID NO: 62648 - DNA, 1524 bp, Homo sapiens
cacccgcactgccacgctcccacctgggctggctgggcccctgtcctgggccacccgcactgccacgctcccacctgggctggctgggccgctgtcctgggccaccctcactgccacgctcccacctgggctcttgctgccaaggggatgtgcttggaggtggcactgcatcagccctgcccctggcagccgaggatggcccctacaggcccaccgccccagtgctgcctgtggcacccttggcagcagcagcgcacaggcacggggcagatggtgccgagaatgccacagggccctgggattgggagtccgcagcccggccagttctccagccaaagcaaacagggtaatgctgctgaccggaccatcccagctgatamaggctgctctgtatctcattaattaagatctggaagcagagcagagcccatgagaggctggctgggggcgggggacgacatggaaattcccaggactgacccggcagctcccaaacacagatctccggggctgctgcaggctggccccagactgaaggtggggacacaacccgggcttcttcctgtctgcactgcccaagggcagggagacagcgctggcctcaagggactgaccctgagcagccgtgagggcagatgcaggtctgagctgtgtccctctggggtccccctagacatctgggacttcttcccagccattccaggggtctggcatcatcttttcagaaggccactaaaaggatcccctagggtcattctcagagcccgactagaggcagcagcaggcggcggatctcatggagccccaccaaccccctagctcccacccagagacctctccctccttctgaacttctcagatgggactccacctcctcctggaggctctgtgctggtccccatggattctgtctgcaccccacacacactcctgggcaggccaggtctacacagctttgctctctgggcccagcccaccacgtaagggcaggggccacctagagcccatgccagcgccagcctgagaggaggcagcgtgtcccctcacggggtcgtgccctccgactccaaccccctgcctggagagccaccgattcagtttcacctatgctgtcacctccccttcccgggctcagccacaggcgccccatgtgccctcttcgggcatcacataaacattcccaggtgacggccacagcccagctgtggtgaggggactggacagtcacagtggggctggtccctccctcttgggtccagaccttggagacggtgggggcagccagtggaccgtgtgtgaccccagaaccgagcacccccagatgtcctcacagcaccaacgaatactgaggttttggctacccagcccggtgggcgcagtttccaatgggggggcctcggaggcctcggaatccagagggcagcgggcgggatctcggccagtaacagcaagaatctgttttccaaaataaacatcgggacacgtgctcctacaaagggtttctgtgcccagctgagaacaagg

SEQ ID NO: 62649 - DNA, 1524 bp, Homo sapiens
cacccgcactgccacgctcccacctgggctggctgggcccctgtcctgggccacccgcactgccacgctcccacctgggctggctgggccgctgtcctgggccaccctcactgccacgctcccacctgggctcttgctgccaaggggatgtgcttggaggtggcactgcatcagccctgcccctggcagccgaggatggcccctacaggcccaccgccccagtgctgcctgtggcacccttggcagcagcagcgcacaggcacggggcagatggtgccgagaatgccacagggccctgggattgggagtccgcagcccggccagttctccagccaaagcaaacagggtaatgctgctgaccggaccatcccagctgataaaggcwgctctgtatctcattaattaagatctggaagcagagcagagcccatgagaggctggctgggggcgggggacgacatggaaattcccaggactgacccggcagctcccaaacacagatctccggggctgctgcaggctggccccagactgaaggtggggacacaacccgggcttcttcctgtctgcactgcccaagggcagggagacagcgctggcctcaagggactgaccctgagcagccgtgagggcagatgcaggtctgagctgtgtccctctggggtccccctagacatctgggacttcttcccagccattccaggggtctggcatcatcttttcagaaggccactaaaaggatcccctagggtcattctcagagcccgactagaggcagcagcaggcggcggatctcatggagccccaccaaccccctagctcccacccagagacctctccctccttctgaacttctcagatgggactccacctcctcctggaggctctgtgctggtccccatggattctgtctgcaccccacacacactcctgggcaggccaggtctacacagctttgctctctgggcccagcccaccacgtaagggcaggggccacctagagcccatgccagcgccagcctgagaggaggcagcgtgtcccctcacggggtcgtgccctccgactccaaccccctgcctggagagccaccgattcagtttcacctatgctgtcacctccccttcccgggctcagccacaggcgccccatgtgccctcttcgggcatcacataaacattcccaggtgacggccacagcccagctgtggtgaggggactggacagtcacagtggggctggtccctccctcttgggtccagaccttggagacggtgggggcagccagtggaccgtgtgtgaccccagaaccgagcacccccagatgtcctcacagcaccaacgaatactgaggttttggctacccagcccggtgggcgcagtttccaatgggggggcctcggaggcctcggaatccagagggcagcgggcgggatctcggccagtaacagcaagaatctgttttccaaaataaacatcgggacacgtgctcctacaaagggtttctgtgcccagctgagaacaagg

SEQ ID NO: 62650 - DNA, 1524 bp, Homo sapiens
cacccgcactgccacgctcccacctgggctggctgggcccctgtcctgggccacccgcactgccacgctcccacctgggctggctgggccgctgtcctgggccaccctcactgccacgctcccacctgggctcttgctgccaaggggatgtgcttggaggtggcactgcatcagccctgcccctggcagccgaggatggcccctacaggcccaccgccccagtgctgcctgtggcacccttggcagcagcagcgcacaggcacggggcagatggtgccgagaatgccacagggccctgggattgggagtccgcagcccggccagttctccagccaaagcaaacagggtaatgctgctgaccggaccatcccagctgataaaggctgctctktatctcattaattaagatctggaagcagagcagagcccatgagaggctggctgggggcgggggacgacatggaaattcccaggactgacccggcagctcccaaacacagatctccggggctgctgcaggctggccccagactgaaggtggggacacaacccgggcttcttcctgtctgcactgcccaagggcagggagacagcgctggcctcaagggactgaccctgagcagccgtgagggcagatgcaggtctgagctgtgtccctctggggtccccctagacatctgggacttcttcccagccattccaggggtctggcatcatcttttcagaaggccactaaaaggatcccctagggtcattctcagagcccgactagaggcagcagcaggcggcggatctcatggagccccaccaaccccctagctcccacccagagacctctccctccttctgaacttctcagatgggactccacctcctcctggaggctctgtgctggtccccatggattctgtctgcaccccacacacactcctgggcaggccaggtctacacagctttgctctctgggcccagcccaccacgtaagggcaggggccacctagagcccatgccagcgccagcctgagaggaggcagcgtgtcccctcacggggtcgtgccctccgactccaaccccctgcctggagagccaccgattcagtttcacctatgctgtcacctccccttcccgggctcagccacaggcgccccatgtgccctcttcgggcatcacataaacattcccaggtgacggccacagcccagctgtggtgaggggactggacagtcacagtggggctggtccctccctcttgggtccagaccttggagacggtgggggcagccagtggaccgtgtgtgaccccagaaccgagcacccccagatgtcctcacagcaccaacgaatactgaggttttggctacccagcccggtgggcgcagtttccaatgggggggcctcggaggcctcggaatccagagggcagcgggcgggatctcggccagtaacagcaagaatctgttttccaaaataaacatcgggacacgtgctcctacaaagggtttctgtgcccagctgagaacaagg

SEQ ID NO: 62651 - DNA, 825 bp, Homo sapiens
caccctccttccccggcaagccctttggcaccagcagctggtcctcattccaggctaagggctcgccgtagtggctccctccgaggctgtcccaccagacgcttaaaggtggctccatagtggaaacgacttctttaaagaagaaagatgagtctcatgttcgggcaaccgcccgtcgcaggggttaaacggtcctgacagagcagccttttcaccctcccctgggccaaagcacacacgtgttctctgctttccctgcacaccggccactcagatctgcttctccacaatctcagcccctcagcgcccgccagggtctcccctacagcccctgcccagcccaacacggccagaatgacccgcggcccaggccgaggccgcagggtggcccccgaccttccactgccttcggatgctgacatgaggttcccgccccgcgctgggggcagcgccccgtccctgcgccggtgtctcttcacgcacctccaccgccctcgcacaggcggagccaccaggggctcggtttctaraggcctgcgagcttctgccacgcaaaacgccacaggcacacggcagagccccggggccgccctgcgcccacctcaggacggctccgctggtcgcacgacgcgcgctccttccctcaccccactgcccgctccggcgtggcgctcccctctgaacccccaggagactctggagcccctcggtgagaggccgctagtcttcctgacctgcacccttctcacctggttggcaaatccccggaggtgagccatggccgcgccgcctcagaccctccgccagcagccccaggaggcgtct

SEQ ID NO: 62652 - DNA, 1218 bp, Homo sapiens
tgtcctaaatactggtctggtgaatrgtaatggctctatcacctgcaaaataaggccaataactgttctttttggcagacataacagtttcttaaacagtgtgacatggtgagcaaaacatcgaaataaaattacaactgaaaagatgctttccagtgctcctttgatttattagattaaagggaaagaagagatttattttcttctgagcaggatagaaacaaaaatgaccttttccctgagtatttacagtcctgaacattgactgaagtaatttcaccaacagagtgcatgcagttgtgccaaacggaaaacaagccaaaagttatatcaaagtcctgagttcagcatcttcacagcaaatcactgagaccctaaacaaagcagtacatcatccagaacatgtaactacaggcaacacatctttactaaacacttaaacagtgtatacagccacttgctgggatttaagagccaaggatgcagccctgacacatagactcttttaatgcagctaaagacacacatgcacaaacacagaaaaatagaataaggcttttcaagttgtcacgtgataacataaggataggatgggcagagcaatatttgagtcctcagaagttctttaaaagaagaggtaactacacttgaataaacaaaggatggggaacttcctttaaagggtgaggcatgtgctgggtataaaaaaggatttaaatatatggtagtaagagagaagccatagttggtagaaagaacttctggagaactagtcaaacaggagcaaatcaaagaaattgttcttgttcctgaaggaaataatattttctctgaattatctattttatttctagaaatgtgccaagtacagtgcttgagtaggggagagggtagttgaagcatttccatgtcagatctttacattcaagataatacagcaagaaataatgcagttcttttaaaaatttgtggaggtttaggtagaaagaaacaaaatgtggtacagagaaacttagtgacgtaaaataaacggcttctcaaatctccgtaaactgaatatagactctgccttagtttgcaattgagaaataatgtatttcagcaaataattgattatttatttatttgtttttattgcctgcagtatggactagctcagatcacactatgcttagagggtctttggattcaacatcctatgtttctgacttacttaaa

SEQ ID NO: 62653 - DNA, 1218 bp, Homo sapiens
tgtcctaaatactggtctggtgaatggtaatggctctatcacctgcaaaataaggccaataactgttctttttggcagacataacagtttcttaaacagtgtgacatggtgagcaaaacatcgaaataaaattacaactgaaaagatgctttccagtgctcctttgatttattagattaaagggaaagaagagatttattttcttctgagcaggatagaaacaaaaatgaccttttccctgagtatttacagtcctgaacattgactgaagtaatttcaccaacagagtgcatgcagttgtgccaaacggaaaacaagccaaaagttatatcaaagtcctgagttcagcatcttcacagcaaatcactgagaccctaaacaaagcagtacatcatccagaacatgtaactacaggcaacacatctttactaaacacttaaacagtgtatacagccacttgctgggatttaagagccaaggatgcagccctgacacatagactcttttaatgcagctaaagacacacatgcacaaacacagaaaaatagaataaggcttttcaagttgtcacgtgataacataaggataggatgggcagagcaatatttgagtcctcagaagttctttaaaagaagaggtaactacacttgaataaacaaaggatggggaacttcctttaaagggtgaggcatgtgctgggtataaaaaaggatttaaatatatggtagtaagagagaagccatagttggtagaaagaacttctggagaactagtcaaacaggagcaaatcaaagaaattgttcttgttcctgaaggaaataatattttctctgaattatctattttatttctagaaatgtgccaagtacagtgcttgagtaggggagagggtagttgaagcatttccatgtcagatctttacattcaagataatacagcaagaaataatgcagttcttttaaaaatttgtggaggtttaggtagaaagaaacaaaatgtggtacagagaaacttagtgacgtaaaataaacggcttctcaaatctcygtaaactgaatatagactctgccttagtttgcaattgagaaataatgtatttcagcaaataattgattatttatttatttgtttttattgcctgcagtatggactagctcagatcacactatgcttagagggtctttggattcaacatcctatgtttctgacttacttaaa

SEQ ID NO: 62654 - DNA, 691 bp, Homo sapiens
tcccctttcagctactacttattctcactttcaaattggtgattttcccccttacttttgcacagcatttaggtgctagaagaaagaaaaagcaaccataactgaacatcctttagaatccatgctcaggttcttcttggcaggttataaactgtttctactataagacatatctttaggttacacaagcagcaagcaatgaaaaaaaatcacactcaactctggggagagatttccaatagttttcacgtttcctcattgtccctgcacatctctagctctctttaagtactttgggcttactcagtcactgaccttgyctaatcatattgattgtcagcaattgcagtctaattggaaagcaagttgctatggtaattcctgtatcttctgtcttacatttaaagacacaatgatcctaaaagggggaaaattgcttgtggttggtgacagaggaaaacataattagatatgcaaattgtgaaactaatgtattcaaatgaattctgaaatctaagtaaggatttgatgtaataaattggtcccagaatttctaccaaaggcacatttggtcagaaggtattctttttctccaaatacttatatttttaggaaaaaataaataaagacaatgtatcatggaagcaggaagggggtggctattcacagctgaaaattggggataggatcc

SEQ ID NO: 62655 - DNA, 589 bp, Homo sapiens
gtaatttgcttctgaattaaacagaggtatctaaccaattattagcaaattggatgaccttggggttatttttgggaggcggagtcttgccacatctaagaggwtgcatcttcgcttcaggtagatcagtttgaaaaggtagagtccagaagaaacatgcttccagagaaaacatgggttttgtccccaaaccttatctccatatggaagagagagtttgtggctgagcaaagctgggacagttcttctgtccacgggacaatttttgctgttgttgttcctgtaagccagagttgatattctctataatctaagacccaggaaggaaagtaacatgttcttccaactgtcaataaatcaacaggagactccaagtgattacattttatctacctgatttttgttaaattctgtacatttcacacatatgaaatgtaacatttccattatcaattagatttaacaatttctttacccagtattcatatttaggttcttgtccagtcgctttactgctttcgacctggtcatgtttacaactgcacagtcattaaaaaacatttctgactagcatatgggttagactgta

SEQ ID NO: 62656 - DNA, 194 bp, Homo sapiens
cctagtcctgcccttgacaagtggggattattacaattcaaggtgagatttgggtggggacacagagccaaaccatgtcagtggtgaaccagaagcagagagtgaagaatgrccctttacttctttaagcctctgttatatcacatggacacgaaaaaaaaattcatttactccatcagtttggggagtgtttc

SEQ ID NO: 62657 - DNA, 387 bp, Homo sapiens
catatgtttaaaagctgtggcaaagtcatctttcggcagaagttgtgtagccttaaacaaatcatgccctggtgtgcgtccttcagtagagggatggttctcaggtttaccatatggtgcatgcagtcagtctcatgactcattttggacttggcactgggaagggttcagaaaggtgcagaacatgcaaatggctttgaggatgagtgctcactccccagtaaggggatatccccgcctgcatacaaatagtccaggccactgttttccaaacataacaaacctacaatgctgtmccctctagaaacttctggatgctcagcagttcacctcctggtttagtccaaaacattatgtccaaaacataatctctttttgaaggacatt

SEQ ID NO: 62658 - DNA, 1514 bp, Homo sapiens
atttgctgtttacttcgcgttttatttatatatacatatataaaatcattgatgtattttagtttctaatggaaggtttatgtttgcttctatgaatagtcattttgtttcttatgcatttccaacagttcataatttcctctatttgcataaaattcctaagctatctttgtcaagcctccacaaaatgaagagcacactagcaatttaaaaaataaataaaattgaatggttttgtttacctctgaggatttagagagatataagagcttcagtttcctggccaaaaataaaaatacttatttttaaaagtctaaacaaaaatgatatattatttattttgttatttggaaaagtggaggggagaagaaatgttaaaataacttttatttccaagataattcagtacattcaataatttgaattggtttcagatcttttcctttaggtaattaggaaatacttgatatgcatacgtttaatattcagaaaatattataattgtccttaagaaaattaaattggctgggtgcagtggctcactcttgtaatcccagcatcttggaaggctgagatagaagaaacacttgaaacttgagtccaggagtttgagatcagcctgggcaacatagtgagaccttatctctataaaaaattaacaaaattcgccagacatgtggtgcatgcctgtaatcccagctacttgggaggctgaggcaggaggatcccttgagtctaggagtttgagtctgtagtgagctatgattgcaccactgtacttcaacctgagtgacacagcaagatcctgactcaaaaaaaaaaaaaaaaaggaaagaaaagaaaaaagaaaagtaaagaaaaaaatgatattgactgggattttctcaaattattttagttgtgtttaccattattaaaattaagtgacattcacttggataggaatacaaaaagttaaattttttagtgattttaaaatcactgttgggccttcatgtgtgcaattgaaaataaaatatatacagttgttgcgctggtttgaagaatgcagtggtgaaagttaccaaatcagttatcagtactgtatctagaaaccaatcttggaaacatgtgttaatagtcttttaaaatagttggcaagaaattattgtgtggttgttcttatgttgtgtttgttttgttgcatagcatttaaatgtaaggagattatttatacttatactgaatttccaaaattgatatttgcatttacctttttttttgataarcagaaaagttcattgtcttactttgataagtttgccatatgacctatcacagtttttatgcttttggtcacagttctgttactggaattctagcaattagacatacacaaagcataacctaaccactgtaataaaatggtttgaagagctacagtcagtaactactaaacaccgaatcacagtgttttaatttatgatgtgttagagagaatggtaggactttcggcaatgtaaatatcttattaa

SEQ ID NO: 62659 - DNA, 713 bp, Homo sapiens
atgtctgtgtccagatttccctctgcttataaggacaccaggcctatttggttagcgcgtgaccaatatgacctcatcctaacttatcacaccagcaacaaccctatctccaaataaggtcacagtctgaggtgctgggggttaggacttcaatatgtctttttgcagggtacacaattcaaaccataccaggaagcaayagaaacacattctaaaaaatttagacagaaaggaggctttatgaaaggcactgggggaaatgaaccgctgtggggacccagcaccagagctcaggcacactctttttttattttttgaaaccgtgtcttgctctgtcgcccaggctggagtgcagtggcgcgatcttggctcactgcagcctctgcctcccaagttcaagtgattctcatgcctcagcctcctgagtagctgggattacaggtgcgggccaccactcccagctaatttttttgtatttttagtacagacagggtttcaccatgttggccaggctggtctcaaactcctgacctcaggtgctccacctgcctcggcctcccaaaatgctgggattacaggtgtgagccacggcgcccgacctacacatactttctctaatgtgctgctattaatgtgactcagtgacagcagttcctaaccctgtgtctttccattcaaattcctggttcctgggtaaaaaggtttgaatagct

SEQ ID NO: 62660 - DNA, 1088 bp, Homo sapiens
tcctggattgaagggattctgggaacaagagacctttgctgcaaaaactgggaaagtcctggacaaactagggtgagctctaaaaagtgctcatatccgtttcttccccaatgacaatggatttatagctgttaatctgtgtcctctaaccttagcccacttgtgacgagtactataacaagtacgtatcaactatttggtgagagggagtaaaccctctctggtatcaggccatatccacccaggctcctgaactgtttaatgacgtgttgactgccatgaacatttcttggttgaaaagggagcagacaagcgttcctgacagaaggctctattttacagctgcctcactgcatgtagccctctgcaactagtcataggtaccaagtrgatgtcatgcaataaaaccggcatccttcactcagcccagctttccctatagctcacctctcagcccactcattggcttttcattctatgagtaaagcgaagtgcacatccgctgtcttgctgtaagactcccaggtatgggaaccctggaagtgaatcacagggtgttgtctgattccagtttatagagtgagtttgaaagtgttcccttctctacaattttctggaacagtttgtgcagacccagcattatttcctccttaaatgtttggtgtaatttaaaagtgaagctgtctgtgtctgtagttttcttcacggggaggtttttgactaaaaatttaatgtatttaaaagacataaggcttttcaggttttctatttgtttttgagtgagttttggaaatttgtgtctttcaaagaatttctttatttcatctaagttttcaaatttattggcataaagttgttgaaaacattccataattatcctcttaatatctgtagatgctgtagtgatgtcacctctctcattcctgatattaggaatttgtgtcttttttttcttatcaggctggttagggtttatcagctttactgatcttctcaaagaaccaacttttcatttattgattttctacatatttttcctatttctattttattgatttctgctctaatcttaattatttcctgacttc

SEQ ID NO: 62661 - DNA, 598 bp, Homo sapiens
aggtcccaggagtgggtgcagagcgcagctaggcaacagcacctccccccgaccccgatcagcccaggttgcggaggatagcatggatatctttttccctaagtttcattcaacattttaaagtcaacaaatacccagctaggcagcactgagtatacaatagaggctgaccaaatcctcgatgaattgaaccacatgagaacttagttctgaagggagccaaaatttgtcaacttaaacaaaaagccagacccccttgggtagaaaacactgatttccttgaaactatatcatttctcctctattcggatcacatgtcaggggtccctgagtgtagagggttagttcttgtcaggaatcaaaactgagacatttgcagtgaatacagcagcagagcacagarttagtgagtaggtttggacttgaccgcaggtgcttttcaacgagagaaaggccaagaagtcagtgttgacagggaaggcaaattccatggagaaaaatgccttgactgattagcaatgtgtgtccctgctcagggaaagaggagtggagccccagggccgtatctgccatctctctggtggaaacagcagcggcc

SEQ ID NO: 62662 - DNA, 1103 bp, Homo sapiens
ttatgttgaggatttggtaaattcattaatttatcttttctcttgcctacgtgcttctgctgcttaactctctcggcactgatgttggcccaacgaccaacctttgggctttggaacagtcacctcaagtttccaggacagggggtgagagatgcagagaagtgtttctggaggagttacttagaagagcggatgtttagggctccggtckcactgtaccaggtctgagccccagattctcaatgcgttgtgtaccaggtctgagccccagattctcaacgcatctgaacacccacgcattgtgtcagagaatttattctggtgtgtgcacttgtgatagctgaaggcctctaaagcatgggtccttgggcaggtcagtcctgtcttgcactggctgctgcctttttctggaacattgttctttttgatatctgcaaggttaacattcttgctcaaatgtcccttctcctggaggcttattcctgatctacgccatttgtacacactgcctcctgagatctgtctgttcttatctctggttcacaaaaaccaaggcatgagaggttaagtaactttcccaaagttacgcagtaggaggtggtaacattgtggtaataaccggtaagaccattacgagggctgagtgagataatctgtttaaagtgattagaacaatgccttgtgtgtggtaagtattcaatatattgcaacaattttttttttttgagttggagtttcactcttgtcgcctaggctggagtgcaatggtgccatctcagttcactgcaacctccgcctccctggttcaagcaatcctactgcctcagcctcccacgtagctgggattacaggcatgcaccaccacgcccagctaatttatttgtatttttagtagagacaccgtttcaccatgttggtcaggctggtcttgaaggctggtcctgaactcctgacctcaggtgatccacccgctttggcctcccaaagtgctgggattacagtagtgagccaccatgcctggccacattataacactttttacatgacaaacagactgttccttggttctctggttgctgagaaacaaccactctcataaatgc

SEQ ID NO: 62663 - DNA, 644 bp, Homo sapiens
gtatctaaattgttccagtctgaggaagtatgggtgtatgcgtgagtgtgtcccatgatgggatggcatcctggccaggttgggttcctgccttgcaccttgagctgcgggacaggctccagccacctgtgaccctgaattggaataactggttaagtaattgtcttacttgttttttatgaatcttttttacatgtacttgactcttgtttatatcaattaacctatggtaaaattagtttctttatatgtaattttgcttaaagtaacagtttcaaaaaacctgttgtacatactttttgagtaagtgaatgaatacytaccttttttggtacatcttcggtgatttatcatagaaattcatatctagagactgttttaaaagtgaattttatatccctaaatgaaactgtcttagccttaatggcctatcatttcaaagagttttagtacttagcaaccatttaatgtatggattattgacctattcactcatatcgcagatgctttgagctgtccaagtctgccaacagaaatctgttttacagacttcaaggtaaatgacttagtagtctttaatgattgctgttatggatggctgtgcccttaattgatagcttagcagattaacagctcgctggatg

SEQ ID NO: 62664 - DNA, 618 bp, Homo sapiens
gtgtcagggaccatccatggccaatcagctttggtggggctttgggagccatctgataacaaaatgtgtctgttccttgagcaaggactgtagacctggaagattgccgtggatgggactgtaagcagcacacttccactagaagttaccttgctagtctcagtgtctaacacataagaggtcctcaataaataaatatctgttgaataaatgactgacaataratggagtggctttgttttatgattagaagcgtgtatgtttgtatgtgtgagataaatattctcacgtttgagactaaagtaggagtgtccaatcttttgacttttctggaccacactggaagaagaataattgtcttggctcacatataaaatatattattactgatgagatttaaaaaattacaaaaaaaatctcataatgtttcgttaaagtttatgaatatgtgttgggccacattcaaagctgtcttgggctgaatgtggctcacaggtcatggtttggataagcttggactaaagcaagtccacctacatgttttttaattattgtaattggaaaactaaatgaggtagagctcttgtgctcaagcagcatctgatagaaaaataacga

SEQ ID NO: 62665 - DNA, 670 bp, Homo sapiens
agtgttagattgagataatatcatttatgggggaggggcactttgtgaagtgggccccatttctcttgtcctttcgtactgggagaaatgtagaacagatagaaactgacctggactgctccagtctgaactcagatcacgtaccgcccatccgctgcacctgtataaagcccttacgtttttttctggttcttggtaaagtgatttaagttggactcttattaatctcattttacaaatgaggaaactgaaccaaggagatagyaagcaatttgcccagggttcctatttcttgggaagggggctaaactggggttcatactgaggtctgtgtactggaaagccaatgtgcttttcattatgtcatgatgacactctaaaaacacaagtgaaaaaatacagctcagttatgaagaaataacttttattttctttctacaatgtcacctataggtagggatgtaagttttttagaggtgggaacaaattgaagtcttgctattatggaaatacgtataaaaaggtagagtatggcaaatccctcctaggtactaagtcgaagtgtttgcatatttatctttatatggtagtgttttatgccaacctggtacaaagtacatgctccgtagatgttcactcaattggcttgaatttttttcttctagttccc

SEQ ID NO: 62666 - DNA, 687 bp, Homo sapiens
aagatggaaataactgtatgataaacatatagacatgtttatttctcaaaaatatgagtttgttatagattccttaaaaaattgcctggttatcaatttttaaaaataaattacgcattatttatgtgtttgcttttctgctggtaacaatatttatgtaacaaacaraaaaataaaaaacaaaaaaaagaaaaacccacagtgcaaacataaacctttgatgaggcttggaattctttctacttttaatctgcataacatttgcctccccttcattggctcaattatggatttgaaagactgattctcaaaaggtgatcctgtatgctttgcctcccagtagaaattttgccaaagagtgctggattatgccttatgttgtagagttgcatactttaacattaatgtataaaaaggtaatttttattaacttagcaaagtagaaacattgaccattgattatgaaacatggttactatttttaaattaacaaacttaagaaaacattaaaagatgttaataaaaacctaagtagcgttttgtaccttccttgatgatccttagctgttgtcaatcaaactgcatctctagtctatttttagtctggaaagaaactgcttatctttaacttgcccaaagactcttctggggcttttccactatgctgaaattttaataacatctcta

SEQ ID NO: 62667 - DNA, 687 bp, Homo sapiens
aagatggaaataactgtatgataaacatatagacatgtttatttctcaaaaatatgagtttgttatagattccttaaaaaattgcctggttatcaatttttaaaaataaattacgcattatttatgtgtttgcttttctgctggtaacaatatttatgtaacaaacaaaaaaataaaaaacaaaaaaaagaaaaacccacagtgcaaacataaacctttgatgaggcttggaattctttctacttttaatctgcataacatttgcctccccttcattggctcaattatggatttgaaagactgattctcaaaaggtgatcctgtatgctttgcctcccagtagaaattttgccaaasagtgctggattatgccttatgttgtagagttgcatactttaacattaatgtataaaaaggtaatttttattaacttagcaaagtagaaacattgaccattgattatgaaacatggttactatttttaaattaacaaacttaagaaaacattaaaagatgttaataaaaacctaagtagcgttttgtaccttccttgatgatccttagctgttgtcaatcaaactgcatctctagtctatttttagtctggaaagaaactgcttatctttaacttgcccaaagactcttctggggcttttccactatgctgaaattttaataacatctcta

SEQ ID NO: 62668 - DNA, 1892 bp, Homo sapiens
tggctagatgcttacatgtatgagaataacagataaaaagagttgcaatttaactttgagaccagactaattttgagagactgagtcctgaagtactttttttcagtcacaaaagcttcagaagggcagaagaaaggcttgactcagtaacccaggaatgtagcagctgatgttcgaggacaagctggtgtatgcaggagcaccagatgtcccgacagaagaaagcggatgccacagattgggaagagctgtggcaggggagagagccaactcagatttcttcttctgactaattctgattttctgattaatgaatgcttataataaaaaaatcatcatcacagaaaggggaaatacatctacaatacccatgattatactgcaccgaacatcactttaagttttgaagtataattctttgggtattttctctttctgaaaaattctgcttatgccatcattttcataatttttttcaaatagtaaaatgttaaagacacttctataagaccagacataatactctttgcctttctttctactctctctctccacacacacacacacacacacacacacagagagagacagagagagagagacagagagagagagagagagagagaatgtcctaggtactgagctgtgtgctaatttttaataagagcaattttgtgtcagtcttatcacagaattcctcagctgtcagggatagccagagttcatcagcaagcccttctgtgctaggaaggtctcaagtttgcatccacaataatcccacaaagcatacattgcagtatctgtatcactctctgcttctcatcttggaaaactgagcaaggttaaaaataccttcactccaaatgatgttagctgcaaagcagatccaaccatagctctgccccccactcggtcctagccagctgtgaaagggcctaatgagcaggctctgggagagagctgctgggggcgtgtggctggagtcctccacgtccatccactagccgatggtcatcagcaggttggaggaaggtaattgcccttgcaacttcttttagcagccacagtaaaggtcctgcataaatacccaggtctggatgcaggaatagaattgccacactgcaaaagtcaagtgagtttatcaactgggtcagcttctgtctttccctatgggatccaggagatattaataaatttgagaaattattaggtaccaaatgtccaatgggccttccctcaagtctgtatcagcccacctatgttttccagtgtggaatcccactcctcactaactgcatcctctacaggcagccttggaggataccctgtgctcctgcagcaggtcyactccctagctccactcttgatgcacatgttgtgagatgtccccaacaaccgatgggcatttcttaggagggttgaaggatatacattttcttttaggcttgataccatatgtggatatggttcttactagtccgtggacatgcatttatttatcatccacttaattccctgtttaaagagatttatagaatgcttcacaggtacttatgaagtacttcagggaacacagagagctataggacatggtctttcccctgaagaagcctccattctggaggtataaaacagagacatactaaacatatcagtagccaaggaagaatatgattgaacatcatatttgatggaaactgaaggggtctgaagggctatatgtcacctttgataaattgatgaaaatgatctggctggcctggagtagggggaaggagagaggtatattcctcaaacagaactgagcaaagaacacgctaggtccatgagacaatgaagaaactggacaagtccagggaagaaaggtatgttggctgctatctacatgtggc

SEQ ID NO: 62669 - DNA, 1892 bp, Homo sapiens
tggctagatgcttacatgtatgagaataacagataaaaagagttgcaatttaactttgagaccagactaattttgagagactgagtcctgaagtactttttttcagtcacaaaagcttcagaagggcagaagaaaggcttgactcagtaacccaggaatgtagcagctgatgttcgaggacaagctggtgtatgcaggagcaccagatgtcccgacagaagaaagcggatgccacagattgggaagagctgtggcaggggagagagccaactcagatttcttcttctgactaattctgattttctgattaatgaatgcttataataaaaaaatcatcatcacagaaaggggaaatacatctacaatacccatgattatactgcaccgaacatcactttaagttttgaagtataattctttgggtattttctctttctgaaaaattctgcttatgccatcattttcataatttttttcaaatagtaaaatgttaaagacacttctataagaccagacataatactctttgcctttctttctactctctctctccacacacacacacacacacacacacacagagagagacagagagagagagacagagagagagagagagagagagaatgtcctaggtactgagctgtgtgctaatttttaataagagcaattttgtgtcagtcttatcacagaattcctcagctgtcagggatagccagagttcatcagcaagcccttctgtgctaggaaggtctcaagtttgcatccacaataatcccacaaagcatacattgcagtatctgtatcactctctgcttctcatcttggaaaactgagcaaggttaaaaataccttcactccaaatgatgttagctgcaaagcagatccaaccatagctctgccccccactcggtcctagccagctgtgaaagggcctaatgagcaggctctgggagagagctgctgggggcgtgtggctggagtcctccacgtccatccactagccgatggtcatcagcaggttggaggaaggtaattgcccttgcaacttcttttagcagccacagtaaaggtcctgcataaatacccaggtctggatgcaggaatagaattgccacactgcaaaagtcaagtgagtttatcaactgggtcagcttctgtctttccctatgggatccaggagatattaataaatttgagaaattattaggtaccaaatgtccaatgggccttccctcaagtctgtatcagcccacctatgttttccagtgtggaatcccactcctcactaactgcatcctctacaggcagccttggaggataccctgtgctcctgcagcaggtctactccctagctccactcttgatgcacatgttgtgagatgtccccaacaaccgatgggcatttcttaggagggttgaaggatatacattttcttttaggcttgataccatatgtggatatggttcttactagtccrtggacatgcatttatttatcatccacttaattccctgtttaaagagatttatagaatgcttcacaggtacttatgaagtacttcagggaacacagagagctataggacatggtctttcccctgaagaagcctccattctggaggtataaaacagagacatactaaacatatcagtagccaaggaagaatatgattgaacatcatatttgatggaaactgaaggggtctgaagggctatatgtcacctttgataaattgatgaaaatgatctggctggcctggagtagggggaaggagagaggtatattcctcaaacagaactgagcaaagaacacgctaggtccatgagacaatgaagaaactggacaagtccagggaagaaaggtatgttggctgctatctacatgtggc

SEQ ID NO: 62670 - DNA, 721 bp, Homo sapiens
catgggctctggggtcagaggaaattaacacaacagcagcaagactcgctatgtgtcagtcactaccctaagcatttcacctacttacttttctcagcagccccactttacagatgaggaaactgaggcttagggattcttttttttctggagacaaagtctcgctctgttgcccagactggagtgcagtggcatgatctcggctcactgcaacccccgcctcccaggttcaagcaattatcctrcctcagcctcccgagtagttgggaagacaggtgcacatcaccatgctctgctaatttttgtatttttagtccagacagggtttcacatgttgaccaggctggtcttgaactcctgggctcaaataatctgcctgtcttggcctcccaaagtgctgggattacaggcgtgagccaccattcctggcccagccttcttgaatttgaattccaaatctgctagtttcttttttctttctttctttctttccttctttctttctttctttctttcctttcttcctttcttccttcctttctttcttccttccttcctttctttcttcctttccttcttcctttcctccttcctttcttcctttcctccttccttccttcctttctttctctttctttcctttctttctttcttcctttctttcctttctttcttctttccttcctttcttcctttcttccttttcttcctttctttcttt

SEQ ID NO: 62671 - DNA, 604 bp, Homo sapiens
gatcagttggaggttttattaagttttagaagtgaaataagtcgtggctagtgagtatttaaaggcaggattcctgagcagataaaatttaggctcattgtaatctgcaggtaaactttttaaaaagtgagattctgtccatgtattccatcactcaacaaatatttattctccatgtgtttgatactgcagtaggtcctacggaggtaaaatagtcaaccagctgtcttgatcttccttgacctcactttagctattggcacattttcctttttcatttttagatggtcttctttagtttctatatttctgaamcattttgttcctctcgcgtttacattgattcattctttattgtttttattggttttcctttttattttaccctaatatcaattcttgactctgtatttttttttctagcctctgaatcatactgccctctattttcagtattcttagctcttacttctcaacccagtttcagctcctttttatccaaatgtacagaacatctcttgtctttggattccctcagctttagcatgttgtagactaaactgatcattttcctttctaagtcaatatatttccaaatctccta

SEQ ID NO: 62672 - DNA, 597 bp, Homo sapiens
ggayaatttggggatgacttacacaatttgatggggaaaaaatgtgattcaaaggagcaccccattagctcatttctcacccagctgtatttttctttcctgactctttattgtatttgtattcttttttgactgtctttttactcactggccactccttctcaatcatattgattctccttatctctccagcctctaaatactggagtgtcccaaggcacagacatctttttttaatccttagggtatgtcttccagtctattggttttaaataccaaacatatactaacaattccctagtttatatatttagtccacacatcgcccaagctccacactcataaacttaactgcctattcaacgtctccattcagatgtctaacagacatattaaactcattgtgtcgataacttgagttcttatctccacccccaaaaccaacatgtccttccttcttccccaccttagttagctgctactcacttactttcaggcaacaggtttcctgagcactttcagttactcaggacaacacttggaattcatctttggctcctgtccttttcgataccttgcattgctacctccattagc

SEQ ID NO: 62673 - DNA, 756 bp, Homo sapiens
tttcttatcctcccatggcttgcagcgttctctcttataaccctcactaaactatttgtttatttaattgctttcccactaagaacatgagttccttgaggacagagattcttatygctgtatctacagggcatagcagagtgaaatagtcaatgattttttgagtgaataactgtattataatttttttaaaaaaggaactataaccatctaagtccatcttataaccatctaagttatagttttctatcagtattggacaaaactgaaattgggctttaagtctttgagaactttgtacaccctgttaataaatactaagaagaaatgtttgcaatgagcatacactttgttaggtggcaaatagtttcactttcagtgtttcgtggactaagcattccctttgcttataaaactttgcaaaaattatgcatgttctgcgtgctaggtgctagaattcagccagacaaagggtgtgtaccaggccctgctgaattagcatctttgtatggtaatgaagcgtgaagagtggccttttgctgtttctttgtgactctgttccttcctgctggtgcttccagtggcatttccttcagggaattctattaggaagtagattcttcaggagatggattgagctgggagggagccagaggctcagaggtgagtgtatagggcaggcctagaagaggcacagagagtgaagttgtgtaacatacaaagtactaaactccacgaactcccttaaggaactct

SEQ ID NO: 62674 - DNA, 756 bp, Homo sapiens
tttcttatcctcccatggcttgcagcgttctctcttataaccctcactaaactatttgtttatttaattgctttcccactaagaacatgagttccttgaggacagagattcttattgctgtatctacagggcatagcagagtgaaatagtcaatgattttttgagtgaataactgtattataatttttttaaaaaaggaactataaccatctaagtccatcttataaccatctaagttatagttttctatcagyattggacaaaactgaaattgggctttaagtctttgagaactttgtacaccctgttaataaatactaagaagaaatgtttgcaatgagcatacactttgttaggtggcaaatagtttcactttcagtgtttcgtggactaagcattccctttgcttataaaactttgcaaaaattatgcatgttctgcgtgctaggtgctagaattcagccagacaaagggtgtgtaccaggccctgctgaattagcatctttgtatggtaatgaagcgtgaagagtggccttttgctgtttctttgtgactctgttccttcctgctggtgcttccagtggcatttccttcagggaattctattaggaagtagattcttcaggagatggattgagctgggagggagccagaggctcagaggtgagtgtatagggcaggcctagaagaggcacagagagtgaagttgtgtaacatacaaagtactaaactccacgaactcccttaaggaactct

SEQ ID NO: 62675 - DNA, 833 bp, Homo sapiens
cgggatccgggaaatgttgattacatgtagttgtctgcaattgaacggtagtgggggttgaggtgggtggccggacctgatggccagaaagattaaggctaaatgcatctgaagaaaagcagagccagagtctgtctctggtggcaagtgtgtcccaggtgacctgcctagagataccactaatcaggaggagaagccaagggggcctgtcaaagggggtgttcttatgaggataattgtttgttgaagtactgtcagaaacagatatgtcaggagatgggaactaaaacactacaggtatgagtgagtgatcagatcttataatgagaggggctaggccttctctaaggaaggctgagagatgagtgaggcttagcaagggagaggaaagcaatagacccagctgtgaaagtgtaaagcaggatctttcagagtcaggcctagaacactgggtgtgattagctagttctcttttagttgaaaattacagaaactgattctggatagcttcaagagagatacaaaagaggttagggagtcagttactgaaaggataactgatatatcttgtagaatcagaggactgagatacttgccaaggataaactagaatcagagatgaatcagtagggygactatagcttacaataatctattttacacttcaaaatagctagaagagaataattcaaatgtttctagcataaagaaaagacaactagcctgggcgacagagcaagactcagtctcaaaaaaaaaaaaaaaaaaaagaaaagacaaatatttaaggcaatgaatatcccaagtatactgatttgatcttcactaattat

SEQ ID NO: 62676 - DNA, 732 bp, Homo sapiens
ggatcctcccactgagtctcccgagtagctgggactacatgtatatgccaccatgcccagccaatttttgtactttttgtagagacgaggtctcattwtgttcccaaggctggtctcgaaatcctgagcccaagcaatcctcccacctgggcctcccaaagtgctaggattatgggcatgagccgccacacctggccattataaaagtcttcagtcttgttgtcttcacgttgagtagactgtggaggaggaggaagaggaggtcttgctgtctcaggggtggcagaggcagaagaaaatctacgtattactggacccacgcagctcaacctcatgttgttcaagggtcaattgtattaatttactcttgtgatccttctagtttggtcttcatttctgaagtgacttctttcttttgtttctcattcttgcctgtgatttgccataagtctttgagtattttttacattctcatttgtgttgtccttgcatcattttcttaatgtcttttcagttattttggaatatagtgcattatagttatactctttcgtgggcatatcttactggtatactttcactgtctatagagaagttgtctgtaccttattctcttcgttcttatgatgattttgtgtgggttttgccctcaatatttttatgatgtttattttaacgcaatcatagttttcctgggatttgtgaaggagacctggttcaggttagcttttc

SEQ ID NO: 62677 - DNA, 732 bp, Homo sapiens
ggatcctcccactgagtctcccgagtagctgggactacatgtatatgccaccatgcccagccaatttttgtactttttgtagagacgaggtctcattatgttcccaaggctggtctcgaaatcctgagcccaagcaatcctcccacstgggcctcccaaagtgctaggattatgggcatgagccgccacacctggccattataaaagtcttcagtcttgttgtcttcacgttgagtagactgtggaggaggaggaagaggaggtcttgctgtctcaggggtggcagaggcagaagaaaatctacgtattactggacccacgcagctcaacctcatgttgttcaagggtcaattgtattaatttactcttgtgatccttctagtttggtcttcatttctgaagtgacttctttcttttgtttctcattcttgcctgtgatttgccataagtctttgagtattttttacattctcatttgtgttgtccttgcatcattttcttaatgtcttttcagttattttggaatatagtgcattatagttatactctttcgtgggcatatcttactggtatactttcactgtctatagagaagttgtctgtaccttattctcttcgttcttatgatgattttgtgtgggttttgccctcaatatttttatgatgtttattttaacgcaatcatagttttcctgggatttgtgaaggagacctggttcaggttagcttttc

SEQ ID NO: 62678 - DNA, 732 bp, Homo sapiens
ggatcctcccactgagtctcccgagtagctgggactacatgtatatgccaccatgcccagccaatttttgtactttttgtagagacgaggtctcattatgttcccaaggctggtctcgaaatcctgagcccaagcaatcctcccacctgggcctcccaaagtgctaggattatgggcatgagccgccacacctggccattataaaagtcttcagtcttgttgtcttcacgttgagtagactgtggaggaggaggaagaggaggtcttgctgtctcaggggtggcagaggcagaagaaaatctacrtattactggacccacgcagctcaacctcatgttgttcaagggtcaattgtattaatttactcttgtgatccttctagtttggtcttcatttctgaagtgacttctttcttttgtttctcattcttgcctgtgatttgccataagtctttgagtattttttacattctcatttgtgttgtccttgcatcattttcttaatgtcttttcagttattttggaatatagtgcattatagttatactctttcgtgggcatatcttactggtatactttcactgtctatagagaagttgtctgtaccttattctcttcgttcttatgatgattttgtgtgggttttgccctcaatatttttatgatgtttattttaacgcaatcatagttttcctgggatttgtgaaggagacctggttcaggttagcttttc

SEQ ID NO: 62679 - DNA, 1130 bp, Homo sapiens
gcttctctatcttggacctttcagaaatcacacacacccaatcaccttgaaactacctgcccatacaggtgaaataaggayatgccagaggagttcacagcattcacctgtagtctctgtacttgcttccacctgactctacttcccctgtgggccctgcttctcagttatgtttctgtttctacatcaaatctgtataactctcctgaatcttgcacatcatttcccctgcctaggggttttcaggaatgtattctggatctttttatcttctgcctctgagtctaacccctgacaaatccacctgtgctcagcaaagatacggtttggtcacaccaggccaggtagctcagagaacaatggaggtctgagcatgttctgtgtaattctctccaatactcactgtggatagattcagacaatggctttggctcacgtttgtcctttacgtgtttttggtcagctttatttttgaaaaaaaatattgctcacaggagcaatttgtgatcgttagtgtgagagaactcttctaagacctttttgtgttaggagaaattacctagttgggattgttgagctcactgactggccatgggacttggtcatttgaatgggttagctgtcgactgatgacacctgctctttagaaactcagcaacataggccttatattgtgggatttcattaattatttcttttcttctttttttgagtcaaatcatttgtgttagaaatagtaagaggtgagatgctagaaatgaagagataaattggatttgatcgcctgtacttgatttgctcacagttattggcagaggagacacacatactgtaaatagctataccacaatactatgttgttagtattgtacaatgacagtgcagaggggggagtaatcatttttggctactggaaagaaggaatctttatggaaggagatactgccttttctccgcaggaatggccagacttttgagagaataacaatatctaagcataacacaagaaatatgtgttaattaagaggaggcaaatgtgtcacatttcttatttaaccacaatgaagattttgataatattaatagtattaataacaaatatctattgaatagtttctgtatgccaacca

SEQ ID NO: 62680 - DNA, 1130 bp, Homo sapiens
gcttctctatcttggacctttcagaaatcacacacacccaatcaccttgaaactacctgcccatacaggtgaaataaggacatgccagaggagttcacagcattcacctgtagtctctgtacttgcttccacctgactctacttcccctgtgggccctgcttctcagttatgtttctgtttctacatcaaatctgtataactctcctgaatcttgcacatcatttcccctgcctaggggttttcaggaatgtattctggatctttttatcttctgcctctgagtctaacccctgacaaatccacctgtgctcagcaaagatacggtttggtcacaccaggccaggtagctcagagaacaatggaggtctgagcatgttctgtgtaattctctccaatactcactgtggatagattcagacaatggctttggctcacgtttgtcctttaygtgtttttggtcagctttatttttgaaaaaaaatattgctcacaggagcaatttgtgatcgttagtgtgagagaactcttctaagacctttttgtgttaggagaaattacctagttgggattgttgagctcactgactggccatgggacttggtcatttgaatgggttagctgtcgactgatgacacctgctctttagaaactcagcaacataggccttatattgtgggatttcattaattatttcttttcttctttttttgagtcaaatcatttgtgttagaaatagtaagaggtgagatgctagaaatgaagagataaattggatttgatcgcctgtacttgatttgctcacagttattggcagaggagacacacatactgtaaatagctataccacaatactatgttgttagtattgtacaatgacagtgcagaggggggagtaatcatttttggctactggaaagaaggaatctttatggaaggagatactgccttttctccgcaggaatggccagacttttgagagaataacaatatctaagcataacacaagaaatatgtgttaattaagaggaggcaaatgtgtcacatttcttatttaaccacaatgaagattttgataatattaatagtattaataacaaatatctattgaatagtttctgtatgccaacca

SEQ ID NO: 62681 - DNA, 2539 bp, Homo sapiens
tttttaatcgtttgtttttatttgaactgccaactattttccattaaaatacagattattggcttatcttgagaagttacaatgtctggttacactggaccgcatttccacatggcagctgcaggttggaactgagtagctgcattcacaattagatggaccatgggctttccaggttgctgtggccccagcaccctgcattgcttcactgaccacttgacatttacattattattcccagccctacatctagatgaaggcattgacaattatgactcctatcgtagggtcagtgacgtgaagtagggtatccaggagccccttacctatgtaaccagtttttaacgctgtattcccccaactttatttccttcattctgcatccttggtgccctactcttgatgcctctgccccttctagattttccccccaggagtcccatcgagcatttgggtttctaccttcccagccctcctccttccaactcctggtcccataaaacccttgaaggtgttaagactgcctgtggatgcagttcataagagaaggcactgaggcccaggtgagagtcagaaaggtaatggaggccagttttaacatggcctaagcaggagacaagaggacaagaccagcgaggagccagggtttcagtgggtcatgcagccaagaagaatgaaaatcaaagccctggttctggggatgggactggagaaaacactaggctagtacaacaaaagggaagggttctatagtctgtgaaatgagtaggatctggatatggtgtttggttgggtgaaggatgtattttgmaggtagtgattcctgtgcactggatcccttttgtgcacaggctggtgttcaacttaagcaggttgcttttcaccaattgccactgggccaccccccttagccatggtttctaggaacatatttagacatacaaggggttgcttatgattccctggaaagccctatgctcttatatctgtacattatacctactgtttctctcatatgcccctctctgtctttgctcaggcaacaaaatgcctcagatctcattttgttcaaaactacctaggctgggctgggggcggtggctcatacctctaatcccagcactttgggaggccgaggtgggcagatcacgaggtcaggagatcgagaccatcctggctaacacagtgaaaccccgtctctactaaaaatacaaacaattagctgggcatggtggcaggcgcctgtagtcccagctactcgggaggctgaggcaggagaatggcgtgaacccaggagatggagcttgcagtgagccgagatcacgccactgcactccagcctgggcgacagagcgagactctgtctcaaaaaaacaaaaaaagacaaaacaaaacaaaacaaaaaactacctaggctgaacaaggtacttctcctctgtgctctctcagcccccaaggaaagtattcatcatagtcttatcttatctcttatttgtctctactaagccaaaagctccttgagaacaagaagagggttttattaaattctgtatcttctacacctaccatgttacaagtgctaaaaaaaaaatgtctaaaatgcttctgaaatcattggtaccccacagatgcaagttggtactagcatccattcacaagagagttccaggagaccagacaccttaccctgacacacagggctgagatcacctgggtgagctcacaatatctgaccatctcctcagcatcttcatctgctaggactccctttctaatcactttaattactttattgcaggtttcatcaggatgataacatgagggagtacaaagagacagccgagccccctgagttattgtgcagagatgggaacagtgtctcattagtcatggaaatttgaggacagacaaaggttttcagaatcagctgtcatcattgctcataagttacaaagagaacattcagagacaggaacgtggtctggacagaaaacaatggtgggtgggaggaaggtagagggctgtccgtcagtggagaagtgggcatccggcacacctgcattccaaaggtggaggactgcagggagggttcatgggtcaaagctatggactgtggaaagtggatttacctgactggctctggacctctcttcttccctccaatgaggccacttgatttccttccctgtgtcctaagggaaatttagggatccacagaaactgtggacactgagacaactgactatcagcccactgtgaccctgggctctgatccacactaggctttagacttatcccagagtagaactcacagcgtaaaccaagttttagccctggaaattgaggcaataccctatacctaatccctgctttgttgacttactcactcgattctctaatgcagtggttctcaatcctggatgcacattagagtcatctgagggcttttaaacataccaacgcctagacttcaccccagaccaaatgaatcagaatttctggggatatgacttgtgcatagattttttaaagctcccca

SEQ ID NO: 62682 - DNA, 1568 bp, Homo sapiens
  misc_feature (1)...(1568): n = A,T,C or G
accatagcccagcatggaagagacagaaccaagtcttcctgttcctggtgttctcaccactgcagcacatggacatgacatttgttggggagtgaaaatcagaacagaaaaggaaagccacaaaatgcaacaaacgttggttattgaattaagctagtttctctcttttttacagataattcagccaaattgattaatgtgcataggtcccaccagcatctcctgcatgtcaaactctgcccaggatctgagcaagaaaggaaactcatgagaagtcattccccaaggctgtcgggtacatgtggcacacttcttctaaagggcagggaagccacagatttggaactggtgtggtcttggtggccccaaatgcctccccaccatgaacaggaaggatttggaagtgacatcatcatgctgacatttggaagccattaggcacttctcattggctgggttgccagccaatacactccctgtcctggcctggcatttgatccaatacctaagttgacctggctagagactatagggttgctaccaagccaagccaatcccaacctggttcccagaattccttgggcttgcttgtcttgcaggtcctaatgtttttgcattaaatctatttagagtaaatcatttatccaatctaattttccccatctgcaaaggcctgaagctcaaattatttctctaatcagactgtttcattactaactttattttattaaatttttattaatgtacctgggatcctatagaacttttcctcttttctctatcacttgaagaaaatataaagttgagaattttagagaattaggcccatacttgccctgagtgatgcattatgggagtatcaggaggatggttctggggatgggaagaaaatatagcacttgaagggagtcttaaagtgatcaagaggcattagccgaatggatcaaagatactacacagttaataacaatggttgttattatatgagtgcctgctggctctagtacagttctgagagatttagtgtaaaataatggttattagaacaaaccctggaatcaaagtgtctgagttcaaatcccagatcagccagttattattgagggaccttgggcactgagacattgtccttttctccaagatgattttcttagagaactcttagttcaattcccaacacattggcgaatgcccaataaatgtcagctattgctatcattatctcttttcctcccacctgctaaagtagataatattatctacattatacaagtgaaaaaaattaagactcagagaaactaaataactarattacatggctagaaaatggtagctctaggaagccagctttccttgaccttgaactcaagtctttcagactcagaatctggcattctttccacaatgtttcactttctctacttccttctctatttgagactggagaaaggccaaaacattagtctattataactntcatcattttcaacatcttctgcaatacagtttcctgacagtcctttgatttccagaatctctagctctcattatacttgtaactctntagg

SEQ ID NO: 62683 - DNA, 1568 bp, Homo sapiens
  misc_feature (1)...(1568): n = A,T,C or G
accatagcccagcatggaagagacagaaccaagtcttcctgttcctggtgttctcaccactgcagcacatggacatgacatttgttggggagtgaaaatcagaacagaaaaggaaagccacaaaatgcaacaaacgttggttattgaattaagctagtttctctcttttttacagataattcagccaaattgattaatgtgcataggtcccaccagcatctcctgcatgtcaaactctgcccaggatctgagcaagaaaggaaactcatgagaagtcattccccaaggctgtcgggtacatgtggcacacttcttctaaagggcagggaagccacagatttggaactggtgtggtcttggtggccccaaatgcctccccaccatgaacaggaaggatttggaagtgacatcatcatgctgacatttggaagccattaggcacttctcattggctgggttgccagccaatacactccctgtcctggcctggcatttgatccaatacctaagttgacctggctagagactatagggttgctaccaagccaagccaatcccaacctggttcccagaattccttgggcttgcttgtcttgcaggtcctaatgtttttgcattaaatctatttagagtaaatcatttatccaatctaattttccccatctgcaaaggcctgaagctcaaattatttctctaatcagactgtttcattactaactttattttattaaatttttattaatgtacctgggatcctatagaacttttcctcttttctctatcacttgaagaaaatataaagttgagaattttagagaattaggcccatacttgccctgagtgatgcattatgggagtatcaggaggatggttctggggatgggaagaaaatatagcacttgaagggagtcttaaagtgatcaagaggcattagccgaatggatcaaagatactacacagttaataacaatggttgttattatatgagtgcctgctggctctagtacagttctgagagatttagtgtaaaataatggttattagaacaaaccctggaatcaaagtgtctgagttcaaatcccagatcagccagttattattgagggaccttgggcactgagacattgtccttttctccaagatgattttcttagagaactcttagttcaattcccaacacattggcgaatgcccaataaatgtcagctattgctatcattatctcttttcctcccacctgctaaagtagataatattatctacattatacaagtgaaaaaaattaagactcagagaaactaaataactaaattacatggctagaaaatggtagmtctaggaagccagctttccttgaccttgaactcaagtctttcagactcagaatctggcattctttccacaatgtttcactttctctacttccttctctatttgagactggagaaaggccaaaacattagtctattataactntcatcattttcaacatcttctgcaatacagtttcctgacagtcctttgatttccagaatctctagctctcattatacttgtaactctntagg

SEQ ID NO: 62684 - DNA, 695 bp, Homo sapiens
gggacaagaggctcattctcatccacatgcccattttatatatgctaactagtaacagcggaaagtgtaataactttgggtcttgggtcttagggaaatggacagaaaatgattaatgaatggaaaatgagtttccaagttctaccttcaataggatgtgtgagcataatatactcttgcctgatttgggcttccctatctctctgaatcatgctggtgctactgctgacgtagcactcttattccttcatccatccatcatgtattcatcaaacgtttatggaatctagtagaagtcaggcaatgatccactgggctaacacagcaatataaggttcaacatgatttcctgtcctctttctgttgctttcaccctccttaatacaagggagtctgttcaatactaaagaggacattttctgccttcacttaacatatatttgaggaaccaaattactttaacaataaagatacataactttcatggaatacttcagatatacaaggctgagcatttaaatacactctcttatttattttaagaatatgctggccttttcccatcatattcccattttacagtgaggaaagctaagctggaaaacagttaagtagcttgtgcaagctctcattactgagatgytgcagctgagggctgaacccagttctctctaaaatcagtcaggctcctaacc

SEQ ID NO: 62685 - DNA, 1144 bp, Homo sapiens
ggaacaatttttggaaaagctcaatcttatgcaagctgatctctgaaaataagaacacctgcaatatttctgtttgagtttgtgtgtgttgttagatttttttgtgccttcagatattttctttctgtgagcctgtgcccttgtcccaagaagtcccctgractggtaattccctgatctgtctactgatatgaactgcatccttgttttataaggtggagggcgttgagtgataatgtactactataaaaaaaaaaaaaacaaacccggacaggtttgtttttgtaactgtcagcaatgtttggcctattttgagaatgtaggacagggttaaggattagtaccagcattctcctttctgtgtatcagagctgcttagcagtaattaatcaggacattaggttttgtactcttggttcaggtcatttgcctatgagctgctccagccttttacaaaggaatactgcatatgtttctgggtacctttttgagagaagatttaaattggccagatgaataatactttgttacaagtgttttgccctaggcaaaaaggttttcttcatattatcatagcctgaagctgcaatccccaagcttgatgtgactggtgttatactgtcacatggcaatgatgtaagaacaggcctctctgtgtcaggcaaatctggatttaggggaattatagcagatgttgcaaaatggcaacagtttagcaagttccttttatcccactgttgggaggcaggactactaagtgtaccagacagaaaagaatgttttctttgatcccttacactctagggtagggacttccccagttagagaacatcgttaatgatatagttatacagtcactgatggatcagaatacagaattaagagctggcttttttttttttcttttcttttcttttccttttttttttttttttagcatttgttttgattgagcttagtatttatggtcattaaattataagcttcagaaactctctaaggctttattcttagtaaagaaagctttattcagtagaagaaacagtaacaataacaacaactaacctccacaaaaaatattttaattttggcaacccaatcgactcaaacctattatgtacacctaagttgcatggatcctaag

SEQ ID NO: 62686 - DNA, 752 bp, Homo sapiens
tgcatttaatgttatgtatcaaatggttattgagccctaccatgtggatggctctgtgctaggccctgtaggggatgccagaaatctcaycggtatttgtcaatgtttccctgtagaaaatggccaataaacgcattttcaaaattttctgagaatggctagagaaagaagaggtgggtggatccaggttttagtggatgtgaaaaaatttgagagcctctttaggaaaaattgctgtccccaccaaccttggaaggcacctgtgtaagttacaggccccaaagcttcacctttattagcttcagggcgaatctgcttctggccaggacagctgtcctcaggggcatctgctgtcctccttacatgctcaggagccctggttccttgctcttcagagacacaaacttcatgatttcaaaatattatcattttgcaacttggcttggtaactcagagagtggccaggggcaattgcagactacacaataggcatggtttgatttgtgtctgaaacattagcaaacggatcatgtgagactgggtggtgctcaggtggacatgtatgataccctgtagtgtactttgcaatatattgtggtgcaacactgcacataggccctgtttgtttgctacagctccttaggccatttccaggatcccttcacccagtgactctggctcttggcaatcgggaatggcattgttgaaaactttccattgtgaaattctgtgtttgtaaagtgcacagaagc

SEQ ID NO: 62687 - DNA, 752 bp, Homo sapiens
tgcatttaatgttatgtatcaaatggttattgagccctaccatgtggatggctctgtgctaggccctgtaggggatgccagaaatctcaccggtatttgtcaatgtttccctgtagaaaatggccaataaacgcattttcaaaattttctgagaatggctagagaaagaagaggtgggtggatccaggttttagtggatgtgaaaaaatttgagagcctctttaggaaaaattgctgtccccaccaaccttggaaggcacctgtgtaagttacaggccccaaagcttcacctttattagcttcagggcgaatctgcttctggccaggacagctgtcctcaggggcatctgctgtcctccttacatgctcaggagccctggttccttgctcttcagagacacaaacttcaygatttcaaaatattatcattttgcaacttggcttggtaactcagagagtggccaggggcaattgcagactacacaataggcatggtttgatttgtgtctgaaacattagcaaacggatcatgtgagactgggtggtgctcaggtggacatgtatgataccctgtagtgtactttgcaatatattgtggtgcaacactgcacataggccctgtttgtttgctacagctccttaggccatttccaggatcccttcacccagtgactctggctcttggcaatcgggaatggcattgttgaaaactttccattgtgaaattctgtgtttgtaaagtgcacagaagc

SEQ ID NO: 62688 - DNA, 2143 bp, Homo sapiens
tggtaccttctggccccctcgaccggcctgtctccttcaggagccctggagaccagggtgtcttaaaacatggctagtgttgagagggctgagattctgtgctggggtttggggatcccccgtgggtacacgcgggtgaagggagtgtgtgacagagggaagagacattgggtgtgccactgggatgacctttaaggcatggactggggtaagatttgaggggaaatcccaaaagtgcctcagtccttcctgctccctgctccggtgcctgatatgatagcatttaccttcatctccggtcttggagactttccaggtcttccaggagccctggttaaaatgtcactagtttgagcaagtcaacctctctgagcctctcattttcctacctgcaaagcaggagtgatggtccgcacctccccaagggttgctgtgagggtttggggagaaaacattggtagaggcatctgccacagagttgtgggtgttccgtaatcattctgggaaccacgacaactgggaggcacttggtcaggcagcctgtagatggagccagctaagagcaaagctctgggaagcctgtatgcagaaatggragtggccagggaagcgaagaggggccttgctgagaaaggtgggggatgaaggccaatgtcacacactgcacacctttgcttaaggaatggaggatggagacagggtcaaagcaccaaatcacagtggatctgagctggaagaactcagaggccattcaagccactgtcccactcagaccaccactggtcgatgtagacacagccgagagacggggtggcgtccttacgtcatgcaggggcgccgtggcacaggctggtcactggactccctccagtcatgttgagaagagatgaggagtgtgccatgagtggagatgggcccaggctccccgcacaggggcagccagcctgagtagaagtcagatgacagacccggggccaaaatgcaggggcaggctgtttggttccagcagccagctcagtggagaggggagagagctcagtctggtgtggactagggtgatctgtaaaggagtgtggcagccctgggcctgcggactgggcaggggtggcagcacagccctgctccaggggccatttgtcatttttaaaagtatacatgcttacaaattataacccttcagaagggaatagagtcaggctctgccactggccccagttctcctccctggagtggccagggggacctgcttcctatgcgtcctcctggagcttttctgggggacccaggagcatctgtgctgtgagcatccacagcatctgcctctttccctgctgccttcctcttacttccctcccttggagatctcactctgtcagcatctgcaatctgcatgtctcctggactttggaacatctgcttggtgttccattttctggatgaatcatggttgatttaggctgttttgagatttgagctgctaaaagggtaccagcctgtccatccctgcttgtgggtcttgcactccatgcatggatccctgtagggtgattttttgctatgttacagctgagccaagctgggtgagccgcacccccatcacctccagcactgcctatgcacttctacacggtgccaggctctcagagatgatcctgactgagcaacagagagtagcaggaaggacttggggaggtctggatcaagatgccctaaggaaatgggaccactgaaaaattgaaataactgaaggatacattttgagaaacagcaaatagcttaagctttacttcccgctgggacaaaattaaaaagtccacaagtgtagctggaaggatttagcaatgttccttcagctcctgcatatgaaaagctttgtagagtctcctcccttggaggagttagtgagaaagggagccagctctctaggagtgatttgtggaagcgaggtgctctgcaggcgggacctcatgcgtggattgtaggccaggcagacctggtgaagaattttgaagtgtctctgcatagagatctaggctctgctaagagtcagctgtgggactagctattccgaaaagtgattgtactcttagtggaggaacagtgtggaggaggagggagaaaatagttctcttggcctcggctt

SEQ ID NO: 62689 - DNA, 1175 bp, Homo sapiens
tgcctcttgggtttaagcgattctcctgcctcagcctcccaagtagctgggactacaggcatgcgccgtcacgccccgctaatttttgtatttagtagagatggggtttcaccatgttggccagcctggtctggaactcctgacctcaagtgacctgcccaccttggcctcccaaagtggtctcactgttgcccagactggagtgcagtagcatggtcatagcaagtgcaaaggtctggagcatgaaacacacacatttcttgaattggacattataaacagtctcaaaagcatacaagtcagaggtgtggaagcttcagcaagttaaattgagaaggccttggagaattctttgaaagcccataagtatttgagcaatcctataaacatatgtgaagacctctgaccctgttttctgatggaaatgtccagattattgatctgaccagaacagtccaggttccatgatgcatgcagtggtgtctgtgatctgactgagagacatctggctctatttcagaagaactaaaactatagttccagctacttcagaggctaaggtgggaagatggcttgaatccaggaggtcgaggctgcagtgagctgtgatctcaccactgcactgatctcaccactgcactccagcctgggcaacaaagcaaaaccctgtctcaaaaaataaagtaaaatgaaagaattcaaaataattatgcagcaaaatgtttactgtatttctataaattcaaataaaacatgccaaatcctttgtccctcccataatttcaatgagtatgtacagaaaattcttagggaacaatgtgagccaggtaattgttgatctggttgagtagcactttagagataacttttatgtgttctcccattcaggacttyaccatgtcagaagaactcaattagccctcttaatataaagaaactggccgggcatggtggctcacgttggcccaacaaaacctttgggaggctgaaacaggcaaataacttgagcccaggagttcaagatcggcctgggcaacctggcgaaacctcgtctctacaaaaaatacaaaaaaattagccgggcatggtggcatgcacctgtaatctaaactacttgggaggctgagatgggaggattgcttgagcctgggagatggaggttgcagtgagccgaa

SEQ ID NO: 62690 - DNA, 1815 bp, Homo sapiens
tgcagggtttttaaaatatataatgacttattttcctttggataaatacccagtagcaggattgctggatcaaatggtagatttacttttagtcctttaagaaaaatctctatactgtttttcatagagattgtactaatttacattcccaccagtagtgtataagcattcccttttcgccacacccatgccaacatctattgtttttttgactttttaataatggccattctgactgagtaagttggcatctcactgtggatttaatttgcatttctctgatgattagcaatgctgagcatttttttcatatgtttatgggccccttgtatatcttcttttgagaaatgtctatccayatcacgtgcccactttttgacaggattatttgctttttttttcttgctgatttatttgagttccttgtagattctggatataagtcctttgctggatgcacaggttgcaaatacttccttccattctgtgggttgtctgtttactccaatgattatttattttgctatgcaggagcttataagtatatatattttaaaagtgcttgtggaaaattttaatgtaatggaattcctcttattgtgtgatcatctctacatacccttctattaatcttaaatattagtttaagattactcgtgagtcttaagattattggtgaatctgattattggtgattattagtttaagattattggtgaatgtactccttttagatgaagctgtcaaaggacgagaaccatataataataaatattagcaaatagcataaataaaataataaacataaaaatagcatatttttatgctaagtacagtaagcatactgtacttagcaccatggctctgcagcaagacattattttaagttagatgctcaatataaattatacattaaaaaatttatcagaacttgaaaactttcacaatcggatccaatcatttccttggaatgtgtgaggtgttacaaatgccgcctaattctttttgaagctcgaggaaaaggcaaaagtcttgtaacatactgaaatgatttgaatgattttaccgtaaaatggcttggatttgctcatctggctccaagttcagaagaatgaccaacaaactgacttatgttctcagcagtgtagacactgaagggcctgagcagatgttgaaggcttactccaggccaatgcatgaggttgtttttttttttgttttttttttgtggtttctcttaagtgtttgctaatatctaccacattgcatactcaatgttccttttcaactggcctgcctgctcataatataaagcagatgatttcatctttcacagcgcctttttgctacagtgaactgaagtctgcagagttcagacttctctaataacatccatgtttctttaagaacaggaaaatcccttccccttaaaaggtttgctcctcagtcctgagttctataatacaatattatatgtaattcctgtttaaacaatagtctacatttcctccaagtactcatttaggcttctgctatattacatttttaagatatgctgtacctttagtaagcacaaattgcatttcctattagaggagaataacgtcacttatttcggttagaaatgcttcattttaaataaacagaacagaaatggtttccttattcagtgttaaatgaaagtaaaagagccctttaataaagacaatgaaggaaatgtatgtatgttttttatattattttattttgtttatttaattaatttatttatttattggagactgagtctcactctgtcacccaggctggagtgca

SEQ ID NO: 62691 - DNA, 1815 bp, Homo sapiens
tgcagggtttttaaaatatataatgacttattttcctttggataaatacccagtagcaggattgctggatcaaatggtagatttacttttagtcctttaagaaaaatctctatactgtttttcatagagattgtactaatttacattcccaccagtagtgtataagcattcccttttcgccacacccatgccaacatctattgtttttttgactttttaataatggccattctgactgagtaagttggcatctcactgtggatttaatttgcatttctctgatgattagcaatgctgagcatttttttcatatgtttatgggccccttgtatatcttcttttgagaaatgtctatccatatcacgtgcccactttttgacaggattatttgctttttttttcttgctgatttatttgagttccttgtagattctggatataagtcctttgctggatgcacaggttgcaaatacttccttccattctgtgggttgtctgtttactccaatgattatttattttgctatgcaggagcttataagtatatatattttaaaagtgcttgtggaaaattttaatgtaatggaattcctcttattgtgtgatcatctctacatacccttctattaatcttaaatattagtttaagattactcgtgagtcttaagattattggtgaatctgattattggtgattattagtttaagattattggtgaatgtactccttttagatgaagctgtcaaaggacgagaaccatataataataaatattagcaaatagcataaataaaataataaacataaaaatagcatatttttatgctaagtacagtaagcatactgtacttagcaccatggctctgcagcaagacattattttaagttagatgctcaatataaattatacattaaaaaatttatcagaacttgaaaactttcacaatcggatccaatcatttccttggaatgtgtgaggtgttacaaatgccgcctaattctttttgaagctcgaggaaaaggcaaaagtcttgtaacatactgaaatgatttgaatgattttaccgtaaaatggcttggatttgctcatctggctccaagttcagaagaatgaccaacaaactgacttatgttctcagcagtgtagacactgaagggcctgagcagatgttgaaggcttactccaggccaatgcatgaggttgtttttttttttkttttttttttgtggtttctcttaagtgtttgctaatatctaccacattgcatactcaatgttccttttcaactggcctgcctgctcataatataaagcagatgatttcatctttcacagcgcctttttgctacagtgaactgaagtctgcagagttcagacttctctaataacatccatgtttctttaagaacaggaaaatcccttccccttaaaaggtttgctcctcagtcctgagttctataatacaatattatatgtaattcctgtttaaacaatagtctacatttcctccaagtactcatttaggcttctgctatattacatttttaagatatgctgtacctttagtaagcacaaattgcatttcctattagaggagaataacgtcacttatttcggttagaaatgcttcattttaaataaacagaacagaaatggtttccttattcagtgttaaatgaaagtaaaagagccctttaataaagacaatgaaggaaatgtatgtatgttttttatattattttattttgtttatttaattaatttatttatttattggagactgagtctcactctgtcacccaggctggagtgca

SEQ ID NO: 62692 - DNA, 2661 bp, Homo sapiens
tttgctgtagaaatacctcagatatatgtcagattccttatctccatttcctatgttaaaaaaagagaaatgactctgtatcttcaggataatttcaactaatttgggtttttacaattccaactataagttaattatcattctttctcaaaaaaatgacatttgatgttctgatactagtctaatatgtcatacatagaaaaatgattaattaggggcagagaatacggtgagaaagaagaattaatttatgtaaagacaagacatccataaataaaatagcacattgggatgttcaagttaaagaatacaattcaggctaagtccttagtatcaggttttaatgactgccataaaaaatttccacagacttggtgacttaaaagaacatgmatttttttttaattttacagttttgttggttttaaatcagattcagttctcagataccgataccaatacagatactaggctaaaatcaagatgtcagcagggctgtgtttcttggaagctctagcagtgaatccattcactcgccttttccagcatctaggggccacccagatgccttggctcatggcccccatccttccatcctcaaagccagaaactgcatttgtttgaccattcctcagtattcacatctctttcttatgtctctttctacatttaagggccatcctgattacactggggctgactggttaccaaaggtgctctctgtgtctgctgattagcagccttagtttcatctgcaactttaatccccctccaccatgtattcacaggttccagagattaagacactgacatctttgggggtcattattctgtctacttcatcctcatgtcttccatagtttttaaaagcacacatgggattttacaattgccagaaatgtattgggttttaagtccttgcctgtgatttttttttaatatgaagggtattgtacaaatgcttattctaacattcaagctgtggactctgtatggcactggtggatttatcatgcattccatgcacttcagggtttcagcaggaagaaccaaatagtgtgcttacttaaggccatttccttccccagagcagaacatgctcccaaataagttttttcacattgtgtttgcagttcaataacccctacgttagtgtttttaccttgagtttctgttccctatctttgatttttttttaaagaagatttaagactatgatgagaacaatagaagaaaagtaatcattttgactcatcttccttccaaataattatttgttggctttgctcagtccattttcgtgctgatcgtggtcagtggtggagaactgtatttggaaaatccatgagatactaaatcaaagcacataacataaaggctatgaggcttttagagaagaaaatatcagtgagagagaagaagcagaagaagaaactgggaaagaggaaagacaaaatttggggaaaagagagacaaaaaaggagttgtcatgagataaagacttttggggagataaataagccaaaggtattttgggggaagtcttacagtttaactcagctctcaaaaaatctaccttgtctttcagcactttcacaattgaatctgtttctattgaaggtgatgtgttgagactgctctccaacctgggtttttgttaaataaagatgatccacaaacattgttaaatatctaccaagcagggaaagctggaaccaaaataaagcctaattcttgactcaaaggtcttaaaatctgcctatatttaaagttataaataaataaattcatacgttatagagaaaacagtaaattatgatgaatagagctgataaattctacaagtgaccagaggaaaaggaagttacaaagaaactgccaccttattttatatcgaatgatgataatgattatagcagccatttgttgagtatctactatatgctaagcatgccctgatactttatagtatactatataatttactcataatcatgcaatatagatactattatctctattttataggcaaataatggtcaagtatttgcctagaataggtgatggagccagtaatcaaacccatcctatgcttttctttttccctaagaagtcacgtcacagactgtgtgcaagccatgtgacatctttagtcattgtctttatagtctttaaaatgagcagagtgtgttttctgtcgctgcctgtggtaagctgaaaaaaattgttccacaaaggtagatgcacttcctgatccctagaacctctccatatgacctaatattgcaaaagagctgatgaagttacggatattgagaagaggagtttatcctggattatctgagtgggccttaaatacaatcgcatgagccttagaagagggaggaagaaggagatcagacacagacatacacagaggagaggcctatatgaagagggaggcagagattagcgctagggtcacaagccaacgaacatcaagaaatgcaggagagccacaagaagccggaaggatcaagacacggattctccctgacggcctccagagggagtgcagctctgccagccccttgattttgaacttctggccagcagaactgtgagaaaataaatttttgttattttaagcctccaaggtttttgttatttcttacagcagcc

SEQ ID NO: 62693 - DNA, 404 bp, Homo sapiens
ggatcctgataaatgcttgaaagttactaactacagtgacctgtgtataaacctagaaggaagagaatgagaggaacaatcagtgttcaatatgtgtttagtaagtgccagatactgggccacacaacctaaatgtatttgacacccgcagtgattctgggctgttggcactctgatcatcatattcccactttgtggataggtaaaatgagactcggctgatgtaatcttrtcacaagtataacaatcgtgtagctggaattcaaatgctaaagcacctaactatcatactgggttcaaaaggaaaaagataaagtgtgaaagctggcaagttaagagaggcagaggacagaaacctgtaacagcaggcttttaaatttttcttcaaaataggacccagtttg

SEQ ID NO: 62694 - DNA, 404 bp, Homo sapiens
ggatcctgataaatgcttgaaagttactaactacagtgacctgtgtataaacctagaaggaagagaatgagaggaacaatcagtgttcaatatgtgtttagtaagtgccagatactgggccacacaacctaaatgtatttgacacccgcagtgattctgggctgttggcactctgatcatcatattcccactttgtggataggtaaaatgagactcggctgatgtaatcttatcacaagtataacaatcgtgtagctggaattcaaatgctaaagcacctaactatcatactgggttcaaaaggaaaaagataaagtgtgaaagctggcaagttaagagagrcagaggacagaaacctgtaacagcaggcttttaaatttttcttcaaaataggacccagtttg

SEQ ID NO: 62695 - DNA, 404 bp, Homo sapiens
ggatcctgataaatgcttgaaagttactaactacagtgacctgtgtataaacctagaaggaagagaatgagaggaacaatcagtgttcaatatgtgtttagtaagtgccagatactgggccacacaacctaaatgtatttgacacccgcagtgattctgggctgttggcactctgatcatcatattcccactttgtggataggtaaaatgagactcggctgatgtaatcttatcacaagtataacaatcgtgtagctggaattcaaatgctaaagcacctaactatcatactgggttcaaaaggaaaaagataaagtgtgaaagctggcaagttaagagaggcagaggacagaaacctgtaacagcaggcttttaaatttttcttcaaaataggwcccagtttg

SEQ ID NO: 62696 - DNA, 605 bp, Homo sapiens
atgcacacagtatacaggagagcagacctcccgacttgctttctctcctccatgccttgagtgtaggaccgttggcatcttaattaccctcccacacccaaggcttgcagaagagcgagccttctcttccctctccagtgcataggcatgagcacatggacaggtacaccaaagggaggtagaccctctcttacgtgctctgtatgtggggtacactgttagcagccatcccatctggatgactgtcctgcttccatggccactgctcctagtttacccatcagcactcctgtggctatcttgctgcccacttgcaccccccaggccagtgcctcttgcctcctagagcatacccatatgtcgtgccaagagagcaagcccttccctgctccctctctcacatcccttgcatggtggagggtgagctttctgaaaacccctcccacatgcagggtttgcaggatggcgagcctcagctttccttgctctcttgtgcatgtgtatatacacatacgcactccttcaccaaaagaaaaacacacacccatgtggtgggaaggagaatgactctcarccatgtcctttctcccatctcagtcttacat

SEQ ID NO: 62697 - DNA, 545 bp, Homo sapiens
aacaaaaaatggggcagaataaaagaaaatgaacaaagttctctagctcaggggatctatcaaaacagtaggttaggaaatgctgatrataaagtgatctgaagtcatttgtaattgccctgtgcctggagagcagggtatcaaaattaacaaatggcttctataccaaaaatggatagccaacctcataactggagaaatgctaatgaaagctaccatgagataccactggcaaagttttaaatatttataatagattgtgttggccgggcacagtggctcatgcctgtaatcccagcactttgggaggccaaggtgggcagatcacttgagcccaggattttgaagccagcctggccaacatgaagaaaccctatctctactgaaaatacaaaaattaggtgggtgtggtggtgcatgcctataatcctagctactccggtggctgaggcaggagaatcacctgaacccaggaggcggaggtggcagtgagccaagatcgcaccactgcactccagcctgggcgacagaatgagactgcttca

SEQ ID NO: 62698 - DNA, 834 bp, Homo sapiens
tgactgtggctacagatttaagtttcatcccttagatataccaataaagatgattttttaaaaatttgaatttggccaatttctttgagtatttatcagttagttgcaatctgggaagcwaaggcatttatgttatgtattgttttctaaaattccaacaactgaatactcattaggcacaccataaaaagttctgtacttgtatggccaacctgtattcattcattcatccactcaatattcaagacaaacttttaaagaactatctctgtgccagtcactatgagtataaattttagtttggaaacagctttgtaaaaaataattattttctatatggcaacctagtgtctagtttcatcaaggttgagtttccctctccaacctcatggccacttatagttttggtcttgggtaaagccaaagtggtggaggagttagagaaaggaactcatcagttactggctctctgccgtcaccttgaggtacctttcaccacagtcaatgccatcaatgtctttctacataactgctgtggtcctgctgcaaacctgggcatgctgtgaagtcatttctcttgagtcttctgacagccttagcaggaagcctgagtaggttctcgtcctttctcctttttcctctaatcaagtcaggaatcccttttttaactggaaaagcttttcttcattatatttctgatcaaaacatttttttctatatcctgatcctcactctttttgtctctgtttaattctcctatgataaaataatattttagaagctatatatttgcctgtcaccctaggttctgaaaattatcttacatagtatcat

SEQ ID NO: 62699 - DNA, 710 bp, Homo sapiens
ctcatcagactggtttgggtttcttggtggtttgcataaattataaacaagagcacaaaaatcacacaacatagactctaccataaggggacatgttccctctggccttgccagagtgatagggacgtgtctctgtgttcaagtctccaatgatgtccccagaaatgaggccaagcctatcctggcccctcctggatgggtccacagtgacccgctgtcttccccaccaactcattctgggttcccaggagacttcctagcacagaacaataccatcctagcaccgcaactggagaccagggtgtggaactgtccccatgtacaatggctgctgggtcttctgtgccgaggatcagaggagtgagttggaaggaagagccaagggtttccactggaaccttctgcctctatgagcgccatgaggttctttagaaacagaccctctaaaacaaggggccccaaactttttctgtaagggccagacaatacagatagcaaatatttcaggctttccaggccacagacagcctgttatatattcttcttctcctttttwttaatgacctcaaaaaaaaagtaaaaaccattctttgctggcaagccatagaaagcaggcccgcaagcaggagtttgcccaaccctgctctagaacaccaccaggccctcctctatcccctcagccttcacctcctccccactctgggactctg

SEQ ID NO: 62700 - DNA, 1012 bp, Homo sapiens
agaagtctttaccataatccaattttctcacaacttttgaagtctgtgttaagcaataacatacggcaagtttattccaacgtaggacacagcttctcaaatcagagccgttttaataattattaccaataggaactttgaaatctactgatagtagctgaagagataaagtgatttgtctttaacagatgtgtttcttttaaattattcattttcagaagcatatttctgtataacaggtgcccaaaaattgctgtggaaatatgaatatatttagaagactcctatttatgctaggcatgttgttttgacaattcaagagaaatttctgaattaaaatgaacatcatacttctcaatttctcagaaaaggtagtaatcaagagtatttggtacgtatgatttaagatttaatcttgcatccaattttaggatcaaattttgttaatatatttctcagcaaagagtataatcatcaaccatttagtcaaaacacttgaggatgatgtgacttaagtctagataaatgtattgatatataattctcatatcagtcttttagtatcaatgccatttttaaagtgtgaaataatrctcctgaaatgtaatatcacaacatgatattgggaggacaaatatattcttcttttcattatataaagggcaatttgacaattctcctgtcaaattgtcatctttttgtagatgagaagtacatttttcaagacatcatacttatgccatcttaagaagcaatgtccatatcttagtcaatactttttaaaaacagtttatttcttgctcaagaatattctgcagctgtccaggtgacatatcagctgttgcccatgaggtgattcagggattaagtcttctggaattttttggccttgctatctcaacaggggttctacacactagcagtgacagggagagctcacactgaaactcacacctactccctctctgctgtagacagaaatgacatacgtcttcagttcataatactctaa

SEQ ID NO: 62701 - DNA, 547 bp, Homo sapiens
taatcatatatatagcttatatataaataatatatgggtgtggtgtgtgtatgtgtgtgagtgtggtgtgtttgcatacatatatgtatgtatatatcctccttttatttttattcttaagagttccatttcacctcagctaatgagrtagagtgttagtcacattggtggcaataagtaagtttataataaatactactttttatttcactagaaacttttcagagcatttatggtgcctgaatacacaatacttgtttaataacagttaatttccttcatttctcaatgaataaattctctgttcaaatggcgcctccagtttcttgattgtgtatcatattgtttgtagcaaacatttattcacacttacttagtgctgggcatgtatgtacatctttactaacattaatttatctttcccatatgtaaaagacaatttttcttgcattctttacattggatttactctctttttattctatcctcaaagagtcaggatgttgctggatggaagaataagagatgttaactaaggaaatggaca

SEQ ID NO: 62702 - DNA, 966 bp, Homo sapiens
ttttttgacagctttaacatttgttactggtagttgatcttggactttttgatccatgaatctgaatggtacggcttgtcctcatgctyatcatttcttggtcagcaaattagtctggggcccttgctcaggatcgtactaaaaatgaaaatccccatgcaaaataagtatttccataattttgagtatctttgttgaaaaagaaaaaaatgttctctctttttaatggcatgagacagttattcttccatcatgtgagcatcttgctctctgtttacaatgtgtatgttatgcagattcttatacaaatatcttttctatttttttaaacgaaggcaggttcacacctctgtcttgtgtccacctttccaggtaccagtgcctctcatttattcttagttttcagtattgcgatttgttttaggtagacgatttgcgccttgaaaaatagtcattgcaaacaatgagtaaatacttaaaaaaaattatagtgtttgtatagtaaaagtgtgtgttttttctcttctaaatttactgtaatgtcacattttacttgtaaataagtaggaatttcaatgtagtaacgtaaataagtaaaattaaataaccagtagttctaaatactgttttaattgttattgtctgtttacttcatagtagtaattgtaggaatatatttcaagaaagtaaatgtaaagtctaacaaagtcactacattatttgttatagtaaaaaatatcaataaccaaaatgcccaaaatgaagtaattgatcaaatttaatgagaacaacctgagggaatattatatgagtggagacaattgtatttatttaaaaaaatataaaaagttgaaaaatgctatttttatgaaaaagcagaatttgacatctaacatatgaaatgatctaaatcaatgtttttcagatgttttagtttccatttttaaaaataaaaagtgtattgta

SEQ ID NO: 62703 - DNA, 966 bp, Homo sapiens
ttttttgacagctttaacatttgttactggtagttgatcttggactttttgatccatgaatctgaatggtacggcttgtcctcatgctcatcatttcttggtcagcaaattagtctggggcccttgctcaggatcgtactaaaaatgaaaatccccatgcaaaataagtatttccataattttgagtatctttgttgaaaaagaaaaaaatgttctctctttttaatggcatgagacagttattcttccatcatgtgagcatcttgctctctgtttacaatgtgtatgttatgcagattcttatacaaatatcttttctatttttttaaacgaaggcaggttcacacctctgtcttgtgtccacctttccaggtaccagtgcctctcatttattcttagttttcagtattgckatttgttttaggtagacgatttgcgccttgaaaaatagtcattgcaaacaatgagtaaatacttaaaaaaaattatagtgtttgtatagtaaaagtgtgtgttttttctcttctaaatttactgtaatgtcacattttacttgtaaataagtaggaatttcaatgtagtaacgtaaataagtaaaattaaataaccagtagttctaaatactgttttaattgttattgtctgtttacttcatagtagtaattgtaggaatatatttcaagaaagtaaatgtaaagtctaacaaagtcactacattatttgttatagtaaaaaatatcaataaccaaaatgcccaaaatgaagtaattgatcaaatttaatgagaacaacctgagggaatattatatgagtggagacaattgtatttatttaaaaaaatataaaaagttgaaaaatgctatttttatgaaaaagcagaatttgacatctaacatatgaaatgatctaaatcaatgtttttcagatgttttagtttccatttttaaaaataaaaagtgtattgta

SEQ ID NO: 62704 - DNA, 966 bp, Homo sapiens
ttttttgacagctttaacatttgttactggtagttgatcttggactttttgatccatgaatctgaatggtacggcttgtcctcatgctcatcatttcttggtcagcaaattagtctggggcccttgctcaggatcgtactaaaaatgaaaatccccatgcaaaataagtatttccataattttgagtatctttgttgaaaaagaaaaaaatgttctctctttttaatggcatgagacagttattcttccatcatgtgagcatcttgctctctgtttacaatgtgtatgttatgcagattcttatacaaatatcttttctatttttttaaacgaaggcaggttcacacctctgtcttgtgtccacctttccaggtaccagtgcctctcatttattcttagttttcagtattgcgatttgttttaggtagaygatttgcgccttgaaaaatagtcattgcaaacaatgagtaaatacttaaaaaaaattatagtgtttgtatagtaaaagtgtgtgttttttctcttctaaatttactgtaatgtcacattttacttgtaaataagtaggaatttcaatgtagtaacgtaaataagtaaaattaaataaccagtagttctaaatactgttttaattgttattgtctgtttacttcatagtagtaattgtaggaatatatttcaagaaagtaaatgtaaagtctaacaaagtcactacattatttgttatagtaaaaaatatcaataaccaaaatgcccaaaatgaagtaattgatcaaatttaatgagaacaacctgagggaatattatatgagtggagacaattgtatttatttaaaaaaatataaaaagttgaaaaatgctatttttatgaaaaagcagaatttgacatctaacatatgaaatgatctaaatcaatgtttttcagatgttttagtttccatttttaaaaataaaaagtgtattgta

SEQ ID NO: 62705 - DNA, 966 bp, Homo sapiens
ttttttgacagctttaacatttgttactggtagttgatcttggactttttgatccatgaatctgaatggtacggcttgtcctcatgctcatcatttcttggtcagcaaattagtctggggcccttgctcaggatcgtactaaaaatgaaaatccccatgcaaaataagtatttccataattttgagtatctttgttgaaaaagaaaaaaatgttctctctttttaatggcatgagacagttattcttccatcatgtgagcatcttgctctctgtttacaatgtgtatgttatgcagattcttatacaaatatcttttctatttttttaaacgaaggcaggttcacacctctgtcttgtgtccacctttccaggtaccagtgcctctcatttattcttagttttcagtattgcgatttgttttaggtagacgatttgcgccttgaaaaatagtcattgcaaacaatgagtaaatacttaaaaaaaattatagtgtttgtatagtaaaagtgtgtgttttttctcttctaaatttactgtaatgtcacattttacttgtaaataagtaggaatttcaatgtagtaacgtaaataagtaaaattaaataaccagtagttcyaaatactgttttaattgttattgtctgtttacttcatagtagtaattgtaggaatatatttcaagaaagtaaatgtaaagtctaacaaagtcactacattatttgttatagtaaaaaatatcaataaccaaaatgcccaaaatgaagtaattgatcaaatttaatgagaacaacctgagggaatattatatgagtggagacaattgtatttatttaaaaaaatataaaaagttgaaaaatgctatttttatgaaaaagcagaatttgacatctaacatatgaaatgatctaaatcaatgtttttcagatgttttagtttccatttttaaaaataaaaagtgtattgta

SEQ ID NO: 62706 - DNA, 966 bp, Homo sapiens
ttttttgacagctttaacatttgttactggtagttgatcttggactttttgatccatgaatctgaatggtacggcttgtcctcatgctcatcatttcttggtcagcaaattagtctggggcccttgctcaggatcgtactaaaaatgaaaatccccatgcaaaataagtatttccataattttgagtatctttgttgaaaaagaaaaaaatgttctctctttttaatggcatgagacagttattcttccatcatgtgagcatcttgctctctgtttacaatgtgtatgttatgcagattcttatacaaatatcttttctatttttttaaacgaaggcaggttcacacctctgtcttgtgtccacctttccaggtaccagtgcctctcatttattcttagttttcagtattgcgatttgttttaggtagacgatttgcgccttgaaaaatagtcattgcaaacaatgagtaaatacttaaaaaaaattatagtgtttgtatagtaaaagtgtgtgttttttctcttctaaatttactgtaatgtcacattttacttgtaaataagtaggaatttcaatgtagtaacgtaaataagtaaaattaaataaccagtagttctaaatactgttttaattgttattgtctgtttacttcatagtagtaattgtaggaatatatttcaagaaagtaaatgtaaagtctaacaaagtcactacattatttgttatagtaaaaaatatcaataaccaaaatgcccaaaatgaagtaattgatmaaatttaatgagaacaacctgagggaatattatatgagtggagacaattgtatttatttaaaaaaatataaaaagttgaaaaatgctatttttatgaaaaagcagaatttgacatctaacatatgaaatgatctaaatcaatgtttttcagatgttttagtttccatttttaaaaataaaaagtgtattgta

SEQ ID NO: 62707 - DNA, 966 bp, Homo sapiens
ttttttgacagctttaacatttgttactggtagttgatcttggactttttgatccatgaatctgaatggtacggcttgtcctcatgctcatcatttcttggtcagcaaattagtctggggcccttgctcaggatcgtactaaaaatgaaaatccccatgcaaaataagtatttccataattttgagtatctttgttgaaaaagaaaaaaatgttctctctttttaatggcatgagacagttattcttccatcatgtgagcatcttgctctctgtttacaatgtgtatgttatgcagattcttatacaaatatcttttctatttttttaaacgaaggcaggttcacacctctgtcttgtgtccacctttccaggtaccagtgcctctcatttattcttagttttcagtattgcgatttgttttaggtagacgatttgcgccttgaaaaatagtcattgcaaacaatgagtaaatacttaaaaaaaattatagtgtttgtatagtaaaagtgtgtgttttttctcttctaaatttactgtaatgtcacattttacttgtaaataagtaggaatttcaatgtagtaacgtaaataagtaaaattaaataaccagtagttctaaatactgttttaattgttattgtctgtttacttcatagtagtaattgtaggaatatatttcaagaaagtaaatgtaaagtctaacaaagtcactacattatttgttatagtaaaaaatatcaataaccaaaatgcccaaaatgaagtaattgatcaaatttaatgagaacaacctgagggaatattatatgagtggagacaattgtatttatttaaaaaaatataraaagttgaaaaatgctatttttatgaaaaagcagaatttgacatctaacatatgaaatgatctaaatcaatgtttttcagatgttttagtttccatttttaaaaataaaaagtgtattgta

SEQ ID NO: 62708 - DNA, 1131 bp, Homo sapiens
aatgaactgtgcccttgcatttgcttgtttcactcttttccctcagccattgttcatcaaaagattcagcaaaactgccaccttcacagagaatgctctctgattccagaaggctttgctctggtttatttatttattttaattaattaatttatttttttaagacggggtctggctctgttgctggagtgcagtggcgcaatctcagctcactgcaacytctgcgtcctgggttcaagtgattcttgtgcctcagccttcacagtagctgggattacaggcacgtgcctccttacccagctaatttttctatttttattagaaacagggttttgcctgttggtcgggctggtctcgaactcctggcctcaggttatccacctgcctcagcctcccaaagtgctggaattacaggtgtgagcccgaccctgattttcttttaaacctccaacacaatttttttattaaaaggttcattagggaaaataatggtttttgtttttgttttttaatctttatgtactctagagagcttataaaatacataatatatcttacagaagatgttcaatggcgattgttgagtgtccctttgaatgaacaaatggaaggatgaagattgaatgtgaatatgcaagtgagagaggaaaatattataaaatatctttggattcattttttcacacacctactggtatcagtatgtgcagtttaggatcaggaaatctgagttccatgatcaaattgattagggacttgctattcaaccttcagtaaataatttagcctttctgtgtctcatacattcagcaattcaacaaatatttgttaagcaccttctatctgcccagcactgaaacatttctcactaagcatgttttgacctgattttcttcccggtaatacactttagtagaagattgaaaatgtaccctaatttttcttccttggagtcaaatactttctcacactgagtaggtgagtagctggtatctgcaagactgataaatgagaaaacatgtcataaactgaccattctttggacagtatttctagaaaagaaaaaaagaaaaatctttatcaggatgccattagattagctattaattacgtttataaaggagtatatgt

SEQ ID NO: 62709 - DNA, 824 bp, Homo sapiens
tatatatgggattttttattttgctgtatcccaaggtttcttcactacccatgcccggaggttctatttggtacagtaagaaatgtgaatggtaccctgcacagaggaagtttctcaataagtattcatagaatagaagttacaaaagtgttgctagacaatttctctctctcagtgctcctttcagttcacagtagaaacaaatgttcaattgttgggtcagtgcacaaataagtaggtccatattcttggcattgstactgtacgtggtcttgcttccttccttcctgctgttttccacttctgcttttctttattctttctacctggcaccctcacaatctttcagtctctcaatctctggatcgctggacctcactgtcactctctctttttctctttcccttttcctcccagtttcccttaaagtagttctgatttactacataaatattatgcgccagcactctgatggaactttcacacgttctcattgtttcctttcatttgtaccataatcctacgagggagggactgctattagctcatactgctgatgagaaaactcagtctctgaaggcttatgttgcaaattcagggtcacacactgaccagaaaggtaactgagatgggtgtgagcagtgtgagagtagaggctggggcgccagttagctatggcagtattctgggcaatagacaaatcaaggtcagaattagggtagtgtcagaggaaatatacataactaggcagaaaagggactcagtgaaaataaattctttcaaagtactgatgggcacactttaatgaaaaccctcagggcctc

SEQ ID NO: 62710 - DNA, 409 bp, Homo sapiens
aggtgactatatcctgaggcactgggaagtaacttcctcaacactgaatagcaaaccagagttagaatgtgtacaagtccaccactccttatccacaattctaaaacccaagcagctytaaaaaccaccagcaaaacgtggcctgacctcatatgccgtggttgacggtctttaccttacttaatataatacaactcaagttgtgactcacagaacctgtgctcctcccccgttaatggataatggtcttgaaggtttcaagtttgtggtgagcctccaccctcatggtcatcctccactgtcggctcctccttctcataaatgtcagcagcttccagtgattggtggggtaggtgggggctataagtttctcacccaaatttgcaaatcttggaccacatcctgacaa

SEQ ID NO: 62711 - DNA, 1255 bp, Homo sapiens
atttgtctttcctcgtctttgcacgactgttatcctctggatacatgcacgttaatgattatgcgtgtgcctgtgtgtgtatgctgagcataagtgggcatgtgacccacatgcgcgggccacaagaggggccatctgcgggttcagcctgcctggcgcccacgcccaccccagtcttgccttggggaacactccttccaccatggcaccggatctaggtgccaccatcacccacgatgctcattctctcctgaccaagggacgggcaactatcccaagccccaggctctctccccaaaatctgaatctcaaacagaatgattaaaaggctgaaattcatcctgttggctatgccctaaaggaacagtcttcaactcctacagcctggatccccaagctgcaggccctgaggcatcttgtcagggccacagaagtggaaactgacatatatatgaatatttatataacttcccagctgtaaagttctatgactcaggagcttaacagtctcacttacrtcccatgatgacagccttgcctgggactgtcatttaaatctctttctctccccctcgtttagcttattactatcccactgtctcacatcagctactcttcttccctggtatagagaggactggtttcttcctagcaaccccgaacagtagacggcaatacttcctcagggtcactcagcaacaatccaagatgatccaaacaaaccagtatgattcagaagttgttcctgtccaggtacgtaccagttacacaattcgagatatacagatttgtttttgcactatagccaaaaggttttttttttgttttgtttagtttgtttcgtttttgagatagagtgttgctctgtcacccaggctggagtgcagtggcacaatctcggctcactgcaacatccgcctcccagattcaagtgattctcctgcctcagccccccgagtagctgggattgcaggcgcccaccaccacacctggttgatttttatatttttaatagagacggggtttcaccatgttggccaagctggtctccaactcctgacttcaagtaatccacctgcctcggcctcccaaagtgctgagacaaaagttctcatacatccttttttaaacaaatgaccttaatataactccaaaaatctgctatacattaattcattccctcttggcaatcaactaaacatcaagacttaaatagcaccacaaatcacgaccatacacaactagggaaagtccc

SEQ ID NO: 62712 - DNA, 1255 bp, Homo sapiens
atttgtctttcctcgtctttgcacgactgttatcctctggatacatgcacgttaatgattatgcgtgtgcctgtgtgtgtatgctgagcataagtgggcatgtgacccacatgcgcgggccacaagaggggccatctgcgggttcagcctgcctggcgcccacgcccaccccagtcttgccttggggaacactccttccaccatggcaccggatctaggtgccaccatcacccacgatgctcattctctcctgaccaagggacgggcaactatcccaagccccaggctctctccccaaaatctgaatctcaaacagaatgattaaaaggctgaaattcatcctgttggctatgccctaaaggaacagtcttcaactcctacagcctggatccccaagctgcaggccctgaggcatcttgtcagggccacagaagtggaaactgacatatatatgaatatttatataacttcccagctgtaaagttctatgactcaggagcttaacagtctcacttacatcccatgatgacagccttgcctgggactgtcatttaaatctctttctctccccctcgtttagcttattactatcccactgtctcacatcagctaytcttcttccctggtatagagaggactggtttcttcctagcaaccccgaacagtagacggcaatacttcctcagggtcactcagcaacaatccaagatgatccaaacaaaccagtatgattcagaagttgttcctgtccaggtacgtaccagttacacaattcgagatatacagatttgtttttgcactatagccaaaaggttttttttttgttttgtttagtttgtttcgtttttgagatagagtgttgctctgtcacccaggctggagtgcagtggcacaatctcggctcactgcaacatccgcctcccagattcaagtgattctcctgcctcagccccccgagtagctgggattgcaggcgcccaccaccacacctggttgatttttatatttttaatagagacggggtttcaccatgttggccaagctggtctccaactcctgacttcaagtaatccacctgcctcggcctcccaaagtgctgagacaaaagttctcatacatccttttttaaacaaatgaccttaatataactccaaaaatctgctatacattaattcattccctcttggcaatcaactaaacatcaagacttaaatagcaccacaaatcacgaccatacacaactagggaaagtccc

SEQ ID NO: 62713 - DNA, 535 bp, Homo sapiens
atccacctgcctcggcctccaaaaatgctgggattacaggcatgagccactgtgaccagccacaaaaataaaaaaattttaaatacatgctacagtgtttccaacaccagcaaagggctgaacctcccagacaccccaggctggagcccaggctgccacggcaggcacctcacagaagcgtatctgcggccagagagtaaaactgctctctccatattgcacgtgcttttctcaagaaacgctttctaaygccctgtaggactagaaacacaagcggtggtgtcttccggattttccaaagagatcaaactattatgaagcaaagtctccaggaacataaatgataagaatgctgggaaattctaaaagcactgcaaactccacacaataagggacatgaaaagagatgaatgggacactaaatgtgtctttcccccatgccctcataacctctccctgtgcagttctgacagaagggccccttgcaggccatcggacagcacagccaaggagcaggagccatctgtcctgcact

SEQ ID NO: 62714 - DNA, 1120 bp, Homo sapiens
tacagtcatacagtaagtrtagagtccaatcagaacagtgttattcaattgactgtcatattaagaagtatcatgagcaagattctgcttcctttttgctattattttaatctgaggactgaatgcccaaataaagcctggcccagattttcatatatacttggcttatttgaatcatgtgcagatgcatctcttcgctccacaccctgactcttggattagctaggaatactaatttctctcccgtgaaatgttttgctttgacctattcctgaaagtttgaggtaggccatagtgagctcgtaagcagaaaatacaatgcagccttttcccctattcctattggacatccagtacctgaacatccacattccttccagatacctcaactgtgctaaaccctgtttcactgcattcactcatgaccgtgtcccctgacatcccaaaaggggctgaggccaggctatagtctagtgattctgcacaagttgtttccttggaagttttcatctaatagtggcaatattgacttttccttacacagctaagtttgtgcttgctacttagtttctttaaaattaaacaatgttttcttaaattatacaaatataggtggtacagctatacagaaaaacatcataataaatacaaaactcgtatagcatttcctttggaagggaaaaaatgaatgcaattaggaagaaacacagagctttttctaaagtgtcagtaatattttgatctggttggcatatacacagcttttcatttcctttttattttattattattattattattattaatatacagagtctcgctctgttgcccaggctggagtgcagcggcacggtgttggcttactgcagcctccgcctcccaggatcaagcgattctcctgcctcagcctcctgagtagctgggattacaggcgctcgctaccatgcccagctaatattttttgtatttttattagagacagggtttcaccatgttggccaggctggtctcgaactcctgacctcaggtgatctgcccaccttggcctcccaaagtgctgagattacaggcatgagccattgtgcccggccaacttttcattttctaattattctttaaa

SEQ ID NO: 62715 - DNA, 1844 bp, Homo sapiens
tctatacaaaaaaataaatgagctgggcaagatggcatgcacctgtagtcccagctgcttggtaggctgagggggaaggattgcttgagcctgggaggtcgagactgcagtgagccaagatcacaccactgcactccagcctgggtgacagagcaagactctacctcaaaaataaaaataatcaatatagtttcaatgaagcaaagcatctcaggtaacaatttgagcataactttaaccataacttatgatagcataataacattcattagtaattcagtagccgtatgtgccaggctgtgttaggtgctttatatattgtttaatttttaaaaacttgtggagtgtacagattggtaaggtgacattgtatcacaaagctagtctttgagtccaaagttttgtggttttatgttatgatatacttttatcatggaattgtcttattaaatgttttgccagtggttcttaaagtgtgtttctgacaccagtagcattgacttcacttagaaacctgttagaaatacaaattatttggccccacccaacacttgagtcacaaactttgcagatggggctcaatctgttttaacaagcgcttcatgtaattttgatgcaggcctaagtttttgagccactgcagtatgcatttctatttttaagcaaagatcttggtctttctttttggacattgtagaaataacatgaacttgttttttgtttgtttttgttttgttttgttttaagctcctgatctttgttggttatgttgcaaaagattgtatcaggagaagcctcagcatggacattggcatcctgacataacccccattaatttagtattctttctgaaactcaaatggattctcaagtccaagagactatggaataaaatcattgtttgtctgtgttaagttttatctctgttattgcctgaagacttttggtaacaataatgcgctttcatcaaacttttaagacttgattggaaaaaataaatgtatgtttcatcagttatacaatttgttttgtatgtgttttgtatgggtggtccctgaggagcctgaatcttcaaaatatactttctgtgagctcagaaaatgaatagcacttttgagctaattgatcagtgtggagaaatcacagtgttgcatcctgatgagtaaagataaaattgactctttatcgattcaagatcattttttatataaataaataagctactcctgtttactttttacaaacttgagaacagttttagatttataaagttattgtgaagatagtacagagggttctcatatgccaccacaccaagtttctcctactaacatcwtacattaatactgtgcatttatcacagttaatcgtccaatatttatgcacgattattaaagtccatacttgattcagatttcctaaattttcccctaatgtcctttctcttttccagtgtccagtccaggatactacattatatttagtacctgtgtctccataaaattctcttggctgtgacagtttcttagattttccttgtttttgatgcccttgacagtttttagttctgggcaggtatttttcactttactatggatatttcagatacacagaaaagtacagaaaatcgctagcaatatcctgctaattttttgttatctgtcctgcttcctttttcttttttgttggggtgttttaaagttaaactccaattatcctttcacctgcagatacttcagtatatatctctaatagtaagaatttaaaagaataaccacaatgttatacctaacaaaattaatattaattatttaatatcatctgtttactttgggttccctaag

SEQ ID NO: 62716 - DNA, 611 bp, Homo sapiens
acattacttgatcgcctgctgtgaagtaaacactgctctgtgaagtaaacatgtgctgagaactgagatctaaaaccgtttaagacttctgctgttcctgcctatagcaaggagcacattttcttcactgcttgaagtggagaaaatggctattcccagccattcctgaagctcccatggggactgaaatccagtaatgctgctaaatgaatgaaagaaattagggtacctgggttcccagatgtcctcaaatggggtttaggtcaggaagaagttgccacagaactcaggacctactttgctactggtggtgacgtgcgtaaatgtgaccacttctttttactccacagaaatttttaagtgtccaaactgatagattgctcaccagcaaacactgaaatctcttgctctagtcatagggcgaggctttggaaaaattaagaamagaactcagagctcctcatatttcctagtgatttccagtggactttacatcctgccctcaaagattttctttgaagagttatgatttcataatctgacccaccaaaggctgtgaacaagatcatgtaatgatgcttcatatccaacaaggagtgatgggaccacaa

SEQ ID NO: 62717 - DNA, 611 bp, Homo sapiens
acattacttgatcgcctgctgtgaagtaaacactgctctgtgaagtaaacatgtgctgagaactgagatctaaaaccgtttaagacttctgctgttcctgcctatagcaaggagcacattttcttcactgcttgaagtggagaaaatggctattcccagccattcctgaagctcccatggggactgaaatccagtaatgctgctaaatgaatgaaagaaattagggtacctgggttcccagatgtcctcaaatggggtttaggtcaggaagaagttgccacagaactcaggacctactttgctactggtggtgacgtgcgtaaatgtgaccacttctttttactccacagaaatttttaagtgtccaaactgatagattgctcaccagcaaacactgaaatctcttgctctagtcatagggcgaggctttggaaaaattaagaacwgaactcagagctcctcatatttcctagtgatttccagtggactttacatcctgccctcaaagattttctttgaagagttatgatttcataatctgacccaccaaaggctgtgaacaagatcatgtaatgatgcttcatatccaacaaggagtgatgggaccacaa

SEQ ID NO: 62718 - DNA, 611 bp, Homo sapiens
acattacttgatcgcctgctgtgaagtaaacactgctctgtgaagtaaacatgtgctgagaactgagatctaaaaccgtttaagacttctgctgttcctgcctatagcaaggagcacattttcttcactgcttgaagtggagaaaatggctattcccagccattcctgaagctcccatggggactgaaatccagtaatgctgctaaatgaatgaaagaaattagggtacctgggttcccagatgtcctcaaatggggtttaggtcaggaagaagttgccacagaactcaggacctactttgctactggtggtgacgtgcgtaaatgtgaccacttctttttactccacagaaatttttaagtgtccaaactgatagattgctcaccagcaaacactgaaatctcttgctctagtcatagggcgaggctttggaaaaattaagaacakaactcagagctcctcatatttcctagtgatttccagtggactttacatcctgccctcaaagattttctttgaagagttatgatttcataatctgacccaccaaaggctgtgaacaagatcatgtaatgatgcttcatatccaacaaggagtgatgggaccacaa

SEQ ID NO: 62719 - DNA, 1347 bp, Homo sapiens
ttggattcaactttgtatgctaagttccttagcacagaccctggcatatagtagatgcttaatatactccatctgagtttaatttattccagactggcttctcttccaataggattaccctttaaatcaaaacattatggtgacctctacttgaatttcttgagtgacaagaaacttattatttcacaagacactttgcttgattcttccccttagtccatggtttctgtttacaaagagataacttccacctacccgttctactaatagttcttctctttgctttttttttctatttgaaggcatcactgtttattaactgaccagattacagaaataatcatggtagaccccttagttcatccttctaataagcctgtagctcttctcttccctattgccagcatttctaccttccacaaaataggaggtctttttcttcattccaccttgtggagaggataatctgaagggtcacaggaagttattggcttctttgaagccttttccaacagtatagatctcatgaatcagatcctccatgcagatgatatcatatttaccaagagattgagcaatcaaagtgttatctgtcatggcaatttgcttcttttcgattttgctataatgacacttgtagatgagttcatttacttactttaggtttgggtaccgccatgaaatgtatggttctccaatcctcaccatgttaattgaagccttgctgagcttaacaaagattccattgaagatctgacaaaggtgaagaaactccaccacctttcagacctttgggctcacaccattgatacctctgatccttagggaaaatgacagtttgggttctgtaagaacatagaagttgccagcttttcttgccctcctagccatttgaatctcagttctgttcatctgcctgtattccttgtgactgtgtttagctttttcatagataagcttcctccttgccttttgaagcatcttttcggcaaacttctttctcaggtgcttgatcttcagctctgcaaaattcctttgctttttcttaagggcttctggcatagcrggaaccttctttttcttctcttcgacaccctccatggttccagctggaaaagaggattcttccctttggaaaaaaccagaacaagtctacttactccctcttctacctgacatctcttcaaatctatgaggacagctatcatgtcctccaaagctttctcaaaggccccagttcagaatttctttaagcatgtctcttaagttatgacttctggacctcctaatattctattaatttacctctagatatcctgtaatttggtaatgttccccttaaaatgt

SEQ ID NO: 62720 - DNA, 588 bp, Homo sapiens
gtaccttttgtgtgagaatggaggaggtgcccttagctcccttacttccaaatagtggagcagtgttccagcttggggaatcttgcaagactggagctcaacacagcactttgctctcttctcattgaggattctggacgacactcaacctttctttcatgtcttagtgctgctggaaagagctgattaaatagatatgtgaagaacacatctgcctattcttgcataacattttagaatgacttttttttttttaactcttaggagagataaagactatgttaacccagtaggaaaataccgtgtttgagaaaaaagtcattctgccttagtcttttagttattcaaagtgaacstggggaatctcctctttgaaagacgttcatgtgttgttactctccatgtgttccataggtgtgtattttccttctcattgctcagaacttgaaatccttactagtgaaagcctggatgatgcaggttgacctctctgcttcccagtaaccagggctaagtagcttctagagacgtttatccattttctgtgcctccatttcctcccaaagaaaggcaagcacacacgtgcag

SEQ ID NO: 62721 - DNA, 1616 bp, Homo sapiens
tgctctttgctgatcattccctgttcgcttgctagaccagagctctctcctgagctccagagacagactaccagctacctcctgggcatcctctttactcagtcagttcaggctgagtgcctactgtgtactctcatgggcatggcattcagctcagggataggacgttgagggagacacattccaggggataagatgtctgaggacacgtgacccagcaggacagggtgtgtcctgcccagtagtggatgctcccaaggcccatgctcatgctgcagtctttgtccacacacctttccccaggtccgctgcccctcccatggaaagctcccttttggggccaattaggctaagggcatggggaagaaaaagaaagtcctgggtttccagcccaggcagaggatgctgccaccccttctgcttctgaagtatttcttgattgtttgtccatggcccctgcctgggtctggcctcctgctgctcacccacccatgtggtctccctgccaagcctcttctcttcctctcactcatgccctgcctttayccggccaaagtcaggccagcctttgtaaagctcttcggagctttctagcacatgcctccagggttaagtgagggtcttccctgtagcctcaccctcctctgcctggggctggtgtgtgctctggatccctggcaggtttggaaggggccctgctctcctgggagatgaggtgttgagacctgctgtgggtggttgtcctctggttgccccatgtcactgcctggggatggccctaaacaccagacctgtgactgttgacatcgcctccctcatgtttgctgagagcccagccccatggagtgctggggtaactgtgtgctgcttagctgggggcaggcctggcaggtgcacaggttgccacaagagtgtggggctgagtgacacactgtggtccagtcctggaattcctcagttaaagcagaattggtaaataatgatcccttcaagcttctggccgttccccaggtctgctacctctcccatgctctgtcttgtctttgcctctgctctggccagaacaggctcagccgcttcttggcagggacctcttctcggacttgtcctatggttgtttcttccccgcattcctaaatggaatgtgcctgttccccagattggaccttcagaccttcctgaaactgtctccatctccctggcccaggaaaccactctgaccccagccagctgaaggccaaagtgagcgctggcccctcccctccctcattgggagtccttgctttacactacttctggagggcagggctcttcccttctttctcttctcagggataaacaagctcagagctggcacacaacaggttgttggcccccgagccttcttccccgtgtgactgcctcctgggctttcattgtaacttttgtttgaacacagatttctgttgcttaggcctgattagagaaggcctgagaatccctggctagtgagtctgacctcctaaactcccttgccagattcttctatgtcctgggttccttcttgatttctccctgacctccactgtagtcccttagtgccacaggccaggtgacccctgtcctttgtcagtggt

SEQ ID NO: 62722 - DNA, 1560 bp, Homo sapiens
agggttgcctctctcagtaaatagtcacttcagggccggggggtggggaatgagccatttttatgtggcagcaaaacacagctgctcatcaacttatcactcagctgtgcctcggtggtgatccaagccacctttgggtctggacaagaggggtgcctaccatggaacccctgctttagaccctctctgaccctccactagctgagcccctccccacaggatgagggaagggaaagggccaaggtgggtttgcccacccagagcccactccctccttctgtctagaccaggctctgggtacgaggaccccagaatcccctatccaaataggcctggggctgattccaggacctgtccaggcctgttttctgggattgtctttaatcccagaaatcctgaaggcacaggattctacatccctgatgcataaccacatcagaaaacttgttctaatagatcgagttcctgcctccattcctgtcccctgtcctgagttctcctctgtgtgaaacatgtctacactgacaatatcattctgcataarcccctctctcacagcagcaaaaagatctgcactctagaaggtgctgttgaggacatctcatgactcaagtggggtgatgtcttctccagattgtcttggcagaaatgggaaactcctgagtgtagtgacctagtgtcttgagagtcctgcgtggtccccagagccagacagggcagggcggagctagaaggcctttccctggagaaactcatcctgaacgcagaacgaggccctgtctctccttaacctgacatgaaggcccagggtcagggtggatcctagatggtttggtccagagccctttgcagacaagaaaactgaagctcagaataggacagcgacttggacaaagtcacataattaatgccaccatttctaggtacaagaccagattcctttccagggccactgggcccctgaggatctggccccgatgacctctccagtttcacaaaggctcccagctatgtggccttttctctgatctctgaaaggcctctgcttactcggcccctggggtctttgcaacgctgtctcctcaagggcctcagagctcatgtggggccaagctgggatttgactccagggtgcaccgtcttaagtactgcacatgtcagtgggtgaggatgcttcataaaggtttgggacggacaaaagcttgagaacaatcttggctggggcactgagtggtggcttcctcttcctggatagagtatcagctatgcttattgtagtaaacagtagtcagcagttgttcattcttttttttttttttttttttttttgagatggagtctcgctctgtcacccaggctggagtgcagtggcacgatcttggctcactgcaagctcggcctcctgggttcacgccattctcctgcctcagcctcccgagtagctaggactacaggtgcccgccaccatgcccagctagtttttttgtatttttagtacagacggggcttcactgtgttggccaggatggtctccatcttctgacctcgtgacctcccaaa

SEQ ID NO: 62723 - DNA, 1560 bp, Homo sapiens
agggttgcctctctcagtaaatagtcacttcagggccggggggtggggaatgagccatttttatgtggcagcaaaacacagctgctcatcaacttatcactcagctgtgcctcggtggtgatccaagccacctttgggtctggacaagaggggtgcctaccatggaacccctgctttagaccctctctgaccctccactagctgagcccctccccacaggatgagggaagggaaagggccaaggtgggtttgcccacccagagcccactccctccttctgtctagaccaggctctgggtacgaggaccccagaatcccctatccaaataggcctggggctgattccaggacctgtccaggcctgttttctgggattgtctttaatcccagaaatcctgaaggcacaggattctacatccctgatgcataaccacatcagaaaacttgttctaatagatcgagttcctgcctccattcctgtcccctgtcctgagttctcctctgtgtgaaacatgtctacactgacaatatcattctgcataagcccctctctcacagcagcaaaaagatctgcactctagaaggtgctgttgaggacatctcatgactcaagtggggtgatgtcttctccagattgtctkggcagaaatgggaaactcctgagtgtagtgacctagtgtcttgagagtcctgcgtggtccccagagccagacagggcagggcggagctagaaggcctttccctggagaaactcatcctgaacgcagaacgaggccctgtctctccttaacctgacatgaaggcccagggtcagggtggatcctagatggtttggtccagagccctttgcagacaagaaaactgaagctcagaataggacagcgacttggacaaagtcacataattaatgccaccatttctaggtacaagaccagattcctttccagggccactgggcccctgaggatctggccccgatgacctctccagtttcacaaaggctcccagctatgtggccttttctctgatctctgaaaggcctctgcttactcggcccctggggtctttgcaacgctgtctcctcaagggcctcagagctcatgtggggccaagctgggatttgactccagggtgcaccgtcttaagtactgcacatgtcagtgggtgaggatgcttcataaaggtttgggacggacaaaagcttgagaacaatcttggctggggcactgagtggtggcttcctcttcctggatagagtatcagctatgcttattgtagtaaacagtagtcagcagttgttcattcttttttttttttttttttttttttgagatggagtctcgctctgtcacccaggctggagtgcagtggcacgatcttggctcactgcaagctcggcctcctgggttcacgccattctcctgcctcagcctcccgagtagctaggactacaggtgcccgccaccatgcccagctagtttttttgtatttttagtacagacggggcttcactgtgttggccaggatggtctccatcttctgacctcgtgacctcccaaa

SEQ ID NO: 62724 - DNA, 1560 bp, Homo sapiens
agggttgcctctctcagtaaatagtcacttcagggccggggggtggggaatgagccatttttatgtggcagcaaaacacagctgctcatcaacttatcactcagctgtgcctcggtggtgatccaagccacctttgggtctggacaagaggggtgcctaccatggaacccctgctttagaccctctctgaccctccactagctgagcccctccccacaggatgagggaagggaaagggccaaggtgggtttgcccacccagagcccactccctccttctgtctagaccaggctctgggtacgaggaccccagaatcccctatccaaataggcctggggctgattccaggacctgtccaggcctgttttctgggattgtctttaatcccagaaatcctgaaggcacaggattctacatccctgatgcataaccacatcagaaaacttgttctaatagatcgagttcctgcctccattcctgtcccctgtcctgagttctcctctgtgtgaaacatgtctacactgacaatatcattctgcataagcccctctctcacagcagcaaaaagatctgcactctagaaggtgctgttgaggacatctcatgactcaagtggggtgatgtcttctccagattgtcttggcagaaatgggaaactcctgagtgtagtgacctagtgtcttgagagtcctgcgtggtccccagagccagacagggcagggcggagctagaaggcctttccctggagaaactcatcctgaacgcagaacgaggccctgtctctccttaacctgacatgaaggcccagggtcagggtggatcctagatggtttggtccagagccctttgcagacaagaaaactgaagctcagaataggacagcgacttggacaaagtcacataattaatgccaccatttctaggtacaagaccagattcctttccagggccmctgggcccctgaggatctggccccgatgacctctccagtttcacaaaggctcccagctatgtggccttttctctgatctctgaaaggcctctgcttactcggcccctggggtctttgcaacgctgtctcctcaagggcctcagagctcatgtggggccaagctgggatttgactccagggtgcaccgtcttaagtactgcacatgtcagtgggtgaggatgcttcataaaggtttgggacggacaaaagcttgagaacaatcttggctggggcactgagtggtggcttcctcttcctggatagagtatcagctatgcttattgtagtaaacagtagtcagcagttgttcattcttttttttttttttttttttttttgagatggagtctcgctctgtcacccaggctggagtgcagtggcacgatcttggctcactgcaagctcggcctcctgggttcacgccattctcctgcctcagcctcccgagtagctaggactacaggtgcccgccaccatgcccagctagtttttttgtatttttagtacagacggggcttcactgtgttggccaggatggtctccatcttctgacctcgtgacctcccaaa

SEQ ID NO: 62725 - DNA, 1637 bp, Homo sapiens
ggcccaaaaacaacttcaagaaaaatatccttatttaggggaatgtgcatgttgaagaagaaatgagtattgcctttgacacaaaataaaatatacaagacggtgcaggacattagtttccctatggccacgttcgtattatagcctaaaactgaccttatttgttttgatacctacaaaagcaaaggtttctttaactccaattcttgtgttcttccctttctatttcaactcttacatctagagagggagagagattctaagtaagactcaataggtatgaagctgtgctaaatatcttttcaggctcagttgatattgatggattgccttgctttaagagctgtgtaagttggatttcacattctgaggttacaaagaggtcatatttaaattttggagtgagtctattttttgttgacaccaccaccaacctgtgattctgagttatcaaaaacaaatgtgtgatagccgggcaaggcagctattgagaaattcaagaagtgagtggaagaactgtattttttttcttaaaaaagcctccctatgatagtttccttgaacacttctgtttgtgccataaccctggttcattagcagaaagacaatagatggattaaacacagaaggcagagtcattcaacgaccagatgccaagcaaatggcaatctttggcatatctagtgttctgatatgggcagtaatcaaaygactatcagatgtgcccaatcagttgttatttcatttgcaagggcctgaaggtatcatttaatttaaagcacaatggaatcagaaatcatttaatgactgattgctgtttctcctagaaactgattttggatttggcagtctgaagaccccaaagtgccagagtctatgcatgggctacattaaaatacagctaggatcttgaatgagttaattagaccagttcttccaactttttcagcaatgttgtgattcttcttgacaaaataaatgtaacttctaaaatttcctcccactttttctaaacttccaatatttttgttctataacttttagcaactgaagaggaataatagcaatccattagtattttaaatatttccctaagcctttaaacataatacagatactattttgaaatatagaatatcgagaccagaagatctcaatgccagccttgtaaaatcaaggttatttgtacaatctactaggatctcattacatgtacatactggaaatgtttatttgattctgtaatgagtgtaagacaaggggaaggtacaatacaattcttatctagagtaaggctgacacaggacttatacattgcctcccatcacactcccacaaatgtatacatgctcaaatatttgaataggcacaggtttttgaagcttcccctctccaagcctttcaatgataaacctctgcattttattcccctgggacttctgttggctacaaaagctgggggcaaccagaaccttaacaattgtatatttctgcaagatatatccctatttgaaattgtgccatggagggcttgcccaaaggtgggaagctggagaaattcctggtctttgtctcactggttagggaagccattcatatatccccaaactagggtttccctcctcatacagagactg

SEQ ID NO: 62726 - DNA, 1637 bp, Homo sapiens
ggcccaaaaacaacttcaagaaaaatatccttatttaggggaatgtgcatgttgaagaagaaatgagtattgcctttgacacaaaataaaatatacaagacggtgcaggacattagtttccctatggccacgttcgtattatagcctaaaactgaccttatttgttttgatacctacaaaagcaaaggtttctttaactccaattcttgtgttcttccctttctatttcaactcttacatctagagagggagagagattctaagtaagactcaataggtatgaagctgtgctaaatatcttttcaggctcagttgatattgatggattgccttgctttaagagctgtgtaagttggatttcacattctgaggttacaaagaggtcatatttaaattttggagtgagtctattttttgttgacaccaccaccaacctgtgattctgagttatcaaaaacaaatgtgtgatagccgggcaaggcagctattgagaaattcaagaagtgagtggaagaactgtattttttttcttaaaaaagcctccctatgatagtttccttgaacacttctgtttgtgccataaccctggttcattagcagaaagacaatagatggattaaacacagaaggcagagtcattcaacgaccagatgccaagcaaatggcaatctttggcatatctagtgttctgatatgggcagtaatcaaacgactatcagatgtgcccaatcagttgttatttcatttgcaagggcctgaaggtatcatttaatttaaagcacaatggaatcagaaatcatttaatgactgattgctgtttctcctagaaactgattttggatttggcagtctgaagaccccaaagtgccagagtctatgcatgggctacattaaaatacagctaggatcttgaatgagttaattagaccagttcttccaactttttcagcaatgttgtgattcttcttgacaaaataaatgtaacttctaaaatttcctcccactttttctaaacttccaatatttttgttctataacttttagcaactgaagaggaataatagcaatccattagtattttaaatatttccctaagcctttaaacataatacagatactattttgaaatatagaatatcgagaccagaagatctcaatgccagccttgtaaaatcaakgttatttgtacaatctactaggatctcattacatgtacatactggaaatgtttatttgattctgtaatgagtgtaagacaaggggaaggtacaatacaattcttatctagagtaaggctgacacaggacttatacattgcctcccatcacactcccacaaatgtatacatgctcaaatatttgaataggcacaggtttttgaagcttcccctctccaagcctttcaatgataaacctctgcattttattcccctgggacttctgttggctacaaaagctgggggcaaccagaaccttaacaattgtatatttctgcaagatatatccctatttgaaattgtgccatggagggcttgcccaaaggtgggaagctggagaaattcctggtctttgtctcactggttagggaagccattcatatatccccaaactagggtttccctcctcatacagagactg

SEQ ID NO: 62727 - DNA, 872 bp, Homo sapiens
aaaatgtcacgctggaacagtcctgcgcttgactatggtgacagctgcacaaatctgcacgtgatgaaatcacacagaactacctatgcctgcgctcacacaggcgtatacaagtgagcacacgtggagctgtgaaagttctgaagactaaggtctgtggattgtaccaatgccagtttcctagtgttgatactgtactgcggttatgtcggatgctaccattggaggaaactagtatacggacttgtctactattttttgaaacttcctgcgaatcaaaaatcattttaaaataaaaagtttaaaaaaaaatcctaggccagtggaaatggatctggctatgtctctccaacttcctgggatgtaagtccccatgctctctcaggagccgatgatgagcctattaataagagtgagagcttcagcacatcatcgtcaaggttccaattgattgaccacgtactatgtatgaggcactaagatatttctttcttttgaacactttctcagttgcacaaaacatgcccacaaggttaccatccccattttacagaagatgataatgatgctgggcaaagctggcttgcaccaaggctctgtagggccaggctctaactcagcaggcactgaggctccagtgctcatatctggggatgactaaccagcaaagcacagktttctgtgacagtattgtggcatccaacgtgtgttccctagaaatcactcaagcacagccctcaatttcatctctgaaggcacctgaccaccctcttgtcccatccctcaccctcactctggtcagagagcccaagtagccacatacgtagtgaagcaaggaaaacatcacttacaggttcttcaatggtgatgcc

SEQ ID NO: 62728 - DNA, 1416 bp, Homo sapiens
tccaagagcttatccatttactcagactttttgattattttttgtgcaatttcacagacttttggtgatgcataaaatttttttagagtactagtttgggcctggcatggcagctcactcctgtaatctcagcactttgggaggctaaagcagcagaatcacttgaggccaggagttcaagaccagcctgggcaacatagcragacctcactaaaaataaaacaaaaaataaaaataatacaaaaaattagccaagcatggtggcacactcctgtagtcccaactacttgggagactgaggcaggaagatgtcttaagcccagaaattcgaggttgcagtgagctataatcacaccactgcactccagcctggatgacagaacaagatcctgtctctaaaaacaaacaaacaaataaacaaatactactttgctcattcatttaagtcagtaaattgtgacaaatggaaaaatgcaagaaaaaaaaggaagctggacataaagctagaatggaaaatgcatgagctcttgctggggtgggtcctaatttggcttttagcttcctagcagcccttgcaaagaagaaaacaagatctgttaggtaaatctctatagcagtggttcccaagacatggtctcctgaccagcagtatcagcactacctgggaacctgttagattgtccctctccaccctcgaatctgggagtcaggcccaggcatctggtttaacgagccccctaggtgatgatgatacatgctgaggagtacgaaccacttatgttagaataaatacacaccagcttctaacattgatatcgcagagaaatttctgcatgacacagtgagctattatattgaccaaatccccattataaacaccatcatgtacttaataggcctttttcttaacttcctacttagcatacactcatgaaaccttctcaaggcacagcttaatgaaattagttccagaggcaccaagctatgtcacccagacacacagcatgatgggctggtttcatgctcatgcacacttctgagtagtgaaagcctggagaatatcccagcattgctgttagaagccaggactctggagccaggctgacccaaatttgaatcttaggtgcacctttcattaactgagtgaccttggccaattcccttaattccctccctctgcctcagtttcttcatgtataagaggaaaatgactattttatgtattccatggagttgctgtaaaaatccaatgggctaacagaccgtatgcttagtatggtgcttagtatgctaatgagtccttataaatgttcccacgattatgaactgctagagtgtgtttcctgtaggtaaacctccaagccatcaaacctatgtccatgtctcctgccaccatctgtcctggatgattattgt

SEQ ID NO: 62729 - DNA, 688 bp, Homo sapiens
caagtcacacagccaagcccacaggcagtggggctgggaaggacagagagagaagggagaatcgctactgaatgacagtctaccacacctattgtgcaaagtgctggaagggaggatttgttcattcattctgttaatatatattaactgaacacgtgccaggcactggcctaggtgctgaatatgcagcagtgaatgaaatagacagaagtacttttcctcctggagttcatgttcaagtgaataatggccccacacctcgattaatccacaaacacttaactgtctaccctgtcaggtttccatatgtgccagacacatcatgtccacaagagattctctgcaaccagcgagctcatggcccacggggaaaccagacagacagacacccaatgacaacattgaaggcttgcacgcacgaggggccagaaaacaccccacatggagtgggtcccactctaggccactctcccatcccttcccttttccaaatttcctccctagccacatgccttggtttccagggccagccagctgtgcaaaatgcctagcaagctctcagcaggcccctgctgggcacagcacagagaaattaagtgcaatyagcgtaactaagccatcaccagtaagaggcacttgctctcctggcggctccctttcggagactaatggggatgactagagagga

SEQ ID NO: 62730 - DNA, 915 bp, Homo sapiens
ctgtgccacgcatgctctaatcattactggctttaacccttgcactaacgttgtcatgcaggtaggagcatctgcacccagcaaatggaaactgaagctcaggaatattcagtcacttgtccaaggctccccagctgttaggtgctaaggctggattcaatccaggacttgcagactccagtatcttggcttttctaacgagagtgtgctagctttctaatgggggtggggaaggcagtctgcccccctcccatggcaccgtgagcaggtgtcactgctccagccagtacgcctggacaccgactaggaaggagtatgtgctactaggagggatggtctgggctgactctttgaagttgacaaggagttgcataatcccagctaataattatgctggaccaggggcagagacattactccaagggtgaccaggtgtggagaagaggctgctgactccggggccccaggacctggcccccaggtctcattgcccgagtgctgccccagaaggagtagaagctggagctgtccgggccacagccgaggctgggtgartgctgcagtgaggctgccgcacaagttgcgtgttgtgacatttgtcttctggaggggattgggatgggctacttcagcatttaaaaacccctactaggtctgagaaatcccctcagcttatgagcctgggtgggcagcaggccttctcaagaagcccagaaggccagatgctcacttcccaggctctcttgcggctgagctgagagcaggcacctgaggcctggcaagtgtgacagctggtgacacagacagacagggacagggagatgggactgtgcctgcagcggtagccctggccggtgttcagtggggccagcatccgtgtctttcctgggggccagtgggggccgtggctctgac

SEQ ID NO: 62731 - DNA, 631 bp, Homo sapiens
tgctgttaatctgtctccagcaaaattaacctagcctatgtcccatgccctctggactctggctgctcgtcaatcactcttaaaaatccggtttctccttaggcaatcattttgttttgattttatgtgtaaaaaaacctgagtaaattttttttttttttgagatggagtcttgctctgttgcycaggctagagtacagtggcatgatttctgctcactgcaacctccgcctcccgggttcaagcgattctcctgcctcagcctcttgagtagctgggactacaggtgcccaccaccatgcctggctaatttttgtatttttggtagagacagggtttcatcatactggccaggctggtctcaaactcctgaccttgtgatccacgcacttcggcctcccaaagtaatcactgctgggattacagaagtgagccaccgtgcctggccaaacctaagtaaatgttttaaaattatactactaacatagcatacaggctttagactgttggttgcttttaagtttgcttactttaaaagctagagagaagatggttgaggtgatcttgtctccttcagtattcactctgagccatgcctcctgaggaagtttgctttaggggaggcattgct

SEQ ID NO: 62732 - DNA, 631 bp, Homo sapiens
tgctgttaatctgtctccagcaaaattaacctagcctatgtcccatgccctctggactctggctgctcgtcaatcactcttaaaaatccggtttctccttaggcaatcattttgttttgattttatgtgtaaaaaaacctgagtaaattttttttttttttgagatggagtcttgctctgttgctcaggctagagtacagtggcatgatttctgctcactgcaacctccgcctcccgggttcaagcgattctcctgcctcagcctcytgagtagctgggactacaggtgcccaccaccatgcctggctaatttttgtatttttggtagagacagggtttcatcatactggccaggctggtctcaaactcctgaccttgtgatccacgcacttcggcctcccaaagtaatcactgctgggattacagaagtgagccaccgtgcctggccaaacctaagtaaatgttttaaaattatactactaacatagcatacaggctttagactgttggttgcttttaagtttgcttactttaaaagctagagagaagatggttgaggtgatcttgtctccttcagtattcactctgagccatgcctcctgaggaagtttgctttaggggaggcattgct

SEQ ID NO: 62733 - DNA, 683 bp, Homo sapiens
atgatcaagtgggcttcctccctgggatgcaaggctggttcaacaaatgcaaatcaataaacgtaatccagcatataaacagaaccaaagacaaacaccacatgattatctcaatagatgcagaaaaggcctttgacaatattcaacagcccttcatgctaaaaactctcaataaattaggtactgatgggacgtatctcagaataataagagctatttatgacaaacccatagccaatatcatactgaatgggcaaaacctggaagcattccctttgaaaactggcacaagatagggatgycctctctcaccactcctattcaacaaagtgttggaagttctggccagggcaatcaggcaggagaaagaaataaagggtatccagttaggaaaagaggaagtcaaattgtctctgttttcagatgacatgattgtatatttggaaaaccccatcatctcagcccaaaatctccttaagctgataagcaacttcagcaaagtctcaggatgcaaaatcaatgtgaaaaaatcacaggcattcttatacaccaataacagatagagagttaaatttgatattttaagtactatagttctgctttcagatgccatgacttgctagatgttcattaaatcattaatatttttattttacagcttatatatactggaagacttttta

SEQ ID NO: 62734 - DNA, 683 bp, Homo sapiens
atgatcaagtgggcttcctccctgggatgcaaggctggttcaacaaatgcaaatcaataaacgtaatccagcatataaacagaaccaaagacaaacaccacatgattatctcaatagatgcagaaaaggcctttgacaatattcaacagcccttcatgctaaaaactctcaataaattaggtactgatgggacgtatctcagaataataagagctatttatgacaaacccatagccaatatcatactgaatgggcaaaacctggaagcattccctttgaaaactggcacaagatagggatgccctctctcaccactcctattcaacaaagtgttggaagttctggccagggcaatcaggcaggagaaagaaataaagggtatccarttaggaaaagaggaagtcaaattgtctctgttttcagatgacatgattgtatatttggaaaaccccatcatctcagcccaaaatctccttaagctgataagcaacttcagcaaagtctcaggatgcaaaatcaatgtgaaaaaatcacaggcattcttatacaccaataacagatagagagttaaatttgatattttaagtactatagttctgctttcagatgccatgacttgctagatgttcattaaatcattaatatttttattttacagcttatatatactggaagacttttta

SEQ ID NO: 62735 - DNA, 683 bp, Homo sapiens
atgatcaagtgggcttcctccctgggatgcaaggctggttcaacaaatgcaaatcaataaacgtaatccagcatataaacagaaccaaagacaaacaccacatgattatctcaatagatgcagaaaaggcctttgacaatattcaacagcccttcatgctaaaaactctcaataaattaggtactgatgggacgtatctcagaataataagagctatttatgacaaacccatagccaatatcatactgaatgggcaaaacctggaagcattccctttgaaaactggcacaagatagggatgccctctctcaccactcctattcaacaaagtgttggaagttctggccagggcaatcaggcaggagaaagaaataaagggtatccagttaggaaaagaggaagtcaaattgtctctgttttcagatgacatgattgtatatttggaaaaccccatcatctcagcccaaaatctccttaagctgataagcaacttcagcaaagtctcaggatgcaaaatcaatgtgaaaaaatcacaggcattcttatacaccaataacagayagagagttaaatttgatattttaagtactatagttctgctttcagatgccatgacttgctagatgttcattaaatcattaatatttttattttacagcttatatatactggaagacttttta

SEQ ID NO: 62736 - DNA, 621 bp, Homo sapiens
agataactccttcccagcccaaacaggaaaagcagcaggcagcctatgagctggtccctgtcaatgaacacttggttccaggctgagaacacaggaaggggcctgaagacagcaggagcggagtcaggcaggtgtggtctggggaagaaggcaggggaagagctactggaccctaacgctgtgtctcacactggacaaactgcttagaactcgggaggcacttttggttcttagaccagagggaggtgagatttgagggcttctggaaaccctaggaacaaagtgtccaagtttccctttacaggcccactgccccccactctgctttcccaggctgggggcaaygtccagcccggagctggctccaaatatctcaccaactggggcagcctaaaacagggcaagacaaggaaggggctttaacagaaagacacagaacgtagaacctcaagtatttagggatttgtttccccaaatggaaataatgtattcaaaagataggaaatcagtatgtcaaagagatgcctgcactcccaagttcgtaagagccaaggtaaggaatcaacgtcagtgtccattgacggataagaaaatgtgtacagacataatggaatatgattc

SEQ ID NO: 62737 - DNA, 662 bp, Homo sapiens
tgcatagaaaacatgcacatgtgagctttcctcagatggaggttggtttgggcgttgctaattcagatgcctctaagtgtgaaaamtaggttgaggagagtgtaacagtcaaaggtacagagtgattgtgtgcccaataaatacattttaagaagttctacctccctataataaaagacacaaattttaataataattttaataataataagtggcttgctaagtcacaaatatatgcttatagttttagtgatataaacccacccatacctcctggtgagagttaattgattcagaatttctggatatgtatcaaaacccttaataatgtccactgtttggtctaaggaaaccaaaatggaagtttgcaaagctgaagttataaagaggtttgtccaaaaaaaaaaaaaaaaaaaaaaaaaagagtggtggggagttagggggcaaggaaactcaaaggttctatctcctttggctgagaatttaatgaagtagacacatccacgtgataaaacacaggtgggcggatcacgaggtcaggagatcgagaccatcctggctaacacggtgaaaccctgtctctactaaaaatacaaaacaaacaaacaaacaaaacacagggcattcactaaatccatgcaccaagagaataatctttattg

SEQ ID NO: 62738 - DNA, 1452 bp, Homo sapiens
cacagtgcaaatgtgtatggccccatttaaccatctcaacacactacgaggttggcgtctcatttttacaacggaagaaactgagaggctcaggaataccgtatcctatgcacatctcccaagagggtcctgttctccagcgcccagcgatctgggcctcgcggtccgagtccggctccmgggccgccgcccagcccttctccgcgctctcctgcgcctgggccacttccgactcctgctgtccggtccccagctcctcctcacccactccgccccgccatgccccgccccagccgctcggctcctccttccctgcacgctccgcccccgacctcccggctcctccccggcctgcccgccacacccttggtccctcctgcaagttccgcccctggcctctgcctccttttctcccgccggctctaacccgcgcttggctaaggtccgcgggaacccgtgagccaccgagagagcagagaactcggcgccgccaaacagcccagctcgcgcttcagcgtcccggcgccgtcgcgccactcctccgagtaagtggctcctgggcgcgcccgtcccgcgcacactccagcgcgcctctcccgccgctgggctgcgggctgctctcggggagcgcctccggctcagagagtttctgaagcgagtgtgagtgagtgtgagtgggtgcgtttgaacaacttgtttaggtgggtgtgcgtacgagtgtgtgcaggagcgcacagcctcggaaactccgcgaaattttactcggttccagtgccgcactgaggatccaagaccccttttaggaacccttacctattcagggcgacctcttaaccacctcctgccgtgagcctcattccttccctccctttgtaactgggttcccgctatttgtcacgtcctcctgtaaccgcacatactggcgaaagcactgcccgggttatcagggtgccccagattgcagactgagatgctggcctgagattgtaatccaaccttgcattgtaaaacgggcagagaccagagccctgctttgagatcattcggtggagacttcctttgaggaagaaaatgtgtgtgtgtgtgtgtatgtgtgtgtgtgtacatgactgcacatgtcgcactggagccctcagcacctgctgcaaagacacctgatgagcgcccaggctccacggactcctcgcgactgataggcacgttcaagaccaggctgacccaacaggcttaggcaccttgaatatgtttattgcttcagtgacactgtatttctaaaccaacagattttcgaaaacacagaagctctaagtagaaaaagcagtatccctagaggaatcatggaaggaatcaaacagtagttcagtgcccagtgttgaaacaagaaaatccttggattgcttaagactgataattccatccctacataattatttttatggggggaggtggggg

SEQ ID NO: 62739 - DNA, 1633 bp, Homo sapiens
caagcacatgaaacattttgcatctcacttagcttttgaattaagtgctaaagtgtatgctgctgaccaattcatttattcagcaaatattaaagtgcttattattcactaggcattcatgtgtgggttttgaggttaaagggacaaacaaaattaagttagttttccttgctatagacagagtaaatgcaactagcataaaatctagtagaggcagcataattactggttaagaatgacctgtgtcatgacacatgcctggcattacaatcccagctacttgggtggctgaggcaggaggattacttgagcccaggaattcgcatctagcctaggcaatatagcgagatgctgtctctaaaaacaaacaaacaaacaaacaaacaaacaaacaaaaaaaccatgtctgtcgtctgttttgttcatttgtgaatctccagcacatgggacagggtctggccagtggtaagcactcagtattagttgctgactgaataaatgctgatagaaatagtccctgtcctcttggaacttacaaactagtggtaagaccaggttttcccggatatgttcatatgttctgtgaaatgtttcctctctctgtcatatacacatgcacacacacacaaaaacagacagattcaaagacatacacggtgccctgtggtcttgttgatggagtctggaacaaaatttgtgtatcatgcatcctctccatatccacaaacttttcttctaaccttgtccaacccaaatcagtaagaacttgaaacactcacaggtggtagagttgagttcatatcactgattgggatttgtttttttgtttttgagaaccagagagacagtactgtgtagtggttaaaagcatcagctttggagccagagagaaataggtccaggtcctggctttgccttggataaatttcttaagactgcataagcctcaattactttatctataaaatgaggacattaataggacctgcttttcagtgctgtcaggagttagtaagattaaagcatgtatggcgcatagtaaagtactgtactcatcctaaccacttactacaagttaccaattatttattttttttcattattttctgtcacctaggctggagtgcagtggcatgatttcggcttactgcagcctccacctcccgggttcaagcagttctgctgcttcagcctccccagtagctgggatcacaggcactcaccactacgcccggctaatttttgtgtgtgtgtggttttttgttttgttttgttttgtgttttgtttttcgagatggagtctctctttgttgcccaggctggagtgcagtggtgcgatctcagctcactacaagctccgcctccggggttctcaccattctcctgcttcagcctcctgagtagctgggactacaggtgcccgccaccaggcccagctwattttttgtatttttagtagggacagggtttcaccatgttggccaggctggtcttgaacccctgacctcaaatgatccacctatcttggcctcccaaagtgctgggattacaggtattagccatctcacctggccataagttactgataattcttattcctgaaatgggagaagaatccttattatgtgtgtat

SEQ ID NO: 62740 - DNA, 1633 bp, Homo sapiens
caagcacatgaaacattttgcatctcacttagcttttgaattaagtgctaaagtgtatgctgctgaccaattcatttattcagcaaatattaaagtgcttattattcactaggcattcatgtgtgggttttgaggttaaagggacaaacaaaattaagttagttttccttgctatagacagagtaaatgcaactagcataaaatctagtagaggcagcataattactggttaagaatgacctgtgtcatgacacatgcctggcattacaatcccagctacttgggtggctgaggcaggaggattacttgagcccaggaattcgcatctagcctaggcaatatagcgagatgctgtctctaaaaacaaacaaacaaacaaacaaacaaacaaacaaaaaaaccatgtctgtcgtctgttttgttcatttgtgaatctccagcacatgggacagggtctggccagtggtaagcactcagtattagttgctgactgaataaatgctgatagaaatagtccctgtcctcttggaacttacaaactagtggtaagaccaggttttcccggatatgttcatatgttctgtgaaatgtttcctctctctgtcatatacacatgcacacacacacaaaaacagacagattcaaagacatacacggtgccctgtggtcttgttgatggagtctggaacaaaatttgtgtatcatgcatcctctccatatccacaaacttttcttctaaccttgtccaacccaaatcagtaagaacttgaaacactcacaggtggtagagttgagttcatatcactgattgggatttgtttttttgtttttgagaaccagagagacagtactgtgtagtggttaaaagcatcagctttggagccagagagaaataggtccaggtcctggctttgccttggataaatttcttaagactgcataagcctcaattactttatctataaaatgaggacattaataggacctgcttttcagtgctgtcaggagttagtaagattaaagcatgtatggcgcatagtaaagtactgtactcatcctaaccacttactacaagttaccaattatttattttttttcattattttctgtcacctaggctggagtgcagtggcatgatttcggcttactgcagcctccacctcccgggttcaagcagttctgctgcttcagcctccccagtagctgggatcacaggcactcaccactacgcccggctaatttttgtgtgtgtgtggttttttgttttgttttgttttgtgttttgtttttcgagatggagtctctctttgttgcccaggctggagtgcagtggtgcgatctcagctcactacaagctccgcctccggggttctcaccattctcctgcttcagcctcctgagtagctgggactacaggtgcccgccaccaggcccagcttattttttgtatttttagtagrgacagggtttcaccatgttggccaggctggtcttgaacccctgacctcaaatgatccacctatcttggcctcccaaagtgctgggattacaggtattagccatctcacctggccataagttactgataattcttattcctgaaatgggagaagaatccttattatgtgtgtat

SEQ ID NO: 62741 - DNA, 853 bp, Homo sapiens
ttttcctctgatctggtgaggctttgcctttgtgctccttgaaacgggcccttcccctgagcagaaggtatgtgggtgcagcacccattggttctgggttgtcccatggattcagtgtcaggttttcagactgtgttcttgttgtattgcattttcaggactagcatgttgggaactcctggcgcacagagtgtctgactccacagtaaggccactgtggtccccacgcctgcttgcccttttctttgtctacaccctgatctgttccttcctgggtttcacagcctaggcccctggcatgtggggcatagaccccagcctctctgtgaccttccttttctgaccactgcatcagtgggtgccagggattccacctgcccagacaggccctttcttccttcctgccctttcctttcttgactgatctttttggtcttcatttcttgcccatcasaaccttttgcagggcactacaaaatgggacccttggccaagatgtgacccagatgcattttgctcaacttatacactgtgttcagcttttaaaattttcatctcacttagtggggcatttgtgcgagtttggccaaagactctgctgctccctattgtgttcctcctggtcggtcatacatttcatttatctgcctggcttctagagacaggtgagttggtgacctctgaactttggtatctcttgcttctcaaagcattcaccatgtggtgatgaccttgggctgccctattttattcatgacctgcactagttcagcaagacattcttgccctggttcactcaccctgttaggtcctggcctgtgggccattccgactttttctttcatcctcttga

SEQ ID NO: 62742 - DNA, 1266 bp, Homo sapiens
cccattatttaaatcaggtccaagtatctattaggcttttttttttttgagactcagtctcaacgcccaagctggagtgcagtggtgggatctcggctcactgcaacctctgcctcctgggttcaagcgattctcctatctcagcctcctgagtagctggaattacaggtgcccgctaccacgcctggctaatttttgtattttcgtagagatggggtttcgccaagttggccagactggtgtcgaactcctcacctcaagtaatccgcccaccttggcctgccaaagtgctgggattgcaggcctaagccactgtgcccggcctctactaggcttcttaagtgaggttttaaaagtatgatacctttcattctgaagaccggtgaactaaagagacaaattktgtgcctcctacacaccaagcatacagtgatgaaacaaagaagagctctctcccattcaaaaagaaggaaacattagaattacatagcagtccctggtccatagagattctaaaatttagataggcacttgttgccagttccttaaataacccttttccctgggagttactctccacagatcttggctcctccctctgggcttcccaccaccctatccccactcccagtcattcttccttttccataaaagtggaccacggtttcaactgattagtcttctcagcttgatttctggccatagaagtttgaaggttgaaaggcttctttaaattttatgtggttcctgtgttttacagttcaatctagtaaaattctttttaaaactttgtggatttcttatatactgaattataaaccactccacttgacaaaagccacaccagtatttttttttttctgagacaggctattctttaccttgggccacctgtgagattgctgtggtgtaccaccttcagattcttagaaatcctagtgtctcacagaaaaggtctacatggcacacccttaaatccttctgagatcttaacaaagggaataacaactaaaatctcggctatatttttactttgagatcttttttttgtggagacggagtctcgctctgtcacccaggctggagtgcagtgggcgcgatctcggctgactgcaagctccagcctcccaggttcacgccattcttctcagcctcctgagtagctgggactacaggcgcccaccaccatgcccagctaattttttgtatttttagtagagacggggtttcactgtgttagccaggatggtctcgatctcctgacct

SEQ ID NO: 62743 - DNA, 641 bp, Homo sapiens
ctttctccattttttgctcttattttttgcatagaaatctgtgtcacatgggctgggcgcggtggctcacgcctgtaatcccagcactttgggaggccgaggcgggtggatcacgaggtcaggagcttgagaccatcctagctaacacagtgaaaccccgtctctactaaaaatacaaaaaaattagccgggcgtgttggcaggcgcctgtagtcccagctactctggaggctgaggcaggagaatggcatgaacctgggaggcggagcttgcaggagccgagatcgcgccactgcactccagcctgggcgaccgagcgagactccgtctccaaaaaaggaaagaaaaaagaaatctgtgtcacatttgtagatgtttactttttaaatatttaacaaatacttgaatttctgtgtatttccaaatccacgaatttcagtattgaaaaacactcaactatgttatcttcttattcaaatggtaagaaaatgtggaaatgtgtaaggaaaagcttttccctgccccaatttcttgagataaccagcattaacactttggcatgtaggaatgctytacctttttttgtgctcataagtatttatttatatatacatatttggggagttagtaatctttgtatt

SEQ ID NO: 62744 - DNA, 1815 bp, Homo sapiens
  misc_feature (1)...(1815): n = A,T,C or G
tactgatgctttaggctccactttgataaaaggaaaacctgaatccttccttgtaaacataccatgtagttttgctttttgaatatacttctagcacttgccacaatgtgtaacatttatgtaggtttgtcatatgttttatcgtatgcttatcatacgttctgccttatcttatatgcatattkgttttatttcttcaggtgaagggcagagattggcacttgtatctatttgtatcccctatagcaccttatactgtgccttgtaggaattcagccaatttttgtaggatgaagtgtataaaagatactgaagcaaccagccattcacattaacacttgtgtacataaaacaacaactgattgagtataggtctaaaacaccaccaagttctccatgatatgaaatgaacaacagttttggatgtcttctgtctctacacaaacacaatgttcttatttcttttgtacttcagtgctgagtactttacccatagtcagctcatgcttcaggggtggatggatagttgaatgacttaaggcaataaaagacaggagagagagagagcatgatgcagggaatttggaaggcctcttaggtgatggagaactggagtcggatttgaaggaccagtagaacttggataggcagaggagaggggaaggcatttcagattggagagcttagtataaaaggcacaatcaagaagcctcaggccattgtaataagaatgctagtgacagcacgtagccgtgtgagctctgagaaagatgggaacagaggcctcattatttcgcattttgtttcctcctcttctgtgagcagcatgtggtcagtcagtccactgggatttgagcttgttgttgaatctctgttctgcacttactagctacatgaccttgggcagttactgtatctttttaagcctcagtttcctcacttgtaaaataaggatattatccacttcaaagggtagttgtaaggagtgataatatgtacaaagtccccagcatagtcctagacttgcaacatttgtttctttcaaaaacaaggtaaggcttctttaattgtaggaatagatttttgccataatttatttatgcatgatgtgagaaatgtgaagtagcttaatttttttccgtctctctgtaaaaatagaacataaatcatatttgtgcttttgtttctaataaggtgaagaaagcaagggtgcctggaaacatgtgactctgactgtactgttccactgaaatttcattagtatgccctgataaccagacaacagaggcagagagcacagaccacgttgttattcagttcagacattggcatgtttcgcttcatcttccagaagattcaaatatagcctgtcttctctttcctttcctggcctctgaggctcagacgcctctcctgttccttttgtgagctgcacaaatctgctttcaccctaacttgcagtttgtgatccaaagctgttaagattgaaacacagtccccctccttccttacacccactcttctctctgagtctgatcctccctgcttatttcttatcttattgtcagaatctgaagccagatttcagggtgtctttctgtttcccttttccatacacctcccaaatagctnatttatttcctactcccttagtccaggttcttaactttggttgaactagtgcaatagggacatcaaaatggctttccatttctacttgcactccccactcctgtcttctgccaagacgttttttttctaagatgtgaaattgatcatctaatgcttgctttcagtagttccaaaatacctaca

SEQ ID NO: 62745 - DNA, 756 bp, Homo sapiens
tttcatgaagaaacttcatcacagagctaagtgaaaaggaaggagtgaatgaattatgtaggcatcacaatgagcaaagatgtggaaggttttagagatggtgaaaagattggcttggctaaagcagaacattattagggtagcctgaggctatttcagagcttggctatcctatctgttgcagggaggttagtaatcgaagagttttctgaagaaagcaaagcagttcaatttgttaacatcagggaatgacttactgcattcctgcctgctcacttgaccatgggaaggtcaggcagacacacacatggatagtccaagggtgatgaagggtattgtaacaaaattcaaattgtgtgcttcacccaggacacaagagtatagagaaagaagtggctggtgtaattagtgatcatccagatcctgagtgataaaggaaggtaaagtagagatttaacatakaatttggaatttgatgccatttataataataatctatattactgcattaaagctgctgcattgtagtggaattaggtgaaaaggggatagctgtataagacaatcttttcaagaattcatcttcagagaactgacatttccagaagagctagcccagagtttgtcagatgctcttcttttggacaaatgagcttcctgatgagtttcattctgctttttgagacagaaaaatcaaactagctcacagatttaataaaaggccaatgagggatcttcactgagaatctctatgga

SEQ ID NO: 62746 - DNA, 756 bp, Homo sapiens
tttcatgaagaaacttcatcacagagctaagtgaaaaggaaggagtgaatgaattatgtaggcatcacaatgagcaaagatgtggaaggttttagagatggtgaaaagattggcttggctaaagcagaacattattagggtagcctgaggctatttcagagcttggctatcctatctgttgcagggaggttagtaatcgaagagttttctgaagaaagcaaagcagttcaatttgttaacatcagggaatgacttactgcattcctgcctgctcacttgaccatgggaaggtcaggcagacacacacatggatagtccaagggtgatgaagggtattgtaacaaaattcaaattgtgtgcttcacccaggacacaagagtatagagaaagaagtggctggtgtaattagtgatcatccagatcctgagtgataaaggaaggtaaagtagagatttaacatagaatttggaatttgatgccatttataataataatctatattactgcattaaagctgctgcattgtagtggaattaggtgaaaaggggatagctgtataagacaatcttttcaagaattcatcttcagagaactracatttccagaagagctagcccagagtttgtcagatgctcttcttttggacaaatgagcttcctgatgagtttcattctgctttttgagacagaaaaatcaaactagctcacagatttaataaaaggccaatgagggatcttcactgagaatctctatgga

SEQ ID NO: 62747 - DNA, 685 bp, Homo sapiens
tggaacaatgaacaattatagtagattaaataccagttgttaaaacacactgtatctatacaaaagacaaatgagaaggaaaattaaaactaaatatatttaatgagacccatagccatcttctgctcatcttagttgtcagtgtgttttttattttagtctggtttttcctgtaaagcagtaaagatgttgaattttgctctggaaattaaaccaagagaggtaaaatttttttattcctctgagaaatattgcagattattgtgttccatgaatagtataattactttcacaataacagaagactgaacagtcacaggtgttgggttttgcattgcaaagtgtgggtgaagccatcattagcagctttgttctcagtgtcaccaaaaacaggcatcgctgtstgcctcatagttgccaatattccagggtattcgtagagtcagactctcaaacatcttgaaccaacaattcctagaggaggctacccattttagaatgtaatttttatcatgcccttctctccttcagccacagacctgacatgagcagcaagtgtccagaactgcaggactctccttgaaaggcacatctagtgatgagtcttcactgtcaaatgtctcttcctaacatgtactttctaaggcttcctatacatattctaaaataagactggctcctcctt

SEQ ID NO: 62748 - DNA, 905 bp, Homo sapiens
ttcttcatcccatgaaaaaaaaagttgtatttaaaaagttatttatattttcaaaaacataagaaaaaatataaaatgcccaggtcctgcttttttttatttttattttttggaaacacagaaatttgagggattttacaagtcataagctacagaaactgagtagctgtccacaactttagtgctgaatacaaacagattcataatttgctcttggcatgtgtttgtcctggcttgtattgtaagcctttaactacatcagtatggtgataaataccaaacttttttgtggttcacaaccaaatcttccttttggccctgtctttgaaaacattttgtgatgaaaaagttcaaacaaaaaagtagaaaatatagttaataaacctccacatctccctcactggtctcagtaattatcagcttatgggcaattttaattatttcacatacttcccttccaagctggattattttgaagtaaagtccatatatgataacaacatttcatccatatttcaatatattaaattaataactattgtatttacaaacagtccattcagatttaaaaatcaccmatgattggctgaattaactgattaaatttttctgacttaacagattagtcacctggatacaatataaatgtgaagctttaagctttaagttctctcctttttttttttttctttttttgtcgcccaggagacaaaaaaaaatctgctgcccattgcaacctctgcctcctggaagacggggtttcaccatgtcggccaggctagtcccaaactcctgacctcaggtgatgcacccacctcggcctcccaaagtgctgggattacaggcgtgagccactgtgcccagccagtcctctctttttattaacttaatcgtatctagataaa

SEQ ID NO: 62749 - DNA, 683 bp, Homo sapiens
atgtctcaggctatacacccatgctgccatttagaggaggaagaagagtaggaggaagataaccatagctgccttagagggaagttagccctaaacacacacctatgtgaccygtcctggccctttctcaagaaaagaaaggttgtcaggggatgtaaagctcctgccatgaatgctgctagagaagaaggctgcagaatgtgaagttttgtttagtcttcatcaccctttcatgtcctcatttctctgctgataaagccaaatttcttggtccagcatgagattcacacctttggagatgatcttaatgttctcgtctcactttttctgtcctacgtacctggaaaaccccaattcagttaaactcaactttctaactattcagatcccagaaaacttcaatggatgaacattgttggagagaaattacgcggtttgggtgactggactcactggaaatttctgaccataaattttaaatgggtgttcaatacaggcagagagacttactacacttccttagtaaattcatttcttgttctctaagatgagaattttttacctcttcttgattctcaaatcaacaccttcttcctacttcatctgtactgattacatcacatcttattttatattaaagaaagggctccattgtattaaagcacattaacagttaattgatg

SEQ ID NO: 62750 - DNA, 548 bp, Homo sapiens
tttttgtttgtttgtttgtttgtttgagacagagtcttgctctgttacccaggctggagtgcagtggcctgatctcggctcactgcaatctctgcctcccaggttcaagtgattctcctgcctcagcctcctgagtagctggaactacaggcacgtgccaccatgcctggctacttttttgtatttttagtagagacagggtttcactatgttagccaggatggtctcaatctcctgacctcgtgatccgcccgcctcggcctcccaaagtgctaggattacaggcgtgagccatcacgcctagctgccagttcctcattcttatgctgcctatgcctggtgagccttttcccagtgaccacaatacaaacattgacttctgatacatacatacctayaataaagtttaatttataaattcggcatagtaagaaattaacaacaataatcaataacaattttataatagaacaatcataaaaatatactgtaatgcaagctatgtatatcttccctctgtctctcaaaaacttatactgtaccgtggg

SEQ ID NO: 62751 - DNA, 979 bp, Homo sapiens
caactaggaggaagaaaggaacaatcttggggactgaaccttcaacttgcgggatgggacactctctctaggtggacagtgttggaattgaattgggggacacccagccacttggcagtgggggagaatctgcacacatttggtcacagaagtctcatggggtcattgttgcgtggtgagagtggaggagaaacacagtttgagagttgtttttctgatacgaaatgaaaatataatttaaatacatctggaaaatagatatgtctttattaacaccattctcaatttgtcaaatttccgatgaaagaaaggtctattttgtgaatttaaggatttaagcacaggcaataacagatttaaatacaaaagtatagaggtgtcattattatacattttcttcctaagtgagtatgatgaactttatcggttgaaagattgctgctgagagtcagtggcactgagtcatattttaaccttttcaatatgacagaataaaccattagctgcaatcttattcatattgtttctgtggttgtcagagtctgccacaaagtcccagcactcccttcgtcattccaaagcatcacaattagtcttaatttctactcccacttcatctgagataggactcttttgtctgtgctaacactgacaggttttcaaactgtctttttaaacattagactttgtatttgtaaggcccctttccactgctagagccactggaattkcactttgaagtttgcatataatcctttattagtcttaatatgtgaggatcctaactatacactaaggcataaagaattccctccattcagacaatgcccccaatcctatgaagcagggagtgaacctggacatgaagcagggagaaggaagtagctggatggtcagatggagccattcctccatgatgtgttcaaaatgatttcttatacctccagtgaatttataggagtccttgctgattgaagtc

SEQ ID NO: 62752 - DNA, 637 bp, Homo sapiens
cagtcaatttctggatatttcacagctgttatacatccacctcctttcttacaaaagccagcaaaaattagtgagcacctcgttggctctgaaatatgaaaatrgagccacagtcaagcctgaaaatcggtttctggttgactcccttcaaagtatttgttctaaaacacagtgtctgcagttcatttatcatctgccaatttttaaatgagtttaaattaaaaaagcttcaatgctgcatgctttttttctttttttttttttaaagcaactctcagaataaaactgtcatttggtcatcacactagtaactgagagaactcttgcttgggcagatatcagcacaattcaagctgagtcttttatgttattattacctgctcatctctcatataattaaaaaataataaacccttggaagacctgtaagttgtgttcagagagaaaatgtgattctcttcaccactcaggtctcccgtcctacctgctttatgagctggtcaggtgagcgtgctctgctgtgcttcagcagcctctggaatgggacagactccaaagttggttgtgcttcacttcccttctccattcaggtctttaaagtcctgggttattaactatcaacaaaaatacaagctgc

SEQ ID NO: 62753 - DNA, 1592 bp, Homo sapiens
ttggtgcaggtataaaaatgtacatgtgcaacttaaatgggaatgacattttattattccaatactcacaaggtcctttgttagctatacttgtaaggaacaaaataggagcaaacatcctctgtttacttcttgcagccattctattttctttctttttttttttttgagacagggtctggctctgttgcccaggtgggagtgcagtggagtaatctcggcccactgcaacctccatcttccgggttcaagagattctcctgcctcaacctcctggagtagctgggattacaggcgcccgccaccatgcccagatattttttgtatttttagtagagatggggtttcaccatgttggtcaagctggtctcaaactcctggtctcaagtgatctgcccatctcggcctcccaaagttctgggattacaggtgtgagccaccactgctggccagatttttggtgttttttagtatattcatttattttagagttttatccagtataaatttttcccctaggagccttgtattgacataacctagttccagtcacagtgagacatttttgaaattgcttctaaattttccatgtattaaaaaactggtggtctagtatcyggacttaagtctttttttttttttttttttaattagatggttcaaatgtctcctaaacagaaaatgctatacattttctcatgtgctccaaatggattctagccatcccaataccctaacacattcttgaaaacaaaaacaggatccgccttttactgatgagataaagaagacagaaagtcactagtatatatgatgtttccctggtgcggcagagaaagaactaatgggaggattagttcctagtctccaaacaccagcagggagccccaggcaagtccacattttttgtgtgcattcaagaggcctgaaagttgatcgtgtgggtaacttcctggaactcaccttcctagttcaggaaagcgtggactcctgctcacagttcaagctaaggagaaggaagtctgctctttagcttttttttcttttaaaagaagtgagggaaaaagattaaaattgccttggcctgtgaccaaactgcagtcctaacaagaggtaaaatttgcctataaaatattcctgacagtattagttggtgacatctgccaaaaatctatggtaaaaccagttatcctgcctctctttgtcccattctctcaacgaagggtggataatatataacatatagttttgctttaaggggaattactgctacatttactcacaaaacgagccacgtagcatacaccagaattcagcaagtacacaagccacctaaccgacccaagtttctgaattgcattatccatgacaggcatctggggctctgccttcttcgtgtccaccttggttccttggtcactgggcttaggagaccactgtgcactcactgtccatcacccgggagggaccctgaagatcactgagttctactttctcattgcgttcgtgtggaaacagaggcccacaggaacatgaggaagctttccaacatcacagggcacattagtggaagtactgaggttacaacgtaa

SEQ ID NO: 62754 - DNA, 1592 bp, Homo sapiens
ttggtgcaggtataaaaatgtacatgtgcaacttaaatgggaatgacattttattattccaatactcacaaggtcctttgttagctatacttgtaaggaacaaaataggagcaaacatcctctgtttacttcttgcagccattctattttctttctttttttttttttgagacagggtctggctctgttgcccaggtgggagtgcagtggagtaatctcggcccactgcaacctccatcttccgggttcaagagattctcctgcctcaacctcctggagtagctgggattacaggcgcccgccaccatgcccagatattttttgtatttttagtagagatggggtttcaccatgttggtcaagctggtctcaaactcctggtctcaagtgatctgcccatctcggcctcccaaagttctgggattacaggtgtgagccaccactgctggccagatttttggtgttttttagtatattcatttattttagagttttatccagtataaatttttcccctaggagccttgtattgacataacctagttccagtcacagtgagacatttttgaaattgcttctaaattttccatgtattaaaaaactggtggtctagtatccggacttaagtctttttttttttttttttttaattagatggttcaaatrtctcctaaacagaaaatgctatacattttctcatgtgctccaaatggattctagccatcccaataccctaacacattcttgaaaacaaaaacaggatccgccttttactgatgagataaagaagacagaaagtcactagtatatatgatgtttccctggtgcggcagagaaagaactaatgggaggattagttcctagtctccaaacaccagcagggagccccaggcaagtccacattttttgtgtgcattcaagaggcctgaaagttgatcgtgtgggtaacttcctggaactcaccttcctagttcaggaaagcgtggactcctgctcacagttcaagctaaggagaaggaagtctgctctttagcttttttttcttttaaaagaagtgagggaaaaagattaaaattgccttggcctgtgaccaaactgcagtcctaacaagaggtaaaatttgcctataaaatattcctgacagtattagttggtgacatctgccaaaaatctatggtaaaaccagttatcctgcctctctttgtcccattctctcaacgaagggtggataatatataacatatagttttgctttaaggggaattactgctacatttactcacaaaacgagccacgtagcatacaccagaattcagcaagtacacaagccacctaaccgacccaagtttctgaattgcattatccatgacaggcatctggggctctgccttcttcgtgtccaccttggttccttggtcactgggcttaggagaccactgtgcactcactgtccatcacccgggagggaccctgaagatcactgagttctactttctcattgcgttcgtgtggaaacagaggcccacaggaacatgaggaagctttccaacatcacagggcacattagtggaagtactgaggttacaacgtaa

SEQ ID NO: 62755 - DNA, 587 bp, Homo sapiens
gaccatactctgtacttttggtataattcatatgagttcatcactaaacaaaatgcctgtaatatagttggctccagggaggagacaaatgatgagtgtccaccctctagayggggagagaaaagatacacaaaactggctgggtgcggtggctcatgcctgtaatcccagcactttgggaggccaaggtggtcagatcacctgaggtcaggagttttgagaccaggctggccaacacggtgaaacccagccaaaaaataaaaatacaaaaaaattagccagatgtgatggcaggcacctgtaatcccagctactcaggaggctgaggcaggagaattgcttgaacctgggaggtagaggttgcagtgagctgagatttcaccactgcaccccagcctggacaacagagacagactccgtctcaaaaaaaaaaagccaacagtcaaacaaaatgagacctatatatctgcatgtttcatgtttatatgcgtctcttctgtactcaactagactgatttgttggttgttggaaactttctgcatgctacttctttttctgccctatccccagaaaaagagaatatttt

SEQ ID NO: 62756 - DNA, 614 bp, Homo sapiens
tcttcctcacattatttaaagttaggttttcaaatccaatacttacgatcaagtgctagacagagatcaaagaagccatccaattgtctgtgccccagtgtgaagtagatgatgcagtgattcaaggaggtgatgggtggagcttttgaggagcccctactgtgtccaccaggattggagccaagagagaaagtgaactgggcccaggctgcagtagaagctttttatccatcttctattccatccttccagtgacacaataagataagcatgattaccccagttgagataagcatcagagatcctcaacctagggtgattttgccccacagggaacacagaacaatgtctagagacattgttggttgtcacaactgctggtatccaactggcatctactgagtaaaggacaaattatctcacctgtattagtccattccacactgataataaagacatacgcaagacaaggtaactgataaaggaaagggktttaattgactcacagttccacgtggctcgggaagtctcacaatcatggcagaaggcaaaaggagcaaagtcatgtctcgcatggcggcagacaagagagtgtgtgcagaggaactcccttt

SEQ ID NO: 62757 - DNA, 625 bp, Homo sapiens
attctcagagccactgagcatagaggactgcatggagcagaccttattacccatacttcccaacctctggttttaaggccaagcaaagatagaaacacaggcttctctagaatatagcagcagggatatgaacagaagagagagagctggtagcatagtcctattaacataaccagccctgctggtgtcctgaagtcgtggggtgttgaccacagaaaatcagcagccctcttcaggtcacctggtgcaatgtggcacattgttgggctccttctgaaaaacgtggcacatgctcaccctgttatatccgccatattccaactccatttgtctaaggacctaggttgcagtaatcttctacaaatacatattttaatatatgatcagccagacttcatttaattgtttattaaacatttatttatggagtatctactataggccaggcataattagtggtataaggtgacatggaaaattaaacttatggaaagagttttaacactgactgtctttgagaatggaaagaaaagaatggagaaatgaccttaatgtggtttgactgtgtccccacccaaatctcatcttgaattgtagctcccataattcyctcatgttgtgggag

SEQ ID NO: 62758 - DNA, 906 bp, Homo sapiens
tatttatatttatatttagatacattcctacatatatacatagattatatataaatacatatctacatatatacacatatacacacacatacataccgatatagaaaattagggaaaaaatggctatctacaggacaaagaaaaccaaaagaacggtgtcccacagttagtaacactgaaatctatgtcatatgtttaaaaaatccattttgctttgggatgctgaagcggcagatcacgaggtcaggagatcgagaccatcctggctaacacgggrtttagtagaaaccccgtctctactgaaaatacaaaaaattagccgggtgcggtggcgggcgcctgtagtcccagctactagggaggctgaggcaggagaatggcgtgaacccgggtggcggagcttgcagtgagccgagactgcgccactacactccaacctgggcgatagagcgaaactccgtctcaaaaaaaaaaaaaaaaatccattttgctttaaatgtcattctcagattgtttccaacatacctgaaatctgttaataaagtttaaatgttaaaagtttaaagtctgacaaaatttgtattgttttctagcacagagatacacattcaagtccctaaaaaacggacgttgctttagctatgagcaaatcaggatgcaaggtgttaacctgcaaaaaattcctagtcatactgaatgcttcctttgcatgttttttttttttttttttttttttggaataaagctgttgtaattataaaatgatagcattactttacttgtaaaatttgactttttcctaaataagttaaaataattttatatttcatttacaacataacctgctttgataataacaccattattttagtaatacagagaattaccaataatcacctaaaatat

SEQ ID NO: 62759 - DNA, 906 bp, Homo sapiens
tatttatatttatatttagatacattcctacatatatacatagattatatataaatacatatctacatatatacacatatacacacacatacataccgatatagaaaattagggaaaaaatggctatctacaggacaaagaaaaccaaaagaacggtgtcccacagttagtaacactgaaatctatgtcatatgtttaaaaaatccattttgctttgggatgctgaagcggcagatcacgaggtcaggagatcgagaccatcctggctaacacggggtttagtagaaaccccgtctctactgaaaatacaaaaaattagccgggtgcggtggcgggcgcctgtagtcccagctactagggaggctgaggcaggagaatggcgtgaacccgggwggcggagcttgcagtgagccgagactgcgccactacactccaacctgggcgatagagcgaaactccgtctcaaaaaaaaaaaaaaaaatccattttgctttaaatgtcattctcagattgtttccaacatacctgaaatctgttaataaagtttaaatgttaaaagtttaaagtctgacaaaatttgtattgttttctagcacagagatacacattcaagtccctaaaaaacggacgttgctttagctatgagcaaatcaggatgcaaggtgttaacctgcaaaaaattcctagtcatactgaatgcttcctttgcatgttttttttttttttttttttttttggaataaagctgttgtaattataaaatgatagcattactttacttgtaaaatttgactttttcctaaataagttaaaataattttatatttcatttacaacataacctgctttgataataacaccattattttagtaatacagagaattaccaataatcacctaaaatat

SEQ ID NO: 62760 - DNA, 906 bp, Homo sapiens
tatttatatttatatttagatacattcctacatatatacatagattatatataaatacatatctacatatatacacatatacacacacatacataccgatatagaaaattagggaaaaaatggctatctacaggacaaagaaaaccaaaagaacggtgtcccacagttagtaacactgaaatctatgtcatatgtttaaaaaatccattttgctttgggatgctgaagcggcagatcacgaggtcaggagatcgagaccatcctggctaacacggggtttagtagaaaccccgtctctactgaaaatacaaaaaattagccgggtgcggtggcgggcgcctgtagtcccagctactagggaggctgaggcaggagaatggcgtgaacccgggtggcggagcttgcagtgagccgagactgcgccactacactccaacctgggcgatagagcgaaactccgtctcaaaaaaaaaaaaaaaaatccattttgctttaaatgtcattctcagattgtttccaacatacctgaaatctgttaataaagtttaaatgttaaaagtttaaagtctgacaaaatttgtatwgttttctagcacagagatacacattcaagtccctaaaaaacggacgttgctttagctatgagcaaatcaggatgcaaggtgttaacctgcaaaaaattcctagtcatactgaatgcttcctttgcatgttttttttttttttttttttttttggaataaagctgttgtaattataaaatgatagcattactttacttgtaaaatttgactttttcctaaataagttaaaataattttatatttcatttacaacataacctgctttgataataacaccattattttagtaatacagagaattaccaataatcacctaaaatat

SEQ ID NO: 62761 - DNA, 678 bp, Homo sapiens
tcgggaaatctcggtctttgcttttaaggcctttgactgggtaagacccacccaaattatggagtgtcattggctttattcaaagtcttctgatgtaattgttaatcatatcttaaaagaaataaaagacttcgtagcaacatccagactagtgtctggccaaatgactggggccatatccagacaggtggacacataaaattagccatcacaagggggcagcctttctccctggacctctgctgcttggatggggtttctgatgtcacattccctgctggcgagtcccttagcatgtccttaccttactttcctcatttctgaaatgggatcgtaatcgctccttccccaaggagctgctgtaaaggctgggcgtggtgaggctccgacagtacctgcccctggccagctgctgyggggtgctcgtgagagatgcgcttattcaggcacgtgatttagtgtcttctctctggtttccccccacccgctatttcatggggtgacccggtttttatgttccttgtttcttcgggtgaggtgagtgtgagttatattacatggtcaaaagcggaagccatttgtaagaaacttccctccctgtatttgagaaaactagaaaccaagggtggaagtttgctggatgttcagaggtaggttccaggtgtggaggggacttgg

SEQ ID NO: 62762 - DNA, 569 bp, Homo sapiens
ttctaaactctttttgtgtgttagctcacttaatcttcacaataaccctaaaargcatttactactattatcattttatagatttggaaactgaaggccagggagttaaaaccttggccaaaggtcacagaggtaggaagggatgggtttgagcaggacaccaaccatgggaatcggctccagagactccaggcaacccataagctcaggcgtcaaggctgaagggtggaggtttgggggaaagatggaaagcagtgaaatggggagaggaaggttcttgtttgattgttggttagaattccataataattccatatgtggaggaagaggatatagttcactctactttaaagagttaagtgaaagtgttaagtgtgatctctaacacagaaatagaacatacaatttccaaaatgataggacacccctccactcactccagtctttttttatattgcttagtagaattttatgtcttgtccatatggttgccacatattcttttaatttttaggtattctgtatttttcctgtcattgtgaatggatcacattatgttgttatatatg

SEQ ID NO: 62763 - DNA, 756 bp, Homo sapiens
gtgctgaagccaagaactagaaaaccgtaactgtgaagtattacgaaatccacacaattaagtgctgaaaccagcaagggccaaaaccrctctgagacccagctcagaccaacccagcctgccctttcaagtctgtaaattggatcgcggtccagtgctttctcttacctcatcagccttcctttttccttttgctgtagtggtatgttttcaatgaactctgacatatttctctgattgaaaaccattttaatactcctagacaatgtgcttctgaaacattgtcacaacacatacaataaccaaaagtttagacctgtgtaaagcaaagtgaaaaatggagtgtcattgaatcccacaattctcgaaatacaagtttatgggaaaagccaaagagagccaagtgatatagtttccagccatggcacctcaggaaggcccctcacctggcctagcagcagccattcccacccccaaattgtaacctcagaggtacagaaccattctccaagtgctgtgacctttcctcctacaaatcattcatcagtccaacatttcctaagcacctactccaggccaggcactgttgtcaggactggacatacagtgaaggaagcaaaggctctgcctcgtgggacccacactccacgggaggaggtaaaccaccaaatacatgagtaaacctatggaggatgatggagaagagaacagaggaatggcgtgctgggaatagggcagggagggagtcgctgaaat

SEQ ID NO: 62764 - DNA, 756 bp, Homo sapiens
tcttaacctatttattttccattttacttgtctctttatttcattcatattattacctcttaatatatgcaatatgaatatatctgcatgatctaagatgtgatgatatctagtaatattaaccaaatttagatgtgcttagacaaaagttttaaaaaaggtattgacccatgcaacatatctggcaacagcaggcacagctgaccttagagatgactgaaagcagagactctaaaataaccaggctcttgactctaggagtcagcttcattcagaccacccatttccatgtcttcgaagcagtggagacagcaggccaaggttctcagcttctcatctttgtcacataggagggaagggctcttcgttttggcttattcaaaatatcacagagtaaagttctgattggctsacccatggtcatgggtccaatccaaaaccagtaactatgctcaagaaaatagagtacaatacatacctgaagatgattcccagccatccctgactctagatggctgggagaaggcaggttatttaaggaaatggcagctcctttaggggctatatattatagcgggagggaggacaagtagactaattctacaaaataaagggtgtgctatttcaaaataagtcttgggtactttagggagaaaaaagtcaaatgagtaaattacaaacttaaccacaactatcaatcagtacaattttcagtggttatatttggtagataatgtagaaaattcaagagagtct

SEQ ID NO: 62765 - DNA, 553 bp, Homo sapiens
gactctcaggttttaatttaaattatcaagtgagaccatcagatagccatatatctgcatcacatatgacattttaatattaaactttcagattcaagggaaataaaagaacaacaacaacaaaaatcacttctgtcttgatactaaatctgatttaaaaggcatggtatatacatgttccctgtaaggtcaataatcaattaattttataattaaacactaaaaaaattgacttcagataaaatttgatacaccacttctataagacaatgaaaaatatgtaatctctttttacccagatttccaagaagttcatagtgaaattaaatgtttaatagctgtaactatattgtttttctacttctgttttactaggcataatatatgagagtttaaaagatgtcaaatcacttttaggaagaggaagatcatacagatacctacartattagtcatgtgcatcaaatgcagatgtgtcgcccaatgtagtttaaatgattttaaatgaagttgttgagctgtattgtaatttattgcattaagaatgttaccc

SEQ ID NO: 62766 - DNA, 705 bp, Homo sapiens
ccacacaagccctggagccggtctcttggtcaccctttgggtctaggggaagtgagaggtggtcctgttcgtggaagagggggtctataccccaagagaggcttgtcagatctcacacaagagggaattcaaggccagtcacagagcacagtgaaagaggcacgtttattagaaatgactctgttacagagcagaaagcaagcagaggacacaccaacttctttttccatttttcttacacagaagtcttgtctgcaaagcgaagtgaagctgtgcatatgtgcagctgagcagagagcatgacaargtttatcattctattggtttaaagaaaaccatccttgacattttagtgtgtcagtcatcatagcatgactcttactatcttgaaagcatagacctaattatgggtattggacgtctggactttctgttcttggagtttgctttgcaggcatcaccaagctgcttccttagctgtaaacatcttaggaccatggcttgtgtgtggcaaggagtgtgccttgctagtttaagacggtgctgattttaaaatggtgtcaccctggctcctctggactcctgcctcgctaacagtccagtgactgtccatggggctgctaatcaagtccacagcaggaagcagcctcttccctgagcctcccaaccccccagacgacttctcccctggaccttcaggtccta

SEQ ID NO: 62767 - DNA, 732 bp, Homo sapiens
atataagaacacggaagttcagagggtttgagtaactaatccaaaatcacataatatgaatgatgctaaagggcagttagagttaaaattagatcctttggaagccaaggtctgcaatctttttaaatcacctcaccatctcccatttatcttctggttaaatttggagagacattataaaaaggggaaacacatttataagttktctcattgccatcattaacagtggtgtaataatgacaaaataattaaaatttaattagttcttcctttgctgtcactccattgtgagcttatattctaatcttgcatcccctcaagcctaaatgaatctttgaaatgagggttgatttaaatcgatagtggaactttggctataggttactatttctttttttttttttttaattgaaatggagtctcattctgttgcccagggtggagtgcagtggtgcgatctcaggtcactgcaacctccgttcgcaccaccccctgcaggttccaagtgattttcctgcctcagcctcccaagtagctgggattacaggcatgtgccaccatgtctggctaatttttgtatttttagaaagcatggggtttcgctacgttagccaggctggtcctgaattcctgtggccacccgctgcagcctcccaaagtgctgggattacaagcatgagccatcatgcccagcctatatagtcattatttcctgtagtgaaacaaaatgat

SEQ ID NO: 62768 - DNA, 732 bp, Homo sapiens
atataagaacacggaagttcagagggtttgagtaactaatccaaaatcacataatatgaatgatgctaaagggcagttagagttaaaattagatcctttggaagccaaggtctgcaatctttttaaatcacctcaccatctcccatttatcttctggttaaatttggagagacattataaaaaggggaaacacatttataagttttctcattgccatcattaacagtggtgtaataatgacaaaataattaaaatttaattagttcttcctttgctgtcacwccattgtgagcttatattctaatcttgcatcccctcaagcctaaatgaatctttgaaatgagggttgatttaaatcgatagtggaactttggctataggttactatttctttttttttttttttaattgaaatggagtctcattctgttgcccagggtggagtgcagtggtgcgatctcaggtcactgcaacctccgttcgcaccaccccctgcaggttccaagtgattttcctgcctcagcctcccaagtagctgggattacaggcatgtgccaccatgtctggctaatttttgtatttttagaaagcatggggtttcgctacgttagccaggctggtcctgaattcctgtggccacccgctgcagcctcccaaagtgctgggattacaagcatgagccatcatgcccagcctatatagtcattatttcctgtagtgaaacaaaatgat

SEQ ID NO: 62769 - DNA, 863 bp, Homo sapiens
cttgtattaattaattaaccagtgtggttgtggataatgctgggctaattgtctatacgtgatatcactgactcttttaagctatggaattccctcatgagaatgctatccctgatcccttattctgatatttctgaataaccagcaaaatacacatctatttctagattgaattcccaagtgcaagagaatcttagactagattgtctacaccaggttttctcaaagatctagactagcagcatcaacaccttctgggaacttgtagaaaagtaaactcaaaagcccgggctaaccctgggttcactgaatcagaaaccctaggggtggggcccagtgatctgtgtttttgtacacacttaagttggaaaactggtcagaaagttgtccytacgattctgacataaacaatgcaatgtttcctggacccagccaacaacgtcaacatccctgttaaaatagtcaggttctttcttctgaagaaattagacttcattgtaagccagataatgggaaaaaaatagtaaaactatgatttaaaaaatcagtataggaatcaattgatgtcactgccactcagtttttattgcataatttaaaacgagtatatcttaactacattgttttaaactgcataccacagctgcatggcattctctggttccaaacagataaaaatgagcaaaataaaactaggtaagatgaagaggaatcttagggattttaaggaaagaatccagccccatacagaagcagaggaagtagtaagcctaagggtcaaatgctaacaacaagaataacaacagtagcagctgtaattattaagtactaattttaagcttggttctttatatatattttcc

SEQ ID NO: 62770 - DNA, 2394 bp, Homo sapiens
gaagcagctctaaccacaatcaagttacaaggacactcatgagaagcttttccatctgagaaacacaaagagctccattgattttgctaacaccccggaggtaagtgtgagagcaacacaaattgtcttggcggtagagtgaggagaagggatagcataaatgattcttgagttgtttcctagccttgccaaaaagcattactgggaaatggaaactggatgtgattaaattcccarcagcttagaaagtcattgcaggagggaaacttagagattatccagggcataactctttttacaattgagaaactgagctcctgagaaaggaagtgatgtgtcccaattcacacttctagttggtggcagagagtcaagtttagaatttaggcctcccaacatcgagcttagtgttcaataaatgtaaccatgagtaagacttctgactgtgtatagggcatgcaaatatagccagtccgagaaacagaattctaacaacaattgtattagtcagttcaggctgctataacagaataccacagagtggatggtttaaacaacagaaacttatttcccacagttctggaggctacaaagtccaggagcaaagtgcttgctggtgcctgctgaaggctttcttcctgacttgcagatggtaaaatgtgactttacatggtgtgtgcgagggagagggagagggagagcgcatgcacacatgcacacaagtacactctggtatctcttcttataaggacactaatatcatcagatcaggaacccacctttgtgacctcattacctaaacctaaattaccaccttataggccttatgtccaaatacagtcaaatcagtggttagggccttaacatatgactttgggtgggatacacaattcagtccatagcgatgaccatcttcagactagcctgcatcctctgtccttggtcacattgatgatttaaatggaggcaggtacttgctctcactgccagcaacaaagacactgcttttgaaaggaagaggatgcaaaaatacttatcaatagtgacttttttttttttaatttcactttaagttctgggatacatgtgcagaatgtgcaggtttgttacataggtatacatgtgccatggtggtttgctgaacctatcaacccgtcatctaggttttaagccctgcatgcattagatatttgtcctaatgttctccctccccttgcctcccacccccagcaggctctggtgtgtgatgttcccctccctgtgtccatgtgttctcattgttcaactcccacttatgagtgagaacaagcgagactttgtttttttttttttgagatggggtctcactctgtcacccaagttggagtgcagtggcatgatcttggctcactgtaacctccacgtcccaggcacaagtgatcctcccacctcagcctcctgagtagctgggaccacaggcacgcactatgatgactggctaattttttgtaattaatgacacttttcgtctattttattttctgtggtgtttcattatgaagacataaagggccataggaaaaatcggctcaatacaagtcaactaatattgatgactctcttagagggacaaatggagtcaccaatggtagttgattagattgagtagttatacaaattgagtagttgtgtgggtgtacaatcccttatctataattctgaagtccaaaatgctctgaaatatgatagtttttctgtaaatgtatagcaaatgctcttggtcacaaaacttgtcctgtccttatatgaagttgtttatactctttacttagcccacttattaagaatattcatatgttttctgaagaaacacgaaagctttcaatattgggttcctgccccagatcctgctggggtgtttttaatatagtaagacagacactgaactatctttctgaaatacaagtaagtataaattcttgaaacacatatggcctcaaaaggttttagacaagaaagtttgagtttgtactaaagtgaatattctatttcaaggagtaaaattacatatgatatggtagcaggaaaaaagcaaggttaaacagaagtgattgttctgtcaaagtcgctaggaaatgagccaatgtcgaggccatcagaacagagcaggtgagaaggcaactgagccgcgtggaattgccgatcctacttctgcctggcttcagcgactgcaagtggagtcacggaattcttcaaataaaatgtttaagtcagaatctttggatttgtattatatagggttctgaggaggagagccatggtgatttggaaaataatatgcagtcgtttttaggaatttggcaatgctgtctcattgagcagactgacctccagggagaagctgactttctgccg

SEQ ID NO: 62771 - DNA, 958 bp, Homo sapiens
ttgcctgtttctgcctcttgaccagcgtctatcaactatggagctcgactccctgccattaaggagacagacttcctggggtgctctgctcccacctgctcccttttggactaaacaatgtgtgtgctcttctgttacagagtcagttccttccacaaaattaccgtcttgctgtcattggtatggctgccagcaaaccatgccaaggtcttctggtgtgcctacagctaaatacttgaggagaaagaggggaactttgaagctcttgatgccacactcagcatggaacaattttggcaaagcaaccatttgaaatttgcttactcttcaatttagggacggctctgatgatttatgagttcagtgagttgaattcaaagatagaaaagagcatgtttctcctggacaattatggagaaagggagaattagctgttccttattcttcttgttagttaagtcctatttgaactgttcttgcctcatgtgatgggaatgtctaaaaatgccaaaggagccatccatttatttccagaattagcaaaaaccacaaacttcgctgctgaagagcrggctcccacaggaactcatataattctgcagcgtgccattgactttaaatggccccaaatactttcttaaaactctctgatgtgatctatctttgtggtaaccttccacacaaagtgctggaacagtgagaaatagaaatatacatgcttcataatgacttgctagtttaaaatgagtgctttgcacatggcattgggcatatccaggccctctcttgcttgggcataaagccagtctgaaaagtgaatgtataaatcattcagctagatatgtcagcttttagatgtatacgcttcagcttagaggcctaaaatatatcacactgttttcagagttttgtagcttattatcggagcaatagagaaagattttgattgtagaatcag

SEQ ID NO: 62772 - DNA, 958 bp, Homo sapiens
ttgcctgtttctgcctcttgaccagcgtctatcaactatggagctcgactccctgccattaaggagacagacttcctggggtgctctgctcccacctgctcccttttggactaaacaatgtgtgtgctcttctgttacagagtcagttccttccacaaaattaccgtcttgctgtcattggtatggctgccagcaaaccatgccaaggtcttctggtgtgcctacagctaaatacttgaggagaaagaggggaactttgaagctcttgatgccacactcagcatggaacaattttggcaaagcaaccatttgaaatttgcttactcttcaatttagggacggctctgatgatttatgagttcagtgagttgaattcaaagatagaaaagagcatgtttctcctggacaattatggagaaagggagaattagctgttccttattcttcttgttagttaagtcctatttgaactgttcttgcctcatgtgatgggaatgtctaaaaatgccaaaggagccatccatttatttccagaattagcaaaaaccacaaacttcgctgctgaagagcaggctcccacaggaactcatataattctgcagcgtgccattgactttaaatggccccaaatactttcttaaaactctctgatgtgatctatctttgtggtaaccttccacacaaagtgctggaacagtgagaaatagaaatatacatgcttcataatgacttgctagtttaaaatgagtgctttgcacatggcattgggcatatccaggccctctcttgcttgggcataaagccagtctgaaaagtgaatgtataaatcattcagctasatatgtcagcttttagatgtatacgcttcagcttagaggcctaaaatatatcacactgttttcagagttttgtagcttattatcggagcaatagagaaagattttgattgtagaatcag

SEQ ID NO: 62773 - DNA, 955 bp, Homo sapiens
tatttaatggcccattaaagggtttgagaagtattagaattaaaacaattaataaagtagcattccaaactatattcacatgtcaggggccccatgggtaggcggtggaggagagagattcagcagaattttttttcaggcagcaccataattacctagaaaacatcatgattagaagaagtcatgtgtctaagactgtcctttctgaaacaagggagcaatttctactttaaagatttttaaagggtgagagtggctgggcacagtggctcaggcttttaatcccaacactttgggaggctgaagtgagcagatcacctgaggtcaggagttcaagaccagcttggtcaacatggtgaaaccccctctctacaaaaaatacaaaaattagccaggcgtggtggcaggcacctgtaatccccgctgctcgrgaggctgaggtgggacaatcacttgaacctgggaggcagaggttgcagtgagctgagatcacaccattgtactccagcctgggtgataaagcaagactccatctcaaaataaataaaattaaaaataaataaataattaaaactgtgagagaaaatatagtggagatatggataaagaagtcagaggagtatgcagcacatcacccttccttagaccatcagtaaaagtctgcaagatgaggaaagtggatggtactggatttcctatataaaacagtgacggacggaccagcacacaaggtggccacatggacaagggatagtctgcatggacaaggcacagaaggccgttgtgggccctggactcctgtcaatgagatcactcagctctccctaccagccagaattctgcccactcgagttaacccaagaagctcaactccagatacctgaaaccctttagaacatcatatgataagatgtaaacagtgtaccctctcatttctgatggcttaaactaacta

SEQ ID NO: 62774 - DNA, 955 bp, Homo sapiens
tatttaatggcccattaaagggtttgagaagtattagaattaaaacaattaataaagtagcattccaaactatattcacatgtcaggggccccatgggtaggcggtggaggagagagattcagcagaattttttttcaggcagcaccataattacctagaaaacatcatgattagaagaagtcatgtgtctaagactgtcctttctgaaacaagggagcaatttctactttaaagatttttaaagggtgagagtggctgggcacagtggctcaggcttttaatcccaacactttgggaggctgaagtgagcagatcacctgaggtcaggagttcaagaccagcttggtcaacatggtgaaaccccctctctacaaaaaatacaaaaattagccaggcgtggtggcaggcacctgtaatccccgctgctcgggaggctgaggtgggacaatcacttgaacctgggaggcagaggttgcagtgagctgagatcacaccattgtactccagcctgggtgataaagcaagactccatctcaaaataaataaaattaaaaataaataaataattaaaaytgtgagagaaaatatagtggagatatggataaagaagtcagaggagtatgcagcacatcacccttccttagaccatcagtaaaagtctgcaagatgaggaaagtggatggtactggatttcctatataaaacagtgacggacggaccagcacacaaggtggccacatggacaagggatagtctgcatggacaaggcacagaaggccgttgtgggccctggactcctgtcaatgagatcactcagctctccctaccagccagaattctgcccactcgagttaacccaagaagctcaactccagatacctgaaaccctttagaacatcatatgataagatgtaaacagtgtaccctctcatttctgatggcttaaactaacta

SEQ ID NO: 62775 - DNA, 3259 bp, Homo sapiens
aataatgacataagagtaaatggtttcaatttagaaagatatttttgctggatacagaattctaggttgggagggacttttgctcttgttgctttttggcacagtcttgctttcattatttgtgataaaaagttagcaggatttctcatttttgtttctctttatctctgactgcatttaagagtttctcttaatgtattttcaacaatcttattataatgtgccttgatatgtttttcttagtgtttctcatgcttagggtttgtcaagatttttgatctacaggtatatttttattagaaaggggatcatgagttaaccagacatgagccatgcttgggaagctgttactgctcctgcggctacagacacaatggaaagaggtaaggtttccacatggacaatcacggcgggtttcctgacagaagcagggttcactgaaggtgggtgactgggagaaatactttggtttttccatacctgttcttccctaatcttctgtcagtacctcctatagtcagaatttaccctgtgatgaatagcagagcatgtgaaggctggaaacggagctcagagaaaatcagcagctgcccctcacaaaagcaacgtattctgatttcttcactgttggattcatgccatctggaagaacaactgggcatatatttgttgaatgaatgaatgaaatataactaaactcatgttttattattgagaaaattgaagctcctgcgggcttcacaatttactcaggtggttaagaactaggacttaaatttaggctatttcatattttaacatagcaatcacctctgacttctgtaaattgaatcatattttaaatccatatgagaactttctttccaaagacactctgtattgcgttttttgcaaaactgaaaatcctttatcacctttttaggtagatttttcaaatttcagtttctcttcaagctttctggactatttctttcgctgggaggttttacataacaactctattttaaaagaacagagcatttcaaaagggttatcattttggtaaaagagtcagcataatgtgaaagaaagagcatggtttttgataccagatagtactacattctgatctaggatttgcaagtaatagcaattagacattagagaaaacacttaactttcctggtccttgattccttattctgtgaactggggataataataccttctctaatcatgtcacagaactgtaagaatgaaattagatgatgcgtatgttatgcaaatacatttcttactattgcttagctgtgagtcaccttctctccagattagcttttattactgatactcattgtggacatagagtccagctgatagctggatgggtgggtatggctgaagcagaagcatagaatgtaagagacctgcaatagagacttcattgtctgatgagatctagtgagaacagcaacactcatagcaggtaaaagtgctgcaaaaagttggtaggaggcagtaagaaagtaactgagatgaatctacttattttgcatttcctatgctaatggtcatcttcattaataaagacaatccagtcactttaaaccagaggctggcatcacagtaaaaagggaccatttccattcttccagtatctatccttggcacttaaatccacgtgattttttaacagctttattgagatgtaattcacagaacacacaattcacccatttaagaacacagttcaatggcttttactgtatacacagagttatgcatctattgccatgatcaattttagaatcttttcactacccccaaaaggacctctctygggtcccttagccattaccccttgagaaattcccccagccctggggagcccctcatttactttctgtctctatagacttgcttgttctggacgtattcacatgaatggaattatacaatatgtagtgttttgtagctggcctatttcgcttaacataatgtatttgaggttcaccatgttgtaacatgtatcagtactttatttctttttatagctacataatatttgctatatattttttcaagcattccacttcactgttatttgtttttccacttaatttacctgttctgatcatatgtaagatcaaaggagtccttgggtgttatgaattcaaccactgtttaatcttgaagagagaaagtctaaattgtcagagggtcctgagtcaaacactttcctgtgtgcaggaggacacggggccaggccctgccctctgactgtgcaccactggcttcctctaacaccgactccaaaatggtagaaattctcctccagataacatttaatcattataaaatgcttccttatcaaggaactcataatctgatcccaaatttgtattggtaaataggtaaaagagaactatatatttgaagcataaaatataattactggccaaaattctccagataattttaaaatagacatatcttacaatgagccccccagattgccttttaaaatgataatgtaaaatgtttgcctggtctcactgattacttggtaaattctgaatatgatgactttctgttcttacaatccataaacgcaacagctataaaagccacaagagtcttgatgacaatgaagaagcatttctgtgctgacaaagtcattctgctttagaactgtggatactataagccaacataagtcttctcttttcctccccatagcatgtcataaactttctgagaccatttgtaccaacgagacccagagcatgcatttatatgcaattgctgacgtttaaaatgcgataatttaataccagtactaacagaagctgcagaatcaagtgctattggtcctgctatttacactaaaatgggtaaccccagtgtgagtgacggcgaagtcctttcaaacccagaggttaaaatcttacttcctttcttacactccttttcatctttgcttcggtgtaaaatctgcatgacttattatgccattgttgaactgctctctgacctcattaacattcttatctcccagaaaaaaaaaaaatgttacaagagacctgtctggttattatctctgccacctaagacttaaagcttcactataatttccaaatacatctaccttgaaatatctaagcttacgtgtctcagctacttccccaagtatgctgaattctaacggtagagattcactaaacctattttctttttcacacttcataatccctggtacaggaaatggctcaaagcacta

SEQ ID NO: 62776 - DNA, 3259 bp, Homo sapiens
aataatgacataagagtaaatggtttcaatttagaaagatatttttgctggatacagaattctaggttgggagggacttttgctcttgttgctttttggcacagtcttgctttcattatttgtgataaaaagttagcaggatttctcatttttgtttctctttatctctgactgcatttaagagtttctcttaatgtattttcaacaatcttattataatgtgccttgatatgtttttcttagtgtttctcatgcttagggtttgtcaagatttttgatctacaggtatatttttattagaaaggggatcatgagttaaccagacatgagccatgcttgggaagctgttactgctcctgcggctacagacacaatggaaagaggtaaggtttccacatggacaatcacggcgggtttcctgacagaagcagggttcactgaaggtgggtgactgggagaaatactttggtttttccatacctgttcttccctaatcttctgtcagtacctcctatagtcagaatttaccctgtgatgaatagcagagcatgtgaaggctggaaacggagctcagagaaaatcagcagctgcccctcacaaaagcaacgtattctgatttcttcactgttggattcatgccatctggaagaacaactgggcatatatttgttgaatgaatgaatgaaatataactaaactcatgttttattattgagaaaattgaagctcctgcgggcttcacaatttactcaggtggttaagaactaggacttaaatttaggctatttcatattttaacatagcaatcacctctgacttctgtaaattgaatcatattttaaatccatatgagaactttctttccaaagacactctgtattgcgttttttgcaaaactgaaaatcctttatcacctttttaggtagatttttcaaatttcagtttctcttcaagctttctggactatttctttcgctgggaggttttacataacaactctattttaaaagaacagagcatttcaaaagggttatcattttggtaaaagagtcagcataatgtgaaagaaagagcatggtttttgataccagatagtactacattctgatctaggatttgcaagtaatagcaattagacattagagaaaacacttaactttcctggtccttgattccttattctgtgaactggggataataataccttctctaatcatgtcacagaactgtaagaatgaaattagatgatgcgtatgttatgcaaatacatttcttactattgcttagctgtgagtcaccttctctccagattagcttttattactgatactcattgtggacatagagtccagctgatagctggatgggtgggtatggctgaagcagaagcatagaatgtaagagacctgcaatagagacttcattgtctgatgagatctagtgagaacagcaacactcatagcaggtaaaagtgctgcaaaaagttggtaggaggcagtaagaaagtaactgagatgaatctacttattttgcatttcctatgctaatggtcatcttcattaataaagacaatccagtcactttaaaccagaggctggcatcacagtaaaaagggaccatttccattcttccagtatctatccttggcacttaaatccacgtgattttttaacagctttattgagatgtaattcacagaacacacaattcacccatttaagaacacagttcaatggcttttactgtatacacagagttatgcatctattgccatgatcaattttagaatcttttcactacccccaaaaggacctctcttgggtcccttagccattaccccttgagaaattcccccagccctggggagcccctcatttactttctgtctctatagacttgcttgttctggacgtattcacatgaatggaattatacaatatgtagtgttttgtagctggcctatttcgcttaacataatgtatttgaggttcaccatgttgtaacatgtatcagtactttatttctttttatagctacataatatttgctatatattttttcaagcattccacttcactgttatttgtttttccacttaatttacctgttctgatcatatgtaagatcaaaggagtccttgggtgttatgaattcaaccactgtttaatcttgaagagagaaagtctaaattgtcagagggtcctgagtcaaacactttcctgtgtgcaggaggacacggggccaggccctgccctctgactgtgcaccactggcttcctctaacaccgactccaaaatggtagaaattctcctccagataacatttaatcattataaaatgcttccttatcaaggaactcataatctgatcccaaatttgtattggtaaataggtaaaagagaactatatatttgaagcataaaatataattactggccaaaattctccagataattttaaaatagacatatcttacaatgagccccccagaytgccttttaaaatgataatgtaaaatgtttgcctggtctcactgattacttggtaaattctgaatatgatgactttctgttcttacaatccataaacgcaacagctataaaagccacaagagtcttgatgacaatgaagaagcatttctgtgctgacaaagtcattctgctttagaactgtggatactataagccaacataagtcttctcttttcctccccatagcatgtcataaactttctgagaccatttgtaccaacgagacccagagcatgcatttatatgcaattgctgacgtttaaaatgcgataatttaataccagtactaacagaagctgcagaatcaagtgctattggtcctgctatttacactaaaatgggtaaccccagtgtgagtgacggcgaagtcctttcaaacccagaggttaaaatcttacttcctttcttacactccttttcatctttgcttcggtgtaaaatctgcatgacttattatgccattgttgaactgctctctgacctcattaacattcttatctcccagaaaaaaaaaaaatgttacaagagacctgtctggttattatctctgccacctaagacttaaagcttcactataatttccaaatacatctaccttgaaatatctaagcttacgtgtctcagctacttccccaagtatgctgaattctaacggtagagattcactaaacctattttctttttcacacttcataatccctggtacaggaaatggctcaaagcacta

SEQ ID NO: 62777 - DNA, 860 bp, Homo sapiens
tgcatgttacccagatcccaagccctgccttgagaccatgttgggacacgtatgaccccaggattgtttgcacaagtagtccttaactcactcaaagcctatgcagtcctcttcacaggctccacccactcgaacagaaactgcatacaggtggacctaggagtagccaacatgcagctttctgttgggggttatggatgaagcttagatctataggtcaggctgtccacttgtgtaggcacaaatttcttacagagcaaaacacagccaagagcaagaatctaggggaaaagggctcgcatactaagaccaaacactggaggccagtattcccaagcttccrgaatccagcatgcaagccccagggagctaagaattctaaactcaaacatggccacctgggtttttatgaaggcacatttttccagggagtagaatagatatacatattatgtatatgattaagcagtttttaagattaacctacaacttttaaatatttagttttatggcatgtggacttccatgtatacagttgggtcttgcaaatgtcatcattgccagacaaacctagcaaagtctaagtatatgctggtcactcctttatctttgcatttcttttccctcaagatacaaagacccagaaaacaaatatattcatcccaggtcataagtcacacccttgctgccaggtcttgagagagggggatatggcctttggcagcctctccagtgggaggcagggccctattgacccacaggaacacacataatggcgatgacctgctcttcttctattaataaggagagagaagtgcatgctggacagccaaacaaggcaaaacccaaagaaatatgca

SEQ ID NO: 62778 - DNA, 1069 bp, Homo sapiens
gaaagaaacaattatgctatagagtatgaggtcttggggaagagatatagctaaaaaactctggaatgctttcataaaggcaacatgtgcattcgatcttaaaggataaataggagatcaccgggatttgaaggtgtaaagaacagtccacatggatagagtagcatggaatgagtcatgacagtgtgtgtgttatggctgcaaagcactaagatacttgattggggtgcctgacggaaaaagttaggtagagctgaggggcatttttttatatacatttttcaggtgccaccttcagaaggttttaaatggaagaaggtgtgtggtgacatggttttttatttttaagagtgatcacttaaattgttccagcaggtaaggaacagaaatatgaatagacctttttgacatattggagatagaygtaagaggctagactatcaattgctttcagggattgaggtactaaaattgtcaagaatgtgtgagtgactagtcgagtgatgaaacaattgattcaaaaagggaccaatgaggttgggcaggttggctttgataaaccacacagtagtatagtgtagggcttatgacgcatgagtaacgaaataagatttcttggactaggattgagtattcattactttataacgaatattgcctttataatttaaatatttctgtgaattttggcaatgtaaactctcaaatctatcaaatttctctcatggtcaaatataaaaatgtataaaaataattccaattttcataagggttgttgtaggaattaaacgagtggctgcacatacactcaattctttgattaggcctaacatatttttttgttggttactaattctcagtaaggtgttgaaagccagacagtaggcatttgatctcaatactgcatttaaattttattagtagttttgctttaagccctatgaaaatgtccgccaaagtgttattcaacctcagtagtttgaaaaaagaacttcaaatgccaatattgcagttacattttaacttttgcaaatttcttaatctaaatttagtaatggaattaagagat

SEQ ID NO: 62779 - DNA, 1069 bp, Homo sapiens
gaaagaaacaattatgctatagagtatgaggtcttggggaagagatatagctaaaaaactctggaatgctttcataaaggcaacatgtgcattcgatcttaaaggataaataggagatcaccgggatttgaaggtgtaaagaacagtccacatggatagagtagcatggaatgagtcatgacagtgtgtgtgttatggctgcaaagcactaagatacttgattggggtgcctgacggaaaaagttaggtagagctgaggggcatttttttatatacatttttcaggtgccaccttcagaaggttttaaatggaagaaggtgtgtggtgacatggttttttatttttaagagtgatcacttaaattgttccagcaggtaaggaacagaaatatgaatagacctttttgacatattggagatagacgtaagaggctagactatcaattgctttcagggattgaggtactaaaattgtcaagaatgtgtgagtgactagtcgagtgatgaaacaaytgattcaaaaagggaccaatgaggttgggcaggttggctttgataaaccacacagtagtatagtgtagggcttatgacgcatgagtaacgaaataagatttcttggactaggattgagtattcattactttataacgaatattgcctttataatttaaatatttctgtgaattttggcaatgtaaactctcaaatctatcaaatttctctcatggtcaaatataaaaatgtataaaaataattccaattttcataagggttgttgtaggaattaaacgagtggctgcacatacactcaattctttgattaggcctaacatatttttttgttggttactaattctcagtaaggtgttgaaagccagacagtaggcatttgatctcaatactgcatttaaattttattagtagttttgctttaagccctatgaaaatgtccgccaaagtgttattcaacctcagtagtttgaaaaaagaacttcaaatgccaatattgcagttacattttaacttttgcaaatttcttaatctaaatttagtaatggaattaagagat

SEQ ID NO: 62780 - DNA, 1069 bp, Homo sapiens
gaaagaaacaattatgctatagagtatgaggtcttggggaagagatatagctaaaaaactctggaatgctttcataaaggcaacatgtgcattcgatcttaaaggataaataggagatcaccgggatttgaaggtgtaaagaacagtccacatggatagagtagcatggaatgagtcatgacagtgtgtgtgttatggctgcaaagcactaagatacttgattggggtgcctgacggaaaaagttaggtagagctgaggggcatttttttatatacatttttcaggtgccaccttcagaaggttttaaatggaagaaggtgtgtggtgacatggttttttatttttaagagtgatcacttaaattgttccagcaggtaaggaacagaaatatgaatagacctttttgacatattggagatagacgtaagaggctagactatcaattgctttcagggattgaggtactaaaattgtcaagaatgtgtgagtgactagtcgagtgatgaaacaattgattcaaaaagggaccaatgaggttgggcaggttggctttgataaaccacacagtagtatagtgtagggcttatgacgcatgagtaacgaaataagatttcttggactaggattgagtattcattactttataacgaatattgcctttataatttaaatatttctgtgaattttggcaatgtaaactctcaaatctatcaaatttctctcatggtcaaatataaaaatgtataaaaataattccaattttcataagggttgttgtaggaattaaacgagtggctgcacatacactcaattctttgattaggcctaacatatttttttgttggttactaattctcagtaaggtgttgaaagccagacagtaggcatttgatctcaatactgcatttaaattttattagtagttttgctttaagccctatgaaaatgtccgycaaagtgttattcaacctcagtagtttgaaaaaagaacttcaaatgccaatattgcagttacattttaacttttgcaaatttcttaatctaaatttagtaatggaattaagagat

SEQ ID NO: 62781 - DNA, 658 bp, Homo sapiens
ttaagcacttactatatgttaacttttaaattagctcaggtacttgcacacaggttccatctaattttcatctgttttggggcggcggcagagtctctattttgcacacaagactaagggttcraaggttaggcaccagctgacaagtagccaatctgagatctgaacccacagctgcctggcttctaaggtccattccacttcataataacagctttgggaagcagccccagccttggagagttgaacccagctcagtctggcttccaagggttctgtctactacccatatcggcttcttggagaagccccagactttattctcggttaccctatattatcctttatagagcctgtaagtccctggtctcagctacagacacctggttacccactctgccagctgggaaggaacagacactatttctccttccctcacccccagctgaattcagatattttcctgggtttatgcctgagaagacgatacggaaatacagcccaagcagcccaggacctccagccttggagtgggcagggtggagggggtgtgagtgagtggtgccatacacttgtctgcccatcatgagctgggaaccacgctaagtgctttacacatctgattgtgccaattcctcccaaccacccagagggaaac

SEQ ID NO: 62782 - DNA, 658 bp, Homo sapiens
ttaagcacttactatatgttaacttttaaattagctcaggtacttgcacacaggttccatctaattttcatctgttttggggcggcggcagagtctctattttgcacacaagactaagggttcgaaggttaggcaccagctgacaagtagccaatctgagatctgaacccacrgctgcctggcttctaaggtccattccacttcataataacagctttgggaagcagccccagccttggagagttgaacccagctcagtctggcttccaagggttctgtctactacccatatcggcttcttggagaagccccagactttattctcggttaccctatattatcctttatagagcctgtaagtccctggtctcagctacagacacctggttacccactctgccagctgggaaggaacagacactatttctccttccctcacccccagctgaattcagatattttcctgggtttatgcctgagaagacgatacggaaatacagcccaagcagcccaggacctccagccttggagtgggcagggtggagggggtgtgagtgagtggtgccatacacttgtctgcccatcatgagctgggaaccacgctaagtgctttacacatctgattgtgccaattcctcccaaccacccagagggaaac

SEQ ID NO: 62783 - DNA, 1277 bp, Homo sapiens
aacaaatgaagtgagaaagcattacagtgatggaaatattagaccaataaattctgtagagtgaatcatcatatcacgtaaagtgaatacaatcactgatgtagcaggataaggaactattacattgcactgatattagatcaaatctcggctctgccaattattttaactttagacatgcaattttgccttttcgtaccaatgtttttcatcttaaattaaactaattcctactttgtatagtgttgcatgtttaagtaaggtgatatatttgaaagcaccagacagattcaaactacaatcactgttgttgctgtcgctgttgttcatttcacttttactatttatatccaattatcatattccagaacccgaaacaaatattgaaggcagtttccaaagtaaccacatatgctagttgcacaactctgtgagtatactaaaaattactgaattgtacactttaaataggtgaattgtgtgatatgcatatcacaataaagctgttgtatacatacatgcatgaattacacatttacatgcccatacacacacatatacatacacttctatgtttataactcarttatccagaagtaaacactgagggatccagaagcagtctcaataccttttcagcatgttaatgatgagattttcaggagcaagaagatcaacctgggtcataaggacaggctacaagtttgaaaggaatttatcctccaaataaactgaagcagccactatccacatcaagtcataaaaaccatctgttctcccaggcagttgtatagctcctctgctctgaaaattggggaaaatgatgctgccagtgaggattcatttgtgctattgacataaaaggctctatgtagatataaaatatcattacgttattacacgcggcccaaagtccttatcactgatatgtatagtgtcaaaagcaatttttcccaccttgctgctcagtgaaaattgaaaaaaaaatatgctcttattattattattattgctaatttatttggaggatgtcaaatttcatcctcaagctgatttacatatttaagagtgtgactgatattatgatactgtattgtccttaagattattttataaatgagaatatcgaataggcagtttgtattttggtcttactgttatagatcatgatttattaaacaaatgtaagtcatgttattttcttagttttacaatcatgtcttcctcacatactagtatctgctaattatgcttcatagaatacatgtcagttgttg

SEQ ID NO: 62784 - DNA, 1474 bp, Homo sapiens
gatcctggcacctaaatttgtatttgcacagccttcaaaaggtatttctttattatgcttctcttttaggggatgatatctaaaatattaatagtgtaaaaaaaataggcataaaattaaaaatgataatgtctctctgtaataaaaaatacttgccttatccctgagttttttttaataattcccatttttaattatttgtcatagctggcttatcatttaggaattttagccaaaataaaacctatttaactaaattttccaataaaaccctatgttataaaaattatttacacaccagaattttttgacatgactgttctgttctgtgaaaatcattttgccaggttattccagtctctagtttgttcgccgctatgtaaccagcaactagtaaagtgcctagcatggagttttcttcaactaaatgaataaataaatgtatgagggttcacgacagtaaccaaagtatatgctctaggtttrgactctcactcccaggattgtggaaactctccccttgacatatttcagaagtctcctacggcttctcacatgagtgtccatattgctctgccttccttcctgttacaatagaagaactgttgatgctcccagtgaagaccaaccttgacccttctgctctagatcccattgtctctgaccttgctctcctgcatcaataagtttgctctcttgattgggtaattcctatcgtatataataacaacatactgtaagttttctcgtctaaatgaataaaaaataaatacttctaactgctttcttaacttctattgctccatttctccgaatagaaaaattctttgcgtggtctgtctgtcactgattgagggctacaatagacccacctcctattatcttctccccaccccttcccacgcctgctgacactactgcatgacttccttaaccctaggaatagagaggtcattcctaatgtgtgaaaagttctacctctctttccttctctctcatgctttatgtgtcgtgctctgctgttagtacaaccatgagctacttctactccagaggctgactctttggccccccaggttcctaagcaactgacctgttgatgatctggtcccctgctctttaccctgggctctccttccactgcccatctctctttactttgtgtgaactccagcagtaccccccacaaagtgtgaatatccccctcacactgcactctgctcaaacagccttatcatgtgctccatatatctaaaatatttgggtgaaattgatattgttttgcttacatatttttctttatagctttgtaaaatgtttttttttttagggaatagacaaatctgaagtataatctgtttagcccacactgttgaattaaaaattattgttgcttcccttttacattggctcgtccttcttgcatcaagcttatatatcatgtttttcctgaagatttaccttcacaagagta

SEQ ID NO: 62785 - DNA, 1264 bp, Homo sapiens
atttaaaaatgtaaaaattattctcagctcatggcccatacaaaaacaggaggcagggcagatgcagcccattggccataatttgccaacctctgatctaagcatcaggtcccagaaaattcaagaagaggcgagaaatcttctacctctaattcagctgacctgatggcaagacactgccgttccccccgtgccccagagacgcaggtgaagggctggtgcgggtgcactatttcatcaaagtccacaccctccagggagcagyagttgaatgggaaacagatgctgcatttttacctattgacagtaggcccttaatctttgcagctgagctttcaggagacagcagcatcaattctccgtggagaaaaactttcacaaggatcatggtcagttccattgggccatttaggctgacatacctgagcttgtcctggaggaaaaggaggagcggccctgggcagcgaccccagaatggccggttgcttcagagagctacttcagctgagagctacttcagctgctcagccccctgctgggtgctctccaccaggaggtcctgagagagggcttcggccaccagggggtctttgaggaagcactggaggaacaaagcccaccctcagcaccaaaagggagagagctggtaggccagtgtcccctaatgaggatccctgctggataagtagggacaacaaccggtagcctggaaaaacagccagacaggaggcagagacaggggcctgcccaggaggtccaagggaagaacagacaatcacgagaggaaggtgggcctgtctgtaaggacccctattccagccgcttcagactatcttccggcccactcccctactacggcccatccgggaatggcttcgggacttggagacaggacaggctcaaagggagccagggagccctctgtgccctcttcaggaccctgaagggaagcctcattgttactgggaaaggagcaaaagggatttcagagggaagtggttggcaggagcaaggtcaggaaaggacctgtgctgtggaatgggagggggtggatctgatctggccataacctgggcatggcaagaacgatgattacaaatgctctatatcccactgccacggtcccagtgatacccctgcacagaagagcaccaggccctcgagaagaacatgcagagaggacagagggggcgtgctgttcacaaggcccaaggctgtggcctcccgaagaaaatgtaaggttcaggattctggttttgttttt

SEQ ID NO: 62786 - DNA, 716 bp, Homo sapiens
  misc_feature (1)...(716): n = A,T,C or G
tataaattcatacctaaaaacccatttttttaaaaggtggagtctgtctgtcacccaggctggaatgcagtggtgtgaacatggctcactgcagcctcaaccttctgggatcaagcaatcctcccacctcagcctcccaagtagctgggggcacagnncatggnccccccccccctccncatattatttttattttttgtaragacaggatcgtgccatgctgcccaggctggtcttgaactcctgggctcaagcagtccccccacctcagcttcccaaagtgttgagattacaggtgtgagccacccatacacagcagatttttgatttctcaaagggctttttatttttttccctcccacagcccagccagagacagtcaagctcccatgttaactttgccagtggatagattttaccttttcggatctggaattttactctacttacaaactaatacattacctgttactttttttttttttttttagatagctatgtctcttgctgtatcacccaggctgaagtgcagtggcacaatgatggctcattgcagcctcaacctcccaggcacaactgatccttccacctcagcctcccaagtagctgggactagaggtgcacaccaccatgcctggctaatttttgtagctttttgtagagatggggtttcacatgtcacccaggctggtcttgaactcctgggctcaagcaat

SEQ ID NO: 62787 - DNA, 616 bp, Homo sapiens
tcccctgaaactccaaaaggaacacggcgctgctgacaccttgattttagacttctgacatcgggaactgcagggtaacatgttattctgcctgggctgctgtaacaaaacaccatagactgggcagtttataaacaacagatgttyatttctcacagttctggaggctgggaagtctgagatcaaggcgctggcagatttaatgtctggcgagggccacttcctggtttatagctggcatcttctcactgtgtccccacatggtggagggggtgaaaagtctctttctagggtcccttttataagggcattaatgccgttcatgagagcctcatccctatgaactaatcacctcccaaaggctccatctcctaataccagcaccttgggggttaagatttcaacacgtgaatttgggtgggacacactcagtctgtagcaggtaataagcatatgtcctgcaagcccttgagcttgtgtgctttgttacagcagtgacgggaaactgacacatgggttttacccttggcaaaggcagggaaacaggcaaggtttcacaagaaaggaagctgtaagatcccgaaagtcactagttctggaggacactgtccttccc

SEQ ID NO: 62788 - DNA, 1251 bp, Homo sapiens
tggaatttatcatcaccctccatgtatcctctaacttaataacaatygacaatgccagtttcccatcggtatcagcccatcagagtgaaattatttttcccaaatgaagacatcaccttaaatacagaatcagcaacatcaaaggatttgctggtactttcagtggctcaatgggaaggtaaggggaggggaggtgtgactgggccccagtgctcaaatcacactttgctctgcaagctggtgagataagaaatggcccatgctcctctcggggaaggcagtgaatgtgttgcatgtgaactgggatttaggggcttgagagagggagtggagacaatgacagatgatgcttgacaaggtcttcccagagatcaggcaagacagatatgttttgactcaatctgataggacctgagaccctgtggtaaattctcagagctttacagctccctttggaagaccaaatgtctgatttaaattccttgtgtttcagtttaggcctatttcatttcattctttcttttccataagctgcaagttgcttcccactgggtgatatgattcccattgacacggaaaagtgataaacagctttaccttgacccctcactccctccacaggatcctgcagtttcagaccctcttctttaggaaccactctgtcactctgcccactcagtagccacattttcgctgagtcatccctccctggccctagctagccctagctggccctagctgaccccaccggccctagctgggccaatcaggacctctcgcctcagaactgagccacagagaaggaagctgagtcacatcacagcaaagctctgaaggggttcggttcttgctacccccaaaatttgccagtttgatacactgattattttgagttgaaggcacttaaaaaaacagcagtgcagagagaggccctctctgaacttcccttacctgcctaaggacagatcctgcaaaagaaactaaattgtcatcagtcccatccctgggagtttcatcaaccagggaagatgaactcatcacagagagactagaagttgacaccactctcaaacaaactttgtcacaacctagcatatttcccatcttattttctatgggctcattcatctttcctaaaaatcttctactctcctaagtgacctgcatcccaccccactttccttattaagatggaatggaagctctcaaatctcactgcttttctgaggtattcacttttttttctgtgat

SEQ ID NO: 62789 - DNA, 1251 bp, Homo sapiens
tggaatttatcatcaccctccatgtatcctctaacttaataacaatcgacaatgccagtttcccatcggtatcagcccatcagagtgaaattatttttcccaaatgaagacatcaccttaaatacagaatcagcaacatcaaaggatttgctggtactttcagtggctcaatgggaaggtaaggggaggggaggtgtgactgggccccagtgctcaaatcacactttgctctgcaagctggtgagataagaaatggcccatgctcctctcggggaaggcagtgaatgtgttgcatgtgaactgggatttaggggctygagagagggagtggagacaatgacagatgatgcttgacaaggtcttcccagagatcaggcaagacagatatgttttgactcaatctgataggacctgagaccctgtggtaaattctcagagctttacagctccctttggaagaccaaatgtctgatttaaattccttgtgtttcagtttaggcctatttcatttcattctttcttttccataagctgcaagttgcttcccactgggtgatatgattcccattgacacggaaaagtgataaacagctttaccttgacccctcactccctccacaggatcctgcagtttcagaccctcttctttaggaaccactctgtcactctgcccactcagtagccacattttcgctgagtcatccctccctggccctagctagccctagctggccctagctgaccccaccggccctagctgggccaatcaggacctctcgcctcagaactgagccacagagaaggaagctgagtcacatcacagcaaagctctgaaggggttcggttcttgctacccccaaaatttgccagtttgatacactgattattttgagttgaaggcacttaaaaaaacagcagtgcagagagaggccctctctgaacttcccttacctgcctaaggacagatcctgcaaaagaaactaaattgtcatcagtcccatccctgggagtttcatcaaccagggaagatgaactcatcacagagagactagaagttgacaccactctcaaacaaactttgtcacaacctagcatatttcccatcttattttctatgggctcattcatctttcctaaaaatcttctactctcctaagtgacctgcatcccaccccactttccttattaagatggaatggaagctctcaaatctcactgcttttctgaggtattcacttttttttctgtgat

SEQ ID NO: 62790 - DNA, 1044 bp, Homo sapiens
tcacacactggggcctgtcagggggtggggggctgggggacagatagcatcaggagaaatacctaatgtaaatgacaagttgatgggtacagcaaaccaamatggcacatgtatacctatgtaacaaacctgcatgtgatgcacacgtaccctagaacttaagattaaaaaaaaacatttcttccctcatgaggtacaaagccaagcattacactggggccatgatagtccaggttgctgaaagatttagatctaaagactgaaaattgggatatatattgagagagagagagagagagaacaaatggtaacctaaatttaataaaataataatagacaaattagggtaacaggcatatgagtactttttgttctaacaattcttttattttcaaacttatctatgatcttacatttatttcccaataaaaaggattttaagttaaaaaaagaaagtttttctttagtaacattttcacaactagggcctttaagactgaggaaatactccaagctctgagcaaactcagtaagtataaatccatatgtagacataccacagtaaaatgcaagatactaaacactaatacaatattttcaaatcaaccagagacggaaggcagattacctgcaaaggaaggacaattactttatcacagacttctcttcatcaacgagaacagacaatacaggaagaacatctcccaagttgtgagggagacgaacagatgacatgaaattctacgaccaaataaagcataattcaatgggcagcagttaacagaattaagctgtttccagacatctatggagagatttaactcaaagatgtcactgtaaatttgattgttgagatgtagtaatggatacttggcaaggttattgaattagttaaacgatcttcaaagcttaggtcatgtatcttcattaaacacatggtgctttgcatttactaaagaagggcctccgttttctctccaaataaatcattgcgaccttagcaccccaagtgtaaaaacctcttttatttctattcttgatctc

SEQ ID NO: 62791 - DNA, 1044 bp, Homo sapiens
tcacacactggggcctgtcagggggtggggggctgggggacagatagcatcaggagaaatacctaatgtaaatgacaagttgatgggtacagcaaaccaaaatggcacatgtatacctatgtaacaaacctgcatgtgatgcacacgtaccctagaacttaagattaaaaaaaaacatttcttccctcatgaggtacaaagccaagcattacactggggccatgatagtccaggttgctgaaagatttagatctaaagactgaaaattgggatatatattgagagagagagagagagagaacaaatggtaacctaaatttaataaaataataatagacaaattagggtaacaggcatatgagtactttttgttctaacaattcttttattttcaaacttatctatgatcttacatttatttcccaataaaaaggattttaagttaaaaaaagaaagtttttctttagtaacattttcacaactagggcctttaagactgaggaaatactccaagctctgagcaaactcagtaagtataaatccatatgtagacataccacagtaaaatgcaagatactaaacactaatacaatattttcaaatcaaccagagacggaaggcagattacctgcaaaggaaggacaattactttatcacagacttctcttcatcaacgagaacagacaatacaggaagaacatctcccaagttgtgagggagackaacagatgacatgaaattctacgaccaaataaagcataattcaatgggcagcagttaacagaattaagctgtttccagacatctatggagagatttaactcaaagatgtcactgtaaatttgattgttgagatgtagtaatggatacttggcaaggttattgaattagttaaacgatcttcaaagcttaggtcatgtatcttcattaaacacatggtgctttgcatttactaaagaagggcctccgttttctctccaaataaatcattgcgaccttagcaccccaagtgtaaaaacctcttttatttctattcttgatctc

SEQ ID NO: 62792 - DNA, 723 bp, Homo sapiens
cttggggcataagattgatcatgaatcaccaaatagaaaaaccttgggatggctttcaagaaaaatcttccttgaagttttaactttcacctacaagcaagttttctcactgctctgtacagcagggtaaggacagcagcctcacagcatcagtctgaggatagaatgggttaatgcagccaggcacagtggctcatgcctgtaatcccagcactttaggaggccgaagcaggcggatcatgaggtcaagagatcaagacaccctggccaacayggtgaaaccccgtctatactaaaatacaaaaatactagctgagtgtggtggtgcatgcctgtaggcccagctacttgggaggctgaggcaggagaattgcttgaacctgggagacggaggttgcagtgagccaagatcacaccactgcactccagcctgggtgacagagtgagactttgtctccgcaaaaaaaaaaaaaaaaaaaaaaagaatgggttaatgcctgaaaactctttggcacagtgcccagcacaaattcagcagtcactcagtgttggctatcatctttggtgatgttggtcccaaacccagacctctgctcttgtcctcggctcatacacccacctgtatagcccatatgcactttaaacatgagtccaaaatggaatccaaaatattagatgccctcgttgccaccaccaggtttgctttcctctcaagccactgag

SEQ ID NO: 62793 - DNA, 723 bp, Homo sapiens
cttggggcataagattgatcatgaatcaccaaatagaaaaaccttgggatggctttcaagaaaaatcttccttgaagttttaactttcacctacaagcaagttttctcactgctctgtacagcagggtaaggacagcagcctcacagcatcagtctgaggatagaatgggttaatgcagccaggcacagtggctcatgcctgtaatcccagcactttaggaggccgaagcaggcggatcatgaggtcaagagatcaagacaccctggccaacacggtgaaaccccgtctatactaaaatacaaaaatactagctgagtgtggtggtgcatgcctgtaggcccagctacttgggaggctgaggcaggagaattgcttgaacctgggagacggaggttgcagtgagccaagatcrcaccactgcactccagcctgggtgacagagtgagactttgtctccgcaaaaaaaaaaaaaaaaaaaaaaagaatgggttaatgcctgaaaactctttggcacagtgcccagcacaaattcagcagtcactcagtgttggctatcatctttggtgatgttggtcccaaacccagacctctgctcttgtcctcggctcatacacccacctgtatagcccatatgcactttaaacatgagtccaaaatggaatccaaaatattagatgccctcgttgccaccaccaggtttgctttcctctcaagccactgag

SEQ ID NO: 62794 - DNA, 723 bp, Homo sapiens
cttggggcataagattgatcatgaatcaccaaatagaaaaaccttgggatggctttcaagaaaaatcttccttgaagttttaactttcacctacaagcaagttttctcactgctctgtacagcagggtaaggacagcagcctcacagcatcagtctgaggatagaatgggttaatgcagccaggcacagtggctcatgcctgtaatcccagcactttaggaggccgaagcaggcggatcatgaggtcaagagatcaagacaccctggccaacacggtgaaaccccgtctatactaaaatacaaaaatactagctgagtgtggtggtgcatgcctgtaggcccagctacttgggaggctgaggcaggagaattgcttgaacctgggagacggaggttgcagtgagccaagatcacaccactgcactccagcctgggtgacagagtgagactttgtctccgcaaaaaaaaaaaaaaaaaaaaaaagaatgggttaatgcctgaaaactctttggcacagtgyccagcacaaattcagcagtcactcagtgttggctatcatctttggtgatgttggtcccaaacccagacctctgctcttgtcctcggctcatacacccacctgtatagcccatatgcactttaaacatgagtccaaaatggaatccaaaatattagatgccctcgttgccaccaccaggtttgctttcctctcaagccactgag

SEQ ID NO: 62795 - DNA, 853 bp, Homo sapiens
atttaaaagacaatttatactattcacaaagattttaggtttagctgattcattttgtctgttgacttataaagctgagaactggagtatttagtaaaaaattattatcccattctgttctttcccacattctgtctcctctgtgctcactcatatacaaaatgacattttctccttatagccaaaagaaagaaaacaagtgtcatatttaatgcaatcggtaataatcgagagtcagcactgctcactttcaagcatttcaggatagaggctttctggggaaccttttaagtggtatcgtgtgcttggttttaaatatggacaggtctcaatacttcactagttgtatctaaggttcttggttttttctttttaagaactcagtcttaataaaacttacatatttgaataaagtgtcatggccactggaagcaagcatggaggtatagctgtacagcagaggtcttaaactgtatactccacaaggaaatcttttctagtattgccataccatgtaatataaatactaacctcagtttcaataataggttgtgaaccatgagtgatttttatrccattctcccctgcccttcagacatcactgtgttatatcattgtcagtaaaatgtcagtatagtaagcaaatcaacattatctccttcagaattctttgttgataactacactagtatttattttatagggtaatacaggtttttgtgaatttaggaatcaaaatgaaagattgtaattaatactatccaaaatagaagactagtacggttaatttctgtagttttttaaaattagttgctcatgctatgtgactgaaaaacacagagtatataaagcc

SEQ ID NO: 62796 - DNA, 638 bp, Homo sapiens
aacacaaagttgtgttaagattagggcagctattccccaggtgccctaatctagtccaatagcttaatactctgtctgtatgatgatgactcctgaagtagcaaccctgatcactcacttaaacattagatatgcacgtccagtcacttacaggacacctcttagtaggctccaaacccaactcttgattcctactctgcagcctctaaaatgtctccttcctttgtctctcagtaagtgagcaactaccccatttctaacccattaatccagccagacacctaaggttagtgttcgatgttttccctttctcagactctctacattcaatccatcagcaagactgattcacagtactatctcaacacatacgtatggaatagatgaatacatgaataaataagcaagtgtatacaactgtcctgtgccaggagcagaaactaggaaaaactatccatcccttacagtccaaagattcaaataacagcattcrttcttaacatggctttttaataactaatgagaaaatgaaacccgtaataaagtcatatgccaagattcatagcaagagtcctcacttctcaaatttgatcacttccccttaatttactggcacagcctgcccagtgttgctattt

SEQ ID NO: 62797 - DNA, 571 bp, Homo sapiens
tggactaaggatagttttgaaaattactgagttaatatatcaactactccagtgaaaccaagtgatattttagtgttcaaatttattatcaaattatagtatgtgggcagctatttgctttaaaaataaagtttgctagactatcctttgaaaaaaactttggcctgatwtgatttgctatgtgctgttgttgaagtatagggaccaactggattgaagctgctgcctaatcagcaagcatactgctggggcataatacacaaactccttgaattccaatggcattacctactaacccactgaaatgttgatcatggccacactgtgaggccagccttgagcaccctgggccaccgtgtgagatttgtgacaggatgcttgagcagtgaccatctgcaggaagaaatggggcaaccagaccaaggacaagtcaaagaaatgctttcagactctacagaggcccagtgaacaacagggctatgaactgagtcccagtaaccaataaaccaagattcagatattaaaaatgcagctgctcgccataaaaaaggatgagttcatgtcctttgta

SEQ ID NO: 62798 - DNA, 571 bp, Homo sapiens
tggactaaggatagttttgaaaattactgagttaatatatcaactactccagtgaaaccaagtgatattttagtgttcaaatttattatcaaattatagtatgtgggcagctatttgctttaaaaataaagtttgctagactatcctttgaaaaaaactttggcctgatttgatttgctatgtgctgttgttgaagtatagggaccaactggattgaagctgctgcctaatcagcaagcatactgctggggcataatacacaaactccttgaattccaatggcattacctactaacccactgaaatgttgatcatggccacactgtgaggccagccttgagcaccctgggccaccgtgtgagatttgtgacaggatgcttgagcagtgaccatctgcaggaagaaatggggcaaccagaccaaggacaagtcaaagaaatgctttcagactctacagaggcccagtgaacaacagggctatgaactgagtcccagtaaccaataaaccaagattcagatatyaaaaatgcagctgctcgccataaaaaaggatgagttcatgtcctttgta

SEQ ID NO: 62799 - DNA, 889 bp, Homo sapiens
ccctaataaatggtggttttgcaaatgtgtgatggttgtatgtatgagaacttctttgcytatgcaactaaggatgagccctgaagatctttagtcaaagtttgctttggaaggcaaacttggtgccaagagaatatgaaagtggcatagatgcaagttattattatcattaaatatgtaactatgaaaataacctcacctaggatacaagatcctgcaaggcatattcacctataaaagatgcctttttaataagcatgtctagaatctatctaacagtgtaatcaatgcctttacacaaagtgcccacatttgtcatttggaagcagcaggacacaaactgaagagggcaggaaccatgtgcatttgggtcaaactgtgacattgaagtctgaaggttttcagctattagaaactaactaaatcttctaaatactgcaataaaattttagaagccaaatggagagtaaattatttttaaaaaagatgaattgcaattattaaaacttaactctattcagtagacactctatgatgtttaaatatacacagaaatgaatatttgaaaaatggaatcatttaaaacttatggcatagaagtttgctacataatagagctctttgggaaatattctgctgaaggatcagacatttattatttctattttttcttttgtttttgatgcacatgtattttaatagttctcatgtattaagtagaatacacattttaaattacatttatacaagttaactcttgtttacctcccgtactaaaagactatgctgtttatttcctcattataaatgcagtgcagtgcacaattgactctataaccagagaggagagaaaactctatttttttaaacttttaggttgaagggtaca

SEQ ID NO: 62800 - DNA, 889 bp, Homo sapiens
ccctaataaatggtggttttgcaaatgtgtgatggttgtatgtatgagaacttctttgcctatgcaactaaggatgagccctgaagatctttagtcaaagtttgctttggaaggcaaacttggtgccaagagaatatgaaagtggcatagatgcaagttattattatcattaaatatgtaactatgaaaataacctcacctaggatacaagatcctgcaaggcatattcacctataaaagatgcctttttaataagcatgtctagaatctatctaacagtgtaatcaatgcctttacacaaagtgcccacatttgtcatttggaagcagcaggacacaaactgaagagggcaggaaccatgtgcatttgggtcaaactgtgacattgaagtctgaaggttttcagctattagaaactaactaaatcttctaaatactgcaataaaattttrgaagccaaatggagagtaaattatttttaaaaaagatgaattgcaattattaaaacttaactctattcagtagacactctatgatgtttaaatatacacagaaatgaatatttgaaaaatggaatcatttaaaacttatggcatagaagtttgctacataatagagctctttgggaaatattctgctgaaggatcagacatttattatttctattttttcttttgtttttgatgcacatgtattttaatagttctcatgtattaagtagaatacacattttaaattacatttatacaagttaactcttgtttacctcccgtactaaaagactatgctgtttatttcctcattataaatgcagtgcagtgcacaattgactctataaccagagaggagagaaaactctatttttttaaacttttaggttgaagggtaca

SEQ ID NO: 62801 - DNA, 1210 bp, Homo sapiens
cgggaggctgaggcaggagaatggcgtgaacccaggaggcagagcttgcagtgagccgagatggcgccactgcactccagcccgggcaacagcgcgagaccccgtctcaaaaaaaaaaaaaaaaatgtggtagcttttggctgggtgcagtggctcacgcctgtaatcccagcactttggtaggctgaggcgggcagatctcaaggtcaagagatcgagaccatcctggccaacatgatgaaaccccgcctctactaaaaatacaaaaattagctgggcatggtggcaggcgcctgtagtcaggagttactcaggagtttgaatttactcaggaggctgaggcaagagaatcgcttgaatcctggaggtggagcttgcagtgagccgagatggcgccaccgcactccagcctggcgacagagtgggactccgtctcaaaaaaaaaaaaaaaagtggtagctttttaaaaacccaatcaatttttctactcaacaggtccattaagattcctaactcttctgcattcaatttygataaattttatgtcttactagtttattatccatttcattcgagtttccaaatttattgtatagaatcaagtaaattccttaatttttactggatccttgataattttctccttgtgacttattatttttgattgattttcaccattatttagtgattaggttaattagcagtttatctattatttttccctaagcaaccagattttgaatttactagtcatattatattcttactttaataatttattattttatgttttgtctttattaatttatttcttctacttgatttgggcttattttatagtttttaatcctaatttcttgagttgaatatgcttatttttattgctattgcttgttgatataagtaataagactttaaatttatttttctgagtactgcttgaactgcatagcagaggtgctaatatgtgatgtttccttattactttctagatattcttcgcttttatttgaatttctttgagctatatgaaagagaatttaaaaggccgggcatggtggctcacgcctgtaatcccagcattttgggaggctgaggtgggcatatcacttgaggtcaggatttcgagaccagcatggccaacacggtgaaaccttgtctccacaaaaaatacaaaaattagccaggcatggtggcatgtgcctgtaat

SEQ ID NO: 62802 - DNA, 889 bp, Homo sapiens
gcatgacatccctctatggccctctatcaaattcatagttctgaacacaaggtggatggtaaataaatctttgttgcattatggatgctatcacagtccattcatataaccttgctttacctttgccactaatactactaatgataataaatattattgaccttccttgacatctgctatgacaaracctactaaatttccctcaatattcattcccttcttctttattttagtaaataaaccttcaagttttagctgtgcatatggccatgcagcttgaatttatatttctaagtcttccttgcagatggtgtggccatgtgcctaaattttgacccaagagattcaaaggaaatcaacgtactcacattctgaaacttttaaaaaagtacattgcttatcttctggtatgcctcccttttttttttttttttttcatggactggatcatggaattaattgagaggctggatatttctttgcccatctagacccactctcccctattcagttgttctgtgctctcagaaacaggctgttatggactctcaggtgctctggcttcaaattggttcagtcagtggaagattggtacatgcaaagaatgatgtatttttatgggttctcctgttttcgaggctatgttctcttgttcaagaccgtatttcctggagaactgtgtctagtcctgcagctgcggctattcttcttggatttttggattccaaatattttttccttttaagttctaggcatgataatgattttattgttttgaggttcatttaactctctctatatctttataaacggctcctttattaaactcttttcatttgttcagttgagtgcctccaccccttctgagaccttgattgataacaatgca

SEQ ID NO: 62803 - DNA, 889 bp, Homo sapiens
gcatgacatccctctatggccctctatcaaattcatagttctgaacacaaggtggatggtaaataaatctttgttgcattatggatgctatcacagtccattcatataaccttgctttacctttgccactaatactactaatgataataaatattattgaccttccttgacatctgctatgacaagacctactaaatttccctcaatattcattcccttcttctttattttagtaaataaaccttcaagttttagctgtgcatatggccatgcagcttgaatttatatttctaagtcttccttgcagatggtgtggccatgtgcctaaattttgacccaagagattcaaaggaaatcaacgtactcacattctgaaacttttaaaaaagtacattgcttatcttctggtatgcctcccttttttttttttttttttcatggactggatcatggaattaattgagaggctggatatttctttgcccatctagacccactctcccctattcagttgttctgtgctctcagaaacaggctgttatggactctcaggtgctctggcttcaaattggttcagtcagtggaagattggtacatgcaaagaatgatgtatttttatgggttctcctgttttcgaggctatgttctcttgttcaagaccgtatttcctggagaactgtgtctagtcctgcagctgcrgctattcttcttggatttttggattccaaatattttttccttttaagttctaggcatgataatgattttattgttttgaggttcatttaactctctctatatctttataaacggctcctttattaaactcttttcatttgttcagttgagtgcctccaccccttctgagaccttgattgataacaatgca

SEQ ID NO: 62804 - DNA, 1754 bp, Homo sapiens
acctccattaaccaatcacctctcaccaggccccacttccaacactggaaattacaattcaacatgagaattgggtggggacatagacccaaaccatattacaagcctatgtgtgtgtgtatttttgagagagatatatatatatatgataatatgatatatgatcatatatatatcatacacacacatatgcaatatgaaacaatacactgtaatgttttaaaagtgatcttagggtataaataaggtggggggttttcttattcttatttatctgtatattctaattttccaggatgtttacttgctgcatttgcaataatgaaaattatattttaaagaaaaaataaaatccatttagtactttcattttgagcagtataaaagaatagaccactcccattgaaacaactaaaagtgctagataagacataaaaaccccttttaaaccttgtagtctgttttcacatggctgtaaagaactgcctgagactgggtaatttataaagaaaagtggtttgattcacagctctgcatggctggggaggccttaggaaacttataatcgtggcagaaggtgaaggggaagtaaagaatgtcttacatggcggcaggagggagagagtgatgggggaaactcccaatcactttcaaaccatcagatctcataagcactcactcactatcataagaatagcatggtggaaaccacccccatgatccaatcacttcccgccaggtccctccctccctacaatttgagatgagatttggtggagacacagagccaaaccgtatcaaacatattaatgaaagagaaaaaaaaagacttctctaaagtgaaaaaaaagtaaaaaaggaagccagtaaatttacttcagttgtgggcatgttaaaatttctagagttgacactaaaagcatagaaagagtgtagaacttctaaactagtagagatgaaaaatagaatagggcaggagaatccgaaaaaaaaaagaagaaacaaataacaaagacaaaagtgtatggtaaatatttacccaaatatatgttatgataataacgtaagtgaaccaaaggattcagtaaaaaaatgaagatgaccaaattggattaaaacatctaactacatagtttacaaaaggcacatataaaaggatccagaaagtttcaaagaaaaaggataggagaaaagtcagaaaaatagtagccaaaagaaagctgtcatcactctattagatattttatagaatagctaggtagatagataatatataaatatataataaagataaagacatatatatgaatttaaatattagatatatgaaagaggctgggcttggtrgctcacacctgtaatcccagcaatttgggaggccaaggcaggtggatcacctgaggtcaggaattcaaggccagcctggccaacatggcaaaaccctatctctactaaaaatatgaaaattacccaggtatggtggtgcatgtctgtaatcccagctacttgggaggctgaggcaggagaatagcttgaacatggaaggcagagtttgcagtgagccgagattgtgccactgcactccagcctgaacaatggagtgagaatccatcttaaataaataaataaataaataaataaataaataatacatgaaagagagcaaaaagcatttctaaatataggattaaaacaaaataacagtttttaatttaccaggaagatacaataatttgaaatttgtaggcaactct

SEQ ID NO: 62805 - DNA, 1754 bp, Homo sapiens
acctccattaaccaatcacctctcaccaggccccacttccaacactggaaattacaattcaacatgagaattgggtggggacatagacccaaaccatattacaagcctatgtgtgtgtgtatttttgagagagatatatatatatatgataatatgatatatgatcatatatatatcatacacacacatatgcaatatgaaacaatacactgtaatgttttaaaagtgatcttagggtataaataaggtggggggttttcttattcttatttatctgtatattctaattttccaggatgtttacttgctgcatttgcaataatgaaaattatattttaaagaaaaaataaaatccatttagtactttcattttgagcagtataaaagaatagaccactcccattgaaacaactaaaagtgctagataagacataaaaaccccttttaaaccttgtagtctgttttcacatggctgtaaagaactgcctgagactgggtaatttataaagaaaagtggtttgattcacagctctgcatggctggggaggccttaggaaacttataatcgtggcagaaggtgaaggggaagtaaagaatgtcttacatggcggcaggagggagagagtgatgggggaaactcccaatcactttcaaaccatcagatctcataagcactcactcactatcataagaatagcatggtggaaaccacccccatgatccaatcacttcccgccaggtccctccctccctacaatttgagatgagatttggtggagacacagagccaaaccgtatcaaacatattaatgaaagagaaaaaaaaagacttctctaaagtgaaaaaaaagtaaaaaaggaagccagtaaatttacttcagttgtgggcatgttaaaatttctagagttgacactaaaagcatagaaagagtgtagaacttctaaactagtagagatgaaaaatagaatagggcaggagaatccgaaaaaaaaaagaagaaacaaataacaaagacaaaagtgtatggtaaatatttacccaaatatatgttatgataataacgtaagtgaaccaaaggattcagtaaaaaaatgaagatgaccaaattggattaaaacatctaactacatagtttacaaaaggcacatataaaaggatccagaaagtttcaaagaaaaaggataggagaaaagtcagaaaaatagtagccaaaagaaagctgtcatcactctattagatattttatagaatagctaggtagatagataatatataaatatataataaagataaagacatatatatgaatttaaatattagatatatgaaagaggctgggcttggtggctcacacctgtaatcccagcaatttgggaggccaaggcaggtggatcacctgaggtcaggaattcaaggccagcctggccaacatggcaaaaccctatctctactaaaaatatgaaaattacccaggyatggtggtgcatgtctgtaatcccagctacttgggaggctgaggcaggagaatagcttgaacatggaaggcagagtttgcagtgagccgagattgtgccactgcactccagcctgaacaatggagtgagaatccatcttaaataaataaataaataaataaataaataaataatacatgaaagagagcaaaaagcatttctaaatataggattaaaacaaaataacagtttttaatttaccaggaagatacaataatttgaaatttgtaggcaactct

SEQ ID NO: 62806 - DNA, 939 bp, Homo sapiens
tgcatatatatgagtatatatataaattttataatgagaaaaaaactatttttttttgagacgaagtctcgcttttgtcccccagtcaggagtgcaatagcgtgatctcggctcactgcaacctccgcttcctgggttcaagcgattctcctgcctcagcctcctgagtatctgggattacaggtgcgtaccaccacacccagctaattttttgtattttaagtagagacagggtttcatcatgttggcgaggctggtctcaaactcctgacctcagatgacccgcccatctcggcctcccaaagtgctgggattacaggtgtgggccaccgtgcctggccgaaaaaaactatttaaaaaaaatctactaatggcattatttcaatgatgcttccaccaccaaaagtacttccaatgtctcctctagaattttcctcaggagtagtaaacaaagcacacaagaaaatgattcttcatacattgttatgcttcatcttgaccccaagtgggcttggccccctcaatcactcccttatttaattcaccaaacctgatatgatttcaaacagcattaatttttttcccaaaattaagctagacaaacatttgcaactgctgaagaagttaaaagaaatcaatataaactctaaggtcaacccctcatataggttccaaaaacaatcttcagcatctgtaaaattcgtggcttagtctccgaagaccattaaacataaactatcattttttctctatataagttttaaaagtcaacatccttaaatcaaagttgtatttcaggtttttctttattataaatctttgaaaagtggttgtcctcatggcgggcaattctatcagcctgctagcaagaacccacccggctgtgccccacccctaggctccctgaccaaracagctcagagtttactggaaacacaa

SEQ ID NO: 62807 - DNA, 719 bp, Homo sapiens
tgtgcactggtggatttagtcccagcttgaactcccaataagaagtaactctccctagcaaagaaggtttaaagcctctttactctaatcatggcaggcatactattactggtaattccagaaaggacacagatcaaaacactataggtggctaaggtagagtactgtttcctaaagccatttttgataatacataatgctggtaatcatatgaaggagtacatgttaaaggaaaatccttccttggaaayaatgaaatacagagtcagaacccaaagattactttgagcaacagcatgaccaaaatcacagacttcctgcaaccggtaataagtaaagcaaagtgtaggcattccggcaaatggcagtgtggagatctagcctggactagaattactcccataaccactatattatgtcttctattgctgtgtaacaagttaccacaaactcagtgacttaaaacaacatacatttattgtcttgaagtttccatggcgtgagaagtcttggcatagcttagctgagtcttctgctcaggtcctacgaggctgcaatcaaggtgtcactcaggctgcattatcatctgaaggctcgcatggggaaaaatctactttctaactcattcaggttgctggtaaaattcatttttcttgtcagttatgaatgaaggtccagtttttgctggttgtaggttgaaggcctccctcaggtcctgg

SEQ ID NO: 62808 - DNA, 719 bp, Homo sapiens
tgtgcactggtggatttagtcccagcttgaactcccaataagaagtaactctccctagcaaagaaggtttaaagcctctttactctaatcatggcaggcatactattactggtaattccagaaaggacacagatcaaaacactataggtggctaaggtagagtactgtttcctaaagccatttttgataatacataatgctggtaatcatatgaaggagtacatgttaaaggaaaatccttccttggaaacaatgaaatacagagtcagaacccaaagattactttgagcaacagcatgaccaaaatcacagacttcctgcaacyggtaataagtaaagcaaagtgtaggcattccggcaaatggcagtgtggagatctagcctggactagaattactcccataaccactatattatgtcttctattgctgtgtaacaagttaccacaaactcagtgacttaaaacaacatacatttattgtcttgaagtttccatggcgtgagaagtcttggcatagcttagctgagtcttctgctcaggtcctacgaggctgcaatcaaggtgtcactcaggctgcattatcatctgaaggctcgcatggggaaaaatctactttctaactcattcaggttgctggtaaaattcatttttcttgtcagttatgaatgaaggtccagtttttgctggttgtaggttgaaggcctccctcaggtcctgg

SEQ ID NO: 62809 - DNA, 719 bp, Homo sapiens
tgtgcactggtggatttagtcccagcttgaactcccaataagaagtaactctccctagcaaagaaggtttaaagcctctttactctaatcatggcaggcatactattactggtaattccagaaaggacacagatcaaaacactataggtggctaaggtagagtactgtttcctaaagccatttttgataatacataatgctggtaatcatatgaaggagtacatgttaaaggaaaatccttccttggaaacaatgaaatacagagtcagaacccaaagattactttgagcaacagcatgaccaaaatcacagacttcctgcaaccggtaataagtaaagcaaagtgtaggcattccrgcaaatggcagtgtggagatctagcctggactagaattactcccataaccactatattatgtcttctattgctgtgtaacaagttaccacaaactcagtgacttaaaacaacatacatttattgtcttgaagtttccatggcgtgagaagtcttggcatagcttagctgagtcttctgctcaggtcctacgaggctgcaatcaaggtgtcactcaggctgcattatcatctgaaggctcgcatggggaaaaatctactttctaactcattcaggttgctggtaaaattcatttttcttgtcagttatgaatgaaggtccagtttttgctggttgtaggttgaaggcctccctcaggtcctgg

SEQ ID NO: 62810 - DNA, 719 bp, Homo sapiens
tgtgcactggtggatttagtcccagcttgaactcccaataagaagtaactctccctagcaaagaaggtttaaagcctctttactctaatcatggcaggcatactattactggtaattccagaaaggacacagatcaaaacactataggtggctaaggtagagtactgtttcctaaagccatttttgataatacataatgctggtaatcatatgaaggagtacatgttaaaggaaaatccttccttggaaacaatgaaatacagagtcagaacccaaagattactttgagcaacagcatgaccaaaatcacagacttcctgcaaccggtaataagtaaagcaaagtgtaggcattccggcaaatggcagtgtggagatctagcctggactagaattactcccataaccactatattatgtcttctattgctgtgtaacaagttaccacaaaytcagtgacttaaaacaacatacatttattgtcttgaagtttccatggcgtgagaagtcttggcatagcttagctgagtcttctgctcaggtcctacgaggctgcaatcaaggtgtcactcaggctgcattatcatctgaaggctcgcatggggaaaaatctactttctaactcattcaggttgctggtaaaattcatttttcttgtcagttatgaatgaaggtccagtttttgctggttgtaggttgaaggcctccctcaggtcctgg

SEQ ID NO: 62811 - DNA, 658 bp, Homo sapiens
cagccaataagcaaataaaatttgaaggccagggagtatctcatgttcacagaatatgacaaaacaaacagaattatacatttcaacatgccattaaaactaatattgtggttcacttcttttttatccatattataatggaagtttcaaaatctctaggttatgaaagtagttcccaagtctttccgagccctcaggaagggaataaactcttctttcaggtcattcatctttccttaagtcagtaaaccagacagagggtcacagcacaaaatgacccccacatactattttttatgaaactacttttgaattattaatggttggtctgcaccaaaatcttcaagacaaagataaaacataaaatacaaagtctctgtcttcagaaaagtcattaacctttgcaaagatcatatttaaatacagtttttaacatttagcttctacttaacagccatgtatttccttttccattgtggcaaatttaaatgtattagattatggtctctttctgctatgtttcatataagtagaagagcataggtaatgtgaaaatactgggattgcagtaatcgaaaaactaacaattagcamtgaaaaaatttataatgcagctacatctttctaaacttcaaaagctatatttcagaagagtgta

SEQ ID NO: 62812 - DNA, 1233 bp, Homo sapiens
tacartcagggtaatcaacatacacaacgcctcccaaagttttcttgtgcccttttgttttaagaactatttactaactggcatttctcctctaatgtggagcagactgactgatttacagagtatttattatacctagttttttctgtcttggtgtcacatcacctcttatcactactgcattcattcattcattcattcataactacatatcaaacatctacaataccccaggcaccattctaagttctgggaatacaatagcgagcgaaacagatgaaaccacctgctatcatgacgcttacagtggcagctgcaactcgttcaatgtaacctctgctcctgccctttttttcttttgacctaagagtttcaatctcaagctcttcctataaatgcttacgtctattgctagagtctctacgagattgtctctcttccaccagccaggctctaccataaaggacattaagtgtaggttcctaaactgccatgaatatggaagacatgttcttggtgtttcagtttatcaatttgaaatacacttgctagatagaagcattaaaacaatataaaaaaaatgatgagggtccctagtattattagtatgtttcttcagctacattatgggttaaaaatatttgtttgaactgccctgtgccctaagcactgtttttacaaatgcatccctggtttccaaccagatatttttcagacagattggtggaacctgagttgtcagctggaaatttcttgtgcaatcataattcaagattgtaatgatgaccttggagctctttaacatgcaaacatggcttttgaatgaaaaaggaatgattaccttttctttcatctatttttagatttatttttctatattgtatttctttaaagagtgataatcttctatacaggatagatagaataactcaattgatcactccccactaaagcctctatcatttgaccagataagataacaaaaagtttactatactcaagagtctcctttggtaaaatagaaacctatgattctaggttatctttgagacctggggaaagtaacagagatgaattgtttcatcttcctgtctgaacaccctctcgagaaaaaaatactttttgaaaaatgagataaaatggtgtctagtgagtcatgatttcaggttagtgcaagtccaaagcactcaggagggtctactttgtgtgtctcaattaacagtacacattcat

SEQ ID NO: 62813 - DNA, 534 bp, Homo sapiens
ggaaataagaggcaccctgaaaaactgaggtcttcttctcaatcccattttatcgtagactcaaagcataaatctgtggttttcaagaagctgtaggattgctgtaagctaaagaaaagcttgattgaatactatttattttacgtacctttcaaagatttctttcttttcttttttttttttttttttttttkgggacagagtctcactttcgccgaggctggagtgcagtggtgtgatctcaactcactgcaacctctgcctcctgggttcaagcaattcttgtgcctcaacctcccgagtagctggaattccagccatgtgccaccatgcctggctaatgtttttgtatttttacttgaaacaaggtttcaccttgttggccaagctggcgtttcaaagatttcgaccctgataagttccataaaggctcctgcccacttgaagtaactgtaggttggtcttgatgtttggagaatcatgtgataactctttcaaacagtatcctatgctgatttataaccccaatccaga

SEQ ID NO: 62814 - DNA, 534 bp, Homo sapiens
ggaaataagaggcaccctgaaaaactgaggtcttcttctcaatcccattttatcgtagactcaaagcataaatctgtggttttcaagaagctgtaggattgctgtaagctaaagaaaagcttgattgaatactatttattttacgtacctttcaaagatttctttcttttcttttttttttttttttttttttggggacagagtctcactttcgccgaggctggagtgcagtggtgtgatctcarctcactgcaacctctgcctcctgggttcaagcaattcttgtgcctcaacctcccgagtagctggaattccagccatgtgccaccatgcctggctaatgtttttgtatttttacttgaaacaaggtttcaccttgttggccaagctggcgtttcaaagatttcgaccctgataagttccataaaggctcctgcccacttgaagtaactgtaggttggtcttgatgtttggagaatcatgtgataactctttcaaacagtatcctatgctgatttataaccccaatccaga

SEQ ID NO: 62815 - DNA, 613 bp, Homo sapiens
tctgaaatttttcaaaataaaaaattaaacaaaaacaaaaccagaggtagatattctggtttctgatgcacactctgtagctttggatatatcacctaacccttctgattttcaatttttccagttttaaaattgaagaaaaaaagagccacctaactgtgaggatcagacagtctaattcttttttttttttttgaggcggagtgttgctcttgttgcccaggctggagtgcaatggcacaatcttggctcaccgcaacctctgcctyctgggttcaagcgattctctggcctcagcctcccgagtagctgggattacaggcatgctccaccaagcccgggtaattttgtatttttaatagagacggggttttgccatgttggtcaggctggtctcgaactcctgacctcaggtgatctgcccaccttggcctcccaacgtgctgagattacaggcatgagtcactgtgcccggcagagatggtctaattcatatgaaagaactctgaaaaaagtagaaagtgattttctaaaataaggtacaaataattaatgtaaacataatcacctaaccttgtggaatttttttttttttgagaagcaaattgcaaat

SEQ ID NO: 62816 - DNA, 1597 bp, Homo sapiens
atgataaggtattagtttcatctccactttacaaatgatgcaactgaggcttagagtgatcaagaaaattttcaagggtcacagagctagaaaatggcagagccagggcttcaaccaaaaaaaccacactggaaccctcagaataataagtctgtccaatccagagtccaggagagggagaaactgaggctgcctggagctgcatagtcacatgaatgttgcttcaacattagtaggtatcacctaccttcctcataaaataaatatactcaaacttaaaaatgaaattyaaataattgcactaacaaaggctcaaaacatacaaaattcaccagctactcaacactaaacgttattgccttagaaaactgttaagcacacatgctctgcaccatatgtagagagatactcattccacaggtcctgagagttaaattttttcctcgtttcatatgaattgagaagaattaaaagagtttgtgttggggtgaaaagctttccaggcaggttttgttcactgaagttaaaggacagttaattttaaaatatgtgcacttaagaacagcgtttgatctgccaacaaataaaccaagaattttcagtaaaatggaaaaagttttaaggtctggaagtgatataaaattgtcttgaaaaataaaatgtttcagttgtttgatagctgcttggtgccagttctgatagacactctaggatccagagatttcccaaaccaggggcatatggcagagaattgttatatagagaggtttgatctagtactctaccaccctgtcagcattcagcagttagtagatacttgaatgttagttttcatctagccttagttggaaggaagagaagatcttgaagttccaaagcaaaacttctaaagttctctgtgcctttcaaagtcactgttgctacctctgcacacacttcccagtaacctgggtgggctttctcatggatgggctcacattgctctcaaagagcacagatgctgtcaattaaagcaatgactctcaacgaaacaagtctactcttagctatactgttctgtgcatggaactgcaaaggcaacaagaattctaatagctgggatgggaaaataaaagttcaaagattaggagaagctacggctagaaacaaattcaaggagagtgatgtagggctgaacagcagcatccagtgagagcagaaacctgaatgtgattatctcagggcttcctaagggaagaaactgactggaatgtgagggagaagaaggcacagtgggaagccctaaaatacactttccttctctggtcctcagcaaatgagcctcaacatcatccccagacatcagagttaagtaccctgaaaagctccacttcaaaataagaaggaatatgagttagagaaactcagtttgttgagtataaattattcacagccttattagaaataaaatgttcttgttaataaagcacgctggttatcacatatgctgtgtatggattaccgtttttcacagatatgaatgaaaaaaggacactcactgccttaaatggaataaacttggtttttttttttcccttaatggtgtgcaggcccttga

SEQ ID NO: 62817 - DNA, 635 bp, Homo sapiens
agctcctggctgttggctgtgctccttcatatcaaagccaatgcctccaagtggaattaggaccagacgtttaggagtggagawgctgttttcaagatgcacatgagcatgaacttctgaagtgcttgcgacactgtcatcctgtcctgcccaatccccttttgaaaggttacaccactgggctcttcatttctctttgctttcaccagctttctatgctcttcagtgcccgtgctaagagcacgcagtcactttcagcgggagaggtttttgatgaggagatgggtaaggagaagtagtgaaaagtttccttagtttcacacatccttttacatgatatgagggaatcagggacaagttcttttgtcttgcttagtgcctcaatataggtagcgaactatgctccattcagaagaaaacttcaggccctctggggagtagaagaaaggaattcacattgcatattctggataaaaaatgtttgaaataaattactatttttagggagaaataacattggcatgtcaccctaattatatcatagaatcctagtgcaggaggagatttttagcgtaaccctctacttgtataataataataattaacaaatatcagctgtgtactacatggcgaac

SEQ ID NO: 62818 - DNA, 645 bp, Homo sapiens
cttgaaatctatccatgtaacaaaattacacttgtaccccacaaatttatacaaatttttaaaaaagagaaaggtctgggtctgtgaaattagaatcgagttagtctttggggtttttttgcaacaatggagaaatacttgcccacaatcttatctaactgatttgattgatttagtaaatattttgaaacaaagatttttctataaggacaatctataaaggaaagaaacaagtggttttttaaaagtattgttttcaaattatggaaaaacatgttattgtattaatgactgggatgaggaaaatcaccattcacaaggcaattctggaaagaggattgttaacactaattaaactaaaaatgataccacctaagcatgtacataatgattttaaatttacaagctcctttcatatgtatcttgttgatcctctcaagaccgagcagatgtcaccatctgtattttataaagaagaaaacatgacaaaaataagatgattttctgaagagcccccwtgtggcaagtttaggacttgaacttggatcttctagttcaagttaatggatcatctatgtcctagtgcagggcaaatgctatataaactttatcatggcaagtgagtctggttcaaacctctgtcta

SEQ ID NO: 62819 - DNA, 802 bp, Homo sapiens
ttcaagctccaaaatctattgcaggtttagctcctctgcagtctctagtacaccaaattcatcacctcagaatacactagattggtcctatccccagacccagcagacttggccacttcattccttctgcctagaatgctctttctctcttctccagtccaagcttcctgttcaaggttctgctcaaacatcagctcccctaaggcctgattgtcccccaggcctccggtcactcaggctctgggccccctgcctattcagcactacctgttcagctatgtggtcactatatctgtcttcaggccagttgctcctgttggacttcctgctccttgaaagcagggtctgactcctcttgtctctgcctggactgaggccttattcacagagatagagacagtgaaagtcttaagactttccttcatggagagcctgtcagtttgatgtatcaatgtaaacttacacacacatacaccctatggcaatactctgtggacttactccttgtaaagcctctcatctcctaaacgccccctgtcctggactctttccagagtcactggccagctttcttctgtctacaaacttttgactgccagcccttccaaaattgactgaccaatgcctactgcactgctattcccaaaccctgctattactccttccattatagaacacataggctgtgatttttccccctagaactgtgtgtgtgtgtgtgtgtgtgtgtgtgwgagagagagagagagagagagagagagacagtgtgtgtgtgttttatggatgtattttccttgtttgt

SEQ ID NO: 62820 - DNA, 802 bp, Homo sapiens
ttcaagctccaaaatctattgcaggtttagctcctctgcagtctctagtacaccaaattcatcacctcagaatacactagattggtcctatccccagacccagcagacttggccacttcattccttctgcctagaatgctctttctctcttctccagtccaagcttcctgttcaaggttctgctcaaacatcagctcccctaaggcctgattgtcccccaggcctccggtcactcaggctctgggccccctgcctattcagcactacctgttcagctatgtggtcactatatctgtcttcaggccagttgctcctgttggacttcctgctccttgaaagcagggtctgactcctcttgtctctgcctggactgaggccttattcacagagatagagacagtgaaagtcttaagactttccttcatggagagcctgtcagtttgatgtatcaatgtaaacttacacacacatacaccctatggcaatactctgtggacttactccttgtaaagcctctcatctcctaaacgccccctgtcctggactctttccagagtcactggccagctttcttctgtctacaaacttttgactgccagcccttccaaaattgactgaccaatgcctactgcactgctattcccaaaccctgctattactccttccattatagaacacataggctgtgatttttccccctagaactgtgtgtgtgtgtgtgtgtgtgtgtgtgagwgagagagagagagagagagagagagacagtgtgtgtgtgttttatggatgtattttccttgtttgt

SEQ ID NO: 62821 - DNA, 802 bp, Homo sapiens
ttcaagctccaaaatctattgcaggtttagctcctctgcagtctctagtacaccaaattcatcacctcagaatacactagattggtcctatccccagacccagcagacttggccacttcattccttctgcctagaatgctctttctctcttctccagtccaagcttcctgttcaaggttctgctcaaacatcagctcccctaaggcctgattgtcccccaggcctccggtcactcaggctctgggccccctgcctattcagcactacctgttcagctatgtggtcactatatctgtcttcaggccagttgctcctgttggacttcctgctccttgaaagcagggtctgactcctcttgtctctgcctggactgaggccttattcacagagatagagacagtgaaagtcttaagactttccttcatggagagcctgtcagtttgatgtatcaatgtaaacttacacacacatacaccctatggcaatactctgtggacttactccttgtaaagcctctcatctcctaaacgccccctgtcctggactctttccagagtcactggccagctttcttctgtctacaaacttttgactgccagcccttccaaaattgactgaccaatgcctactgcactgctattcccaaaccctgctattactccttccattatagaacacataggctgtgatttttccccctagaactgtgtgtgtgtgtgtgtgtgtgtgtgtgagagwgagagagagagagagagagagagacagtgtgtgtgtgttttatggatgtattttccttgtttgt

SEQ ID NO: 62822 - DNA, 901 bp, Homo sapiens
cttttttttttttttgcctctttcctgttttccctgtttatgactttgctatagcacagtaactatagccactttcactggggttcttagggttgaaaaggctgctgcccctctttgaatgaatcctcattaaacgtggcaaatattaattactgacattagaagtagaagggctgtgaagtacayaaaagagcatattagggcagttagcatgatacagtttttttcttctgagaaaatgtgagcaaatgacaggtatcataaactcattaattgttctaatatgggacaggctcacaggtcttgagcatgaaaacacttgtattaaaattggcaaaacaacttgattaaatggtattgtatacacagatgtgaaaggtaaatttcattaataattattattatgaataagaacaattcaactccagactcattttcttttcttttctttttcttctcttattttttttttgagatagaatgtcactctgtcacccaggctggagtgcactggtgtgatcttggctcactgcaacctccgcctcctgggttcaagcaattctcgtgcctcagcctcctgagtagggggaattacaagcacgcaccaccacacccagctattttttgtatttttagtagagactgggtttgccatgttgcccaggatggtcttgaactcctggcctcaagtgatccacctgccttaacctctcaaattgctgggattacagacgtgagccactacgccaggcccggactcattttctatgagaaaaggtgaaaaattaagaacaaattgtgtaaaaataaaacaatgtttaaatctgtatgcacttccatttagttaataatagaagtagacaagctaataagtgcagtgttataaagacaagtgaatgca

SEQ ID NO: 62823 - DNA, 791 bp, Homo sapiens
caggatttgaagatgtttccatttgatgatttccattttcatcatcatgtaggatacaagatcctccagagagtggattagggggattggttgggaaaggaattttaagtacatggtaaaggtgttgttgcttctgaggtaatgggagacaaatgaactaggacaaatagggtagatagtagtattatgttgtgtcatctccagccttaactttatgtacttttcccccgctgaawttttttcctctgactcctcccaaccactcgttctcaggattgactgccttctccattagatttttctcccctaaccccaattactgtcctgaatctgataaagtggtgcacccattgagttaacaaatcaatcgatcactctataaaggtcatccattttttatttaaataaaattttaaaaacaaaaaaagaaggaaatgtaaataaagtatagagtttagttaataataatatttcaatattggtttattaattgtaaccaatgtactttactaaagtaagaagttagtaattggggaaactgggtgtagggcactattttctgtaaacctaaagctgttctaaagttaaaagtttattttttaaaacaaagtgaatattaccgagagagagagtaggagagaacacatgtgcacacacctggagtgtaaatagaaaaacatctatatgaactatgagtattgtattagtccattttcatgctgctgatagacgtacccgagactgggaagaaaaagaggtttaattggacttatagttccacatcgctgggg

SEQ ID NO: 62824 - DNA, 791 bp, Homo sapiens
caggatttgaagatgtttccatttgatgatttccattttcatcatcatgtaggatacaagatcctccagagagtggattagggggattggttgggaaaggaattttaagtacatggtaaaggtgttgttgcttctgaggtaatgggagacaaatgaactaggacaaatagggtagatagtagtattatgttgtgtcatctccagccttaactttatgtacttttcccccgctgaatttttttcctctgactcctcccaaccactcgttctcaggattgactgccttctccattagatttttctcccctaaccccaattactgtcctgaatctgataaagtggtgcacccattgagttaacaaatcaatcgatcactctataaaggtcatccattttttatttaaataaaattttaaaaacaaaaaaagaaggaaatgtaaataaagtatagastttagttaataataatatttcaatattggtttattaattgtaaccaatgtactttactaaagtaagaagttagtaattggggaaactgggtgtagggcactattttctgtaaacctaaagctgttctaaagttaaaagtttattttttaaaacaaagtgaatattaccgagagagagagtaggagagaacacatgtgcacacacctggagtgtaaatagaaaaacatctatatgaactatgagtattgtattagtccattttcatgctgctgatagacgtacccgagactgggaagaaaaagaggtttaattggacttatagttccacatcgctgggg

SEQ ID NO: 62825 - DNA, 562 bp, Homo sapiens
tgtagagtttgggtctctggatagtcttgtggagcaaaatctcctacttgccaagaattgcccattgtcctttccactattacttaacagggaaataaactactgtctcctctgagcactttattcttggagctctttgtggtacccatttacattatgctgtatactaacttatatatggataattgatgggtaatcatgtcaaaaatgaatacaatagataaacaagatagcagtcaaagatagatwagccttcaaagaatgagttgaacagaggcataaaaagtattaaaatacttatgtgatccatgtgagaatggattttattttgttcattgtagtagtcaatagctgtgagagttcctgcttacaataggtctttaataaaaatttgtgaagtgaataaatatgaggtatatgaccaatggagatacatgaaaagcactaatgaaatgtatcagagtttcatgacatagtaggcagacatcttagagtaaagacaatattcacatagaaatgatagcagaaaatatttaacactaaggaagaatatgagcaggta

SEQ ID NO: 62826 - DNA, 562 bp, Homo sapiens
tgtagagtttgggtctctggatagtcttgtggagcaaaatctcctacttgccaagaattgcccattgtcctttccactattacttaacagggaaataaactactgtctcctctgagcactttattcttggagctctttgtggtacccatttacattatgctgtatactaacttatatatggataattgatgggtaatcatgtcaaaaatgaatacaatagataaacaagatagcagtcaaagatagattagccttcaaagaatgagttgaacagaggcataaaaagtattwaaatacttatgtgatccatgtgagaatggattttattttgttcattgtagtagtcaatagctgtgagagttcctgcttacaataggtctttaataaaaatttgtgaagtgaataaatatgaggtatatgaccaatggagatacatgaaaagcactaatgaaatgtatcagagtttcatgacatagtaggcagacatcttagagtaaagacaatattcacatagaaatgatagcagaaaatatttaacactaaggaagaatatgagcaggta

SEQ ID NO: 62827 - DNA, 562 bp, Homo sapiens
tgtagagtttgggtctctggatagtcttgtggagcaaaatctcctacttgccaagaattgcccattgtcctttccactattacttaacagggaaataaactactgtctcctctgagcactttattcttggagctctttgtggtacccatttacattatgctgtatactaacttatatatggataattgatgggtaatcatgtcaaaaatgaatacaatagataaacaagatagcagtcaaagatagattagccttcaaagaatgagttgaacagaggcataaaaagtattaaaatacttatgtgatccatgtgagaatggattttattttgttcattgtagtagtcaatagctgtgagagttcctgcttacaataggtctttaataaaaatttgtgaagtgaataaatatgaggtatatgaccaatggagatacatgmaaagcactaatgaaatgtatcagagtttcatgacatagtaggcagacatcttagagtaaagacaatattcacatagaaatgatagcagaaaatatttaacactaaggaagaatatgagcaggta

SEQ ID NO: 62828 - DNA, 987 bp, Homo sapiens
cacacacacacacacacacctgtctctytctttcctccatgacttatgggattgttgtgggttttttttttcctgatggacttttcttctttgacggatgaaacacctcttatctcagagcccaaactgtgagacagctgtagtgggagggtgggaagcatggaggctcaagctgagtccctgagagcctggcaagtgtgtcctcaggttcaaaactcagcctgctggggttcttggcttaactttctctgggttggtatgtgcattttctagtagggattgagtgaaaggcatgttatttttaagaagcaggaggaaggaggaggttgcctctttctactaagtgctgaccaacagctgtaattttagtggtagtaactgacgaaggaagaggagggaggagattgcctctttccactaaggggtgaccaacagctgtaattttagtggcagtaactgacaggaacagcttgatggcatcatgtttaatgggaagagaccagctcacctcatgccctggttgctatgtacagagatctgaggagtccataacaaaggctgtgagagtcactgcttagagtagaaggaaacaggggctgtcccagaaaaggggggcttgcttttgtccagccctgttggaatttatgaggtctgtagagtggagtttatagaagtgacttgggaggcaacgaaagcccctatgaatttctcagatatccttcactccaagaagcttcctaagtaattattgaacttgggagaacataattaaagaacacatgtctcctgcggccatatttagacatagtggaagactttttggcattttgaaaatagcatcagtttctatcttatgcactctgggaattctctgacccatcagcaattggccacttcttggaggaggatgagaaatgagccacataattttagatgtgaaaaccaaagggaaaataggtttcattagccctgagggaaaaagaagca

SEQ ID NO: 62829 - DNA, 987 bp, Homo sapiens
cacacacacacacacacacctgtctctctctttcctccatgacttatgggattgttgtgggttttttttttcctgatggacttttcttstttgacggatgaaacacctcttatctcagagcccaaactgtgagacagctgtagtgggagggtgggaagcatggaggctcaagctgagtccctgagagcctggcaagtgtgtcctcaggttcaaaactcagcctgctggggttcttggcttaactttctctgggttggtatgtgcattttctagtagggattgagtgaaaggcatgttatttttaagaagcaggaggaaggaggaggttgcctctttctactaagtgctgaccaacagctgtaattttagtggtagtaactgacgaaggaagaggagggaggagattgcctctttccactaaggggtgaccaacagctgtaattttagtggcagtaactgacaggaacagcttgatggcatcatgtttaatgggaagagaccagctcacctcatgccctggttgctatgtacagagatctgaggagtccataacaaaggctgtgagagtcactgcttagagtagaaggaaacaggggctgtcccagaaaaggggggcttgcttttgtccagccctgttggaatttatgaggtctgtagagtggagtttatagaagtgacttgggaggcaacgaaagcccctatgaatttctcagatatccttcactccaagaagcttcctaagtaattattgaacttgggagaacataattaaagaacacatgtctcctgcggccatatttagacatagtggaagactttttggcattttgaaaatagcatcagtttctatcttatgcactctgggaattctctgacccatcagcaattggccacttcttggaggaggatgagaaatgagccacataattttagatgtgaaaaccaaagggaaaataggtttcattagccctgagggaaaaagaagca

SEQ ID NO: 62830 - DNA, 764 bp, Homo sapiens
aaaactcctgaactcaagcaatccacccgcctcagcctttgaaagtgctgggattacaggcatgagccaccaagccyggccagaagattcctaacctttctctaaaagcttaggaatcacagccttagaataaactaggtattcatttttttttcccaattctacctttaccttctaacctctcctctttctaaacttttagttgtttcacgagtaaggttcataaacagccctggtaggatttctaactaggcaagactccagcatccttattgtagaaattaccaggtgatactaaaagttaagaatatgacatcagtcaacattgctcccgctctgtccggccaaagtggtggcatgaagatgatcaagacatctctggacctaccactttgggtaggcatggagggaaaggctggcgttttacaggtgccaaagatagcttcaggctttgggaatgccacttgtagaccaaggtggtggcagaatgtccagaaatcttcacagtgatgaacctatttacctgggggtaacagaaaggagggtcatttcctgcgtggaatcctcattctcataattcagatggaaatcatgtatttgcatgacatgtggacggaaatttgggactgacattcacagacagctgcagtctcttgatttaatactattacatttttgagttttgggctttgtgctgcaatttcgtgtgttgttatgacttggggagggaaaaagacaagggaggagaaactattttgcaagta

SEQ ID NO: 62831 - DNA, 764 bp, Homo sapiens
aaaactcctgaactcaagcaatccacccgcctcagcctttgaaagtgctgggattacaggcatgagccaccaagcctggccagaagattcctaacctttctctaaaagcttaggaatcacagccttagaataaactaggtattcatttttttttcccaattctacctttaccttctaacctctcctctttctaaacttttagttgtttcmcgagtaaggttcataaacagccctggtaggatttctaactaggcaagactccagcatccttattgtagaaattaccaggtgatactaaaagttaagaatatgacatcagtcaacattgctcccgctctgtccggccaaagtggtggcatgaagatgatcaagacatctctggacctaccactttgggtaggcatggagggaaaggctggcgttttacaggtgccaaagatagcttcaggctttgggaatgccacttgtagaccaaggtggtggcagaatgtccagaaatcttcacagtgatgaacctatttacctgggggtaacagaaaggagggtcatttcctgcgtggaatcctcattctcataattcagatggaaatcatgtatttgcatgacatgtggacggaaatttgggactgacattcacagacagctgcagtctcttgatttaatactattacatttttgagttttgggctttgtgctgcaatttcgtgtgttgttatgacttggggagggaaaaagacaagggaggagaaactattttgcaagta

SEQ ID NO: 62832 - DNA, 1466 bp, Homo sapiens
ctccccccacagcctcctgagtagctaggactacaggcgcacaccaccatgcctgacttagttcttaaaattttttgcagaaacagggtctcgctatgttcccaggttggtctcagactcctggcctcaagcaattctcccgccttggcttcctaaagtgctgggattacaagcatgagccacagcttctggccagaggacccactttgattttttttttttttcatcatgtccagttttgtcttattttacttttattttagggtcggggtatatgtgcaggttttttatataggtaaactgtgtgttatggggtttggtgtacagattatttcatcacccaggtactaagcatagtactcaataggtagcttttttactttttccctcctcccattctccaccctcaagtccttgtgtctactgtttccctctttgtgcccatgtcttctcattgtttagctcccacttataagtgataacatgcagtgtttggttttctgtactctgttcgtctgcttaggataatggcctccagttccatccatgttgctacaaaggacatgatctcactcttttttatggctacatagtattccatggtgtatatgtacgacacttttttatccaatggccaatgtgcatttcagctgattccatgtctttgctattgtgtatagtgctgcaataaacatacacatgtatgcgtctttgtggtagaataatttatatcccttcggtatatatatccctttgggtatatacccaataatgggatggctgggttaaatgaaaactctactgtaagttctttgaggaattgccacactgctttccacaatggccttatttcaattacttgtagttttatttgaaaaactcaattattgatgtcatagaaaagatgtccaaattattacctgaatattataattttaatcattatataattaccattttatttacatattacatacagtctcctaaacatcaacatccatttcttggtcctgcctcctcagaacctagaaaaacaaataactccatcagttcatcatcagcaagggtgtagtaagcagctactatttgggctctgtgcttcaagaatggattcagttgggaagacagcatataaacttctggttttcccaatcaccaggttcaacaccatggagtcagatttgaatcttctcttccttgcctactgcattcaagcagtggctaaacgtactaactctactttcatggtatttgatgcctttatctctcacccttcttcactggtatgtctactgcacgggttcagaatcccagtaaacagttgagaatggaactcatgggcataaggtcatttgatatgtctggatacacaggcctgaagcctgattccaacctsaagtcatgactaagcgatgggtggtggagtcactatcaaagaatctccacagtggcaatgatgagccaga

SEQ ID NO: 62833 - DNA, 893 bp, Homo sapiens
atttatctagtaactataacatgagttcgacttgatttttttttaatttaatgtccttactaacaggtaatttctttgttcacccaggatagaygaatgcaactgaattatgttcttgaataaattgccttctggatttcaactacttcttttggaaagtagcaatatcttcaaattaacctcagttaacacgaatggactaaaaaaattgttcaagaatttatgtagttcaaaaattgtcagatttgtggaaatgaataatgtgtttggatttttggaagacctttacaaattttgaacctcctgcagttccatttggtgtaaagaattatactgtaaacaaggggctccatctgtacttttgaaataactattcagttttccatttcagtgctcagacaaattgacacgacaaactgaaaagcagaagttagtgttcaaagaagttcaagagtaaacatttagtcaactcgtctgctcagattgagagagattcagtgcacaggaatccacaattctgaatgtaggttctagaatggcagtgaagactgtcagggagtggactttccagttgccccaggtcacatctaaaatatgaatctacctgcagggccctcacatttctaggtatttcatatacatttggctacacttaggaatgagaagaaatatttgtattaaaactttatttactaactttaggtttttttctgcccctttcactgctgacttcaggctactatttggtctccatatttggctaaggggataagaaatcacatttctaggaaggagaccaaggtggtaacagctgtcaggaacttttttcatagaacccagcaagggaagttacagaatgctgtttgagtcattatttcaattcagctcaatag

SEQ ID NO: 62834 - DNA, 893 bp, Homo sapiens
atttatctagtaactataacatgagttcgacttgatttttttttaatttaatgtccttactaacaggtaatttctttgttcacccaggatagatgaatgcaactgaattatgttcttgaataaattgccttctggatttcaactacttcttttggaaagtagcaatatcttcaaattaacctcagttaacacgaatggactaaaaaaattgttcaagaatttatgtagttcaaaaattgtcagatttgtggaaatgaataatgtgtttggatttttggaagacctttacaaattttgaacctcctgcagttccatttggtgtaaagaattatactgtaaacaaggggctccatctgtacttttgaaataactattcagttttccatttcagtgctcagacaaattgacacgacaaactgaaaagcagaagttagtgttcaaagaagttcaagagtaaacatttagtcaactcgtctgctcagattgagagagattcagtgcacaggaatccacaattctgaatgtaggttctagaatggcagtgaagactgtcagggagtggactttccagttgccccaggtcacatctaaaatatgaatctacctgcagggccctcacatttctaggtatttcatatacatttggctacacttaggaatgagaagaaatatttgtattaaaactttatttactaactttaggtttttttctgcccctttcactgctgacttcaggctactatttggtctccatatttggctaaggggataagaaatcacatttctaggaaggagaccaaggtggtaacagctgtcrggaacttttttcatagaacccagcaagggaagttacagaatgctgtttgagtcattatttcaattcagctcaatag

SEQ ID NO: 62835 - DNA, 973 bp, Homo sapiens
attttatagtaaaaattttttattttatgtgcaactgtagaaaaactgctgcattttgtttttctgtagaaaatagtaaaaatgattacatttcccaggctagcccaacaagctcatttaaaccaaatagtacctgaatacactatacacttataaatatggtttgatttcttggatcccagggaaaactttagtttcatttatcgaaacagccatgtttttctttaagttacgtgaagtgaaattcctattaatcttcccttttagtcttgatttatgcctgattatttttctttatgctaatccacaatccataacaaggtttttgctgttcttttctgaaggacagatacgatatggtttaatctgcttgataaggtacccatacctatccaaataatgaaatatcttggttgttattaaagcatgcccaatatttgggcaaaaccagaacctaataaatttccctgtcccctaatacacacaacttaatgggaagccatgaggaacaggagtaaagtgataaaactggcaagtggatcaagagaattctcaaaccagaggcaagaaacatctaatcaggattcaaagacagaaccgaagttcaaatagaaaaagggtggttttsctttttttttttttttttgaggctgagtctcgctctgttttccaggctgaagtgcagtggcgcaatcttggcccactgcaagatccgcctcccgggttagcatgattctggtgcctcagcctcctgagtagccgagattacaggtacccgccatcatgccagactaattttcttatttttattagagacagggtttcaccatgttggccaggctggtctcaaactcctgacctcaagtaatccacctgccttggcctctcaaagtactgggattacaggcatgagccactgtgtctggctaaaggatgttgcctcaaggatcaggagctaaactggctatcagag

SEQ ID NO: 62836 - DNA, 973 bp, Homo sapiens
attttatagtaaaaattttttattttatgtgcaactgtagaaaaactgctgcattttgtttttctgtagaaaatagtaaaaatgattacatttcccaggctagcccaacaagctcatttaaaccaaatagtacctgaatacactatacacttataaatatggtttgatttcttggatcccagggaaaactttagtttcatttatcgaaacagccatgtttttctttaagttacgtgaagtgaaattcctattaatcttcccttttagtcttgatttatgcctgattatttttctttatgctaatccacaatccataacaaggtttttgctgttcttttctgaaggacagatacgatatggtttaatctgcttgataaggtacccatacctatccaaataatgaaatatcttggttgttattaaagcatgcccaatatttgggcaaaaccagaacctaataaatttccctgtcccctaatacacacaacttaatgggaagccatgaggaacaggagtaaagtgataaaactggcaagtggatcaagagaattctcaaaccagaggcaagaaacatctaatcaggattcaaagacagaaccgaagttcaaatagaaaaagggtggttttcctttttttttttttttttgaggctgagtctcgctctgttttccaggctgaagtgcagtggcgcaatcttggcccactgcaagatcygcctcccgggttagcatgattctggtgcctcagcctcctgagtagccgagattacaggtacccgccatcatgccagactaattttcttatttttattagagacagggtttcaccatgttggccaggctggtctcaaactcctgacctcaagtaatccacctgccttggcctctcaaagtactgggattacaggcatgagccactgtgtctggctaaaggatgttgcctcaaggatcaggagctaaactggctatcagag

SEQ ID NO: 62837 - DNA, 589 bp, Homo sapiens
ttagcaatgaaaggcaagagattttgggtctcatctcaactatatttttagaaactaagtcacttacactatctgtgtctcaggtttttctatacaaagtagggctaattatattttttgatcacttgccagagtgtgggtaaaatgagaacaaaagagttaatgagyttctgataagctaaacatgctgaacaattgtaatgtattatttttatggtataggcacatgaacataaaaatatgagaaataaaacagcagaagcgacaaaatgaagactatcctaaaataaagagccaagctgaatgtttcccagaatgaattcctttgtagatttgaaccataaaaatctcctacttgaagaaaaaataaaagtgactacttgagttcaaggaaataatgtaggtaagagagtggaggaagatgatcttattgatggggttgaatttaatcttcttagagctcattcaacaaacatttatagaatgcctaccaccaggaagacacactgtgttagttgcttttaaaaatacaatggtgtatgaataggagttggctgttcccacaaatcctttttgaaataaagtggta

SEQ ID NO: 62838 - DNA, 555 bp, Homo sapiens
aagtatatggtgagtgtggttatgcacatatgtttcttgactttacccaccattggggattactgattcacaggtgtaataatactacaaatcccagtgctctgagacccctcatatggaagtctggccttttgccctgattgtcctcttcagtgtttatcttgaagagtcctagaggaagggagggaaaagattctcatttaatcagcacttcagggtgcacaggaaaaatattactttttgagtaataagaataaaattaaccttaattttgtctatctttttctgtattttttgcaatgatcattaattttgtaacagctaatttaaaaaaagaaaaagttagcactcrtgctattctccttggtattttaaataggacgtatatgtttccttccttccagttcccatcacatatattcccacacatacattccatgtgtgcacacacacatggccgcccacacattagaccttgaacttcttgggcgggattttgtgtccatctttagcatctaaccatgaatgtggtggtgaactctgctgatactgaat

SEQ ID NO: 62839 - DNA, 2627 bp, Homo sapiens
tttttttttttktttttttgagatggagtctcactctgtcaccaggctggagggcagtggcatgatctcggctcactgcaacctctgcctcccgggttcaagcgattctcctgcctcagcctcccaagtagctgagactacaggcgcctgccaccacgcccggctaatttttgtatttttagtagagacggggtttcactgtgttggccaggatggtctcgatctcttgaccttgtgatccgcccggctcggcctcccaaagtgctgggattacaggcatgagccaccatacctggccccatgattgcattttttaaaagtacattggaaactcactttttttccagtgggtacatttgtatgtatgcaaaaatattttttataaatctgaaaggacagtgcagagtgagaccacacctcatgtgtctctgtttgatcagggatcagtgcacggcccacggcaacatagtaggtgcttctaagatgtttgccacatggatggcagcgttgggcagctgctgaggacttatggagtgatggacccagagtctcgtgaagggccttgagaggattccttctatactggctccctcctcatcccatccgcccccaccttccactaagcccagaacccacagctccattctggctgtggcatccctgggtctgtccactccctcctcagcttcagattcagccctagccctgttcctctatttttctgaggactggccccagtgtgtatatgtgtgtgtgttgggggagctgactgttacttagaaactgggattggaaaaaagcaagttgattctggcccaggccattaactaaactatcctactatagtcttggatcaagtacttccgaatgagagggagcactgggtgggtactcgtgagcctgatggctaatgtactgggaaaggacatgaacaaatgttctagaaaggtgcctggtctggtggggaggcctgccagctttccgagcccataagtccttgtcctagtcagcttgggctgctgtaacagatgaccatagactgatgtggcttaaaccacagttatttctcacagttctggagaggctgggaagctcaagatcaaggtgccagtttttggtgagggccttcttcctggcttgctaatatgcattttcttgctgtgtcctcacacagctgggagggagagctctggtctctcttcctcttcttataaggacactaatcccattatgggatcccacctcaagacctcatctaaaccaaatcacctccctaaatcccctcctccaaataccatcacattggaggttagggcttgaatatatgaatcttgggaggacccatacatttgtaggggaaaggtttcaaaagcagggtgtttggcatgctttaactcagacttcagggtaaatagtgaatatcagaggttctggatgaagcttttgacacaggcagaagaggtagagcatgcagggaactggtaggaaggaggaggcctactcttcatcattatgactggctccaaagcacaggcttcattcaggcaggcacacattcatttaacgtcttttaagggcgcaggccctggctagcactgggcaagtgctagggaccctgagttgaaacagagtgcttgccctcctggagcttactgctgtccatgagacaggtctcaatggaaaactgcaaacttttacctggcctccaggttttgcatgtgccattttgtctggtacaccctgcattccctttgtcctgtcccccgagctgctcctacccatctggcaggtatgggcaggtggggctgttttggggaagtttcctcaagtctggattctgagacgctagggcttctagaacatggcacctcttgcctctcaaggcttgccattgcaaggctgcccctcttgtttgcatgtctgtcttctccatgacacctgagcttcctgagaacgaaacagtgaaccaccatatcctaggtacccactgtggcctgcttcctgcagggagagggtacagtcaatgagtgagtgaatgaatgaattatacgctattgcaaatggctggtccctgagcatgaggggtatctgaacagatgtgtaagtatggtgattagaaacaagtgataaaggtttgagaaataatataaaaagccactgcaatgacaaacacacccatccacctgctcgagactaacaaccaactgttttcttgatccatagctgccagaggaacatgcctctgtcttactgggtttctgagatttgcaacctctgcagctgggttctagccagagaggtgtaaaggtcaaaaatgttagatcgttcagtcaccttgtataagttaacataatattattttttctctctctctcttcttttctttttctttcgctttggagaaggtctcattctgttccccaggctagagtgcagtggcacaatcagggctcactgaagcctcaatctcctgggcttaagtgatcctttcacctcagctcccccgccgcccaccccagtagctgggcctacaggcacaggccaccacacccagctaattttttcatatttttactacagacagtttgccatgttgcccaggctggtcttgaactcctggactcaag

SEQ ID NO: 62840 - DNA, 2627 bp, Homo sapiens
tttttttttttttttttttgagatggagtctcactctgtcaccaggctggagggcagtggcatgatctcggctcactgcaacctctgcctcccgggttcaagcgattctcctgcctcagcctcccaagtagctgagactacaggcgcctgccaccacgcccggctaatttttgtatttttagtagagacggggtttcactgtgttggccaggatggtctcgatctcttgaccttgtgatccrcccggctcggcctcccaaagtgctgggattacaggcatgagccaccatacctggccccatgattgcattttttaaaagtacattggaaactcactttttttccagtgggtacatttgtatgtatgcaaaaatattttttataaatctgaaaggacagtgcagagtgagaccacacctcatgtgtctctgtttgatcagggatcagtgcacggcccacggcaacatagtaggtgcttctaagatgtttgccacatggatggcagcgttgggcagctgctgaggacttatggagtgatggacccagagtctcgtgaagggccttgagaggattccttctatactggctccctcctcatcccatccgcccccaccttccactaagcccagaacccacagctccattctggctgtggcatccctgggtctgtccactccctcctcagcttcagattcagccctagccctgttcctctatttttctgaggactggccccagtgtgtatatgtgtgtgtgttgggggagctgactgttacttagaaactgggattggaaaaaagcaagttgattctggcccaggccattaactaaactatcctactatagtcttggatcaagtacttccgaatgagagggagcactgggtgggtactcgtgagcctgatggctaatgtactgggaaaggacatgaacaaatgttctagaaaggtgcctggtctggtggggaggcctgccagctttccgagcccataagtccttgtcctagtcagcttgggctgctgtaacagatgaccatagactgatgtggcttaaaccacagttatttctcacagttctggagaggctgggaagctcaagatcaaggtgccagtttttggtgagggccttcttcctggcttgctaatatgcattttcttgctgtgtcctcacacagctgggagggagagctctggtctctcttcctcttcttataaggacactaatcccattatgggatcccacctcaagacctcatctaaaccaaatcacctccctaaatcccctcctccaaataccatcacattggaggttagggcttgaatatatgaatcttgggaggacccatacatttgtaggggaaaggtttcaaaagcagggtgtttggcatgctttaactcagacttcagggtaaatagtgaatatcagaggttctggatgaagcttttgacacaggcagaagaggtagagcatgcagggaactggtaggaaggaggaggcctactcttcatcattatgactggctccaaagcacaggcttcattcaggcaggcacacattcatttaacgtcttttaagggcgcaggccctggctagcactgggcaagtgctagggaccctgagttgaaacagagtgcttgccctcctggagcttactgctgtccatgagacaggtctcaatggaaaactgcaaacttttacctggcctccaggttttgcatgtgccattttgtctggtacaccctgcattccctttgtcctgtcccccgagctgctcctacccatctggcaggtatgggcaggtggggctgttttggggaagtttcctcaagtctggattctgagacgctagggcttctagaacatggcacctcttgcctctcaaggcttgccattgcaaggctgcccctcttgtttgcatgtctgtcttctccatgacacctgagcttcctgagaacgaaacagtgaaccaccatatcctaggtacccactgtggcctgcttcctgcagggagagggtacagtcaatgagtgagtgaatgaatgaattatacgctattgcaaatggctggtccctgagcatgaggggtatctgaacagatgtgtaagtatggtgattagaaacaagtgataaaggtttgagaaataatataaaaagccactgcaatgacaaacacacccatccacctgctcgagactaacaaccaactgttttcttgatccatagctgccagaggaacatgcctctgtcttactgggtttctgagatttgcaacctctgcagctgggttctagccagagaggtgtaaaggtcaaaaatgttagatcgttcagtcaccttgtataagttaacataatattattttttctctctctctcttcttttctttttctttcgctttggagaaggtctcattctgttccccaggctagagtgcagtggcacaatcagggctcactgaagcctcaatctcctgggcttaagtgatcctttcacctcagctcccccgccgcccaccccagtagctgggcctacaggcacaggccaccacacccagctaattttttcatatttttactacagacagtttgccatgttgcccaggctggtcttgaactcctggactcaag

SEQ ID NO: 62841 - DNA, 2627 bp, Homo sapiens
tttttttttttttttttttgagatggagtctcactctgtcaccaggctggagggcagtggcatgatctcggctcactgcaacctctgcctcccgggttcaagcgattctcctgcctcagcctcccaagtagctgagactacaggcgcctgccaccacgcccggctaatttttgtatttttagtagagacggggtttcactgtgttggccaggatggtctcgatctcttgaccttgtgatccgcccggctcggcctcccaaagtgctgggattacaggcatgagccaccatacctggccccatgattgcattttttaaaagtacattggaaactcactttttttccagtgggtacatttgtatgtatgcaaaaatattttttataaatctgaaaggacagtgcagagtgagaccacacctcatgtgtctctgtttgatcagggatcagtgcacggcccacggcaacatagtaggtgcttctaagatgtttgccacatggatggcagcgttgggcagctgctgaggacttatggagtgatggacccagagtctcgtgaagggccttgagaggattccttctatactggctccctcctcatcccatccgcccccaccttccactaagcccagaacccacagctccattctggctgtggcatccctgggtctgtccactccctcctcagcttcagattcagccctagccctgttcctctatttttctgaggactggccccagtgtgtatatgtgtgtgtgttgggggagctgactgttacttagaaactgggattggaaaaaagcaagttgattctggcccaggccattaactaaactatcctactatagtcttggatcaagtacttccgaatgagagggagcactgggtgggtactcgtgagcctgatggctaatgtactgggaaaggacatgaacaaatgttctagaaaggtgcctggtctggtggggaggcctgccagctttccgagcccataagtccttgtcctagtcagcttgggctgctgtaacagatgaccatagactgatgtggcttaaaccacagttatttctcacagttctggagaggctgggaagctcaagatcaaggtgccagtttttggtgagggccttcttcctggcttgctaatatgcattttcttgctgtgtcctcacacagctgggagggagagctctggtctctcttcctcttcttataaggacactaatcccattatgggatcccacctcaagacctcatctaaaccaaatcacctccctaaatcccctcctccaaataccatcacattggaggttagggcttgaatatatgaatcttgggaggacccatacatttgtaggggaaaggtttcaaaagcagggtgtttggcatgctttaactcagacttcagggtaaatagtgaatatcagaggttctggatgaagcttttgacacaggcagaagaggtagagcatgcagggaactggtaggaaggaggaggcctactcttcatcattatgactggctccaaagcacaggcttcattcaggcaggcacacattcatttaacgtcttttaagggcgcaggccctggctagcactgggcaagtgctagggaccctgagttgaaacagagtgcttgccctcctggagcttactgctgtscatgagacaggtctcaatggaaaactgcaaacttttacctggcctccaggttttgcatgtgccattttgtctggtacaccctgcattccctttgtcctgtcccccgagctgctcctacccatctggcaggtatgggcaggtggggctgttttggggaagtttcctcaagtctggattctgagacgctagggcttctagaacatggcacctcttgcctctcaaggcttgccattgcaaggctgcccctcttgtttgcatgtctgtcttctccatgacacctgagcttcctgagaacgaaacagtgaaccaccatatcctaggtacccactgtggcctgcttcctgcagggagagggtacagtcaatgagtgagtgaatgaatgaattatacgctattgcaaatggctggtccctgagcatgaggggtatctgaacagatgtgtaagtatggtgattagaaacaagtgataaaggtttgagaaataatataaaaagccactgcaatgacaaacacacccatccacctgctcgagactaacaaccaactgttttcttgatccatagctgccagaggaacatgcctctgtcttactgggtttctgagatttgcaacctctgcagctgggttctagccagagaggtgtaaaggtcaaaaatgttagatcgttcagtcaccttgtataagttaacataatattattttttctctctctctcttcttttctttttctttcgctttggagaaggtctcattctgttccccaggctagagtgcagtggcacaatcagggctcactgaagcctcaatctcctgggcttaagtgatcctttcacctcagctcccccgccgcccaccccagtagctgggcctacaggcacaggccaccacacccagctaattttttcatatttttactacagacagtttgccatgttgcccaggctggtcttgaactcctggactcaag

SEQ ID NO: 62842 - DNA, 2627 bp, Homo sapiens
tttttttttttttttttttgagatggagtctcactctgtcaccaggctggagggcagtggcatgatctcggctcactgcaacctctgcctcccgggttcaagcgattctcctgcctcagcctcccaagtagctgagactacaggcgcctgccaccacgcccggctaatttttgtatttttagtagagacggggtttcactgtgttggccaggatggtctcgatctcttgaccttgtgatccgcccggctcggcctcccaaagtgctgggattacaggcatgagccaccatacctggccccatgattgcattttttaaaagtacattggaaactcactttttttccagtgggtacatttgtatgtatgcaaaaatattttttataaatctgaaaggacagtgcagagtgagaccacacctcatgtgtctctgtttgatcagggatcagtgcacggcccacggcaacatagtaggtgcttctaagatgtttgccacatggatggcagcgttgggcagctgctgaggacttatggagtgatggacccagagtctcgtgaagggccttgagaggattccttctatactggctccctcctcatcccatccgcccccaccttccactaagcccagaacccacagctccattctggctgtggcatccctgggtctgtccactccctcctcagcttcagattcagccctagccctgttcctctatttttctgaggactggccccagtgtgtatatgtgtgtgtgttgggggagctgactgttacttagaaactgggattggaaaaaagcaagttgattctggcccaggccattaactaaactatcctactatagtcttggatcaagtacttccgaatgagagggagcactgggtgggtactcgtgagcctgatggctaatgtactgggaaaggacatgaacaaatgttctagaaaggtgcctggtctggtggggaggcctgccagctttccgagcccataagtccttgtcctagtcagcttgggctgctgtaacagatgaccatagactgatgtggcttaaaccacagttatttctcacagttctggagaggctgggaagctcaagatcaaggtgccagtttttggtgagggccttcttcctggcttgctaatatgcattttcttgctgtgtcctcacacagctgggagggagagctctggtctctcttcctcttcttataaggacactaatcccattatgggatcccacctcaagacctcatctaaaccaaatcacctccctaaatcccctcctccaaataccatcacattggaggttagggcttgaatatatgaatcttgggaggacccatacatttgtaggggaaaggtttcaaaagcagggtgtttggcatgctttaactcagacttcagggtaaatagtgaatatcagaggttctggatgaagcttttgacacaggcagaagaggtagagcatgcagggaactggtaggaaggaggaggcctactcttcatcattatgactggctccaaagcacaggcttcattcaggcaggcacacattcatttaacgtcttttaagggcgcaggccctggctagcactgggcaagtgctagggaccctgagttgaaacagagtgcttgccctcctggagcttactgctgtccatgagacaggtctcaatggaaaactgcaaacttttacctggcctccaggttttgcawgtgccattttgtctggtacaccctgcattccctttgtcctgtcccccgagctgctcctacccatctggcaggtatgggcaggtggggctgttttggggaagtttcctcaagtctggattctgagacgctagggcttctagaacatggcacctcttgcctctcaaggcttgccattgcaaggctgcccctcttgtttgcatgtctgtcttctccatgacacctgagcttcctgagaacgaaacagtgaaccaccatatcctaggtacccactgtggcctgcttcctgcagggagagggtacagtcaatgagtgagtgaatgaatgaattatacgctattgcaaatggctggtccctgagcatgaggggtatctgaacagatgtgtaagtatggtgattagaaacaagtgataaaggtttgagaaataatataaaaagccactgcaatgacaaacacacccatccacctgctcgagactaacaaccaactgttttcttgatccatagctgccagaggaacatgcctctgtcttactgggtttctgagatttgcaacctctgcagctgggttctagccagagaggtgtaaaggtcaaaaatgttagatcgttcagtcaccttgtataagttaacataatattattttttctctctctctcttcttttctttttctttcgctttggagaaggtctcattctgttccccaggctagagtgcagtggcacaatcagggctcactgaagcctcaatctcctgggcttaagtgatcctttcacctcagctcccccgccgcccaccccagtagctgggcctacaggcacaggccaccacacccagctaattttttcatatttttactacagacagtttgccatgttgcccaggctggtcttgaactcctggactcaag

SEQ ID NO: 62843 - DNA, 2627 bp, Homo sapiens
tttttttttttttttttttgagatggagtctcactctgtcaccaggctggagggcagtggcatgatctcggctcactgcaacctctgcctcccgggttcaagcgattctcctgcctcagcctcccaagtagctgagactacaggcgcctgccaccacgcccggctaatttttgtatttttagtagagacggggtttcactgtgttggccaggatggtctcgatctcttgaccttgtgatccgcccggctcggcctcccaaagtgctgggattacaggcatgagccaccatacctggccccatgattgcattttttaaaagtacattggaaactcactttttttccagtgggtacatttgtatgtatgcaaaaatattttttataaatctgaaaggacagtgcagagtgagaccacacctcatgtgtctctgtttgatcagggatcagtgcacggcccacggcaacatagtaggtgcttctaagatgtttgccacatggatggcagcgttgggcagctgctgaggacttatggagtgatggacccagagtctcgtgaagggccttgagaggattccttctatactggctccctcctcatcccatccgcccccaccttccactaagcccagaacccacagctccattctggctgtggcatccctgggtctgtccactccctcctcagcttcagattcagccctagccctgttcctctatttttctgaggactggccccagtgtgtatatgtgtgtgtgttgggggagctgactgttacttagaaactgggattggaaaaaagcaagttgattctggcccaggccattaactaaactatcctactatagtcttggatcaagtacttccgaatgagagggagcactgggtgggtactcgtgagcctgatggctaatgtactgggaaaggacatgaacaaatgttctagaaaggtgcctggtctggtggggaggcctgccagctttccgagcccataagtccttgtcctagtcagcttgggctgctgtaacagatgaccatagactgatgtggcttaaaccacagttatttctcacagttctggagaggctgggaagctcaagatcaaggtgccagtttttggtgagggccttcttcctggcttgctaatatgcattttcttgctgtgtcctcacacagctgggagggagagctctggtctctcttcctcttcttataaggacactaatcccattatgggatcccacctcaagacctcatctaaaccaaatcacctccctaaatcccctcctccaaataccatcacattggaggttagggcttgaatatatgaatcttgggaggacccatacatttgtaggggaaaggtttcaaaagcagggtgtttggcatgctttaactcagacttcagggtaaatagtgaatatcagaggttctggatgaagcttttgacacaggcagaagaggtagagcatgcagggaactggtaggaaggaggaggcctactcttcatcattatgactggctccaaagcacaggcttcattcaggcaggcacacattcatttaacgtcttttaagggcgcaggccctggctagcactgggcaagtgctagggaccctgagttgaaacagagtgcttgccctcctggagcttactgctgtccatgagacaggtctcaatggaaaactgcaaacttttacctggcctccaggttttgcatgtgccattttgtctggtacaccctgcattccctttgtcctgtcccccragctgctcctacccatctggcaggtatgggcaggtggggctgttttggggaagtttcctcaagtctggattctgagacgctagggcttctagaacatggcacctcttgcctctcaaggcttgccattgcaaggctgcccctcttgtttgcatgtctgtcttctccatgacacctgagcttcctgagaacgaaacagtgaaccaccatatcctaggtacccactgtggcctgcttcctgcagggagagggtacagtcaatgagtgagtgaatgaatgaattatacgctattgcaaatggctggtccctgagcatgaggggtatctgaacagatgtgtaagtatggtgattagaaacaagtgataaaggtttgagaaataatataaaaagccactgcaatgacaaacacacccatccacctgctcgagactaacaaccaactgttttcttgatccatagctgccagaggaacatgcctctgtcttactgggtttctgagatttgcaacctctgcagctgggttctagccagagaggtgtaaaggtcaaaaatgttagatcgttcagtcaccttgtataagttaacataatattattttttctctctctctcttcttttctttttctttcgctttggagaaggtctcattctgttccccaggctagagtgcagtggcacaatcagggctcactgaagcctcaatctcctgggcttaagtgatcctttcacctcagctcccccgccgcccaccccagtagctgggcctacaggcacaggccaccacacccagctaattttttcatatttttactacagacagtttgccatgttgcccaggctggtcttgaactcctggactcaag

SEQ ID NO: 62844 - DNA, 2627 bp, Homo sapiens
tttttttttttttttttttgagatggagtctcactctgtcaccaggctggagggcagtggcatgatctcggctcactgcaacctctgcctcccgggttcaagcgattctcctgcctcagcctcccaagtagctgagactacaggcgcctgccaccacgcccggctaatttttgtatttttagtagagacggggtttcactgtgttggccaggatggtctcgatctcttgaccttgtgatccgcccggctcggcctcccaaagtgctgggattacaggcatgagccaccatacctggccccatgattgcattttttaaaagtacattggaaactcactttttttccagtgggtacatttgtatgtatgcaaaaatattttttataaatctgaaaggacagtgcagagtgagaccacacctcatgtgtctctgtttgatcagggatcagtgcacggcccacggcaacatagtaggtgcttctaagatgtttgccacatggatggcagcgttgggcagctgctgaggacttatggagtgatggacccagagtctcgtgaagggccttgagaggattccttctatactggctccctcctcatcccatccgcccccaccttccactaagcccagaacccacagctccattctggctgtggcatccctgggtctgtccactccctcctcagcttcagattcagccctagccctgttcctctatttttctgaggactggccccagtgtgtatatgtgtgtgtgttgggggagctgactgttacttagaaactgggattggaaaaaagcaagttgattctggcccaggccattaactaaactatcctactatagtcttggatcaagtacttccgaatgagagggagcactgggtgggtactcgtgagcctgatggctaatgtactgggaaaggacatgaacaaatgttctagaaaggtgcctggtctggtggggaggcctgccagctttccgagcccataagtccttgtcctagtcagcttgggctgctgtaacagatgaccatagactgatgtggcttaaaccacagttatttctcacagttctggagaggctgggaagctcaagatcaaggtgccagtttttggtgagggccttcttcctggcttgctaatatgcattttcttgctgtgtcctcacacagctgggagggagagctctggtctctcttcctcttcttataaggacactaatcccattatgggatcccacctcaagacctcatctaaaccaaatcacctccctaaatcccctcctccaaataccatcacattggaggttagggcttgaatatatgaatcttgggaggacccatacatttgtaggggaaaggtttcaaaagcagggtgtttggcatgctttaactcagacttcagggtaaatagtgaatatcagaggttctggatgaagcttttgacacaggcagaagaggtagagcatgcagggaactggtaggaaggaggaggcctactcttcatcattatgactggctccaaagcacaggcttcattcaggcaggcacacattcatttaacgtcttttaagggcgcaggccctggctagcactgggcaagtgctagggaccctgagttgaaacagagtgcttgccctcctggagcttactgctgtccatgagacaggtctcaatggaaaactgcaaacttttacctggcctccaggttttgcatgtgccattttgtctggtacaccctgcattccctttgtcctgtcccccgagctgctcctacccatctggcaggtatgggcrggtggggctgttttggggaagtttcctcaagtctggattctgagacgctagggcttctagaacatggcacctcttgcctctcaaggcttgccattgcaaggctgcccctcttgtttgcatgtctgtcttctccatgacacctgagcttcctgagaacgaaacagtgaaccaccatatcctaggtacccactgtggcctgcttcctgcagggagagggtacagtcaatgagtgagtgaatgaatgaattatacgctattgcaaatggctggtccctgagcatgaggggtatctgaacagatgtgtaagtatggtgattagaaacaagtgataaaggtttgagaaataatataaaaagccactgcaatgacaaacacacccatccacctgctcgagactaacaaccaactgttttcttgatccatagctgccagaggaacatgcctctgtcttactgggtttctgagatttgcaacctctgcagctgggttctagccagagaggtgtaaaggtcaaaaatgttagatcgttcagtcaccttgtataagttaacataatattattttttctctctctctcttcttttctttttctttcgctttggagaaggtctcattctgttccccaggctagagtgcagtggcacaatcagggctcactgaagcctcaatctcctgggcttaagtgatcctttcacctcagctcccccgccgcccaccccagtagctgggcctacaggcacaggccaccacacccagctaattttttcatatttttactacagacagtttgccatgttgcccaggctggtcttgaactcctggactcaag

SEQ ID NO: 62845 - DNA, 2627 bp, Homo sapiens
tttttttttttttttttttgagatggagtctcactctgtcaccaggctggagggcagtggcatgatctcggctcactgcaacctctgcctcccgggttcaagcgattctcctgcctcagcctcccaagtagctgagactacaggcgcctgccaccacgcccggctaatttttgtatttttagtagagacggggtttcactgtgttggccaggatggtctcgatctcttgaccttgtgatccgcccggctcggcctcccaaagtgctgggattacaggcatgagccaccatacctggccccatgattgcattttttaaaagtacattggaaactcactttttttccagtgggtacatttgtatgtatgcaaaaatattttttataaatctgaaaggacagtgcagagtgagaccacacctcatgtgtctctgtttgatcagggatcagtgcacggcccacggcaacatagtaggtgcttctaagatgtttgccacatggatggcagcgttgggcagctgctgaggacttatggagtgatggacccagagtctcgtgaagggccttgagaggattccttctatactggctccctcctcatcccatccgcccccaccttccactaagcccagaacccacagctccattctggctgtggcatccctgggtctgtccactccctcctcagcttcagattcagccctagccctgttcctctatttttctgaggactggccccagtgtgtatatgtgtgtgtgttgggggagctgactgttacttagaaactgggattggaaaaaagcaagttgattctggcccaggccattaactaaactatcctactatagtcttggatcaagtacttccgaatgagagggagcactgggtgggtactcgtgagcctgatggctaatgtactgggaaaggacatgaacaaatgttctagaaaggtgcctggtctggtggggaggcctgccagctttccgagcccataagtccttgtcctagtcagcttgggctgctgtaacagatgaccatagactgatgtggcttaaaccacagttatttctcacagttctggagaggctgggaagctcaagatcaaggtgccagtttttggtgagggccttcttcctggcttgctaatatgcattttcttgctgtgtcctcacacagctgggagggagagctctggtctctcttcctcttcttataaggacactaatcccattatgggatcccacctcaagacctcatctaaaccaaatcacctccctaaatcccctcctccaaataccatcacattggaggttagggcttgaatatatgaatcttgggaggacccatacatttgtaggggaaaggtttcaaaagcagggtgtttggcatgctttaactcagacttcagggtaaatagtgaatatcagaggttctggatgaagcttttgacacaggcagaagaggtagagcatgcagggaactggtaggaaggaggaggcctactcttcatcattatgactggctccaaagcacaggcttcattcaggcaggcacacattcatttaacgtcttttaagggcgcaggccctggctagcactgggcaagtgctagggaccctgagttgaaacagagtgcttgccctcctggagcttactgctgtccatgagacaggtctcaatggaaaactgcaaacttttacctggcctccaggttttgcatgtgccattttgtctggtacaccctgcattccctttgtcctgtcccccgagctgctcctacccatctggcaggtatgggcaggtggggctgttttggggaagtttcctcaagtctggattctgagacgctagggcttctagaacatggcacctcttgcctctcaaggcttgccattgcaaggctgcccctcttgtttgcatgtctgtcttctccatgacacctgagcttcctgagaacgaaacagtgaaccaccatatcctaggtacccactgtggcctgcttcctgcagggagagggtacagtcaatgagtgagtgaatgaatgaattatacgctattgcaaatggctggtccctgagcatgaggggtatctgaacagatgtgtaagtatggtgattagaaacaagtgataaaggtttgagaaataatataaaaagccactgcaatgacaaacacacccatccacctgctcgagactaacaaccaactgttttcttgatccayagctgccagaggaacatgcctctgtcttactgggtttctgagatttgcaacctctgcagctgggttctagccagagaggtgtaaaggtcaaaaatgttagatcgttcagtcaccttgtataagttaacataatattattttttctctctctctcttcttttctttttctttcgctttggagaaggtctcattctgttccccaggctagagtgcagtggcacaatcagggctcactgaagcctcaatctcctgggcttaagtgatcctttcacctcagctcccccgccgcccaccccagtagctgggcctacaggcacaggccaccacacccagctaattttttcatatttttactacagacagtttgccatgttgcccaggctggtcttgaactcctggactcaag

SEQ ID NO: 62846 - DNA, 1066 bp, Homo sapiens
ccagcttgccccaccaggcctytttcctttgctttctgcagcctgaatcaattcctttgtgctgatgggctctcctaagagctttcctgagtcagttaactttacctcgtgtctacggtgctattcatgcgatacgggcgaggctgagatgctaagattaaaaagaaaagaatgctgttttagatcaagttgatagcatttgttttccatatgcttttttaaaattttttcataacatacagctcagttaggtgtatgaaagaagtgttattgtattaaataactagagcagggctacagctctggccctcccctagggggaagagattggtaatactccatcttccagggcatttttaaagtgagccaggttagctcttttcccctggcatttctcaggaatgcagtagatagtgctgaagatgcactgacttttttttagtcctaaaaatagaaactcctcctttaaagctgtgcatactatgcttatctttccaatagagtggggttccttcagatatcctataggattctgcctctggttttgtataggccttggctagaaagagtcaatgtttctgagctctcaaaccagttgctctcagaagataggaataccccaaggttcctggcatttttcctatttcatttttgttcagactgatattttgccaagagcacaatgactgaggaatgtagccatcatttgcagggtagtgattggttcccagcctggcttccacacaggacaggaagggaaagcatccctgagctctcctcagtatttccggatgtaatgaaagaggacatctttctacacaaagtcagccccaacttttggcttggtcacaggagttctgatagtactgtttggtgcactcatgggaaattgaaccagtcgtagccacagtctttcagagcctgggctctggggagtggaagtgaaaaataaagatgtggcttgttggattgtgatccccagcttgctttccttctgtcaactctgtcaggtttgtgttcatagcaactagactgaatatgcaaaaggcttagatccaagcaaatc

SEQ ID NO: 62847 - DNA, 1531 bp, Homo sapiens
  misc_feature (1)...(1531): n = A,T,C or G
gnnnnnnnnnnnnnnnnnnnnnnnnnnnnnnnnnnnnnnnnnnnnnnnnnnnnnnnnnnnnnnnnnnnnnnnnnnnnnnnnnnnnnnnnnnnnnnnnnnnnaagcccaagacatatcccatacaaatttacctctttttttttttgagatggagtttcattcttgttgcccaggctggagtgcaatggtgcagtcttggctcactgcaacctccacctcctgggttcaagtgattcacctgcctcagcctcccaagtagctgggattacagggatctgccatcacacccagctaatttttgtacttttagtagagacagggtttcaccatactggccaggctgrtcttgaactcctgacctcaggttatctgcccaccttggcctcccaaagtgctgggattactggcgtgagccctgcacccagccaaatttatctctttttacagagtctcacatgacctataccttttactgatttacttcacaataggcaccttcacatccctttacttgaactcaaagggagtgtgtgttcattgcatggagttccaagtagtgcttgtctctcatttccctcttactagcaataataaataagtcattcccaaggagaattatgctattgattctatcattttgcctggaaagtgagagggcagaggtaatatgcagttttcccacatttccagctggttgaggactaagttaaattttgaaataagtactctttactatgctaaatggttattttaaaaatattccatccctagtcctttgggagctcattgagaatatttttctccttaccttggttggttagactgaccatttgtcacgctgcgtaactcagctagaaaaaaaaaaagttattaaaggtcatttaaattgtaatatggaaatcctattcttctctaacatgttcctgggttgcctgctacattcagcctcctcagatccctgactttaacaatgctgtgctccacagcccaggccttgatcctattctcattctatcccaacccattactggttgtaacacctagtctcatggtgatagagacaggagacagtcaaatgctgcccaggtcattgtgcacagggggcttgcctaaacctgcccacggtgaaaaattccatccctcaacacatgcacagtaagggaaataaatcaatatggagtggctcagactaagggcccacatgcacactgggagaatggggtggaaccactaggaatttgtgccttatgcagggagagaagcctggcctcttcagctggtgtgttgtggcctggtattcaatctgtgaggtgggagcctgttcgcaggacctccttttttcattgagagcgttcttttaataaattctgctcttctcacctttcaatgtatccatgtgcctaatctttcctggtcatgcgacaagaacctggattttagctgagctaaggaccaaaaaatcctgcatcattttggtggcccatataagaacatgagtaaaggtgagtaaaatgtgaaccaaaaaatattt

SEQ ID NO: 62848 - DNA, 2006 bp, Homo sapiens
aatttttgtaaggtttcataaatgtttttagacaatacttcactgataaatgggaacgatcacatttaacaatcattagacatacaaatcttactgctgttgtttagcaagaaaaccccaagatcgtctttgctagccgatgtgtgctctgggctctttgggcctggataaggaatagcagggcccagcccagagtctggaggtgtggtgaatcagataggttagggtgggaggtgagacagaccatgttggttccagtggaattggctccagggctggactgggcagataattattactccaaattccagagccatccagttcctttgggaaacaagggcttggagggctcagatttcccccaaatccactcaacttgtcatagattgagctgagatgggaccccagatagcctggctgagagcctgtcttgtctgtactgcttcygtgttcccttgctggtcttcaatagggtccccaaagttcttcttgcctggaggcctgcagcagtgagtcctgactgtcaccagcatggtccctcacagggtagcccctcaccagagtttaaaagtcagtcccctatgcagttagacctaatgctacaccagggggaaaattcaaaagaaaaaaatacacaatttaggcaacagggttcctagctgcattactgctagcagcagttagttgcctgatagttgagaaatggttaggcaaatatggtagaatatcacgtgcccacgaacaggggtgagcatttgaaataggcggatcctagacagtgtccacaaggcagcctgccaggcatggcctgaagtgccaggtttgctccatgcagtgtaaacacatttgtgtacaatggcaagcgctaggagtggcttaaaaagaggtgacttcggggtttattggattcttttatttttctcctataaagttgtttacatatataataggagtcagatgagagatgaatttatagtttcagatataagaagaaaagattttgctcccacaaatctgtggatgcgtatttactaactcctccctgtctccacacaaaaaaagggggcggggatgcatcaggatgcctatctttatgatttagctccgagcttagcaccatgaacagcagctgtggtgcctagagtccaacagggcctcagttgttctttcatcctcagaattggggggtggatgcagaggtgggtcagggattaggcttgaatccccaaaaccaatgtgtattgggctttccttccaaaagggactcccagcatgcgttgggagaagaggacacagcctcccctgacctctgcaggaggcacctgccccacaggcacaggcatggggccgctcccaggcttccacctgagcaccctgtcctgtttgcttatttgttcatttattcatgcattccctcatctgctgagcactctgtgccatgctatgggctagggacacaaaatgagaagattccattcctggctaaggtcctctatgaacttcatcttgaaacgtgtcttctgttccccaccttacctggtggttttcaggctcttcttgcctgatttttccttttctccctcctccccagctccatcatctgtggattaatgtgaagtgtagaccatgccaacttttctgggacagcacattcagagcctcctgtcccatggtggggcctgtgtctggtcctcttggagagcagagagcagagggtcttgagtgggctgcctctgatcccaatatgcctggagttggccaccaggtgctagtgcaatacagtggctgcagttcagcagctggtgggggagggggatgctgatggccccagtggcctgtgactagaccatggtgtcagctgtggccccagacaggaaacatgagaaaagatgatcctttgggaccagctgacagataaaatgccacatgcacaaggaactaaataagggccgactctgctgaggcccggaagttctgctgcaggaagagggaagggaggctcacgg

SEQ ID NO: 62849 - DNA, 496 bp, Homo sapiens
tacatcgtgctgcaattagttgttttatgtttttgttttgttttttttttttttttttgaggtggagtttcgctctgttgtccagtctggagtgcagtggcgcaatctcggctcactgcaagctccacctgccgggttcacgccattctcctgcctcagcctcccaagtagctgggactataggcacccgcctaaatgttatctttacattttcttttaaaatcagaagtcacctgagaaaaaattagcccagctaattttttttttttatttttagtagagayggggtttcaccatgttaggcaggatggtcttgatctcctgacctcatgatctgcccgcctcagcctcccaaagtgctgggatgcaattagttttatgttaaattgccttccttttttcttcatttttggaatcactgaaaaatcttgagtcagaatttcatttttgctatctcaaacaatatctttatttccttttagtgtcttttatcatg

SEQ ID NO: 62850 - DNA, 496 bp, Homo sapiens
tacatcgtgctgcaattagttgttttatgtttttgttttgttttttttttttttttttgaggtggagtttcgctctgttgtccagtctggagtgcagtggcgcaatctcggctcactgcaagctccacctgccgggttcacgccattctcctgcctcagcctcccaagtagctgggactataggcacccgcctaaatgttatctttacattttcttttaaaatcagaagtcacctgagaaaaaattagcccagctaattttttttttttatttttagtagagatggggtttcaccatgttaggcaggatggtcttgatctcctgacctcatgatctgcccgcctcrgcctcccaaagtgctgggatgcaattagttttatgttaaattgccttccttttttcttcatttttggaatcactgaaaaatcttgagtcagaatttcatttttgctatctcaaacaatatctttatttccttttagtgtcttttatcatg

SEQ ID NO: 62851 - DNA, 650 bp, Homo sapiens
gtttagtctgcttttctattgcatagggtataagactaggtagaactggcaaaagttatggaagcagacttatatatctggggccaaacacaaacagtactgaactttattattactcaatgcagcttccactcttttttaccaccccacccccaccgcatggtatcccagtgagcccttactcaaattccccaggatctgtgcattggatagggccttcgtaacagtcaatggggggcagaaacttaaggtctagagaccagattatgatcctgatggatatgctacttacaaatttattgagatcaattcattttctgcagaaggtggcaccatcccaccccagaacatggagaagtagtctggtggctggagtcctactgacactccttgctaactctgtgacctcaagcaagattctgtgttaggaaccttcttccccataaaatgagaataacaattcctctcattcaggactgaataggaaaaggagtagaaggcacttttagtrcctctgagaaaaaaaaagaaaaagcagaaatgcaagacactaagctttctgaaaaatttccaggactacttagttcttgaatttcctacatgtggccaccttaaatcctggtctcccactgaaaggtgtcagctgagct

SEQ ID NO: 62852 - DNA, 563 bp, Homo sapiens
ttgtctctgtgcttatgccaaagttktgacaaatgcaattatggtatcatcaagcaattttaaaaagaaaaaagaaacagagggatctgctttaaattttagttttttcataggttgccctgaactatgatttctctggagtgacaaggaagagaagagagacatctttattggatatctattatgtgtcagctcctatgctagactgtttatatatattatgttatttcagaaagagggtgaacaaattagatccatgagtcaaataatatcaacttttagtgagtacccaccatgtgtgagagtatataaatattccataggccttgttcttgaaataggagctgttgacaagataagttataaacttgggaaaagtaaaataataaggcaagagtaagataatattttgagccagcaattgcaaactctgatggtagaatttttgttgctggaggagactggcctaacatcttaacaacagacagaaaaaaggaaatatgaaggggcgggctaaacaacctgcccaagattttgcatggttatctgtagagctggcagca

SEQ ID NO: 62853 - DNA, 563 bp, Homo sapiens
ttgtctctgtgcttatgccaaagttgtgacaaatgcaattatggtatcatcaagcaattttaaaaagaaaaaagaaacagagggatctgctttaaattttagttttttcataggttgccctgaactatgatttctctggagtgacaaggaagagaagagagacatctttattggatatctattatgtgtcagctcctatgctagactgtttatatatattatgttatttcagaawgagggtgaacaaattagatccatgagtcaaataatatcaacttttagtgagtacccaccatgtgtgagagtatataaatattccataggccttgttcttgaaataggagctgttgacaagataagttataaacttgggaaaagtaaaataataaggcaagagtaagataatattttgagccagcaattgcaaactctgatggtagaatttttgttgctggaggagactggcctaacatcttaacaacagacagaaaaaaggaaatatgaaggggcgggctaaacaacctgcccaagattttgcatggttatctgtagagctggcagca

SEQ ID NO: 62854 - DNA, 543 bp, Homo sapiens
ggaaaacaagatgagcagctgctcagccagtcagccgcctgcgggccagggctgccagccacccccagcccagcctgcttctgccagggcctggtgcctgctgtaccaagggtagctagaacgcccggctcaccaggccaccgccctctcttccyatggtccaggcacaactcccacaccagtgggcctcggtgcctggagcaccgtccataagcgagccctgggtccatgccagctgcagctagccatggggctgagcaggcagctggcgtctggacacggagcctcattgagcagggggtgcgaggcctctggggctgcctctggggccagggttgggctcaggcctggcatctgggcttggctcccctgctgcccaccacccaccaagaggtgaggagaagcagatgagacctaaggtaggagatgggagctggcagtaagtgggtgttttaggggagactttccaggtgagaggaggcaagtggaggtccatatacccaagtatctcccactgggtgtccccagtcactcaccctctgc

SEQ ID NO: 62855 - DNA, 543 bp, Homo sapiens
ggaaaacaagatgagcagctgctcagccagtcagccgcctgcgggccagggctgccagccacccccagcccagcctgcttctgccagggcctggtgcctgctgtaccaagggtagctagaacgcccggctcaccaggccaccgccctctcttcctatggtccaggcacaactcccacaccagtgggcctcggtgcctggagcaccgtccataagcgagccctgggtccatgccagctgcagctagccayggggctgagcaggcagctggcgtctggacacggagcctcattgagcagggggtgcgaggcctctggggctgcctctggggccagggttgggctcaggcctggcatctgggcttggctcccctgctgcccaccacccaccaagaggtgaggagaagcagatgagacctaaggtaggagatgggagctggcagtaagtgggtgttttaggggagactttccaggtgagaggaggcaagtggaggtccatatacccaagtatctcccactgggtgtccccagtcactcaccctctgc

SEQ ID NO: 62856 - DNA, 396 bp, Homo sapiens
aggagataaaaagaggcttccttgctgtactctcttctgcccctgcctcagacacccaggcctgcacttgccagcagcaggaagcaagaccacagctccctcctcctcccatctccttcccacaacctcctaccccctccaagaaggggtacttccactccaagaaaacagtaggaatggccaggctcggtggctcacgcctgtaatcccagcactttgggaggccgaggcgggcrgatcacgaggtcaggagatcgagaccatcctggctaacacggtgaaacccccgtctctactaaaaatacaaaaaaattagccgggcatggtggcacacacctgtagtcccagctactcgggaggctgggacaggagaatggcgtgaacccaggaggcgga

SEQ ID NO: 62857 - DNA, 764 bp, Homo sapiens
cattctgatttcacctgcgtgattcacagtctccagtcccactccgcggccgctttctcgttctgtgatctcgtattcagccgttctttcctcttcctcattggcagtatttttgtgccctttgacacttaaactgctcattcgtggctagtttttttcgtacttttatattaaataattatacatgacttagctattataagtaatggctgatatctcttagaaaggagaatcaagaaatagggaaattattagccagcgtggtggcgcgcacctgtaatcccagctactcgggagactgaggcaggagaatcgcttgaacctgagaggcggaggttgcagtgagccaagatcgcaccattgcactccagcttgggagacaagagtgagactccgtctcaaaaagaaagaaagaaggaaaagaaagagaggagaaagaaagtgggagagagagagaaaataaaataaaaaagaaactggtaaagcaaggaaaatttccataaaatttgcattctgaagcactaagtttgggactgtgggtgcaaagtgaaatccatattgcattgagaaaccattccattttttcagtcaagtcaayccccaaattattccaaattatttgctgcattacaccaaacctgggtttcccttcactctcttctgctgggaagtcaccagtgtcttttgtctccaggatttttgccttagggagacccagttaaatgccagggttccttctttaactggggaggactatctgacct

SEQ ID NO: 62858 - DNA, 2104 bp, Homo sapiens
aaatatcacaaaaggaacaagaagatgcccaacttgaatgcctcattcctagccaagttggtggtgttctccatataaaatgggaggctcttgttcactactcaaaggcactgtgtgttggggattagcttgcaccttttacttcttatacacacgtgatgcttatcaagtatgcatctgacacaaaagcagagcgagcatcctaatattgaagatacccagctttgaatgctgacatttcagaggaaaaggtcagctcttgcacttttatctctctcatttggtaataaccttgagttgagccttccaactcctgcagaacagagataccctcgggcactttcaggtcaaagatgactttgaaaagtgcagagcattcaaagtgagagtcgaggttaagtgtgtgtgaggcagtaagaccaggtgtgaatgatgggcggtaagaggagttatattctctttgccgtgtcaggttaggaagacatcttgctatgcagtctatttttttctcatcaagtgtcactgtgatgttggctttcaatgtgatccccttaatgaccgtcctgacactctttcatggtgtcactcagttatcgtgaaagttactgcaggctacaatgctaagtcatagaggtattcaaaatattcacaggaatcagagaagggatcctgagtctctctagtcttacagaggtagggtagacggcaaggagcaagatcttgccaaaaaattgtactaccggtcatcagaccttgatccaaatctactagtttcagggctcttgtttttaaaaggacaagttctcactctgctacccaggctagagtgcagtggtgtgatcacggctcactgcaaattcttgggctcaagggatcctcccacctcagcctcccaagtagctgggactacaggcacaagccaccatgcttggctaatttttaagtctttttttttaatagagatggggtctcaatttgttgtccaggctgctcacaaattcctggcctcaagcaaccctcccgccttggcctcccaatgtgctgggattacagcatragatgtgagctattgcacccatccagcaccacccccccccttttttttgtgacacagtcttagtctgtcacccagactgcagtgaagtggcatgatctcggctcattgcaacctttctcctgggttcaagcgattcttctgcctcagcttcctgactagctgggactacatgcattcaccacttcactttaaagtcaagattttcaagcaactgacaagatgtcaattgggcaagatgatagatacacttaatacctgtcaattaagagaacacaccatgcatttagtgcacaaactcaaccttgttcatcacaaatagcatctgtgtccctttttttaaaagtatgcaagatttatttgtttctgtaaattttgtctataaaagtgccaggaacatacagattcatagacccccttgcaatgactttcaagcctccttagtttacaaccactattctaaagaaatgcagttttatgcactaaaaatctgttatttcctgccaaacaccggtggtcatggagccgttcttgttataggatacatttagtggcaggaatcacattgtgaagcatctgtaaacattctcattggctccctgcactggagcttagggaatttaggagggtttcctcttttgggtcatagttactgcaagaaactacagtttaactccaattcggtacttctcacgttatttggacatgagacatcttctttccttttggtgctctatcctgtctttgtcttcccactttgacaggggtttacagtgaggacaattacagagaaaaacagtcacaaagatctttgtgcttttccccccctttgtctcttgttaaatataggcatgggatttcaaagtcaaaagcaaaacaagacaaaaaagcaacctccttcttcaaactgcctaaaacttggcagtgatcattacaacgtctgtaaccactaataattcgaccataccatctgcaaccgttacatgcctaatggttactgcagatgactcattttatttctaatttgtatcttcagcacatcatgaagat

SEQ ID NO: 62859 - DNA, 2104 bp, Homo sapiens
aaatatcacaaaaggaacaagaagatgcccaacttgaatgcctcattcctagccaagttggtggtgttctccatataaaatgggaggctcttgttcactactcaaaggcactgtgtgttggggattagcttgcaccttttacttcttatacacacgtgatgcttatcaagtatgcatctgacacaaaagcagagcgagcatcctaatattgaagatacccagctttgaatgctgacatttcagaggaaaaggtcagctcttgcacttttatctctctcatttggtaataaccttgagttgagccttccaactcctgcagaacagagataccctcgggcactttcaggtcaaagatgactttgaaaagtgcagagcattcaaagtgagagtcgaggttaagtgtgtgtgaggcagtaagaccaggtgtgaatgatgggcggtaagaggagttatattctctttgccgtgtcaggttaggaagacatcttgctatgcagtctatttttttctcatcaagtgtcactgtgatgttggctttcaatgtgatccccttaatgaccgtcctgacactctttcatggtgtcactcagttatcgtgaaagttactgcaggctacaatgctaagtcatagaggtattcaaaatattcacaggaatcagagaagggatcctgagtctctctagtcttacagaggtagggtagacggcaaggagcaagatcttgccaaaaaattgtactaccggtcatcagaccttgatccaaatctactagtttcagggctcttgtttttaaaaggacaagttctcactctgctacccaggctagagtgcagtggtgtgatcacggctcactgcaaattcttgggctcaagggatcctcccacctcagcctcccaagtagctgggactacaggcacaagccaccatgcttggctaatttttaagtctttttttttaatagagatggggtctcaatttgttgtccaggctgctcacaaattcctggcctcaagcaaccctcccgccttggcctcccaatgtgctgggattacagcatgagatgtgagctattgcacccatccagcaccacccccccccttttttttgtgacamagtcttagtctgtcacccagactgcagtgaagtggcatgatctcggctcattgcaacctttctcctgggttcaagcgattcttctgcctcagcttcctgactagctgggactacatgcattcaccacttcactttaaagtcaagattttcaagcaactgacaagatgtcaattgggcaagatgatagatacacttaatacctgtcaattaagagaacacaccatgcatttagtgcacaaactcaaccttgttcatcacaaatagcatctgtgtccctttttttaaaagtatgcaagatttatttgtttctgtaaattttgtctataaaagtgccaggaacatacagattcatagacccccttgcaatgactttcaagcctccttagtttacaaccactattctaaagaaatgcagttttatgcactaaaaatctgttatttcctgccaaacaccggtggtcatggagccgttcttgttataggatacatttagtggcaggaatcacattgtgaagcatctgtaaacattctcattggctccctgcactggagcttagggaatttaggagggtttcctcttttgggtcatagttactgcaagaaactacagtttaactccaattcggtacttctcacgttatttggacatgagacatcttctttccttttggtgctctatcctgtctttgtcttcccactttgacaggggtttacagtgaggacaattacagagaaaaacagtcacaaagatctttgtgcttttccccccctttgtctcttgttaaatataggcatgggatttcaaagtcaaaagcaaaacaagacaaaaaagcaacctccttcttcaaactgcctaaaacttggcagtgatcattacaacgtctgtaaccactaataattcgaccataccatctgcaaccgttacatgcctaatggttactgcagatgactcattttatttctaatttgtatcttcagcacatcatgaagat

SEQ ID NO: 62860 - DNA, 680 bp, Homo sapiens
atctccccaccctcttaccctcaactcagatttaagtacagaaagaaaacattcagaaatcttgctgaaacagaaatcatttcacttttctcctttgttaaaagccttctgatgactcccccatttctgttgcagcaaaaggcaaaatcctgtaaatgcaacttgatgtcctagaatggattctggaacagaaaaaggacataagtagaaargctgtggaaatttcagtaaaatccatggtttagttaatagacaccagtgttaccttcctcgttccgataaatgcacatagttgggtaagatgttagtgttagaggaagcggggaaaaggatataagaggaccctgtgtactatctttgcaacttttttgtaaatctaaagttattcaaaaagttaaaaaagattttttgtttaaagctaaagttcttagagcagactacaaagacctgcgtgacctgtttctgtgccctcgtcaggtctctgacgtcatctccttttctcttccccttgaacgttctgtaccagcctcacgcttcatcactttctcaccgcaggacctttgcactggctgtgtctgggactgggctattattgcctgagctctccctgtggcccactcttctttgtcaaattgtgattcaaatgtcaccttcataaaagccatccattgaaaatgtca

SEQ ID NO: 62861 - DNA, 680 bp, Homo sapiens
atctccccaccctcttaccctcaactcagatttaagtacagaaagaaaacattcagaaatcttgctgaaacagaaatcatttcacttttctcctttgttaaaagccttctgatgactcccccatttctgttgcagcaaaaggcaaaatcctgtaaatgcaacttgatgtcctagaatggattctggaacagaaaaaggacataagtagaaaagctgtggaaatttcagtaaaatccatggtttagttaatagacaccagtgttaccttcctcgttcygataaatgcacatagttgggtaagatgttagtgttagaggaagcggggaaaaggatataagaggaccctgtgtactatctttgcaacttttttgtaaatctaaagttattcaaaaagttaaaaaagattttttgtttaaagctaaagttcttagagcagactacaaagacctgcgtgacctgtttctgtgccctcgtcaggtctctgacgtcatctccttttctcttccccttgaacgttctgtaccagcctcacgcttcatcactttctcaccgcaggacctttgcactggctgtgtctgggactgggctattattgcctgagctctccctgtggcccactcttctttgtcaaattgtgattcaaatgtcaccttcataaaagccatccattgaaaatgtca

SEQ ID NO: 62862 - DNA, 680 bp, Homo sapiens
atctccccaccctcttaccctcaactcagatttaagtacagaaagaaaacattcagaaatcttgctgaaacagaaatcatttcacttttctcctttgttaaaagccttctgatgactcccccatttctgttgcagcaaaaggcaaaatcctgtaaatgcaacttgatgtcctagaatggattctggaacagaaaaaggacataagtagaaaagctgtggaaatttcagtaaaatccatggtttagttaatagacaccagtgttaccttcctcgttccgataaatgcacrtagttgggtaagatgttagtgttagaggaagcggggaaaaggatataagaggaccctgtgtactatctttgcaacttttttgtaaatctaaagttattcaaaaagttaaaaaagattttttgtttaaagctaaagttcttagagcagactacaaagacctgcgtgacctgtttctgtgccctcgtcaggtctctgacgtcatctccttttctcttccccttgaacgttctgtaccagcctcacgcttcatcactttctcaccgcaggacctttgcactggctgtgtctgggactgggctattattgcctgagctctccctgtggcccactcttctttgtcaaattgtgattcaaatgtcaccttcataaaagccatccattgaaaatgtca

SEQ ID NO: 62863 - DNA, 604 bp, Homo sapiens
gggtttcccaaaagggagtatcttgcaaccctatagtacgatataccacaaccatgaaattgacattgctgcagtccaacatttttattcagatttcaccagttttacatgcattcctgtgtgtgtgtgtgtgtgtgtgcacgcgcgcgtgtgtgtgtgtgttgttccatttaattttttttttttgagacgtagtttcgctcttgttgcccaggctggagtgcaatggcacgatcttggttcactgcaacctccacctcccgggttcaagcgattatcctgcctcagtctcctgagtagctgggattacaggtgcccaccaccacgcccagctaatttttgtattttttagtatagacggggttttgccatgttggccaggctggtctcgaactcctgacctcatgtgatccacccgccttggcctcctaaagcgctgggattataggtgtgagccaccgagcctggmctgttccatttaattttaaggttattttaaaagagacttttcttctcaaagtttagaataatataattctagagtttgatcatagattagagatcacttagtccaaatctttcattttacaattgaacagactga

SEQ ID NO: 62864 - DNA, 626 bp, Homo sapiens
tccttccatttagagggagatagaaacaaacaagcagttataatacagattgatgagttctgtgttagcgaaatacaatgtattacaatcttttccctaaagctttctctggccaccccaacttttagtcataattttcttatttgaacttctggagtgctagttgttttcacaacgtattttctcytaaaaatatattctttctctattactgatttagatctgtattctcgggcggtgggggggactcattttatgtatcccagaccctaaaacagttctctctaaagagtaagaactaacctacaggggcgtcccctaaggggacggagcccacgtgtgccgtggcgctgagaaatctctgcctggtgctggagctgctgtgcggggcgtgcagtggtgctgggtcgggccaaggggctgcccacccggagctgggatgccagaagggctgttggtgaggacatttcaccattcggtctctccttttgtgggcaagcaggtggtaaagacagggagcaacagtaagaagtatagcccaccagcctccagtctctgtggctccaggacacccaggtccatggaaagaaattattccttagatttgatccaaataaagaaatggg

SEQ ID NO: 62865 - DNA, 654 bp, Homo sapiens
taacacgtgcagaaagcaatcacttcagttttccatatttgaggtcctctctgggccagtacagttcgagacactagaaattcaaaaccacagataatgccctcctgggcctgtaggatgtacttgttaggtggcaggggcgaggcccaaccagtgcgcacaacaatgtcatagccccaggtgagtgtgggaggggaagttgtagaaatattttccagccraagaaatcagtgaagtaaagataggcaggaggcaggcaaaaaggaggcagaactggcaggttgtgggggcaggagtggccacggatgaggagccaggcttggcaacacaggtgcaggtgtcacgtgtcataggcacaggcgtggagatctgagggcatagaggggagaagaccgtgcaccgccaatgtcaactgtgtggaagcaaacctgggctacatctaagagtcctgagagcaggggaggagaagggaggaagagacaacagaagtcctgggtgggaagcagaaatatttcctgagtcaatgaaagagccccaagcctccagacctgccagggctcaagcaggcagctccagaggccaagacctataatccagcagttcaggttgattttgccagagtagtgtgaagaggccctgattttcccctttaat

SEQ ID NO: 62866 - DNA, 416 bp, Homo sapiens
ttatcaccttcatagaaaggtactcacctcccacgtcaagagaaaagccaacatgtttttcctccamtgcataaaaggaacttccatagggctggcaggagtcaggctgttcaagacaactggaaggagttgaataacatctatccagtgagtcctgcaagacttcaggctctactacctccagcagctccctgctgagcctggaaaaggaggaaaaagtaaagaataagccaggggaaatcagacacaacagagccccaactaggtttcatgggtagcatagggaagtggttaaaaaactaaaaggatagatccattaatgaggtaacaaattattgccttcatgttgggacagaacagggccaaatggaaaagaatgaaagagaaagacagatagacacacacacacacacaca

SEQ ID NO: 62867 - DNA, 703 bp, Homo sapiens
tgctgtagggctggcctaagtcaggcagttcaagataacctgaaggagtcgaataacatctatccagtgagtcctgcaagacttcaggctctttctcatccagcagctccctgctgagcctggaaaagtaggaaaaagtaaagaataagccagggggaatcagaaaccacacagccccagctagatttcatggctaacataaggaactgtttaaaaagaaaaaggacagatccattaatgaggtaatgaattattgcctttaggttgggatagaccagggccaggtagaaaagaatgaaagagaaagacagggagagacagagacagagacagagagaaagtgacctagtgaattggccgggtgacacactgatgaaggagtaaaaggacactctgagttagtgccctcatgacacacagcaaactgtgatcatgaaaagagtgagctcaatagttttccataaaatatgctcaaaattcgatgcagtggccatgagagtacagcttttgaagtatggtcaacctatggtacgttagkaaatgataaggggaggaagaaatggaaacctaaacatctactgcaatgaaaaccaacagcaatgacagtaggagtaattcagccttcgttgaaaacgtgacatcaaacacactctggtttccctgaatctgttgcctccaggtgttaacacagaactaaggatcc

SEQ ID NO: 62868 - DNA, 492 bp, Homo sapiens
ggatcccagcagcacccactggcgtcggctgcctcccacaatgccagcccccaggtagccaagaggagtcatccaggtgtcrgggagagaagctgagagaagcagcgagggcggtggttgtgggagagaggaggaagttgggagggtcacccacacacttacggaaagcttggtgcaaagagaaagagaccgcctttcaaaaacagccctgctctaccatcctgaacctagtcccgatcatgccttgaaaaaatagattcccaagtgggtcttgcctaaataatgtaagtggacgtgggaaaagcacggatttgtcagcagtttcagaaggttccttgctgctggtgactttggaaaactcccttaaccagcgtgagcctccatgtcctcctccagagcaggggactgtgtaccttcccccaggaggcctggaaggattttgttgggttttcctgataaactcactcagtggatgaaagggggggatgtttg

SEQ ID NO: 62869 - DNA, 492 bp, Homo sapiens
ggatcccagcagcacccactggcgtcggctgcctcccacaatgccagcccccaggtagccaagaggagtcatccaggtgtcggggagagaagctgagagaagcagcgagggcggtggttgtgggagagaggaggaagttgggagggtcacccacacacttacggaaagcttggtgcaaagagaaagagaccgcctttcaaaaacagccctgctctaccatcctgaacctagtcccgatcatgccttgaaaaaatagattcccaagtgggtcttgcctaaataatgtaagtggacgtgggaaaagcacggayttgtcagcagtttcagaaggttccttgctgctggtgactttggaaaactcccttaaccagcgtgagcctccatgtcctcctccagagcaggggactgtgtaccttcccccaggaggcctggaaggattttgttgggttttcctgataaactcactcagtggatgaaagggggggatgtttg

SEQ ID NO: 62870 - DNA, 522 bp, Homo sapiens
tgtcatctgagagacctgaaaaataatatctacattccatcattgttgataacattaattatgataatttccaaagggctaattcagtaaaaattgcttaataaatctatgaatagatgttatctaattctgttatctttctggtaagttagcactcaggaaatgacttcacgtgcattgtttcaactgaggaagagtaactgttaggatctctactttctagagactcccttcctgtgtttacttagaaagtatcttttgccagttttctttctcttcctcagcatccctttttaagtcaatttccccckgtcatgcacttcagtaacaacctattaggcacattagtaaaagtgcaaatcctgggcccacaagtcagtctcctgacatacccagcttcttgctctgttttctcccctcgttttgaaataaaagaatgaaagggcaaccttctcatggaaagggtataaatctgtctcttttatgaaactccatttagttcatcatctccattcatgccca

SEQ ID NO: 62871 - DNA, 814 bp, Homo sapiens
ttctccaggtatgatattattttgtttgaccatccttatcttcaagggctaccaagaagaaacaaatcatttatttacctccccagaggaaaaggttttaccaatgagacactttcttaccatgaccccagggcccccatgccctgttcacttgagtgccctgtgtggcctgagagaagctcatactggtcacaggattctttatatgattaacctccttcctgaatcccaactttatggtggtggtgatgacaggtatcccatgctcatgtccctgaagtcatcagcctgtctccagttagaaaaaattacatgtatatagagaggcctctttggaagtagcaaaagctttctcaccttcatacattaatggttggaatgtacaatagtataaacactttgggaaaaaatgtctggcatattcttacagaactaamcaactacctattctatgactcactaattcctaagcatttatccaagagaaattaaaacatatgtccagaaaatgatttatacaagaatgttcatagcagttttattcataataggaaaaactggaaacattcaaatatctatcaatacaagaatggatcaataaactgtgatacattcattccatggaatggctaaaggaacaaacttttgacacacaaaacaacatggatgaatctcaaaaacattttgagtgcaataggagccatacgcaaaacagtgtgagaaaaatgataaataataatggtttcaagaaatgcagagcagagagcccagaggcaaagacccacaggacagagggtcagtcccaggctgtgga

SEQ ID NO: 62872 - DNA, 814 bp, Homo sapiens
ttctccaggtatgatattattttgtttgaccatccttatcttcaagggctaccaagaagaaacaaatcatttatttacctccccagaggaaaaggttttaccaatgagacactttcttaccatgaccccagggcccccatgccctgttcacttgagtgccctgtgtggcctgagagaagctcatactggtcacaggattctttatatgattaacctccttcctgaatcccaactttatggtggtggtgatgacaggtatcccatgctcatgtccctgaagtcatcagcctgtctccagttagaaaaaattacatgtatatagagaggcctctttggaagtagcaaaagctttctcaccttcatacattaatggttggaatgtacaatagtataaacactttgggaaaaaatgtctggcatattcttacagaactaaacaactayctattctatgactcactaattcctaagcatttatccaagagaaattaaaacatatgtccagaaaatgatttatacaagaatgttcatagcagttttattcataataggaaaaactggaaacattcaaatatctatcaatacaagaatggatcaataaactgtgatacattcattccatggaatggctaaaggaacaaacttttgacacacaaaacaacatggatgaatctcaaaaacattttgagtgcaataggagccatacgcaaaacagtgtgagaaaaatgataaataataatggtttcaagaaatgcagagcagagagcccagaggcaaagacccacaggacagagggtcagtcccaggctgtgga

SEQ ID NO: 62873 - DNA, 1455 bp, Homo sapiens
ggagtcaggctgctatttttttttactactttaagttctgggatacatgtgcagaatgtgcaggtttgttacccgggtacacatgtgccatggtggtttgctgcacctatcaacccatcatctagtttttaagccccgcacgcattaagtatttgtcctaatgctctctctccccttgccctccaccccctgacaggccccagtgtgtgatgttcctctccctgtgtccatgtgttctcattgctattttttaaactaaagtttcagaccagtctctgggccagatccattcccagcttactatgcccagtgctcatgtctgcaggtcgtgacagtcacataacgttccataaaatgggcttctcagaaagaccatctcagccttgagtgtctgtgaatggcaattgaagaaaaacacattagcttmtctctcctctgatcttccaagtttatcaagtaaaaattttcaagggctacatctaaagagaaaacatgtttcaaacttgatctagttgctatctctaccagatagaatgatggtttaagtgtacagtatataaacaagcaatgtagggatacaaaaaagttaaaaaggaaaagagagagaaataaagtgggatgggggaaggaaggaaggaaggaaggaaggaaggaaggaaggaaggaaggaaagaaatacctaggctcaggatcccaatcaaacgtgtttaatttaacatgatcttcttacaaaaagagttaaataaaacatgccggacacacccaatcacattggtagagtcgccgaaggctgacttttatgaatcaatttcacaaaacatcgtccttacaatatcatcttcatcaattaatatttattgagcagcttctcaggtacatgacacatgaacagagatgattaactttctgttcttttcccttctctttagaaaatgaagccagcacaaccttcaaaatatctgcctgagggaaaaaaatggacttgctctaacaacctgaacaaacattatttccagaactaattttccacttatctggctcttgccatccatatttttaatatcctgtgatgtctgtgaacaatttaaaattgaaagtcactatgtgcaaactgtcacagtcaagagcatgttttgtgtccatttcatttgtttaatgttttatattttaaaattccttttgatggcaattacttaagctaaccaaagtagctattgtttttctcaatttataggtacgaatttataaaatttaagtgatttattctagatctccttgctggggcttcaaactttctgttattaatttgtaaataaggacacatgctcactcaaaattatataacatgctgcagagtaattttatattgcttttcctatttaccaacagcttcccttctacaggttgagaaagaaagagataatgcaagtgtatctaacaacagcaaatctttgt

SEQ ID NO: 62874 - DNA, 1455 bp, Homo sapiens
ggagtcaggctgctatttttttttactactttaagttctgggatacatgtgcagaatgtgcaggtttgttacccgggtacacatgtgccatggtggtttgctgcacctatcaacccatcatctagtttttaagccccgcacgcattaagtatttgtcctaatgctctctctccccttgccctccaccccctgacaggccccagtgtgtgatgttcctctccctgtgtccatgtgttctcattgctattttttaaactaaagtttcagaccagtctctgggccagatccattcccagcttactatgcccagtgctcatgtctgcaggtcgtgacagtcacataacgttccataaaatgggcttctcagaaagaccatctcagccttgagtgtctgtgaatggcaattgaagaaaaacacattagcttctctctcctctgatcttccaagtttatcaagtaaaaattttcaagggctacatctaaagagaaaacatgtttcaaacttgatctagttgctatctctaccagatagaatgatggtttaagtgtacagtatataaacaagcaatgtagggatacaaaaaagttaaaaaggaaaagagagagaaataaagtgggatgggggaaggaaggaaggaaggaaggaaggaaggaaggaargaaggaaggaaagaaatacctaggctcaggatcccaatcaaacgtgtttaatttaacatgatcttcttacaaaaagagttaaataaaacatgccggacacacccaatcacattggtagagtcgccgaaggctgacttttatgaatcaatttcacaaaacatcgtccttacaatatcatcttcatcaattaatatttattgagcagcttctcaggtacatgacacatgaacagagatgattaactttctgttcttttcccttctctttagaaaatgaagccagcacaaccttcaaaatatctgcctgagggaaaaaaatggacttgctctaacaacctgaacaaacattatttccagaactaattttccacttatctggctcttgccatccatatttttaatatcctgtgatgtctgtgaacaatttaaaattgaaagtcactatgtgcaaactgtcacagtcaagagcatgttttgtgtccatttcatttgtttaatgttttatattttaaaattccttttgatggcaattacttaagctaaccaaagtagctattgtttttctcaatttataggtacgaatttataaaatttaagtgatttattctagatctccttgctggggcttcaaactttctgttattaatttgtaaataaggacacatgctcactcaaaattatataacatgctgcagagtaattttatattgcttttcctatttaccaacagcttcccttctacaggttgagaaagaaagagataatgcaagtgtatctaacaacagcaaatctttgt

SEQ ID NO: 62875 - DNA, 1101 bp, Homo sapiens
catatttatagccacaaaatctgcaattgcaaaaatgtggtaccagcccaaatgcccatcaatcaacgagtgaataaagaaaatgtggcatgtatgtataccatggaatactactcagccataaaaaggaatgaaataatggcatttgcagcgacctggatggaattggagaccattattctaagtgaagtaactcaagaatgggaaaccaaacattgtatgatctcactcataagtgggagctaagttatgaggatgcaaaggcataagaatgatacaatggactttggggactatgcgggaaagggttgtgggagggaggagggataaaatactgcacattggctacagtgtacactgcttgggtaatgggtacaccgaaatctcagaatcaccatcaaataatttattcgtgtaacgaagcaccaactgttccccaaaaacctattgaaataaaataataaaaaatatttaaaattaaaaattaaaaaataaaagttataatagaaaaataaaaaagaaaagtggttggagcatagaggatggtaaagttataaaatagtagagttgtaagtaggtaatcattcccaaagaatagactgcagaacggtcatgaggaatgtgaaaagacaaagaacaaatytgagagcaagcaggccaaggacagcacaccagctttcatctaatctgggttatcagcccttgctgtctcaaagaagagctgtgaaaacacaacatattgaagaggacacagagcaaccaggatctcagacattcatgataggagaatataacgatgcaaccactttgaaaaactggaagttccgtaaaaaaatgaaacatacatcaccccccacatcccagaagttctactcctaggtatttgtttaagggaaatgaaatcttatgacagcaaaaagattccacaagaagtttcatggcaactttacatataatagccaaaaactagaaacaaccctgatgtccatcaacaggtgaatggatcagcaaaatgtgatacagttatacaatgaaatactagttggtaatataaaggaaaaatagattataaatagataattagatagatagataatagag

SEQ ID NO: 62876 - DNA, 1147 bp, Homo sapiens
cagcactattcacaatagcaatgacatggaatcagcctaaatgcccttcaaagataaactggataaagaaaatatggtacrtacacaccatggaatactaagcaggcataaaaaagaatgagatcagatcctttgcagggacatggatggagatggaggccattatccttatcaaactaatgaaggaacagaaaaccaaataccaaatgttctcacttaaaagtgagagctaaatgatgagaacacatcaacacatagaggggaacaacacacactggggcctgttgaagggtgaagaatagaagaagagagaggaccaggaaaaataactaatgggtattaggcttaatacctgggtgatgaaataacctataccacaaacccccatgacactagtttacctatgtaataaacctgcatatgtaccacaaaattaaaagttaaataaaagcatggtaacaaaataaaataaaaataaataagtaaataaaagaaaaaaatgaaatattgagaagtgattaattatcacaatgctcaataaataaatgttctgagaggccatgtgaattatatgtgttatatattacatttcataatacattcatatattaatacattaataaattcacacatatattatttcagatttacccagatttatgtgaactccaaactaattttttgtgtcatataatcatcatggcattaactgcctttcttgtttcaaagattatattattctttattgcccctagtagtctcttccccagtagagggccaactactcttctaagctcacatagatagacataataatttagatttaggtacatcaaatacagtaaacaacagaatagttctgaatttttcaaaaattttccatagtttctgattcatcaatttagtgaagcacttctgtgttcccaagttacgtgggttgttacctactagcacgtattttgttttgtttttttatttgtatatgtgtttcttttgccttggaacttctttggccatctggtttaacctatggactctctcaaaataaatgttttaaataaaaaatgtttttaaaatgttctaaataatatatattattatagaagaaatccaattataatgaaatatatatagaatattagatgca

SEQ ID NO: 62877 - DNA, 699 bp, Homo sapiens
atttaaaagataagacagaacctttgttcaaatgccaatcaataaactgggaaactcaccacacgtctccttcaggatgggacagtggtctgggccataccttcacagaagtgagtccaagggcagagatacagggtctttgggctcttacctctcaaaataagaaagatagagttggaagaatatattcatagaaattcttacctttatttttattataaaacccaaygtttgaaagtgtgtcagtacttcttgcacttgagcaaataaacaatacttcaagtgaaatctcgccagctttctaaccctataatttagctttgtcatttctagagtttcatataaatgaaatctagagtataagcttttatagttgtctctcacccagcataatgttttcagacaggcattcttgtttggggaatgtatcagtctgttatggcattgctataaagaactacttgagactaggtagtttatgaagaaaagaggtttaattgattcatagtcccacaggctatacagaaagcagggctggggaggcctcaggagacttaaaatttcagcggaaggcaaagaggaagcaggcacatcttcacatggtggaacgagagagagagcaaagggggaagtgctatatgcttttaaacaaccagtcttgtgagaactctctcactatcatgagaacagcaagggaac

SEQ ID NO: 62878 - DNA, 699 bp, Homo sapiens
atttaaaagataagacagaacctttgttcaaatgccaatcaataaactgggaaactcaccacacgtctccttcaggatgggacagtggtctgggccataccttcacagaagtgagtccaagggcagagatacagggtctttgggctcttacctctcaaaataagaaagatagagttggaagaatatattcatagaaattcttacctttatttttattataaaacccaacgtttgaaagtgtgtcagtacttcttgcacttgagcaaataaacaatacttcaagtgaaawctcgccagctttctaaccctataatttagctttgtcatttctagagtttcatataaatgaaatctagagtataagcttttatagttgtctctcacccagcataatgttttcagacaggcattcttgtttggggaatgtatcagtctgttatggcattgctataaagaactacttgagactaggtagtttatgaagaaaagaggtttaattgattcatagtcccacaggctatacagaaagcagggctggggaggcctcaggagacttaaaatttcagcggaaggcaaagaggaagcaggcacatcttcacatggtggaacgagagagagagcaaagggggaagtgctatatgcttttaaacaaccagtcttgtgagaactctctcactatcatgagaacagcaagggaac

SEQ ID NO: 62879 - DNA, 699 bp, Homo sapiens
atttaaaagataagacagaacctttgttcaaatgccaatcaataaactgggaaactcaccacacgtctccttcaggatgggacagtggtctgggccataccttcacagaagtgagtccaagggcagagatacagggtctttgggctcttacctctcaaaataagaaagatagagttggaagaatatattcatagaaattcttacctttatttttattataaaacccaacgtttgaaagtgtgtcagtacttcttgcacttgagcaaataaacaatacttcaagtgaaatctcgccagctttctaaccctataatttagctttgtcatttctagagtttcatataaatgaaatctagagtataagcttttatagttgtctctcacccagcataatgttttcagacaggcattcttgtttggggaatgtatcagtctgttatggcattgctataaagaactacttgagactaggtagtttatgaagaaaagaggtttaattgattcatagtcccacaggctatacagaaagcagggctggggaggcctcaggagacttaaaatttcagcrgaaggcaaagaggaagcaggcacatcttcacatggtggaacgagagagagagcaaagggggaagtgctatatgcttttaaacaaccagtcttgtgagaactctctcactatcatgagaacagcaagggaac

SEQ ID NO: 62880 - DNA, 1510 bp, Homo sapiens
tgtcaggtctacaagtgtacatcctcctcctccctggccattaattctgtcaagcactgagcaatgttgttgccaagccttcctctcctgtgagcaatctgtgagactgcctgacatttataagttccagagctgtttttccctcaaaacaaagtcatctcccaacttttacattatagatcatcctggagctttattttcaccatcactgagctggaaaggggacgaagatatcccatatttttctcctcctcaaaaccaagcatcttgaataaaaacccttttgattctcatctttttcatttgctctcctaatgctcaaatgaaaatgagactttgccttttgattttcactcctttgtcaattttccagtggctgccaacccaagagcagcatggacaggcttcagcagctcctcatggatgagaatgtgagggtggcagctccatcaccaggcacctggggctgcctggatgttctatcagtgccagttttgctaatgccccaggactagtttgactgaatagcttttagaatagtaaggtctgtgtggcagcctgggaacaaaactattctaatagcatgtgtgtggggagtgggggacatacatgtgggaggcaagaagttcagaagcttggtttgaatttctaactcatctcgggcttccctgggctttcaggataatttagccctccaatcactgtaagaatgtaaatgtcctaatttatggaacggtgctgataatttattgtgttgaccttatcaagggcatttgccatttgaatgaagaccacatgaaaagtgtgtttaacctccaatgttctgctctaataatggaatttcaggcagcctcttagctgattgagggaaatgtatttgctctggagtgtctccctggtatttctcaaatctcaaatcacacatgtaaggtagccatgtaactctaagtatatttcaggctgattttacatacacacatatgccttggatggggttcccttccctgcctgctgctgcttgatgtgtctggactgacacctcagtgatccagactgacaagaacttgttgttctattactgagttgttattaagttttgtttttccatctctttgaattttcaagatattggtttttattctactctgctcttcactgaagggaaggagaaatttatttggcaggtgcagttcatagttttaaaattaaactgactttatccttttgtctttctccttctgaaccctctatttccatatatgttcactgtctctatatcttactttatctctttcatttcccctctccttttttccctttctctcctctttttctctctgtcacacacacacgcatgcgcacacacacagatacttccttagttgtatcactctggttttcatacacataattcctytttccctgctttataagctctgattctcaagtgatgttactaggtgagctatttgatgaccattactcagtggaggctagaaagggcattcct

SEQ ID NO: 62881 - DNA, 643 bp, Homo sapiens
gttgaaattagtgcagtgcaagtatgtataacgatcttaggagcacaaataagagcttgattctttctgccttgaccagtcagggaaggcttcatagagagggggtgatcaaaagaagagcaagagtttgtccagcaggtcatagggccagggcattacaggcagaggaaactgtgtcctcagagcacctaacayactcacttagctatggtaggagcccaatgactatatgctgaaataagcatggtgctcaaagtgggaatctttaagctgccagctacagaaactaactcaagtacagtgaggcattttaagggtccctagaaatctcatagtgtgtaaacaccaaaaatttaaaaatacatacagctgggtcccatgggaattttaattgagtactggaaaagcatctgaactgaagccctttccgcatctctgtgtcccacagcagccacgtgcccccactctcctcagcacgtctgctccaagtctctctacaaactggatctatcacttctcagctgtctacgactcaacccagtcatctctctctctctcctagtctacatgaccttctagctccagcactctctgtaagttaaaaacagatgccacattctatgtgtctcactgtagtgatgtg

SEQ ID NO: 62882 - DNA, 643 bp, Homo sapiens
gttgaaattagtgcagtgcaagtatgtataacgatcttaggagcacaaataagagcttgattctttctgccttgaccagtcagggaaggcttcatagagagggggtgatcaaaagaagagcaagagtttgtccagcaggtcatagggccagggcattacaggcagaggaaactgtgtcctcagagcacctaacatactcacttagctatggtaggagcccaatgactatatgctgaaataagcatggtgctcaaagtgggaatctttaagctgccagctacagaaactaactcaagtacagtgaggcattttaagggtccctagaaatctcatagtgtgtaaacaccaaaaatttaaaaatacrtacagctgggtcccatgggaattttaattgagtactggaaaagcatctgaactgaagccctttccgcatctctgtgtcccacagcagccacgtgcccccactctcctcagcacgtctgctccaagtctctctacaaactggatctatcacttctcagctgtctacgactcaacccagtcatctctctctctctcctagtctacatgaccttctagctccagcactctctgtaagttaaaaacagatgccacattctatgtgtctcactgtagtgatgtg

SEQ ID NO: 62883 - DNA, 539 bp, Homo sapiens
aatgggacatctgtgaccattcagggacctggatacacttatcccctagccacccaataccaatatgtttgctaagtagctgcttcttaaactgcacagtagggtgagtgtcttgcacaccttgtcagaccactaagcctgcctgtcctaacaaatctactctgctgtgactgtattcctctggcgtgttggtacatatgcttctcccactggcgcttggggccccagcatgtctgagaaattgaatgacagcaagtttttctgccaagaccaaagcaaatatccctgggaaaaaaaaaaaaaaaaaaccaagagcctcattgcaaagcgtcctggcttctgtgtggatcttccgctagggaattgcaaaaactttcttgagatgcagagaccctaaaggtccttcaaatgctgaatgtcagtctgtgccacagtcaaaattacaatcccagcaragaaaaatgtgcctgcttttcgcttgtgtggaattacaggggtcccatatactggctttgatccagtttactatgtgatcttga

SEQ ID NO: 62884 - DNA, 710 bp, Homo sapiens
acaggtgagagagaagggggaactgccacacacttttaagccatcagctctcctgagaactcactcactatcatgagaacagcaagggggaaatctaccgccacgatccaatcacctcctgccaggcccctccaccagcactggagatgacaatttgacatgagatttgggtggggacacaagagccaaaccatatcagacaggtagtaaatcaaataccgtcttcccatttgtttcttctgccaggtgatgtttttgcctttagtattgcttgaagacagatggggttcctggagagccagtgcccagctggtggtcaggaaacggggcccagagaatgtgggccaaagggtagaagccccggcctggagaaaggctgtgggtgacactgtgcccaaacaggagaaggccctcagaaaaattctgttggaaatccaatgcttcaaagggctagaggagcacaagggaatcctttcatcacagaaggctatcaatcttatagatttttttttaaaaaaggccaggtgtggtggctcacatctgtaatcccagcactttgggaggccagagtggrtggattgcttgagggcaggaatttgagacctgcctgagcaacatggcaaaaccccatttctacaaaaaataaaaaaattagccgggtgtggtggtgtgtgcctgtagtcctggctactccagaggctgaggtagaa

SEQ ID NO: 62885 - DNA, 717 bp, Homo sapiens
ggactgggagatggggaggtcccgggcttggattctactcaagcaatgccatcagctgggtgtccaaccttgagccccttttaaagtttcctcatctttaaaagggactgataaaacttaacatcccacttcacgtgcttttgctgacacacgaagttgcttgtgttacatgtctgtcctgtgtctgacatatctgacatggagatgctacaagttcatttccatcccccagacaatttctagatcttccttttagtctatgctcgtctcagtggcaggttaattttcagttcacttctctttgaagcctcaagcaaaagaaacaaataatctttttttgtatttttagtagagacggggcatacaaaaattagccgggygtggtggcgtgtgccgatagtcccagttactcggcggcctgaggcaggagaatcgcttgaacctgggaggcagaggttgtggtgagctgggattgcgccactgcactccagcctgggcaacagagcaagacttcgtctcaaaaaaataaaataaataaaataaaaataattggatatcaagaatttattctgaaaagctttcacggaatatcatcagagggtgacggtacatgtgatctgccaaactaggatatttttggaagtggaagggatgctgcttgtgatatgttgggatggccggcagactttggggttgcccctggcaatggaaacatat

SEQ ID NO: 62886 - DNA, 717 bp, Homo sapiens
ggactgggagatggggaggtcccgggcttggattctactcaagcaatgccatcagctgggtgtccaaccttgagccccttttaaagtttcctcatctttaaaagggactgataaaacttaacatcccacttcacgtgcttttgctgacacacgaagttgcttgtgttacatgtctgtcctgtgtctgacatatctgacatggagatgctacaagttcatttccatcccccagacaatttctagatcttccttttagtctatgctcgtctcagtggcaggttaattttcagttcacttctctttgaagcctcaagcaaaagaaacaaataatctttttttgtatttttagtagagacggggcatacaaaaattagccgggtgtggtggcgtgtgccgatagtcccagttactcggcggcctgaggcaggagaatcgcttgaacctgggaggcagaggttgtggtgagctgggattgcgccactgcactccagcctgggcracagagcaagacttcgtctcaaaaaaataaaataaataaaataaaaataattggatatcaagaatttattctgaaaagctttcacggaatatcatcagagggtgacggtacatgtgatctgccaaactaggatatttttggaagtggaagggatgctgcttgtgatatgttgggatggccggcagactttggggttgcccctggcaatggaaacatat

SEQ ID NO: 62887 - DNA, 1250 bp, Homo sapiens
tgcataggccagtttcatccttatgtggcagacagaaattaacaaaggagcaaataagaggtgcgagggctctatgtacaatttggtagccactagcctggctatttaaatctaaagtcatggaaatgcaataaaattcaaaattcagttccttggtcacacatatttcaaatgctcaacacttacacatatccagtggcagtcacttcgggcagtgcagacacagaacattttcatcattgcaaagttctactgggcagccctggtctagagtgttgtggctcataatggaagctccagggtttgaatcctgatctgacactcaccagatgggagaccttgagcaaatttcttaacctctctctatcttgggttattgatatataaaatgtggtcaatggcaataccaatctcaaggagtttgggagaagatgaattaattctaggatgtttagaacagtgtccatcacataataaacatctgatccattgatcatatctactattataaatatataaaatgatgggaggtcatgataaatgctgtaagggaaaataaagygaggcgagtggttggatgtgacagggtcttgcttagacgaaacagtcaagggtgtcttcttgagagggtggcctctgaataaagtcaggaagccagacctgtggataactgggggaagaacatccaggcagaggccgtgagcaaagaccccaaggctgggtcttgcttggcatgtcccaggtacagcagaggccagtgtagctggaaaggagcaagtgagggagagaggaggcagatgggcttggagagatgctagaggaccatggtgaggacttgcactgcattgaatgtggtgggagcacctggtgggttttgagcagggacgtgttggggtctgacttatattttagagtcaccctggctggccatgtggggctagaagaccccaggggaggagatggaggctgggaggtctgatagaaggctgctgcagccagcaggccagtggagacaccaaaagaaggggcagtgggtaggctttgcattcagggcagctctcacactggctgtcccctctgcctggagcaggctttgcccagatgtcctcctggctcactccctcacctccttatgtcttgactcagaggtcacccttccagattagactgcctgaccccttctgtgctttctgttttctccttattacaaatgaatctgcaccatatttcactgattgtgtttgctgcat

SEQ ID NO: 62888 - DNA, 1100 bp, Homo sapiens
tgcatatgtagaaatacatttaccttacaataggacatagtatttttattttttaaaatgcagtttttttttaaagaaaatttgcagaatttactacactaaacccttcacttttttcatgccactgtacaatttttcctacagctgtgcctggaccaaagagagctcaaagaaaggctaagaattcacttctgggacttggaaagcttcaaaagagtgaaccagaactagggggaacattgatccyggatgcagctggctggcagaggtgctggtgtgctgtttcttcagaggtttcaggaaggcccccccatcccaaaatcacccttccttcacctgggaagtcaatgcctgagactccaccattacagatacaatgcaaaccttcctgggagacaaaactcctcatatacaccttaaagtgagtttttatgatcttttcaagagggtcaatgttgagaagaatccaagtggagaaaggatgaggttggttgagggtagcaccaaaagattctctttttcactcagaataggcgctgcaagtctgtcctgctggtgatgcacatactggagaacaagagggtggtggagaaaattatgtaaacttccagggagaaaatctgggcaaggggaagggcatggaggtgggtggtcaggtatatcggggcatattgtggagagaagtgtaagaagtatgtggttactttggtagtggacactagagagacactgaaggttcttgaggaggagagtgacataatccaaaagtcaaatctgatggctatgtggagaggcttgaatggagagactggcatcagggactccagggaagacataatgaagggctgaacatggccataaaggaataggtagaaaggtcacaagaaaggcacaaagtagaatccaggtgaccttgtccccaaagacatgtaggaagaatgctgatttctttaaagggaactagaaagtgaggccagaaaactggtttatagtgaagaaataccgagtttaaggtacttgtaggtcatccaagtggagataatattattgtcattagtattggctgacaaacattaagagattactctctaccaggcacc

SEQ ID NO: 62889 - DNA, 784 bp, Homo sapiens
tcagctggatccatggagaaataaaatgtattaatgcctatctttggactacaaatccagtggccatatctactgaaaaaggacaaatcagaatcagccaccagaagttcttcttcatagactatcatctgacctgtttcctcccctgtgcctcctttgcttaagctcccagtttgatttctgggttgcaacacaaacctgagaaggagggtattcctggacctgacttacttcaccagtgtatgaaattccatagaagtgtgacctgaaagaaaatctgaaggttatatgccagggaggatgattccaggaaaacacaatcagaagacataaagagcaaattccagaagaataaaatcaagaagccatgacgcataatatgtcaaggctttccacattacatacacagaaaaaaaaaaaacacatactccttaagttttgtctcaacagtgctatgggttttaatatggctcagatcaacatgtctcttttttaaggtaatttgaataaaagagaaaactamaatagcttgcagacccaaatgtaaattagacttcagcaaatatctgaataaatacagcatctgtttctccaacacctaaaattagagccattgaaaatttgccttcattcatactagattggattattagacataaggcaactctatttccaggctaatgcaaatgatacctgagcagtctgttctaattgtagttcacagtagaccactcccattttaaatgaccttagtattaatattttatttttatatttttatgca

SEQ ID NO: 62890 - DNA, 689 bp, Homo sapiens
atttgtcaggtgttctgggcagtggtttcccctgggtagtggcctcagcagggagatacgccccatccttcccagattggccctgagaagggaagtaggctccacttccacaccattccacaaacctgcccttctcactcctctcagtgctctgagagtgggggctcctctcctacataagtgcagaccacagatcctagctcaacactcccaacctatgtccccagcctggaggctccgggactggcctgcagcttggggttgagttccagatgccctatggaatttaaaatgctctcaggtcaccaggaaagtattcagttgccccaaagcacccagactggacaatggaggctgcactgtgcacatatccctgcaggatggccagtcaggggacctgggaggggctgactaggaggagggccttcagaataagcatgcccttgtctgatggggaagtcaatcctgctctctctttgcctgcagtcaactggagscagaacttctcagagggagatggggagtcctggtggatgtgtgcctatggccaccctctgccagagctgctccgtgcttaaaagcccctgggctccaagtgggctgaagccctacctctacctactctccaggcacatcctcctgccagctcaaacacccatggaagaagtgggggctctgtagctaggatc

SEQ ID NO: 62891 - DNA, 1249 bp, Homo sapiens
  misc_feature (1)...(1249): n = A,T,C or G
tttgtgtaaggttgtggtggcctttgtgcaaggttgtggttttgtagagtctttttttgctatcaggcatgtaagcacgagaaccttctcttcatggcctttccaggctttgtttgtcaggattttcccaatggagtcattagtgattccattttgattctgacaactttcataacaccaagctaactgctgaaatatagaaagcttgtttgttgcgtatttatttctgcattctatctgcaagcctatatggataaaatagataccagactcttcattgtccttgtacactagttccattttgtttcactacaggactgattacctagtaattttattcctaggattctaactcacacaaataattctagatgctcatatatttgatgtataaggttgctcaccatgttatatatcataataatgcttaaatatattatggtataattattagaagaaataatatggaaaccttgaaatagatttgtagggatccaattgtcatgtataattggaaagtaggaaagtaaattgtatcaacagtctgaagtgwttttattaaaaatacaaatagactgcacacacagagaagactggaaagaagcacattatgtttgagaggttattaatatgtggtaaggttttaggaattcttattatttgcatgttttacaaaagttctatttattattactttgtaatatatagagcttttataaaataaaaaggtaattaagaaaacaacaataatctgtagaattagccttctatttatatatatgtctaactctacatacttccttgccaaattaacaattttgcactttaaaaataaaattgacctaaagggcctagcattggtttgaacacaaacattttagaaatatctgaatttagaaattacttagtccactgcatcgctctgaaagaatacttgagactgaataatttatatattttaaaaaatgtttatttggctcactgttctgcaggttgcaaaagaagcatggtgccagcatctgtttctggtgagggctataggctgctgccactcgtggcagaaggggaagaggagccagtgtttctagagatcacgtgatgagagaagaagcaagagagagaggagggaagtgcagagtgagaattcnnnnnnnnnnnnnnnnnnnnnnnnnnnnnnnnnnnnnnnnnnnnnnnnnnnnnnnnnnnnnnnnnnnnnnnnnnnnnnnnnnnnnnnnnnnnnnnnnnnntt

SEQ ID NO: 62892 - DNA, 1178 bp, Homo sapiens
gtgtgtttcacgtacaataaggaaagtctccatgtcattctgctcaaatctgtattacctttcattggttcttttacataaggagaacatctggctttatcaccattcaaatgcatgaagtactcttttggatgcttattcttaaaggtggctgagtggtcaagtgctggcagtctggtagtttaccaaaggtctgtggtctagtctgctgtgatggctgtcgaaatttgtccagagctgttcaaccatcaggcctgcaattcctgcacctttactatcagttgaaactccaaagctgagaacaaaagaggatacttcttcccatgtttaaaagagagatcagagaagctgtgttggacttgctaaatgatgaccctaaaatagtcagacaccttagcccaccacctaccacaaggctgtataagaggcagaggggagagtgattcttggatgactttgagagaacaggtttttggagagaattgtcagagacccctgctattttccagctctatagaaaggggggaaatgtgcttcctagtcacctcaaaacaacaagagagcttcaaccctatcacttggaaaacttgatctcagattctgggagttcatgggttgctagagtcagtgcctgattctcaactggaaatgtgtgaaaattaaaaatgcaacaggaggcatcttgatatatraatgatgggtgtgagatgggcaagcatgtgtatgtatactccttataagccacattgacccagggaggtccccaagtagcgggacatgaaatgtttgcaaaaaggatccagcagaaagcaaaaagaagtttgacctattataaaataaatgaattcaaggagagtctaagtcatcaggaatagaataacttttctattttctgtgtggttatgcaaccaataatatttagttagacttattgtattttgagtttggcttttcagcattgaatcttttaaatttaaattagtgttacagtcatggaaacaagtagatgattgaaaagccaaatctacaaaacaaaatatattcaatgacatctagctgatatcctgtcccttctgtcctgctcctgcactctgtttcctcttctcctataggtaactattattttgtggttgcatttgaatacacacccataatatatatgacatataatatttaca

SEQ ID NO: 62893 - DNA, 1178 bp, Homo sapiens
gtgtgtttcacgtacaataaggaaagtctccatgtcattctgctcaaatctgtattacctttcattggttcttttacataaggagaacatctggctttatcaccattcaaatgcatgaagtactcttttggatgcttattcttaaaggtggctgagtggtcaagtgctggcagtctggtagtttaccaaaggtctgtggtctagtctgctgtgatggctgtcgaaatttgtccagagctgttcaaccatcaggcctgcaattcctgcacctttactatcagttgaaactccaaagctgagaacaaaagaggatacttcttcccatgtttaaaagagagatcagagaagctgtgttggacttgctaaatgatgaccctaaaatagtcagacaccttagcccaccacctaccacaaggctgtataagaggcagaggggagagtgattcttggatgactttgagagaacaggtttttggagagaattgtcagagacccctgctattttccagctctatagaaaggggggaaatgtgcttcctagtcacctcaaaacaacaagagagcttcaaccctatcacttggaaaacttgatctcagattctgggagttcatgggttgctagagtcagtgcctgattctcaactggaaatgtgtgaaaattaaaaatgcaacaggaggcatcttgatatataaatgatgggtgtgagatgggcaagcatgtgtatgtatactccttataagccacattgacccagggaggtccccaagtagcgggacatgaaatgtttgcaaaaaggatccagcagaaagcaaaaagaagtttgacctattataaaataaatgaattcaaggagagtctaagtcatcaggaatagaataacttttctattttctgtgtggttatgcaaccaataatatttagttagacttattgtattttgagtttggcttttcagcattgaatcttttaaatttaaattagtgttacagtcatggaaacaagtagatgattgaaaagccaaatctacaaaacaaaatatattcaatgacatctagctgatatcctgtcccttctgtcctgctcctgcactctgtttcctcttctcctataggtaactattattttgtggttgcatttgaatacacacycataatatatatgacatataatatttaca

SEQ ID NO: 62894 - DNA, 568 bp, Homo sapiens
tcgcttagtctctcaccttcccccattagaacatgagctccatgagggcagggatctttgtctggctgactgctatgtcccagtgcctggaatgcagtatccacacatggttggtgttcaaaaacacgtgttgcatgaatgaatgaagtaattgtgtggagaggcatcagagtaactgaagacaaagatcattacaaattatccacttctaaacttctttgataacagacaytgcattatctgtgccctgagacccccctcagattcaatgacttactggcaggactcacaggactccgaaaagctgatatactcacagttatggttcattacagggaaaggatacagatgaacatcagcaaagggacaaagtaggtggcgatgtccaggagaaatcaggcaatcaggctcaaccttctaggtgtcctctcccagtgggcctgacgggaatgcagttaattcccccaaaaactatgcatgacaacacgtgcaaaatattaccaaccagggatgagccttgttgtccaggggttttatgtggtggcagtacccacatgacttattttag

SEQ ID NO: 62895 - DNA, 1078 bp, Homo sapiens
taaagattttcaaaagtgcgtttattgtgctgcggtatccacatattaacttctcttacatagcagaactacaaatagagtttattagtttcttagggctcagttcctttaaaatagatttcaccaaggtaggtctacctttggctgttataccttttcccttttctcttagggaattattttattgctttatattcttgaaggaaatttttaatgttcttgttattggaattataaacgcaacctttgaacagtctcacatggtttcaggggagacattgttaccctttgtgaagcaaaatagaaaatactgccgtttgattatttataaaatactcctttcttggtgaatatggaaggcmtgactgagtgatgtactgttgcttacagagagaagagggttagtccctttttattattataaagttgcaaaatggaatatgtgtatgctgttacttagtgatggtgattttgttacgaatgtgtttacagttttaaaaaagacagcttacatggccactattattatttacaattttaaagatgacccaaatatgccaagattttcacatacttttgctacttatccttaaactctgaagactgctgatatttttgtgttttttattctcaaaggaaattgttaacagtgtcagacagatgatcctccatgccccttagataccttcatcaattctgggcctcagatctgggctgtagattaggttagatggttgtaagtcccagttttcagagacaccccagtttatgtcattagtccaacaagatcaattctagtaccccttcttgctctcaaaattgtactgacttaaatggcagattatacaaattatagggcccatccttcagtcgaatgcaacagctttgctttgctgcaaagcaaatttaaagaggatttccaatttaaaaaagtctcctaccctaccatcaccaactttttcccacgaattttctacataagtgaacatttcttacatgtgttggccagattgtttctctgaccaattatatgacaaagtcagaatttttcatgttagctagaacttgaatgtcccta

SEQ ID NO: 62896 - DNA, 945 bp, Homo sapiens
ggtagcaaatgctagttgccacggcaggatggaaaaattacaaagttcctgagctatttggaaagctcactatatcacaaaacaaacatagctttttaaagttaaaaataaaatccctgtcagtgaaactgatttatttcaaatagtaagtagaaatgatcattttcctaaatgaaatgctaaacgatgttgggatgttacggaggcaacagttcaataaagatttcagagtcaatgctcaaaatgtcagttatatacaaaattttagaattatttattcatgcaatatattgaacacttactatgtgacaggtgctagtttacttacttgggaagcatcagtaagcaaagtgtataaaaattcctgcccttccagaccttacattatagtggcggaaatgcgagatgaataataaacatttttttaaaaagtcagctgtacaatatcagcagttgataaatgctacggaaaaaataaaataggatgaggacaataaggatgctttacgaaggggcctcattcctagccacttacggatgtgtgtgtcattgtgtgtgtatgtgtgtctgtgtctatgtttmgtgatctagtgagatcagagagggaataatgaaccaaactcctacactgacttctcttgtgtctgccccttaagcactggtttccctcatgtgtttcagactttctgagtcctcactggacctcctacctcacatagttaatgacaccaaagccaaaaccttccagccatcctcttggacctcctgtatccattactgcattttgttgatgctgtctcttactcctttcactctcatattgtttcatttcaagccctacttctcctttgcctaatctatgacaaaagctctcaggagtcctacctttatctataataccttcattagcattatttcctgctaattccctttgctcactggaga

SEQ ID NO: 62897 - DNA, 1758 bp, Homo sapiens
tggttcatatttggaatttactaactttgttcttgtttttgttcttctttaagatatattaaggttccaaatcctcataaatggaaaacacagagagtaaagggatgttgttcactgatcatgttccttttttttctttcttttatccatttaattagttatcattaatttagatagttcccaaaggcattttcctcaggaagtagctgaactcaggaggctgagatgaaaggattgcctgagcccaagaggtcaaggctgcagtgagctgtgatcgtgccactgcactcaagcctaggtgacagggcaagatcctgtctccgaaaaaaaaccaaaattgtcatggaacaaaaggtaaaaatagggctgggcatggtggctcatgtctgtaataccagcactttgggaggccgaggcaggtgtatcacttgaggtcaggagttcgagaccagcctggccaacatgatgaaaccccgtccctactaaaaatacaaaaattagttgggtgtgtggtgtgtgcctgtaatcccagctactcaggaggctgagtcaggggaatcccttgaacctgggaggtggaggttgcagtgagctgagatcatgcccctgcactctagcctgggccacagagcaagactccatctcaaaaaataaataaataaataaataaataaataaataaataaataaatgtgatgaaactaatatcagatgaaagtattttcttcatttgcttatttactcattcagtcattcctactaactcatttatttgtccatgcattcatgaaggccaggcactgtgatagcagctagaaacataatgataaaccaaatagccttggtccatgtcctcatgtagctcacactgtagacaagaggaaaaatgatattacatgcaatagaagtaacatgtaagaaatcctatgatactaaaataacaggatgccataggagcaggtaaatgtcccccagttgtctagtgtggtcatggaagaacataaaccaatttgtgactcatgaagtctcctggtattgaatcccatttcctttttaattaaaggtgcaagaattcaygtgattcagaaactgaatagcaaaaaattgagatgaatatattactctataaaaatgaatctgaaacatcagagtactaaagaaccaactgaaaaatatttttaagtatgtggattcctgggcctcatgcctcccccaccaaactcccatcctctagcccagagattctgattaaataggattggtgtggggctcaaaaatttgtatgtttggtgggcatgaaagctgattctcatggtgggtgaaaaggctatgagactcatagaatcactggtttaagatacctactatagaatattttaataaattattcccttttaattgaaaaataaatgctatacctctgcatcgttttgtcaattcatcactctggctcattctgtcctaaaatgtgagtttataaagaaatgataatattactgtaataattttccatttctatctcacattgtaattcataaattaattaattcctttattcattcaccaaaatgccaatgcagcatcaggatttgtggcaagtgctaggaattcagaaaacaatcgtatatgctccctctcctaaagctcatacacctggcatgaaacaggcacagtgtggtgttcctgctaccatgaataggaagaaaggtggcataaaaaagggagaggtcagtttttctcaggggtgaggggacatgc

SEQ ID NO: 62898 - DNA, 1758 bp, Homo sapiens
tggttcatatttggaatttactaactttgttcttgtttttgttcttctttaagatatattaaggttccaaatcctcataaatggaaaacacagagagtaaagggatgttgttcactgatcatgttccttttttttctttcttttatccatttaattagttatcattaatttagatagttcccaaaggcattttcctcaggaagtagctgaactcaggaggctgagatgaaaggattgcctgagcccaagaggtcaaggctgcagtgagctgtgatcgtgccactgcactcaagcctaggtgacagggcaagatcctgtctccgaaaaaaaaccaaaattgtcatggaacaaaaggtaaaaatagggctgggcatggtggctcatgtctgtaataccagcactttgggaggccgaggcaggtgtatcacttgaggtcaggagttcgagaccagcctggccaacatgatgaaaccccgtccctactaaaaatacaaaaattagttgggtgtgtggtgtgtgcctgtaatcccagctactcaggaggctgagtcaggggaatcccttgaacctgggaggtggaggttgcagtgagctgagatcatgcccctgcactctagcctgggccacagagcaagactccatctcaaaaaataaataaataaataaataaataaataaataaataaataaatgtgatgaaactaatatcagatgaaagtattttcttcatttgcttatttactcattcagtcattcctactaactcatttatttgtccatgcattcatgaaggccaggcactgtgatagcagctagaaacataatgataaaccaaatagccttggtccatgtcctcatgtagctcacactgtagacaagaggaaaaatgatattacatgcaatagaagtaacatgtaagaaatcctatgatactaaaataacaggatgccataggagcaggtaaatgtcccccagttgtctagtgtggtcatggaagaacataaaccaatttgtgactcatgaagtctcctggtattgaatcccatttcctttttaattaaaggtgcaagaattcatgtgattcagaaactgaatagcaaaaaattgagatgaatatattactctataaaaatgaatctgaaacatcagagtactaaagaaccaactgaaaaatatttttaagtatrtggattcctgggcctcatgcctcccccaccaaactcccatcctctagcccagagattctgattaaataggattggtgtggggctcaaaaatttgtatgtttggtgggcatgaaagctgattctcatggtgggtgaaaaggctatgagactcatagaatcactggtttaagatacctactatagaatattttaataaattattcccttttaattgaaaaataaatgctatacctctgcatcgttttgtcaattcatcactctggctcattctgtcctaaaatgtgagtttataaagaaatgataatattactgtaataattttccatttctatctcacattgtaattcataaattaattaattcctttattcattcaccaaaatgccaatgcagcatcaggatttgtggcaagtgctaggaattcagaaaacaatcgtatatgctccctctcctaaagctcatacacctggcatgaaacaggcacagtgtggtgttcctgctaccatgaataggaagaaaggtggcataaaaaagggagaggtcagtttttctcaggggtgaggggacatgc

SEQ ID NO: 62899 - DNA, 611 bp, Homo sapiens
agccctcttgagctggggtctagcatgagaaatttttgtgttgggtatgaaagaaatccttccatcctccttcttaacagtcacacacttttaatgaacttttgcttaatgtactgccaacaaagaaaatagttacatcttttggggatttacactagtcattttgagaactgttgctgtaagacatgaagccttattgaaaggctctatggaaagaatgacatgtcggagacagttgccacwccgccatcataagttaccatggctcctgggaagcaactaaagcctaacccacttccacttccaccatcctgagctagggcatacatttttgctgttggagaaatttggggattttaaactgggtaagagtgaaatctagatgttcagtctggcttgtgggctctgctgtagtttatattgggtgtatctcctgttgataacacattcagtaatgtgagagatgataacaagaaatatttctgtagaggaaagatcatgacatgcagcctccagaagcctggctgccattttacttccagatgtgaggactgggtcaatcccttcacgtcttctgagatacaatttatttgattgtaatattaagataa

SEQ ID NO: 62900 - DNA, 611 bp, Homo sapiens
agccctcttgagctggggtctagcatgagaaatttttgtgttgggtatgaaagaaatccttccatcctccttcttaacagtcacacacttttaatgaacttttgcttaatgtactgccaacaaagaaaatagttacatcttttggggatttacactagtcattttgagaactgttgctgtaagacatgaagccttattgaaaggctctatggaaagaatgacatgtcggagacagttgccacaccgccatcataagttaccatggctcctgggaagcaactaaagcctaacccacttccacttccaccatcctgagctagggcatacatttttgctgttggagaaatttggggattttaaactgggtaagagtgaaatctagatgttcagtctggcttgtgggctctgctgtagtttatattgggtgtatctcctgttgataacacattcagtaatgtgagagatgataacaagaaatatttctgtagaggaaagatcatgacatgcagcctccagaagcctggctgccattttacttccagatgtgaggactgggtcaatcccttcacgtcttctgagawacaatttatttgattgtaatattaagataa

SEQ ID NO: 62901 - DNA, 653 bp, Homo sapiens
aggtaggggtgaggagggaaatcatgaggtttattttttattttattttaactttttgtaacacattaagtgtgtgatgcctctttagatagccaagctgttttacagttgaacagtgacctgaggtatgactatcctctttaatgtcaattgctctatgctcgtattttttaactggagacttcgctgtcaagaagattaattggttatagaacagtatgtattgttagaaggttttccttgtagggaattaaaaggtctcttaaatttctacccatggatcttgattatactttttttgstcaaaaagcattagtcttatctctcttctccatcatacacctttggctattaggaggtaaactagcctaacttatctagatccactctttccaaggaacagaaaggaggattggatcatgtaatgactaggtcttaaacatgtttttatcattttctttttaagtcttttcttctgtagggtgccaaccatgtctgtgccaagcactttatgtaggtcatttcactagtcctcacaagtcttttaagcacttatctgtgttccagcagcagcagcagctgctgggagcttgttagaattggagatctcagttatgtcccagacccactgaatatgaatctgtatattaaca

SEQ ID NO: 62902 - DNA, 653 bp, Homo sapiens
aggtaggggtgaggagggaaatcatgaggtttattttttattttattttaactttttgtaacacattaagtgtgtgatgcctctttagatagccaagctgttttacagttgaacagtgacctgaggtatgactatcctctttaatgtcaattgctctatgctcgtattttttaactggagacttcgctgtcaagaagattaattggttatagaacagtatgtattgttagaaggttttccttgtagggaattaaaaggtctcttaaatttctacccatggatcttgattatactttttttggtcaaaaagcattagtcttatctctcttctccatcatacacctttggctattaggaggtaaactagcctaacttmtctagatccactctttccaaggaacagaaaggaggattggatcatgtaatgactaggtcttaaacatgtttttatcattttctttttaagtcttttcttctgtagggtgccaaccatgtctgtgccaagcactttatgtaggtcatttcactagtcctcacaagtcttttaagcacttatctgtgttccagcagcagcagcagctgctgggagcttgttagaattggagatctcagttatgtcccagacccactgaatatgaatctgtatattaaca

SEQ ID NO: 62903 - DNA, 651 bp, Homo sapiens
ataggataaagaggggaggattgctagaatgatatccttggttgagaagttgggtacatttcccgaaagttcagtgtaggcatttaggcaccaaaggcacatagatgatatttaaaaccaaaaaatctagatgagcttactgtcttagtccatttgcactgccctagcaaaactaccataagctgggtagcttatgaacaacagacatttatttctcacagttctggaggctagaaagtccaagagcaaggagctggcrgatgctgtgtcaggtgagggcgtgttcctcatagacagcaccttctctctgtgtcctcacatggtggaaggggtttctttcataagggcattaatcccattcatgggggctctgctctcatagtctagtcacttccccaaaggccccaactcttagcattatcatactagggattaggtttcaacatacaaatttggggaggacacaaacattcagatcttcacacttaccaaggggtgaataaaaatagaaaagaagtcaaacaactggttagaagtcagagaaatgtgcaggaaccaataaggagactgagagggaccagaaagtaacgtggagaaaaatcaagaacatgatggcttggaaattaagaaagtattcctaggtggaaggaa

SEQ ID NO: 62904 - DNA, 1119 bp, Homo sapiens
tgatttggaaagggacaaactaactcgatagaaccagtaggtaaaagatataaacagaaaattaataaaagaaatattcatgaccactactcatttgaagaagtcaaactggcaagtaactgaagaaatgcaaatgaaattaaaataaaaaataggtgggtttttaaaatacatattacttggtaatggtgtggagagttaggcattattatttgccactggtatatatgcagagaacactttggaaatattgaccatcattttacataggtatatttatggcccaaattttcagtgttagaaatgtagcatagagaaacacaagattttaaaatatttatgtgcaatattttcagtgcagcattatttataataatgaaaaactagatataatctaaatgtccattattagaagacaattacataaaagtttctatacacataaaatagaaaatctacagctcttaaagtcaaatgaaagccaaatgtcttatgttgtctatagtacgctgctaaaacaagtgacactacacccagcagactgctaaaatsagagacagaaaatatcaagtttatgcagaatgtggaggacgaaaagtacctctcaaacactggctggtaggggtgtattagtcagggttctccagagaaaaaggatcaatagaatgtgtatgtgtaagaagaggtttaagaaatttcgctcgtacagttgtggaggctggcaagtccaaattctgcagagtaagctggcaggctggggactcagagaagagtatgaagtctgtctgctgacagaattctcacttcctccaggcaggtagggccttcaactgattatatgaggcccacccacattgtgaagaataatctactttactcaaagtcctgatttaaatgtcaatctcatctaaaatataacttcacagaaacaccgagagtaatatttgatgaaatatctaggtaccctgccatagcaaagttgacacataaaattaaccattacaaggagtataaatggtgtttggaaaatgtctttgaaatgtagaccaaagctgaatattataaaagtccacgactgagtaatctcatcctttgtcttatagtcaacagaaatgcaca

SEQ ID NO: 62905 - DNA, 1478 bp, Homo sapiens
gtttctcacctggagaaatagttttctcgaatattctcccaacctaagtacttaccaaaacagcatattgtggttggattgttaaaaatgggatgagaaaatggcctttctcttgatattgctatgtataaatattggaaatgagctattgccttgcaaattatgatgtacgaattgaaaacaatttattatataaaaatccatttatccaaaagataaattaaagaattatttgatttataaagagtgtcacactgagccagacttaaatagcatatccttgatatattcaagatggtcgtgtggggtgaagtcatctgctaaaattttaaagtttatatcagattttycctaccagaggcttttttttcctattgaaaaagaaaaaaatattgttttccattgccggtggttatattaactaagtttattgaatgatcattgatatattacttcaaagtggataattgggtagagaaatactgatcccagtggtttccagggaggtttaatgtccagcctatgtgcatctcattgctggatgtgatgtgctgaataaaccacagtcccttatctcacaagctggagtcccaggaagatgtcttaagtcggggaagttcgtccttaagcagcagaagcaagacaattattttgcatgctttgcccaaagcaagtattagtattgaaacatctcacttccttgcctgtgaccagaccacgagttctccttgttatcccacataagcagttgtctttggctttacaagagaagatggatgaggcctatctctgaatcacatctttttggccagttttctgcttctactccttttaatccgggagctggatcctgtgttctcagattctcttcagcccctacaccaggcaacccctgagaaagagtcactaagtaggcttcttacaagaggaaatctgattccttggcggaggaatagctagagataggagtcgaccttgctgctctgagttcctgatagcagtgctctgctttcttaaactaggacacaagggttttgaagtagccccatgcccctgtggctctttggtttttgttggaaagtagccagctcatgaggacaggggtgggggttttcgagtgcaaggtgagaggaaatgaggccaaagattacatccaaagtgcaccctctccttcaggacacttctcccttcatttccaaatctcccttcatttccctccttccttgccttgccgacattaattcttacatcagatgcatttgtcttcatccctctgaagcaagagtgtctttaatctcggaaccctaaaagctgagtagtagaaaagctgcaccacacaacgccgtgtgaataatgtccctgctgttgatagtgtgaaccagaacaaccatgcacagcagccctgagacatgggttcctagagagagtcatctcggtaaatggatgacttctttttctggaaaggaatccacctgaat

SEQ ID NO: 62906 - DNA, 1478 bp, Homo sapiens
gtttctcacctggagaaatagttttctcgaatattctcccaacctaagtacttaccaaaacagcatattgtggttggattgttaaaaatgggatgagaaaatggcctttctcttgatattgctatgtataaatattggaaatgagctattgccttgcaaattatgatgtacgaattgaaaacaatttattatataaaaatccatttatccaaaagataaattaaagaattatttgatttataaagagtgtcacactgagccagacttaaatagcatatccttgatatattcaagatggtcgtgtggggtgaagtcatctgctaaaattttaaagtttatatcagattttccctaccagaggcttttttttcctattgaaaaagaaaaaaatattgttttccattgccggtggttatattaactaagtttattgaatgatcattgatatattacttcaaagtggataattgggtagagaaatactgatcccagtggtttccagggaggtttaatgtccagcctatgtgcayctcattgctggatgtgatgtgctgaataaaccacagtcccttatctcacaagctggagtcccaggaagatgtcttaagtcggggaagttcgtccttaagcagcagaagcaagacaattattttgcatgctttgcccaaagcaagtattagtattgaaacatctcacttccttgcctgtgaccagaccacgagttctccttgttatcccacataagcagttgtctttggctttacaagagaagatggatgaggcctatctctgaatcacatctttttggccagttttctgcttctactccttttaatccgggagctggatcctgtgttctcagattctcttcagcccctacaccaggcaacccctgagaaagagtcactaagtaggcttcttacaagaggaaatctgattccttggcggaggaatagctagagataggagtcgaccttgctgctctgagttcctgatagcagtgctctgctttcttaaactaggacacaagggttttgaagtagccccatgcccctgtggctctttggtttttgttggaaagtagccagctcatgaggacaggggtgggggttttcgagtgcaaggtgagaggaaatgaggccaaagattacatccaaagtgcaccctctccttcaggacacttctcccttcatttccaaatctcccttcatttccctccttccttgccttgccgacattaattcttacatcagatgcatttgtcttcatccctctgaagcaagagtgtctttaatctcggaaccctaaaagctgagtagtagaaaagctgcaccacacaacgccgtgtgaataatgtccctgctgttgatagtgtgaaccagaacaaccatgcacagcagccctgagacatgggttcctagagagagtcatctcggtaaatggatgacttctttttctggaaaggaatccacctgaat

SEQ ID NO: 62907 - DNA, 678 bp, Homo sapiens
gatttgacatttttataacattgacttcctaatggggaagtttaaccaggtcttgtgcattcttcagaaatacattgcattttcttcataaagatctttaactttgttstaaaatttattctaaggtccttataactttgtcacaaatctgagtggaattttaaaactccatttctttttcttactgttaattacttaatgaattaattcttactgttaattactgatatttttcaaaagctgttgatttcctaatatgaataactagcttgctaaactcttatcctaatagttcgtatttaatttcttaggtgtgtaggcgtaaacaagtaaaattttcttcttttctaataagtatattgtttctttgatttttatcttattctattattttatatccctaaaacaatattgaataataatgctaataccaggcaatatgtctttttcttgaatttacggggagaccttaatattctttcatcctttatgaaagatggtgttttatgttcgtttctggcgtttctttattgtgttttaaaaggtgtctctctatgaaattttagagtgtttataaagactggctgccctgttatcacatgcatatgcgtcctattaatacaacagcttttctgttttagttagcactgtaataaaatcaatgggcttttgtcctgt

SEQ ID NO: 62908 - DNA, 678 bp, Homo sapiens
gatttgacatttttataacattgacttcctaatggggaagtttaaccaggtcttgtgcattcttcagaaatacattgcattttcttcataaagatctttaactttgttgtaaaatttattctaaggtccttataactttgtcacaaatctgagtggaattttaaaactccatttctttttcttactgttaattacttaatgaattaattcttactgttaattactgatatttttcaaaagctgttgatttcctaatatgaataactagcttgctaaactcttatcctaatagttcgtatttaatttcttaggtgtgtaggcgtaaacaagtaaaattttcttcttttctaataagtatattgtttctttgatttttatcttattctattattttatatccctaaaacaatattgaataataatgctaataccaggcaatatgtctttttcttgaatttacggggagaccttaatattctttcatcctttatgaaagatggtgttttatgttcgtttctggcgtttctttattgtgttttaaaaggtgtctctctatgaaattttagagtgtttataaagactggctgccctgttatcacatgcatatgcgtcctattaatacaacagcttttctgttttagttagcactgtaataaaatcaatgggctkttgtcctgt

SEQ ID NO: 62909 - DNA, 1277 bp, Homo sapiens
attaagtattgcagatttaaacaacaacatratagacttaaaaagccaagattagatttacaatacgctatataggaaattattctggtaaataatcgctctcacactttgctgacagcagtgtaaatctggccatttttacattttacttcttcctgtaatacataaataggtgtgcctaccagtgataaaattccacttaaagaaatttattccaaagaaataattagacaaatttgcaaagatttcataaaatgataataatggctaaaatttcttgatcttactatatataaattatctaatttaatcattaaaaactctgggcgatgtatatctatgttatcccagttttataactgaggaatctaaaaatgatagaagttcagtaactttctcaatctaacaataattgtgacatttaaatcaggctgtctatatccttatcaggtcattaaaaccaggtaattttaatgaatatagttaactggcttttagcctccattccacccttcttctgggactttctgtgctgtggaatcagagaagcctactgtctgtactgtggaatcagagagtctataattttatagattatagactgccttgaagctaggattacgggtatgatgggttcatctaagcaggtgcagtaccatgacatttggaaaacaggagtgatctggagactatgtaatacatattagctccttccatgttctgctggcaactacagtgtaggagcattcggtttctagtggcagcatcccaggcaccaatcactagtctcgtggatgctgagaggcaagccccatggcctgtcattgacagtgtacatcttactgtgtggcaaagctctgggtacaccgttcctggctcagcagcttcctgatacttagatgacagcttggcaaaattttctcgggacacacaagtgaggaggcagaagcaccgtcttgactctgcagatcatagccgaagttttctagttctcgggaaaaaatttcagtgggggctgcttcctgacatatggatcacaaataaggcactgtcctcttggaattaacagacacaaggactgcttcctgatagccagacttacagattgagagaaaaatagctattctcctaatgggcctattccctgatattgtctcaaaattatttctgcaggatcagtctagaactcacttctacagccatgttaacaattttgataaaagcctagagctttctcttttctgaaattaatcactggctatacagctagcctggaa

SEQ ID NO: 62910 - DNA, 1277 bp, Homo sapiens
attaagtattgcagatttaaacaacaacataatagacttamaaagccaagattagatttacaatacgctatataggaaattattctggtaaataatcgctctcacactttgctgacagcagtgtaaatctggccatttttacattttacttcttcctgtaatacataaataggtgtgcctaccagtgataaaattccacttaaagaaatttattccaaagaaataattagacaaatttgcaaagatttcataaaatgataataatggctaaaatttcttgatcttactatatataaattatctaatttaatcattaaaaactctgggcgatgtatatctatgttatcccagttttataactgaggaatctaaaaatgatagaagttcagtaactttctcaatctaacaataattgtgacatttaaatcaggctgtctatatccttatcaggtcattaaaaccaggtaattttaatgaatatagttaactggcttttagcctccattccacccttcttctgggactttctgtgctgtggaatcagagaagcctactgtctgtactgtggaatcagagagtctataattttatagattatagactgccttgaagctaggattacgggtatgatgggttcatctaagcaggtgcagtaccatgacatttggaaaacaggagtgatctggagactatgtaatacatattagctccttccatgttctgctggcaactacagtgtaggagcattcggtttctagtggcagcatcccaggcaccaatcactagtctcgtggatgctgagaggcaagccccatggcctgtcattgacagtgtacatcttactgtgtggcaaagctctgggtacaccgttcctggctcagcagcttcctgatacttagatgacagcttggcaaaattttctcgggacacacaagtgaggaggcagaagcaccgtcttgactctgcagatcatagccgaagttttctagttctcgggaaaaaatttcagtgggggctgcttcctgacatatggatcacaaataaggcactgtcctcttggaattaacagacacaaggactgcttcctgatagccagacttacagattgagagaaaaatagctattctcctaatgggcctattccctgatattgtctcaaaattatttctgcaggatcagtctagaactcacttctacagccatgttaacaattttgataaaagcctagagctttctcttttctgaaattaatcactggctatacagctagcctggaa

SEQ ID NO: 62911 - DNA, 1277 bp, Homo sapiens
attaagtattgcagatttaaacaacaacataatagacttaaaaagccaagattagatttacaatacgctatataggaaattattctggtaaataatygctctcacactttgctgacagcagtgtaaatctggccatttttacattttacttcttcctgtaatacataaataggtgtgcctaccagtgataaaattccacttaaagaaatttattccaaagaaataattagacaaatttgcaaagatttcataaaatgataataatggctaaaatttcttgatcttactatatataaattatctaatttaatcattaaaaactctgggcgatgtatatctatgttatcccagttttataactgaggaatctaaaaatgatagaagttcagtaactttctcaatctaacaataattgtgacatttaaatcaggctgtctatatccttatcaggtcattaaaaccaggtaattttaatgaatatagttaactggcttttagcctccattccacccttcttctgggactttctgtgctgtggaatcagagaagcctactgtctgtactgtggaatcagagagtctataattttatagattatagactgccttgaagctaggattacgggtatgatgggttcatctaagcaggtgcagtaccatgacatttggaaaacaggagtgatctggagactatgtaatacatattagctccttccatgttctgctggcaactacagtgtaggagcattcggtttctagtggcagcatcccaggcaccaatcactagtctcgtggatgctgagaggcaagccccatggcctgtcattgacagtgtacatcttactgtgtggcaaagctctgggtacaccgttcctggctcagcagcttcctgatacttagatgacagcttggcaaaattttctcgggacacacaagtgaggaggcagaagcaccgtcttgactctgcagatcatagccgaagttttctagttctcgggaaaaaatttcagtgggggctgcttcctgacatatggatcacaaataaggcactgtcctcttggaattaacagacacaaggactgcttcctgatagccagacttacagattgagagaaaaatagctattctcctaatgggcctattccctgatattgtctcaaaattatttctgcaggatcagtctagaactcacttctacagccatgttaacaattttgataaaagcctagagctttctcttttctgaaattaatcactggctatacagctagcctggaa

SEQ ID NO: 62912 - DNA, 1277 bp, Homo sapiens
attaagtattgcagatttaaacaacaacataatagacttaaaaagccaagattagatttacaatacgctatataggaaattattctggtaaataatcgctctcacactttgctgacagcagtgtaaatctggccatttttacattttacttyttcctgtaatacataaataggtgtgcctaccagtgataaaattccacttaaagaaatttattccaaagaaataattagacaaatttgcaaagatttcataaaatgataataatggctaaaatttcttgatcttactatatataaattatctaatttaatcattaaaaactctgggcgatgtatatctatgttatcccagttttataactgaggaatctaaaaatgatagaagttcagtaactttctcaatctaacaataattgtgacatttaaatcaggctgtctatatccttatcaggtcattaaaaccaggtaattttaatgaatatagttaactggcttttagcctccattccacccttcttctgggactttctgtgctgtggaatcagagaagcctactgtctgtactgtggaatcagagagtctataattttatagattatagactgccttgaagctaggattacgggtatgatgggttcatctaagcaggtgcagtaccatgacatttggaaaacaggagtgatctggagactatgtaatacatattagctccttccatgttctgctggcaactacagtgtaggagcattcggtttctagtggcagcatcccaggcaccaatcactagtctcgtggatgctgagaggcaagccccatggcctgtcattgacagtgtacatcttactgtgtggcaaagctctgggtacaccgttcctggctcagcagcttcctgatacttagatgacagcttggcaaaattttctcgggacacacaagtgaggaggcagaagcaccgtcttgactctgcagatcatagccgaagttttctagttctcgggaaaaaatttcagtgggggctgcttcctgacatatggatcacaaataaggcactgtcctcttggaattaacagacacaaggactgcttcctgatagccagacttacagattgagagaaaaatagctattctcctaatgggcctattccctgatattgtctcaaaattatttctgcaggatcagtctagaactcacttctacagccatgttaacaattttgataaaagcctagagctttctcttttctgaaattaatcactggctatacagctagcctggaa

SEQ ID NO: 62913 - DNA, 656 bp, Homo sapiens
tattctatgaggccttgactagatctgattcatattctagtggattggccttttgtggcctgctgaaaagccatgaaatctctgacagcaagaatgactgcatcacaaatgagcctttctctcatttccaactctgctgtcccctgagactgactttattataagaacatcaaatgcactagcttcaggtattcaagtcttcttgattccatggtgcatgccttgactactaccttmcttctactttgagtttcaaagggcattatctgagtatctgtctttggtcatcactccttattctttttctcacacttataggcatgagaaataacacaggctttattcagtgtttgggaaggaaaccttgatactgatgtagtttgttcatcagaatcctaaacaattttctgaaacacacacacacacacacacacacacacacacacacacacacaatgagggtaccctgaagagctgagtttaatttacagttacaaattaaattaagcttaggctcttctacctagctgtctcttcttttttgagatagcattctttaaatcagtttggtttgagctaaatatttttcttattataagtttcaggaagtgatcaattttgttattatttagaaatgatatttatagatatctatt

SEQ ID NO: 62914 - DNA, 895 bp, Homo sapiens
attcagatatgttttacctgaactgtttcacaagtttctaaatgaactcttgactctcctgtttcctgctctgatccatgtgcacacacgactatgaaagatctttatctttctaagttgcaaaatgactgtgtgtgcctctgcatgaaaccttcaacaacactcctttatctatggattaaaacccacattctctactttggcatgtgtttcttttgccggggctgccataacaaagcaccagaaacagagtggcttaaagaacagaaatttatcatctcccagatctggagaccagaagtccaaaattaaggtgtccgcggcgttgattctttcttagagctgtgagagagccttggttccatggctttctcctggcaggtaacctctggcattctttggcttgtgaatggcattgtccctgtgatttcatattgttttccttctctgtgtctttgtgtccacacttctccttttcataaggacatcacttatattggagtagggcctactctaatgacctcctcttgatcatctgcaaagaacttatttccgaataaggtcacagtcacaagtactgggggttataacttccacatcttttgtgggaaggcaattcaacctataacagcatataaatgcctttgtgaccctggatccaactcttaaaccacatctcctgtcacctctaccacacacacacacacacacagagagagacagagagagacagagagacagagacagacacacacacacacasagagacagagagagacagagagacagagacagacacacacacacacacacactcagactcaccctaaggaacttgctcagcagccacagtaaattatgcaccatgacccacactcctgctcattcatgccat

SEQ ID NO: 62915 - DNA, 666 bp, Homo sapiens
ctgtgactggggatacgggaagaggaggggaatgactacccaaacctaacaattacattgggttctatgtgttttccagaaaacaaaggaccatttcttggaggtgaagatggagagttccaagcagcacttcttccacctctggaacgacttcgcttacattgaagtaagtgcctctggcccctggaggattcgggtttgctcattgagaggtgatactgtgtcctgsggctgctggcacaaattactgcaaactgggagcaaggtgttggcaggggtggtttcctccagggggcttggggcggggaacctgttccatgcctcttctcgctcctggtggctgccagcactcctgagcattcctcagcttgcagacacattaatctctgtctttatgtgggcttttctcctgagtgtctgcgtctcacctctcctcctgcctttcttttgcaaaggcacctatctttgaatttagggcccaccctaaaaatccagaaggtttaatcaaaaaatcttttaacttaattccgtctgcaaagattctattttcacataagcccactttcacaggttccgggtggacataacttttgcagggccactatttgacccactactgagggctacgaggagttaagtggataatggagtttacgcttcaaatag

SEQ ID NO: 62916 - DNA, 1086 bp, Homo sapiens
catcttcatctccaaacctccagtgctcctcccagggcctggtgtacggctgagactatttagtgtttgttgaatgaatgaatgagcacatgagactatttagtgtttgctgaatgaatgaatgagcacatgagactatttagtgtttgctgaatgcatgaatgagcacatgaataactggatgcttggtgaaacacccctgtcttgacccctgcagatcaaggacgttgtgggctataactctttgggccactgcttcttcacggaagatgggccggaggaacgcaacacttttgaccactgtcttggcctccttgtcaagtctggaaccctcctcccctcggaccgtgacagcaagatgtgcaagatgatcacagaggactcctacccrgggtacatccccaagcccaggcaagactgcaagtaagtgcctggacccctctctgtgtgctggggggaaggggtgtacatgtgtgtgcatgtgttcactcagctcagcccagcaccagacttctgcacttcggggctctgaggagcttgggcctcacagcccttaaccacctacggctccagcttcctgcaaagcaggtgggagggagggtgtcttctcccttctcccttctcagtttgcctcatgtgcatttttcttgtccaaagaggatccctgttctcatctgtggggcttctcctgatccacacagtgctctttgatgagaggaagtggctgacacctcgcctgccacagaggccccgaccacacagacccttttctagatattagagagacagagggacggggtgagagctctctgtgcagtcagccttccaagtgcagggcccctcccttagaaagggctactttcctgggttcttctgacctgcatgtattttagagtcaatctcagacatcacttgcacactgcttctattttcaggacccatgctctttttaatttctgaatattttaagtgcttaaactagcaccacactttaattagaaaactgggtttcagatcaacaagtcaatgatttctcagatctctgataagagactatcaggccaatatcagagtgcccaacctgca

SEQ ID NO: 62917 - DNA, 699 bp, Homo sapiens
tccccaactcccaggcagccattctttaaaaggatcatcagaccacactccatatcccagcagtggactggcctcttataccttttaatcttgctgaaatctcacaccatcctctattcaattttaatttttttttagagacgaggaaaacgagactcagagaaagcaagtgatttgccaaaggtcacataagccatatgtacaaggtcaaggcagaaagcatggttttctgtgtccactcactccatatgggagaacccaacatacaagcaagtagctctgttccaggcaagctctctgttcttctgaataaacatccttcccttcatctttagtaataggcaagggtgtgatcttgaatcctaktcacctgtttaataagtcaatcaatatcaaggtcagccaatgggactgctttcctttctcctattaagccctaaaagtttgttataaatagcctggacagacaagcatgggagaaaaaggcaaggaaatgtgggcttcctgagctggccagaacatctgaggtcaagtttaatgcctccaactttacagaggaggatgccaaggcccagagaagggatgtggagtgtcccaggatgctcagcaacctcattctgcagctgtgatcaaactcaggcctcttgcctcctgcctcctgcctcctgcctcctgcccatagctctttctaaatcttag

SEQ ID NO: 62918 - DNA, 699 bp, Homo sapiens
tccccaactcccaggcagccattctttaaaaggatcatcagaccacactccatatcccagcagtggactggcctcttataccttttaatcttgctgaaatctcacaccatcctctattcaattttaatttttttttagagacgaggaaaacgagactcagagaaagcaagtgatttgccaaaggtcacataagccatatgtacaaggtcaaggcagaaagcatggttttctgtgtccactcactccatatgggagaacccaacatacaagcaagtagctctgttccaggcaagctctctgttcttctgaataaacatccttcccttcatctttagtaataggcaagggtgtgatcttgaatcctattcayctgtttaataagtcaatcaatatcaaggtcagccaatgggactgctttcctttctcctattaagccctaaaagtttgttataaatagcctggacagacaagcatgggagaaaaaggcaaggaaatgtgggcttcctgagctggccagaacatctgaggtcaagtttaatgcctccaactttacagaggaggatgccaaggcccagagaagggatgtggagtgtcccaggatgctcagcaacctcattctgcagctgtgatcaaactcaggcctcttgcctcctgcctcctgcctcctgcctcctgcccatagctctttctaaatcttag

SEQ ID NO: 62919 - DNA, 1231 bp, Homo sapiens
ctgggctctgcttgaatatttttggcagttgggaagacatgtgactcacggtatttataaggaacaggctgcccactttcctctgaccagtctgggtagcagcactaccatggaataccactgccctggagaattccagattaaatagaggaaaatcagtcagggaaaagaaacatccaactcagagagagagggagacagaagaggtggcatgtttttgcacagccccayggaattctggaacagtccagagcaggagctgtgaccttagccgagaatcaaagattaacatgggcaagagaaaggctggttgagcttcactgtcccacccttgtcatgctggccactttgagatgtctacaattcaattctctggttgactgcagaagtcaaggggtttcagacagacttgcctttgaatcctgactctgtcctattgtgaccaagtgaccaagtcaaccaacttaactgagcctcagtttcctccatccacaaaatagggttattgagacccatagctcaaggatattcatgaggatcaatgtcataatgtataagaaatacctggcatgggcctaaagtaggtgcttaataaatgttcccccattcccttcctctttctctaagagaagatcctttctttcctccttaaaacaaaataggctgaaagcaatctagcccatcatttaaaatgattaaagtccccaatttctgtttatgaatgctgtagagggtaaagggggaatactcagggtgtgctgtcattggtcttggtgaacataaatttgaggaattgtaccaatgttcccattccaggtcacatcctgtcatgatcaagacattaatggatatgacaaagatcccagatgaaaagcaacttctgaaccacaccactggcatcctgattaaagcaaacataagcaagccgaacccagcaagacatctggaaccatccctaagagtgaccatccactagacaggacccaaccctgccatgagtggaatcaacttcctgtctcatgagactgcagatttcaaatcctgtgcctctccatggcttcctgagctcctaaccacactctgacaggcatggcatctatgcaaaaagggaaatgagtgaggccagttgaagaattatataatcctccattttaaaaataggactgggtatttttggaaagaactagctgggtgagttatttaacagcctttctggctagcctgtggaaac

SEQ ID NO: 62920 - DNA, 631 bp, Homo sapiens
agctggtgaacgcgaccattggtgtcttctgcggcgattgcaggaaaaaacaggtgaaatktcttgcggtggagttgtagagggaacctgcctggtcctggctgcgttctcaccttctcttttccgcaggacacacctcactgaggctccactgaccgccgggttacacctgctccttcctggacgctcactcccttgctcgctagaataaactgctttgcgctctcttctctgtctgagattgtgccttctgtaaggaggagtgtgcgagaggctacggatacacctggcctttggggcccctgcaccccacttgtactttcttaacgaatagatactgagctatttggttgcgctggaaataaggacggtaaacaagacagacaagttttattctctcaaagaacttggcattccaagagtggaagataggcaatttttaaaagaagcaaaaaattatttcaataggtaataagcactttttttttttttttttgacagggtctcgctgtcactcaggctggaaggccgtggtacgatctcggttcactgcatcctccacctcctgggctcaagcaatcctcccgtctcagcctcccaagtagctgggaccataggcatatgccaccat

SEQ ID NO: 62921 - DNA, 631 bp, Homo sapiens
agctggtgaacgcgaccattggtgtcttctgcggcgattgcaggaaaaaacaggtgaaattkcttgcggtggagttgtagagggaacctgcctggtcctggctgcgttctcaccttctcttttccgcaggacacacctcactgaggctccactgaccgccgggttacacctgctccttcctggacgctcactcccttgctcgctagaataaactgctttgcgctctcttctctgtctgagattgtgccttctgtaaggaggagtgtgcgagaggctacggatacacctggcctttggggcccctgcaccccacttgtactttcttaacgaatagatactgagctatttggttgcgctggaaataaggacggtaaacaagacagacaagttttattctctcaaagaacttggcattccaagagtggaagataggcaatttttaaaagaagcaaaaaattatttcaataggtaataagcactttttttttttttttttgacagggtctcgctgtcactcaggctggaaggccgtggtacgatctcggttcactgcatcctccacctcctgggctcaagcaatcctcccgtctcagcctcccaagtagctgggaccataggcatatgccaccat

SEQ ID NO: 62922 - DNA, 812 bp, Homo sapiens
cccttggggtgatggtatgtcccttaccctctattacatactccgtcgcaacaggcaggctggctccgccagagctacggggcagtatagaccggggaggcgaagggtggatggaagacccctcctccgctcctcggcggaggtcggggagcacccagcccaccaggtcatatacacagcacttggcttggaaagtctcaagggcttggtgaakggggggcccgcagaggcaacgcatctccctttgccttgcagctggggcgaatggagtgagccgctgtggtgtcgcggcggcgcctacctagtggctttctcgcttcgcgtggaggcacccacgaccctcggtgacaacacagcagcgaacaacgtgcgcttccgctgttcagacggcgaggaactgcaggggcctgggctgagctggggagactttggagactggagtgaccattgccccaagggcgcgtgcggcctgcagaccaagatccagggacctagaggcctcggcgatgacactgcgctgaacgacgcgcgcttattctgctgccgcagttgaacggcgccgccgccgccgctctctcccgggccaggaggctagtcccacctcttgctattaaagcttctctgagttgactttggtctcgcctgtttatttcatttatttatttattaatttatttatttgagacggagtatcgctctgtcccccaggctggagtgcagtggctcactcggctcactgcaagctctgcctcccgggttcacgccgttctcctgcctcagcctcccgagtagctgggactacaggcgcccgc

SEQ ID NO: 62923 - DNA, 1397 bp, Homo sapiens
cttgaggctgggaaatggaggttgcagtgagccaagatcatgccactgcactccaacctgggtgacagagtaagaccttgtctcaaaaataataataattctgggactattgtgagataaagaaaacagaaaaaccccactgtaatataactgactgatgaaaaccacataaattagaagaggggaatttagagacaagagaaaatacataatcagctccagcctctgatattgggctgagatagcagagatatagtyttgtcaccctcaattatgcagagtaatgttaaagacaaacagatagggttatctgtgataaatctggggctaaggttattgacccacccagcaaattgtgacaaccatcttcctggaaggtagcatagagctaggaaggtcccaggaatgaagggtggacacagaagatctcgtgtttatgggtcttgaaggatgggtagaatttgggggaggtttagtgggagagaagggaagataggagattgttataaggagcagctattatgggctagaaatatgccttcttagaatcagtgccttcacccggacaagatggtgggggttcaagctagaatgggagcaatgagaaagatggaaaagagtggacagatctgaaaactactcaaaggataaaatcaacaggacttgacagattgcttatggaggtgtatgaagaagagtttagaattacttgagtgtctagcttgcagaactgaatggttatcagattccattcttatagaagtccaaaggctcctaacccggcctaaaacgctctgcatgacccgaccactgcctacccatctcaccagtctcatctgtacccactctcttcccctccacatctgagccccaggaacgatgcccttctttccagttccttcctaccacagggtcttcccacatgagctctcctctgactgaacagcccctcccatattttttccctacccaacccctattcatccttagggtctcagcttaaacgccggtttctttggaaaaatctctgccagtcttcagataaggttagagacccctgatattcaattctcatcttgtttcgcagcattttgtgtatcgccaccacgtctgtaaccggagcgcctagtacagtatctgaccctcaataagagctcggtaaatgtttattgttgaatgcgtcattcagtcagtcgaaacaatccccgaaacagatattgccagaggaaaaagagacttttagattatacaactagtgagtgaccgggcctggaacctaatcgattcctgtgtgccgaccaatagcctaacaacagaaaaataaggcccatttttcccctggagaaactcatggccgataaaggagaaatacgtgcatcccgtccggactgatacct

SEQ ID NO: 62924 - DNA, 1397 bp, Homo sapiens
cttgaggctgggaaatggaggttgcagtgagccaagatcatgccactgcactccaacctgggtgacagagtaagaccttgtctcaaaaataataataattctgggactattgtgagataaagaaaacagaaaaaccccactgtaatataactgactgatgaaaaccacataaattagaagaggggaatttagagacaagagaaaatacataatcagctccagcctctgatattgggctgagatagcagagatatagttttgtcaccctcaattatgcagagtaatgttaaagacaaacagatagggttatctgtgataaatctggggctaaggttattgamccacccagcaaattgtgacaaccatcttcctggaaggtagcatagagctaggaaggtcccaggaatgaagggtggacacagaagatctcgtgtttatgggtcttgaaggatgggtagaatttgggggaggtttagtgggagagaagggaagataggagattgttataaggagcagctattatgggctagaaatatgccttcttagaatcagtgccttcacccggacaagatggtgggggttcaagctagaatgggagcaatgagaaagatggaaaagagtggacagatctgaaaactactcaaaggataaaatcaacaggacttgacagattgcttatggaggtgtatgaagaagagtttagaattacttgagtgtctagcttgcagaactgaatggttatcagattccattcttatagaagtccaaaggctcctaacccggcctaaaacgctctgcatgacccgaccactgcctacccatctcaccagtctcatctgtacccactctcttcccctccacatctgagccccaggaacgatgcccttctttccagttccttcctaccacagggtcttcccacatgagctctcctctgactgaacagcccctcccatattttttccctacccaacccctattcatccttagggtctcagcttaaacgccggtttctttggaaaaatctctgccagtcttcagataaggttagagacccctgatattcaattctcatcttgtttcgcagcattttgtgtatcgccaccacgtctgtaaccggagcgcctagtacagtatctgaccctcaataagagctcggtaaatgtttattgttgaatgcgtcattcagtcagtcgaaacaatccccgaaacagatattgccagaggaaaaagagacttttagattatacaactagtgagtgaccgggcctggaacctaatcgattcctgtgtgccgaccaatagcctaacaacagaaaaataaggcccatttttcccctggagaaactcatggccgataaaggagaaatacgtgcatcccgtccggactgatacct

SEQ ID NO: 62925 - DNA, 1397 bp, Homo sapiens
cttgaggctgggaaatggaggttgcagtgagccaagatcatgccactgcactccaacctgggtgacagagtaagaccttgtctcaaaaataataataattctgggactattgtgagataaagaaaacagaaaaaccccactgtaatataactgactgatgaaaaccacataaattagaagaggggaatttagagacaagagaaaatacataatcagctccagcctctgatattgggctgagatagcagagatatagttttgtcaccctcaattatgcagagtaatgttaaagacaaacagatagggttatctgtgataaatctggggctaaggttattgacccacccagcaaattgtgacaaccatcttcctggaaggtagcatagagctaggaaggtcccaggaatgaagggtggacacagaagatctcgtgtttatgggtcttgaaggatgggtagaatttgggggaggtttagtgggagagaagggaagataggagattgttataaggagcagctattatgggctagaaatatgccttcttagaatcagtgccttcacccggacaagatggtgggggttcaagctagaatgggagcaatgagaaagatggaaaagagtggacagatctgaaaactactcaaaggataaaatcaacaggacttgacagattgcttatggaggtgtatgaagaagagtttagaattacttgagtgtctagcttgcagaactgaatggttatcagattccattcttatagaagtccaaaggctcctaacccggcctaaaacgctctgcatgacccgaccactgcctacccatctcaccagtctcatctgtacccactctcttcccctccacatctgagccccaggaacgatgcccttctttccagttccttcctaccacagggtcttcccacatgagctctcctctgactgaacagcccctcccatattttttccctacccaacccctattcatccttagggtctcagcttaaacgccggtttctttggaaaaatctctgccagtcttcagataaggttagagacccctgatattcaattctcatcttgtttcgcagcattttgtgtatcgccaccacgtctgtaaccggagcgcctagtacagtatctgaccctcaataagagctcggtaaatgtttattgttgaatgcgtcattmagtcagtcgaaacaatccccgaaacagatattgccagaggaaaaagagacttttagattatacaactagtgagtgaccgggcctggaacctaatcgattcctgtgtgccgaccaatagcctaacaacagaaaaataaggcccatttttcccctggagaaactcatggccgataaaggagaaatacgtgcatcccgtccggactgatacct

SEQ ID NO: 62926 - DNA, 804 bp, Homo sapiens
tcctgggttctggccccacatgttccagtctggcccagggcttggaaccagggaggtgctcggttcatggtgccggctgctccctgggccgggagagctcttggcagctgtgtcatccctcctgggtgaccctggcttctgctccggggaagcccccatccctctcattcaccccatctctgctgggaccctgtggctcccgtaggcttacttggttccgtatcgatccctgaagaatatatgcttccttartgtcccgcttacgtcccggtcgatgcgctggatgtgctcagatgacctcttgcccttctccttcatgatctgtagggcagggccaagaggaggaagcagtctcagaacagatggaagactccctgcccccagtggcagtcagcccacagtcagcacttcgggaaggaaggacagaaggaaggtttccttctgcagaaagctgcattttggcttgttactgaagccagggagggtcaccagagctgagtttgtctgtggtgactgtgtcaccatctgtgcccagggtgttcatctgaccttcacccccagctccccagggtggtcttgacgttccctccagctggagacctgggccccgacacggcctgtcctgtttgttgtgctctggctgagcgtacctggtatcttccggggtttttcaacttcatttcctcaatgttcaggaggactgaccacatcgggccccggatgttcatgggcattcccttgtacgctcgatctatgagctgtgggcagaaaacgatctggtgtcacaggccacggggtgacccc

SEQ ID NO: 62927 - DNA, 684 bp, Homo sapiens
ggagaaattaaagagaacacgcaacaaagccttgggacactgggagggggatggaccacccagttttgtgctatgggagaagagagcaagaaaaggaatctgtgttaaatcccgacagcctgcaggagaagcaaatgcccttcattttcttcatcagcagcgagactggcatccctgtagctttgagaaaccatgctagtgtagatgccagctccctccagcgggcctgactgggagaacttgggctggggttctggtctggggctcctaggcctgatgggaagagagttcagcccagctttcctgtacttcagctcgtatgcagacgatggccattgttgaaatgagagactcaaaggaagctggaacctgaacttttttgttgtctcgtggacacctgtgttcagtttcgggttctacctcttgctgtctgtgtgttcttaggtgactcacttaaacctttctgagtctcattgtcttcatttataaaataaaagacgtaacattgatgtcagatattgtcctgagcattaaatgggagaataagcaagcctcttctgcattcccctggcttccagtgggtggaggccagagaagctgctaaacatcctgccaggtgcaggacagmccccatcgcaaagaattgtctggcccctgatgtcagtaatgcagtattgaggatcc

SEQ ID NO: 62928 - DNA, 877 bp, Homo sapiens
ggccggttactgcctctctgaccccagacgtctcatctgtcgaatggggacatttgggaacagcacccactctacgaagccaccatggagacgaaagagccaatcgtctacacgggcagtgtagaacgggcgcctggtgagtgctcagggatgaccctcctcggtagctgccccacagaggccaacaccgcccgcaccgtagccactgcccccaagtccgcctggagggaagagagcaggtcacgctcacctgattctgatgaatcagctggcctgggtcatgcctctcagggagaaaacctttgagtccacagagctgctcacagataccastgcctgtgtgtaactgctgtagaccactgaggcagaccagagagcagataggtgctaagcaccagtgacattctgaggtcatggcacgaatcacagtggggccttgcccgggtcagcagcgcccagagtcagggtcctccgctgcctgaggcgtcaacatgcctgcctgcaatgtgtttgtgcacgtgcgtgcacatgtgtatgtgggtaaacacatctgtgcacgtgtgtgctgcttctctggccaggcccggctgccccactcatgtgtgcacccagttcctcatcactgtcacccccgaggcccagggccagcatcagagcatccatggctgctccctaacctcagccctccccgcccagggtggtcctgggatacacatagcggtggagggaagtgactgctgctgttggatctcagaatacaaaagctagtactattacctaatggtctttttagtgtctctaatggtatcgctttttcatttctgatattttaactgggtatttctctccatgacccttggatattctagctagagga

SEQ ID NO: 62929 - DNA, 877 bp, Homo sapiens
ggccggttactgcctctctgaccccagacgtctcatctgtcgaatggggacatttgggaacagcacccactctacgaagccaccatggagacgaaagagccaatcgtctacacgggcagtgtagaacgggcgcctggtgagtgctcagggatgaccctcctcggtagctgccccacagaggccaacaccgcccgcaccgtagccactgcccccaagtccgcctggagggaagagagcaggtcacgctcacctgattctgatgaatcagctggcctgggtcatgcctctcagggagaaaacctttgagtccacagagctgctcacagataccagtgcctgtgtgtaactgctgtagaccactgasgcagaccagagagcagataggtgctaagcaccagtgacattctgaggtcatggcacgaatcacagtggggccttgcccgggtcagcagcgcccagagtcagggtcctccgctgcctgaggcgtcaacatgcctgcctgcaatgtgtttgtgcacgtgcgtgcacatgtgtatgtgggtaaacacatctgtgcacgtgtgtgctgcttctctggccaggcccggctgccccactcatgtgtgcacccagttcctcatcactgtcacccccgaggcccagggccagcatcagagcatccatggctgctccctaacctcagccctccccgcccagggtggtcctgggatacacatagcggtggagggaagtgactgctgctgttggatctcagaatacaaaagctagtactattacctaatggtctttttagtgtctctaatggtatcgctttttcatttctgatattttaactgggtatttctctccatgacccttggatattctagctagagga

SEQ ID NO: 62930 - DNA, 877 bp, Homo sapiens
ggccggttactgcctctctgaccccagacgtctcatctgtcgaatggggacatttgggaacagcacccactctacgaagccaccatggagacgaaagagccaatcgtctacacgggcagtgtagaacgggcgcctggtgagtgctcagggatgaccctcctcggtagctgccccacagaggccaacaccgcccgcaccgtagccactgcccccaagtccgcctggagggaagagagcaggtcacgctcacctgattctgatgaatcagctggcctgggtcatgcctctcagggagaaaacctttgagtccacagagctgctcacagataccagtgcctgtgtgtaactgctgtagaccactgaggcagrccagagagcagataggtgctaagcaccagtgacattctgaggtcatggcacgaatcacagtggggccttgcccgggtcagcagcgcccagagtcagggtcctccgctgcctgaggcgtcaacatgcctgcctgcaatgtgtttgtgcacgtgcgtgcacatgtgtatgtgggtaaacacatctgtgcacgtgtgtgctgcttctctggccaggcccggctgccccactcatgtgtgcacccagttcctcatcactgtcacccccgaggcccagggccagcatcagagcatccatggctgctccctaacctcagccctccccgcccagggtggtcctgggatacacatagcggtggagggaagtgactgctgctgttggatctcagaatacaaaagctagtactattacctaatggtctttttagtgtctctaatggtatcgctttttcatttctgatattttaactgggtatttctctccatgacccttggatattctagctagagga

SEQ ID NO: 62931 - DNA, 877 bp, Homo sapiens
ggccggttactgcctctctgaccccagacgtctcatctgtcgaatggggacatttgggaacagcacccactctacgaagccaccatggagacgaaagagccaatcgtctacacgggcagtgtagaacgggcgcctggtgagtgctcagggatgaccctcctcggtagctgccccacagaggccaacaccgcccgcaccgtagccactgcccccaagtccgcctggagggaagagagcaggtcacgctcacctgattctgatgaatcagctggcctgggtcatgcctctcagggagaaaacctttgagtccacagagctgctcacagataccagtgcctgtgtgtaactgctgtagaccactgaggcagaccagagagcagataggtgctaagcaccagtgacattctgaggtcatggcacgaatcacagtggggccttgcccgggtcagcagygcccagagtcagggtcctccgctgcctgaggcgtcaacatgcctgcctgcaatgtgtttgtgcacgtgcgtgcacatgtgtatgtgggtaaacacatctgtgcacgtgtgtgctgcttctctggccaggcccggctgccccactcatgtgtgcacccagttcctcatcactgtcacccccgaggcccagggccagcatcagagcatccatggctgctccctaacctcagccctccccgcccagggtggtcctgggatacacatagcggtggagggaagtgactgctgctgttggatctcagaatacaaaagctagtactattacctaatggtctttttagtgtctctaatggtatcgctttttcatttctgatattttaactgggtatttctctccatgacccttggatattctagctagagga

SEQ ID NO: 62932 - DNA, 877 bp, Homo sapiens
ggccggttactgcctctctgaccccagacgtctcatctgtcgaatggggacatttgggaacagcacccactctacgaagccaccatggagacgaaagagccaatcgtctacacgggcagtgtagaacgggcgcctggtgagtgctcagggatgaccctcctcggtagctgccccacagaggccaacaccgcccgcaccgtagccactgcccccaagtccgcctggagggaagagagcaggtcacgctcacctgattctgatgaatcagctggcctgggtcatgcctctcagggagaaaacctttgagtccacagagctgctcacagataccagtgcctgtgtgtaactgctgtagaccactgaggcagaccagagagcagataggtgctaagcaccagtgacattctgaggtcatggcacgaatcacagtggggccttgcccgggtcagcagcgcccagagtcagggtcctccgctgcctgaggcgtcaacatgcctgcctgcaatgtgtttgtgcacgtgcgtgcacatgtgtatgtgggtaaacacatctgtgcacgtgtgtgctgcttctctggccaggcccggctgccccactcatgtgtgcacccagttcctcatcactgtcacccccgaggcccagggccagcatcagagcatccatggctgctccctaacctcagccctccccgcccagggtggtcctgggatacacatagsggtggagggaagtgactgctgctgttggatctcagaatacaaaagctagtactattacctaatggtctttttagtgtctctaatggtatcgctttttcatttctgatattttaactgggtatttctctccatgacccttggatattctagctagagga

SEQ ID NO: 62933 - DNA, 756 bp, Homo sapiens
acagggtggatatcaggccaggggagttacctgggaatggtcacagctcataccccgtggccacttcagtctcctactgggcggtgccggatccttttgtggccaccccaggtgtccagatayacacaggagactgtggctggggggcgatccggacagggaagtgctcaccacactctcgactttcatctgggtcatgtgggggatgggctcggtgtcacagtgtcctgcccagcccacctggccagacctccctctgggccagaacagaggatcatgaggacagtgtgaggaagctgccctcgggccagtcggggtctgaccccagggctccccaggccccgctgggcacacgtagacttactctgctgaaccttaaaggcgattcttgttatcggcatcaacgcctgttcgccttctaccagatacacgtcccacaggcgcagggtgagcccgagagagatctgtggggacagcaggtgtgaaagaacctggtccttccaggctggggctggtggctcgagctgcgcacactggggcttcagtctccagagtcagtgaccttccccatgagggtcgcctgagccctccaggacgctgggtcagacaaggtcttgaagctcctcatggggggcactcatttgagtggggatgtggctcctggagagaggggcttgcccagggcttgaggcttccctgagccctctcaagtcgggtcctggcccagtctgcccatgaggctgggcctgagcccca

SEQ ID NO: 62934 - DNA, 756 bp, Homo sapiens
acagggtggatatcaggccaggggagttacctgggaatggtcacagctcataccccgtggccacttcagtctcctactgggcggtgccggatccttttgtggccaccccaggtgtccagatatacacaggagactgtggctggggggcgatccggacagggaagtgctcaccacactctcgactttcatctgggtcatgtgrgggatgggctcggtgtcacagtgtcctgcccagcccacctggccagacctccctctgggccagaacagaggatcatgaggacagtgtgaggaagctgccctcgggccagtcggggtctgaccccagggctccccaggccccgctgggcacacgtagacttactctgctgaaccttaaaggcgattcttgttatcggcatcaacgcctgttcgccttctaccagatacacgtcccacaggcgcagggtgagcccgagagagatctgtggggacagcaggtgtgaaagaacctggtccttccaggctggggctggtggctcgagctgcgcacactggggcttcagtctccagagtcagtgaccttccccatgagggtcgcctgagccctccaggacgctgggtcagacaaggtcttgaagctcctcatggggggcactcatttgagtggggatgtggctcctggagagaggggcttgcccagggcttgaggcttccctgagccctctcaagtcgggtcctggcccagtctgcccatgaggctgggcctgagcccca

SEQ ID NO: 62935 - DNA, 756 bp, Homo sapiens
acagggtggatatcaggccaggggagttacctgggaatggtcacagctcataccccgtggccacttcagtctcctactgggcggtgccggatccttttgtggccaccccaggtgtccagatatacacaggagactgtggctggggggcgatccggacagggaagtgctcaccacactctcgactttcatctgggtcatgtgggggatgggctcrgtgtcacagtgtcctgcccagcccacctggccagacctccctctgggccagaacagaggatcatgaggacagtgtgaggaagctgccctcgggccagtcggggtctgaccccagggctccccaggccccgctgggcacacgtagacttactctgctgaaccttaaaggcgattcttgttatcggcatcaacgcctgttcgccttctaccagatacacgtcccacaggcgcagggtgagcccgagagagatctgtggggacagcaggtgtgaaagaacctggtccttccaggctggggctggtggctcgagctgcgcacactggggcttcagtctccagagtcagtgaccttccccatgagggtcgcctgagccctccaggacgctgggtcagacaaggtcttgaagctcctcatggggggcactcatttgagtggggatgtggctcctggagagaggggcttgcccagggcttgaggcttccctgagccctctcaagtcgggtcctggcccagtctgcccatgaggctgggcctgagcccca

SEQ ID NO: 62936 - DNA, 756 bp, Homo sapiens
acagggtggatatcaggccaggggagttacctgggaatggtcacagctcataccccgtggccacttcagtctcctactgggcggtgccggatccttttgtggccaccccaggtgtccagatatacacaggagactgtggctggggggcgatccggacagggaagtgctcaccacactctcgactttcatctgggtcatgtgggggatgggctcggtgtcacagtgtcctgcccagcccacctggccrgacctccctctgggccagaacagaggatcatgaggacagtgtgaggaagctgccctcgggccagtcggggtctgaccccagggctccccaggccccgctgggcacacgtagacttactctgctgaaccttaaaggcgattcttgttatcggcatcaacgcctgttcgccttctaccagatacacgtcccacaggcgcagggtgagcccgagagagatctgtggggacagcaggtgtgaaagaacctggtccttccaggctggggctggtggctcgagctgcgcacactggggcttcagtctccagagtcagtgaccttccccatgagggtcgcctgagccctccaggacgctgggtcagacaaggtcttgaagctcctcatggggggcactcatttgagtggggatgtggctcctggagagaggggcttgcccagggcttgaggcttccctgagccctctcaagtcgggtcctggcccagtctgcccatgaggctgggcctgagcccca

SEQ ID NO: 62937 - DNA, 756 bp, Homo sapiens
acagggtggatatcaggccaggggagttacctgggaatggtcacagctcataccccgtggccacttcagtctcctactgggcggtgccggatccttttgtggccaccccaggtgtccagatatacacaggagactgtggctggggggcgatccggacagggaagtgctcaccacactctcgactttcatctgggtcatgtgggggatgggctcggtgtcacagtgtcctgcccagcccacctggccagacctccctctgggccagaacagmggatcatgaggacagtgtgaggaagctgccctcgggccagtcggggtctgaccccagggctccccaggccccgctgggcacacgtagacttactctgctgaaccttaaaggcgattcttgttatcggcatcaacgcctgttcgccttctaccagatacacgtcccacaggcgcagggtgagcccgagagagatctgtggggacagcaggtgtgaaagaacctggtccttccaggctggggctggtggctcgagctgcgcacactggggcttcagtctccagagtcagtgaccttccccatgagggtcgcctgagccctccaggacgctgggtcagacaaggtcttgaagctcctcatggggggcactcatttgagtggggatgtggctcctggagagaggggcttgcccagggcttgaggcttccctgagccctctcaagtcgggtcctggcccagtctgcccatgaggctgggcctgagcccca

SEQ ID NO: 62938 - DNA, 2430 bp, Homo sapiens
tgcatcctcctcaggaagatagaggaggaacaaggcggcgatgtggctcaggtccctgcagtagcccacctcctgcaagagccagagtcaccatggaaggacatcacctgggagggctgaggtcacctgggaggactcatgtcattggagagggcagaggtgactggagaggcttcctctgaaggagaggcttcctctgaaaaagaggcttcctcaggatgcacattcatttcatgacaagagccaagtccatcaggcacttcagcaccttgtccaaaatgtctgctgatagcaccatcctgtgtgcgatgctgccaagctcctgggctttggggcagccccaggaggagggcgtcatttcttgttctgagaagtggtggtcaggcccaggtgacaccaggagtccaggccctgactcctytgtgtctcagcttgaccccttgagaccacccccttccttggaggtttatgccagcggtgagctgacatcctacctcctatatcctggtgggtcacaaatactaactttaaaagaagcaacgacacccccaccagacacccactcctgtcaatatggaaatatggcccgggaacctcactgccgggaatactcaccgggttgtactcctcatatgccaggaggatgtggagtagttcccgctgcctaggaaacagagaaagggggctttggtttgttttgtgcagatgttgttaatttcactttgtctacaaagcctaacagcaaatcccatttcaggttcagatgtttcaccagataagcagtgagctcttcagggcctgagactcttgaagaaatgtttcagtaaaatccacatctgtgacatgcaaatagcccagttgtacagtgacttgcctgatccttttcactctgaatgatttttttttttttttttcagtttgcacacacgccagttcagtctgtgggtgtacagttcctccacggttccaaaccaatgtgcagagtctcccggccaccgctccagcccctcctggggcgactccttcatcctccaagtctccagggtggcccctatgcacccagcctctccccgatccgtcagcccctggccacccagactgcttctcagtccctgtggtttggccttttccagaatggcctaggaatgggaatcctactgtggtagcttattgggtctggcttctgtccctcagcaaaatgcatctaggatccacccacgttcgtgcgggcatcaccggctcgttcccttttctcactgggtcttccgtttgaagggaggaccagccttgctctccccatccccgtgttgaaggccgtccccgaaggctccgtgtgtgagtgacgaggagtcaagcagtgaacctggcatgctggtttcatgtggatgtcagtttgcaaatcagtgggttcaatatctgtgacactttggggatgtgtggttcaagtccatcgagctttgtgagccactgcccaacgggctgccaacgtggctgtgccatgtcatgttcccagcggacctggatgagagtttccaggacccctaattctcccagcatttggtgctgtcactgttgcctggggggggctcatgggccctctatcctgccaccctcccgtgggtcctaccatgggtccccatgggtcagggagagcacccttcaccattgtgcatgattttgtttgctgccttccatctcctcaggatcctcctgggttctggccccacatgttccagtctggcccagggcttggaaccagggaggtgctcggttcatggtgccggctgctccctgggccgggagagctcttggcagctgtgtcatccctcctgggtgaccctggcttctgctccggggaagcccccatccctctcattcaccccatctctgctgggaccctgtggctcccgtaggcttacttggttccgtatcgatccctgaagaatatatgcttccttaatgtcccgcttacgtcccggtcgatgcgctggatgtgctcagatgacctcttgcccttctccttcatgatctgtagggcagggccaagaggaggaagcagtctcagaacagatggaagactccctgcccccagtggcagtcagcccacagtcagcacttcgggaaggaaggacagaaggaaggtttccttctgcagaaagctgcattttggcttgttactgaagccagggagggtcaccagagctgagtttgtctgtggtgactgtgtcaccatctgtgcccagggtgttcatctgaccttcacccccagctccccagggtggtcttgacgttccctccagctggagacctgggccccgacacggcctgtcctgtttgttgtgctctggctgagcgtacctggtatcttccggggtttttcaacttcatttcctcaatgttcaggaggactgaccacatcgggccccggat

SEQ ID NO: 62939 - DNA, 2430 bp, Homo sapiens
tgcatcctcctcaggaagatagaggaggaacaaggcggcgatgtggctcaggtccctgcagtagcccacctcctgcaagagccagagtcaccatggaaggacatcacctgggagggctgaggtcacctgggaggactcatgtcattggagagggcagaggtgactggagaggcttcctctgaaggagaggcttcctctgaaaaagaggcttcctcaggatgcacattcatttcatgacaagagccaagtccatcaggcacttcagcaccttgtccaaaatgtctgctgatagcaccatcctgtgtgcgatgctgccaagctcctgggctttggggcagccccaggaggagggcgtcatttcttgttctgagaagtggtggtcaggcccaggtgacaccaggagtccaggccctgactcctctgtgtctcagcttgaccccttgagaccacccccttccttggaggtttatgccagcggtgagctgacatcctacctcctatatcctggtgggtcacaaatactaactttaaaagaagcaacgacacccccaccagacacccactcctgtcaatatggaaatatggcccgggaacctcactgccgggaatactcaccgggttgtactcctcatatgccaggaggatgtggagtagttcccgctgcctaggaaacagagaaagggggctttggtttgttttgtgcagatgttgttaatttcactttgtctacaaagcctaacagcaaatcccatttcaggttcagatgtttcaccagataagcagtgagctcttcagggcctgagactcttgaagaaatgtttcagtaaaatccacatctgtgacatgcaaatagcccagttgtacagtgacttgcctgatccttttcactctgaatgatttttttttttttttttcagtttgcacacacgccagttcagtctgtgkgtgtacagttcctccacggttccaaaccaatgtgcagagtctcccggccaccgctccagcccctcctggggcgactccttcatcctccaagtctccagggtggcccctatgcacccagcctctccccgatccgtcagcccctggccacccagactgcttctcagtccctgtggtttggccttttccagaatggcctaggaatgggaatcctactgtggtagcttattgggtctggcttctgtccctcagcaaaatgcatctaggatccacccacgttcgtgcgggcatcaccggctcgttcccttttctcactgggtcttccgtttgaagggaggaccagccttgctctccccatccccgtgttgaaggccgtccccgaaggctccgtgtgtgagtgacgaggagtcaagcagtgaacctggcatgctggtttcatgtggatgtcagtttgcaaatcagtgggttcaatatctgtgacactttggggatgtgtggttcaagtccatcgagctttgtgagccactgcccaacgggctgccaacgtggctgtgccatgtcatgttcccagcggacctggatgagagtttccaggacccctaattctcccagcatttggtgctgtcactgttgcctggggggggctcatgggccctctatcctgccaccctcccgtgggtcctaccatgggtccccatgggtcagggagagcacccttcaccattgtgcatgattttgtttgctgccttccatctcctcaggatcctcctgggttctggccccacatgttccagtctggcccagggcttggaaccagggaggtgctcggttcatggtgccggctgctccctgggccgggagagctcttggcagctgtgtcatccctcctgggtgaccctggcttctgctccggggaagcccccatccctctcattcaccccatctctgctgggaccctgtggctcccgtaggcttacttggttccgtatcgatccctgaagaatatatgcttccttaatgtcccgcttacgtcccggtcgatgcgctggatgtgctcagatgacctcttgcccttctccttcatgatctgtagggcagggccaagaggaggaagcagtctcagaacagatggaagactccctgcccccagtggcagtcagcccacagtcagcacttcgggaaggaaggacagaaggaaggtttccttctgcagaaagctgcattttggcttgttactgaagccagggagggtcaccagagctgagtttgtctgtggtgactgtgtcaccatctgtgcccagggtgttcatctgaccttcacccccagctccccagggtggtcttgacgttccctccagctggagacctgggccccgacacggcctgtcctgtttgttgtgctctggctgagcgtacctggtatcttccggggtttttcaacttcatttcctcaatgttcaggaggactgaccacatcgggccccggat

SEQ ID NO: 62940 - DNA, 2430 bp, Homo sapiens
tgcatcctcctcaggaagatagaggaggaacaaggcggcgatgtggctcaggtccctgcagtagcccacctcctgcaagagccagagtcaccatggaaggacatcacctgggagggctgaggtcacctgggaggactcatgtcattggagagggcagaggtgactggagaggcttcctctgaaggagaggcttcctctgaaaaagaggcttcctcaggatgcacattcatttcatgacaagagccaagtccatcaggcacttcagcaccttgtccaaaatgtctgctgatagcaccatcctgtgtgcgatgctgccaagctcctgggctttggggcagccccaggaggagggcgtcatttcttgttctgagaagtggtggtcaggcccaggtgacaccaggagtccaggccctgactcctctgtgtctcagcttgaccccttgagaccacccccttccttggaggtttatgccagcggtgagctgacatcctacctcctatatcctggtgggtcacaaatactaactttaaaagaagcaacgacacccccaccagacacccactcctgtcaatatggaaatatggcccgggaacctcactgccgggaatactcaccgggttgtactcctcatatgccaggaggatgtggagtagttcccgctgcctaggaaacagagaaagggggctttggtttgttttgtgcagatgttgttaatttcactttgtctacaaagcctaacagcaaatcccatttcaggttcagatgtttcaccagataagcagtgagctcttcagggcctgagactcttgaagaaatgtttcagtaaaatccacatctgtgacatgcaaatagcccagttgtacagtgacttgcctgatccttttcactctgaatgatttttttttttttttttcagtttgcacacacgccagttcagtctgtgggtgtacagttcctccacggttccaaaccaatgtgcagagtctcccggccaccgctccagcccctcctggggcgactccttcatcctccaagtctccagggtggcccctatgcacccagcctctccccgatccgtcagcccctggccacccagactgcttctcagtccctgtggtttggccttttccagaatggcctaggaatgggaatcctackgtggtagcttattgggtctggcttctgtccctcagcaaaatgcatctaggatccacccacgttcgtgcgggcatcaccggctcgttcccttttctcactgggtcttccgtttgaagggaggaccagccttgctctccccatccccgtgttgaaggccgtccccgaaggctccgtgtgtgagtgacgaggagtcaagcagtgaacctggcatgctggtttcatgtggatgtcagtttgcaaatcagtgggttcaatatctgtgacactttggggatgtgtggttcaagtccatcgagctttgtgagccactgcccaacgggctgccaacgtggctgtgccatgtcatgttcccagcggacctggatgagagtttccaggacccctaattctcccagcatttggtgctgtcactgttgcctggggggggctcatgggccctctatcctgccaccctcccgtgggtcctaccatgggtccccatgggtcagggagagcacccttcaccattgtgcatgattttgtttgctgccttccatctcctcaggatcctcctgggttctggccccacatgttccagtctggcccagggcttggaaccagggaggtgctcggttcatggtgccggctgctccctgggccgggagagctcttggcagctgtgtcatccctcctgggtgaccctggcttctgctccggggaagcccccatccctctcattcaccccatctctgctgggaccctgtggctcccgtaggcttacttggttccgtatcgatccctgaagaatatatgcttccttaatgtcccgcttacgtcccggtcgatgcgctggatgtgctcagatgacctcttgcccttctccttcatgatctgtagggcagggccaagaggaggaagcagtctcagaacagatggaagactccctgcccccagtggcagtcagcccacagtcagcacttcgggaaggaaggacagaaggaaggtttccttctgcagaaagctgcattttggcttgttactgaagccagggagggtcaccagagctgagtttgtctgtggtgactgtgtcaccatctgtgcccagggtgttcatctgaccttcacccccagctccccagggtggtcttgacgttccctccagctggagacctgggccccgacacggcctgtcctgtttgttgtgctctggctgagcgtacctggtatcttccggggtttttcaacttcatttcctcaatgttcaggaggactgaccacatcgggccccggat

SEQ ID NO: 62941 - DNA, 1327 bp, Homo sapiens
cgccaccgctcaggccagctgcttcctctgcctcactgaccacccgcccagtccctacgtccctggaccagcccctccacgcatcaggctcttaccttcgcctcccgcgcagtcagaggaggcagctccgtctcactgtaaggcaacccaggcagagctgaggaactgcacggggcctggagcggccccagcctgggtgccgacccccagaaaggactggctctgtccctttccagctcagggctcagcccaggagaaggcacagggaagggaggacaagggccttcctgtggggctgaytcccaggaggggcaggacctgggagaagaaggagtgtagggacagcctggccggggttactggggcccctggcgtggggggcggtcaggctgcccagtggggctgcccgtcctggactcgaggtggtgctttctgctggagctgagaaaggttagccctgagatgggatgggggccgcccagggtgggcgaccgggccctgacaggagtccctcagggagtgaccacatccccccgccagggtcaagggagcctgccctgagacctgcccggtgtactctggctgcaccaggggcccaccccacttgacagccccaaggcccttgcaggttctgacctcccagcatccacctgcctctccctgcacccgagccacacaccctgcgtttcagaagtggcacggctcgtcagctccctcccgccctacctccccagggatcctctgtctctccatcctgtgatccctgagggatgggctcctggctgggctcctcttacccggccccagatcccttcccagcaccagacccaggtctttagccgcgagccctgctgcctccctggcctcaccgtgagatgcccagaacggggccctgcccatcttctcccccgttctcctagggctacagcccccattgtcaccatgccttttcccctcacgggacagtgagggctgtagctctaggggaatgggggagaacaggggcaggtgggccctcagagacctgctggacaacagccctgaggctgggccaggcgtcccctcaccctgtggccataacccttgcatctcaccggggttgtctccaagtagacagggccagaccctcaggctgccccgctcctcttgtgctcacttgccgacagaactgctgagcgcccaggggcctgacctagcccagtctccattcccaccggctccctagatgggccccacacctctggcctaacaacctcgggctggacctgcaggggagtcagggaggagttctatccctggaaaggaggttgacccgacctggtgagac

SEQ ID NO: 62942 - DNA, 1327 bp, Homo sapiens
cgccaccgctcaggccagctgcttcctctgcctcactgaccacccgcccagtccctacgtccctggaccagcccctccacgcatcaggctcttaccttcgcctcccgcgcagtcagaggaggcagctccgtctcactgtaaggcaacccaggcagagctgaggaactgcacggggcctggagcggccccagcctgggtgccgacccccagaaaggactggctctgtccctttccagctcagggctcagcccaggagaaggcacagggaagggaggacaagggccttcctgtggggctgactcccaggaggggcaggacctgggagaagaaggagtgtagggacagcctggccggggttactggggcccctggcgtggggggcggtcaggctgcccartggggctgcccgtcctggactcgaggtggtgctttctgctggagctgagaaaggttagccctgagatgggatgggggccgcccagggtgggcgaccgggccctgacaggagtccctcagggagtgaccacatccccccgccagggtcaagggagcctgccctgagacctgcccggtgtactctggctgcaccaggggcccaccccacttgacagccccaaggcccttgcaggttctgacctcccagcatccacctgcctctccctgcacccgagccacacaccctgcgtttcagaagtggcacggctcgtcagctccctcccgccctacctccccagggatcctctgtctctccatcctgtgatccctgagggatgggctcctggctgggctcctcttacccggccccagatcccttcccagcaccagacccaggtctttagccgcgagccctgctgcctccctggcctcaccgtgagatgcccagaacggggccctgcccatcttctcccccgttctcctagggctacagcccccattgtcaccatgccttttcccctcacgggacagtgagggctgtagctctaggggaatgggggagaacaggggcaggtgggccctcagagacctgctggacaacagccctgaggctgggccaggcgtcccctcaccctgtggccataacccttgcatctcaccggggttgtctccaagtagacagggccagaccctcaggctgccccgctcctcttgtgctcacttgccgacagaactgctgagcgcccaggggcctgacctagcccagtctccattcccaccggctccctagatgggccccacacctctggcctaacaacctcgggctggacctgcaggggagtcagggaggagttctatccctggaaaggaggttgacccgacctggtgagac

SEQ ID NO: 62943 - DNA, 835 bp, Homo sapiens
cctcctccttcagcctctcctgtagttaggactataggtgggtaccatcacaccctcctaatttaaaatttttttttgtctcactgtgttgcccaagctggtcttgaatttttgacctcaagtaatcctcctgcctcagcctcccaaagtgttgggattacaggcatgagccactgtgcccagccctttaatagtttaaaatcaaagtttaagtagaaaacattattttatttggctcattggttagatgtaagtgatgtgaaatacttaaacatccattattgtttttaatataatttggaaaatatgagttgctttggattattaaaacttcatttatttgtaccattgatgcataaattctcagtctaggttttagcgaagtctggattttaaaaaattgactgtgatattagttcaagtcttacgaacatcattattattattatttgagagacacagagtcttgctcagttgcccaggatggagtgcagctgcacaatcacagtttattgcagyctcaacctcctgggctcaagcagtcctcccacttcaacctcccgagtagctgggactataggcacacatcacaactcctggccaatttttgtattttttgtagagatggggtttcgccatgttttccaggctggtctcaaactcctgggctcaagcgatcctctttgcttagcctcccaaagtgctgggattacaggtgtgtgccaacacacctggccaagttgtatatactattaatctaggctatttctgacactgttgattttccttttccccttaggtgaggcaggcgactaatcagattgtgatgaattgt

SEQ ID NO: 62944 - DNA, 835 bp, Homo sapiens
cctcctccttcagcctctcctgtagttaggactataggtgggtaccatcacaccctcctaatttaaaatttttttttgtctcactgtgttgcccaagctggtcttgaatttttgacctcaagtaatcctcctgcctcagcctcccaaagtgttgggattacaggcatgagccactgtgcccagccctttaatagtttaaaatcaaagtttaagtagaaaacattattttatttggctcattggttagatgtaagtgatgtgaaatacttaaacatccattattgtttttaatataatttggaaaatatgagttgctttggattattaaaacttcatttatttgtaccattgatgcataaattctcagtctaggttttagcgaagtctggattttaaaaaattgactgtgatattagttcaagtcttacgaacatcattattattattatttgagagacacagagtcttgctcagttgcccaggatggagtgcagctgcacaatcacagtttattgcagcctcaacctcctgggctcaagcagtcctcccacttcaacctcccgagtagctgggactataggcacacatcacaactcctggccaatttttgtattttttgtagagakggggtttcgccatgttttccaggctggtctcaaactcctgggctcaagcgatcctctttgcttagcctcccaaagtgctgggattacaggtgtgtgccaacacacctggccaagttgtatatactattaatctaggctatttctgacactgttgattttccttttccccttaggtgaggcaggcgactaatcagattgtgatgaattgt

SEQ ID NO: 62945 - DNA, 835 bp, Homo sapiens
cctcctccttcagcctctcctgtagttaggactataggtgggtaccatcacaccctcctaatttaaaatttttttttgtctcactgtgttgcccaagctggtcttgaatttttgacctcaagtaatcctcctgcctcagcctcccaaagtgttgggattacaggcatgagccactgtgcccagccctttaatagtttaaaatcaaagtttaagtagaaaacattattttatttggctcattggttagatgtaagtgatgtgaaatacttaaacatccattattgtttttaatataatttggaaaatatgagttgctttggattattaaaacttcatttatttgtaccattgatgcataaattctcagtctaggttttagcgaagtctggattttaaaaaattgactgtgatattagttcaagtcttacgaacatcattattattattatttgagagacacagagtcttgctcagttgcccaggatggagtgcagctgcacaatcacagtttattgcagcctcaacctcctgggctcaagcagtcctcccacttcaacctcccgagtagctgggactataggcacacatcacaactcctggccaatttttgtattttttgtagagatggggtttcgccatgttttccaggctggtctcaaactcctgggctyaagcgatcctctttgcttagcctcccaaagtgctgggattacaggtgtgtgccaacacacctggccaagttgtatatactattaatctaggctatttctgacactgttgattttccttttccccttaggtgaggcaggcgactaatcagattgtgatgaattgt

SEQ ID NO: 62946 - DNA, 1603 bp, Homo sapiens
gaattccaaatacttgatgtagacactcagctgtcaagaaggcggagccaactcctcactccgtaaggagtgaggctctgcatagtggcttgctccaaaagaacacatgtagtatggacaaggaggaaaaataacttcacagtggagaaacctgacaaacagtagctctgccaaatgatccaagtgaacaacaaaggtaacagttcaccttgagaacatgaagtgacaatgagggacattctacaaaatgcctgaccaatcctcctcagtactatcaaggtcacctgagatggaaagcctgacacactgtcacagccaggaagagcccacatgatgactacatgtcatgcgggatcctggatgggatcctggatcagagtaagacagatctaagggaatccaaatgaaatatgaactttagtctatcagtattggttcattaactgtgacaaattgtgtaagatattaataagccatgtgaaggaacacactgataaaagatgttaataagagaggaaactaggttgcggctacatgggaaatatctgcttttttttgacaatttctgtgtaagtaaagatgtaaaataaaactttatttgaaacactgtttttttgaacacttccttgtttaattatttataccatgaattactagtaattgacactgttaactagtcctgtttttttaaataagagcatttatgacacaaaaaattaaacagtgcagactgatatataaatcaaaacaaatgttctttacatgttttctgttacwgtagtaacaatatgtgtaaacttaattatcatatttttttcttgtgttgtggttgtgtcctgggttcattctctaaaatgctgttcaccttagaccaggaaaaatagtaaccatacagactctgtttcaattcatagctaaatattttcaaaagagtgactttgtaaaaatatgttccaatggcaaattgattcattgtgatgggatcacttatcccgaagacttcttgtctttattttgttcccatgcctaccttttagccataatacagcagaatcaaatattggtcactgggaaaaaatattcaaagaaagaaggaatgtggacagaacttatgaccatgatgattcaatgttttaccacaatgctttctaaaacagaagagtgtaaaaggatattcaaagtcaatttcctcagcgaggctttgcagaaaatgaggaaactagagaaacaaaaatggcaggacattctacgggtgattttaaatgttgctatgttttatgggaaaaaatactttaccttttaaagaatcacaaagaattgttggaaacccaaactctggaatgtttgcaaatttagttgagcttctatgtaattatgtctatataggtagccacgatgttgatgatttcttaaaaatctgtgccttatttgtgtgataaaatacacaatgaataattaatgctcataggaaaaccttataaagggaaaataaatcttggggacccaaaatcactaagctaaagggaaaagtcaagctgggaactgcttagggcaaacccgcctcccattgtatccaaagtcacccatctgctcacctagataa

SEQ ID NO: 62947 - DNA, 1603 bp, Homo sapiens
gaattccaaatacttgatgtagacactcagctgtcaagaaggcggagccaactcctcactccgtaaggagtgaggctctgcatagtggcttgctccaaaagaacacatgtagtatggacaaggaggaaaaataacttcacagtggagaaacctgacaaacagtagctctgccaaatgatccaagtgaacaacaaaggtaacagttcaccttgagaacatgaagtgacaatgagggacattctacaaaatgcctgaccaatcctcctcagtactatcaaggtcacctgagatggaaagcctgacacactgtcacagccaggaagagcccacatgatgactacatgtcatgcgggatcctggatgggatcctggatcagagtaagacagatctaagggaatccaaatgaaatatgaactttagtctatcagtattggttcattaactgtgacaaattgtgtaagatattaataagccatgtgaaggaacacactgataaaagatgttaataagagaggaaactaggttgcggctacatgggaaatatctgcttttttttgacaatttctgtgtaagtaaagatgtaaaataaaactttatttgaaacactgtttttttgaacacttccttgtttaattatttataccatgaattactagtaattgacactgttaactagtcctgtttttttaaataagagcatttatgacacaaaaaattaaacagtgcagactgatatataaatcaaaacaaatgttctttacatgttttctgttactgtagtaacaatatgtgtaaacttaattatcatatttttttcttgtgttgtggttgtgtcctgggttcattctctaaaatgctgttcaccttagaccaggaaaaataktaaccatacagactctgtttcaattcatagctaaatattttcaaaagagtgactttgtaaaaatatgttccaatggcaaattgattcattgtgatgggatcacttatcccgaagacttcttgtctttattttgttcccatgcctaccttttagccataatacagcagaatcaaatattggtcactgggaaaaaatattcaaagaaagaaggaatgtggacagaacttatgaccatgatgattcaatgttttaccacaatgctttctaaaacagaagagtgtaaaaggatattcaaagtcaatttcctcagcgaggctttgcagaaaatgaggaaactagagaaacaaaaatggcaggacattctacgggtgattttaaatgttgctatgttttatgggaaaaaatactttaccttttaaagaatcacaaagaattgttggaaacccaaactctggaatgtttgcaaatttagttgagcttctatgtaattatgtctatataggtagccacgatgttgatgatttcttaaaaatctgtgccttatttgtgtgataaaatacacaatgaataattaatgctcataggaaaaccttataaagggaaaataaatcttggggacccaaaatcactaagctaaagggaaaagtcaagctgggaactgcttagggcaaacccgcctcccattgtatccaaagtcacccatctgctcacctagataa

SEQ ID NO: 62948 - DNA, 1603 bp, Homo sapiens
gaattccaaatacttgatgtagacactcagctgtcaagaaggcggagccaactcctcactccgtaaggagtgaggctctgcatagtggcttgctccaaaagaacacatgtagtatggacaaggaggaaaaataacttcacagtggagaaacctgacaaacagtagctctgccaaatgatccaagtgaacaacaaaggtaacagttcaccttgagaacatgaagtgacaatgagggacattctacaaaatgcctgaccaatcctcctcagtactatcaaggtcacctgagatggaaagcctgacacactgtcacagccaggaagagcccacatgatgactacatgtcatgcgggatcctggatgggatcctggatcagagtaagacagatctaagggaatccaaatgaaatatgaactttagtctatcagtattggttcattaactgtgacaaattgtgtaagatattaataagccatgtgaaggaacacactgataaaagatgttaataagagaggaaactaggttgcggctacatgggaaatatctgcttttttttgacaatttctgtgtaagtaaagatgtaaaataaaactttatttgaaacactgtttttttgaacacttccttgtttaattatttataccatgaattactagtaattgacactgttaactagtcctgtttttttaaataagagcatttatgacacaaaaaattaaacagtgcagactgatatataaatcaaaacaaatgttctttacatgttttctgttactgtagtaacaatatgtgtaaacttaattatcatatttttttcttgtgttgtggttgtgtcctgggttcattctctaaaatgctgttcaccttagaccaggaaaaatagtaaccwtacagactctgtttcaattcatagctaaatattttcaaaagagtgactttgtaaaaatatgttccaatggcaaattgattcattgtgatgggatcacttatcccgaagacttcttgtctttattttgttcccatgcctaccttttagccataatacagcagaatcaaatattggtcactgggaaaaaatattcaaagaaagaaggaatgtggacagaacttatgaccatgatgattcaatgttttaccacaatgctttctaaaacagaagagtgtaaaaggatattcaaagtcaatttcctcagcgaggctttgcagaaaatgaggaaactagagaaacaaaaatggcaggacattctacgggtgattttaaatgttgctatgttttatgggaaaaaatactttaccttttaaagaatcacaaagaattgttggaaacccaaactctggaatgtttgcaaatttagttgagcttctatgtaattatgtctatataggtagccacgatgttgatgatttcttaaaaatctgtgccttatttgtgtgataaaatacacaatgaataattaatgctcataggaaaaccttataaagggaaaataaatcttggggacccaaaatcactaagctaaagggaaaagtcaagctgggaactgcttagggcaaacccgcctcccattgtatccaaagtcacccatctgctcacctagataa

SEQ ID NO: 62949 - DNA, 3310 bp, Homo sapiens
ttttttttttggcctttgaattaaatgcaaagaagaaacagagggataagaaattcagccacatgcatcctcttcctctgtgcctcagcccccaaaacacaccacacacacacacacacacagagagacaggagagggcatgcatcccctttccctggcaactgtcctctcactcaaaagctgtgcccttgggaccaaggccacctcctacctcctccagcacatacagcctgacagcccagcatctgtcagttacaagccgaggtctccctgacagccctgacctgacttggggtcctaatagctgagttctgacaagtgaggagagttggtgatcaagggcagcagtcctgcgggcagctccaaggactccaatgcttggcatcaggcacgccaaatcccagggtggcagggtgcatcttctgcctttcatccagctgttctgacatctcgacgccccggccagaggagatccatgttttacccctagccctgaccaagctctgagcgaagttgaaaaagtcaccaacctgatctgtagttctgcccacctgccttgtgaaattaggaatatccatgcaagagactccttcccttccttggatctgactaagccctctgttgtcccaggggtccctctctaaggccgacaagatgggacagtgagaaagaatccctgacactgggttcaccaccgtggctctcactcaggaaaatggactttgggagcagctcagcctgcagctgacaggtaacagctgtggggcggctccagctccttcccattggcaaattagcacctgccagacctgcagtcaaaacagccaaaggactctggatcattggaagtaagctgacatctgcttgaagggaaactgaaaggaggaaagtggtggggtagaagatagaaaaaaggtgttctcatcctcaagaaaacctctgtcctctctatttctgtgcagttcaaacgaacttaccaatgcctgggctactacyggaatggaggtcctgggggacaaagctagacagagctctcagggcctcagtttccatctgcataatggatgtactcagacatctctctcatgggagtgtcgtgagtattcatgcagggccagtccctgtatgcaccagtaccaaaggactcaacccagtacatgacagctgttactactgaaagaagtcagggaaggaagcaggaggatgccatcagtcccaagactcaaggacaaggatgctctcatggagtaaaataggaggtgtaaagccaagattacgaagagcaggacaccaaaggatctgatgataatgttcaagttgtacataacaaacagtttaagtgattcccttttagttactggtgggtggagatgcataccaggtatgcccttgggacccaggccacgatccacctcctccagcacatatagcctgacagcccagcaactccagagtctacatttattttagcaggatttctgcttcttcaaaaattttgtttcaaagctcttcgaaataaagttgattcaggtcaactggatgagaagcacagggccaagccagacccaggtgagacctcaaaggacgtctagaggaggatcctttcctgccaggctaccactgctgtggaacccacaacactggctctcaatattgcttggtaaacacctgagtgcagacagagggttctcttctgaccacctctttgggccacaaatgttttccctctcgaaactctctattttgctgtctaaaaatttcttagttgttttttgtgaccacaaacataacccaaactattttaaaaaatctaactcttaccaaataattaaggacaccagcaacaacaatttggcactgaatttttgtttccattttacaaagtaaagaaataaattgaaccaagaaggtttctctgtggcttgagttttcaatgagcaagtgatctttgccatatttttataccagcaaatttaggtagaaaccaacccatgttcgtggtattcagccatgcccctgaggaatacatggattttctcccatcttgcactctcccagacactcctgaagtaaacgtttatttgggaacttgtagaaatgtttctttaatataaattcttaaaagtaggaatgctggttatatacatacaatggaatattattcagcctttaaaagttaggaaattctgacccctggtacaacagggacgggccttgagggcattatggtaagtgaaataaaccagtcaccaaaggacaaacaacatatgattctacttacatgaggtaatagagtagttaattcacagagacaaagtagaagggtggcttccaggggctgtgggtaaggggaaatgggactggtgttcagtgggtgccgtttccagtttgcaagatggaaaagttctagagatctgtggcacaacaatgcaaacatacgtaacactactgaattgtatacttaaaaatgattaagatggtcaactttatgttatttgtattttaccacaatcaaaactaacaataaaaaagagaaaaggactgcccaaaacaaaaaatgggaatgctggatccaagggtgagtgcattttcagttttaacagatattgttgaagtgcactcaagaaaagctggactgatttttgttctcattacagtgtgtgagggcctttcttgtccactttttctccataatgatttggtaatagcacatgggagagaaaatgggcagaaactgatacactttacttgaagtataacaaaagaatattagtctgctcagctatgtcctgatcctcaagagtggccacaaagtaaattgggttgcagctttctgcagggtaggtgcagatctctgcgatgcctccagaaactccagagttattctggttctcttcccccatcccactccctaaccttaaaatgatgactccaaaaatcacagactggcctacatatttcccttaaacagctgtcctacagaatcactaaaacttgggttaaaaatagtctcagtctctaaaagaaggctgggtccctggaacaaagccctcttagaaatgctcccaccaccacagagggaacacaaaagctgacccatgtggccccagggctcgtcatcaatcctgaccctccctgccaccgtggaaacagagaacctgcctgaactcttttcacatgcttggtccatctgtgaaacagaagtcggaatacagggagaataatgcaattacaaccaagctatgcgtttgtgccattatttccattttataaattcccagagctcagagaatttaaaatttaagtaagg

SEQ ID NO: 62950 - DNA, 1500 bp, Homo sapiens
tatgagtaatctttttattacttcttggctagtgattactctcaaactcctttgcctataagattgtgctcatgcttttaatattggttctctcctcttcccctttctgttggccctcattagtccttgcacacagcatcagttcctgatctcagtcctaatgccatcctgattagttctcctaacatcagacaaatccagaggctgtcaacagccaatggagttgggaaatcatcttttccagatcttcattttaaagtaggaaaccctgattttacacaaaaaatggatggtatcccatcctccagcaaaggccagcctgcccatctggtcccctrtgtaagggtctcctgagtgcttcggtttttctattccattgaggtatccagaaccaagagagaaattcttctctggccccaagtgacacacagactgagccctgctttcttactgccttcaagacagccctacatacctggactatgtcctgtttctgctcattccatatgttattacagaagtcctgtttctcctcattccatctgttattacagccagaatggtgaactgatccttacatattatctgtgctgcacccacctcatttcccagaatcagattctcttccaaggtccatgcctggcttcagtgagagtggccatgttcttgctatggcagagctgagtaggctggacctcaacaggacccaggccactgtgtgtatgacatgttgcctccgtgctcctgagagcaacccccatcctccctcttcatctcttcatctactcttgggggctccccttcacctccaaggaagctgcatatctggcattacctcctcatcaggagctaccatttcctcaggaatcatcagagcacctatttctaagataaagtgacagagagtatgtctaacaaaagagaaattgcacccaacttcaggtattaaactttaaggtaataggctccttaaagcccaaaataaacagcagagtttcttggggcatcaaattcacttaaaagcagtaacttcaaatttcttatatattagaataaaggatggattactgtggagtaaaatacagaatgtatattaatatttaaagataaaatctaagacctctaggaaatctttaaattcaggtggaaaatatcagcttgactctagaccaccctcacattacctcctcaacacgtaggtgtagacatttattcttgcagttattactgagaacgtcagagagacatgcctctatggttgttttctatcattaaagggggttactattgggccaggagtaactttcatactctatagatgcagccctttctcctctgccccttccactgaccattttcatgaggtattccagatgttgtgcctgccagaagtttgcagggctgatgtggtttcacaggattttcttctagactgacaaggagaagtggaataatttttcttgcataggttccaaagagattgatatctcaataacaatt

SEQ ID NO: 62951 - DNA, 1500 bp, Homo sapiens
tatgagtaatctttttattacttcttggctagtgattactctcaaactcctttgcctataagattgtgctcatgcttttaatattggttctctcctcttcccctttctgttggccctcattagtccttgcacacagcatcagttcctgatctcagtcctaatgccatcctgattagttctcctaacatcagacaaatccagaggctgtcaacagccaatggagttgggaaatcatcttttccagatcttcattttaaagtaggaaaccctgattttacacaaaaaatggatggtatcccatcctccagcaaaggccagcctgcccatctggtcccctgtgtaagggtctcctgagtgcttcggtttttctattccattgaggtatccagaaccaagagagaaattcttctctggccccaagtgacacacagactgagccctgctttcttactgccttcaagacagccctacatacctggactatgtcctgtttctgctcattccatatgttattacagaagtcctgtttctcctcattccatctgttattacagccagaayggtgaactgatccttacatattatctgtgctgcacccacctcatttcccagaatcagattctcttccaaggtccatgcctggcttcagtgagagtggccatgttcttgctatggcagagctgagtaggctggacctcaacaggacccaggccactgtgtgtatgacatgttgcctccgtgctcctgagagcaacccccatcctccctcttcatctcttcatctactcttgggggctccccttcacctccaaggaagctgcatatctggcattacctcctcatcaggagctaccatttcctcaggaatcatcagagcacctatttctaagataaagtgacagagagtatgtctaacaaaagagaaattgcacccaacttcaggtattaaactttaaggtaataggctccttaaagcccaaaataaacagcagagtttcttggggcatcaaattcacttaaaagcagtaacttcaaatttcttatatattagaataaaggatggattactgtggagtaaaatacagaatgtatattaatatttaaagataaaatctaagacctctaggaaatctttaaattcaggtggaaaatatcagcttgactctagaccaccctcacattacctcctcaacacgtaggtgtagacatttattcttgcagttattactgagaacgtcagagagacatgcctctatggttgttttctatcattaaagggggttactattgggccaggagtaactttcatactctatagatgcagccctttctcctctgccccttccactgaccattttcatgaggtattccagatgttgtgcctgccagaagtttgcagggctgatgtggtttcacaggattttcttctagactgacaaggagaagtggaataatttttcttgcataggttccaaagagattgatatctcaataacaatt

SEQ ID NO: 62952 - DNA, 881 bp, Homo sapiens
atttgagtttttgaaagccacttagcatctttttgcctttgtattctcttctgtaaaatgagatgactgaactacctgaccatgtactagtgcaaattagactgtgagaacagagcaccgaacattgtatataccatgctgggccacagagtacagcagctgaggggcttgactgggcggccaggctgcctgagttctgctccttgcctcagcctttgagaagtctgcccttggcaaatcctccaactattttgtatatcagtctcctaatataaaaattaggataatgcagcaccttcctcagaaagttgtgagtattaaatgaaccaatatgtgtaaaaatgtttagaacaatgcctgatatgtggaaagtgctaagtagtaactagtattactaatgccaagcagggaaggggttagtgggtgggaaccctcctcattacttctaccaagtgttattgtacccatctagggtataagaactgtggaaacccaggtttacactgtagagttactctaattatagcatatcatggagttaattgtggaccccatttaacwacagctttgtcacagggcagttttgcaagagtgagactgaactctattgttttcatcctcattatcttaaatgaacagtttgcaatatgtgataataccactggcatctgtttctgaatgtttccactcacaagacccaaaacaattccacaaagaaaagacttctttcggttgttctggagtctttctaaaacagcttctactgggagattaattatagaagccacagaatttcctgaaaatggtaaaacattttaaagaaatactaagacactacatgataaatgacttgactctttattgcctaacaatccaaaaga

SEQ ID NO: 62953 - DNA, 1129 bp, Homo sapiens
gcgacattacagtaagtgacccaagagttagtaccatgcgggagaaggtgcaccagttataaggaagtagggtgtgttagaaagagtgtgagttttagaaacagacagatcactaattctgagacctgaaagatgctcagtaatgggcagttagtacccccacmagcatgatctacagcagcaccactgtcttatcgtcgtcagactcaaactttcttctccaggaactctttgctcgttccagtatgctacacttccttgcaactgccaaggtgtcaatagcctgctagataccctttaaaatgttcctaaaatacttgttggtggattaactggttgtaatttgtctttccaactatagtaacactgagagaaggacagatcagtaaggtaacaaattgatattcaattgtattaattaagctgtgagcagttttgctataggctgttttcccaaagtttttacaccctaggacctgcagggatgtgggagaaagggagagccccctgccaggtccctgcaggtcctggggtataaaaacaaccaaccaccatctccagctacaaatccaggtaacaaggtgtcactagacagcttaacccaaagaagtaagaacaatcttttagaagcaagaaaaccccaaggcaataaatataatcccagctaaatgctttgtcagactgaaaggaacatgaccttgtatgttttcatcttttgacttgactttgttaacggaaggcatgaaataaaattgtgtttacctgaattctactacagcagagctaatggaaatcagctaacatcggaagttagggtaaatgtcttaaaaactttatcttctaaagccaattgtaacattgtaactcaaacgaaaatgaaaaataagtgtttccaaacgctaaaagagatttctatcttctcatcattttaagaacaaccactataaaatatgttctaaaacaaacacagagcactaaaaatttcactgtttaagctaaaagtcaaacatctgtctcactgtcttctagtttcaccttggtttctgaggatctcaactaaaagctgcagaaatttggaacatttccccctcacattcattttaaagagttagttctgagattttaaaga

SEQ ID NO: 62954 - DNA, 667 bp, Homo sapiens
attgataaagtcttacacacaacactcaaagacctagacctggaaaaaatgcactagtgtcagactagtttaacgtcttagataggggtgcataggttagagccatatctctctggacttttctgggaaaacacacacatacacacacacaaaacatcctcctgcaatgactatgagtggcagtcattcctggcagagaatagggactgggaaggtggggattggcctgggsaaaggagcatgaaaattcccctctttaggacttcgaattttagtctagactccaaagcccatcagtgagtagaggaacttgggtgttgaaaagtaaactacccactggcccatggcaataaggtaggagagatacagagaggcaggtcaaccagaagtcctgagtccagttctggccctgggaagtatttgtaagctcatctctgtgttataatgctctctctcataccttctgttctttagagaatcgaagacaagggcctatcccatatttggcgtgaagtaaaagtaaagaacaacgtctgttgccaaaactactagtggcactggtggtcaccaacaaaggacagctttgtcaagcagaatgataaactaatgagagttatcagcagcagaggcatgagggtcagatgagacagacagaacagaggagaga

SEQ ID NO: 62955 - DNA, 667 bp, Homo sapiens
attgataaagtcttacacacaacactcaaagacctagacctggaaaaaatgcactagtgtcagactagtttaacgtcttagataggggtgcataggttagagccatatctctctggacttttctgggaaaacacacacatacacacacacaaaacatcctcctgcaatgactatgagtggcagtcattcctggcagagaatagggactgggaaggtggggattggcctggggaaaggagcatgaaaattcccctctttaggacttcgaattttagtctagactccaaagcccatcagtgagtagaggaacttgggtgttgaaaagtaaactacccactggcccatggcaataaggtaggagagatacagagaggcaggtcaaccagragtcctgagtccagttctggccctgggaagtatttgtaagctcatctctgtgttataatgctctctctcataccttctgttctttagagaatcgaagacaagggcctatcccatatttggcgtgaagtaaaagtaaagaacaacgtctgttgccaaaactactagtggcactggtggtcaccaacaaaggacagctttgtcaagcagaatgataaactaatgagagttatcagcagcagaggcatgagggtcagatgagacagacagaacagaggagaga

SEQ ID NO: 62956 - DNA, 744 bp, Homo sapiens
ggatgcagagaaaacaagattagctatgaattgttcattgttgaagctggataatgggtacacagggctttactacactattctttttactttgatatgcttgaagttttttttatcttaaatagatatctttttaatgtgcagggaggtttgaagaaaagtgaagttgaaaaataaaaaagtatactaaataaaattagagatgtagtcgacatattatatgtcatatcagatacaattaacagcagaattagtgaactggaagatagatctgaaataatcaccaagaaagcagcacagagaaacaaagaaatgagctatatcagagtttgagatacctggaaggcagactcagaaggctaaagtgcatctaataagaggaccactgcttgatgttattgtgtcatttattgtgcctttataaaggaggcctctgacggctgccttccctcttccaccatgtgaggaaatrgccacaaagcaccacctatgaacaagagagtggacccttaccagacactgaatctggtgaaatgacctttttaaaaagtacgagagggaaataatagagaaaatggacaagatataatattaaagagatattggccaagaattctccagaactgatgaaatacaacaatctgagttaatggctcagattcaggaagctgaacaagctatgaggaaagaaatctaaacgtggatacatcatgggaaaactacagatcaacaataacaaagaaa

SEQ ID NO: 62957 - DNA, 586 bp, Homo sapiens
cataaagtttgagaaacaggaagagtgctagattagtgggagtagacattttattggagagagagggcagagcccaggaatgtgccttttccacggttatcttccttggctcggcaggtgttgcctggtgagccctggaaatgctgcctacaacttccatcatacaattgtccgattgatcttgggcttgcccatttgaacagtgcacttgactttcggcacctgcacatccatggtcgggagaggagtctggtctgcctcatggtgtaacgggcatgggattttcgggcttccagaaagaggaagacaccagtacccttcatttcagtccactgtgattatggagctgttaaaacctcttctgtgtatcatcagattacactatcttcacagggagtgactgaatgttctatgcaaagtgagaatttgasagaagagaccctcaaaccacaaccagcatcatcaccacaaggtcacacaaacactccctgttcttatcatacagcaatattatctgatgccagagaatttcataaacaaacttgaatgggcaataaaaggaagcccccacactaggcaggcaatc

SEQ ID NO: 62958 - DNA, 736 bp, Homo sapiens
cttccaaggccctgtgctcatytgtattatttacttatctaatatttttgagacaccgtcttgctctgtcacccaggctggagtgcagtggcacaatcatagctcactgcagcctcgaactcctgggctcacgtgatgtctgtgcttcagcctcctgagtagctgggagtacagccacatgcaaccatgcctggctttttaacttgtgtgagcttcatgtgaatccacccctgaatacatgtaaacagaaaacactgaggtaaactaaagatagaagaaaccaagatattatttcctactctctttcacagtcactcaacaatcctgactccattgtctgttggggcgggaggacgttccccacacaaagcaattctccggcagattcttcagtggacagcaactggatgtcctctaatttaactcaatttttacaccatctacctggagatatagggtcagatcccataggttgagggtttagccccacaagattgcccacttcagatgccagtccccactgctgggaaagggagaggggccagaggttaaattgatcagcaatggccaatgatgtgatcagtcatgcctatttaatgaggcctctattaacaacatgaaggactgggttcagacaagcttccagatggataaacacgtggaggtttgtggcgggtggtgtgcccccctagagggcatggaagcttcacaccccttccctcatacctcgccctaa

SEQ ID NO: 62959 - DNA, 752 bp, Homo sapiens
agcttagcaggagtgtgtgtgaggtgacatggggaatatgtgaggtgacctgcctgatgtgtgaggtgacctgagcacatgtaaggtcacctaaggcgcatctgaggtgacatgggggacgtgtgaggtgacctggggaacgtgtgaggtgacctgtgggacatgtgaagtgacctggggaatgtgtgaggtgacctgtgggacatgtgaggtgacctggggaatgtgtgaggtgatgtgggtgcgtttgaggtgacgtgggggatgtgtgagcttagcaggagtgtgtgtgaggtaacatggggaatatgtgaggtgacctgcctgatgtgtgargtgacctgagcacatgtgaggtcacctaaggcgcatctgaggtgacatggaggatgtgcgaggtgaccttgggtgagtgtgaggttacctgtgggatgtgtgaggtgaattgggacttgtgtgaggttacctgggaaatgtttgaggtgacctgcgggatgtgtaaggtgacattggggatgtgtgaggtgactcagggcacatgtgaggtgaccttggggatgtgcaaggtcacactgtgtgagtgtgaggtcatgtgggatatttcaaactttgtaaggaaagcctgcaacaatatatggctctagaagcttcacactccaacactgttaatgcgcacatcctcaaggaactctaaatgtttccaggttagcttaaatgccatggagtgacacctgccccaggtacactcatat

SEQ ID NO: 62960 - DNA, 1397 bp, Homo sapiens
tcagtagtgagcaggttccagaggtgttcggccaacatgagcaggtgctccaggcctgatccaccggctccgcctgctccgccctaggccaccacgcaycactgtcttctatgatgtttgacttctgggagcaggtcttaccttcccagctggattggaagtctttgaaaacaggccgtctgccctatatcccctccctgccccaccttgcctggaacagaggcctcggacgtggcagagcaatagaaatctgctgcacgaagagcgatgcgcgaaggagggagaggaagggaactgtggaggcggcggcctgccctgccctgtcagagaggcagctatgctaggagtcttgcgtgctctctggttattctccgggcgctgcacagggagcctggtgaggagggagggcttggcaggctcctgggctcgccctcgcctggcaccaaggagcccgctgttatttctgtgtgttccaggcacacgctccagcaccactaggggacattttaggacattctgggggcagttagcaccgggggcagtggtcacctggtagaaaaataaaaaggtcctgagcatgtcctaagcggggccctcgggcctgcctgagcgcctcctctctccacttggagggcgcatggccgggaagaaccgtcaggaatcagcggctccaccgcctcacccctgttctagaagcaggatggagactggggggcgtttctccggcagcatccctggaggtggggggagcccacccctcgtcccctccagccctcaggtgtggagtcagtgcaggcgtcagcacccccgggcgcccctccgagcggggaagcctgcgggcggggcgcttccctgggcctcgggggaggcatcaccgcgcacacgagcagcagccagcgttggtgctcgagtcagaccagcgcgtcgctcactaggaccacggcctgaagccgctctccagcagctcagccccacgacggttccgctgcgagaagggagggggaaagaaagcaggttcgttggccattttccagtttttcttttttgccaaaagaaaacaactgaaaacttccaccttgtggcacctgccctgaggtacatgtttatttctgacatctgcagtggtgtggcctgtatcccccgccagggcaccaggtggaaccgcggggaaggaggaagaggaggggaaggaagaagatgaggggaaggaggaagacgaggggaaagaggaagactaggggaaggaggaagagaaagcccagagcagaggcggggtcagccgcacaggtagagtctggagaaacacaaatgtcaggggtagaaaaacaacccacttaaatctgggggactccagggaacacactcacgatttgattcctgaaacctttcagttatgc

SEQ ID NO: 62961 - DNA, 767 bp, Homo sapiens
gggggtcagaggctctgctcacctgatgtgaaaattactatttttaattctgacaactgtagggggaaaataatcacaaagtctgcttgaattttcatcaaaaatagtcaatgtggtgaccctggattaacatgttatgttttccagaaagccccaagagatgagttttatagtcttttgatctgaaagaaggaacatgtcagtttctgcctgcctgaaatctgcctgacaagattcatgcctgccactggccctcaaattaagggacaagctgccagtggtggtcacaggttactgatcctgcatttggagatgtgggccagagaggggagcgtggccgctcaaagacagcctctgactttcatgtcccctttctgtgcactgttatgagctcggttgtgtcctcctagaatttgtatgttgaattcccaacacccagtactgtgactgtatttggcaataaggactttaaagaggtgataaagtcaaaatgagaccattaggatggacccttccaatgtgactgtgaccttatgggaagaggagatggcaggggcacagcacagagggcagactgcgtgatgaggcatcaagaagaggrcctcagatgaaaccaaacctcccaatactttaatctcagacctccaacctccagaactgtgagacaatacctttctgttgtgtaagccacaatacctttctgttgtgtaagtctgtggcactttgttatggcagcccaagaaaactaacacatgcacacacatgct

SEQ ID NO: 62962 - DNA, 767 bp, Homo sapiens
gggggtcagaggctctgctcacctgatgtgaaaattactatttttaattctgacaactgtagggggaaaataatcacaaagtctgcttgaattttcatcaaaaatagtcaatgtggtgaccctggattaacatgttatgttttccagaaagccccaagagatgagttttatagtcttttgatctgaaagaaggaacatgtcagtttctgcctgcctgaaatctgcctgacaagattcatgcctgccactggccctcaaattaagggacaagctgccagtggtggtcacaggttactgatcctgcatttggagatgtgggccagagaggggagcgtggccgctcaaagacagcctctgactttcatgtcccctttctgtgcactgttatgagctcggttgtgtcctcctagaatttgtatgttgaattcccaacacccagtactgtgactgtatttggcaataaggactttaaagaggtgataaagtcaaaatgagaccattaggatggacccttccaatgtgactgtgaccttatgggaagaggagatggcaggggcacagcacagagggcagactgcgtgatgaggcatcaagaagagggcctcagatgaaaccaaacctcccaatactttaatctcagacctccaacctccagaactgtgagacaatacctttctgttgtgtaagccacaatacctttctgttgtgtaagtctgtggcactttgttatggcagcccaasaaaactaacacatgcacacacatgct

SEQ ID NO: 62963 - DNA, 887 bp, Homo sapiens
cataatcagtaagaacttattcaaccatttgtctaaaaatagatgttaaggctatcactttttttttttgctaatacaaataacgatgagtatccttgtgtatatatttttattcttattttatccttatgttagactcttaaaattggaagtgtatacactgaaattgctttcatcaaagattattccactttagcagaagtgtgtgagaatatctgtcttcctaagccttgacagcattgtttattatcttttaaatacctctgttatcaaattttatcttatcattgtttccatttatattgctttgattacttggaagggtgaacatttcaccggagtttgttaatcatttatagttaattttggggaatcgtttatccacttattgatggagggtcttcatggtttttttgtgtgttatctttcactatgttaaatatatcaattccttgtcattttgttacagatactttytttttcttaagcgattcagtgccctgagtcataaccatgtggaataatgggctcctgggaacagaagcaacagctgcgtggagggtgaggacaagctgacatttagaaatattctggtcaagagttccaattggtgtttgtttgctgagggcgctggtgtgaagcccggctgagtcatgaggttggacagacagtccaggagcggctgagtaaggcaaggtggggaagggcacatgctctggggctccctgagaattagggaaagcgactgatgaagtgggtgtgatggaaacagagaaaatgacatcttggagtttacaggcaaggaccgtccttaggctttgggaaagctcaagttgagataacagatggatgcaattccattccctaggaccaaggaagatgctcaa

SEQ ID NO: 62964 - DNA, 602 bp, Homo sapiens
tgaagctccatacccactgaacagcaatccccatttctgcctttcccagcccctgacagtcaccatcctgctttcgatttgtcctttgggcttcatttcgtccccaggggcctgtccttgtcttcagggccactgtgtccctgcttgtcctcttctctgtgaacacattcctcctgggtaagcttgtcatagtattgtttctaacagcaaagacaattttgaaacaacttgaaggttcaacagtgcaggattggttaaatatgttttttttttaatggcctactatgcatcatttgatgaaaattgcactgtacatttgttgacataaagatgttcatgatactgcttagttcataaaccatgttataacgttgcatgtataatgtgatcctatttgtgtgaaaaatagataaatacatagtgacatctgaatgaatgctcactccaaatattaacagtatttatctctaggtggtggaattatgtgtgatttaagcattatttctgtttgtcagcaatttctagtttttctacaacaaacacgkacttttagtgtagtgaaaaaaatacaggtcataagaaaaaagattctcttaggatat

SEQ ID NO: 62965 - DNA, 602 bp, Homo sapiens
tgaagctccatacccactgaacagcaatccccatttctgcctttcccagcccctgacagtcaccatcctgctttcgatttgtcctttgggcttcatttcgtccccaggggcctgtccttgtcttcagggccactgtgtccctgcttgtcctcttctctgtgaacacattcctcctgggtaagcttgtcatagtattgtttctaacagcaaagacaattttgaaacaacttgaaggttcaacagtgcaggattggttaaatatgttttttttttaatggcctactatgcatcatttgatgaaaattgcactgtacatttgttgacataaagatgttcatgatactgcttagttcataaaccatgttataacgttgcatgtataatgtgatcctatttgtgtgaaaaatagataaatacatagtgacatctgaatgaatgctcactccaaatattaacagtatttatctctaggtggtggaattatgtgtgatttaagcattatttctgtttgtcagcaatttctagtttttctacaacaaacacggayttttagtgtagtgaaaaaaatacaggtcataagaaaaaagattctcttaggatat

SEQ ID NO: 62966 - DNA, 1139 bp, Homo sapiens
gagttgaaaccaacatgaagctaaaagctaaatcaggcatagctgtggattgacagagctataaatccttgctgaaggagtcttgtttctttattgtctacaccatccaagatttaagggacagaagctctgaagatatataattattatctgtggtaactcagccagtccagaacacccttattctggagatatggacattatctgtaaaataaaaggcataaggttctatactccacccaaaggcagagctttcccagctgtccttcccaaaggcatgtctgatgatcctgtgttgatagcaggaccttcacacatatctctccacacttcgagagttttcacagaatttttttttttctttaaacttaaatgatagtacacactatgtccaaaacaacccaggtttaatcttctgggagaaacctttggaatattatcgagtcttttacaattatgtttctaaatctttaaaaggtcaaacagttgaaaatgaagccttttagagtctacttgtgtgagaaaggagagtggcccagaaaattaatatttgcttccagctgcatgtacatgaagagctaagaaaactcactaatagaaaacgtggaccgggcgcggtggctcacgcctgtaatcccagcactttgggaggtcgaagtgggtggattgtttgagctcaraagcttgagaccagcctcggcaacatggcaaaaccctatctctacgaaaaatacaataaataaacagatttggtagcacacgcctgtagtcccaactacttgcaaggctgaggtgggaggatggcttgagcccaggagatggaggttacagtgagctgaaatcatgccactgccctccagcctgggcgacagagccacaaactctgtgtccaaaaaaaaaaaaaaaaaaaaaagtttaaactgggtctgaccactatacattacatgtatcaaaacatcactatgtacctcataaatatgtataattattgtcaatttaaaaaataaataaaattaggaaaaatcaataatagttggtaaaagaaagaagaaaaaaaggaaggaaagaaaagggaaaatacgtaaaaagtaaaatcagcttaaacttctgctcagtagaaagtagtcataaatgatctt

SEQ ID NO: 62967 - DNA, 1139 bp, Homo sapiens
gagttgaaaccaacatgaagctaaaagctaaatcaggcatagctgtggattgacagagctataaatccttgctgaaggagtcttgtttctttattgtctacaccatccaagatttaagggacagaagctctgaagatatataattattatctgtggtaactcagccagtccagaacacccttattctggagatatggacattatctgtaaaataaaaggcataaggttctatactccacccaaaggcagagctttcccagctgtccttcccaaaggcatgtctgatgatcctgtgttgatagcaggaccttcacacatatctctccacacttcgagagttttcacagaatttttttttttctttaaacttaaatgatagtacacactatgtccaaaacaacccaggtttaatcttctgggagaaacctttggaatattatcgagtcttttacaattatgtttctaaatctttaaaaggtcaaacagttgaaaatgaagccttttagagtctacttgtgtgagaaaggagagtggcccagaaaattaatatttgcttccagctgcatgtacatgaagagctaagaaaactcactaatagaaaacgtggaccgggcgcggtggctcacgcctgtaatcccagcactttgggaggtcgaagtgggtggattgtttgagctcagaagcttgagaccagcctcggcaacatggcaaaaccctatctctacgaaaaatacaataaataaacagatttggtagcacacgcctgtagtcccaactacttgcaaggctgaggtgggaggatggcttgagcccaggagatggaggttacagtgagctgaaatcatgccactgccctccagcctgggygacagagccacaaactctgtgtccaaaaaaaaaaaaaaaaaaaaaagtttaaactgggtctgaccactatacattacatgtatcaaaacatcactatgtacctcataaatatgtataattattgtcaatttaaaaaataaataaaattaggaaaaatcaataatagttggtaaaagaaagaagaaaaaaaggaaggaaagaaaagggaaaatacgtaaaaagtaaaatcagcttaaacttctgctcagtagaaagtagtcataaatgatctt

SEQ ID NO: 62968 - DNA, 1139 bp, Homo sapiens
gagttgaaaccaacatgaagctaaaagctaaatcaggcatagctgtggattgacagagctataaatccttgctgaaggagtcttgtttctttattgtctacaccatccaagatttaagggacagaagctctgaagatatataattattatctgtggtaactcagccagtccagaacacccttattctggagatatggacattatctgtaaaataaaaggcataaggttctatactccacccaaaggcagagctttcccagctgtccttcccaaaggcatgtctgatgatcctgtgttgatagcaggaccttcacacatatctctccacacttcgagagttttcacagaatttttttttttctttaaacttaaatgatagtacacactatgtccaaaacaacccaggtttaatcttctgggagaaacctttggaatattatcgagtcttttacaattatgtttctaaatctttaaaaggtcaaacagttgaaaatgaagccttttagagtctacttgtgtgagaaaggagagtggcccagaaaattaatatttgcttccagctgcatgtacatgaagagctaagaaaactcactaatagaaaacgtggaccgggcgcggtggctcacgcctgtaatcccagcactttgggaggtcgaagtgggtggattgtttgagctcagaagcttgagaccagcctcggcaacatggcaaaaccctatctctacgaaaaatacaataaataaacagatttggtagcacacgcctgtagtcccaactacttgcaaggctgaggtgggaggatggcttgagcccaggagatggaggttacagtgagctgaaatcatgccactgccctccagcctgggcgacagagccacaaactctgtgtccaaaaaaaaaaaaaaaaaaaaaagtttraactgggtctgaccactatacattacatgtatcaaaacatcactatgtacctcataaatatgtataattattgtcaatttaaaaaataaataaaattaggaaaaatcaataatagttggtaaaagaaagaagaaaaaaaggaaggaaagaaaagggaaaatacgtaaaaagtaaaatcagcttaaacttctgctcagtagaaagtagtcataaatgatctt

SEQ ID NO: 62969 - DNA, 1139 bp, Homo sapiens
gagttgaaaccaacatgaagctaaaagctaaatcaggcatagctgtggattgacagagctataaatccttgctgaaggagtcttgtttctttattgtctacaccatccaagatttaagggacagaagctctgaagatatataattattatctgtggtaactcagccagtccagaacacccttattctggagatatggacattatctgtaaaataaaaggcataaggttctatactccacccaaaggcagagctttcccagctgtccttcccaaaggcatgtctgatgatcctgtgttgatagcaggaccttcacacatatctctccacacttcgagagttttcacagaatttttttttttctttaaacttaaatgatagtacacactatgtccaaaacaacccaggtttaatcttctgggagaaacctttggaatattatcgagtcttttacaattatgtttctaaatctttaaaaggtcaaacagttgaaaatgaagccttttagagtctacttgtgtgagaaaggagagtggcccagaaaattaatatttgcttccagctgcatgtacatgaagagctaagaaaactcactaatagaaaacgtggaccgggcgcggtggctcacgcctgtaatcccagcactttgggaggtcgaagtgggtggattgtttgagctcagaagcttgagaccagcctcggcaacatggcaaaaccctatctctacgaaaaatacaataaataaacagatttggtagcacacgcctgtagtcccaactacttgcaaggctgaggtgggaggatggcttgagcccaggagatggaggttacagtgagctgaaatcatgccactgccctccagcctgggcgacagagccacaaactctgtgtccaaaaaaaaaaaaaaaaaaaaaagtttaaactggrtctgaccactatacattacatgtatcaaaacatcactatgtacctcataaatatgtataattattgtcaatttaaaaaataaataaaattaggaaaaatcaataatagttggtaaaagaaagaagaaaaaaaggaaggaaagaaaagggaaaatacgtaaaaagtaaaatcagcttaaacttctgctcagtagaaagtagtcataaatgatctt

SEQ ID NO: 62970 - DNA, 1314 bp, Homo sapiens
ttttttttttttttgcattgcttttgcagccaaatgtattctgactgaaacacagggtttgtaggatttattacattatccgtaatcttctctaattgatatttttgtaggggagatgccatcattttgtcaaattaatattatcaggatatttgaaatgttaggtttttccgttttttagaaaaagaaatctgtggatcttaaatttttgcattacttattttcatatatgtcaaatcaagttagaatgtttcttgatttttaaaagatatatatggtcagttatagtaatagttgtcacttgccacagaacagtagtaaaaaaatttgtgaaatgcttaaatgttgctgaataaaagcatcatgacaaattcatggatactaattatttaatgtaaatatcaccattttaagaaaagaatacggtgaaaccctgtctctactaaaaatacaaaaaattagccgggcgtggtagctggcgcctgtagtcccagctactcgggaggctgaggcaggagaatggcgtgaacccgggaggcggagcttgcagtgagccgagatcgcgccactgcactcctgcctgggcgacagagcgagactccgtctcaaaaaaaaaaaaaaaaaaagaaaagaatatacatgattgattcaataggttatattttaaaataaattattaacttacctgtttattcaaactgattgctatcatgataataatactgccttttgtaatttttattgggcaatttttaacatctagatctccatatgaaagctgttaccttaagagtactaaaaactctttgatctatgcggatagccatttttaattaaaatagtatgtttttcttccatctgtaaataatatttttagatatttgactcttctgtgaaaggaaaaggtaatctaaaacttaatttcttcacagacagaaaaagcgaagtagagaggccagcaagtattcctctgtcctctggctatagtacagcatcatcagattcaactcccagagcctctacygttaattactgtggtttgaatgagatttcagaggtaagaaaatgcttagattatttcctttctaaatgaggaaaacaagcaagcattagcttttgttgtaaatattgctagcaagaaaaatagcaaacgcgaatcttagtctctcaaaattctttcataagtaaacagtacttaatgcaatgtttcaaactgtgttttgtacattctcggtccatctttgatgatggtttactttgagaaatcatctaaatttgttgctttttaaattaaaggaaacaacaatccagaaa

SEQ ID NO: 62971 - DNA, 964 bp, Homo sapiens
cttccatagtcttcctgctactggcaattcaaaataaccagacttatatgtgcgttcttctcaacaattgtttttttagctactgaaatatgtggcaatgtattcatttgtgtaattccacattttcattatactttagacatggaaagatctttgtgcttctagaaaatttgtactcacggttttataattccaagaacagaatttgctctaaatactctttcttttatatttttcatgaaattaattattgttaagtatcttctggactccctgtgtcttgaaataaaattcctttagtatatctttataatcacagttattgacaaatatctgatatgtattggttttttaaagtttgttcaaccagagaagaaatcagttgttttaccagaggagaaactaagcctcagggtccttcactcctatgggtcctttcccaggtatggggagacgctgtaggcagtgtgctcagatgctcacgtgtttttctgtttgtttggttttttttttgtaaaatttgaaaagaaagctattttagctgcaatcatgtaagaccagtgcttcgactttgactgcccttcctttagtgtcatgttttggggtggcattggaaagaccgtggccgtttttggtgggggtccaamaaagggagaatcaaactggggctgctgtggtctaaaattaagtgggttctattttggttgtttgtaaacacttccatgtatagtgaagctgttgataattgtccaccttggcaactccctggagcattctgacacaggtgtggagcccgaggtcatggtaatacccagtgcacgtgtccacagcactggtatctcatgtatgctcatgggtggcgggagtgaaactaggtttgaaatacacggagacagaagctactctctgcaaaacccttcctgttattagatgtgcaataatagcagaggatgtgggtttatca

SEQ ID NO: 62972 - DNA, 901 bp, Homo sapiens
cttctactgtttaatctcctctgatgcctcccattttcaaaacccaatcagaagcctggaacaggggcgtcttttgatgtgatccatggcagtcagcatcctagggcaccaagctgggcaaagggtcgagcttgcatctggatgtgaagataagtgactttgtgtcactccaaaactgagaccagtagaggaagattagaattatatgtgttacctccaaatgaagtgaattttgatttctggaaagagggtctgacaaaatctgagatggtgatggtgaaattacgtacaagattccagttttaagtgaaggattgaattacttctgaagttcccttgcaaactctatttctgcctctaaccactggcatattgacaccaattgtattatcgtttggccagctgtgatcttggaaattcaaagtttgggctttggctaatagaccattaagtgggtgcattttgatggggagagtgagaaagcaragggaatattctgagtatgagctgctcagttgggattcaaccccatgtgaataaataaattggacttaactgtggccagagacagtctggggagagaagtgacagaagaaaaagaaagaagcttgtcatcaaagaagatgtaggatttggagaaataaaatttgcctacttaacaattttactgattatgtatattagtcctactttcctttttagtttaaaatgacagtaaaaaggccttaatattccctgtaagaaaattatcgtcatctttcatgaaagatgtcagagaagcttgtgtgtcttttctccagcatgtttcaccaagactcactccatctcctggagtgatttgaagagggtgacagaatagacccccagggaatgcacatctgagtctctgccatgcatcact

SEQ ID NO: 62973 - DNA, 2548 bp, Homo sapiens
tgcattcatggagcccacgctcaaaataacacctccaactatgtgcagagattttgaagtttagcatttccctaaacatccctgaaagtgatagcattccaatgaagactgatagtcggctgagtatgagtcaatgaccctgagatgctaggaaactttctagactcactcagtagaggcttgtgctgtgcccctggatgtccctccaggaccaaggccctccttccagctgccgggaggtctgactgctgatcactcccaagcgattcttccccagaactgcccacagtagaatgactgtcctacaaagcgtctaggagtagagaggcccagtatccttacctcagctacgaacagctctgcgaggccatgcagtccaaagctccccatggattagctgagctctgagttgtggctgcatctcagtccrcttcctccctctgcctggtactggagagcagaggcgaaagtcttactcctcacaggtgttaatcctgagagcacttgcaatctctaactcagcacctcaggaaacccagcccaagagacttcacaatgagagtggctggagggcaacatagagatactgtaattcaacttttcctcttttgtaaaaaataaagaaacctcagccaagaacagttaaacaatttccgccaaatcaaaatctagttagtcccaggaccagagcctctatttctggacttacaggtgggtgttcctttattagaaatggttttcttcaaggaacttttaagtaaatgtcacctaacaaaatcacatttgagcttaaatctggccaagtaacagttaacattccatctctattcagggtcccatgtgccatatcatatttctagaaactctactaaggaagaagggtcagaatgcatgagagagatttaaggcatcagggtggttgaggtggaagtacctttcttctgcatgtctactgactatgccaggatcttcacatgttatcttatctagccttcacagcaagtcagtgaagggaatatgcctgttcttacttaacaaatgaaggaactgaggttcagttaggtcatgtgggaactgaccacagagctcttgatgtgtccattcacccaagcacctcactgggactcctaataaacattcgctatctcccttggctcaccaagtttgcaaatgtgaaagcttcattatcatttaccttcctgagtctcactaattaaagacagcttccccacataatatacctgtgaacctgactcgttataaataaaaatcaacaatgctacactttccagagtgtgattagcattcatgatttcatagtgccaaaataaatcatttactttgaaagatcagtaaacctaaaacacattcttacggctgtgtagccagtataaaaaatttacaatgtcatcccttaactaggcacttaagaaatcatttggcagtttactttttgccaaatgccatacattgttttaatgtcagataggaagcaaaagttatttatagattgaaatataatactattaaagctcaatcttatatacagtaacacattccaaatagagttctcaacactacattttaaagcgcaaatcgctgtattcaataccagcatatgaatatcatcttcttaatagagtaccagatgtgactaagactccaaaagaggagacagttaaaagaaaaacctaataatgtcaatggtgtattttttaccttaacctgaaaattaatttttgtgactaaacttctaaaacctgttttttttaaaatatatacgtctgtgaatcacagtaggccagtcaacaggagccacagttaaatgtgagtttccaacaatggttgttgcttttaccaatgctaggctttgacattttagttaatctaagtaattttttaagagattagcatttcttatttgggcatacagacacaacatttttagccttgtgggactgtgttttcatagtaagataagcctttggataatttccctttggggaaattctagtatttgtagttttatgagcaccaattgttatactttagttataacaaggcagcttctggattctataaataaaagaatttcccaatatcagacaatttttaaataaataaacaaaaatggaaaataattttaatgcaaactgattattgcctcaaaagtgaaggagctgtctccattcttgcataaacagaacaatgttctatttatttccaacatataggatgactaccactggttttgagggctatcactggttttactttataggcttaaaaattagtgggcattatagataagggaagatgagataaaatgaaatgtaaaatactaagagtgttctctcaactcagattactattttccatttttattctataaggaaatcagttccttcctaaatagggatgtgaggtaaaatacaggacactcaagtaaatatgaattgcaggtaaactatttttttttttagtataagtatgtcccatgcaatatttgtattgtgcatgtgaatcacctgaatatcttgttaaaatg

SEQ ID NO: 62974 - DNA, 748 bp, Homo sapiens
tgcatatcctggatgttttttttagacagtctcgctctgtcaccaggctggagtgcagtggtgcgatcttggctcactgcaatctccgcctcctgggttcaaaggattctyctgcctcagccttcctaatagctaggattacaggtgtgtgccaccacacccagctaatttttgtatttttagtagagacagggtttcatcatgttggccaggatggtctcgatctcctgacctcgtgatctgctgccttggcctcccaaagtgctgggattacaggtgtgagccaccgcacccagctgatatcctggattttatatgtaactttttagaattttctactacctcagagaactgctactagggatagtatcctattattcaggatactataaatgtacatctcctctccctttgttttgggataatataatgctaggttacttttattgggggcttttcacgtgacagtcactgtgctcagtggtttacagatattgttggactccttacaagaactccatgagcttactggaagtatccatctttaatggacaaggatgtgaagcacagggagatttctattttgaccagacttacagcaccagtaaagtggcacaaccaaaattcaaatccaggtctttggcctccagtctgtgctaaaacccacaacagaatacaccaaggacatttagaaaatatatagtaaggtgtcatgctgggcatgcttgcttgcccagtgtccccagtc

SEQ ID NO: 62975 - DNA, 748 bp, Homo sapiens
tgcatatcctggatgttttttttagacagtctcgctctgtcaccaggctggagtgcagtggtgcgatcttggctcactgcaatctccgcctcctgggttcaaaggattcttctgcctcagccttcctaatagctaggattacaggtgtgtgccaccacacccagctaatttttgtatttttagtagagacagggtttcatcatgttggccaggatggtctcgatctcctgacctcgtgatctgctgccttggcctcccaaagtgctgggattacaggtgtgagccaccgcacccagctgatatcctggattttatatgtaacwttttagaattttctactacctcagagaactgctactagggatagtatcctattattcaggatactataaatgtacatctcctctccctttgttttgggataatataatgctaggttacttttattgggggcttttcacgtgacagtcactgtgctcagtggtttacagatattgttggactccttacaagaactccatgagcttactggaagtatccatctttaatggacaaggatgtgaagcacagggagatttctattttgaccagacttacagcaccagtaaagtggcacaaccaaaattcaaatccaggtctttggcctccagtctgtgctaaaacccacaacagaatacaccaaggacatttagaaaatatatagtaaggtgtcatgctgggcatgcttgcttgcccagtgtccccagtc

SEQ ID NO: 62976 - DNA, 748 bp, Homo sapiens
tgcatatcctggatgttttttttagacagtctcgctctgtcaccaggctggagtgcagtggtgcgatcttggctcactgcaatctccgcctcctgggttcaaaggattcttctgcctcagccttcctaatagctaggattacaggtgtgtgccaccacacccagctaatttttgtatttttagtagagacagggtttcatcatgttggccaggatggtctcgatctcctgacctcgtgatctgctgccttggcctcccaaagtgctgggattacaggtgtgagccaccgcacccagctgatatcctggattttatatgtaactttttagaattttctactacctcagagaactgctactagggatagtatcctattattcaggwtactataaatgtacatctcctctccctttgttttgggataatataatgctaggttacttttattgggggcttttcacgtgacagtcactgtgctcagtggtttacagatattgttggactccttacaagaactccatgagcttactggaagtatccatctttaatggacaaggatgtgaagcacagggagatttctattttgaccagacttacagcaccagtaaagtggcacaaccaaaattcaaatccaggtctttggcctccagtctgtgctaaaacccacaacagaatacaccaaggacatttagaaaatatatagtaaggtgtcatgctgggcatgcttgcttgcccagtgtccccagtc

SEQ ID NO: 62977 - DNA, 748 bp, Homo sapiens
tgcatatcctggatgttttttttagacagtctcgctctgtcaccaggctggagtgcagtggtgcgatcttggctcactgcaatctccgcctcctgggttcaaaggattcttctgcctcagccttcctaatagctaggattacaggtgtgtgccaccacacccagctaatttttgtatttttagtagagacagggtttcatcatgttggccaggatggtctcgatctcctgacctcgtgatctgctgccttggcctcccaaagtgctgggattacaggtgtgagccaccgcacccagctgatatcctggattttatatgtaactttttagaattttctactacctcagagaactgctactagggatagtatcctattattcaggatactataaatgtacatctcctctccctttgttttgggataatataaygctaggttacttttattgggggcttttcacgtgacagtcactgtgctcagtggtttacagatattgttggactccttacaagaactccatgagcttactggaagtatccatctttaatggacaaggatgtgaagcacagggagatttctattttgaccagacttacagcaccagtaaagtggcacaaccaaaattcaaatccaggtctttggcctccagtctgtgctaaaacccacaacagaatacaccaaggacatttagaaaatatatagtaaggtgtcatgctgggcatgcttgcttgcccagtgtccccagtc

SEQ ID NO: 62978 - DNA, 907 bp, Homo sapiens
ggcatccatttcyagtggacctgtgggaatataaacaggctcttaaaaatcctgtcagcttattgctagcatgatctgctgattttcctccctcctctataggttaaattatcaccttcttttgtttgagagcaggttttttgttttgttttgtgttttgagacagagactcattctgttgcccaggctggagtgcagtagcgtgatcttagctcacttctaactccgcttctcgggttcaagcgattctcctgcctcagcctcccaagtagctgggattacaggtgcccgccatcacacccagctaatttttgtatttttttagtagagacggggtttcaccatgttggccaggttggtctggaactcctgacctcaggtgatctgcccacttcaacctcccaaaatgctgggataacaggcatgaaccaccgcgcccggccagagaacaggtcttattaagggctggcttgtaaaggattttgtaggtttagaatttggtattaacatagtttggtagagtcatttcctgaccttcttattaggttttctttggggtagagggcaggtggtagatagcaggtacacacacacaaaaaaaaaaaaaaaaaaaaaagagggaactggggaactgcactctaaatagcagaaagaaaagtaatcagattctgtttagtaccattatcagcatcttgtagatttagtgttgatttccatttagaaatcaaccataacactacaaatctctcactctcccaatatttatgattttcaggtgttcagaaaagttgaaagaagtgtatgctcaacatccatatgcctaccacctcaagtctgcaattagcattttgctattattgttttatcatacacatatctatccatctatctccatccatgattccat

SEQ ID NO: 62979 - DNA, 597 bp, Homo sapiens
tgagaccaaaaaagtttaagaactgttactgtccataaatctctgtgtgtttaagtctttttctaaaggatagtgttctagatgtgaactgctaggtaaaaagatatgcacatttaaaattaaaatcctgccaaattgcttttcaaagagctttgccagctcaaattcccaccaaatgttatgtgagaatgctcgctgacctacacatgggcaatgactggaatgatcaaactcttagattttgtgattagtctccataaagaggtttctcataagatttgtttcaggagtaaactcctytaatccatctaaaaatgagattcaactcagaaaattttaatttaaatataatttctcaggcttgactgtccccagcttaccaaaaaattacctgactactcgtgaatggttgtctggaacagagacttttcccacagaaacaatggtagttaacagccctcaatatgtaacgaaacaaactcccacaatgtgctgaattctagatgtgcactacattgtaaaaactgacaacactgtttctatctgaaagagcacttcatgccctagttggaatactgggaactctgatacaatcca

SEQ ID NO: 62980 - DNA, 641 bp, Homo sapiens
gatcctgcctttttaaaaaaaagtacaaagtgggaaaattacatcaaagggctaagggtggttgttcagttttggggtcagagtgacaagagaatcaaatactggttccaggcccccaaaacaggccactaagaacaaggaatctttctgaatcataatttcttcaattacaattatacaggctgctgtaaggatacaatgagagatctaaccgaagggctggattatacttagtacrtggtaaatgctagataaatggtagtcattttactttttattggtaatatagttacattgctttttattgcaaaaatattataaacaagaatgttttcattatttgactattatatagggtatttcctgaacaaatacttcttaaaattagctgtcttctccctttaaattttcagaaatgaaatcaaatgtgaaaataacatttctgttaacccacatgtaacatttacaaattgttctgtcttatctattttctaaatttttttaaactataagaagtgcttgcaaaagaaggttaaatttgtacacttaacacataaaacccaacagatgctgctgtaaagggtctcagatgtaacactgacatattcttgtggtgtctttgcattttctctgtgggatcc

SEQ ID NO: 62981 - DNA, 670 bp, Homo sapiens
gaactgcctgagttcaaatccagattctgtcaagggctgtgtggctatgggtgaattactccatgtctctatgcctctgtaaatggggatgcaacaacagtatctagttcatagggttatgatgattaaactgtgaaccaccaaaagcatttagagcactgtgggctacatgtaaatgctatttaagtctttgcacatttactctttccctgtattttctagaacaagtcacgttaattttatcatcagaaaatctactccctgggccaagcacagtggctcatgcctgtaatcccagcactttgggaggccaaggtagtggatcacttgagctcaggagtttgagaccagcctaggcaacatgtaaaaccccgtctctacaaaaaatgcaaaataaaattagctgggtgtgggggtgcatgcctgtagtcccagctacttgggcgggtgagrtgggagaatcgcttgagcctgggaggcagaggctgcagtgagccaggttcatgccactgcactccagcctgggtgacagagcgagactccatctcaaaaaaaaaaaaaaaaatctactgcctgactaccacacaggccccatgagcttgtcactttatctttggcccttcctttcaaatgggcacaacctcaccttaatgtgtacacacacacacac

SEQ ID NO: 62982 - DNA, 1082 bp, Homo sapiens
  misc_feature (1)...(1082): n = A,T,C or G
tgacttttagtcctgagtttacactataactttatagctgcccagaatccatgcagagcaacaggatgattcagcaaggtgggtgcagaaaagtcacacttttgagatctgtctctccctgccatcacttttggggartgcaaaataacataatctctttgattagaacaattcctgagaactagagggcagacacagacaagtattgcccaagaggagcaagaacagtctctttctcattacgtcatcttccctgaagacactagtgattgagatacagaaagtatgagatcacttattatctacctctgttgtacagttatttcgactttgactttcttgggctgccagtgttccagataagggttttgtaacaccaggattgagaaagattttagctatttcacatcctcccaagatagtaggaagttgtctgcgcatattttttttttctcaaggcttctctgtactcagccattatttaattaaacaccagccatatgctgggatctgctggttctctgcttgacgcattgccagcctggtggcctcaactgcaatttgaagttgacaggcgtacaatacaaagctcaggagacactaggaagaaaaggacttggcttggaggaatcaggaagacccagggagagaaaagtgtgccgctccaagggagggtttgcccaagagtggctcagcggaaacgtggcagtggaatttggaatctggattgtttgtcagaattgataaagacattcttataaggaaatgtatctgtgaaaagttgtttgccactcggggagggagaaaaatgattatagaattttggagacaaaaatgtatacgcagcagtcattatacacatgatcagaaggaaaaccagaagatccaggggccaaaggggaataattgatttcttaaatggcagcaagactggatttgacaactctcacgatcaagaatatttctctgtatttaatctacnnnnnnnnnnnnnnnnnnnnnnnnnnnnnnnnnnnnnnnnnnnnnnnnnnnnnnnnnnnnnnnnnnnnnnnnnnnnnnnnnnnnnnnnnnnnnnnnnnnnc

SEQ ID NO: 62983 - DNA, 1082 bp, Homo sapiens
  misc_feature (1)...(1082): n = A,T,C or G
tgacttttagtcctgagtttacactataactttatagctgcccagaatccatgcagagcaacaggatgattcagcaaggtgggtgcagaaaagtcacacttttgagatctgtctctccctgccatcacttttggggaatgcaaaataacataatctctttgattagaacaattcctgagaactagagggcagacacagacaagtattgcccaagaggagcaagaacagtctctttctcattacgtcatcttccctgaagacactagtgattgagatacagaaagtatgagatcacttattatctacctctrttgtacagttatttcgactttgactttcttgggctgccagtgttccagataagggttttgtaacaccaggattgagaaagattttagctatttcacatcctcccaagatagtaggaagttgtctgcgcatattttttttttctcaaggcttctctgtactcagccattatttaattaaacaccagccatatgctgggatctgctggttctctgcttgacgcattgccagcctggtggcctcaactgcaatttgaagttgacaggcgtacaatacaaagctcaggagacactaggaagaaaaggacttggcttggaggaatcaggaagacccagggagagaaaagtgtgccgctccaagggagggtttgcccaagagtggctcagcggaaacgtggcagtggaatttggaatctggattgtttgtcagaattgataaagacattcttataaggaaatgtatctgtgaaaagttgtttgccactcggggagggagaaaaatgattatagaattttggagacaaaaatgtatacgcagcagtcattatacacatgatcagaaggaaaaccagaagatccaggggccaaaggggaataattgatttcttaaatggcagcaagactggatttgacaactctcacgatcaagaatatttctctgtatttaatctacnnnnnnnnnnnnnnnnnnnnnnnnnnnnnnnnnnnnnnnnnnnnnnnnnnnnnnnnnnnnnnnnnnnnnnnnnnnnnnnnnnnnnnnnnnnnnnnnnnnnc

SEQ ID NO: 62984 - DNA, 619 bp, Homo sapiens
ccgcctcggcttcccaaagtggaaacacctatttctaattccgcaaaggagcctttacctagtagtagcagccttaaatatgtgggctggcaaaatattttgcaaatattttttaaatattaaagttattgttgcacaagtattttgcaggtcatactagagttcctagggaaaaagtaaaggatggtagacccaaagaccaaaggttcataattgagtccaagctttggcctcaattctggttctggcaaagcacctaatttccatttaaggagttatttgtccaaaattattaatatattattttattctttaaatttttagattcagggattgattttcagtgttggcattcaaattatctcaggaagtatatgatctaagtgtttcccacagtctttgatattcctgacatgtttttacactgacatagtagttaagttccattcctgggtcatmgcatgcacagaacttactgatctttgtatttatgaaaggaaactgcacactagagacatactacagaagtgactaaccggtgacactataactatctaaaattatggtaaagatatgggatatattttcaataaaatgcattagataattcagaagtcaa

SEQ ID NO: 62985 - DNA, 677 bp, Homo sapiens
atccgcctgcctcagcctcccaaagtgctgggattactagcgtaagccaccgcaccagtacatttttttcttttctatgaccccttgagtcctggagtgagaaattgtgagatgctgcaggactagagatagaagagggagggaagtgatatttcttaaagtctcgtttgaactttaactttttatacaatctgcaaatctgcagtcttaaacccttagttttgccagtgcaaaatgtggattccaatgcaataatatacagagataattacataaaattaagtgagatgttcaccaaaaaactctattggttttctattgtygccataacaaattaccacaaaccaagtagtttacaagaatacaaacttgttcttatacagttctagagataaaagtccaacatcagtttcaccaagatgaaatcacagtgttagcagagttgcattccgagtgcaggttctagaggaaaatccatttccttgctttttccagcttctggaggcctctgcattccttgatgcataacgttttcttcctctttaaagcacattacttcaagttctcctttcattgtcacatcttgttttctgatgctgactcttgtgcttcaattttataatgaccattgtgattacattgcccactggacaagccaggatagtcttcccgtgttg

SEQ ID NO: 62986 - DNA, 587 bp, Homo sapiens
agcaagggtgatttttgtcagcactttgtctctgtcttcttgttctgcttccctctgtgctggtttcattctcrtgtaggatcttccggtgcagtggtctctggcaattccaggctttcaccatcatcttacccaaactctcagtggaaaagggcttcctttctataatggttccaagagaggtcctggggtggagtctcattggactgccttgagtcatgcacccagtcatgatccagtccccatggcctgagagggagctaatgggtcagacccgggtcacaggaacagaaaagcaaatccagatgtcacgttcagcttgatcagactcctgagaggctaaagtcatcctgaactgaggaatgtgtcctgcagaggctttgtttggagatgtgaaggccgccaccttctgcttattcctggtgatttgcttttctctttcctcctttttttcttctgccgaccacctccagttctcccctccctctatcccttttaacagccctcaccctgtcctctccatctgttgctctttttatttctggatctccttctgtccatctctttatctctccctgtagcttgct

SEQ ID NO: 62987 - DNA, 561 bp, Homo sapiens
tttaatcatctgtccttgataaaacaaatattttagatacagacgtaatgaatcatctctccctgtgtgcttctgtaaacacaaaatgattcagctgttgctacctactgagatttcattttgccataattttatcaaccttgtagagtcagatgggttgtcattgtaagaagagcaattttcagaaaaatataatctattgagagtttgcaggtcttttcacagttaattagttatttctggcttttagactttgttaatacagcataaaagacataatttatttggggaatggctctgttggttaatagagaaatttttgattgttttcagtctrtacctgactgtaatatttctctgtttgattattggaccgtttatatcagatttactctggagaaccttgttgaaaatagagattttagagctccacttcagacctgaaccctaattggtggatggtgtggagaaggggatggagaatctgcgttttaaataaactctttaggtgcttcttaggtacactaacgtttgggacagccttgtgtgagctagttatat

SEQ ID NO: 62988 - DNA, 1371 bp, Homo sapiens
tattacaaggcccattttctagaaaaggaaactatggttcagagaggtaaagtcacctgcccagagtcacacagtgaaaaatcagcaagggtgaaattctagcccaggtctgcctgactccgaaatccatgctgtttcttggcgccacttctccttacaccttactaaagaaaacatggatgtttcattgtctttctttgtggttgctttttttttaaaagtaacaaaccccactggggcattttcagtggttttctggtgtcatttctcccaccttaattgcctcctctcttcttttctcgacaaaatctccaagctttacttgtctcctgtcttccctttggcccatcagattcccaggcctttgttccctccgcctctccatccacataacttttcccatccttcaatgccccactccagcctcacctcctccaggcagccttccctgatctccccctgcccagagcagagtgagctcccttctttctgacctctggtcatgcacactgtctgtgaacatgggacacctcagcagagggggcctttcagagttagagaattcccaagtccatatcatgtctttccagctgggttggaagaatctgctggaggccgggggctgcccgtgcttctgtgtgtctgctcacatcagtcccctgacccaaaccctcaatgggcatgggatccagtattcatccatctaccatgcatcatccgtctgtccatccatccatatatgtattcaytcattcaatgggtatttattgtgtgcagtgtaagagatatggagattcatcagatacctgcagtcagaagagagagagatagagaaggaggcaattagaacacagtcaataaatgctatggaaagtggcatgggttcatgggaatctttccagggaagcagacatctgagttggatcttaaagggagaatggagttcattaggtgaaactaggaaaccattcttcagacaggctcctaacacatgtcctctagggtttgacctaacgttcttcccatctcatccccatcagccactgtaccactcgggtcccaacagggaagctagtctgctccagtcagatcccaggaggcgtgttagtttccacagggactacacaattcctaacaggcagggttggggaccacacaggagagtgtggttacctggctagttgtaatgcagccattaccacttgaaaaggtgagaggaaggaatttatagaaatccataaagagagcgctggttagagacccccttgagggcacagtgactttccatcaaaggaaaagagcagaccaagtcgacctagcagggcaggaaccaagatctacaccttgacctcactggcctctcatccactt

SEQ ID NO: 62989 - DNA, 670 bp, Homo sapiens
atcctatctcaaaaaaatgaattagtagtaataataattattgagtatttagtatgtgatatggtttttggctgtgtccccacccaaatctcaccttgaatagtaatagtccctacatgtcaagggtggggtcaggtggagataattgaaacatgagggcagcttccccacactctttttcgtggtagtgaataagtctcacgagatctgatggttttataaatgggagttcccctaacacatgccctcttacctgctgccatgtaagacatgtcttgcttcccctttgcyttctgccatgattgtgaggcctccccagccatgtggaactgtgagttaattaaacctctttcctttataaattacgcagtctccggtatgtctttactagccgagtgagaacagattaatacagtatgtgccgggctgtgttctaagagccttccgttaattacgtatctctagtcctcacaacaggtctgggaggagtaggtactcttaatacgatcattttgcagatgagcagactaagttcgcagagattgatgagatggtctcagggctagggtggggcttagctaagatttattcaaaggcaaaagttgttttacaattaatcatatacatgttgtgtgtgtgtatgtactacatacaccatatcttgcataat

SEQ ID NO: 62990 - DNA, 670 bp, Homo sapiens
atcctatctcaaaaaaatgaattagtagtaataataattattgagtatttagtatgtgatatggtttttggctgtgtccccacccaaatctcaccttgaatagtaatagtccctacatgtcaagggtggggtcaggtggagataattgaaacatgagggcagcttccccacactctttttcgtggtagtgaataagtctcacgagatctgatggttttataaatgggagttcccctaacacatgccctcttacctgctgccatgtaagacatgtcttgcttcccctttgccttctgccatgattgtgaggcctccccagccatgtggaactgtgagttaattaaacctctttcctttataaattacgcagtctcsggtatgtctttactagccgagtgagaacagattaatacagtatgtgccgggctgtgttctaagagccttccgttaattacgtatctctagtcctcacaacaggtctgggaggagtaggtactcttaatacgatcattttgcagatgagcagactaagttcgcagagattgatgagatggtctcagggctagggtggggcttagctaagatttattcaaaggcaaaagttgttttacaattaatcatatacatgttgtgtgtgtgtatgtactacatacaccatatcttgcataat

SEQ ID NO: 62991 - DNA, 684 bp, Homo sapiens
tttcaggagaagttttaagcttttcatttgaaaatagtcatgtatttacctatagcacatataatagcatttaaaaaaactctcattaaaagaatgtcctccatttttatatacctgtatataaaatataattgtataaagcatgctttgtatactttccacctctagaaataataaaatcagcaactacaatctcccatttttttttaaagaaagacctactacacttcccttcatctagaattgaaatggttcataaatctatttacttttgttctctaccattaaggagttggcaatatgaggccgagtgtggtgactcattcatgcctgtaatcccagcactgtwggaggccaaggtgggtggattgcctgaggtcaggaatttgagaccagcctggccaacatagtgaaaccccatctctactaaaaatacaaaaaattagctgggcgtggtggcggatgcctgtaatcccagctactcaggaagctgaggcaggagaattgcttgaacccaggaggcagaggttgcagtgagcaaccagaggttgcagtgaggttgcagtgatctcaccattgcactccagcctaggcaacaagagcgaaactcccatctcaaaaaaacaaagaagttggcaatatgaggtaaagttgtatttgagggccacatgataaaagttgctt

SEQ ID NO: 62992 - DNA, 1645 bp, Homo sapiens
caaatttcaaattatactttgttttctacagtgtgagttgtgaaaagtagtacaaattcactgtgattaccactagcatgttgaaagataacattttatgggtaaaataagtacttattgctttaaaatgatagcctcagatatcatccaggcattaagtttatatctacagagagtgttcatacaaaacttacgtatatatctactgatggtgttcatataaaacttgacctttccatccattcagtctttatctcttcacatatacctttgtatttgcttaaagactactttgtctatttagcaactcaacttttggttcattgaagctagaattttcacctgtatctctacaaatctatattaattttatttcaaaatgactgtttttgatttgttttcccagatcttacagtatgctccattggaactagacttctaaatcatagagaaatctatttcttaaatgacatcaatctaagatccaccaaaatgttaaccctatgagggcagttctgtgttctgttcattgtttatcgcacacctagaatggctctttacatctatgggagctactcagcaaatacttgttcaatgattgagtgaatctagtccatctattttgactacataaattaattatttgataattatatttcaactatttaactaacagttaaatatttacatttcaactatttacatgtttgaactattcacaggaaaatgctatgaccaatttcttttcttgtagcctttcttttcaggagactaaaacttcaatgcatgcaatgctaatttgttgtcagcctcatgacatcttaaataaagaaaaccctctttatcctggggtggtttggatgaacttagcggaatgctcaaaaactaaaggtgaaccaaaaagaaggaagtcaatatagttcaggaagctccctcctcctgttggccttatttcgattcttctagggctatttacacgtagccaaataccccagaatttaaaattaaagcctttggaatgtctggcagaaagaatatattctagaagtaaaacctcagacttagattcttttgactgtttggcatcattattttgaatttgcaatgtgaatgagaaacaaacaaatgaaaaagataaagtaaaagaaaaccctcaatttcaaagttgcacatatttrtcattatttaaaaagaagagtacatgttaaaggcctaaatattttaaataaacattttctaccacaaaagatagcattttatcataaaattggcaatttttagaccattgaacttaatttgaatggactaaactttgtctcttggcaaccagaatccacacaaattggtaggcactttctctggaggaagatcatgcttctcaatacttatgaactccaagctaaaggctggctttactactgaaaacatcacaaagttaagccaccagtatagacaggaaggattttaagtttctattttctcttgtttgtgtgtgtgttcaattaattttaaagaaataacagtgagattcagatttcttaaaaatattgtttaggacattattaatagctcttatacagccattaacacatgctcgttatgatgagctagcgatgctggttataaattaaaggatgtgtacact

SEQ ID NO: 62993 - DNA, 1172 bp, Homo sapiens
tgtgtgcttcagggagaaccagcctaacctccagagctgactaagctaacggaatcattttccctttgtccacaatggactcaggaatgcaaggctaagccaatagatttcatgacattttcttgaccaaaaagactggttaaataattgatgggtaacccaatattagctgacaaaactcagtagatttttgctctgggcatgaaaaagagatgctcttgctcctaagagagaatgtctggaagagataatctcagttcctaagagagaaccactgaaagagatcatctctcctcctctgaactttaaatactgacacgaggcctagatttcccacaaccattgtctttctgtctgacaattaggctgccacatgttcgagtgggtgacccaggtggacagggccagagtccttgtcaaaacagatctgacctcggtccacacctgaactttttcttttaactgaagcaatactatgcctatattgcttgagtctgaatttacttttctaatatttatagaaaatgatatttgaaatgtttccaatcataaatattatatctcagctatcacatcttcctctagatgttaaaaaacctgttcccatataactgactatttctgtactcttaacatagttaaattttcatcttctctagagaatctttcctggttagcctggaatcaatctaacatcaaatatctaaatttgtagcgataagaatataaacacaaaggaatatttattttctgtgtatctgagaacaaaatgttttatatagcataagatgttcaatatattcagaagtttcataatcttattaaagtctaggcaaaacacacatacacacatttcgtgggaatataagttagtgcaaccactatggaaaacagtatgcagatttctcaaaaaactataaatagaactaacatacgatccagcaatccaactactgcatatttatkcaaagaaaaaagaaagctgtatataaaaatgatgcccacactcacatgtttagagcagcattattcacaatagccaagatatggaatcaacctaagagcccatcaatgggtgaaagataaagaaaatatgagatatatatctatatctatatatacacacacaaacacacgtacacgatatggaatactattcagccataaaaaat

SEQ ID NO: 62994 - DNA, 2166 bp, Homo sapiens
  misc_feature (1)...(2166): n = A,T,C or G
ctcaaacctgtcactcctcctcaccgtatttcttcctttagtaacctagtagattttattttaataaattgcctcacctggggtggttcttatatcagtggcccaggactgcattttaggaaacactgtcttgggggaaacatttcagaatttttttttttttttttttttttgagacacagtctcactctgtcgcccaggctggagtgcagtggcacgatctcggctcactgcaaactctgcctcctgggttcatgccattctcctgcctcagcctcccgagtggctgggactacagacacccaccaccacgcccggctaattttttgtatttttagtagagacagcgtttcaccatgttagccaggatggtctcgatcttctgacctcgtgatctgcccgcctcggcctcccaaacattttagaatattgagtttcagggaggaaactgtgtcgtttagaaaaaacacatttaattttttcatgagtttgatttgcttctaatggtcatcttgaattattttcaaatatcatataacatgaaaatagtggaagatagttttatgcttatcaaaggtgtttatatactagatgtgtatatactagaatcagaagtactacttttaaaagtgctgttttcttcctgggtcagtcactcagttctttttgagtttgtgttattacatcctctatagaggccacaagttgaagtctgttgccaatttagacaaaacgctgatagtaatggccattgctatactgtcttgaaggtttgctatgtaccaggtattatgtaaatattttcccaattcaatctcctgtaatacactaagtaatcccttcagaagcagctactattatcctcaacacatagatgaggaaattaaggcatactaagtttaagacacttaaccaagaccacatagctagttaatatcacagccagaattttcaccctgtctgatttgataaacagttgatccttggaaataggatgtgggcatctgtwtttaattaggctctatgaaactaattcttagttaaaacaatagttcaaatggagtgccctctttatataatgaataaagggaatgtttcggaacaagatttaatgtattgccttgacaggatgtggccatgactgaccgtttttgctatctgtttagtattaattacattaccagcatttttttttcaaccttacaggaactttaatgcatcatttttatccttctattaggatctggtgctcttgatgctgctatctattctccagtagcatttttggctagccaaaaaagtctatagtcatcttgtctcaaattaaaggctattttcagggttatctggttttcttttccatgatatatgtagaagataagtgttttccctattacctattatcttctctcattaaatactacatttaggtaaagtttcaagcagcctgtttattgccattcctcaatttcatattcccgattcaaagcacaaaatcttttgttttttgtatgtttgtttgtttgtttgttttgagacagagtctcactctgttgcccaggctggagtgcagtggtgcaatctcggcttactgcaacctctgcctcctgggttcaaagtgattctcctgcctcagcctcccaagtggctgggattacaggctcctgccaccataaccagctaatttttgtaattntagtagaggtggggtttcaccatgttagctgggctggtcttgaactcctgacctcaagtgatctgcccacctcaacctcccaaaatgctgggattacagacatgagccacagcagctggccagcacaaaatctttaaaaacaaatagcgttcatgcaaaaatgtgctgacctaaagaatttcattctttattttgaactttattgaagatataatcattaactcaaacatgtcctagatcttcggagccaaaatctccagggaaggggtttagaaaactgtctttttatctttatgaaactttgagcctctacatttacctctactttcacaatctggactttgagctacaattgtctaaaagcccaccagcatttttcaaaatgattcttactgaagtcttctttcaaaatgtattctttcattgacacataacattttctattattaatggtgtacatatgagtgtgt

SEQ ID NO: 62995 - DNA, 632 bp, Homo sapiens
cctgagatatgactcctgatgtgagcccaaatgtgctttttccacttcaaatactgctcattggactggggtctctcaccccaacctccattcctccttagggaccagcccttctcttgcctgaatcttagcttcttccactgacaccacgctgccttgggttgggacatgcctgagctatgacatgtayattgaaatgactagacaacacgaggttgctcgtcacctctggcacagtaaagaccctgggacatgacaactgaagctggtgtgatctccagtgcatgtaaaatacttgtagtttataggaactgatgattctgaattgaatgccaatccttgggaaggtttttaaaaggaaagatcagagtttctgatattgtggtttcctcaatatcaaaggcaccaggtggaggtgagaaagatgttacctgaaatccaggtgagcctcttcaatgggctttttaaggatgttttcccattagtggggcaggacaggttttggagtgcatgattactttgtagtctggctgatatctagaaccaaatgggcttcaatttggaaaatgacattcacagatagcattagcttgaattacatggatttctcctctatttacacccaattaatt

SEQ ID NO: 62996 - DNA, 731 bp, Homo sapiens
ccccaactcgctaatacacgttagaaatacccagacacttccttcttgaggtcgctgcaggaatccaccgtctccctctaagactttgttcatgtgtgagcctccttagggctcctaagctgttatgagggagcagctcctctcagggagggagcaccactcaccttcattcattcacagtcactcagaataacactgtttcctttccatgcccaacatgagatcagggtgtatgactgaactcaaggttcatcacacccttagggggacaggcttggggggatgagagagagagaggaactgtgctgcttcagtgaagaactcctcactctcctgggtaaaagagaattttgtacaggctgtcatgaccagtaagctattgctgagaagatgcatcctaggatgatagttttaaaaagttaaaaaaagaaatgtttagctccagttggcaaaaaaaactagacacaggaaaagatagtgtagcctgctttaaaggatcacaaagtatgaaggagactggatgggtaagggctttatatgaagagcttgctttccagctccatggtgtttccctccttctgctttcagtgtttttggtgtgttgtttgaaatgtttggaaaagatcctaagtcaaaatgaggctaacggtaattgctttctaagttccaagcgctgttgtaagcactgatcaygtagtcactaatttaaaccctacaacaacctcagggga

SEQ ID NO: 62997 - DNA, 714 bp, Homo sapiens
ccctgcrgtctgtaggaggtaagtatgggaacacagtacttgccactgtcaattaacaaaaagcgagcacttcagattggctgctcagaggcccctcaggctgtactcaagctgatttgaatggcaaagaacctctgtggggaaactagccagtgcaaaagcccagaggtggagttaggaaatagctggtgagacagaagcctcaggagacctcgcagcagggatttatgttggggaagatgatggggcagagaggaagccaaagaccagtgaggaggcagtggtgtgggccaggctcaataaaggatggctgcttctgctgtttcctactttaggtcaaagctggttctgtgaagcaggagttcgaaaagcaagatgaactgaagcgctctgcaatgagggcagtggctgttctgctgaccatccccgaggtggggaaaagccccatcatggccgacttctcttcccaaatcagatccaaccctgaacttgctgccctctttgaaagcatccagaaggattccgcttcagcccccagcacagactcaatggagctcagctagtcccctcagcaccaaggtgggccctcgcttaagagaaaggagcccacccaagtccgaggcctccccatcccaccatcgcaggtctctacttttgcccttccaccatctcactgggggccctgtcgctcctggtcagggcttacagtgcctt

SEQ ID NO: 62998 - DNA, 678 bp, Homo sapiens
ataggtcagggatccagtctgttggcagctgaggtattgtcagcaacagttagtgaccttagcctagttagcaacagtggtgctgtgcatcttagcctagtttgcagagttaggacttgtaaacagcgtagttaggaggtaccatggagcaggaatcagcctccacctcacttgataaagaaatacaaaaccataagatcataggcaccatcccgccagagatctggcccagcataggctgagacccaggtcgtcctccaaatcatctcttaaaaggctgaccttgctctccagacagagatgagctcataaaaattctccatcacccaaatatcattcaactctaccaggtgattgacaaggcagaaaccatttaggtggtaatggagtatgccagaggaggagagctgcatcacctgatacaccaccaccaygacatcaaggatggggaggaggcctggatcatgttaaggcagattctgtcagccctgcagtactgccacttaaagaatatcacacatccagacctaaagctacaaaacatcctactcaatgaggaaggcaaaataaaaatcatagactttggctttagcacaatattcagggagcagcggattgctgaaaaccttttgtggggtatacccctacatggtcacagaaatcttcctgggactgggg

SEQ ID NO: 62999 - DNA, 401 bp, Homo sapiens
gccttgcacaggctggccggctcccaggacgggggaggtcagagctgtgtccaggcctgggggcagggagttcagtgactgtcgaggtagagcggagtgtggcctgcaggagggctcctatggggttgctgctccagccccctccccaccgcctcccacccacggccggcaggagtgctgtgagcactggcgctctgcatggaggatgcrttgcacgggaggcaggtctccccctgcctgcacactctttctgaggccggcttgccgagttctgtgccttctagtgtggctgctggagtgggtgggcccctctgtccagcagagcagtcaggaccccttcctggttccgctcgctccactggactctctcatgtggtggagccctttgccatccacaagga

SEQ ID NO: 63000 - DNA, 537 bp, Homo sapiens
tgcctctggaacccccttccctggatgaccccatactcaagtcacgtggctctccccactctcctccagaccccacccttccaggatcgccctcccctagccagctccaattctagagctctctcagggcccggcttccctccacgcctggtgccaacccctgctttctgctcttgtaccccccactgccccatggtctctccccgacaacccttctccactctgcagccagagggatttttagaaaccatgcagcaactcatgtcacgccttcacttaagacctctcagtggttcttactgctcttaaaaacatccaaacccactggcctggcattcaaggcccccgtgacctggtcagggccctccagctccggcctgagtcgcctgctctgctggtctggaatgagactccgggagaaagggctgcaggaggcagaactccagcgttcccctcaggtgcccctgggagggtggggcaatgactccctcccctgctgccttacrtgagctgagggcccctacagagatgcctgag

SEQ ID NO: 63001 - DNA, 524 bp, Homo sapiens
agagtgaaaccctgtctcaaaaaaaaaaaaaaaaaaagctgcagtggactcagtgatcatgagccaggcactgtacacrtatacatcatctcatttaattttttctcttgtttaaaattagtttttcctctaatccccatgttgatcaatactttcttaatccaaggattttattagttgaaaatttcgcacaagaattaaaaattgcctggcgtgatggcctacacctgttatcccagcactttgggaggctgagatgagagaatcgcttgaagtcaggagtttgggctagtctgggcaatatagtgagaatgcaactctataaaaaaaattagaaaccctgggtgtggtagccttcacctgtagtcccagctacttggaagactaggtgggaggattgcttgagcccaggcggtaaaggcagcagtgagctatgattgtgccattgcactgcagcctgggggacagagtgagactctatctctgaaatgaatgaataaaattgtggtataatatatgcaaca

SEQ ID NO: 63002 - DNA, 524 bp, Homo sapiens
agagtgaaaccctgtctcaaaaaaaaaaaaaaaaaaagctgcagtggactcagtgatcatgagccaggcactgtacacatatacatcatctcatttaattttttctcttgtttaaaattagtttttcctctaatccccatgttgatcaatactttcttaatccaaggattttattagttgaaaatttcgcacaagaattaaaaattgcctggcgtgatggcytacacctgttatcccagcactttgggaggctgagatgagagaatcgcttgaagtcaggagtttgggctagtctgggcaatatagtgagaatgcaactctataaaaaaaattagaaaccctgggtgtggtagccttcacctgtagtcccagctacttggaagactaggtgggaggattgcttgagcccaggcggtaaaggcagcagtgagctatgattgtgccattgcactgcagcctgggggacagagtgagactctatctctgaaatgaatgaataaaattgtggtataatatatgcaaca

SEQ ID NO: 63003 - DNA, 524 bp, Homo sapiens
agagtgaaaccctgtctcaaaaaaaaaaaaaaaaaaagctgcagtggactcagtgatcatgagccaggcactgtacacatatacatcatctcatttaattttttctcttgtttaaaattagtttttcctctaatccccatgttgatcaatactttcttaatccaaggattttattagttgaaaatttcgcacaagaattaaaaattgcctggcgtgatggcctacacctgttatcccagcactttgggaggctgagatgagagaatcgcttgaagycaggagtttgggctagtctgggcaatatagtgagaatgcaactctataaaaaaaattagaaaccctgggtgtggtagccttcacctgtagtcccagctacttggaagactaggtgggaggattgcttgagcccaggcggtaaaggcagcagtgagctatgattgtgccattgcactgcagcctgggggacagagtgagactctatctctgaaatgaatgaataaaattgtggtataatatatgcaaca

SEQ ID NO: 63004 - DNA, 524 bp, Homo sapiens
agagtgaaaccctgtctcaaaaaaaaaaaaaaaaaaagctgcagtggactcagtgatcatgagccaggcactgtacacatatacatcatctcatttaattttttctcttgtttaaaattagtttttcctctaatccccatgttgatcaatactttcttaatccaaggattttattagttgaaaatttcgcacaagaattaaaaattgcctggcgtgatggcctacacctgttatcccagcactttgggaggctgagatgagagaatcgcttgaagtcaggagtttgggctagtctgggcaatatagtgagaatgcaactctataaaaaaaattagaaaccctgggtgtggtagcsttcacctgtagtcccagctacttggaagactaggtgggaggattgcttgagcccaggcggtaaaggcagcagtgagctatgattgtgccattgcactgcagcctgggggacagagtgagactctatctctgaaatgaatgaataaaattgtggtataatatatgcaaca

SEQ ID NO: 63005 - DNA, 719 bp, Homo sapiens
ttaatgaataaactcaaaactagtgatcttttgaaaatcataaaaataagtattttaaaattcctaattgaaataaaatatcaaattttagtatgttaattttatgtttggtttcttatttctaagaaatttttcaaaccttaattgtctttctaaacaatggattaaaaattctgccaaattttttcattcaaaaatatttattaaaaatttttttaaactttacttacgatttaatgccaaacttctaaaaatacatttcaattcaaaatattcccctgaaaaacttgtaatatttactttgctatataatcttatttacctagagacaagataaaaacaaattattggtctaaaaaacattttaaaatcttcaaagtgtttttaataagaaaattgcccataagatagttaacatctattagcatctttttaacatctatttttaatgagactgggagaagctagggagtatgatagacggtaaccatgcgtttaattgaattttcttgccaaaaacaaataatgaaaagttaayaatgaggtagttccagttcaggtaatggcaaagtaagttgtattacactaaccctttaaagataacaattataaactctggaccaaacaaaacaaacaaacaaaaatcaacagcaaaaacactatgttcaagggactggaaaatcacaaaagcagacagaaactggcggatactcaaatag

SEQ ID NO: 63006 - DNA, 1049 bp, Homo sapiens
gtaatataatataatatcagatactctaatatctggtatattgatttcataaggtatccatacaaggtgagaagtaaaaattacataaatgcctcagtcagtcaatgcctttatactcctgaaattttaataatgtgggaagatgtaaggtgtcattttggtttaaaaatgaaaaataggaacaaaaacggatattaaaaattaattggttcagtatttttttwaaaaaattgacagagtgggaattctcctcaagctcccctggttcaagatcccttgctcagcaggttaatcagttaataactttatacaggtgttttaaaagatatctttgaacagaagtctgatgataataaatttagtagtgctgtcttctctagtagcacacttttaatatgctttgtttttattgttagctacatctgagtagttgtaaaaatacaccctcaaaaggaagacttcttaaacaaccaattttcagacatacttttttcattaaaattaaaatagtagagctgattgtaatggctcatgcctgtaatcctgacattttgggaggcctacatgggaagatcacctgaactcaggagttcaagaccagcctgggcaatatagtaaggtcttgcctctacaaaaaataaacaaaattggctaggcgtggtggcatgtgcctgtggtcccagctagtgtggaggccaaggtgagaggatcccttgagccagagaggtagaagatgcagtaagctgagatcatgccactgcactccagcctgggcaacagagtgagaccctatctcaaaataaataaataaataaattaaatatcacagctgtaagaagctttaataaagttatcatctgatatagacaaagacaagatagttctagaatgtctgagactttatctttggataaggtcctccagattgtgctcattcaaatatagttgagtcaagtcaatgggtgtgtcctaatatatattactttctactttcaagaaaatgcaaaaaacatgtttacatttgctaactactcttattgtaaaggtaa

SEQ ID NO: 63007 - DNA, 1049 bp, Homo sapiens
gtaatataatataatatcagatactctaatatctggtatattgatttcataaggtatccatacaaggtgagaagtaaaaattacataaatgcctcagtcagtcaatgcctttatactcctgaaattttaataatgtgggaagatgtaaggtgtcattttggtttaaaaatgaaaaataggaacaaaaacggatattaaaaattaattggttcagtatttttttawaaaaattgacagagtgggaattctcctcaagctcccctggttcaagatcccttgctcagcaggttaatcagttaataactttatacaggtgttttaaaagatatctttgaacagaagtctgatgataataaatttagtagtgctgtcttctctagtagcacacttttaatatgctttgtttttattgttagctacatctgagtagttgtaaaaatacaccctcaaaaggaagacttcttaaacaaccaattttcagacatacttttttcattaaaattaaaatagtagagctgattgtaatggctcatgcctgtaatcctgacattttgggaggcctacatgggaagatcacctgaactcaggagttcaagaccagcctgggcaatatagtaaggtcttgcctctacaaaaaataaacaaaattggctaggcgtggtggcatgtgcctgtggtcccagctagtgtggaggccaaggtgagaggatcccttgagccagagaggtagaagatgcagtaagctgagatcatgccactgcactccagcctgggcaacagagtgagaccctatctcaaaataaataaataaataaattaaatatcacagctgtaagaagctttaataaagttatcatctgatatagacaaagacaagatagttctagaatgtctgagactttatctttggataaggtcctccagattgtgctcattcaaatatagttgagtcaagtcaatgggtgtgtcctaatatatattactttctactttcaagaaaatgcaaaaaacatgtttacatttgctaactactcttattgtaaaggtaa

SEQ ID NO: 63008 - DNA, 647 bp, Homo sapiens
gaaaaaataaaataaaataccaaaaccagcagccaatgtgaatatatataaccaaaagaatagatcccttattcccttcatgaaatattatataccagtggaagggaggccgaggtgtgcagatcccaaggtcaggagattgagcccatcctggctaacatggtgaaaccccgtctttactaaaactccaaaaaaaaaaaaaaaaaaaaaaaaaattagcttggcgtggtggctcacgcctgtaatcccagcatgtggatcacgacatcaggagatcaagaccatactgactaacatggtgaaaccccgtctctactaaaaatataaaaaatgagctgggcgtggtggcgggtgcctgtagtcccagctactcgggaggctgaggcaggagaatggtgtgaacctgggaggtggagtttgcaatgagccaagattgcgccactgcackccagcctgggtgacagagtgagactctgtctcaaaaaaaaaaaagaaaaaaaaaattggtatggcacaggttaatgtgattaaattataaaaatataatattgaagaaaaaatcatagaagcccatcataaaatgacagcattttgtataatgcccaaaaccaagcaaaaattaattatataattaatatatacatgca

SEQ ID NO: 63009 - DNA, 951 bp, Homo sapiens
tttatattttgttgatttaatggatgattcctgtattttcatctaagttgattatgccttttttatattaaagcacatgtaatcttttttcttttcttttcttttcttttcttttttttttttttgagacagagtctcgctctgtcacccaggctggagtgtagtggcgcaatctcggctcactgtaatctctgcctcccaagtttaagcaattctcctgcctcagcctcctgagtagttgggattacaggcacgccccaccacacccagctaatttttgtatttttagtagagacagggcttaaccatgttggtcaggatggtctcaatctcctgacctcatgatctgcctgctttggcctcccaaagtcctgggattacaggcatgagccaccatgcctagccacatgtaatcatttttacagcattttacttttttgctcactctgtctttatcttcacatttcttctcttttccccctttcttctccttcctctttctcctttttcttcttcttgttatgtcatctttattttatagatgaggaaactggatcttaaagtggtgatatggtttggccgtgtccccacccaaatctcctcttgaattgtagctcccataattcccatgtgttrtgggagggactaggtgggaggtaattgaatcatgggggcaggtctttcccatgctgttctcatgaataagtctcacaagatctgatgattttataaatggaagttcccctgcacaagttttctctttgcctaccaccatgtaagatgtccctttgctcttccttcaccttctgccatgactgtgaggcctccccagccatgtggaactgtgaaccaatttaatctctttcctttataaattacccagtcttgggtatgtctttattagcagtgtgagaacagactaatacaggtggttacattacttacctgaag

SEQ ID NO: 63010 - DNA, 1951 bp, Homo sapiens
  misc_feature (1)...(1951): n = A,T,C or G
tattaacaaacaaatataacctttaatttcatacttttatacttactagtgataatatttaatatctattttgtgtttgttacctgccagaatcaatgataggcattttacatgtgttatttcatttaaatttaacaggttagtatataattactcccattttaaagatgaagctagtggacagagaagtggtttgcatcgcatagataataagtgacgaggtagaggtgactcaagtcctttgtaaattgccttacacacactaacaataacaatgtgtcagtttataaatgtacttgaacttgtgctcaaaactactatcattttccctttttctttataaatttgggttatctcagagtacaacaagagctcttttgaataacatacccatctagggcccataagagagcagcacacctgagaataaagaagaagacgatgaaccagctgtttccataatctcagcataactgtattgccaaactgtactgaccacccatagaaaatatgaacagctccagggcaattaaaagtttagattccaacaatgaagaatcattcctgatatgtaaggtcagaccctttaaaactgagcagaataaatattattattgctaacatttttaatgtattcatttgactttggggaagaatgaatagatgcaaaagatggtctatcttaatagtctcctgaattaatacattaatttgattcagtctatcagaaacctattagcaactactaaaaacaaccatgggccaggtgtggtggctcacgcctgtaatcccagcactttgggaggccgaggcgggcggatcatgaggtcaggatttcgagaccagcctgaccaacacggtgaaaccccatctctactaaaaatacaaaaattanctgggnnnnnnnnnnnnnnnnnnnnnnnnnnnnnnnnnnnnnnnnnnnnnnnnnnnnnnnnnnnnnnnnnnnnnnnnnnnnnnnnnnnnnnnnnnnnnnnnnnnncccaaataccaatttgacttttactaaactatctcagtttccataatattataaktttttggtagttaaaaaaagcctttggcccaatagactggatttatctcaaaatgtattattgagctctttcgggtattggcccagaaatgtgaacagcaagggaggcagtatggaatcatggttcaccataaaactctggagtctaattttctaggtttgaatccttcctgtgatagttaatagctgtgtgaatttcagcaagtcccataacccctattgttctcagttttctcatttgtgaagttcagttaataataatatgtacctcatggggtccatgtgcccatcaaatgaaatattgtgaataaaatgctgagcaagaagcctggcccatggaaagtaaccagttattgactaatattattattaagtgcttgtgggaggcactttcctatttatcacatgtgatactcctgctcatcttgagagcagtagtgctctggcattactaaatatttaattgaatagacactcttgatttcattaatatccccaagttctttttatgtgctaagagtctccatttaaaattgatattctcatgctttatcaaaattctcttgtggtgaaaagttcatattcataagggagagggaaagttgtttttagctcttgggccaatgagaagaataccccaatcccccatcccatctgcctacagacttattgaagtgcaggtgccagaggaaaaggaatagcaaacatttggcttgcaacgataacaatattaatataatttactagcttaacaactgttgactatcacaatctttttcatctataccagtgaaaaataatttttcagagttgttttaattaattattttaagtactttattgttataggttgaacatattttcaggtttgtattagattattgcctaccacaattt

SEQ ID NO: 63011 - DNA, 1951 bp, Homo sapiens
  misc_feature (1)...(1951): n = A,T,C or G
tattaacaaacaaatataacctttaatttcatacttttatacttactagtgataatatttaatatctattttgtgtttgttacctgccagaatcaatgataggcattttacatgtgttatttcatttaaatttaacaggttagtatataattactcccattttaaagatgaagctagtggacagagaagtggtttgcatcgcatagataataagtgacgaggtagaggtgactcaagtcctttgtaaattgccttacacacactaacaataacaatgtgtcagtttataaatgtacttgaacttgtgctcaaaactactatcattttccctttttctttataaatttgggttatctcagagtacaacaagagctcttttgaataacatacccatctagggcccataagagagcagcacacctgagaataaagaagaagacgatgaaccagctgtttccataatctcagcataactgtattgccaaactgtactgaccacccatagaaaatatgaacagctccagggcaattaaaagtttagattccaacaatgaagaatcattcctgatatgtaaggtcagaccctttaaaactgagcagaataaatattattattgctaacatttttaatgtattcatttgactttggggaagaatgaatagatgcaaaagatggtctatcttaatagtctcctgaattaatacattaatttgattcagtctatcagaaacctattagcaactactaaaaacaaccatgggccaggtgtggtggctcacgcctgtaatcccagcactttgggaggccgaggcgggcggatcatgaggtcaggatttcgagaccagcctgaccaacacggtgaaaccccatctctactaaaaatacaaaaattanctgggnnnnnnnnnnnnnnnnnnnnnnnnnnnnnnnnnnnnnnnnnnnnnnnnnnnnnnnnnnnnnnnnnnnnnnnnnnnnnnnnnnnnnnnnnnnnnnnnnnnncccaaataccaatttgacttttactaaactatctcagtttccataatattataagtttttggtagttaaaaaaagcctttggcccaatagactggatttatctcaaaatgtattattgagctctttcgggtattggcccagaaatgtgaacagcaagggaggcagtatggaatcatggttcaccataaaactctggagtctaattttctaggtttgaatccttcctgtgatagttaatagctgtgtgaatttcagcaagtcccataacccctattgttctcagttttctcatttgtgaagttcagttaataataatatgtacctcatggggtccatgtgcccatcaaatgaaatattgtgartaaaatgctgagcaagaagcctggcccatggaaagtaaccagttattgactaatattattattaagtgcttgtgggaggcactttcctatttatcacatgtgatactcctgctcatcttgagagcagtagtgctctggcattactaaatatttaattgaatagacactcttgatttcattaatatccccaagttctttttatgtgctaagagtctccatttaaaattgatattctcatgctttatcaaaattctcttgtggtgaaaagttcatattcataagggagagggaaagttgtttttagctcttgggccaatgagaagaataccccaatcccccatcccatctgcctacagacttattgaagtgcaggtgccagaggaaaaggaatagcaaacatttggcttgcaacgataacaatattaatataatttactagcttaacaactgttgactatcacaatctttttcatctataccagtgaaaaataatttttcagagttgttttaattaattattttaagtactttattgttataggttgaacatattttcaggtttgtattagattattgcctaccacaattt

SEQ ID NO: 63012 - DNA, 705 bp, Homo sapiens
gtgtgaaattatatacagcaatgaaattaaatgaactacacgtccacataacaaaatgaactaacacacatgaactgattaaaagatgttagctaaaacagagcatagatattcctccaacttatgattgggttacatcctgataaacccatcataagttggaaatatcacaagttgaaactgcagttaatacgcctaacctactgaacatcatagcttagcttagcctactttaaacatgctcagaacacttagagtagcctacagttgggcaaaagcatacaatacaaagcctattttataacagactgttgaatatctcatgtaatatattaaataacatactgaaagtgaaaaacaggatagtagtgtgggttctcaccattaacgtacacagccgaaagctcactgtgcctgaagaatgtttgaagcatggaactaaaattaatttctggatgatgagaaagctgcagagacagtgtcatcartctctcttctgaggagtctcaagaacagctggtagaaggcactggagcatcctacacttgatagtttagcaggtgtgatgttctttgagaggaagtcaagtatctatttaccctaatcatgtggcagacttggaactgcagctcattgccactgctcagtattgcaaaggaatattgtaccacatatcactagtctgagaaaatatcaaaattcaaa

SEQ ID NO: 63013 - DNA, 705 bp, Homo sapiens
gtgtgaaattatatacagcaatgaaattaaatgaactacacgtccacataacaaaatgaactaacacacatgaactgattaaaagatgttagctaaaacagagcatagatattcctccaacttatgattgggttacatcctgataaacccatcataagttggaaatatcacaagttgaaactgcagttaatacgcctaacctactgaacatcatagcttagcttagcctactttaaacatgctcagaacacttagagtagcctacagttgggcaaaagcatacaatacaaagcctattttataacagactgttgaatatctcatgtaatatattaaataacatactgaaagtgaaaaacaggatagtagtgtgggttctcaccattaacgtacacagccgaaagctcactgtgcctgaagaatgtttgaagcatggaactaaaattaatttctggatgatgagaaagctgcagagacagtgtcatcagtctctcttctgaggagtctcaagaacagctggtagaaggcactggagcatcctacrcttgatagtttagcaggtgtgatgttctttgagaggaagtcaagtatctatttaccctaatcatgtggcagacttggaactgcagctcattgccactgctcagtattgcaaaggaatattgtaccacatatcactagtctgagaaaatatcaaaattcaaa

SEQ ID NO: 63014 - DNA, 1013 bp, Homo sapiens
ccttccatgtgagggcatgatgttttacttacaacaatctgacatgcagagaaccctcaataaatgttagcaattattacagtaaaactcaaaayatatttgtgttactcattcctgctttctcactgcctagtatgcactgttgaggaagcgaaaaatcaaagacagaatagaagaaaacatttccaggcttatttaaaaaaaacaaacaaatcctgtacacacagaataaaagagctctttattttttaagcaaaaatttttttaaaaaagagatactcaaaactagacatactttgccttgattttgaaatcgcatatataaagaataatctctacagttataaatccattcaaggcagaatacttaaaactcacatatttagatctttctttcacattagacaatttatataattactctctcatctgctttttaaaacttgctatatcctagaagctattccgtgtcattggatgcttaaatacctcatttttaaaaacatccataatagaatttgccatggtttatttaaacattcccattcattacccttacaagggtgaaaacattttagttttttaaatgaagacttgattatgatctgtgttcttagaatacaatttaaaattgtacttcttttcttttgtctttattacatactgttcaactatttgtacttgttattgatcaatgttggagaatggtttggaatttgggcatagcattcttagtcattaaaaaagaattagtttaatcactccaagatgtatgtcattttgtttgcaaatttgcattgcacttgtcaatgtcatccaaaaattgggaggccatatggccctcacttgaacgttataacaattatttaagaaaagggcaccttttgtaaaacacacacacactctctgtcacacacacacacacacacacacacacacacacacaaaaggactaaggctttaacaaattgaagcagagaaagttgagtcttttgagtgagaaagaatagtga

SEQ ID NO: 63015 - DNA, 1013 bp, Homo sapiens
ccttccatgtgagggcatgatgttttacttacaacaatctgacatgcagagaaccctcaataaatgttagcaattattacagtaaaactcaaaatatatttgtgttactcattcctgctttctcactgcctagtatgcactgttgaggaagcgaaaaatcaaagacagaatagaagaaaacatttccaggcttatttaaaaaaaacaaacaaatcctgtacacacagaataaaagagctctttattttttaagcaaaaatttttttaaaaaagagatactcaaaactagacatactttgccttgattttgaaatcgcatatataaagaataatctctacagttataaakccattcaaggcagaatacttaaaactcacatatttagatctttctttcacattagacaatttatataattactctctcatctgctttttaaaacttgctatatcctagaagctattccgtgtcattggatgcttaaatacctcatttttaaaaacatccataatagaatttgccatggtttatttaaacattcccattcattacccttacaagggtgaaaacattttagttttttaaatgaagacttgattatgatctgtgttcttagaatacaatttaaaattgtacttcttttcttttgtctttattacatactgttcaactatttgtacttgttattgatcaatgttggagaatggtttggaatttgggcatagcattcttagtcattaaaaaagaattagtttaatcactccaagatgtatgtcattttgtttgcaaatttgcattgcacttgtcaatgtcatccaaaaattgggaggccatatggccctcacttgaacgttataacaattatttaagaaaagggcaccttttgtaaaacacacacacactctctgtcacacacacacacacacacacacacacacacacacaaaaggactaaggctttaacaaattgaagcagagaaagttgagtcttttgagtgagaaagaatagtga

SEQ ID NO: 63016 - DNA, 591 bp, Homo sapiens
agcctcctcacttcatacgcatctcatttttagctaacttgaagaaaataaaaacaagaatattaactggtggcctatttacctgtattgagtgtctagcrtggagatttgccattcgtgggtgtcctcaaggcttgacagacatgaagaactccatgaatgtttgctgaattgaactagattacactgttacattgcttcagttgggagcttcctgatggttattatagtgctcatgagtcagcaatagtttgttctaaaattccacaaatatgtttctattgccctgtgttactttccacagcagagagctgaactgtcacgcttctaaggcacagagcatttcacacaccaacatacatttatatttatcttcaataatctggcataaacagaaatctcacctgtaatttttcaagtttttaaaatctgtttcaaatattagcttcttctaaccgtgactgtttaatgaaaattcaattcactatcaactctaataactaacttcccaaactgctgaaaagaacaagccacaccggatatgaaataaaactctataaagagaattgaaatcatatgatgaaaataaag

SEQ ID NO: 63017 - DNA, 591 bp, Homo sapiens
agcctcctcacttcatacgcatctcatttttagctaacttgaagaaaataaaaacaagaatattaactggtggcctatttacctgtattgagtgtctagcgtggagatttgccattcgtgggtgtcctcaaggcttgacagacatgaagaactccatgaatgtttgctgaattgaactagattacactgttacattgcttcagttgggagcttcctgatggttattatagtgctcatgagtcagcaatagtttgttctaaaattccacaaatatgtttctattgccctgtgttactttccacagcagagagctgaastgtcacgcttctaaggcacagagcatttcacacaccaacatacatttatatttatcttcaataatctggcataaacagaaatctcacctgtaatttttcaagtttttaaaatctgtttcaaatattagcttcttctaaccgtgactgtttaatgaaaattcaattcactatcaactctaataactaacttcccaaactgctgaaaagaacaagccacaccggatatgaaataaaactctataaagagaattgaaatcatatgatgaaaataaag

SEQ ID NO: 63018 - DNA, 1544 bp, Homo sapiens
caaaataattaacatggcaaattttcaacagaaattttattgatttctcaccaaatgccaagcaatgtgtcatagaatcacaaaatgcttggcaaactgatgttacaatcattctaaagtcaattgtttgccaattaataagatttattcactacataagagtacacaatttcaaacaataagtatgctaaaagcatccattaaagtcaagttgcaattctcatagttgcaaaaatggcaaaggaaataattatacattgtcccatattcaagttttctgtgcgtttctggaaaggcacagaaaactttccctatttcttaggctttctatatactaggtaagaggaaagaacaggctaatagcaataaatagtatccacctttaaaacctatcctcttccccagggttggtacaatagacaatattgatcccttatttacaatctaacttctacaacttaacagctacaagtttcttttatgtaaatttaaaaaacaataataatattctatgcttttatttaattatcaatatgtaagtatgcacaaggtcattaggtaaactatatttcttactatggatcataataaaaaaaagtttggaagccataattcagagagtaagtctccctggaggtttcatattcagttactagatagtattgttgggagaaaaaattatatgctacaatgttatctccttaaaaattatttttaggttatttctagagtggaaggcatcaaaaagaagacctgaacttgtaagagacagaagtcatagatggccctttaaacaataaaatcttccgagacaaacactgctaatgcctttagggctgaacatctgtgcaaggatcktctttatttactttaaataacgagggatcaaacccaatttaatcaaatccattctcaataaaaggagaaacatccctacttctctccatcagagaggatggttgggttaagttttctaacaagtaagatatttgttcttctatttgcttagcctagatacctaggattctctccagaatattgtccagcctacggacaaccagggagcctcaaagattttgatgcatttgtctgaaaaagaatgctagctaataaataacccctgtgtcccaagggctttttctctgtctagccatccagttacttctatctaatgaggtcagagaacaaagaacaatgggaaatttcctcttcctcactgcaaacttgcctccctctcccagtccctgtacattaataaaaattaacatttatacagtctactaggtgccagacatggttctgagtgcttcatatatattaattcattcagtcctcataaccagcctgtgaggtagagaactctcggtatctccattttacagataaggaaactgagctacatagaggttaaataaattgcccaaatagtacttacacaaatagtaagtagtagagccagggttctaatctagacagtttaatgttggaatctatatccttaaccatacagtttttactctaaataaggacttatagaataggca

SEQ ID NO: 63019 - DNA, 1622 bp, Homo sapiens
tcctaagaaagccacaggcaaatcagcaagagaggagctgactacaaagagacaaagacttgttggtgattttatagcatggtgcttgtgctgtgtgctgaagagggctttgtgcaatacagataatgcgtcaaggtttcagttagctaacttgcattttttgatcagtaaagagtccagtgatagctggacacaygaagattgtgagttatttgtgtaggagagctatgttttctggaccatgaagaaaggtagacttataccttatctgctttttatttttgctttctcttggtcccaccagcctgactccctttccctaattaggattccccattacctttgtttaagatacttttcctagccatctcctcttagctgggtctttccctacatccttctttcttgtttcaaaaaacaatggcatttatcctaaagtttaaactttctttgagatttgctccacagttgtactcatttctctgtatcttctcccatgtaacatgtaacatgaagtatacattttaataaacttctgcttgttaacctgtcttttgttacaaggaatttcagttaagaactacagagtagagagaaaattagtttttcttctctacaagaacaagaaacaaaatgaaatatattcccaatagtttcacaaaacaattaaatcataactaaatttataataaacaaattatttttgaagacattcgtaacaataaaggtaatgtattgttttatctttttaaattttttgagctgggaattgttgactgccaagtcattagggaatatctccaagactgcttttgtttgaaaactgttgacttgtttctctgaaagaaaagtacagccactattgtttactattgataggtttgtaggacttttcattctttaatttccttgtttgatataacaaatatttatttgaacactaacaatacacaaggcaaaatgcaagggatggagggaaaacaggacatataaatatgaaatatgtattttatatatatatgtgcatatcacttcatttggagtgatagagaagacatatgcatgtatacaaataaagataactaatcatataaaacaacaagtaaaattccaaattactcttgtaattgtttaggggagagaaaatcttctatcctctgaaggttcaataattgaatctatgaaataaactgacagtagacagtttagtaagagaaaagctattttaattacacacaggagtcccacaaagtagaggacttgaagaggggccagatgatagaagtttttatagcatcctgagctaaagaaaggagtaggggttggtggtttatcgggggtggtgtctatacaagttgcaggggagtaagaggagggaatgcatggagaacaaaggttgtcttgttatacagataacatctctcaggtaataaaagttgtctccaaggatctcatcagaagaagaggtaatggatagtttgtgacaaagtctttctggagtgtggtgtctcctgtgagttaatcttccttcactgatgagattcccagggaggatacctatgacaattgtgtttctttttggaggctctatcttcagccacttaagggagttcagagagagc

SEQ ID NO: 63020 - DNA, 1622 bp, Homo sapiens
tcctaagaaagccacaggcaaatcagcaagagaggagctgactacaaagagacaaagacttgttggtgattttatagcatggtgcttgtgctgtgtgctgaagagggctttgtgcaatacagataatgcgtcaaggtttcagttagctaacttgcattttttgatcagtaaagagtccagtgatagctggacacatgaagattgtgagttatttgtgtaggagagctatgttttctggaccatgaagaaaggtagacttataccttatctgctttttatttttgctttctcttggtcccaccagcctgactccctttccctaattaggattccccattacctttgtttaagatacttttcctagcyatctcctcttagctgggtctttccctacatccttctttcttgtttcaaaaaacaatggcatttatcctaaagtttaaactttctttgagatttgctccacagttgtactcatttctctgtatcttctcccatgtaacatgtaacatgaagtatacattttaataaacttctgcttgttaacctgtcttttgttacaaggaatttcagttaagaactacagagtagagagaaaattagtttttcttctctacaagaacaagaaacaaaatgaaatatattcccaatagtttcacaaaacaattaaatcataactaaatttataataaacaaattatttttgaagacattcgtaacaataaaggtaatgtattgttttatctttttaaattttttgagctgggaattgttgactgccaagtcattagggaatatctccaagactgcttttgtttgaaaactgttgacttgtttctctgaaagaaaagtacagccactattgtttactattgataggtttgtaggacttttcattctttaatttccttgtttgatataacaaatatttatttgaacactaacaatacacaaggcaaaatgcaagggatggagggaaaacaggacatataaatatgaaatatgtattttatatatatatgtgcatatcacttcatttggagtgatagagaagacatatgcatgtatacaaataaagataactaatcatataaaacaacaagtaaaattccaaattactcttgtaattgtttaggggagagaaaatcttctatcctctgaaggttcaataattgaatctatgaaataaactgacagtagacagtttagtaagagaaaagctattttaattacacacaggagtcccacaaagtagaggacttgaagaggggccagatgatagaagtttttatagcatcctgagctaaagaaaggagtaggggttggtggtttatcgggggtggtgtctatacaagttgcaggggagtaagaggagggaatgcatggagaacaaaggttgtcttgttatacagataacatctctcaggtaataaaagttgtctccaaggatctcatcagaagaagaggtaatggatagtttgtgacaaagtctttctggagtgtggtgtctcctgtgagttaatcttccttcactgatgagattcccagggaggatacctatgacaattgtgtttctttttggaggctctatcttcagccacttaagggagttcagagagagc

SEQ ID NO: 63021 - DNA, 1622 bp, Homo sapiens
tcctaagaaagccacaggcaaatcagcaagagaggagctgactacaaagagacaaagacttgttggtgattttatagcatggtgcttgtgctgtgtgctgaagagggctttgtgcaatacagataatgcgtcaaggtttcagttagctaacttgcattttttgatcagtaaagagtccagtgatagctggacacatgaagattgtgagttatttgtgtaggagagctatgttttctggaccatgaagaaaggtagacttataccttatctgctttttatttttgctttctcttggtcccaccagcctgactccctttccctaattaggattccccattacctttgtttaagatacttttcctagccatctcctcttagctgggtctttccctacwtccttctttcttgtttcaaaaaacaatggcatttatcctaaagtttaaactttctttgagatttgctccacagttgtactcatttctctgtatcttctcccatgtaacatgtaacatgaagtatacattttaataaacttctgcttgttaacctgtcttttgttacaaggaatttcagttaagaactacagagtagagagaaaattagtttttcttctctacaagaacaagaaacaaaatgaaatatattcccaatagtttcacaaaacaattaaatcataactaaatttataataaacaaattatttttgaagacattcgtaacaataaaggtaatgtattgttttatctttttaaattttttgagctgggaattgttgactgccaagtcattagggaatatctccaagactgcttttgtttgaaaactgttgacttgtttctctgaaagaaaagtacagccactattgtttactattgataggtttgtaggacttttcattctttaatttccttgtttgatataacaaatatttatttgaacactaacaatacacaaggcaaaatgcaagggatggagggaaaacaggacatataaatatgaaatatgtattttatatatatatgtgcatatcacttcatttggagtgatagagaagacatatgcatgtatacaaataaagataactaatcatataaaacaacaagtaaaattccaaattactcttgtaattgtttaggggagagaaaatcttctatcctctgaaggttcaataattgaatctatgaaataaactgacagtagacagtttagtaagagaaaagctattttaattacacacaggagtcccacaaagtagaggacttgaagaggggccagatgatagaagtttttatagcatcctgagctaaagaaaggagtaggggttggtggtttatcgggggtggtgtctatacaagttgcaggggagtaagaggagggaatgcatggagaacaaaggttgtcttgttatacagataacatctctcaggtaataaaagttgtctccaaggatctcatcagaagaagaggtaatggatagtttgtgacaaagtctttctggagtgtggtgtctcctgtgagttaatcttccttcactgatgagattcccagggaggatacctatgacaattgtgtttctttttggaggctctatcttcagccacttaagggagttcagagagagc

SEQ ID NO: 63022 - DNA, 661 bp, Homo sapiens
aaaatgaagaaataaactagcatcatcgtcatgttatatacatggaacaccttggctctttgcctagcattatgttagtaattttacatgtcttaaaatattcattttggcagggcatggtggctcacacctgtaatcccagcactttgggaagccgacatgggaggatcacaagagcttaggaattcaagaccagcctgcgcaacataatgagaccttgtctttactaaaagttaaaaaaaaactagccaagcatggtggcacacctgttgtcacagctactagggaggctgaagcaagaagattgaggattgcttgaatttgggtagatcaaggctgcagtgagctatcattgcaccactgcactccaccctaggcaacagagagacactggctcaaaaaaaaattgtacacacacacacacacacacacacacacagacacacttactttagcattttcctcttgaagacaagggtgtggatgttttggttaaataacttaaggtgaacagctaatagaaaaacttatcaggccaaaccacaggaagcttcagtggagagaaactttttagcagatttttttttagcttttagctttcccaaatsacatataaatgtttccgcctctgtgtacaataccagttttggctttgggatcc

SEQ ID NO: 63023 - DNA, 600 bp, Homo sapiens
ttaatttcatgccactcatggtcatgaaaagtgcctttgatcccgtcatgcagccacagctgattgggccaggaatgaacacttgacccaggcgggaccaatcaacttcctcctctccttgaagtgggaaataacccctggtccacgagctgcagggagctgtcgtgaaaatcatacagaggcttgtaatgctcatgggtagaagcattcaatgttgttaacatgtcaatcatgcctaaattggtgtatagattcagtgcaatccaattcaaacatcaagtagatgttttagagaaaattgataaactgacctcaaaattcamaaaggaattgaaaggatctaaaagagtaaaaataacattgaaaaagaacacatttagagaaacttatttcaagacttatcacaaaggtacaacaatgaaaacagtgtagtgtcactgttaagagtggcaaatagataaatggaacacaacagaaactccagaaataaacattcacataaatggatgtctgatttctaacaaagtagcaagaacaatttagtggagaataaaagatgatagtttcaaaaaatgattctataaacattagatattcata

SEQ ID NO: 63024 - DNA, 374 bp, Homo sapiens
cacacacacacacacacacacacacacacacatctatcacatgtgtatcatttacaagatgagtagaaatgatgggatgtttttctggggtttaaggcatattattttcaacaggatggttagagaagatgccactgggaggggacatttgagcagatgcctgcagttaaaggggaggctctttcagatgtgagggaagaacatttctggcagaggcaacagcaggtgtgagacgggaacttgtgctgtcacagttatcggtagtgccctgccccacagctgctgagcccactttcaaatccatccagagctgtggagtttygattccatccagagccatggagggcagtttctctgcactctggaagcttcct

SEQ ID NO: 63025 - DNA, 374 bp, Homo sapiens
cacacacacacacacacacacacacacacacatctatcacatgtgtatcatttacaagatgagtagaaatgatgggatgtttttctggggtttaaggcatattattttcaacaggatggttagagaagatgccactgggaggggacatttgagcagatgcctgcagttaaaggggaggctctttcagatgtgagggaagaacatttctggcagaggcaacagcaggtgtgagacgggaacttgtgctgtcacagttatcggtagtgccctgccccacagctgctgagcccactttcaaatccatccagagctgtggagttttgattccatccagagccatggagggcagtttctytgcactctggaagcttcct

SEQ ID NO: 63026 - DNA, 417 bp, Homo sapiens
actgcattcttcctgggagctgtgaaccgaactaggctatgtgtcaccagctagagacaacaagaactcgtccctaaggggcttccagtctagcaggcaggacaacagagaaaaagtccattcaaccaaatgaccttgagcaagycactcaaccatgctaagcctgaaaatcctctcctataaaatcaacacaaaagtgcagaatcgcccagggttactggggtaactagaaagggaaggaaagcaccgagcacagtgcccagtccatgatgaccaatcagcatttgcttaataattaattcccttcatagcagagggcattcgcgtgggttcctttttgtgttagcagcatctaaatgtatacatctgtatgagtgtgcataagtatttgtggatcaagccaatcactgggatcat

SEQ ID NO: 63027 - DNA, 726 bp, Homo sapiens
tacttcattggagggacactcttcttctaccaccatttcttgaattggcacgttttagacattaccagtttcctgctggaataggtagaggttgtgcgtgcgcatcctgagcatcctgctgggctgaagggagcagcctattttgttctctcctttctcagggctctgcattattttcttcttcatctgggtgtcctaatgtacctttgtggccccccccaacttttttttttttttttttttttgccttgcaraacctttaacatctctctcattctgttcttcctcctactaaatgggtgacccccaattttattttattttttttttgagacagagactcgctctgttgcccaggctggagtacagtggcgtgatcttggctcactgcaacctccacctcccgggttcaagcgattttcctgcctcagcctcctgggtagctgggattacaggcatgcaccaccatgcctggccaatttttgtatttttactagagacagagtttcaccatgttggccaggctgatcttgaactcctgacctcaagtgatctgcctgccttggcttcccaaagtgctgggattgctggcacgagtcgctgtgcctggcctgacccccagttttaatcatcttatgttggcagctgtagttttagtcatagctgtctcttggtaataatgaaaaaggaaagtatctttttaatttaaatatactttaagttctg

SEQ ID NO: 63028 - DNA, 903 bp, Homo sapiens
cctccctctccctgcttgaggccttaaattacaaagtttatattgtcaagcctgctggaaattttctaaacaaaagaactcttttctctctgtacacgtttagcttcattataattcagttaattatacacaaataaagacaggaaaataatttcaaaagtaaaattagaatactgtaatttgtgacaaaactatactaaaaataaattacaaataattgggacaaaattatattaattacacatagagaaaattactttattgctcctaatattacaaattaaaatctagtttgaccatgaagcaactttgttgatcataaaggatttctttttyaatgctaagaagatggattttcataattatagccatttgaatattataatgtttgggaaaaattactgtgtatcgtcgtctatactgaggtttctgactcatatacaacagcacgaaatacattattgccaccagttaatatcatctgaaagatgtgataggcttagcaactgcttatctctggttcttaagagaaaattttcttccttctgcatttagccacaagattagctagcacttccagcacttcacatctggtctttcttgcacctcactgaactcacagaattgagagatttacctgctgaaagccttgtcacagttccagcctctgcctcatcttaatccttctcatcctttcccaagctccacacttctctccattccagagcttctgcaaagacctactattgttacaaattgctcagtggagtctagaaccgaatttgctctcaaatgtggttgcatcatttttctgttttttatgtacaaagtactaacattagcatctaaatgcagctgtgttgctactcatcctcagctactccaaggattcctcagatactc

SEQ ID NO: 63029 - DNA, 536 bp, Homo sapiens
tggctcctgcacccattcacctgcatgcttcctttcatgagcaggggactgcagcaggtccaagtgagtgaagtttgatcctgcagcactgaagtgctgattccagcactcatgcactccagttcctgcctcatttgcttgcatgctctctcctgcaaggaggtgagagtggcaggctgaataaatgaggccctgtcacaagtcccacagaagggtcagggaaacatcctgcttcacttccatcaaagagaatttaaaagcttatgcaaaaaaattattactattactatgactgtgctgtrtacaataatcaggtcaagtataataaagcaaatcagctctgccatgatttgtctttagtaaaaatggtaaatgggagagagaagaattgtttcaaaaaatgatagtacacctgttgttagattctagtcttgcctaatgtttttccatttttattaatttttacagtttggactgaattctaatttttcttggctacaggtcttcaaaagattgtcttcagtttttttcttctt

SEQ ID NO: 63030 - DNA, 631 bp, Homo sapiens
ttcagccaaaggctcaaggaaatgcctatcctgatttatggaactttttctccatgtagttcccttctctcaagcactytaccctgaaatttattgcctccctgaactgtcattttttttttttttgtctcctcaactcaaagagatcccaaagttttgttttcattgtccctccttatgtagtaatcttggggttacttcccagtagcaagcttaggtgactttagggttcacatcttatgtttctgttttctaagtgattatttgtttgtgctctatttgggtggaaaatagttattttctatattttctccagttttctagttttttacagtgaaaaaaagttattctggacttactacctcgttgacagaagaaattacactcatgaatagaagcagaagtaagagtaaccttcatttttgggggaacaaattctagtttggtacttgttttaacacttcaaatatgtcattaaattgtgaggcatgttgttgctattttgtaggttaattgttaatgtgtcttctttcttgctgctttaaaaatgtatctctttgtctttcatttttatttgttttactagaatatttctaggtggcattctttgaatttgccctgcttggcattc

SEQ ID NO: 63031 - DNA, 534 bp, Homo sapiens
acatctccacctacagattaaatatactaacacacagtggaaacaagcttctattcagtttagcctaaattcatagagcatgagwtataggttttggtcacttgagtgtgaaatacccttttttagctgctagtcaatcaaattagaacaagtataattttcaaaaactatccttgacacacccactgttttttctcctttcatctactttttctacatttcaatacatatgatatttacattgtgagattcctctaagagatgtttcaactaatcttctatttctcaatggaaatattgagaaatagagggaattgaggcaatttctcaattgcctgagaaatactgattgtacaatgacaatcatgaaaggaactcgaggtggtctacctttcctacaaatacatattgatttctttccataaacatttggtcagcatcagtgaggtaggggctaagggacaacaagatagggactaagaataaaattggtgaagaaaaatagacatgatccctatttctatggaaattaaa

SEQ ID NO: 63032 - DNA, 765 bp, Homo sapiens
acttgcaatgctcttatgtagacaaagggagatctacaagttgatcctatacataccctaagatctaaatataaaagaaactaaaagaagtcaacacagttgataaaaccctttagcaatgccactgcgatatgtatttccagtcatttcttcacgcattcaatcactcattctttagtcagttaaatgcagtcggctgtgtacctaactctatacatgcaactatacgaataggaaagaaacagaggattgagtctttgggactggaaactgcagaaggattgtgatctatttgaagagtatgtaggtcagggttattgttagctacatataacaacaaaatccccaaaaatagtggctgcaagcaaacagtttatttcttgcattttaaaagtggcagtaggtggtccatattggtttaggagacccagatattcatcaggtcccctggaaattgtaccaatcttataacatgaccttcctggtcaaggttcaaggtgtctgctggagctcctgaacattacacttgcatttcaggtggcaaaatggagtgataaaaggaaaaggaatgtgccttccatttragatgatccccctaaaggattacaccaaatgcacacagacattcagtgtacttggtctcactgacacatgcagctgcaaattagtttcggatactcgggttctattcctcgacagtgaagagagaatgtctattgggaagcagttgtcagtctctcatacatggagacaaaagaactggac

SEQ ID NO: 63033 - DNA, 1274 bp, Homo sapiens
atgcattaagaaaaaaattctgtactttactctccaaagcatcaattcaaaaaacataactacttcagctttttctacaaaaatgctgatggagaaaaagagtcctcaggcatattaaaatgtgcaagggtaatcatagtttgagagaaaatattagatatttttaaagcaaaagattaggaaaggttaaattattttaaaagttttacamaacgtatttacttacaactgttccagaaagtctccataaaacagtattgttcctctagcgctttacttttagagaatgctgaaccaactgtcctgctctgttactaactcaactgtttatcatgtatgtgtaagcgccaggcacttcttacctctggcaaatatgtaaaagaaggaattcactggtcttatccaatcattctgggaataatcttgttaacattttcacaggctctttttctaaagagaatgtgctttacgcaataaaaattacaaaaataaaaagcagcttcttatcaagcaattttaaaattggagaatccaattttttgtttcctttataaagttataaatgcagattctcaacatatacaaaatctttaattatcttaattcatcgtttgatctgattgctaagaagcacatctgtataatattttttaaagccttaaaattacttgtaggatgatagtttgaagaaagctgagtatataaaaataaaattcagagaaaaaagcaggcatttaattttgtaaaaagaaaaaaagaaccaggtaaacttcctggcagatgccctaaattgtctcccagtaggtccagggcaaacatcattttctaccacagaagcctcaatacggccaatggaagctggtatttctgtttcatggcttcacttctactaacattctactgtgaaggccctgatgtgaaaggagaagaatttaaacagctagattttatagtcagtccttttctaaatcaaagtgcatctttgcaacaattccgatttttccagaatgttcaaaatcaaatgcagactattctaatatgagtgacagaaactttgatacaaaattacatgtcccattactttcactgacagaagcattatttcttcttccatgtgtgcaatactgattgataaggttatagctcaaaatatcacaagaactgtgactggcacttgctttctagccttgactgtctcttatatagctctacgtactttgtacctacatctgtctccacaacaaacatttttaagaaggtgttcataagaatga

SEQ ID NO: 63034 - DNA, 1274 bp, Homo sapiens
atgcattaagaaaaaaattctgtactttactctccaaagcatcaattcaaaaaacataactacttcagctttttctacaaaaatgctgatggagaaaaagagtcctcaggcatattaaaatgtgcaagggtaatcatagtttgagagaaaatattagatatttttaaagcaaaagattaggaaaggttaaattattttaaaagttttacaaaacgtatttacttacaactgttccagaaagtctccataaaacagtattgttcctctagcgctttacttttagagaatgctgaaccaactgtcctgctctgttactaactcaactgtttatcatgtatgtgtaagcgccaggcacttcttacctctggcaaatatgtaaaagaaggaattcactggtcttatccaatcattctgggaataatcwtgttaacattttcacaggctctttttctaaagagaatgtgctttacgcaataaaaattacaaaaataaaaagcagcttcttatcaagcaattttaaaattggagaatccaattttttgtttcctttataaagttataaatgcagattctcaacatatacaaaatctttaattatcttaattcatcgtttgatctgattgctaagaagcacatctgtataatattttttaaagccttaaaattacttgtaggatgatagtttgaagaaagctgagtatataaaaataaaattcagagaaaaaagcaggcatttaattttgtaaaaagaaaaaaagaaccaggtaaacttcctggcagatgccctaaattgtctcccagtaggtccagggcaaacatcattttctaccacagaagcctcaatacggccaatggaagctggtatttctgtttcatggcttcacttctactaacattctactgtgaaggccctgatgtgaaaggagaagaatttaaacagctagattttatagtcagtccttttctaaatcaaagtgcatctttgcaacaattccgatttttccagaatgttcaaaatcaaatgcagactattctaatatgagtgacagaaactttgatacaaaattacatgtcccattactttcactgacagaagcattatttcttcttccatgtgtgcaatactgattgataaggttatagctcaaaatatcacaagaactgtgactggcacttgctttctagccttgactgtctcttatatagctctacgtactttgtacctacatctgtctccacaacaaacatttttaagaaggtgttcataagaatga

SEQ ID NO: 63035 - DNA, 1274 bp, Homo sapiens
atgcattaagaaaaaaattctgtactttactctccaaagcatcaattcaaaaaacataactacttcagctttttctacaaaaatgctgatggagaaaaagagtcctcaggcatattaaaatgtgcaagggtaatcatagtttgagagaaaatattagatatttttaaagcaaaagattaggaaaggttaaattattttaaaagttttacaaaacgtatttacttacaactgttccagaaagtctccataaaacagtattgttcctctagcgctttacttttagagaatgctgaaccaactgtcctgctctgttactaactcaactgtttatcatgtatgtgtaagcgccaggcacttcttacctctggcaaatatgtaaaagaaggaattcactggtcttatccaatcattctgggaataatcttgttaacattttcacaggctctttttctaaagagaatgtgctttaygcaataaaaattacaaaaataaaaagcagcttcttatcaagcaattttaaaattggagaatccaattttttgtttcctttataaagttataaatgcagattctcaacatatacaaaatctttaattatcttaattcatcgtttgatctgattgctaagaagcacatctgtataatattttttaaagccttaaaattacttgtaggatgatagtttgaagaaagctgagtatataaaaataaaattcagagaaaaaagcaggcatttaattttgtaaaaagaaaaaaagaaccaggtaaacttcctggcagatgccctaaattgtctcccagtaggtccagggcaaacatcattttctaccacagaagcctcaatacggccaatggaagctggtatttctgtttcatggcttcacttctactaacattctactgtgaaggccctgatgtgaaaggagaagaatttaaacagctagattttatagtcagtccttttctaaatcaaagtgcatctttgcaacaattccgatttttccagaatgttcaaaatcaaatgcagactattctaatatgagtgacagaaactttgatacaaaattacatgtcccattactttcactgacagaagcattatttcttcttccatgtgtgcaatactgattgataaggttatagctcaaaatatcacaagaactgtgactggcacttgctttctagccttgactgtctcttatatagctctacgtactttgtacctacatctgtctccacaacaaacatttttaagaaggtgttcataagaatga

SEQ ID NO: 63036 - DNA, 2129 bp, Homo sapiens
ccatctgaaggtcagagaaggaagttcagctgattcgaagtcacacgtgcatctgaaaataggggagctcattagcagtcataggtcaaaaaagtagtgaaaacaagatcacactataaataggcaaacaatagattgcagcatttgagataatagccacgtacacatctaagctctccattggttgggtgctgagaaactacctcagtaacaaatgctgctggaggtctgaatagcattcagaatggcttcttgcctgctggctgaaatcctcatcagggcaagctccaaaaagaacttatttcacctaaagcctgtcgacttctattagatcaccctgggcattaatttcaattttcatgtttctgcaccacgaaaaaaaagaaagaaaaaaaaaagcctttatatgtgccaaagcttagctgccaactgttgaggaaaaaaaatttgatttctattgaatactgcactttggaatgaaagaaaacaacgtctaaatgaagctgaggctctcagtcacctatgcctatattactgtgaaatcaattatgtgggctctctcgaaagttactgattgtagcaaattgaatggcctttatttcagcataatttggagaggttgatgtaatcagagaccttacaccacggtgagatacaagattcgtgatattcagatgggagaaaagctacagtggttaagcttgttccgtaccttccacttacctgctgcaacgctttcataagtacaaatgaaattgttttgatgaaggcagcaatgttgctgaaggaatgagtgaaggggtgagggagtggaaatgaggttgctgggaatcacactattgtcttcatatgtaaggaggctgaagaatctaatcctaggcctaattggctgcaaatgaaacactttaatatcaaatcttgagatatgccccagagctgaagttcaagcttagatgtgaggagagggtgaaatgcttgattttttcttgctgtaactgtttgttccacttcattcctttgggagtctagaggctcaaataattgctcttcaaattataaattgattctcttcaaccccaagacaatttttggcttgagaaaattcatggcaggtttggtttcattacatttgcctaggtgaaagctattgtatgcatttatatatgtgatgtagcatgtttgcaatcaagtattcctactttgtagtaggtcaggcatcattgcccaatgcaaaggcaatatggtttgctctaaatcaacacaacgtgatcatactctatcaagggtctgggacttacatgagcacaggttacataagggaggtacaacaagctaaatagaaacgtacttcttacaagacactgtgaacatattctagctttgagtattaatatgttttcaacttggagagagacagcagggctctttcttttgcatgcgtaattctttttatttattcttttttcatcaattccaaaagcccagctcaagaataaatgaaaaatggcaatctttttttttcttttttcctgagcattgaaatttccctcatttggaactaactcttggccagagttgagagacctcgatgtaatgagaggaaaaggacccgaattcaatctcaattcttttactgtgaattcttggtttaccagactgaacgttagcatgttcatttgtacatgggatttattttgtaaggaaattgaagacttacaaaatgcgtttatgtcagtgggcatatagtaagtgtgagaaaatgtcagttattataatccacccagctacattgtaagacccttaaaagaaacaatcatccttttctcttaatatagattaacatctgagacatattagtaggtggtcaattawttcttgtttgacataacatgatatattggaaagaaaatatattagggttcaagagctcttagttcaaccccagaactaattgtacaatcttggaaagaatattgattttgctcggtctttctgatctaatttataaataaagagatatatctaaaagcacctataaaactttctttagacctaaattctgaaaataaaaaaaaattttttaatctaaaatgaaattcaacaatatccttaatttaaatgtgtgtatg

SEQ ID NO: 63037 - DNA, 1673 bp, Homo sapiens
ctggaaaaactggatatctttttgtaaaaaaaataaagaagaacctagaccgttacttcacataccacatgtataaattaactcaaatccaatgagaaacctaaaatgaagacctacaaatataaaacttatagagaaaataaggacggacccagtggctcgcacctgtactcccagcactttgggggactaaggcaagaggatggcttcagcctagcagttcaagaccagtatggccaacatagtgagaccccatctctatgaaaactttacaaattatctacatgtggtggcacatgcctgtagtcctgcctactaggaggctgagatgggaaaatcactcgagcctaggaggttgaggctgcagtgagccatgactgcaccactgcactcctgcctgatagagcaagaccctgtctcaaaaaaaaacacgattaagaaaatgaaaagacaagccaccaaccaggaaaaagtaaatacaaaatatatatctaagatttgatccagaatatattttttaaatcttttataacccaataaaaagaagacatattctaagacagcacttgagttaatatcctcaaggatctctcagtataaaagtgggtgttttttataacagagcaactgcagcaaacagaccaggtcctctgctatctcaaaatactttgaataaagttatccataaagcactgatatgtcctacctccccatcaggaggaacgttggcaggtaacagaaacatgggatcctgctaaccacagctaataggcacagaagccagcctgttctagtcacaggctaacagtttcaaaagggatccatctttttggtggattgtcattttacagaagacttcttcaaattgaacagaatcaaagtgctcatcaaaacggggatatcatgctgaaccaattactacttaaacatgcaattggcaatgggaaataggttgtgatctctgaagagataaggctctaccagaaaagattaaacagtcatcagagaagatcctgcctawcagagctttaatagctaaactgataatttggatttagaacttgaattccttcctacgcaactttgggaacttgccttcaaaggcacatcctggcactggtgtctttagaccaatggacagactcttcctaggcctggttaaagaggaagacattctccaaagcagttatacaaatttaccgggatctctcactctgaagtaaatgtacaaatcaaacagactctctgagaggagctggcaataacgcataaattagcttttaggaaacattttaaagtaaccactttctcaatcactctccctctagaaataaatataaaatctttcctgaaatgaatgtaaacgttgactttcacttatagaatggaacacacttcaagttctataaacgttaaatgaaacctacagcaggccatggatttggactgagctcctgcattatacccaacagaccaaaccgaaatgaagtcactcatgctaaagttccaggccaccaaaccaaaactaagttgtttatctgagcttctgataaatcaggagagagagataacagccaaatctccaaacaggccagttttagcctgcatgatgagaaagtcccctctattttacccttacaagggaagtaacctgaagtaacctaatgttaacc

SEQ ID NO: 63038 - DNA, 902 bp, Homo sapiens
gggtttccaattcctcttctgtaaaacggtaacaatagtacaacttttaaatattgttataatgttatatgagaattttaaaagataataggtgttaaaaatgccaggcattactctcatatgtgataggctgtcatttatttgttgattactgtgtggagatgatgtactaagcactctacctgcatttcctcatttgctatttcccccaaactatgaggcagattctgtttttatcattattttaaatgaggagactaacacacaagaaaggtaaaacatataatttggcactgatcctagaatgaatacagagaagaccagtatttgagcccacaggttgatggggtgtggttcaaagacaatgttgaaacttctaggtatttttttgttgttgttgtttttgattttttttcctgccaaattaagaaaaaaaaaatctggatttagtaaggagaggctttatttgaaaagggaagaagtggaagagaaaatggactattgcagtgagaatcatgctctgaccataagatcagcaatgtctcagaggttaggaaaacaggagttcctcctttattaaggggagggaaagaggctacaaagagctgatgtgaaatgtaagggttgtgcagtcccatagtagaccacaggacatttttactctgaggccagcctcttctcaggaaaggcttttaagcaggggtttataacagctcaggctaaggtttgctaaaaattcaggacctgggaggagaagagaaaattcaccagagtttgattagcaaacatttggttccaaataatcacaggkataagcagttaagataattctttatgagtcatagaattggaatttcgagtttgggtctaaccttttcctaggtaaacaaggggtaattcat

SEQ ID NO: 63039 - DNA, 780 bp, Homo sapiens
ttaaatagttatgagtaaaaagaaactacaagctgaagggtgttccatttatgaaagctttaatggatatagtttagcccaaactgaaacctgtttggggagcacaactgcatttgtttagtgatatatgaaaatattactctgtacttggcatagcatcagcgagtaattggaaagcagaaaatgccgaactgtagttggtgagacttttactgctggaagaaaaactgctatgattatagcagaagtctacgttagctaaataaccatgcttctggggcttaaatgcagggaatattattgcgcatatgtcatgacaatgcagtctctgtcttattaagtgtgggtttggtcccaygtgggcagtggtgaacaaatattgtatagcattggcacttggcagtggcacctgcaaaacagacgtcattggcagatgttgcacttattctaattcagaaccacgttggcttctaatgagacttctgagaaacagtggggtggtggatattcacagcttccaattagacataggagagcagggaaacaagcatgtagggagattatttgggagcctttgcatttgtttcactggcatatattctactcactccccctccttttttttttctattcctttctttgagagacaaagacactcaggctgagtgggtctcagtgatttgagtgtggataatttcaagtcacagctgattgaattttctattgtatgtttgtgtgtgtgtagaaaagagactaaagagagaattaagtaaggatcct

SEQ ID NO: 63040 - DNA, 812 bp, Homo sapiens
tcctcttggcccaaacacttcccaccaggtcccacctccaacactggggattacatttcaacatgagatttggaagggacagacattcaaactrtatcactatgtctagtcaatcaatccaacatcccattcctggaaacatttgggagaaattgcagctgcaaggaggatgttgtacaaatggggatgaagctgaataaatactgtattgtgactattactaatgctagctattctgctttatacaccaggcacccagggctattgaagccttggaagcccctgttccatatttgcgccactcagcctgtcctcagtcattctatgtacagccatttatttccatagagctcctttaagatggaaagatgaaactgttaagtcgaaccatatgatttccaagaatcagcagtacataataggcttttccatttagtattactgcttccctctaacattttcatgttcacaactgtgattggttcatattgaaatttaaggagaatgaagaatcagcaaattcaaatagacaaataaatccagatcatctaaattcaaattgtattttgggtcatctgtgaaatgtctttgacttgtttttgtttctacggctgtaaaatggataatctacaatcaactctgtaattttaaggaatataaacaaaggactataaagtgcttttaaaattaaattcccgctttaatttccaggtttcagcacaatgttgacacaaataaggcatttaagtggtttgcttcatgggtaaaataatatcatgtgtggtatgtagtttttggcttactcagggatt

SEQ ID NO: 63041 - DNA, 659 bp, Homo sapiens
tatgttattaaacttatcccatattttcatgaggattcacttacatatatattcctgccactgctttgtgagaattttgaaggtttggatcgtatcayttttagcttcacatctctccacgagcatctcgtccgtgtaagttatcagtgaactttaagtgaaattattattgctttagagtatggatttctttcctgacttaaatcactacagagtatttccttaatggttaaaataatattctgatacccattaaaataattttcaaactcttaagataaatgtcagttttaatgtaagcaccaataaacaggctagtggttttccactctcaaaattcagagatctctttcccttccactcaaaaatgtaaattcttacaatgacagatccactcaagctatagtcaaaagaataaaacagttccctacatggatatgtccccttccacaggctgcccagtctataatcaaaaatgttgccatgactcaatagaaatttatattttagtatctactctgtatctggcaatgggcaaatatatgaagaaaatagaaacctcaactttgttcagtattcagttgggaagaatagatagacaactaaatatcaaagagctacacatcaaagtgctgggagtatactcaggaatgctttgc

SEQ ID NO: 63042 - DNA, 558 bp, Homo sapiens
aggaattaataatatatctgatgttatgtttccatctagcagtacctatccataaatatactgatgaattcaatcaacatttaaggtagcatattgctagtgtcaggaactgaggattccaaaaaatatatagacttatgccctggtgatactactctagaacttatgtggtcattgcaataactaagtcaagaaataagtgtgatgggatttccataaaggacttgcacaagatatcttgaggagtgaagaaaaaacttcaggtagaaggagtctcctgtagatgtttaattcctttgccaaatggagtttctaaaatgtatggcttatcatgaataatcattccaaatgtaattcagaataaaattttaattttacataaaaatttccaataatgggaatgaagcatacacacacacaccagaaacatggatattgagtactcagactaaaaaaaatcacaatataatatgttcaaagaagcaagattataattaragattcagtttcttataacacttaatgggcatttgctaatacccaagccctgtgttagca

SEQ ID NO: 63043 - DNA, 558 bp, Homo sapiens
aggaattaataatatatctgatgttatgtttccatctagcagtacctatccataaatatactgatgaattcaatcaacatttaaggtagcatattgctagtgtcaggaactgaggattccaaaaaatatatagacttatgccctggtgatactactctagaacttatgtggtcattgcaataactaagtcaagaaataagtgtgatgggatttccataaaggacttgcacaagatatcttgaggagtgaagaaaaaacttcaggtagaaggagtctcctgtagatgtttaattcctttgccaaatggagtttctaaaatgtatggcttatcatgaataatcattccaaatgtaattcagaataaaattttaattttacataaaaatttccaataatgggaatgaagcatacacacacacaccagaaacatggatattgagtactcagactaaaaaaaatcacaatataatatgttcaaagaagcaagattataattaaagattcagtttctyataacacttaatgggcatttgctaatacccaagccctgtgttagca

SEQ ID NO: 63044 - DNA, 619 bp, Homo sapiens
cagcaactacctctaaaacaactaaaactaacatttatttaaaacaaatggctatttatgctattttattcaaacctcaaaataatgctatgaaatagttatcgttgttattaccatttcactgatgagaaaactgaggctcagggaagattagttaactccctttggatcatacaattaggaagacctagagccaagatttcagcctaagcaaaattcatccttagcaatagcacatcctgacctggtcatatataagaatttaatagtagtttctgataaagatatcggtttggaaaatttaaaaaaataatattttattgtacatctataatataattgtatrgttaattgtataattgtataattgtatatgtgtatatgagatagacagtttaaaaaatattactttaagtcctttttgaaatgaatcgtgaataaaaatagtttgaatatagaagcaggattttaatcaaatgaatatagaaaatattctttaaaatcactgacagaaaatacaagaatttcagaaaatgaaccttcaacatattttttcaagggctcttattcttttctattttgtggatattcaatataagcaaaattttaaattcaaaaa

SEQ ID NO: 63045 - DNA, 619 bp, Homo sapiens
cagcaactacctctaaaacaactaaaactaacatttatttaaaacaaatggctatttatgctattttattcaaacctcaaaataatgctatgaaatagttatcgttgttattaccatttcactgatgagaaaactgaggctcagggaagattagttaactccctttggatcatacaattaggaagacctagagccaagatttcagcctaagcaaaattcatccttagcaatagcacatcctgacctggtcatatataagaatttaatagtagtttctgataaagatatcggtttggaaaatttaaaaaaataatattttattgtacatctataatataattgtatggttaattgtataattgtataattgtatatgtgtatatgagatagacagtttaaaaaatattactttaagtcctttttgaaatgaatcgtgaataaaaatagtttgaatatagaagcaggattttartcaaatgaatatagaaaatattctttaaaatcactgacagaaaatacaagaatttcagaaaatgaaccttcaacatattttttcaagggctcttattcttttctattttgtggatattcaatataagcaaaattttaaattcaaaaa

SEQ ID NO: 63046 - DNA, 651 bp, Homo sapiens
ttcaaagaattaaagttttaagatgtttccaagttatttgcaactaaatcagataaattataacattcataaatggaaagcaaatattttaaaatatcaagaattattgaatgtcggtaagtgaggagtaaacagatgttcattgtgtgaaattgtttatagtaagaacttggaaaaaaacaaacaataagatgaagcattaatatggaacagtatttttagtggtggaattacaggtactttatttttacttttcagcrctgttcatttttatagtacttttaaattatcattcaatcactttaaatttagtttatcttcattcaacatattagtcattcaacattttaatacttttatcccttccaccataaatatacaataaataatttgctttgaaaagatgatgaatcagtgctctcattttttctcatgcaactaagatgtgcttcagtgatactaatttgtaaatcaatatgacaggagacttcaggtagatcctaaaataattctccccttcaacatgggtttctattctttggaatgttagctagataatgaccctaaagaccttctaacaaaaattatgcgttacttacagagatgttaccaaaacctgttgttagaattaaaaaccaaacatggaaaaaa

SEQ ID NO: 63047 - DNA, 1104 bp, Homo sapiens
  misc_feature (1)...(1104): n = A,T,C or G
aaagttacaaatgtttgactaatagtatagcgtgtggcactgttagtgttggaccatcaggaattatgtgatagaaacaaggaaatatatagaaaaatatctgctctctggaatatttttctcctctttacttttgtaatttaacatttcaacaccctagtaaatagcaagcagtatatagatcatttgttcacaggatttcctaaagtgtgtttggatgcacggcatatcaaacatgccaaattacttgctaaaagttttgstatagcttgttctgcaatcagcatatgtttaagaaaattttttcttccctttaatttcaggcatcaactctcaattgacttatagcatnnnnnnnnnnnnnnnnnnnnnnnnnnnnnnnnnnnnnnnnnnnnnnnnnnnnnnnnnnnnnnnnnnnnnnnnnnnnnnnnnnnnnnnnnnnnnnnnnnnnacactcaaaccaagttcgtaatattatttccatcagatcagtacaactccaggatccaatttttctttccatttacctatatgcatttggaattatatctggaacacattctgtaatgagatggatcaaaagaatttgtttttttgttacattaaaatatgtggaggatatccaaattttctgttataactagccaactctcatatccaccttagaaactaattttactttagagatgtaaatatgttttagggtaatacaaattattacatgaatgtataaatcattttcttggaaagaaatatatattttaaaattcctttaattttctatccggtgtcaatacctcatatgaaggttctctaaaattaaattggctaaaaatataaatttttgatgatatgcagggaattatttggtaaaagtaaagtactaacattttaataagtagaggctatactaaatttctctatattcatgtctaaatttaaaaaatatgtggataacaggaaaaactgtcataatataaatgtgcagttgaagctaagctagtatgacttcctcccacgtttctgaatcttaaaattcagaaagtctcagaaaccatactaggagtactgctttgaacagttcctttgaggtccactgtttga

SEQ ID NO: 63048 - DNA, 974 bp, Homo sapiens
tctaaattccgtytttcttgacttatagccattttcacaggaaatcaaaggcaatgacagatccccttgagccagaagttgacgtctttggttttagtctcccatgtagtaatgataatgtggacaaaaatagatggatgtgatttttcaaagagaacttatttcactgtacacagtaggataatgcaaagaactactgctttattttcatgactagtacatatgaatcataatcagttctttgaattccttcaaagaggatgaaataaatccaagaatgcaaacttcccttatttcacaatattcgtgacagatgtgtgaccagcagacacccttgtgcttgtttctacatgtgggaagactgcagcacatccattaatcagtcgtttcttcttgctacttccatatattggcagaacagaatattcccacgctggttttcttcagatgacccggtaaatctttcagctcatctttaaagctccctccacaccacctgggtgtatagaatgcttgcttgtggtgcgtatatgtcaggatttgatcaagaagctgaatgtggctctgtgcctggtttgcatcacagagtcacaaaaaaggttgcataaaatcacccgtctgcagactgtttacttgcctgaagtgtcatgccacttctgagattccggggttccagagagctccatggcattttgaactgacttcctctctgcttcatccaagacaacatttttttgtgcattttttacatatattttatattaacacactttttaaaaggcaggaaattataaatatctataatctcttctgcaaatctaacattaactaatttggagataaaacctagcctggccagacatgagactttacaaaatctctatttattttatttggtgtgactacgcattcaggtccctgtgcaaatattaatgtgtttgattaggctgtgccacccaagacatagttggaaa

SEQ ID NO: 63049 - DNA, 974 bp, Homo sapiens
tctaaattccgtctttcttgacttatagccattttcacaggaaatcaaaggcaatgacagatccccttgagccagaagttgacgtctttggttttagtctcccatgtagtaatgataatgtggacaaaaatagatggatgtgatttttcaaagagaacttatttcactgtacacagtaggataatgcaaagaactactgctttattttcatgactagtacatatgaatcataatcagttctttgaattccttcaaagaggatgaaataaatccaagaatgcaaacttcccttatttcacaatattcgtgacagatgtgtgaccagcagacacccttgtgcttgtttctacatgtgggaagactgcagcacatccattartcagtcgtttcttcttgctacttccatatattggcagaacagaatattcccacgctggttttcttcagatgacccggtaaatctttcagctcatctttaaagctccctccacaccacctgggtgtatagaatgcttgcttgtggtgcgtatatgtcaggatttgatcaagaagctgaatgtggctctgtgcctggtttgcatcacagagtcacaaaaaaggttgcataaaatcacccgtctgcagactgtttacttgcctgaagtgtcatgccacttctgagattccggggttccagagagctccatggcattttgaactgacttcctctctgcttcatccaagacaacatttttttgtgcattttttacatatattttatattaacacactttttaaaaggcaggaaattataaatatctataatctcttctgcaaatctaacattaactaatttggagataaaacctagcctggccagacatgagactttacaaaatctctatttattttatttggtgtgactacgcattcaggtccctgtgcaaatattaatgtgtttgattaggctgtgccacccaagacatagttggaaa

SEQ ID NO: 63050 - DNA, 974 bp, Homo sapiens
tctaaattccgtctttcttgacttatagccattttcacaggaaatcaaaggcaatgacagatccccttgagccagaagttgacgtctttggttttagtctcccatgtagtaatgataatgtggacaaaaatagatggatgtgatttttcaaagagaacttatttcactgtacacagtaggataatgcaaagaactactgctttattttcatgactagtacatatgaatcataatcagttctttgaattccttcaaagaggatgaaataaatccaagaatgcaaacttcccttatttcacaatattcgtgacagatgtgtgaccagcagacacccttgtgcttgtttctacatgtgggaagactgcagcacatccattaaycagtcgtttcttcttgctacttccatatattggcagaacagaatattcccacgctggttttcttcagatgacccggtaaatctttcagctcatctttaaagctccctccacaccacctgggtgtatagaatgcttgcttgtggtgcgtatatgtcaggatttgatcaagaagctgaatgtggctctgtgcctggtttgcatcacagagtcacaaaaaaggttgcataaaatcacccgtctgcagactgtttacttgcctgaagtgtcatgccacttctgagattccggggttccagagagctccatggcattttgaactgacttcctctctgcttcatccaagacaacatttttttgtgcattttttacatatattttatattaacacactttttaaaaggcaggaaattataaatatctataatctcttctgcaaatctaacattaactaatttggagataaaacctagcctggccagacatgagactttacaaaatctctatttattttatttggtgtgactacgcattcaggtccctgtgcaaatattaatgtgtttgattaggctgtgccacccaagacatagttggaaa

SEQ ID NO: 63051 - DNA, 548 bp, Homo sapiens
ccaggactcctgcactgagcatgtttagaaatagacaattcccagagtccagccaggttgagagcccagcttctggggatgtgggacggastgatcctagctgcaaagacaccacagggctgcgctcagggcagaagctagggctatggagtgagggaactaggctcaaatctctcaccctttccccatcctttacccagctctccaaggtcatgagcagtgtaagctgaaacatgaggttaaagtctgtaagcttcaggtgtctcatctaaaagtgagaatcgtagtaatgaataacacttgctccactacttgtcacatggcagcattacataaatgcattatagacacagcttcttttgagcttcacaaccaacgcacaagggaatactgttatgatcatcctcattttgtaaaggagcgaaccaaggcacagaaagtttaagcaacttgcccaaggtcacatagccagtaaagaacagagccagggtttgaaccaaggtagcttcactggcaaatctgtgttcctaattattctattagcttct

SEQ ID NO: 63052 - DNA, 548 bp, Homo sapiens
ccaggactcctgcactgagcatgtttagaaatagacaattcccagagtccagccaggttgagagcccagcttctggggatgtgggacggagtgatcctagctgcaaagacaccacagggctgcrctcagggcagaagctagggctatggagtgagggaactaggctcaaatctctcaccctttccccatcctttacccagctctccaaggtcatgagcagtgtaagctgaaacatgaggttaaagtctgtaagcttcaggtgtctcatctaaaagtgagaatcgtagtaatgaataacacttgctccactacttgtcacatggcagcattacataaatgcattatagacacagcttcttttgagcttcacaaccaacgcacaagggaatactgttatgatcatcctcattttgtaaaggagcgaaccaaggcacagaaagtttaagcaacttgcccaaggtcacatagccagtaaagaacagagccagggtttgaaccaaggtagcttcactggcaaatctgtgttcctaattattctattagcttct

SEQ ID NO: 63053 - DNA, 595 bp, Homo sapiens
accattaggcaaataactaaattgctaagtgggtatgatacacattaaaatcgatagaaacaggatagcaagacagaggaagatgggtggtcaggtgacatttaagatgggacctcaagatgaagagggaccagctatgcaaagagctggagaagagccttccaggcagagggacaaagggaccaaggcctgcagcatggaaggaggccggaagcaggaagaaccaggtgtgatggagcagagtgtaggggcaggtgtgggcacacagtgggctggcagaagaacataggtacaggttctgggtcttgtcaacaagataaggagtttggattttattttaagcacaagaaggagagacaatgtagtgtgggtaggtgctggagccagatgscctgtacctcagtttctccatctatatcacagggacagcaaaagcacctgtcttgtatagcgctatggtgagaattaaatgagctcatgctgtgaagtggaacccccagcttggtacggaagctcagtggctactcagcgggctactggaaccagctcctgagagctgacttcatgcatctcttctcaactcacacctctttgg

SEQ ID NO: 63054 - DNA, 1114 bp, Homo sapiens
tattatgtaagtgtagctcyaatgtgagttgttacttgtagagaacagctatgtcaaaaccacaccaaaaacgatttggaaaggaaataatttgactggtcattttgtttatccatcaactgagttggattgatatatttttcctttggccttcaaaggaaatttgagcattcattcattcatccttttagagaaatattctctaagcacctaccgtgcgccaagctttgggttggatacctggaacccctctcagtgagatcacagtctaacagcacacacccaactatgaaatatagatggactgtgaagatgaagaaaggttctggttatgaactcacagaggaagtgacggctgaactttgtaaggacacaagtggtttaacaagtttcctggcccatatgagatctcggctccgacgttacaggcagcagtgtggggcctcaccttaccttttcccacttccatccttctccacccccgttcagttcccaggctccccttgtgtgaactggctcatttctcactgcctttctgttctacagcccccgctctgctgagtcaggaggtgctactttctccatctgctttccatcgtccaaaatttttgttgatgtttcttgatcactgagttaaataatttttccccgtattatacattcagtagagtttctggagagagtgcatacaaaaacgcctaactgaatctaccacgtctaagcagatgctcccagagtctatgcttttttcccccatgccatactccccaaactaaaggatgagaaagaaccatgcaggcagaatgagatgagtagatgctactgctaatgctgtcagttctactactaccgccactgctgtcttctgctgagtatggattatatgcctgttccatatgagaacattatgcatatggtgtgatttggtcattccggatggctaaagtgtgagcatacccgtatctcagatttacagaggagaaaacagaggctcagactggttatgtatatttctctaagtcccccagctattgtttgttgtaggttgggtaccccaggaagtagattctgcaactgagattggcatgtaggaagattactggggagtgttcta

SEQ ID NO: 63055 - DNA, 1114 bp, Homo sapiens
tattatgtaagtgtagctccaatgtgagttgttacttgtagagaacagctatgtcaaaaccacaccaaaaacgatttggaaaggaaataatttgactggtcattttgtttatccatcaactgagttggattgatatatttttcctttggccttcaaaggaaatttgagcattcattcattcatccttttagagaaatattctctaagcacctaccgtgygccaagctttgggttggatacctggaacccctctcagtgagatcacagtctaacagcacacacccaactatgaaatatagatggactgtgaagatgaagaaaggttctggttatgaactcacagaggaagtgacggctgaactttgtaaggacacaagtggtttaacaagtttcctggcccatatgagatctcggctccgacgttacaggcagcagtgtggggcctcaccttaccttttcccacttccatccttctccacccccgttcagttcccaggctccccttgtgtgaactggctcatttctcactgcctttctgttctacagcccccgctctgctgagtcaggaggtgctactttctccatctgctttccatcgtccaaaatttttgttgatgtttcttgatcactgagttaaataatttttccccgtattatacattcagtagagtttctggagagagtgcatacaaaaacgcctaactgaatctaccacgtctaagcagatgctcccagagtctatgcttttttcccccatgccatactccccaaactaaaggatgagaaagaaccatgcaggcagaatgagatgagtagatgctactgctaatgctgtcagttctactactaccgccactgctgtcttctgctgagtatggattatatgcctgttccatatgagaacattatgcatatggtgtgatttggtcattccggatggctaaagtgtgagcatacccgtatctcagatttacagaggagaaaacagaggctcagactggttatgtatatttctctaagtcccccagctattgtttgttgtaggttgggtaccccaggaagtagattctgcaactgagattggcatgtaggaagattactggggagtgttcta

SEQ ID NO: 63056 - DNA, 923 bp, Homo sapiens
gatagaatgcaaactttaaaaaagacatacctttgtaactttctatgctaaggtgttgcataatcaaggttaatttttgtttgtttctagtctattggcatcaagtgctttaaaatgctcactaacaccgaggcagaattatttacccgggcaattaaagcaacagcacacacgatcatttcctactaactagcaacacgctgctggtgaatgaaatatctattgtttctcattacccatcgaccactgtgaagagatctctctgtgtaaaggcagtgcctaagctatcaccattaattatggaagtaatataaatgagacactctccacagtatgttctaaatgaaatattaacaaggccagcgtcttggaacctgagaaatggtctgttccagtgagctctgtatggaaatccacacacctaactcagacatgcccgatttgaaatagcggggctggacattgggggcctacctgtgagatctgaattattgcaaagtacatcctcttaatttgtttctggaaggcagagttaagagttaattccttcccatgatgtggccccagcggagaccttgtgtttttttttttttttttcttcagtgctttttcaggactatgttatagaatacttatggggcatacgtgtaaatgaactgtcaaccttaaaatctaaacaaacagcttgtttgtggttygtcctgaaatcctccctgctcacaaaacagccagctacttggttttctaaaagacgtaattttgcaggcagacttcgtagagccattctgtgcagaagaagggaagggagaagctgtttgttttacctgtagtatgaagatattctttgcgctgttagaactgagctcattaattctgcctggcaataatttcaaaggtttattttggtgtagatggcgaataca

SEQ ID NO: 63057 - DNA, 923 bp, Homo sapiens
gatagaatgcaaactttaaaaaagacatacctttgtaactttctatgctaaggtgttgcataatcaaggttaatttttgtttgtttctagtctattggcatcaagtgctttaaaatgctcactaacaccgaggcagaattatttacccgggcaattaaagcaacagcacacacgatcatttcctactaactagcaacacgctgctggtgaatgaaatatctattgtttctcattacccatcgaccactgtgaagagatctctctgtgtaaaggcagtgcctaagctatcaccattaattatggaagtaatataaatgagacactctccacagtatgttctaaatgaaatattaacaaggccagcgtcttggaacctgagaaatggtctgttccagtgagctctgtatggaaatccacacacctaactcagacatgcccgatttgaaatagcggggctggacattgggggcctacctgtgagatctgaattattgcaaagtacatcctcttaatttgtttctggaaggcagagttaagagttaattccttcccatgatgtggccccagcggagaccttgtgtttttttttttttttttcttcagtgctttttcaggactatgttatagaatacttatggggcatacgtgtaaatgaactgtcaaccttaaaatctaaacaaacagcttgtttgtggttcgtcctgaaatcctccctgctcacaaaacagccagctacttggttttctaaaagacgtaattttgcaggcagacttcgtagagccattctgtgcagaasaagggaagggagaagctgtttgttttacctgtagtatgaagatattctttgcgctgttagaactgagctcattaattctgcctggcaataatttcaaaggtttattttggtgtagatggcgaataca

SEQ ID NO: 63058 - DNA, 853 bp, Homo sapiens
ttctctgcctcttcccatgtctggtggcggcgggcaatccttgacgtactctggcttctggctgtgtcactccaatctctgttctcatttctcatggtgttttctcttctgtgtgcctgtgtatctaaatctctcttttttaattttgatttttattgttttttgagtccggtctcactctgtgccccaggctggagagcagtggtgcaatcatggctcactgtaacctcaaactactgggttcaagcgatcctcctgcctcagcctcccaaaatgctccttaggcagacgccagtaattgaatctaggacacgygcagttcggtgtaacctcatcttaacctgattacatctgcaaagaccgcatttccaaaggaattcgcatacaggggtaccaggagctaggacctcagtatgacttttggggggtgcccattccacccacaaaagtttctaatcatgtttgacatttatggagctatgactttgttacaggactgtagcaggcactttgcaatgcctgggtcaacccatatggaattgctgcatctgtaggctataaattgttgaatatcaccaatttcatatgctaaacttcatattatctcatttacctctctaagattagtactattattactattattatctcatttaactctctgagattagtactattagtactattgtatctgctaacagaggagaaaaagagccacctacatttgtcagggagatgaagtagtggatggctttaggaattgtacagacactagtcaaactatcccttcctctctatgtgaccaggagggagttacctaatccccctgagcttctatgtgtctgtttataaa

SEQ ID NO: 63059 - DNA, 572 bp, Homo sapiens
ggattgccacaggggaatttctttttgtaccacatttcctatctcttgagtactagaaacaactttagtttagattccaaagaaatcatatttgagtccctactgtatgcttattctcacataactctcaaaccagggagataggacgttctccatggaagaggaggctgaggctcagggaggccagagcaatacattcatggtcctccagcaccaaattccaggctccttctctcacttctctgccttggggttggaactgtwtggccaatggccatgggaggacctcagagccacttctctttaactgtcctttgactccgctgggctgtacttatcccactggagcaaaacttcatccctggggacaggacgaccacagcctgagctacatctgacctggggttcctcctgcctccttttgagctgtcaattcaactctatgtccatcaagttcagccatagataagactctattttaagaatgtgagatacgttttccagcagggaaagttgtgaaacactggggagataggtgcaagtactgccaatgtattctggagttttcacta

SEQ ID NO: 63060 - DNA, 601 bp, Homo sapiens
ttgagagcagtctgggcaacatggcaaaactctatctctactgaaaacccaaaaaaattagtcacggtggtgcgcacttgtagtccaagctacttgggaggctgaactggggggttacttgagccccagaagttgaggctgcagtgagccgtgatggcaccactgcactccagcctgggtgatgggagtgagattctgtctcaaaaatttaaaaagaaaaagaaatgatctgcttatgtgtctctaccccacttatctctggtctccatgaagascatggcatgctggtaagtgtgcagtgatccccagaaaggtttgtgggtctagaaaacactgaaggagggctttaggtgttaacgatgatcattcccatccacaagacactaaataagactttgagatctgcttttcttttttccttcagggagtgaggaccatcgtctaaaagattttgatttaaatcctgtctgggctgcagactgtatactattagccaagtcccttaccctctcaggacctcagttgcctcctctccaaaggcagaaaaatagcagcccaccttacagggctcttaggggaattaaacagtccaggaacacca

SEQ ID NO: 63061 - DNA, 2364 bp, Homo sapiens
catgcaaccacatggatgggtctcaaaataattatgtaaggggaaagaagcctggcaataaaaagcataatatatgattcaatttatatacaactccagaaaatgcaaacctctctgtagtgacaaaaagcagattcgtgattacttgggtatgtggtggggtggtgagggctggaggaaggcattaccaagagacataaggaatcttttaagagtgatggaaatgtttcctrtattgattgtggcagtgatttaatggatgtgtacgtgtttgtgtgtgtgtgtgtataaaaatttatcaaaaagtatattttcactatgtgtaggttattatatgtaagttatacctctataaagtgtaaagaaaaaaaagcaggctctggaagcattcttcctgagcatgaattttacattccattcttgcaaagaaaaaaaaaaatgaggctgcaagtccactaatctaaagtgttaattataatgctggactgtagtgatccatatcttctttaaataccaatgtttatgaatttaaacttttaatttgttttcaggcaactactctaagagtgaggaaattagaagaaaacattgaagcagaaagagcagcgcatttggaatcaaaatttaattctgaaattattcaggtaaaatgtaaacaaatattttggcctgcattttcttaatttgtgttataacagctgggaaaaacagcactgtgttcagagaacgaaggtgtgcattgagaatgggtaacatattgttatgacactcattattgtatataaggttaggatacagttgagatatgctaccttagtggaggagttggcacactatagcctacaggccaggtctcacccactgtctgttcttgtgaagttttgtcttgtccatagctacttttgtggcagagtggagtagttgtgacagagaacttacctggcagtctgcaaagaaatttgcagattggagtgttcttttacggctgtgggatggatttctttttgagaacgttgaaaaaatgtgcatgttatttattgagtgcatatcctatgcatatcactgtattaagagctgaaggtgtaaagatgaatgagctccttttgtaacttacattttgttgtcagagatactatatatctatctccagatatatagatgcttacatagaagtacaaaatactgaaatacaatgggaatataataaagaaaaggattaaatctgggaggggaattaaatggaggcctcctaaggaaattatcctttttgctatgctttagagaatgagaaggaatttctaagagaagtgagagcagggcattttattaggggttggcacactactgcccatgggccaagtctgacctgcagcctttttctgtaaagttttattagaagatagccatgcccatttgtttacatattgtttatgggtgcttgtcgagacagaccttatggtccacaaaaactgaaatatttactctgtggccctttacagaaaatgtttactgaccactgttctgaacaactgcttggataaagccactaaataaaatgtacttgtttatttttgaggaatacttgcagtgttgagtggtagagcttagggaaaagtttggagataatggtgggaaggcatgatgaagactaattatggaagtcctttttcgtgctaagaaacttagacttattttgaaagcaatggaaagccactgcagcttttgggacagacagatatgaaatctaagtttaggaaaataactctggtgccatattggtagataaaggaagggagtgaagataggaggctgggtgaagagatgatgaacacctgaatcaagacaacgactgtagcaatggaaaagagggctcctgtggcagaataacagtccctcaaagatgtccacatctgcccttatcctcagaacctgtgaatatgttaccttacatggcaaatgggactttgcagatgtgatttatttgaggatcttgagatgggagtttgtcccagtttatctagttgagactgatgtaatcataagagtccttataacagggaggcaggagggtcacagtcagaggcagagatgtgatgacagaagcagaggtcagagtaggtcaccatgaacccaggaatgtgggtggcctccagaagttagaaaaggcaagacaagatttcttccctagagtctccagaaggaatggagtcttgctgacacgtgactttagccccagaagacccatttcagaattttgacctccacaactgtaagataatacatttatgttgttttaaattgccaatttgtggtaattggtaatagcagtgattggaaaggtacaggggacaaactgagaatgca

SEQ ID NO: 63062 - DNA, 1026 bp, Homo sapiens
ggctgaggtgggaggatcacctgagcccgggagttcaaggctgaagtgagctatgatctaaggctaagatctggggctaagatttctaagtcacataaaatggtctatatgaagatggataatatttgacattttctcaaactacagaaataataataatagcagtaacactactactaatagtggccaacatgcattgtggctcacttcagacctagcattgcagtttcatttgtctaacaccgtatgaggaaggtattttaaaaaatctctttgacagatgtggaaattgaggctaaacaagagtaaggacatacagctcctaagcggcagaattagaatctttatgactccaactgagtttaacctttttcagtttaaaagcctttcatcttcaaaattctgtgaaatgatttaagaagtttataatgcattaatatgtttccaaaaataagtcaatagtagacattttaaaccatttccccccccagagggtgaaattcatactaccattagtatgtggcatgataatacattggcatattagaattatattttaatcttagtttctatttatggcaagtagataatggttttccatttatagccacaatataaagatcccttttaaaatgctttattggctgggcacggtggcttacacctgtaatcccaacactttgggaggctgacgcgggtagatcacctgagttcaggagttcgagaccagcctggctaacatggtgaaaccctgtctctactaaaaataaaaaaattagccaggtgtggtggcgggcacctgtaatcccacctacctgggaggctgaggcagaagaatcacctgaacccgggaggcagaggttgcagtgagctgagatcgcgccattgcactccagcctgggcaacagagggagactgcatctcaaaaaaaagagaaaagcttcatttattataagaagtgagttaacttaagtgaaagtgtkatttaaatagcggtaatttttgtgagtgtgacaaaaatcacga

SEQ ID NO: 63063 - DNA, 616 bp, Homo sapiens
tagctacaaacttacttctcctctcttccctttcttgcctaaatcctccaccttttaagtcctggccctttcccatcaraattcagagacaaggcatctccttaacctgccctactcttgctccacttactccttcttgggtgggagtttaccagcatggtaggagccagcttttttgtccgccaaaatgctcaacagcaaggtgtgttcccccatttcagtggacacagtttggcctttatttataaaatagtaccaaaaaaaaagctgtgtgtgtattgtgtgtgtaatgacagatgcacttaattatctattttttgagtaacagcagtttttaactaaaatcttgattttatcaaattaatacatgtacacagtctaatgaataaaatggtactgttaggctcatgaaaaacagcagtttcatgccccattgctctctactatcagtttctactcctttgatgcatctactttcaaatcttattgctggttcttctgatatttgatttcatatttctaaataacaggcatagtatgccatttttttcagtttctacctttaaatatctattggcttctacttatatatctctattatatgcttctcccacac

SEQ ID NO: 63064 - DNA, 769 bp, Homo sapiens
atatgtatagttgacccttgaacaacacagtggtaagagtgccaagccttcatgcagtcaaatttgcatataacttttgatttccccaaaacctaactactaatagccaactgttaactggaagccttaccaataacataaacagtcaatcatcatgtawctgtatgatatatgtattataaaccatatccttacaacaaactaggttagagaaaacatcattaggaaaattaattaaaaaaagagaaaatggtttacaatactgtactatattttttgataccataagtttaccttgtctgtttacaagatgcaacttccgtctgaaatggtaggcaaccacagccgcagacctcaatctatgtcacgtatcagacaatttagctttttcttgtaatgtcgtgacttttctctggttcttgggatcacttccagcatcactagtggcacttcctatgggtctcacggtgttattcaaggttcgcggtattgtaccaaacatgatgaaaaatacacaagaactgcgagagattactttttactgtgatacacaatttactggagagacgagctgctaacgtagagatgattagagacacactgcatttaaagtggatactcacaacacgagctcaccgcagtagcaataggaggtggctatgaaattattacggtagtatagcatgtactatagtcaattttatacagttatgatttaatactgcatcattgcatccacttaacttgactgcaaatggcaacatgtaat

SEQ ID NO: 63065 - DNA, 1379 bp, Homo sapiens
tactgctttaaaattttatcttaaaaaagtagagcctatctctcattattagargtatttaaagtttgcaaagttgtgtgctatgggaaagagatttgttttaaatttattaaaagatgagaagtctagcgaattatcggtaaagtgatctcagtgaaaagctaaagtaataagagataataaactgcttagatactgaaacttccaaaaatttttgagaggcgccagttttgccatcctccttttaactcacttgtgccttcaatggcatagagaaatgtttaagaacccagctccagacccaagctgccttagttgaagttatgggtcatacacacaataactacagtatcttgggcaagttacttaatctctttctgcctcagtttacacatttgtgtggaggtaatagtagaatgtcctaatgtcattataaggattcaataagttagaatccaaagcaattagaatattgcctgtcatgtgaaaccagctaatacaatagttgttattatttgtgaagaaggaaaattgagccaaaaaaatgtagttcttatgacagtctaaatctcagtgtcttctttcattcattcagatttgattaagtgttaataagtgaagtatgagcctattagcaaggcactgtggaaggcagtgggcatggaagaatgaataaggaatgggctttggcctcaaatgacaagccatacagactcaacaacctgtaataatatgcacactcaaagtggatgcattttaaattgcttgtaaaagcccccatgaaattctatcagctgacatgaaaatagcattccattaattttgatagaattcatatccctttccttcccgcctcacaacagacattgcaatggagagaacatgcacgtatccctcctatctgcatttttccttatttcacatctgtagaaagagggggcttttaggcagatctctgaataatgactctgaaagtacttatgaaatagtcctaaaataaaataaaaacttctgttaattcagagcaaaaggtagttgtttctgtaaacttccaggaaagcaggttggtaagcagataatctcttctacccaatgccatcaatatggccatttaaacttggaaagattgatgtgtatggtgccttcctacttgggaatgctataatttacttttttacacttgtaagactagcccaacctggtgaaaacaccactatgattatctcaatagtgctgagtcagattaggttttttggtaaggactcttggagtctgtcaaaggagtgactttcccttacttgacagcacacaggtagaatttggtgctttgagtcctagttacagggttttaaaaaattatttatttttattttttagag

SEQ ID NO: 63066 - DNA, 1379 bp, Homo sapiens
tactgctttaaaattttatcttaaaaaagtagagcctatctctcattattagaagtatttaaagtttgcaaagttgtgtgctatgggaaagagatttgttttaaatttattaaaagatgagaagtctagcgaattatcggtaaagtgatctcagtgaaaagctaaagtaataagagataataaactgcttagatactgaaacttccaaaaatttttgagaggcgccagttttgccatcctccttttaactcacttgtgccttcaatggcatagagaaatgtttaagaacccagctccagacccaagctgccttagttgaagttatgggtcatacacacaataactacagtatcttgggcaagttacttaatctctttctgcctcagtttacacatttgtgtrgaggtaatagtagaatgtcctaatgtcattataaggattcaataagttagaatccaaagcaattagaatattgcctgtcatgtgaaaccagctaatacaatagttgttattatttgtgaagaaggaaaattgagccaaaaaaatgtagttcttatgacagtctaaatctcagtgtcttctttcattcattcagatttgattaagtgttaataagtgaagtatgagcctattagcaaggcactgtggaaggcagtgggcatggaagaatgaataaggaatgggctttggcctcaaatgacaagccatacagactcaacaacctgtaataatatgcacactcaaagtggatgcattttaaattgcttgtaaaagcccccatgaaattctatcagctgacatgaaaatagcattccattaattttgatagaattcatatccctttccttcccgcctcacaacagacattgcaatggagagaacatgcacgtatccctcctatctgcatttttccttatttcacatctgtagaaagagggggcttttaggcagatctctgaataatgactctgaaagtacttatgaaatagtcctaaaataaaataaaaacttctgttaattcagagcaaaaggtagttgtttctgtaaacttccaggaaagcaggttggtaagcagataatctcttctacccaatgccatcaatatggccatttaaacttggaaagattgatgtgtatggtgccttcctacttgggaatgctataatttacttttttacacttgtaagactagcccaacctggtgaaaacaccactatgattatctcaatagtgctgagtcagattaggttttttggtaaggactcttggagtctgtcaaaggagtgactttcccttacttgacagcacacaggtagaatttggtgctttgagtcctagttacagggttttaaaaaattatttatttttattttttagag

SEQ ID NO: 63067 - DNA, 1379 bp, Homo sapiens
tactgctttaaaattttatcttaaaaaagtagagcctatctctcattattagaagtatttaaagtttgcaaagttgtgtgctatgggaaagagatttgttttaaatttattaaaagatgagaagtctagcgaattatcggtaaagtgatctcagtgaaaagctaaagtaataagagataataaactgcttagatactgaaacttccaaaaatttttgagaggcgccagttttgccatcctccttttaactcacttgtgccttcaatggcatagagaaatgtttaagaacccagctccagacccaagctgccttagttgaagttatgggtcatacacacaataactacagtatcttgggcaagttacttaatctctttctgcctcagtttacacatttgtgtggaggtaatagtagaatgtcctaatgtcattataaggattcaayaagttagaatccaaagcaattagaatattgcctgtcatgtgaaaccagctaatacaatagttgttattatttgtgaagaaggaaaattgagccaaaaaaatgtagttcttatgacagtctaaatctcagtgtcttctttcattcattcagatttgattaagtgttaataagtgaagtatgagcctattagcaaggcactgtggaaggcagtgggcatggaagaatgaataaggaatgggctttggcctcaaatgacaagccatacagactcaacaacctgtaataatatgcacactcaaagtggatgcattttaaattgcttgtaaaagcccccatgaaattctatcagctgacatgaaaatagcattccattaattttgatagaattcatatccctttccttcccgcctcacaacagacattgcaatggagagaacatgcacgtatccctcctatctgcatttttccttatttcacatctgtagaaagagggggcttttaggcagatctctgaataatgactctgaaagtacttatgaaatagtcctaaaataaaataaaaacttctgttaattcagagcaaaaggtagttgtttctgtaaacttccaggaaagcaggttggtaagcagataatctcttctacccaatgccatcaatatggccatttaaacttggaaagattgatgtgtatggtgccttcctacttgggaatgctataatttacttttttacacttgtaagactagcccaacctggtgaaaacaccactatgattatctcaatagtgctgagtcagattaggttttttggtaaggactcttggagtctgtcaaaggagtgactttcccttacttgacagcacacaggtagaatttggtgctttgagtcctagttacagggttttaaaaaattatttatttttattttttagag

SEQ ID NO: 63068 - DNA, 740 bp, Homo sapiens
catagtcgtggttctttagtgaagtaaatctttcagtttacagctctayaggtgcacacgcacacacacacacacacagtgcccaaataactgggtcagaggcaatctagtgtaagtggcatcttggagtggagtaaatttaaaggatgatttaaatgtatttttgcttctaattctttttcttctatatattttaaaagataactgaaataattatttttaaaaatataaactgcattgatacattatatatatataatgtaatttgtatatcagtaacaacatgaagtagaggagacggtgtagagttatattggagcaaacttctttaaattactgaaattaagttggtattagtccaagctagatttttataagttaagatgttgactgtaatttccagcgtagccattaagaaaatatatactaaactaaaatatatagtaaaagaactaaaaatatgtgtttaaagaaacaatggaaattgaaactgtattctataaaatagagatttaatgttaacaaagaaataatgaaggaatagaggaacaaaaaatatacataagagaaaacaacaaaatgacagatgtaaactgaccatatcataattacattaagtgcaaataaacagtccaatcatgaggcagaaattggcaggatagattttttaacccaactatacgctgtctatgagacatattttttattcaaagacacgagtagtttaaaagaatccaaaa

SEQ ID NO: 63069 - DNA, 740 bp, Homo sapiens
catagtcgtggttctttagtgaagtaaatctttcagtttacagctctataggtgcacacgcacacacacacacacacagtgcccaaataactgggtcagaggcaatctagtgtaagtggcatcttggagtggagtaaatttaaaggatgatttaaatgtatttttgcttctaattctttttcttctatatattttaaaagataactgaaataattatttttaaaaatataaactgcattgatacattatatatatataatgtaatttgtatatcartaacaacatgaagtagaggagacggtgtagagttatattggagcaaacttctttaaattactgaaattaagttggtattagtccaagctagatttttataagttaagatgttgactgtaatttccagcgtagccattaagaaaatatatactaaactaaaatatatagtaaaagaactaaaaatatgtgtttaaagaaacaatggaaattgaaactgtattctataaaatagagatttaatgttaacaaagaaataatgaaggaatagaggaacaaaaaatatacataagagaaaacaacaaaatgacagatgtaaactgaccatatcataattacattaagtgcaaataaacagtccaatcatgaggcagaaattggcaggatagattttttaacccaactatacgctgtctatgagacatattttttattcaaagacacgagtagtttaaaagaatccaaaa

SEQ ID NO: 63070 - DNA, 1003 bp, Homo sapiens
tatttackatatataaagcagaacataggtgctagatgtcatataagagatgccaagcagagatccagttgataaaaagttttcatggaagaactaatatttggaatgggctttgagaaatgggtaaatttttggaaggtaaattttatgtagttatttaacagttatcggtcagtgaccatgtgctaattattttaccaggctttaaggttatccagatcctatctagtacttgttatcgtaatctctaattgattactaataaacatagacaattccaagtattctgaattttattttctttgtaatttatgattaagcaacactgtctctaaaactgtacctgaaagtggactcatttttagaatgaactttagttataaatactgatatattactgtggccaggttttgtgaaagctgttttctagtttttacgtttctaaaacttgtttttgcttttcagaaatggtttcacaaacccatttgaaaatggaatgttaatacataaaaagcaagcaacaggtgaattcctagactctgcttggatttgttagattattttagagttctgttaattataacttgtaagtcctaatcaggctatattaaaaggctaaatagaaggttatagtcttaccctttccccatttccatactctaaaagagtaaaataaacacatctacacttcactcagaataaaaataaacacttcagagtcataaaattgagaaacacatttttaaatgggagactttaatattgtattaaaaaacacaaaagttgtgtttttgtttccttccatgaaaattttttccgtttaaattatgtgagtgctgagatgtttacttttattttagtgtatggaatgaattttttactaaagtcttcaggcatctctcaccacacttacatataggtttttaaaatgacagcctgatagatgcacacagaaaaagaaaatcatttaattttattgtgaattctcccggacaccagcacc

SEQ ID NO: 63071 - DNA, 1565 bp, Homo sapiens
aaaaaaaaaaaaaaaaaaaaaaaaaaggcttgacaatattttgtagtgttggctacttaaatgtgaaaaatcaagtctgtaataagaatatgtgtgaaacattctataaaccatacagtaaaataaaaatatagggtggtattgaggtcagacaagaccattttggtgtcttttcctccaatctttcatatccagtaagtcatcccactaccacagcagaccaactaggattggccgaaatcgtgcctgcttgcgccttctttctagaaatttccatgtccccagcgtgcatgttctgtcgccttctgcccctttctgtcttgctgccgtactctccattggtcttgcctctgctgccttgtttcctttctgtacaagtgcaaggcagagctctttcctttcccctgagcatctgtccctgtgcaaatttatcaggtttctctcgtctagcagagaaagaaaaatgaagtatcagcattatggcctatctgtgcactttttaaaattaactgcaagcttcatttaatatcttcattcttgtttttcctttccttttctcttccactttaattttattcctcctcgctgtactcttggatctcagtaagccaccttaagttctttttgacataagaaagagagataaatacattttttcaacttataaattgaggtagtttcgtgtcccagggtttcgaagttaatactgtctttcttcctgcgtttaacacggacttgatggaacaggtctctggcatggaaaaatcacagagtcaccctggctattaacagtcatggatccattaagagtctattttattttgactactttgtatcttttttcttctggacccaggaataattacagatccaagaattgaacagatactcccaacctgagagctaacgctcacctaactgattccaaaawcccctcatttggtggggagggagggaggggggctaccttgtacttccagaactcctgggaacacattgagattcctccatcacggtatttttatgtctactctttccctattggtgctgaagagttgcctcctgatctctgtcctcaactttgagccaaaggatatttattaaagaaagaaagtcatagcacgtttaaaaaagaagagtccccagaagtaaaatttctctgcactcgttgtaagctccacatggcttgcagtgaagaaaagtggacaaccctgcctcgcctccagtagatgcgccctccacaaaccacccaaggctgcccccgtgttctgtccacactaacctaagccaacctcataagtgacagatgtttattgagtgcctgctaggggccaaatgatttttaaatttatatttttgaatcaggggactctttttaaaaaatgaaatattacactgaatttcaatatacaaatgataaaggtggagcccattgaggtgaagtgagggagatggcagggggaggatagcgggagagaaagcccctccctcagctcctgggagcacagattgaaaaccactgtgctatggggaccgaaggagagttagctacctgtgaggaactc

SEQ ID NO: 63072 - DNA, 646 bp, Homo sapiens
acatggtgaaaccctgtctttactaaaaatacaaaaaaaactggctgagtatggcgcacacctatattcccagctactccggaggctgaagcacgagaattgcttgaagctgggaggtggaggttgcagtgagctaagatcaccccactgcactccagcctgggtgacagagtgaggttccatctctaaataaataaataaataaataaataaatrctacaacaacaacaacaacaaaaagaaaaaataaaataaaaaaataaaaatactagttgcaacacattaaattgattttcttgatgttgaaaactctggtatactagttcaaaaatggaaatcaaacatattttttcctttgagcctgattaagctaaacaggccactttcagactcttcattttcctgattttttgaactcagaagagccttaatgtgtgtcagaagggatgctgtaggagtggatttccttcccttttggaagctgcccagcagtgaaacgcaatgcctcacagtgggtgggggcgggggtggggaccccttcacctagccaccctctgacacacactcagccttccgttgtctctttgtgaaagtgagatagtttggtaagtcagccaggttttgggcgtgctcagggttgaggtat

SEQ ID NO: 63073 - DNA, 661 bp, Homo sapiens
ctcatggatgggttggtgcctgtctggtgggagtgagcgagctctcactcttaattcccaagataatcggttgttgaaaagagsctggcaccttctcctctctgtctgtctgtctctctttctctcgcttcttctctcaccatgtcgtctgtacatgccagcttgcctttgccttccaccatgtgtggaagcagcctgaagcctcactagaagcagatgctggcactatgttttctgtacagcctgcaggaccatgagacaaataaacctcttttctttatgaattacccagcttcaggtatttttttaaatagcaacacaaatggactaagacaagtatttactgaatttctgctactatgtgccagactctgttctctagataagtaaataaatatgattttcattgcttttatgacagaaataatgtggaaatcatgtaggcaattcttcttagccaatgagagaaagaatagactcataagattacagtggaagtactccatcggtggtcccgtttccatcagttttctaggttggagagaggcagaagacatgaattttctggaaatgttatagagacagaggcaatagacagagacaggacaggaagcttaatgagggtcttaaaaaaaccagaacaggccaggtgcggtggctc

SEQ ID NO: 63074 - DNA, 989 bp, Homo sapiens
atggacattttctcacaaacaaaataccattattaacctaatgattccttggtatcagtgaataagccagtccttattcaaatttcctgattacctcgaaattgtctttttaagctggattgtttaaatcatgttctaaacaaggtccacacatatcgtgtagcttttataactcttaaatctatcttaatccagagcagccctcctcatcccacttttcttcctttatgccattgatttattgaaggaagcatgtcagttatcccctagaatactaccaaatatgaattggtttggttcctcccctggggtgttatttaaattttccctttatttcttgtaaattaaaattactcaatgcctgyttgtttcacacttagtaatgctaatgcacactgtaaaattttctatccacctattggtttcatccattgatagtctttgcctgaattgtctatttcattgggtctcacaaagtggtgattttctaattttgtcattctcttcacacttactacctggaactttttttattgttaatttttatggatatatagtatttgtacgtatttatggagtatatgtgagattttgatataagcgtacagtgtgtcatgatcaaatctgggtaattggtgtgtccatcaccccaagcatttatcatttctttttgttaggaacattccaattattttagttatattgaaatatacactaaattattgtttttatcttgtttttttgaggctgggtttcactttgtcacccaggctagagtgcagtagtgcgatcatagttcactgtagcctcgaactcctgggcttaagtgatcctcccgcctcagccacccaaatagctaggactacaggcacatgttaccatgctcaaccaatttttaaaatttttttctagagacagtatctcgctatgttgcccaggctggtctcaaactcctgggctcaaaggaccttcccaccacacagcgtccc

SEQ ID NO: 63075 - DNA, 989 bp, Homo sapiens
atggacattttctcacaaacaaaataccattattaacctaatgattccttggtatcagtgaataagccagtccttattcaaatttcctgattacctcgaaattgtctttttaagctggattgtttaaatcatgttctaaacaaggtccacacatatcgtgtagcttttataactcttaaatctatcttaatccagagcagccctcctcatcccacttttcttcctttatgccattgatttattgaaggaagcatgtcagttatcccctagaatactaccaaatatgaattggtttggttcctcccctggggtgttatttaaattttccctttatttcttgtaaattaaaattactcaatgcctgcttgtttcacacttagtaatgctaatgcacactgtaaaattttctatccacctattggtttcatccattgatagtctttgcctgaattgtctatttcattgggtctcacaaagtggtgattttctaattttgtcattctcttcacacttactacctggaactttttttattgttaatttttatggatatatagtatttgtacgtatttatggagtatatgtgagattttgatataagcgtacagtgtgtcatgatcaaatctgggtaattggtgtgtccatcaccccaagcatttatcatttctttttgttaggaacattccaattattttagttatattgaaatatacactaaattattgtttttatcttgtttttttgaggctgggtttcactttgtcacccaggctagagtgcagtagtgcgatcatagttcactgtagcctcgaactcctgggctkaagtgatcctcccgcctcagccacccaaatagctaggactacaggcacatgttaccatgctcaaccaatttttaaaatttttttctagagacagtatctcgctatgttgcccaggctggtctcaaactcctgggctcaaaggaccttcccaccacacagcgtccc

SEQ ID NO: 63076 - DNA, 1310 bp, Homo sapiens
ttgcagcactattcacaatagcaaagacttggaaccaacccaaatgtccatcaataatagactggattaagaaaatgtggcacatatacaccatggaatactatgcagccatacaaaaggatgagttcatgtcttttgtagggacatggatgaagctggaaaccatcattctcagcaaactgtcgcagggacaaaaaaccaaacacctcatgttctcactcataggtgggaattgaacaatgagaacacttggacacaggaaggggtacgtcacacactggggcctgtcatggggtgggggaagtggggagggatagtattaggagatatacctaatgtaaatgacaagttaatgggtgcagcacaccaatatggcacgtgtatacrtatgtaacaaacctgcacgttgtgcacaggtaccctagaacttaaagtataattaaaaaaaaaaagaaaatacatatgtttctaagaaaaatgtaacaaaataagtaaaataaaacaaaagtataaataaataaataactcaacaacttgggaatttaaaaacactctcctaaccaacacttgtgccaaaaaagcaatcaaaaccagacattatcaagtctggaatttattctggttaaatagtaaaaacagaaatttagcttcatttttcttcatttgacgatccaattgattcaataccatttcctcaagaatccaaaatttccaaaccgatttaaaaggttgtttttatgtcatactacatagagtggggaaaatcttactccaaaccaaaaaaacagaagcaacttaattgatgcctttggctggatcttcagcaacagcttccttgcccttaatgtcagcaatttcttcccttcaaattcactttattaaaattgaacaaaagaagacaaacaaaaaatctttaaacatgaagtacagaagaacggcttctgttttccttactgaaatcaagtatggtaccacagaagcctccagagaggctggtgtttcaggaatgatctgccatgtcaaatgctgcaaagagcatgagtaagatgagataagatgaacttggcagcagggaagtcactggtgacccgaataacagcagtttcatttgagtgatggggatttagagtacagtgggttaacgagcgtcccggagaagcagaaatgacgagggcagacaactctcccatgaatgttccttattcaggtgaacagagaaacgactcaacagctaaaggggaatatggggtcaaggaagaacattttagggatgatacaagtgggaataatccagagaggggaaattccta

SEQ ID NO: 63077 - DNA, 1310 bp, Homo sapiens
ttgcagcactattcacaatagcaaagacttggaaccaacccaaatgtccatcaataatagactggattaagaaaatgtggcacatatacaccatggaatactatgcagccatacaaaaggatgagttcatgtcttttgtagggacatggatgaagctggaaaccatcattctcagcaaactgtcgcagggacaaaaaaccaaacacctcatgttctcactcataggtgggaattgaacaatgagaacacttggacacaggaaggggtacgtcacacactggggcctgtcatggggtgggggaagtggggagggatagtattaggagatatacctaatgtaaatgacaagttaatgggtgcagcacaccaatatggcacgtgtatacatatgtaacaaacctgcacgttgtgcacaggtaccctagaacttaaagtataattaaaaaaaaaaagaaaatacatatgtttctaagaaaaatgtaacaaaataagtaaaataaaacaaaagtataaataaataaataactcaacaacttgggaatttaaaaacactctcctaaccaacacttgtgccaaaaaagcaatcaaaaccagacattatcaagtctggaatttattctggttaaatagtaaaaacagaaatttagcttcatttttcttcatttgacgatccaattgattcaataccatttcctcaagaatccaaaatttccaaaccgatttaaaaggttgtttttatgtcatactacatagagtggggaaaatcttactccaaaccaaaaaaacagaagcaacttaattgatgcctttggctggatcttcagcaacagcttccttgcccttaatgtcagcaatttcttcccttcaaattcactttattaaaattgaacaaaagaagacaaacaaaaaatctttaaacatgaagtacagaagaacggcttctgttttccttactgaaatcaagtatggtaccacagaagcctccagagaggctggtgtttcaggaatgatctgccatgtcaaatgctgcaaagagcatgagtaagatgagataagatgaacttggcagcagggaagtcactggtgacccgaataacagcagtttcatttgagtgatggggatttagagtacagtgggttaacgagcgtcccggagaagcagaaatgaygagggcagacaactctcccatgaatgttccttattcaggtgaacagagaaacgactcaacagctaaaggggaatatggggtcaaggaagaacattttagggatgatacaagtgggaataatccagagaggggaaattccta

SEQ ID NO: 63078 - DNA, 538 bp, Homo sapiens
acataggtatacatgtgccatggtggtttgctgcacctgtcaacccgtcatctaggttttaagccctgcatgcattaggtatttgtcctaatgctctccttccccttaccccccaccccccgacaggccccagtgtgtgatgttcccctccctgtgtccatgtgttctttgttcaactcccacttatgagtgagaacatgcagtgtttgttttttttgtcgktgttaccaacatatagaaatgcagtcattttgaatattgagctttgatcctgcaaccatgttaaactcatttattagttctagtagcttttttgtgtagatttcataggatttcctacacagatgatgtcatctgcaaataaagacagttttctgcaggggtgtgttcaaggaggctgcattctaataaattcctcttcaggctgctggagaaaaataaaggggcaatccatatgaggagggtaaagtccggccagttatccttggggcagcagatccatagatctagttgtttcactaaggctagtgttaaaatg

SEQ ID NO: 63079 - DNA, 1227 bp, Homo sapiens
  misc_feature (1)...(1227): n = A,T,C or G
agctgttgccatgtccagtgttggtcctaagtcagtagagccagcagttggaaaggagagatgagtgtgaagagggggagagtaagactagattagaacccatgaagacaaactgggaccctggaggacaaactggaactcacatttgtctcactctctttcagtgatgcaagtgacctgcaggattcactggtgccccacagagctgcacaagctggcccaggatttggagaagcagaagattcgacaagaccaataagggctgtggactcagctrctgtttcacgctcacaaggtggccaggagaccagcaattgtgtgcttgagcccacatcaaccttcagagcatagaaatggctgctatttcacttccacttccaaatctcatgaactcctcttatggccaaccctagcctagaacagtacaagaaagggaattctgaaaattccttagtatttctggttaaagtgatgtacataggcaccaaactcacgtaaggatagcctctnnnnnnnnnnnnnnnnnnnnnnnnnnnnnnnnnnnnnnnnnnnnnnnnnnnnnnnnnnnnnnnnnnnnnnnnnnnnnnnnnnnnnnnnnnnnnnnnnnnngctaactatggtctctgtctccaaacaggcagcttttaaatgatcctaaataccaaaacatgcccaggctctatttcttcagtgctgaagctgaaatttacaacataaccaacctcaaaacatttggtttccagcagtgcctggatatgtccaagcctgattttgcacaagtctagggtaaaagaacagaggaatccaggagaagcaataaattgggtggactagggagggggtaagagaggtaattggtgaggatagaagaggcatgaagtctaacaaaattcaaatggtagcctaaaaaaaagtctcctaaagggttagaaagagacactatagtattaaaagttatttttcagaaaaagaataaaattatgattcacatacaaatataaaaatgtacacgttgaagaatttatttactcctgataccaagaaaccaggcaatagttcaaaggaaaagtcaaaaacacacaaattcttactgagtgaaggaatgtagagatgaattgcaaatggagattaaattgctttttttcccaaaaggggaggaagtcaattaaatcactatcagacaagacataatttacatatctatcggttacttccaatttacagagc

SEQ ID NO: 63080 - DNA, 1336 bp, Homo sapiens
gaaatgaggaaacctcagcttatttcagactcacccttctccattttactttacccacatcaagcaccattgattccaatcctgatatttcagacccccacagtggctgcagcctgagctcctgccttcttcactacctgggctgaataaacagtgagctctgccttaggtctctctctgtccttcccatctcttccctctatcttcttcatgctgccagagtggttttcttaaatgcaaattctatcatgtctctgtcttgcttaaaaatcattgatggcacctcgctgcctggaccagtaatgggaaaaattggccctagattaaaagttgctttgacccaggtaaaaagcttgaaggcaagtcttgaaaaatcaagttgtttccaagtagcttaattgagtcccagaataaaactcaaaagcatttaaagaagaaacctagcattcagcactaatctggcatccaataaaaaattatcaggcgtcaaagaactaggaaaacaatataaagaggagaaaaatcaatcaatagaaatagatacagaaatgacacaggtgaatagacaagaacagtattttaaatgaggtaaatatactccatatatttatggagaagacagaggaatgcatgagcatattaaagagatggtggtagatatttaaaggagaagacctaaatcaaacttgtagagattaaaacaaacaaacaagaacctctaatgtctgagatggaaaaacacactagatgggaataagaatgaattggacactgcagactgaagaaaaacagtaaacagcatcagtgagctgcagaacaacttcaagcaagataatataacatatagcttatatacaataacatataataattctttttgcagtccccacaaaaagaatagagagatagaaggaagaaataataaggccgggcgcagtggatcatgcctgtaatcccagcactttaggaggctgaggtgggcggatcacgaggtcaggagatcgagaccatcctggctaacacagtaaaaccccgtctctactaaaaatacaaaaaattagccgggcrtgatggtgggtgcctgtggtcccagctacctgggaggctgaggcaggggaatgttgtgaacccgagacgcagagcttgcagtgagctgagatagtgccactgtactccagcctgggagacagagcgagactctttctcaaaaaaaaaaaaaaaagaaataatagctgaatgcttttttctaatttgataaaaatatttaggaagctcgatgggccctaagcacaagaaacatgaagaaaacaacaccagtgtacataatcaaattgct

SEQ ID NO: 63081 - DNA, 715 bp, Homo sapiens
gcacttttgctacagcaggtagaaagacaaacactcttatttcatactgatgatttggcttgtttctatgtaggagtgttttcatggttgagttagttggctagtttctgttaaacaatagtaataagcactaacatttattgagtgttttctttatgccaggaactgttctaaacacttcacatgtatttaatcatcatccatataaactctattaaagaaatcctataaaacaggtactattatccccactttayagaggacagagaagcagagggataagtaatctgttcaagattacaaagtaagtggcagagacatgatttaaacccaggaggactgattctagaattcacactcttaacctttattattccgctttctcaaatgtcaatgagaaatctgaccagccaaaactgtcatatttggcatacagaaccaacatttataccttaaataaccccatgtaactgttcagaggatcacagaattttttcccccctagggacaagttagaactcagtattcttttcagttaaagttatatttcatattaagtggaaaagaatacttgtgcgtcaacctatacttgtacaaatccttcagatgactgcaagatctcttttctgtggaaggtattagacctaggcccatacctatgaagttgttgaaccttgtctgggagacaaataaaaatttatataactgaatgaca

SEQ ID NO: 63082 - DNA, 1416 bp, Homo sapiens
attttttgatgagcctgatatttgcaccagtcatggytcaggcaattgaacatgtagtgtttactgtattattaaggcattaaccatttatcataggtttatttatttatttcctgtaacaaaagtagcaaaatagcctttatggtaaaatagcttgtacatcttgatttcaattttgaagttgactgattttttaaattgggaaatttattgaagactaatcctccatttcaacacactggggcatgtccagaagagagtgagcagaattagtcatcttcagcaacggctttaataaatagatatttcactttaagaaatggtacagaaacttacagatggaagaatatgcagcatccacatattcttatgatttgcagtctcttttctatggagctttaacttccatagatgttatgtgtctaagaaagctaatggggaagccaagaggtggagttctaaattttccacctacttttcatatataaaacattctatgaataaatgcttttaaagttttcttttcataaattagaaaacttaaggccagagaggaaatgatttatctgaaatcatacagctagcagagaaatgaagggtaatatggaaagcaaatacctatgttcaaatattgaaaaagttaacgtgaaagtaatagaagttattcaatgaaatatcctaagacagcaatactatgtggatggaagatgaatgttatagaaaaatagactactattccacaaaaataatcttgcaacttaagctgcctgaagatcagatgggttgccacaagaagcagcgatttctccagctacagggatattgagaacaaatccagaaaggcagtgttgctggtgatgcagaggagatgaaagcacttgatcaaaggaaaaattgaatgtctcttaagaacgttccagctctaagaggctgtcatttttgctttcctggctgtggaagatgttgctaaaagcaaattagaatgtgtccttgtgctccttgtccagacagctctttcaggttttcctctggtgaatacattttaccctcccacaatgtcctaggaaaaggatgtacatataaatattagtatatttatattttccctgcctaaatcttgtgtttctcatagcaactaaatttaactcaaatgccatttccaaattaaagttagtggatgccttgaaggttgtattattaacaattctcatatgtcatttgtgttcaaaaagaagagtaaaatcccttaatccagttattaagtgtcactgatgtaaatcaataaagaaattaataggtaatttggtgtatggaaaaagcaacatggtcaaatgacttaatcgcttaagaatatctaaaattgccttagaaatgtatttgttttaactctgtgatttttgaagtttaaaattctct

SEQ ID NO: 63083 - DNA, 1416 bp, Homo sapiens
attttttgatgagcctgatatttgcaccagtcatggctcaggcaattgaacatgtagtgtttactgtattattaaggcattaaccatttatcataggtttatttatttatttcctgtaacaaaagtagcaaaatagcctttatggtaaaatagcttgtacatcttgatttcaattttgaagttgactgattttttaaattgggaaatttattgaagactaatccyccatttcaacacactggggcatgtccagaagagagtgagcagaattagtcatcttcagcaacggctttaataaatagatatttcactttaagaaatggtacagaaacttacagatggaagaatatgcagcatccacatattcttatgatttgcagtctcttttctatggagctttaacttccatagatgttatgtgtctaagaaagctaatggggaagccaagaggtggagttctaaattttccacctacttttcatatataaaacattctatgaataaatgcttttaaagttttcttttcataaattagaaaacttaaggccagagaggaaatgatttatctgaaatcatacagctagcagagaaatgaagggtaatatggaaagcaaatacctatgttcaaatattgaaaaagttaacgtgaaagtaatagaagttattcaatgaaatatcctaagacagcaatactatgtggatggaagatgaatgttatagaaaaatagactactattccacaaaaataatcttgcaacttaagctgcctgaagatcagatgggttgccacaagaagcagcgatttctccagctacagggatattgagaacaaatccagaaaggcagtgttgctggtgatgcagaggagatgaaagcacttgatcaaaggaaaaattgaatgtctcttaagaacgttccagctctaagaggctgtcatttttgctttcctggctgtggaagatgttgctaaaagcaaattagaatgtgtccttgtgctccttgtccagacagctctttcaggttttcctctggtgaatacattttaccctcccacaatgtcctaggaaaaggatgtacatataaatattagtatatttatattttccctgcctaaatcttgtgtttctcatagcaactaaatttaactcaaatgccatttccaaattaaagttagtggatgccttgaaggttgtattattaacaattctcatatgtcatttgtgttcaaaaagaagagtaaaatcccttaatccagttattaagtgtcactgatgtaaatcaataaagaaattaataggtaatttggtgtatggaaaaagcaacatggtcaaatgacttaatcgcttaagaatatctaaaattgccttagaaatgtatttgttttaactctgtgatttttgaagtttaaaattctct

SEQ ID NO: 63084 - DNA, 1416 bp, Homo sapiens
attttttgatgagcctgatatttgcaccagtcatggctcaggcaattgaacatgtagtgtttactgtattattaaggcattaaccatttatcataggtttatttatttatttcctgtaacaaaagtagcaaaatagcctttatggtaaaatagcttgtacatcttgatttcaattttgaagttgactgattttttaaattgggaaatttattgaagactaatcctccatttcaacacactggggcatgtccagaagagagtgagcagaattagtcatcttcagcaacggctttaataaatagatatttcactttaagaaatggtacagaaacttacagatggaagaatatgcagcatccacatattcttatgatttgcagtctcttttctatggagctttaacttccatagatgttatgtgtctaagaaagctaatggggaagccaagaggtggagttctaaattttccacctacttttcatatataaaacattctatgaataaatgcttttaaasttttcttttcataaattagaaaacttaaggccagagaggaaatgatttatctgaaatcatacagctagcagagaaatgaagggtaatatggaaagcaaatacctatgttcaaatattgaaaaagttaacgtgaaagtaatagaagttattcaatgaaatatcctaagacagcaatactatgtggatggaagatgaatgttatagaaaaatagactactattccacaaaaataatcttgcaacttaagctgcctgaagatcagatgggttgccacaagaagcagcgatttctccagctacagggatattgagaacaaatccagaaaggcagtgttgctggtgatgcagaggagatgaaagcacttgatcaaaggaaaaattgaatgtctcttaagaacgttccagctctaagaggctgtcatttttgctttcctggctgtggaagatgttgctaaaagcaaattagaatgtgtccttgtgctccttgtccagacagctctttcaggttttcctctggtgaatacattttaccctcccacaatgtcctaggaaaaggatgtacatataaatattagtatatttatattttccctgcctaaatcttgtgtttctcatagcaactaaatttaactcaaatgccatttccaaattaaagttagtggatgccttgaaggttgtattattaacaattctcatatgtcatttgtgttcaaaaagaagagtaaaatcccttaatccagttattaagtgtcactgatgtaaatcaataaagaaattaataggtaatttggtgtatggaaaaagcaacatggtcaaatgacttaatcgcttaagaatatctaaaattgccttagaaatgtatttgttttaactctgtgatttttgaagtttaaaattctct

SEQ ID NO: 63085 - DNA, 515 bp, Homo sapiens
tagaagttggagatttaaagttcatttggacatatagcctgcattcaaataattgaaaatcttcatctttattttagcacaatgtcatatatgttatttgttacatatgtatgtaacaaattgaatcaatgaatgaagtaaaggaacctatactcctatactttacctaaaaggggtttaattcctctattacatttttctaatttaaaaaatggacacctggcatggtggctcatgcctgtaatcccagcactttgggatgcagaggcaggtggatcacgaggtcaggagttcgagagcarcctggccaacatggtgaaaacccatctctactaaagatacaaaaaaattagccaggcatgatggcatgtgcctgtaaccccagctattcaggaggctgaggcaggagaatcacttgaacccaggaggtgaaggttgcagtgaaccgagatcatgccattgcactccagcctgggcaacagggcgagactccatctcaaaaaaaaaaaaaaaaa

SEQ ID NO: 63086 - DNA, 665 bp, Homo sapiens
cacacaaaaacctctagaaattaagaggcacttgagaatatatctgtttgaattgtgatgcctaataaaattaaatgacaacagagaggggacataatttaatcaaatctctcgtttaataattacattctagaatttttttgaggtctaacataactgttatttctactttgtcacatagtaaatgaaaaattggggtttgaggtaatatgagctattcgactaatccagataaggaatttgcatataacagtatgttttacctgattgcatttgttttcccagtgtgtttcatggaacagtggtttcgtggaatgttaggtgtgcagcccaagagggatcttatggatggcagcatagcctcctggttaactgtgggagtttgtctaggtttgaatcgtggctgtatcatttcckagttgtgagaccttgggcaagttcctgcaccttctgtgtttttgtttcatcatctgtaaaatgtcaatgacaataatagtatttacatcatagggatgtttgagaattagaattttgatttttaaagtgtttagaacagtgataggtacatagtaaacacaagcgtttgataagcaagtaaataatgaaatctggcaatttctgatgtttttaaattgcaaccctttctgagcctttgttgtattaac

SEQ ID NO: 63087 - DNA, 1599 bp, Homo sapiens
tgaaaagaaagaggatagaaagaaagaaagagagagaaaggaagaaagaaaagagaaagagagaagaaagaacaaagaaagagaaaaagaaagaagaaagaaagaaagaagaaagaaagagaaaagaaaagaagaaaggaagaaagaaaggaagggaaagaaagaaaaagaaagacactacctgagaaagcaaaattccattttgtcctctataatctgtatccagagactatgtgggacataggcccttgtactgagtaggtgtgtgaatgcagatcagcctctggctggaggctctgacacttcccttaaggaggttacagcttttagaaacaacagggtgattgaactgtgatttcacccctgactagaaaacaacaattccccctgtggcttaagggtaaccagggttttgttttaaattaaaagtaaattacttatgttaaagatgccctagggacccttaggtattctatcatttaaagcaaaccaagcagaactcagaaaattattagcattcctctagagagcactttgggctatctcctattgtccattcaatggccagtttattaggaacttttgtgaggattgtttatcaaactcaaacttttccatgtaattatcaggcagagagagagtctaaataaacagaaaacatacgaataactaacttatcttgccaacagatattgatgaaaaagctcagcttcaaactccactatggcaactaataccacaaataggctttatttttttcccatcacaaaacaagtttatttaataaagaaagtaatatacatgtatggatacaaaaacccattcactcactcatttactcattcaatcaacttctagcaaaggtcccagctggatcccaaactgaaactccaacataacaggcatgcctagtaaacagacacgttaggtcacttaaagttgagcaaaagctcttcatgggcacatgaagttagggtcaggagaaggcagacagcaaactacttttctcgactcttgattccactgcacatttgatggggtcttatgtatagagggactgtatccagatggtcaagttgctgtctggggagggacaggacacaaacaatactacttctgtgctcaggtgtccaagggagtcaggggggagagggagagggtactttccccatttctacacacacacacacagcatcagtatatagtggcctccacagagtatcatgccattttttgatacccagggcatgtgtatttgtgtgtgcaagcatagccaccttgtggcacaattctagggagtgccattctgttggagtgtaaggaaatggtagccctggggttgtacagggcataatctctattgtcctacacagctctcctggcagccctgttcaaatcagaagactgcatcctgagcagagatattagtattgccatgttggtctcttcatgcagtctctaatcagtaaaaatcaaaagggggctggagtaatcaccatggkggacctactttttagcacaaagaagccattcctttcaaattcccagaaatagctgggtgagacattaagagggctggaaggtcctgcaggtggaaaa

SEQ ID NO: 63088 - DNA, 822 bp, Homo sapiens
cttgtgtatctgtttagaggtaatccttttttttttttttttggtaaagaagaaggttctgtgatttggggatagtgaaattcatttttaattatttgatataaataatgcattttgataagtgttagtgactctgacactttttaaaactcaatgtttgtttgacacctggaaaagtgatctctcaattttaaatattatgatggaaaagcaattacattttaagtaatgttttgattatacctcccctgagctttatggaagtaaatctgagctcttgttgctgyttaacacctatcatgaagcatagatttaatgaagaactgaatatgataatatcatacccaaatattggaggtggaaatagcaactatgattcttgcttcaactatgctaacaacataaacagttttgctttttatgattaaactgaatggtcagtttaatacaaaaaaatgacgactgtggtgagatcaatcaaaatagtcaaactttttaacagtatcgttcacatttacattagtcaaggttcccaaaactttaattataaaacctttttttatcagttcatgacaaaatttttcaaacttaaaagaacacaaaatgagcgataattgaaaacatcaagaaataccaagaaattgaggctgaatatacaagagagggttatgttaaaatagatgttaagtagagcttggtttaggcagcataaaaatcataatttaaatattttttctaatagaaaaacatgtgaataggctcttgtgttcttatgtaaactggcataaatatgcttgtatattttataaaacgtaagtgcca

SEQ ID NO: 63089 - DNA, 660 bp, Homo sapiens
tgccaaatgacctgtgagttttctctcactcctgagtctgcaagctcagaaagccaggggctcttagaggttgctaagtccagaagacttttatgcagaataccgagggaggaggttagaattaagtattaagtgggcaaaacaggaggggtcatttcagagtcctgcttgggtcctggtgcagcctgttgtagctgatagggatggaggcggggaggtatctcctttgttgaagaaataaacctgtgactgtgaatccagtctgctccctcctaaagactgggctgcagtgtttgaagtcggaactggtgtgtttcgggaagctggctgcatcaggttcccattagcccaggcagctgcaccagtgggttcacaccatgacatggtaacaattaagccttctgctactggtccttaccctggggtgaggctcttttcttttttaccaatgtgacttaaagttgccctggtttccttgtggctcgatttcctgcagattcccgttactttatgtctaatcytctgagaccactcattagaccacacaaattgtaacaattgtctccagcacacagatcctgttccagaccctcagtgtacctaggaaaaagactatctctctgaaacgtgagagttacttcctgtgtaaatagacgaatt

SEQ ID NO: 63090 - DNA, 588 bp, Homo sapiens
gtatccagctaacagagtactcatcagcagcctggcaatgactgctgctgtttagttacctcatgtgtaattacctgctggcctgactatttcacctagcagactgtgagcttctggagaggggggagcgtgtcttattcatctccaattcctagtatttagcacaatattggcctggcacacagaacacctgcctatgggtgttctgattttgatttgttgactgagaaagatgatagcagtgaaaggaacatcaggttgagggagaaattgtagggtttttgtttgttttgatataggagatattgaagcaggttcacaaaaagagaaaagttgaaagattggggaccataaaacacatggaatggttggtaggatcaggcactagaagtcacaagaaggatatgaggacaaaagcaccataggatggcccctatcacactacctatgagaakggtgtgatgggggaaggcgtatgtggaggtagataagggtaggaagtaggttacaaaaatagagctcacttctcatgtgagaggcatctctttgtccctggagaatagtttagcacctgacatagataagcca

SEQ ID NO: 63091 - DNA, 1041 bp, Homo sapiens
tatatggtcaaagttagtgtcagtcccagagattctgggattggaaggaatgaccctattgcagaggaaggagacatggataaggagagtagacaagatcgaaagaggtttaattaaaaactagatgtgatctattccatacccctaccataatctgacttctggaagatcctactgtgatggagagggagaacaattcccttctcaaatctacaacctcaatgcaagcacatctactatcctcctaggaactggggatgcccagtgctccagagctttatggaatactaaggacctgctcatggaagggctgggaagcatgaagtagaggagtaaaactaatactagaagaatgggcatagtggttccacgactccttccacatctccatagggtagggcaaacctgatcttacagggtctctctacctctcctgaaactgagtgaaggaggcctgggctactatgctaccattagtcacaaaaggatctcatactgacccaggaattgggatttgacaattgagtttgctttagtaggtttccagaagaggatttagtgctgtacaacaccgcgaggacccaagatttctgatctgtaatctatcatgtaaagtaataagctactcatatgtgttcttgctcatggatcattttaagcggaaaacaatagaacaggcccacatggagccagctgttatctaagaaccctattctatagatgttggtggtagctgcactagccaaaaatgtgagaaaatcagagtcagtctccagacagaaccctcctatcctatttttcttgtcagtctaacagcaactaagaaatccaacaagcctcccctctccctaccccacccaactcctcacagagagctgacaccctgctctggggagcaggctctggtatatagcccccagatcacaggtgtcagatcccctcctctaatggtcaacgtcacaggaaaagaccagccagctggttcccaagatgtgcttagatagcttctatargtatgaactggagcttgggagactaacc

SEQ ID NO: 63092 - DNA, 647 bp, Homo sapiens
ttttaatttttctctttactaattttgtgttttggttttggttcatttgtaggcaataatcattagcagcagcaatgattgagaattgggtttcatagtctgaccatttggtgatctctataaatagatgaatgacttatagagacatattctcttttgtgtgagagaaaatggagaatctggattattagttctttttgtttgtctatttgtctactttaagcccaaatgaattaagaatcctgggctcactgggaaggagaacaaatctttcatactgagactggtgagttttggggtttctktattacccttaacccatgatggaatttttaattgaagtataagatttctttgtctctgtttgtctatgtgtccataatttagaaagatctttacctttcacagtgtaagtatgtaaaattttcctacctctagataatactaataaattagattatcaatctctttttaaagaggctcttttctgattggctgatagagataaataagcacttatataaaaagaatattcttaaaattcccagaaaataatggatttgaacttctaatactttaaatatgctacattttaaaaatatccttatctccttctttaatatgcttcattacagacacaaagacct

SEQ ID NO: 63093 - DNA, 1956 bp, Homo sapiens
tatctatttctgattcaaagactaatctgtgtcacgggaaaaggggagtcttggatcttcagcatgtaagctacttagattgcccatcgattctctttactctagaactctacagggagccccctgaaacactgcaaatgtttgaaagctgagtgtaaaaaaagtcaaagtacaaatgtactttgggaatattcttcacagaagattaaaacattaaaaattataaaatccaattaatgtcattatatagatcctgccttattcaggtctacaaaaaccagcaagcttaagaaccttcatagacactcagatactcaagagacagactgctggaaaagtctccctcctgagtacttacagcttaatttcattcatcactatctaaatatcttccttcctatgggctcccccttctggatccctcttctgcagggatccatggcaatctccaatctacatcttcaaatttgtctgtccyctgcaaattccattcttatccactttcattgggttcaacagctcattattccattctcatccttttccactgtgttcactagagccactccctctttctaaaactaaaatcactcaatgacagaatgatgtaaaagaagactgggttttgaactagaattattagatatgtcatgcatattatgttacctgtaacattccattataaaaaaaacccatttccttgtttgttgatttacatgaaaaactactaaaatgcttcttacatgcaagaccttattctgtgtattccaggatacatacaaataggttttctagtttcaagtggctcgtagtaatgcaggagctttacaattattttttcaataactaagcacaaaagcctctgaaatttgaaatttagaatgagatacaaagaccctgagtggattccttttaattaaaatgcaaaaaccttgtgaaattaaagtctgaccataggaatatgaagagtatctgtttatcaaacaggttattttaaacaaaatgcatatttttcaattaaataaagagtttaaagtatactctaaataaaaaaggcttggaaaacactgtgtaaaccttctctaatacagatttgagaacagaatttaaatttctaaacttccacgactttttgaaattagagataagctcttgttatattgccaagcttggtcttaaactcctgggctcaagaaattctcctggcttcatctcttgaataggtgggactacatggacatgataccatgtctagttaaatttccacaatttctaatattattttagtctaattatagagccacgaataaaaataaggaaatagctctctgcaaaaatagtgtatgatatcaaaatatgtgtacaagaaataaaaaaaaccacatgctatgtgtaacagagtgattccatgatttctatgataagtcatctgatgtattaaagattcatttaaacagaggtattattagtcacactcatatgatatacaactcaaagtaaaaacactcaaataagcctagaccaaaatttgtatctcctctattgtgggaaagcgttcccgaacaccatttttctgtcactgtgtattttccagcaattttttttttcagatcacacctctcaaagaatttatcaactatttattatttgccaaagtaaaaaaaaattaaaattaacccctcccatttctttaaaatggttatctctaataaaagttgtaatactaacataaaacaatgataggtagacaactgctaagttttagaagaaaataatataaaaaatgagattcagagtgagaaaattaatttcacaagagagtactctacctcagattccaaagcaaactcatcctctgtcacaggctgtgcaacagcatccggtctgtagcgactcctacagagcaaaaagatacaacaaaaatgagcacgttcatttcttaaaagaaaacaaaaa

SEQ ID NO: 63094 - DNA, 645 bp, Homo sapiens
ctgaactggagtaaacctgataacctaaaacaaggtagaaaaggcactgtctcttctgcattatctatttctgattcaaagactaatctgtgtcacgggaaaatgggagtcttggatcttcagcatgcaagctacttaaagagggcccattgattctcttcaccctagaacactacagggagccccttgaaacaccgcaaatgtttgaaagctgagtgtgcaaaagtcaaagtacaaatgyatatgttgttaggttgttattgggaatattcttcacagaagattaaaacattaaaaattttaaaatccaattattgtcattatatagatcctgccttattcaaatccacaaaaaccagtaagcttaagaaccttcatagacactcagatacccaagagagagactgctggaaaagtctccctcctaagtacttgtagtttcatttcattcatcactatctaaatattttccttcctatgggctcccacttctggatccctcttctgcagggatctgtggcaatctccaatctacatcttcagcctaggaaagcccagattcctcaaaagacgggctaacttaattgagagtaggatctctctattcctctgcttctggaaagtaagttagtctcagtcatccac

SEQ ID NO: 63095 - DNA, 645 bp, Homo sapiens
ctgaactggagtaaacctgataacctaaaacaaggtagaaaaggcactgtctcttctgcattatctatttctgattcaaagactaatctgtgtcacgggaaaatgggagtcttggatcttcagcatgcaagctacttaaagagggcccattgattctcttcaccctagaacactacagggagccccttgaaacaccgcaaatgtttgaaagctgagtgtgcaaaagtcaaagtacaaatgcatakgttgttaggttgttattgggaatattcttcacagaagattaaaacattaaaaattttaaaatccaattattgtcattatatagatcctgccttattcaaatccacaaaaaccagtaagcttaagaaccttcatagacactcagatacccaagagagagactgctggaaaagtctccctcctaagtacttgtagtttcatttcattcatcactatctaaatattttccttcctatgggctcccacttctggatccctcttctgcagggatctgtggcaatctccaatctacatcttcagcctaggaaagcccagattcctcaaaagacgggctaacttaattgagagtaggatctctctattcctctgcttctggaaagtaagttagtctcagtcatccac

SEQ ID NO: 63096 - DNA, 645 bp, Homo sapiens
ctgaactggagtaaacctgataacctaaaacaaggtagaaaaggcactgtctcttctgcattatctatttctgattcaaagactaatctgtgtcacgggaaaatgggagtcttggatcttcagcatgcaagctacttaaagagggcccattgattctcttcaccctagaacactacagggagccccttgaaacaccgcaaatgtttgaaagctgagtgtgcaaaagtcaaagtacaaatgcatatgttgttaggttgttattgggaatattcttcacagaagattaaaacattaaaaattttaaaatccaattattgtcattatatagatcctgccttattcaaatccacaaaaaccagtaagcttaagaaccttcatagacactcagatacccaagagagagactgctggaaaagtctccctcctaagtacttgtagtttcatttcattcatcactatctaaatatyttccttcctatgggctcccacttctggatccctcttctgcagggatctgtggcaatctccaatctacatcttcagcctaggaaagcccagattcctcaaaagacgggctaacttaattgagagtaggatctctctattcctctgcttctggaaagtaagttagtctcagtcatccac

SEQ ID NO: 63097 - DNA, 645 bp, Homo sapiens
ctgaactggagtaaacctgataacctaaaacaaggtagaaaaggcactgtctcttctgcattatctatttctgattcaaagactaatctgtgtcacgggaaaatgggagtcttggatcttcagcatgcaagctacttaaagagggcccattgattctcttcaccctagaacactacagggagccccttgaaacaccgcaaatgtttgaaagctgagtgtgcaaaagtcaaagtacaaatgcatatgttgttaggttgttattgggaatattcttcacagaagattaaaacattaaaaattttaaaatccaattattgtcattatatagatcctgccttattcaaatccacaaaaaccagtaagcttaagaaccttcatagacactcagatacccaagagagagactgctggaaaagtctccctcctaagtacttgtagtttcatttcattcatcactatctaaatattttccttcctatgggctcccacttctggatccctcttctgcagggatctgtggcaatctccaatctacatcttcagcctaggaaagcccagattcctcaaaagaygggctaacttaattgagagtaggatctctctattcctctgcttctggaaagtaagttagtctcagtcatccac

SEQ ID NO: 63098 - DNA, 645 bp, Homo sapiens
ctgaactggagtaaacctgataacctaaaacaaggtagaaaaggcactgtctcttctgcattatctatttctgattcaaagactaatctgtgtcacgggaaaatgggagtcttggatcttcagcatgcaagctacttaaagagggcccattgattctcttcaccctagaacactacagggagccccttgaaacaccgcaaatgtttgaaagctgagtgtgcaaaagtcaaagtacaaatgcatatgttgttaggttgttattgggaatattcttcacagaagattaaaacattaaaaattttaaaatccaattattgtcattatatagatcctgccttattcaaatccacaaaaaccagtaagcttaagaaccttcatagacactcagatacccaagagagagactgctggaaaagtctccctcctaagtacttgtagtttcatttcattcatcactatctaaatattttccttcctatgggctcccacttctggatccctcttctgcagggatctgtggcaatctccaatctacatcttcagcctaggaaagcccagattcctcaaaagacgggctaacwtaattgagagtaggatctctctattcctctgcttctggaaagtaagttagtctcagtcatccac

SEQ ID NO: 63099 - DNA, 1958 bp, Homo sapiens
tgatttttacctctaaaaaggcaggaaaggaaaagggttgagtggaagtactaaaaatgctaacagtggatacctttggataatgatattgtgagtgttgttatatcatgagttttcatgtccagtagaattttctgtatttcccaaatgttataattagagaaacatcaacaaactaattttaaaaagaagatggataaaagatataaagatggtaacgaggcatagtttttccccggcgggaagagagaagtcaaattgtacatagataagtaatgactgccacatttcaagagataactagagtgtaaacagctcacatgtagccacaattgaacacaaatgtgaactctcagggttatagcatagccagacttcacacttattttctgatgtgtcatgtcaggtatcagtgaggtccttcttgaacagcagtggcttgaaaggagaaaaaacaaaaaaagaaaattgaggaactaaaagtgccaggagctattggtatcattattatttgtaaaactctgtatgtttctcaatctaatttcagggcctgataaaagagctgtagggttttgaccaagttgtagttctgaaggcatttctttactcacatttggtggcaggattttctctgctcctgcataggggatatgccacagtatggcccctaggagaacagtcactgctaaataccaagaggaacatggccaggaagtgggacaggacaggaaccagttgttctttaggggtgtcacagagtaaaaaaaaaaaaaaaaaaagggaagatataggaatgtagacagagtgaaatgaatatgtgtgtcaataaaacaaatattagtcaatttttttaaattatttttttgagacggagtctcgctctgtcgcctaggctggagtgcagtggcacaatcttggctcactgcaacctctgcctctcctctggggttcaagtgattctcctgtctcagcctcccgactagctgggattacagacatgagccaccatgctttgctaatttttgtattttttttttggtagagayggggtttcaccatattgactaggctggtcttgaactcccaacctcaggtgatccatccgcctcggcctcccaaagtgctgggattgcaggtgtgagccactgtgcccagccagcccattggtttttaatcagtctttctctttcccttctctctctttctactatacacatgtagttacaaagaaatgtcacttattttgtgtgtggctataaactagtcccattattatatataactaaatcatgttttatgccaagtattgcagttatccctgcccttaaaattttaggagtaattttacatttgttgctaatatgcataacaccataaatggaatattttgatttcaaaaagtagagttattgaaactgatttgtttgaaatgtaaaaatttagtacaggtagtaaagattaaaaaaggtgaagatgaaaatagaagtagaaatttgtaggacttgtaatgaaatagaagtagtagagtctcagcaaatcatataatttggttggatctctgcttatttgagaaaactcctctgaaaagccataacgatttaccaacttcacagaaaattatttgctagagtcatctcctataggatgaggtgcctgtgcatagtgaaggtgaagtaataaatagtcttcagcatactggagacagctgagttcagtacaggactcttgtaaaattgggagaggaagaggctgcagtagattttgtaggttatgatgaatgatccaggtgccatagcctttgaatggataatttttcatatctattttctcattatttatttacctctatgcagtgttacatggttcagtggtccccaaacctctctgcaaactagaaaaaactgatttttgttttgtttttaatgtagattttggaggtcccatccttggaattctat

SEQ ID NO: 63100 - DNA, 875 bp, Homo sapiens
tgccttcattctgaccttgctcccttatttacaacaaagtagccttgataagggagcaatgatccagtcaaccaaggcagctctatttactggaatctgttgctagagttaggttatagcatggcttgctagctagtgggccttgcgaggcattgtactctgaaccatagttggaggcaaattttttttgatgcctcttctgggatcctattcaataaaataaaatgtggaataaaaatgtaatgcttaatgtttttcttcaaaggtggtaaaacaacagaattattaataagcatgtgtgatttcattgtatggagamagagtagctcaaacacacaggaggattctattaaatggatttttaaagccacgaggaaatttattgtttaaaaaagataaatttatcaaagtatagcctaatatttttatcctactattttagaagcttgtactaaaatgagaaaggaaaaaaattatagagaggatctgaactgtagaacaactatgccagacaatttcattgtcaaagaaattatgggctgggcgtggtatctcatgcctgtaatcccagcactttgggaggccgaagtgggtggttcacttaaggccaggagttccagcctactggccaatatggtgaaactccttctttactaaacaatacaaaacctagctggacgtggaggcatgtgcctgtaatcccagctactcgagagggtgaggcagaagaatcacttgaacccaggaggcggaggttacagtgagctgagatcgtgccactgcactccagcctgggaaacagagcaagagcctgtcaaaaaacatatatgaatatatatatatttttatatatgaatttatatatgaatttttta

SEQ ID NO: 63101 - DNA, 751 bp, Homo sapiens
tataagacaaggggaatgtgacattagaagtataagcaaggaataatttactaatgtgttatcctttgcatctgaagataacagcattactagttctctttgggcaactgtggctacaaagagaggcaaaagcccatagcccctaagtcaagatttaacaccgttcacagagtctgatgaagttggagattcagacttgtcctcgctaagtcattgttcaggaagatcttcaccccatctcccttctcactcacattccttttttgtccactcatgtgacctctgcaactgctcacagccaagaactgagattcactcctggtggaaacaaatattctgaaggcagaaagtgccagcccccatcagattttgaaggaggccaagtttatctttcaggccttgggcttttgttttctgcaactggcaccaggcttagagycgggacacctaagttctagcatcctaagccatattaacttgctgtatgatgctgtgaaagacactcctctctgggctttggtttcctcatctgcaacaggaggagtctggctcatgattgctgaagcttcccctccagcactaaccttgtagaagttttgaaccatttggccccttaactccattgcctcaccaggctctctcagaaaaactaaatttctctttcagcaaaactgctgtggacagggtctgataaattcattcccacagaggcacattctgtcccatggtatttgcatttccatttggatcc

SEQ ID NO: 63102 - DNA, 1484 bp, Homo sapiens
tcctgttggcacctaacaaagctcaaggaattaaagcatattatagccttggttttataaaataatctagcaacagtccactcagaaggaggaagcatagagcttcttgttgctaaaaagcagggcaggggagcgcagcagggtgaaggttaattaaacactccactaactttccttggaaatggttaatgccactctgtggagaagcttgtagagaagagacaggaataaacaatcccatttacacatttttagcataaaaccatacgtggtcaaagaggactcaccttggggctgaaaatcccaatagtacctgaaatacaagggggaaaaaaaaagggaataagtcaaacttgtatttctcaattttggttggcctaccatagctatagcacctggtccaaaaagcttgctaaagtctataaccagccaaagtcactactaattttgagaaaaacaaaaggttatccctgagatttgaaagagtctcaatggcttaaaagatgcatttaattcactgaaattcctcacgtaattttgactttagagctggaaaggtcctaaaagggaacctagcrgtggcctggggtttctcatcaagagctctacgggctttcagcaggatggttctttgttgtgacaatctggcctgtgtattacaggactgtgtattacactggtcctaggtaccaaataccagaggcattcccagttgttataacagtcaaaccccaccaccaacaccaacacatctcaaatgcctctgaagcctaattttttttttctctgttacccaggctggagtacagtgacacaatcatagctcactgcagcctcgaactcctgggctttgccttttaaacctaaattcttaattttacaagtgaaacatgggccgggtgtggtggctcacgcctgtaatcccagcactttgggaggccaaagcaggcagatcatgaggtcagcagttcgagaccagtctgaccaacatggtgaaaccctgtctctactaaaaatataaaaattagctgggcatggtggcgtgtgcctgtaatcccagctactcaggaggctgaggcaggagaatcgcttgaacccaggaggcggaggttgcagtgagctaagatcgcgccattgcactccagcctgggtgacagagcgagactccatctcaacaaaacaaaacaaacaacaacaacaacaagtgaaacatgaacaattgacttaaggttgtctaacgttttagtgcaattgacttaaggttgtctaacattttagtgtctgagccaagaatggggctcttgcagttcattgtaccatcctatctcctctattattttgggaaataattggcaaaactgacaacccttgaagtcttttatttatctatttttttttctgagactaggccttgctctatcacccaagctggaatgcaatggcatgaacgtcactcactgcaaccttgacctgctgggctcaag

SEQ ID NO: 63103 - DNA, 1484 bp, Homo sapiens
tcctgttggcacctaacaaagctcaaggaattaaagcatattatagccttggttttataaaataatctagcaacagtccactcagaaggaggaagcatagagcttcttgttgctaaaaagcagggcaggggagcgcagcagggtgaaggttaattaaacactccactaactttccttggaaatggttaatgccactctgtggagaagcttgtagagaagagacaggaataaacaatcccatttacacatttttagcataaaaccatacgtggtcaaagaggactcaccttggggctgaaaatcccaatagtacctgaaatacaagggggaaaaaaaaagggaataagtcaaacttgtatttctcaattttggttggcctaccatagctatagcacctggtccaaaaagcttgctaaagtctataaccagccaaagtcactactaattttgagaaaaacaaaaggttatccctgagatttgaaagagtctcaatggcttaaaagatgcatttaattcactgaaattcctcacgtaattttgactttagagctggaaaggtcctaaaagggaacctagcggtggcctggggtttctcatcaagagctctacgggctttcagcaggatggttctttgttgtgacaatctggcctgtgtattacaggactgtgtattacactggtcctaggtaccaaataccagaggcattcccagttgttataacagtcaaaccccaccaccaacaccaacacatctcaaatgcctctgaagcctaattttttttttctctgttacccaggctggagtacagtgacacaatcatagctcactgcagcctcgaactcctgggctttgccttttaaacctaaattcttaattttacaagtgaaacatgggccgggtgtggtggctcacgcctgtaatcccagcactttgggaggccaaagcaggcagatcatgaggtcagcagttcgagaccagtctgaccaacatggtgaaaccctgtctctactaaaaatayaaaaattagctgggcatggtggcgtgtgcctgtaatcccagctactcaggaggctgaggcaggagaatcgcttgaacccaggaggcggaggttgcagtgagctaagatcgcgccattgcactccagcctgggtgacagagcgagactccatctcaacaaaacaaaacaaacaacaacaacaacaagtgaaacatgaacaattgacttaaggttgtctaacgttttagtgcaattgacttaaggttgtctaacattttagtgtctgagccaagaatggggctcttgcagttcattgtaccatcctatctcctctattattttgggaaataattggcaaaactgacaacccttgaagtcttttatttatctatttttttttctgagactaggccttgctctatcacccaagctggaatgcaatggcatgaacgtcactcactgcaaccttgacctgctgggctcaag

SEQ ID NO: 63104 - DNA, 756 bp, Homo sapiens
caattgctactacatgcagccaggttgttaatgttattttggcttaaatccatattctgggcaggatttagtaccatgtaggcagttgggacctatcagctaccagggtaatgtcagtaggccccattccatcacacaggacaaactacgaaccaaagaaatatctattccacctccttcatacttgtctcttttgcttctgacttcaaaagcagggctagaaagaccaggaagaagagactgattatgtttatatctgtggagcaaagattatgcaaactgccagcacttcattgtttttgttttcggtgtggttatcacaraacaaaaacaaaaagataacttctacatctgaagccccattatttgaaaacagacctgaatatttcctcctctttcaataaagcagaaagcaccctccattttacttatctatgaggtatttatttgttgataggggactagttactatttctatatgagagcttgacagagtctatctaaagaagctatttcctgagttactctagaaacctcacactgttttgatatttgccaaaaatccaagatagcgtgttttttttttttaatttctccaccttccatacccctcagggctaaaaagagaaaaacatgatcacaagcatagtaaatggtccgttagcactctgacctctctgagtttctatttgtcttttgttcctttttcttttaaatacccttactgtttattttttcctgtttacagaagtaatg

SEQ ID NO: 63105 - DNA, 2050 bp, Homo sapiens
gatcacgaggtcaggagtttgaggtcagcctgaccaatatagtgaaaccccgtctctactaataatacaaaaattagctgggcatggtggtgcacgcctgtaatcccagctactcgggtggctgaggcaggagaatcacatgaacccggggggcggaggttgcartgagccgagatcaggccattgcactctagcctgggtgacagggcaagactccatctcaaaaaaaagaaagaaagaaagaaagaaagtatagcaatgggcagactacccctttcaggcttgggatcaagtaccaggtacccccatggcatttttaccaacttcaccacttcacctataaaattgtagctgctctagaatcattttgaagtacttatgaggcatactaaaaagcaaggaaagatacatgggaactgtctgtgctatcatctcaatttttttttggtaaatctaaactgttacacaaaaaatacagcaagggcagcaaagtctccccatatgtcaacctaaactttgccttgctttccttcttggcaacagaagaaaatttgataacctccccctcttcttcaaggatatggtgtcacatactaatataagctaccagctaatgaattgtttgataaagagcagtaaacccaggtaattgcacttctttgcaggcttcactgcctgtcatagcttacttacaccaaaaactcacagtgtacgtattctatatgcatccttccttacaagaatctctgggttttagagagacaggggtagagggaggtgcacagtcgggtagtatgtagtgagtgactggcagattccaatacggtattgtcatgttgcatcaaggttcctcattgcagacagaaatctgcctccacacatgaacgcagcccttccttaatcatctgaggaccctgtttcagcagtcagccccactcctaatgacattctgttaaatggacaaattcctttgaagccttgtccttttttgaaatccaatttcgcaggaagccaaatctgattgggggtagccatggaaaccacatggaggagtcttagaggaggtgaagagaggcaaggcaaaacgtgatagtcacgagtcctttactgttctgtcagaaatatcaaagcaatctggagaggttggcagtagctgagtccctgcctgggtcctgttctgtgtggctgggtactatgtggctgtcatggaagaaagcagccagctgtctctgcacacaggcaggaggacagaacagaatacacaaatctcaggtctgtctgcctcccttttcttcccgtcccccccagacccaattccagcaagatcttagcatcctcttcttagctgcctgccccttaaagacaaacaacaaaagaatgacaaggttaaaatacaaggccctcacagataagaggtcctttggagcagaggccatgaaattaatctggaattccttgtaattagataagataaggggatctaaagagatgtagaacagccaggaatggagtccagcagcacaacatgcagaaaacacaccgccttgtccaccgggacccttcacgcactgtcagcagacagaagacacagaaaatagggcccatattggcctctgagcttcttgggaatgctgtctacatgttctcatgccaggtgggcactcgctaaataggcatctatgggatgtccagagggaccaatcaggaagaaacaaaagcatctggcacccagaatggcatgcagtgggaacacaactgcaagcaaagcaggagctggctggcaccgctctgccctggctgaaatgggtctggagaggaaactgcagagggcaggctctgaggctttattctgagctggttattgatccctgaatgctgggtcatgacatgtggcggagctgacgtctgccctatggatgtgcagccactgcctctcagcctctcggtcccaaccccatcaaccgggtttattgactcttttattgacaatgctggggcctaatgaggccaagagctgcacacttcattaagagatgtggaaggagagatg

SEQ ID NO: 63106 - DNA, 2050 bp, Homo sapiens
gatcacgaggtcaggagtttgaggtcagcctgaccaatatagtgaaaccccgtctctactaataatacaaaaattagctgggcatggtggtgcacgcctgtaatcccagctactcgggtggctgaggcaggagaatcacatgaacccggggggcggaggttgcagtgagccgagatcaggccattgcactctagcctgggtgacagggcaagactccatctcaaaaaaaaraaagaaagaaagaaagaaagtatagcaatgggcagactacccctttcaggcttgggatcaagtaccaggtacccccatggcatttttaccaacttcaccacttcacctataaaattgtagctgctctagaatcattttgaagtacttatgaggcatactaaaaagcaaggaaagatacatgggaactgtctgtgctatcatctcaatttttttttggtaaatctaaactgttacacaaaaaatacagcaagggcagcaaagtctccccatatgtcaacctaaactttgccttgctttccttcttggcaacagaagaaaatttgataacctccccctcttcttcaaggatatggtgtcacatactaatataagctaccagctaatgaattgtttgataaagagcagtaaacccaggtaattgcacttctttgcaggcttcactgcctgtcatagcttacttacaccaaaaactcacagtgtacgtattctatatgcatccttccttacaagaatctctgggttttagagagacaggggtagagggaggtgcacagtcgggtagtatgtagtgagtgactggcagattccaatacggtattgtcatgttgcatcaaggttcctcattgcagacagaaatctgcctccacacatgaacgcagcccttccttaatcatctgaggaccctgtttcagcagtcagccccactcctaatgacattctgttaaatggacaaattcctttgaagccttgtccttttttgaaatccaatttcgcaggaagccaaatctgattgggggtagccatggaaaccacatggaggagtcttagaggaggtgaagagaggcaaggcaaaacgtgatagtcacgagtcctttactgttctgtcagaaatatcaaagcaatctggagaggttggcagtagctgagtccctgcctgggtcctgttctgtgtggctgggtactatgtggctgtcatggaagaaagcagccagctgtctctgcacacaggcaggaggacagaacagaatacacaaatctcaggtctgtctgcctcccttttcttcccgtcccccccagacccaattccagcaagatcttagcatcctcttcttagctgcctgccccttaaagacaaacaacaaaagaatgacaaggttaaaatacaaggccctcacagataagaggtcctttggagcagaggccatgaaattaatctggaattccttgtaattagataagataaggggatctaaagagatgtagaacagccaggaatggagtccagcagcacaacatgcagaaaacacaccgccttgtccaccgggacccttcacgcactgtcagcagacagaagacacagaaaatagggcccatattggcctctgagcttcttgggaatgctgtctacatgttctcatgccaggtgggcactcgctaaataggcatctatgggatgtccagagggaccaatcaggaagaaacaaaagcatctggcacccagaatggcatgcagtgggaacacaactgcaagcaaagcaggagctggctggcaccgctctgccctggctgaaatgggtctggagaggaaactgcagagggcaggctctgaggctttattctgagctggttattgatccctgaatgctgggtcatgacatgtggcggagctgacgtctgccctatggatgtgcagccactgcctctcagcctctcggtcccaaccccatcaaccgggtttattgactcttttattgacaatgctggggcctaatgaggccaagagctgcacacttcattaagagatgtggaaggagagatg

SEQ ID NO: 63107 - DNA, 1207 bp, Homo sapiens
gcatgggttagcctgtaaccttggttttcattttttgctgtgtacctggccaggtttctatattcttctagcactctytgtagttttcacaaagtcatgacctaaacacaatatgcagcatgcttctatattcttctagcactctttgtagttttcacaaagtcatgacctaaacacaatatgcagcatggttactgcccctcatcactaaaattatgggtggatgggcccgactgtgtatccttttataatggcaagtctaggatactactctagctgacagtggaagacaaaatatctgaaatattttcacattttctaatgaagacaaaattcgagaagcctaaaataactgtcattacaaagaatgttaaagaggaatatctgggaggccaaggcgggtggatcacgaagtcaggagatcgagaccatcctggctaacacggtgaaaccccgtctctactaaaaatacaaaaaattagccaggcgcggtggccggcgcctatagtcccagctacttgggaggctgaggcaggagaatggcgtgaacccaggaggcagagtttgcagtgagccgagatcccaccactgcactctagcctgggtgacagagcgaaactctgtctcaaaaaaaataataataaaaaataaagaggaatattttttcttcataaataattgacttagctatctataaagacactaactttatatttttttatttgtctacttattaatagttttcccagtgagatggtaagctccatgagggcagggactgtatctgctttctcactgcatttttcacctgcagcttaacacagtgtcttggtgttaactaggaatctttaaacaaacatttgtttaaaaaaatgaataagtagcatatcaagtgttaccattctctataatggtaaaaactaattaaataggatatagagattgctaaaaattttgacacctttataactttctctttaatttcacaggaaatgtatgtatctttaattttcaggggatgaaaatgaacatttattgtgcctgttatgtattaggcactcaggcactgtgctagattcaatgctttgcagaaactcacatttaaacagtatcacatcatcttacaatcaagtttttaacatagaaataggtctattcctacctctaccattgactatgtcactttgggaattctttaatttcatgc

SEQ ID NO: 63108 - DNA, 1207 bp, Homo sapiens
gcatgggttagcctgtaaccttggttttcattttttgctgtgtacctggccaggtttctatattcttctagcactctttgtagttttcacaaagtcatgacctaaacacaatatgcagcatgcttctatattcttctagcactctttgtagttttcacaaagtcatgacctaaacacaatatgcagcatggttactgcccctcatcactaaaattatgggtggatgggcccgactgtgtatccttttataatggcaagtctaggatactactctagctgacagtggaagacaaaatatctgaaatattttcacattttctaatgaagacaaaattcgagaagcctaaaataactgtcattacaaagaatgttaaagaggaatatctgggaggccaaggcgggtggatcacgaagtcaggagatcgagaccatcctggctaacacggtgaaaccccgtctctactaaaaatacaaaaaattagccaggcgcggtggccggcgcctatagtcccagctacttgggaggctgaggcaggagaatggcgtgaacccaggaggcagagtttgcagtgagccgagatcccaccactgcactctagcctgggtgacagagcgaaactctgtctcaaaaaaaataataataaaaaataaagaggaatattttttcttcataaataattgacttagctatctataaagacactaactttatatttttttatttgtctacttattaatagttttcccagtgagatggtaagctccatgagggcagggactgtatctgctttctcactgcatttttcacctgcagcttaacacagtgtcttggtgttaactaggaatctttaaacaaacatttgtttaaaaaaatgaataagtagcatatcaagtgttaccattctctataatggtaaaaactaattaaataggatatagagattgctaaaaattttgacacctttataactttctctttaatttcacargaaatgtatgtatctttaattttcaggggatgaaaatgaacatttattgtgcctgttatgtattaggcactcaggcactgtgctagattcaatgctttgcagaaactcacatttaaacagtatcacatcatcttacaatcaagtttttaacatagaaataggtctattcctacctctaccattgactatgtcactttgggaattctttaatttcatgc

SEQ ID NO: 63109 - DNA, 1207 bp, Homo sapiens
gcatgggttagcctgtaaccttggttttcattttttgctgtgtacctggccaggtttctatattcttctagcactctttgtagttttcacaaagtcatgacctaaacacaatatgcagcatgcttctatattcttctagcactctttgtagttttcacaaagtcatgacctaaacacaatatgcagcatggttactgcccctcatcactaaaattatgggtggatgggcccgactgtgtatccttttataatggcaagtctaggatactactctagctgacagtggaagacaaaatatctgaaatattttcacattttctaatgaagacaaaattcgagaagcctaaaataactgtcattacaaagaatgttaaagaggaatatctgggaggccaaggcgggtggatcacgaagtcaggagatcgagaccatcctggctaacacggtgaaaccccgtctctactaaaaatacaaaaaattagccaggcgcggtggccggcgcctatagtcccagctacttgggaggctgaggcaggagaatggcgtgaacccaggaggcagagtttgcagtgagccgagatcccaccactgcactctagcctgggtgacagagcgaaactctgtctcaaaaaaaataataataaaaaataaagaggaatattttttcttcataaataattgacttagctatctataaagacactaactttatatttttttatttgtctacttattaatagttttcccagtgagatggtaagctccatgagggcagggactgtatctgctttctcactgcatttttcacctgcagcttaacacagtgtcttggtgttaactaggaatctttaaacaaacatttgtttaaaaaaatgaataagtagcatatcaagtgttaccattctctataatggtaaaaactaattaaataggatatagagattgctaaaaattttgacacctttataactttctctttaatttcacaggaaatgtatgtatctttaattttcaggggatgaaaatgaacatttattgtgcctgttatgtattaggcactcaggcactgtgctagattcaatgcttygcagaaactcacatttaaacagtatcacatcatcttacaatcaagtttttaacatagaaataggtctattcctacctctaccattgactatgtcactttgggaattctttaatttcatgc

SEQ ID NO: 63110 - DNA, 759 bp, Homo sapiens
gggcttttattttcctcatctataaagtagacttgaggttgttgtgagtattaaagaaatcatgtgcataaagctcttggctcaatgcctggtacatggttgaaatttaagaactggttgtttcctatgaactcttgaagacagagactgtttcatttcggtatctaaccatttagcatggcgccagacatatagtaggggttcactatatgactgttagtgaatgaatgaataatgaacaaacatatccttgtaactttgaagtatggccgggagcagtggctcatgcctgtaatcccagtactttgggaggctaaggcaggcggatcaccttaggtcaagagttcgaggcctggccaacatggcgaaaccctgtctctaccaaaaatacaaaaattagctgggcatggtggcaggcacctgtaatcccagctacttgggaagctgagggaggagaatcacttgaacctgggaggcagaggttgcaatgagccgagatcgtgccattgcactccagcctgggagacaagagcgagactccatctcaaaaaaaaaaaacaaaaaaaacctttgaagtacatagaataattcctgcacattgtkggtgtttaataaatttcaaatgaatgcatgtaataatcctatatgaagcctacttcttctgcatcctacttcatgagaaaaggaatttgctcatgtccctaaagttcctgaaggacaattcagaatcaagtatttgacctactcccaactttctgg

SEQ ID NO: 63111 - DNA, 759 bp, Homo sapiens
gggcttttattttcctcatctataaagtagacttgaggttgttgtgagtattaaagaaatcatgtgcataaagctcttggctcaatgcctggtacatggttgaaatttaagaactggttgtttcctatgaactcttgaagacagagactgtttcatttcggtatctaaccatttagcatggcgccagacatatagtaggggttcactatatgactgttagtgaatgaatgaataatgaacaaacatatccttgtaactttgaagtatggccgggagcagtggctcatgcctgtaatcccagtactttgggaggctaaggcaggcggatcaccttaggtcaagagttcgaggcctggccaacatggcgaaaccctgtctctaccaaaaatacaaaaattagctgggcatggtggcaggcacctgtaatcccagctacttgggaagctgagggaggagaatcacttgaacctgggaggcagaggttgcaatgagccgagatcgtgccattgcactccagcctgggagacaagagcgagactccatctcaaaaaaaaaaaacaaaaaaaacctttgaagtacatagaataattcctgcacattgtgggtgtttaataaatttcaaatgaatgcatgtaataatcctatatgaagcmtacttcttctgcatcctacttcatgagaaaaggaatttgctcatgtccctaaagttcctgaaggacaattcagaatcaagtatttgacctactcccaactttctgg

SEQ ID NO: 63112 - DNA, 744 bp, Homo sapiens
ggtatattatgttaatcgattttagatattaatccaatattgcatttctgggataaatcctatttcttcataatgtgtaatcctttttatgttgttaggtttaatttactagtatttccttgagaawtttgagtgtatatttgtaaaatatattgttctgtaattttcttgtgattgttttgcctgattttgatatgagagctatactggcctcacagaataagctaggaagtgttcgctcctctcgtatgttttggaactatttgtgaagacttggtaaaaatttttctttaaatgtttgacataatttgccagtgaacccatctgggcctgagtttgtgtttgggaagtttcaaaataattgatttaaactttttagataccctttggtcaacctagttaagatttgtaaatttctaaaaaaaaaaattcttttttttttgagacggagcctcgctctgttgcccaggctggagtgcagtggtgcgatctcggctcactgcaaactccacctcccgggttcacgtcattctcctgcctcagcctcctgagtagctggggaaaaaaaaaatcttttcaaagagcaaactttggttttcttgattttcttcattacttttctaatctcttcttcatcagtttttgctctaatctttatttctttccttcttgctttggtctgaattcgctcatcttttctcatggtcataaggtagaaacttaggatattgttttgaggtcctt

SEQ ID NO: 63113 - DNA, 467 bp, Homo sapiens
atctcaatgacatcaatgattaactaggcagttggcaaggttttcctagtcatgcaatcacatagaatatagaggaaaatgcagattcaggaaaaatttaggaggtagcatagtcaggccttggtgcttgatcctatgtgcatactgcagggaaggcaggaatcatgaatgactggagatcatttggggtagggagactgatatcgtgtgcctggaagttttaaaggggctggggctgaggaagtaaactgtggatatcgtgtggtggtttctgccaaagagataattcacttcatctggatattgattacctacagggaaaattaatagattaaggacaatgaaagacaactttcttacagagtaaggagaacaaatacagaaagaggaaaggctacaataaactctgtggttgagaccatcctggccaacatggtgaaaccctgtctctactaaaaatatmaaaa

SEQ ID NO: 63114 - DNA, 1007 bp, Homo sapiens
ggggctctgtgtagaggaacagttctgagaatgagcaaactggtgctaccatgagctgtctaaaccccaagtttttgtttttgtttttttgagacagagtcttgctctgtcacccaggctggagtgcagtggtgcaatctcggctcactgcaacctccacctcccaggctaaagcgattctcatgcctcagcctccycagtagctgggattacaggtgcacaccactgtacccagctaattttttctatttttagtaaagacagggtttcactgtgttggccaggctggtctcaaactcctggcctcaagtgatccccctgcctcagcctcccaaagtgttgagattacaggtgtgagccactgtgcctggccataaaatccaagttctttttattcttagttactgtgacagaccgagttaaagaaaacaaaaggaactcacctcgcctttgtctggctggttccctcagttctcaagtgaagtgaaaattattttcctgcctgcagctttgcatagttattttcccattgcttactttaatgtaatggccagcaatgttcttttctatagttaggaaaagcagattttctgaaaccagaagcactagttctgatgtcagacagtcagtgttcaaatcctgggttctgtcactccctagcttatatgatgctgggcaagtgagcatagccactttcttcctcagtttcctcatctgtaaaacagagacaataaatagttactacctcaaagggttgttatggggatcaattgaaatgatacaactacaacatgcactaaataaatttaaagcaaaactggcatatggtaagccttgaagaaaagttagtaatattgccattgttgttaagtttcaggatataaaaatccattttttttttccttctgccacccaggctggagtgcagtggggcgattttggctcactacaacctctgcctcctggattcaagcaattctcctgcctcagactcccaagtagctagg

SEQ ID NO: 63115 - DNA, 1452 bp, Homo sapiens
atgtgcatttgctgagagggattcattcatccaggttgagaaaatgccatacaatttagagccaaaggcctaggacaaattcccagctctcctgctcacaggtcttgagcaagttaacctttctgaacctgtgtctcattgttaacatgagggtttattcaaaaagcaagtattttttgattgtctgctacacgtaggcacagggctatggaaatagataggacatggccctgtctcactagaagcttatgttttttggtggatggtgataacactgacatcaggattgctgacaagatgactagaagggtgaaactgcttgctaaactataatatttcatgcaattattaaacacagttaatgtataaagtgattcatagtttgctactgggaagacttacacaaattaaagacatttagtaaagagatatcagagaagctcaacaagattttataatcctactcttcccaattccttcctttaagatgtaatacattactgatttatttattaaccaccccatccattattaaccaccccttctattctgtcccaaacaggaatttaagactttctcagtcctactccattaacaacaataaccaattatgccccataacataaaagttaacatggcattcattcttcttaggctcaattctcttacaatggaatttggaggaggttacatagacacttctttttactcctcaatcccatttaatattgctggagaaccaagagtcattcattcaacatttattgatatttacttgctaacgaaggtttacagtaatatcccttgagggataaagatttcctacccagccatgggcagaaatattcagcaccctgaggatgcctactccattctcttgcctgttggaaccttcttkgggtgtcctttagatcatttatatcaaacagataagcttacagatggtcatcaaggctttgactaggagcatttgacaccaacacagcacaacttactgtttcataagtttactccttacactaatgtagttttttttggtgggggtggtgtctagggtattttgcttttcacccagtttttatcaaacaatgcaagcctaaatgagcataagattatacacatataacacttttatgtttagagcatgggaaagacatgtttattaacagaaaagtttaaccatgcatgagtaaagagaacagatcctaactgtctagtgggttccaatcacaatgtattgagttattttaaagttaacctaaagggattgtataccaggaaaatagtacttttcctttgcttgtattaaaagcaatagatgcaattaaacctgaaactgacaatgaacaattgtgaaaccaatggaaaaatttgcagatgatttaaaacacattgttcaagataaaaggctggtgatgacttgatcaacatcctcaaaagaaacaaaacatg

SEQ ID NO: 63116 - DNA, 1474 bp, Homo sapiens
aacctggcaaataagattaatgaacaatataatattgttatgtgtttttcttaaatacaaataacattttttaaaggtgataacaatgctttatacaaagactttcctcttttcttaygtggtttataaactattttgcgtgtaagtcccataaaggagttccacatacttttatcgaatggtattatcattagattaagtgtctaagtgatcactctgctgtgggcaaaactcacttttatgcataagctcatgaatgtgtgcatacaaatcagatcaatctcattaaataaaaatcttaaaaaggagcaaacaatttgcactaagagaaatatgtgtttataaatatttttaaaatggtatttgacttctctagagattttcaaaatgcctaggaggcacttttctattttctttgtgtttgcaaaaatacctctgaggattaattgacacaagcatcaagcatttggggtggaagtatgcacgggagtatacattttggaagataatttggagatgtatatcacaattcagaaaagaattgatatgtcctcaacccaataattccattcctaagaactgattacaaagaaataatccatgatcccaacaaagctgtatattcagggacattcagatagtgttattttatattggtgaaaaattaaaaacttaaatgcccaaaaattatagaatgagtacataaattctggaacatgtggtccagatgttgaaatactatgccttgaagttgccttggcttaaattccaactctgtccttccctagttgtgtaaccctgaacaaggcaattaacattaattaattttttaaaatggagattacaataatttctatctcaaggggttgctaagagaaagtacttggagcagtgtctggctcatagaaatgttatcacagttgtttatacaaatacaaagtatacctataatatgatctcaaatttttacgattaaacacagtcatatgccaaagactggaaaaaaaatttactgtacaccgaatatcttagtctttttgtgttgctataaaggaattcctgaggctgggtaattcataaagaaaaagcatttatttggctgatgattcttatggctgaaaaattcaagattgggtatctgtagctggtgaaggcctcaggatgcttccattcatagtggaaggtgaagaggagccagcctgttcagagatcacctggtgagggaagaagcaagagagagagaagcgggaggtgccaggctctttataacaaccagctctcctgggaactaatagagtgagaactcacttacccccaagggaggacattaatcttttcatgaggggtcagcccctatgacctaaacatctcccaatagactccacttcccaatactgccacaagagatttggtggaaacaaactgtaaccaaagcatagcattaaaccaagggttctcagacatcttgctctta

SEQ ID NO: 63117 - DNA, 1474 bp, Homo sapiens
aacctggcaaataagattaatgaacaatataatattgttatgtgtttttcttaaatacaaataacattttttaaaggtgataacaatgctttatacaaagactttcctcttttcttatgtggtttataaactaytttgcgtgtaagtcccataaaggagttccacatacttttatcgaatggtattatcattagattaagtgtctaagtgatcactctgctgtgggcaaaactcacttttatgcataagctcatgaatgtgtgcatacaaatcagatcaatctcattaaataaaaatcttaaaaaggagcaaacaatttgcactaagagaaatatgtgtttataaatatttttaaaatggtatttgacttctctagagattttcaaaatgcctaggaggcacttttctattttctttgtgtttgcaaaaatacctctgaggattaattgacacaagcatcaagcatttggggtggaagtatgcacgggagtatacattttggaagataatttggagatgtatatcacaattcagaaaagaattgatatgtcctcaacccaataattccattcctaagaactgattacaaagaaataatccatgatcccaacaaagctgtatattcagggacattcagatagtgttattttatattggtgaaaaattaaaaacttaaatgcccaaaaattatagaatgagtacataaattctggaacatgtggtccagatgttgaaatactatgccttgaagttgccttggcttaaattccaactctgtccttccctagttgtgtaaccctgaacaaggcaattaacattaattaattttttaaaatggagattacaataatttctatctcaaggggttgctaagagaaagtacttggagcagtgtctggctcatagaaatgttatcacagttgtttatacaaatacaaagtatacctataatatgatctcaaatttttacgattaaacacagtcatatgccaaagactggaaaaaaaatttactgtacaccgaatatcttagtctttttgtgttgctataaaggaattcctgaggctgggtaattcataaagaaaaagcatttatttggctgatgattcttatggctgaaaaattcaagattgggtatctgtagctggtgaaggcctcaggatgcttccattcatagtggaaggtgaagaggagccagcctgttcagagatcacctggtgagggaagaagcaagagagagagaagcgggaggtgccaggctctttataacaaccagctctcctgggaactaatagagtgagaactcacttacccccaagggaggacattaatcttttcatgaggggtcagcccctatgacctaaacatctcccaatagactccacttcccaatactgccacaagagatttggtggaaacaaactgtaaccaaagcatagcattaaaccaagggttctcagacatcttgctctta

SEQ ID NO: 63118 - DNA, 1474 bp, Homo sapiens
aacctggcaaataagattaatgaacaatataatattgttatgtgtttttcttaaatacaaataacattttttaaaggtgataacaatgctttatacaaagactttcctcttttcttatgtggtttataaactattttgygtgtaagtcccataaaggagttccacatacttttatcgaatggtattatcattagattaagtgtctaagtgatcactctgctgtgggcaaaactcacttttatgcataagctcatgaatgtgtgcatacaaatcagatcaatctcattaaataaaaatcttaaaaaggagcaaacaatttgcactaagagaaatatgtgtttataaatatttttaaaatggtatttgacttctctagagattttcaaaatgcctaggaggcacttttctattttctttgtgtttgcaaaaatacctctgaggattaattgacacaagcatcaagcatttggggtggaagtatgcacgggagtatacattttggaagataatttggagatgtatatcacaattcagaaaagaattgatatgtcctcaacccaataattccattcctaagaactgattacaaagaaataatccatgatcccaacaaagctgtatattcagggacattcagatagtgttattttatattggtgaaaaattaaaaacttaaatgcccaaaaattatagaatgagtacataaattctggaacatgtggtccagatgttgaaatactatgccttgaagttgccttggcttaaattccaactctgtccttccctagttgtgtaaccctgaacaaggcaattaacattaattaattttttaaaatggagattacaataatttctatctcaaggggttgctaagagaaagtacttggagcagtgtctggctcatagaaatgttatcacagttgtttatacaaatacaaagtatacctataatatgatctcaaatttttacgattaaacacagtcatatgccaaagactggaaaaaaaatttactgtacaccgaatatcttagtctttttgtgttgctataaaggaattcctgaggctgggtaattcataaagaaaaagcatttatttggctgatgattcttatggctgaaaaattcaagattgggtatctgtagctggtgaaggcctcaggatgcttccattcatagtggaaggtgaagaggagccagcctgttcagagatcacctggtgagggaagaagcaagagagagagaagcgggaggtgccaggctctttataacaaccagctctcctgggaactaatagagtgagaactcacttacccccaagggaggacattaatcttttcatgaggggtcagcccctatgacctaaacatctcccaatagactccacttcccaatactgccacaagagatttggtggaaacaaactgtaaccaaagcatagcattaaaccaagggttctcagacatcttgctctta

SEQ ID NO: 63119 - DNA, 1474 bp, Homo sapiens
aacctggcaaataagattaatgaacaatataatattgttatgtgtttttcttaaatacaaataacattttttaaaggtgataacaatgctttatacaaagactttcctcttttcttatgtggtttataaactattttgcgtgtaagtcccataaaggagttccacatacttttatcgaatggtattatcattagattaagtgtctaagtgatcactctgctgtgggcaaaactcacttttatgcataagctcatgaatgtgtgcatacaaatcagatcaatctcattaaataaaaatcttaaaaaggagcaaacaatttgcactaagagaaatatgtgtttataaatatttttaaaatggtatttgacttctctagagattttcaaaatgcctaggaggcacttttctattttctttgtgtttgcaaaaatacctctgaggattaattgacacaagcatcaagcatttggggtggaagtatgcacgggagtatacattttggaagataatttggagatgtatatcacaattcagaaaagaattgatatgtcctcaacccaataattccattcctaagaactgattacaaagaaataatccatgatcccaacaaagctgtatattcagggacattcagatagtgttattttatattggtgaaaaattaaaaacttaaatgcccaaaaattatagaatgagtacataaattctggaacatgtggtccagatgttgaaatactatgccttgaagttgccttggcttaaattccaactctgtccttccctagttgtgtaaccctgaacaaggcaattaacattaattaattttttaaaatggagattacaataatttctatctcaaggggttgctaagagaaagtacttggagcagtgtctggctcatagaaatgttatcacagttgtttatacaaatacaaagtatacctataatatgatctcaaatttttacgattaaacacagtcatatgccaaagaytggaaaaaaaatttactgtacaccgaatatcttagtctttttgtgttgctataaaggaattcctgaggctgggtaattcataaagaaaaagcatttatttggctgatgattcttatggctgaaaaattcaagattgggtatctgtagctggtgaaggcctcaggatgcttccattcatagtggaaggtgaagaggagccagcctgttcagagatcacctggtgagggaagaagcaagagagagagaagcgggaggtgccaggctctttataacaaccagctctcctgggaactaatagagtgagaactcacttacccccaagggaggacattaatcttttcatgaggggtcagcccctatgacctaaacatctcccaatagactccacttcccaatactgccacaagagatttggtggaaacaaactgtaaccaaagcatagcattaaaccaagggttctcagacatcttgctctta

SEQ ID NO: 63120 - DNA, 1474 bp, Homo sapiens
aacctggcaaataagattaatgaacaatataatattgttatgtgtttttcttaaatacaaataacattttttaaaggtgataacaatgctttatacaaagactttcctcttttcttatgtggtttataaactattttgcgtgtaagtcccataaaggagttccacatacttttatcgaatggtattatcattagattaagtgtctaagtgatcactctgctgtgggcaaaactcacttttatgcataagctcatgaatgtgtgcatacaaatcagatcaatctcattaaataaaaatcttaaaaaggagcaaacaatttgcactaagagaaatatgtgtttataaatatttttaaaatggtatttgacttctctagagattttcaaaatgcctaggaggcacttttctattttctttgtgtttgcaaaaatacctctgaggattaattgacacaagcatcaagcatttggggtggaagtatgcacgggagtatacattttggaagataatttggagatgtatatcacaattcagaaaagaattgatatgtcctcaacccaataattccattcctaagaactgattacaaagaaataatccatgatcccaacaaagctgtatattcagggacattcagatagtgttattttatattggtgaaaaattaaaaacttaaatgcccaaaaattatagaatgagtacataaattctggaacatgtggtccagatgttgaaatactatgccttgaagttgccttggcttaaattccaactctgtccttccctagttgtgtaaccctgaacaaggcaattaacattaattaattttttaaaatggagattacaataatttctatctcaaggggttgctaagagaaagtacttggagcagtgtctggctcatagaaatgttatcacagttgtttatacaaatacaaagtatacctataatatgatctcaaatttttacgattaaacacagtcatatgccaaagactggaaaaaaaatttactgtacaccgaatatcttagtctttttgtgttgctataaaggaatkcctgaggctgggtaattcataaagaaaaagcatttatttggctgatgattcttatggctgaaaaattcaagattgggtatctgtagctggtgaaggcctcaggatgcttccattcatagtggaaggtgaagaggagccagcctgttcagagatcacctggtgagggaagaagcaagagagagagaagcgggaggtgccaggctctttataacaaccagctctcctgggaactaatagagtgagaactcacttacccccaagggaggacattaatcttttcatgaggggtcagcccctatgacctaaacatctcccaatagactccacttcccaatactgccacaagagatttggtggaaacaaactgtaaccaaagcatagcattaaaccaagggttctcagacatcttgctctta

SEQ ID NO: 63121 - DNA, 549 bp, Homo sapiens
gtgttgattctccataccyccctctccgtaccactgactaattatggacatttaatgagaggcaactcacataggataaagaacatagtctgggcatcagacctgagttgcagtcctggtcctaccactttctagatctatagccttgggtaagttactcaacctctctggtctttggtttcctcatttgtaaaatggagctaaactcccccatcttgcagggctgttgttaggatttgatgagccgatttaatccctgacacagtggatgcccagtaattagttggcattccttttagtgataagttgtaaaaggttaggcaagtgttggcagggctaggcaattgcctggccttgatgaggagtaaagtctactgccctctaggggctgcatgagtaacctgggcctcactagcatggtgtgctctactcgcaggagtccttactggtccgtgaaggggaagtggggaatctgtcctagaacacaacccaccactacaccactgcctccttctggggctggcattacactcagccaggctagagagg

SEQ ID NO: 63122 - DNA, 549 bp, Homo sapiens
gtgttgattctccatacctccctctccgtaccactgactaattatggacatttaatgagagrcaactcacataggataaagaacatagtctgggcatcagacctgagttgcagtcctggtcctaccactttctagatctatagccttgggtaagttactcaacctctctggtctttggtttcctcatttgtaaaatggagctaaactcccccatcttgcagggctgttgttaggatttgatgagccgatttaatccctgacacagtggatgcccagtaattagttggcattccttttagtgataagttgtaaaaggttaggcaagtgttggcagggctaggcaattgcctggccttgatgaggagtaaagtctactgccctctaggggctgcatgagtaacctgggcctcactagcatggtgtgctctactcgcaggagtccttactggtccgtgaaggggaagtggggaatctgtcctagaacacaacccaccactacaccactgcctccttctggggctggcattacactcagccaggctagagagg

SEQ ID NO: 63123 - DNA, 549 bp, Homo sapiens
gtgttgattctccatacctccctctccgtaccactgactaattatggacatttaatgagaggcaactcacataggataaagaacatagtctgggcatcagacctgagttgcagtcctggtcctaccactttctagatctatagccttgggtaagttactcaacctctctggtctttggtttcctcatttgtaaaatggagctaaactcccccatcttgcagggctgttgttaggatttgatgarccgatttaatccctgacacagtggatgcccagtaattagttggcattccttttagtgataagttgtaaaaggttaggcaagtgttggcagggctaggcaattgcctggccttgatgaggagtaaagtctactgccctctaggggctgcatgagtaacctgggcctcactagcatggtgtgctctactcgcaggagtccttactggtccgtgaaggggaagtggggaatctgtcctagaacacaacccaccactacaccactgcctccttctggggctggcattacactcagccaggctagagagg

SEQ ID NO: 63124 - DNA, 549 bp, Homo sapiens
gtgttgattctccatacctccctctccgtaccactgactaattatggacatttaatgagaggcaactcacataggataaagaacatagtctgggcatcagacctgagttgcagtcctggtcctaccactttctagatctatagccttgggtaagttactcaacctctctggtctttggtttcctcatttgtaaaatggagctaaactcccccatcttgcagggctgttgttaggatttgatgagccgatttaatccctgacacagtggatgcccagtaattagttggcattccttttagtgataagttgtaaaaggttaggcaagtgttggcagggctaggcaattgcctggccttgatgaggagtaaagtctactgccctctaggggctgcatgagtaacctgggcctcactagcatggtgtgctctactcscaggagtccttactggtccgtgaaggggaagtggggaatctgtcctagaacacaacccaccactacaccactgcctccttctggggctggcattacactcagccaggctagagagg

SEQ ID NO: 63125 - DNA, 1052 bp, Homo sapiens
aaaaaagtaaagaactctcaatgtaatcctcctctttaaaaagaagtctgtttgaaatgctgatcctttaacaaaaaattgacactattttgatttacaaagaaatagttttttttcagagttttaatttagtaaaacataaaggcaaaataatatataattatactaataaatgattgcatttttattttctatatctatctgatatagggacatagatgaatagacagatcacaatctcaaagcagtaaagataaaggcatttaaacaaatactaacatcaaattctcagaagtacagacctctccaaaaaaataaagccttgtagtaaaaacttaggagtttctgaatcagaatgcctaggtttgaatctaggatccatcagttaagtaaacttcaacaagctrcttaatctttctaaacatcagtgttcccacttctgaaagaggtttaacaatattatttattctcataacattctgagcatttaataacataaagtatgtgaagcattttgaatttatacttagcatagagtaagcattatgtaactattttagattactgttattatcattagttgtatctggttattcatagtcctcttcaggagcatagccctggacaggtaaccaatcccatttaaagagcagaatgtaaagcagtcttttatctaccaagggctttctcggtgccctgaggctccagagaattagttataatgtgtggccatgtttccagtgctctacaactatgtgttctggaaccttggtactgaacaaagctaaccaggacatatgggatatttgatactgctgtcttaatcagcagtctctaaaatcaggtggaaaaaagccaaagcaacagtttgaatatgtaccctgaaataaatatatgatcaatgtaaatgacccactgtactgataaattacattataaaacattctgaagaaagaactaaacaaaggtctgaacctttcttcaaactgtttccctggaaatatttcaggttaagaaaaatagggattgtcagctgtgttaccagcaacatt

SEQ ID NO: 63126 - DNA, 685 bp, Homo sapiens
tttcaaacgtgtcttttcttcatcctccctccccaagcccaattccttttgccaagacctatttatscagtacagcattttcttccttacttgttggtttgttccaactttcagggaactccagcaatttttcatgagaaagaaagttcttttttgccttgtttttatatcttctacatccttagcactatctgctaggatcaccaaactgtgttactagtgtagcttgataggactcttctctagtacagatgatgccttaacatcaggttatcaggatgcctgtcatccattcccatccccaaatttgacagttatttgcctaaataaactcctaagtatttcagctaaacacttagtgctaaatgcctccaactccattgttttgcccaaaatatgtattgttctaaaaagcccactactatttgttttgtagttaagctacaatatttccaaaacttttttatatgctagcattcaaggaggaaatccatgataagcaattattttagtacttgatttcacgaactattcatttcataaccaagtagattaagtagaaatccttattttcctaatattaatgtgtttttcccctatacttttatattgatctcctttttcctttgcagatggagactggaaggtgaccattgtcactggggatcttgaaaatgccggcacc

SEQ ID NO: 63127 - DNA, 727 bp, Homo sapiens
tcctgcggattcctggaggccatgtcttcttttactcttctgaggatgtcaatttcctgagtgtgttctgggaaggaggtggagaaagatggcccgcagcgatcctcccctctcaggaacaccaaattgaacaaccagccacacaagaaaacaccatcataagaaccaaaaatcagatgagtgatcgcagtacctggttttaagatcatatcagggaaagggacactgaagatggccgaaaagacaatcttgcactgcccacaccagccctccacatccccyacagcatgcagagaatccttgtgcttggggaagggacagtgaagtgactgtgagactctgccatggaactcagtgctgccctgtcacagcagagcacaacacaggacagaattcttcctgtgcccatgaagggagcatttagagcagtcccagccagaggggaatcctccaccccagcaatagaaactcgatttccagctaactctaccaccagcagactaaagcagtctagggtcctgtataaatttgaaaggcagtcaggccacaaggactgcaattctgtggcaagtcctggtacttcactggacttggagccagtgatcttgcaatgtatacaacccagtgcaacacaagctggagtggccaagggagtgcttgcctcacccctcccccagccccaggcagcacagctcaggaagaaactccactgcttggggaaaggaga

SEQ ID NO: 63128 - DNA, 1096 bp, Homo sapiens
cccccacaccccttctaccagacagagctttatcatacagcacagcatctactccagygaattcaagcccagtgagatttctccagggacagtaattggtcaacagaattcacaggagagctgaagaagcaaaccctaggccagttttccaagaatgacaaggagccgttcccgctacagccagtaagctcttgatggcacagagaagccactgttaaggtggctggctgtagagcaatgaggctcatgcttgagccacagtagcaaaaccagggcccacactctgcctctctccctgtttgactctgctcagaatgcaagtccctcataagtcatcaaattcatgttcttaagtcacctctggatctttggttgtaaaggagtctgagagatgctagccttcacaccctagaagagagggccagcctgctaggtaccaccctcccctgatacccgctcagaacactgagagcattgcatccgccacagaaagaaggtggcctcggcacaggtgtcggaagtgcctccaggttggaaacccccagccttcactggggcattgacagccgtgggaccttgcacgagacagcaaggacaagctgtccccttagtgcaagctgacagcacccaagcagacgggagtgaggagggggctggcaggtgcccgggaacctcggggacccatcctccaggctgtctgagcttccctggggcatcccagacttcctttggagagctgagttccaacagagagaagaagacagagccagaggaaccatcactgagtactacgacaaggctctagtccacccttgatcctgtgtggcctgagaggcacagggtccgtgggccactgtcctgtctgagggcctcacggaggctgccctgccccctgcctctaagggcacttcctgcctccctggactctcctttcttaccaaatccatgcagcattagagccctctccccagaaagtcactttgtgacttaggatcactgtcacaacaattcagcttcaataagacacttaaggaggtttaaaagaaccacatgatttaagtccatttgcttcagggacttatatcttgggaggcca

SEQ ID NO: 63129 - DNA, 1439 bp, Homo sapiens
tgagagcactccctaataaacctcatgcccacaaatctctatcttggaatctgcttcttcggaaccaaatctgggacagatcaatttacaaagatagaagggtttaggaaggcaaaagggtttctgttaccatgtctaggcctgaagggacaaagagaggaacttggagcaagagccatatggaaaaaacaatctgaaagattgtagggattctggcagaagcacaaggccaagccctggcaatccccacctcacatccctccgctctttcatctccccttagtgcctcccattgtagaaccaaactggaagtggtggtcagtggattcctttgtctgtttcttataggtcagcctcctggggcagagagcatgttagagtgtggatttggaggtgcaaatgaaagttaccctgtagcccacttgactctgtagatttctttttctcttacagaaaataaattaaattatgtatcttctttagagatagggtatgacttctattttgagttatctgtgtcatttaattaatatacaaataaaatgacatgacagaaaatacttacttgaatacaaaggacaagtaattagatcttagataataaatccatccctttagataagactttaggcaaatggatttataagtaaaagcaataggaaaacttgctacctaagcatgaaaaatgatgttcctgataaattcctggaaggaagctggtgtcagcccccaactcctttctaggcctctaccagcctatattccaaatggccctgccatggctcttcttttcttaagatttgatctttctccaggcatggatgaaccacatgtaagacatttaaacagcccaggtgccaaatttagtagggcttaggattacacaacattcccaaacctgggatctgaagggccaggtgctgaccaacaggatcccaaattcatcccaggggctctttgaccgataaccagaatgtgaattcaactgctggatgaccccatgcaaagctctccctggcgctgagtaatccagttcccttttcattaaaagccatctactttcccaggagggggaatccttctgcacagcccattcctatgactaagctctgtgttcacaaggaagatctyctctcagtcctgctatgcccccactgctgagcttggaaccccaatactaagtatagcctgtgtcacaattgttcttgctgagatcttctactattgcctgaacacaactcattcctgatcccctctagtgagtatgtccctggccatttttcagcacttttatcctcttttcttgctctgagttttcatggacagggtatctaggaaaaggaaaaggaagaaggaataaatcaaatgcctacagaccttcaaagagtgctccaaagccagtgtaaagcactggggaacagtgaggattagggcaaaat

SEQ ID NO: 63130 - DNA, 822 bp, Homo sapiens
tcagaaaggttttgtagcctgcccaaggccacacagttaaaatgtgttggagacaactcaaacccaaattcatctgactcccaagaccaagttccttccaacctcctttggtctcataagatcagagcaaaactagaatagatgtgcttcttaacccattttagttcttaaacacacacacacacacacatacacacaatctggcaaaggaccctcttcctagaggagggtgcctatcatttcagggaatccacaggtccccaaacctcgactctacatggatcccaagttaggagtccctatccttagggtaaagagctctgctcaacattcaaggtctgtatcagagaagagggcagtgtaacctggctggggttctgctaggactgcctttgaagagatgctacactgagccctgggtagctatgtgtgtgtgtgtgtgtgggtgtgtgtgcatgtgtgtgtgtgtgtagrtgtatgtgtaggctactataattttatagtaaataaaattctattgttgaaattgaggaccaatattttaagaaaatgtctacgtcaatagtgctatttattgcaaagtagttgcttctgaccgtatctgcaacaacaaaacagatatttacttaaaatgaaatgcttaaaaacagggtttttttttttttttgctagtaaatactagtaagaacaaaagtgtacccaccagtctaatgctcttaaacagctaacaaaaatcaacgtgaatgaaaacagtttactgtagtagtaacatggttggcagcagggccataataatctgtatccaaggcctctcatcccctc

SEQ ID NO: 63131 - DNA, 857 bp, Homo sapiens
gatttagggataattctatctggtgcttgtgtaacaggacaagccacagacaaaacccttcagacaccgagttaaagagggatgcggtttatttggctgggagcatcggcaaggctcctgtctcaagagctgagctccctgaatgagaattcctgtcccttttaagggctcacaactctaagggggtgcgtgtgagatggtcgtgatkgattgagcaaggagggggtacatgactgggggctgcatgcaccactagtaaccgattaggtcaggggtcgatctttaactaccaggcccagggtgtggcgctgggctgtctgcttgtggatttcatttctgccttttagtttttacttcttctttctttggaggcagaaattgggcataagacaatatgaggggtgttctcctcctttattcagagttctcttctctaggaattagtgtgtggagactctgtatacttgtgattcactgctaaatatgaaatttcccaatccagcagcaaacagcaaagagctgggttaaagttgtgcagactggttgaaacacttagccagacttaagcggcctgggtgggaccatcactcccaaagctgtcagcagagaaaggccctctgtgtcagtcaattcaagcctggtattgctttgcaattgagtcctcatcccatgggggaaggtctctgggggcttttcattcctttatactagtgttctggatataacttcctgcttcccactttcttttttgatttctcagaagaccagtgtctccctgtaaaccgtggccttctgtgcaccgagctcagtggctcttccccaccaaaactcctaagagaagtcatctctccccaaaa

SEQ ID NO: 63132 - DNA, 698 bp, Homo sapiens
cctcaggagcaacaaacctgccaacaacacaatctcgaaattctagccactagaactgtgagaaaataaatttctattgtttttagggcgccctgtctctggtattttgttatgggagtcctagcaaaccagtacaacatttgaacacagtgttagagcccttccagggtcttagaagggacacatgcaagcgaagggctctcaatcttcattttcattagctttatgataaatccgcccctttatgtggctcctaaggtagtgcctgggactgtaaaaagtctggacaaggaaggaaagaagggagggaaggagggaggaaaggaggaaggaaggaagaaagaagcaatgagctcagtgtcacaacaagcctttgaaagcatcttttcgtgattacatgtgggcatggtaatgtcagggcagcttttccaaccgcatctggtagagaagaggaagcagagacattcagagaagggaaacagcgtgagatgaagcctgagtgctgggcaggcttgaagagacatgaatttgcagcagaggtcagattacacaggaatttgtaatctcagtgtrgtgctctttccaccacctcacagcagctgcttacttgtgaaacaggtatttgtgcagctctttaacgcttaggaacttctattagaagacactgtggtagcagattgtattttccaaagtggtca

SEQ ID NO: 63133 - DNA, 848 bp, Homo sapiens
tactttcattatcaaacaaaaaataattaaatgaaattaatattgaattcagatgttgaattaacatctaaacaaaagaaacaaagatgaaagtaccaattaataaagtagaaaaatagaataaatatacaaaataagaactaattccttgaaaataaactttataaatagaaaagctactaatttaacctgtcaagaacgaaggaaggaaatgtaaatacacaaaactcaggatgaagaaggataaacaatagatgtggaaaaaataaaagaaattataagcaaatactttgcaactcctaataaatttgaaaaatgtgaaatggctttgatatttatatactaggctttaggttttataaaatatgtagcatctttagtttctataaattatttgaatattttcgtgaacctaccttccagggaagaatggacataaacttgttaattaggagtatctcattctcttcaagataaagagcctcctttctttaaaactgtccattttgggtaaatgctcagyctgtctaattttctgacatcttttctttcccaagatagtgcctggatattgttgaccacagaaattctgcatcatttggtgaggggaaccataaggctcagatgtgagagggtcctcataccttaccctagctcttctgtgtcctctattatcaagctctgcttctagtgaaactcctggtccaccttctcagtctgggtattactgataaggaggttagccagcttccatgtgagtagccttttctggtcctctaagatggggctgtgccttccaactgacttctgtcttgggccatgtgcccacaggttctcaaccacatttt

SEQ ID NO: 63134 - DNA, 523 bp, Homo sapiens
cttttggtctttgcactactgcttctttccctgcagactgtctttcacatatctaccagaggcatcttcccccataacaaagaggctcatgccatcatcctgcttaaagatttctgttggtttccactctctccttccaaaacgtgatatcatacatctccagttgcattttccttaccctgcccacaaaacactagactctaggcatatgcaactggactcttctcccaaagccaggcttttcatgctctgtgcctctatacctgacttcttatttgcttgktatgtccttctcatctttcttttttttaaatttaattttttttattatactttaagttctacggtatatgtgcacaatgtgcaggtttgttacttaggtacacatgagccatgttggtttgctgcacccatcaactcatcatttacattaggtatttctcctaatgctatccctcccccagcccccaccaactgacaggccccaatgtttgatgtacccgaccctgtgtgcatgcgttct

SEQ ID NO: 63135 - DNA, 983 bp, Homo sapiens
ggccatgtggaagactgtaacagaaagtccccagtttaccaccttccttaaccactggctgatccacgtaaggagagctccatgcagcaacccaaagcaaagacggagcattttcttcttcctagtagggcttgagttttgctttgcaaaataagcatataaatagtccaaacaaaccaacagttattaaattcacaatattaagttggacacgagatctgctggaagcactgaatgaaagtggatcatgacttcctggttttcaacagccacacacacccaactctgatgcctgaagctgctggtggcaatcatcaaacaaataaatacggggcctctaaaggagggtgggtacacgggatctttgggttttccaggagctgtgtctacataacaattcatatccttcttggtccagccacctgagaagtaggtggggaaaggctctggtaaggaaatggcccaataccataatcagctccaagtgaactgagcgccacgctcccctgcacactacaagactcggctgcctatgccccccgccttcctgctcgccagctcctccaagtggagagcccttccttcaccatgttaacctggctagccctccagtttcaaggctcagccttgcctgaccacagcccatggatagatttcttcctctgtgctcccaaaccaccctctgtttaatttgcttccagcgctcactgctctgaatrcccatcatggccccctcatttgtctctcccatttgcctggctgctcttccacaagagccctacccacttatctctgtatcccaagtattttgctcagtgcctgacacacaggagatgctcaataaatgtttgtttcatcaatgaattaatgtatccactttggcaaaccaccaaatcacatttttaaccaagactgctgctactattattacgataacggcaatgactactactgttaatactactaccatgaatagatgacat

SEQ ID NO: 63136 - DNA, 591 bp, Homo sapiens
tgaacagaagccagccctcgggcagacggagacaagcacatgcaaaggcccagaggcacaaagggctttcagagaatggccctgcacactgtctccacttcatagtgtagggaatagggcaccactcaagccctcccagcaaggaatttggggtcagggacagraattcagttcctggattcttcacttacgagctcacatgaacttgaccaagataggaaacctccagtctctgctttttcatctgaaaaatgcagaaaatcaagcctgcttcataaccacgtttcaaaggctccaatcgtgtcaatgtaaaggcataagaccctttacatggtgctacacagtggcctgaggtaaaaggataatactgcagagcactctgggagagcaggacacccaggaaacggctgctgtgaaacctcccgccctgggcaataagagaagttcctttaggagacatcatgaccccacgtcccctgccctcggctcacctctcgccctcatgctgtggagggccagtgtgtgcacatcgcctactcactcccacctccataaccatgaggtctgccctgtgctgccctcaggaccttc

SEQ ID NO: 63137 - DNA, 737 bp, Homo sapiens
ggttgcagtgagctgggatcatgccatggcactccagactgggcaacaagagcgagactccatctcaaaaataaataaataaataaataaaatgaaataaaaatatgaaaattagccgaacatggcagtggacacctgtaatcccagctactcgggaggctgaggcaggagaatcgcttgaacctgggaggcagaggttgcagtgagccaagattatgccactgcactccagcctgggcaacacagcaagactctacctcaaaataataataataataaagacactaataaccttaaatctggggcttgcataaagttttaagaaaaacagccagctgagggtggtggctcacacctgtaattctagggctttaggaggccaaggtgggaggattgcttgagcccagaagtttgaggccagcctgggcaatatggcaacaccccgtctcaatttaaattttaaaaaaagaagaagaaaagaaaagaaaagcagctaatacatgatcaaaggatatgctcatacaatccacgtttagaaaaacaggccaggcgtgatggctcgggcccatattcccagcaacttgggaggttgaagtgagaagactgcttgagcccacaagtttgtgaccagcctaagcaacacagcgagaccctgtctctacaaaaaaattttaaaaatgagccaggcacagcgstatgtgcctatactcccagctactcgggaggctgttgcaaga

SEQ ID NO: 63138 - DNA, 584 bp, Homo sapiens
tatgtttttaaaaggccggtaaataaagttcctatcgatttgaactcaagtgtaatctgtttttctgtctgccaccaacactggtaataaagcagaatcatgtaatacggtatttcagctaatgtgactatacatcactgcagggacgccctgctcggtggcgatctatcattttctattggtattgcttagctgcagaatttataaacttgctccaaattgatgcaatgttcaattttcttttccaatttatttttggttgagccaagcaatattgaggtctctgagcaagccgctgagcaccaccagatgttacctggaagacctcatgctccttgataggagtgaggagaacatgagccagtacttgccactctcaacaggcacagagacagagagccctggaaggagataggtgatggagaagaggtagcttcctcccctggggrctcagcaacaattgcgctctaggaaatccaggggctgaaggtgaaaggcaagagaacatccaagagagaaactgcagtaatgaacactcaagagtctgagactttcactaagctgcagacatcagttcagtaggt

SEQ ID NO: 63139 - DNA, 584 bp, Homo sapiens
tatgtttttaaaaggccggtaaataaagttcctatcgatttgaactcaagtgtaatctgtttttctgtctgccaccaacactggtaataaagcagaatcatgtaatacggtatttcagctaatgtgactatacatcactgcagggacgccctgctcggtggcgatctatcattttctattggtattgcttagctgcagaatttataaacttgctccaaattgatgcaatgttcaattttcttttccaatttatttttggttgagccaagcaatattgaggtctctgagcaagccgctgagcaccaccagatgttacctggaagacctcatgctccttgataggagtgaggagaacatgagccagtacttgccactctcaacaggcacagagacagagagccctggaaggagataggtgatggagaagaggtagcttcctcccctggggactcagyaacaattgcgctctaggaaatccaggggctgaaggtgaaaggcaagagaacatccaagagagaaactgcagtaatgaacactcaagagtctgagactttcactaagctgcagacatcagttcagtaggt

SEQ ID NO: 63140 - DNA, 1681 bp, Homo sapiens
ggctgaagagttggcaattttggaggccagtgaagagccacgtagaaaatgtcccgctgcctgccatcatcagcagctcctcttgctcccatcctgcagagagggctcccacacagagagcagacacagggacctctttaaaatgaagatgaaatgcacctggttctaccacctagttagaagcagttatgaaggttgaagagctgttatctgagatttatagccccaaatctatgagatagactctcctaattaataagacaaggatgactagaaagttgtgaaaactacctggcagggcttggagcctgctgtcaccaccacgatgatagcactgtctttgctgctgagcctattagaatgtcaggatgtgcattcttctctcctagtgggatggcacggttcacctggctattacagagaagcaagtgcagatcgtgacttaaggctccgggaggagagttaatcagggaagagctggttgacaagactcactcagtgcatgacttgagagcaccaagagggggaaagggagaagaaagaacctcttccaaaggcagcatccacccccttgacaaagggccatttcccccagcccggggtgctttctgacttcctttgttccccgatgagcattttcttccttgtccccagccttcacataagttcaattcaacatcctctctctcttctcccaatgtcctctccttaattttgctgcatcctccaatgtgaatgtttgcctcctggtctgggatmtgtcttattccctttatctcacctgaaaaaactctcccctttaatctctgctcattcaagtcctgcccatccttcaaagtatggccaagctcacctcttccagaaagccccaccctgtggtgttatctccatcctgaatcacagcagcacttactgtgagataactatcaggttacatctatcagagttcaatgcactctccccaaatgaagtggacacttgttggcagtaagaagagaagctttttgcaccaagtggtgcattcaatgcaatgcaaggagactgtgacgatactgaaatgagtattacccggccccaggagatgaacaccgtccttgcttgatgccagttcataaagagagctcttgtttattgagagcttatgagtgctgaggaattcacataaatcatctcatctaaattttccaacaatcatgagatggtttctcttatttcctccttttacgcatgaagaaactggggctcaggaggttagatgactttctcagagtcacacagatagtacagggctgacccagaattcaagcccaggtctggcagactccagcacccgccctttgcctccacgaccaagtacaagcagcaggctggcactggcctttccctgctatgactgccgagctgggttacacctgctgctggtccccagcaccaggcacacgacgtaactgtgagtctccgagtatgtgagggagctggcactcaccttctgcctgaagcaaaggagctgtgctcttccgtttcagtgtgaaaaagcctcagaagatgcccagcttagaaggacacaagagacagtctgtggacaacatctccacttcctggcgtcctcagcactgttgctagtgaagctactctgcccaaggtctccagagagcttctgaaagaagtcaggactcatgca

SEQ ID NO: 63141 - DNA, 1651 bp, Homo sapiens
agtgttgctgattcaatgatgtttgcccaaatgctgtttcctaagaactgttggatgcccaagatgctttctgagtctgttttctttttccaacaagcccgtttcttttcctggaagtgggacatggcatgaagccgtgtctgaacccaagtctattccaactcttttctaaacttggatcacattgcaatgagaggcccttcctcctacccctccctgaggtcctgagaggctgtggctgttagtaacactgactatatgcagcagtcttcctgcgtatgcgcctagacatagctccatacatccggatttcatttcattttcaaaccatgttgggaggaaggatgagtatctccatcatataaatgaagaactaagactagaagtcacaaatggcaggttccacagacagagctaggctcatagcccctgctctttctagcatcacacagacacacagacacacacacacacacacgcttgccatggagatgttttcagaccaagaacaacccctcctagtggcgctgcccagccctatcacagctcccgcctcacctggctgtttggacatgactttgctctctggcttcccagttctcccagaagaccagcttgctccaagaagcccctggctttgttccttttccagtccctcttcagtcccttcccaccatcaggcagtctcttttgactggttgtcctgattcgagatgctggccagcaagcattcctcccattcactcttgcctgttcaccttttccattgttttcaggagggtctcatcaactcagaccctaaaccaggggaggcattgcagtaagaagaagaacaagaatcatcccagctcaatcactcactggccaagtcctcaagcccattatttatttcttctaagccacggattttttttttttttcttaaagagtaggatgatatcttcctctatcacagggctcctgggggatccaggagtccttaygtgtggacatatttggtgaactgtgaaacacaagtcatacacaagctcttctgtgcccactgcccccaccctaatttgatcactatttctttccacccagcatttaccaaatgcccacatgtgccacctccttcacggagtacactgaggtcctctctcccaaccccactcacaaaccagttgcattccacagcaacaaatgacagattaaagccatggacatgtgaatgtcttgagttgactgtatgtgaaaggaatcagaagcatcagattttgacatctttaacctttatttgcataaaaagtagatatgaagagtgaagagttgtagtaacaccccaggccaagtagcatattcaagacagcatggcaggtgacacccaggatgtcagagaatgcgacagcagcactggggacatgaatcacataatgccacacatcagcattgccagcagagccaggataacttggcagtgggcacggaaacaccgtctgggtcagaaggtgctaagaagagctggtgtgttatcattagcaaagtaacacacagattcaaccaaggctgctaataccaagttgccatgtcttccaccctctccttctgccctctaactgacctcaggtcggtagctttcctttccctgcctgtgcagtgggacgccccactt

SEQ ID NO: 63142 - DNA, 1841 bp, Homo sapiens
ctccatccagtgccatgatccctaaagggccctgcacaaacgctcctgggtcctatcactgacaaaaacctctcacacaggaagggtctaatcatacaccttctttcattcaaatgcctctttgttggggttctggggagagggggcattcaggctgcagggagggatggtctctctctgggtctctctctgagggtctcagcctcctgcccccacaaagaccccccaggtttggagggcccaagcagagccgaccacatacacagccctcctggtcctgggagaggtgcattctggaaggcaggaaggagtctgtttctaaatccctttctcagtgccatcctccatcaaggtggtctccagatctgacacgtgttctgccttcccataaaatcaggctcaggagatggtgctycttggttctggatatacccctccctgccatctacctgcctggtagcctctgtgcctcccgcctccaagcctgccctgacttactggcaaaagagggtgtcctcgtccaagagggcctcatgggcacacgggctgttctcatcctcgtctccagtgaccaccatcatgagacccagtaacagtgctgctgtgaccagcctcattgtccaacccatgggcacctggaacagaaagaactttagagcggctggatcccctgcaggggccttcctgcccactacctgtgcccccgaccccaggggcccacttggcaggatagagacctctggttaagcacagggagaaggacaggcagcttccagggctccgcagctaatccagtccaccacccggacacaagtactttgggaggactgggcctcttccaagttggactcaatgtacgttcctggcagaggcccctcccctggcaggacacagctttgttgtcactcttgtcctggctgccagggcagagagcaggctgcaaagtagaagtgcttatataagctcctcggtgcagctccttgtccagtccctgctgttggcccagggatggtcagctggccaaaggccagcctgctccttggctgtaaggcaagccctgggaagctggtgaccccaggctcagggctaggagttgggctgtgcccctcagaccggctctgactctcctggcccccattcttccaccacctgtctccacagcctgtgagcttccccaaggtggaggtggttggacacagtgaccttgtgtaggagggactgctgcagggggtgggggtaggtgcaccccagaccgaggccagctccgaagggccagctccgaagggccagctgaggacagaagggtgcgtctgggtgcaccttgcagctgtgctgcactcagcactctcccaaaataatcgtatctggagaaggaggtctggggagctgcttggggctcagaaaggggtggcctgccccagcagtgcactgggaggaaggggagccggggactgtcgcctgcattcccttggggaacagtcctgccaccaggtgcatgtgggactctggtttgagcctgagtgggcagggagaagaataaaggcggcttgcaacaggctttccaatagctctgctctctgcttctcagaggcgggggtgggagagacgtgccagcaactcaggactcctggcttctgctctgagctctctctggatgctgggaggccactgtgtctccctagaatgcaccacttttccttttcacaaacaagtaaaataattcctgtcaccgtggtgccttgctaaggaatatgagatcatcgctgtaaagtacacgcagctagacctttagagaaactactttcagcatagtctgctttctggctcaattcctgcctcca

SEQ ID NO: 63143 - DNA, 1084 bp, Homo sapiens
aagcagctcactggaggtggtgggtagggggtaatctaataggaaggcagaaggctacgtggcaagtgactaatggaaactacatttgcatggtaaacacactctttttatttagtttacctgttatagattaatcaaaattgcaacactatctaaagaggcctttaataacacttcagataagctggagaaaacgtcaatcatgtatttcaaaaaataagcatgcccaggagtggcttgaggaagcagtaatggaaactttgatgaggacagaccctcccccaggcccatcacccatttgcaacactggaggttgtgtgctgttcctgtccaggcactatgctaagtgattaaatgtgttatatctcgtcatccccaatttacagataaaagctcggagggttagaaaggttaaatacattgccctactcacacagctggtgattttatttcaacgagcatctaaaaaaaaacataataaatgtatgaactaggattctgcactatccagcacagtagccattagtcacaaagtggctacttaaatggaaattaactaaaaattctgttcctgtttgcagttgtcccctttaagtgctcaacagccatgtcggtgaagggctaccatagaacatttcattaagaacaagatgacaggccgtgcacggtggctcacgcctataatcccagcactttgggaggccgaggcggttggatcatttgaggtcaggagttcaagacgagcctggcccaacgtggtgaaaccccgtctctactaaaaatgcaaaaattagctgggcatggtcgtgggcgcctgtgatcccagctactccggaggctgaggcaggagaatcgcatgaacccasgaggcagagcttgcagtgagccgagatcgtgccactgcactccagcctgggtgacagagcgagactccatctcaaaaaacaaaacaaaaacaagatgactacttcataactgagcactgcctcatgagttaactcacatttgcattgtgtttgtgatcaaattggcatagcatagcattccccagttgtccctggcaaatgagaaaagagcagagttg

SEQ ID NO: 63144 - DNA, 835 bp, Homo sapiens
tttcctaacgcttcttgccagttgggtcagaactagcttattaaccagttttttctgagctttaatcgaactggctccaaccagttggagacttgaaaagggctacgtgatagttatagatttttaaagatatattattattttagagtagtwttgagtgcacagcaaaatggagtgcagagtccagagatctcatatggcctcgattcctgtacactctcaggtcactccaccaacaacctcctacaccagagccactttgaaacattagaaaatatatttgagcattcagaaatgtataaactaggcagctccagactgcaagcagctcagagttccaacagagaggcttagggagggtgggggaagaattttatatggtgaatgtggaagaaaaaatacttgattgggtaaagtggagcagtggcctcatttggaacattacagtggaaagtctctagttagatattagttggtggtttctgactggttaagcttaagtttccttttattatttacactgagtcaagttttggtttatttaaggaggaattgagtgcactgcagccacctcagcctcatggccacctgtttatttgattatttttaaaagagaagagccttttaaaaatatctgttgccctggctggagtgcagtgacgtgatcatggctcactgcagccacaaccttccagctcaggtgatcctcccacctcagtgctccccaccctgagtagctgggactacaagcatgtgccagcacaccaccatgctaggctaatggtttgtatttttttgagagatgcagtttccctaagttgcttaggcttctttt

SEQ ID NO: 63145 - DNA, 835 bp, Homo sapiens
tttcctaacgcttcttgccagttgggtcagaactagcttattaaccagttttttctgagctttaatcgaactggctccaaccagttggagacttgaaaagggctacgtgatagttatagatttttaaagatatattattattttagagtagttttgagtgyacagcaaaatggagtgcagagtccagagatctcatatggcctcgattcctgtacactctcaggtcactccaccaacaacctcctacaccagagccactttgaaacattagaaaatatatttgagcattcagaaatgtataaactaggcagctccagactgcaagcagctcagagttccaacagagaggcttagggagggtgggggaagaattttatatggtgaatgtggaagaaaaaatacttgattgggtaaagtggagcagtggcctcatttggaacattacagtggaaagtctctagttagatattagttggtggtttctgactggttaagcttaagtttccttttattatttacactgagtcaagttttggtttatttaaggaggaattgagtgcactgcagccacctcagcctcatggccacctgtttatttgattatttttaaaagagaagagccttttaaaaatatctgttgccctggctggagtgcagtgacgtgatcatggctcactgcagccacaaccttccagctcaggtgatcctcccacctcagtgctccccaccctgagtagctgggactacaagcatgtgccagcacaccaccatgctaggctaatggtttgtatttttttgagagatgcagtttccctaagttgcttaggcttctttt

SEQ ID NO: 63146 - DNA, 835 bp, Homo sapiens
tttcctaacgcttcttgccagttgggtcagaactagcttattaaccagttttttctgagctttaatcgaactggctccaaccagttggagacttgaaaagggctacgtgatagttatagatttttaaagatatattattattttagagtagttttgagtgcacagcaaaatggagtrcagagtccagagatctcatatggcctcgattcctgtacactctcaggtcactccaccaacaacctcctacaccagagccactttgaaacattagaaaatatatttgagcattcagaaatgtataaactaggcagctccagactgcaagcagctcagagttccaacagagaggcttagggagggtgggggaagaattttatatggtgaatgtggaagaaaaaatacttgattgggtaaagtggagcagtggcctcatttggaacattacagtggaaagtctctagttagatattagttggtggtttctgactggttaagcttaagtttccttttattatttacactgagtcaagttttggtttatttaaggaggaattgagtgcactgcagccacctcagcctcatggccacctgtttatttgattatttttaaaagagaagagccttttaaaaatatctgttgccctggctggagtgcagtgacgtgatcatggctcactgcagccacaaccttccagctcaggtgatcctcccacctcagtgctccccaccctgagtagctgggactacaagcatgtgccagcacaccaccatgctaggctaatggtttgtatttttttgagagatgcagtttccctaagttgcttaggcttctttt

SEQ ID NO: 63147 - DNA, 835 bp, Homo sapiens
tttcctaacgcttcttgccagttgggtcagaactagcttattaaccagttttttctgagctttaatcgaactggctccaaccagttggagacttgaaaagggctacgtgatagttatagatttttaaagatatattattattttagagtagttttgagtgcacagcaaaatggagtgcagrgtccagagatctcatatggcctcgattcctgtacactctcaggtcactccaccaacaacctcctacaccagagccactttgaaacattagaaaatatatttgagcattcagaaatgtataaactaggcagctccagactgcaagcagctcagagttccaacagagaggcttagggagggtgggggaagaattttatatggtgaatgtggaagaaaaaatacttgattgggtaaagtggagcagtggcctcatttggaacattacagtggaaagtctctagttagatattagttggtggtttctgactggttaagcttaagtttccttttattatttacactgagtcaagttttggtttatttaaggaggaattgagtgcactgcagccacctcagcctcatggccacctgtttatttgattatttttaaaagagaagagccttttaaaaatatctgttgccctggctggagtgcagtgacgtgatcatggctcactgcagccacaaccttccagctcaggtgatcctcccacctcagtgctccccaccctgagtagctgggactacaagcatgtgccagcacaccaccatgctaggctaatggtttgtatttttttgagagatgcagtttccctaagttgcttaggcttctttt

SEQ ID NO: 63148 - DNA, 835 bp, Homo sapiens
tttcctaacgcttcttgccagttgggtcagaactagcttattaaccagttttttctgagctttaatcgaactggctccaaccagttggagacttgaaaagggctacgtgatagttatagatttttaaagatatattattattttagagtagttttgagtgcacagcaaaatggagtgcagagtccagagatctcatatggcctcrattcctgtacactctcaggtcactccaccaacaacctcctacaccagagccactttgaaacattagaaaatatatttgagcattcagaaatgtataaactaggcagctccagactgcaagcagctcagagttccaacagagaggcttagggagggtgggggaagaattttatatggtgaatgtggaagaaaaaatacttgattgggtaaagtggagcagtggcctcatttggaacattacagtggaaagtctctagttagatattagttggtggtttctgactggttaagcttaagtttccttttattatttacactgagtcaagttttggtttatttaaggaggaattgagtgcactgcagccacctcagcctcatggccacctgtttatttgattatttttaaaagagaagagccttttaaaaatatctgttgccctggctggagtgcagtgacgtgatcatggctcactgcagccacaaccttccagctcaggtgatcctcccacctcagtgctccccaccctgagtagctgggactacaagcatgtgccagcacaccaccatgctaggctaatggtttgtatttttttgagagatgcagtttccctaagttgcttaggcttctttt

SEQ ID NO: 63149 - DNA, 835 bp, Homo sapiens
tttcctaacgcttcttgccagttgggtcagaactagcttattaaccagttttttctgagctttaatcgaactggctccaaccagttggagacttgaaaagggctacgtgatagttatagatttttaaagatatattattattttagagtagttttgagtgcacagcaaaatggagtgcagagtccagagatctcatatggcctcgattcctgtacactctcaggtcactccaccaayaacctcctacaccagagccactttgaaacattagaaaatatatttgagcattcagaaatgtataaactaggcagctccagactgcaagcagctcagagttccaacagagaggcttagggagggtgggggaagaattttatatggtgaatgtggaagaaaaaatacttgattgggtaaagtggagcagtggcctcatttggaacattacagtggaaagtctctagttagatattagttggtggtttctgactggttaagcttaagtttccttttattatttacactgagtcaagttttggtttatttaaggaggaattgagtgcactgcagccacctcagcctcatggccacctgtttatttgattatttttaaaagagaagagccttttaaaaatatctgttgccctggctggagtgcagtgacgtgatcatggctcactgcagccacaaccttccagctcaggtgatcctcccacctcagtgctccccaccctgagtagctgggactacaagcatgtgccagcacaccaccatgctaggctaatggtttgtatttttttgagagatgcagtttccctaagttgcttaggcttctttt

SEQ ID NO: 63150 - DNA, 1555 bp, Homo sapiens
  misc_feature (1)...(1555): n = A,T,C or G
tgccttgaacanaatcccacacagaagggagtataacacagggactttttgcagaggtgggagcgggtttanagctggcctcacccaggggccagctgcagtgggaagctgtgagaccctcagcctgaaggcacggagagtccagggagacccggagggggcccgacacaggctggagtcacaggacaaggccattgtgaggatcttggtgctgagccaaggagggagcaggggagaaatacccagacctctctctctgcccatctccagtctgggcttcccatctctgggcctgacaggagccagagggctgagtcccccaggtggtataggccgtgagtgaggtctgtccctgggccttaggcaggacagagaagggcagagaatgaaccatgggacgaggaggtcgtggcacacagagaatcccctcaggtggctttgggccctggctgccagttccagggtgccaagagaagcctcactccgtatctgcgacattctcacatatttcaggaagaccctggggagaggcagccaggcctgcggggctccagggtgagcacaaagacggggtgtgcttggcccttggctgggagtggcctgtgggaagccaggtcttggccttgtcaagaatgcggtgatggatttcagagcacagcaggggcaggaagccataggtcgaatgagcccctggaggtcaggggcccaccagatgcattctcaccgtgcccccragagacacatcctacaggcccactgcaaggagcgcaatgaatgatcacagtagccaccatttagcgcacacctactgtgtgccatggctgtttgggctgcagttgagttattcacagaggtgcacagagcactgtcccatggcatgtgaaaccttgtggtgcagtgacattttaagctacaaggaataacccatgacagcctgcattgccttggagtgtcacttgcccgggaggtgacagcttctctcccgcacctggacagaggctgccttggcttagaagagaacacactttgcaggaaacatccagggtcctgtcactcagcagctgccagctcaggacctcctggccaggaacccagcttccctgcctctccatccctggctcagttcccattgtgtggccagcacagctgtcgtttcaggggccactggtggactctggatgatcatttacagattgggagggcgtgataaggccctcatgccctgtatgggttattaagaaatggcaccacaggggccaggtttccatgccagctccccctcactgtctctttctgcctatcttttattgtccactcttatctttccccctccccatgccccacccttgtgcaggtccctaagaccataaccttcttcaaactgctgctggcttttcctgaccctctgccccaggcccggaaggtaactttatcagcagggctagtgagggcttggctggggccccaaccctgtatggccagagagggagaaattctgccagcagagacccatggctgcccagtgatgtggaggaaagggattggaaggctaatc

SEQ ID NO: 63151 - DNA, 1555 bp, Homo sapiens
  misc_feature (1)...(1555): n = A,T,C or G
tgccttgaacanaatcccacacagaagggagtataacacagggactttttgcagaggtgggagcgggtttanagctggcctcacccaggggccagctgcagtgggaagctgtgagaccctcagcctgaaggcacggagagtccagggagacccggagggggcccgacacaggctggagtcacaggacaaggccattgtgaggatcttggtgctgagccaaggagggagcaggggagaaatacccagacctctctctctgcccatctccagtctgggcttcccatctctgggcctgacaggagccagagggctgagtcccccaggtggtataggccgtgagtgaggtctgtccctgggccttaggcaggacagagaagggcagagaatgaaccatgggacgaggaggtcgtggcacacagagaatcccctcaggtggctttgggccctggctgccagttccagggtgccaagagaagcctcactccgtatctgcgacattctcacatatttcaggaagaccctggggagaggcagccaggcctgcggggctccagggtgagcacaaagacggggtgtgcttggcccttggctgggagtggcctgtgggaagccaggtcttggccttgtcaagaatgcggtgatggatttcagagcacagcaggggcaggaagccataggtcgaatgagcccctggaggtcaggggcccaccagatgcattctcaccgtgcccccaagagacacatcctacaggcccactgcaaggagcgcaatgaatgatcacagtagccaccatttagcgcacacctactgtgtgccatggctgtttgggctgcagttgagttattcacagaggtgcacagagcactgtcccatggcatgtgaaaccttgtggtgcagtgacattttaagctacaaggaataacccatgacagcctgcattgccttggagtgtcacttgcccgggaggtgacagcttctctcccgcacctggacagaggctgccttggcttagaagagaacacactttgcaggaaacatccagggtcctgtcactcagcagctgccagctcaggacctcctggccaggaacccagcttccctgcctctccatccctggctcagttcccattgtgtggccagcacagctgtcgtttcaggggccactggtggactctggatgatcatttacagattgggagggcgtgataaggcyctcatgccctgtatgggttattaagaaatggcaccacaggggccaggtttccatgccagctccccctcactgtctctttctgcctatcttttattgtccactcttatctttccccctccccatgccccacccttgtgcaggtccctaagaccataaccttcttcaaactgctgctggcttttcctgaccctctgccccaggcccggaaggtaactttatcagcagggctagtgagggcttggctggggccccaaccctgtatggccagagagggagaaattctgccagcagagacccatggctgcccagtgatgtggaggaaagggattggaaggctaatc

SEQ ID NO: 63152 - DNA, 1555 bp, Homo sapiens
  misc_feature (1)...(1555): n = A,T,C or G
tgccttgaacanaatcccacacagaagggagtataacacagggactttttgcagaggtgggagcgggtttanagctggcctcacccaggggccagctgcagtgggaagctgtgagaccctcagcctgaaggcacggagagtccagggagacccggagggggcccgacacaggctggagtcacaggacaaggccattgtgaggatcttggtgctgagccaaggagggagcaggggagaaatacccagacctctctctctgcccatctccagtctgggcttcccatctctgggcctgacaggagccagagggctgagtcccccaggtggtataggccgtgagtgaggtctgtccctgggccttaggcaggacagagaagggcagagaatgaaccatgggacgaggaggtcgtggcacacagagaatcccctcaggtggctttgggccctggctgccagttccagggtgccaagagaagcctcactccgtatctgcgacattctcacatatttcaggaagaccctggggagaggcagccaggcctgcggggctccagggtgagcacaaagacggggtgtgcttggcccttggctgggagtggcctgtgggaagccaggtcttggccttgtcaagaatgcggtgatggatttcagagcacagcaggggcaggaagccataggtcgaatgagcccctggaggtcaggggcccaccagatgcattctcaccgtgcccccaagagacacatcctacaggcccactgcaaggagcgcaatgaatgatcacagtagccaccatttagcgcacacctactgtgtgccatggctgtttgggctgcagttgagttattcacagaggtgcacagagcactgtcccatggcatgtgaaaccttgtggtgcagtgacattttaagctacaaggaataacccatgacagcctgcattgccttggagtgtcacttgcccgggaggtgacagcttctctcccgcacctggacagaggctgccttggcttagaagagaacacactttgcaggaaacatccagggtcctgtcactcagcagctgccagctcaggacctcctggccaggaacccagcttccctgcctctccatccctggctcagttcccattgtgtggccagcacagctgtcgtttcaggggccactggtggactctggatgatcatttacagattgggagggcgtgataaggccctcatgccctgtatgggttattaagaaatggcaccacaggggccaggtttccatgccagctccccctcactgtctctttctgcctatcttttattgtccactcttatctttccccctccccatgccccacccttgtgcaggtccctaagaccataaccttcttcaaactgctgctggcttttcctgaccctctgccccaggcccggaaggtaactttatcagcagggctagtgagggcttggctggggccccaaccctgtatggccagagagggrgaaattctgccagcagagacccatggctgcccagtgatgtggaggaaagggattggaaggctaatc

SEQ ID NO: 63153 - DNA, 658 bp, Homo sapiens
gcctggggctgcacagctgcccacggtaaagcctgtgctcttgttatgctgttctgataaacgctgggtcagaagagcagcagacacactcygggcagggatggggctagctacctgggcctcagtattttacctttcatttcagcccacgtactaacaaaaatgtcaagatgtgttgcttttggctagaattgcagtaactccatgaaatcatgctgattatctcatggcaaaaataatagatgccatttagaagagaaaaacctttcaaagcaagtggcccactgaggggtgtaagtgctgatggtaatagcagtggtactatgaccaataagacatggtctcctctggtggtaatgtgctgagccagcctctggctaagaaagccaccgcccccacaccaaggcctgcggtagacattgccagttcatccccgcactctccctccaggccttggactcctctttaaccccaggctccaggcagtcattgccaaataaagcatgcctgcacctctttgccattcctggatctcagtagatgtaaatccagtaaatgtgggatcaaaatagattgggctgaatgagcgtggtagcactgtgtgttctgctgagaactttgtctacatctgactttcattaattcactgaacaaacag

SEQ ID NO: 63154 - DNA, 525 bp, Homo sapiens
cggtgccagtctcagctctgccgacgctctgtaggacccaagtgcagtatttcccctctcttgaccttggcttcccaatcttcaagaaatcagaggtgagaccgcgtgaccttttggcctataacaactgtggctttctccaactccggaaaaaatctacataagaactacaacaacgaggatgatggggatgcggatgatgatgataaacagaagtagcaactaccatttcaggaatgtttactcattgccagacaccaagctgacagctttgcacgtaggttttagtcttcaccaatgcgggaaagatgactgccttccctctataggtgatgaakttgatctggtcccctggtggcagagccagcaggacaactgtaaaccactcttctatccaaactcacaagtctggggttgtccgtctgattctacctgtaacatggtatcagaagtccctgtcttcccgcctcgtgcgtgtttggaggcccctgagagtgcactaaaggctcctaagagaatgtcgtg

SEQ ID NO: 63155 - DNA, 525 bp, Homo sapiens
cggtgccagtctcagctctgccgacgctctgtaggacccaagtgcagtatttcccctctcttgaccttggcttcccaatcttcaagaaatcagaggtgagaccgcgtgaccttttggcctataacaactgtggctttctccaactccggaaaaaatctacataagaactacaacaacgaggatgatggggatgcggatgatgatgataaacagaagtagcaactaccatttcaggaatgtttactcattgccagacaccaagctgacagctttgcacgtaggttttagtcttcaccaatgcgggaaagatgactgccttccctctataggtgatgaagttgatcyggtcccctggtggcagagccagcaggacaactgtaaaccactcttctatccaaactcacaagtctggggttgtccgtctgattctacctgtaacatggtatcagaagtccctgtcttcccgcctcgtgcgtgtttggaggcccctgagagtgcactaaaggctcctaagagaatgtcgtg

SEQ ID NO: 63156 - DNA, 525 bp, Homo sapiens
cggtgccagtctcagctctgccgacgctctgtaggacccaagtgcagtatttcccctctcttgaccttggcttcccaatcttcaagaaatcagaggtgagaccgcgtgaccttttggcctataacaactgtggctttctccaactccggaaaaaatctacataagaactacaacaacgaggatgatggggatgcggatgatgatgataaacagaagtagcaactaccatttcaggaatgtttactcattgccagacaccaagctgacagctttgcacgtaggttttagtcttcaccaatgcgggaaagatgactgccttccctctataggtgatgaagttgatctggtcccctggtggcagagcyagcaggacaactgtaaaccactcttctatccaaactcacaagtctggggttgtccgtctgattctacctgtaacatggtatcagaagtccctgtcttcccgcctcgtgcgtgtttggaggcccctgagagtgcactaaaggctcctaagagaatgtcgtg

SEQ ID NO: 63157 - DNA, 1341 bp, Homo sapiens
gaagtaaaatggctcttggagaagctggaaaaattagcaattaggagggaaaattgtaatgagaaaatgagccctaataaggcaaacacaatactgctgcggcttgtttcttgttctctcgctgcaaacaagcggtgacttcatgtctgggtttctttgctttcctgcaccagagccaactgggaaaaagctggagaaaaatgtctccattgtccctagacggcgctcctggcgtccaggaaaaagaaggcccacttactgccatttgtgaaacacttcctctgctcttggcccccaagagcacggtgcccacatacttccttagtcaggatgggctgggtcatgctgcagtaagacctccactctcccagtggcttaacacaacgacactgattctcattcacacgatgcattccacatagcttggcagggaagctcagctcatcatggtccttcagggacctagaataactggagggtccacgtggatccctccttccgtgattgtcatcacgggagaagaggaccatggtgaatctctcttactagctgttaaagctttcaccggccaggtgtggtggctcacacctgtaatcccagcactttgggaggccaaggcgggcagatcacaaggtcaagagtttgagaccagcctggccaacatggtgaaaccctgtctctactaaaaatccaaaaattagccaggcatggtggcgagcgccagtaatcacagctactccagaggctgaggcaggagaattgcttaaacccggatggtggaggttgcagtgagccgaggtcaagccactgcactccagtataggygacagagtgagactctgtttcagggaaaaaaaaaaaaaaaaaaaaaagctttcacccagaagggccattcatcacgtacactcacatttcattagcgaaagaagtcacttggccatacttaacttcaaagggacagggaacagtattcccaatgtgcactgagaaggggtgtggaaaatttgtgaccagctctaatgaggtccacacacattagctaatcttccccaaagcaggaaaatagtagctcttaatactaccttcctcactttacagagaagaaggctgagtctcaaacaagttcatccactcactcgtgtattcattcagccttggccacttacacattattcaacaactaaaaatgagttgaattcctgattctccatcattcagccaccatttctgttttaagttctaggatacttgtgcaaaacatgcaggtttgttacataggtaaacatgtcccatggaggtttgctgcacccatcaacccatcacctaggaattaagcgccgc

SEQ ID NO: 63158 - DNA, 1341 bp, Homo sapiens
gaagtaaaatggctcttggagaagctggaaaaattagcaattaggagggaaaattgtaatgagaaaatgagccctaataaggcaaacacaatactgctgcggcttgtttcttgttctctcgctgcaaacaagcggtgacttcatgtctgggtttctttgctttcctgcaccagagccaactgggaaaaagctggagaaaaatgtctccattgtccctagacggcgctcctggcgtccaggaaaaagaaggcccacttactgccatttgtgaaacacttcctctgctcttggcccccaagagcacggtgcccacatacttccttagtcaggatgggctgggtcatgctgcagtaagacctccactctcccagtggcttaacacaacgacactgattctcattcacacgatgcattccacatagcttggcagggaagctcagctcatcatggtccttcagggacctagaataactggagggtccacgtggatccctccttccgtgattgtcatcacgggagaagaggaccatggtgaatctctcttactagctgttaaagctttcaccggccaggtgtggtggctcacacctgtaatcccagcactttgggaggccaaggcgggcagatcacaaggtcaagagtttgagaccagcctggccaacatggtgaaaccctgtctctactaaaaatccaaaaattagccaggcatggtggcgagcgccagtaatcacagctactccagaggctgaggcaggagaattgcttaaacccggatggtggaggttgcagtgagccgaggtcaagccactgcactccagtataggcgacagagtgagactctgtttcagggaaaaaaaaaaaaaaaaaaaaaagctttcacccagaagggccattcatcacgtacactcacatttcattagcgaaagaagtcacttggccatacttaacttcaaagggacagggaacagtattccyaatgtgcactgagaaggggtgtggaaaatttgtgaccagctctaatgaggtccacacacattagctaatcttccccaaagcaggaaaatagtagctcttaatactaccttcctcactttacagagaagaaggctgagtctcaaacaagttcatccactcactcgtgtattcattcagccttggccacttacacattattcaacaactaaaaatgagttgaattcctgattctccatcattcagccaccatttctgttttaagttctaggatacttgtgcaaaacatgcaggtttgttacataggtaaacatgtcccatggaggtttgctgcacccatcaacccatcacctaggaattaagcgccgc

SEQ ID NO: 63159 - DNA, 724 bp, Homo sapiens
tcactgcctttctatgcactcacccattttttctctttcgtacttcttacattttttttttaatttttaaaaatgtttgtttatttatttatttatttattttttaagatgaagtttcgctcttcttgcccaggcaggagtgcaatggcacagtcttaagtcactacaacctctgcctcctgggttcaagtgattctcctgccttagcctctcaagtaactgggattacaggcacatgccaccaggcctggctaatttttgtatttttagtasagactgggtttcaccatgttggtcaggttggtttggaactcctggcatcaggtgatctgtccgcccccgccttccaaagtgctcggattaaaggcatgagccactgcgcttggccaaaaaatttttatttttaatagatcttctctaagattccatcttctccttcttcttcttctttttttttttttttttaaagacatggggtctcactatgttgcccaggctggtctcgaaatcctgtgctcaagcaatcctcccccttcagcctcccaaagtgctgggactacaggcatgagccaccaccatgcctggcttcctttttgcttcttaattctatacttgcctgttgttctttttttttcttctttttttaacttttaacattaatctaacttttagagataggatctcactatgttgcccagcctggacttgcaattccgggctcaaa

SEQ ID NO: 63160 - DNA, 724 bp, Homo sapiens
tcactgcctttctatgcactcacccattttttctctttcgtacttcttacattttttttttaatttttaaaaatgtttgtttatttatttatttatttattttttaagatgaagtttcgctcttcttgcccaggcaggagtgcaatggcacagtcttaagtcactacaacctctgcctcctgggttcaagtgattctcctgccttagcctctcaagtaactgggattacaggcacatgccaccaggcctggctaatttttgtatttttagtacagactgggtttcaccatgttggtcaggttggtttggaactcctggcatcaggtgatctgtccgccyccgccttccaaagtgctcggattaaaggcatgagccactgcgcttggccaaaaaatttttatttttaatagatcttctctaagattccatcttctccttcttcttcttctttttttttttttttttaaagacatggggtctcactatgttgcccaggctggtctcgaaatcctgtgctcaagcaatcctcccccttcagcctcccaaagtgctgggactacaggcatgagccaccaccatgcctggcttcctttttgcttcttaattctatacttgcctgttgttctttttttttcttctttttttaacttttaacattaatctaacttttagagataggatctcactatgttgcccagcctggacttgcaattccgggctcaaa

SEQ ID NO: 63161 - DNA, 724 bp, Homo sapiens
tcactgcctttctatgcactcacccattttttctctttcgtacttcttacattttttttttaatttttaaaaatgtttgtttatttatttatttatttattttttaagatgaagtttcgctcttcttgcccaggcaggagtgcaatggcacagtcttaagtcactacaacctctgcctcctgggttcaagtgattctcctgccttagcctctcaagtaactgggattacaggcacatgccaccaggcctggctaatttttgtatttttagtacagactgggtttcaccatgttggtcaggttggtttggaactcctggcatcaggtgatctgtccgcccccgccttccaaagtgctcggattaaaggcatgagccactgmgcttggccaaaaaatttttatttttaatagatcttctctaagattccatcttctccttcttcttcttctttttttttttttttttaaagacatggggtctcactatgttgcccaggctggtctcgaaatcctgtgctcaagcaatcctcccccttcagcctcccaaagtgctgggactacaggcatgagccaccaccatgcctggcttcctttttgcttcttaattctatacttgcctgttgttctttttttttcttctttttttaacttttaacattaatctaacttttagagataggatctcactatgttgcccagcctggacttgcaattccgggctcaaa

SEQ ID NO: 63162 - DNA, 724 bp, Homo sapiens
tcactgcctttctatgcactcacccattttttctctttcgtacttcttacattttttttttaatttttaaaaatgtttgtttatttatttatttatttattttttaagatgaagtttcgctcttcttgcccaggcaggagtgcaatggcacagtcttaagtcactacaacctctgcctcctgggttcaagtgattctcctgccttagcctctcaagtaactgggattacaggcacatgccaccaggcctggctaatttttgtatttttagtacagactgggtttcaccatgttggtcaggttggtttggaactcctggcatcaggtgatctgtccgcccccgccttccaaagtgctcggattaaaggcatgagccactgcgcttggccaaaaaatttttatttttaatagatcttctctaagattccatcttctccttcttcttcttctttttttttttttttttaaagacatggggtctcactatgttgcccaggctggtctcgaaatcctgtgctcaagcaatcctcccccttcagcctcccaaagtgctgggactacaggcatgagccaccaccatgyctggcttcctttttgcttcttaattctatacttgcctgttgttctttttttttcttctttttttaacttttaacattaatctaacttttagagataggatctcactatgttgcccagcctggacttgcaattccgggctcaaa

SEQ ID NO: 63163 - DNA, 805 bp, Homo sapiens
cctgatttaagcgcagttgttgatcaactcatgggcttggtgggtgtgatggttgattttatgtattaacttggaggctgcttttgaatgagattaacatttaaatcagtgaactttgggtaaagaagattgccctccatattgtagctgagcctcatctaatcagttgaaggcctaaatagaacaaaaagaccaacctctcctagcaagagggagtttttcagtaatgtctttggacttcatctgcaccactggctcttctggatctccagcttgctggaccgcaatgyaggttttggacttgctagcctccataatcacgtgagccaattccttatagtaaatctcctcctatatgtaaaaatatactattggttctacagtgggcaatgaaattgacaggaaagtaagaaagaagattgaaacatcagactagttcttgtgaggaaacttctcgtggaagcccctgtggccaggactggggcatgggtgtgaggaacagtatgatcatcattacagtggtgccagggtgtcaactacaaaggctgccaaattttgtattgaatttagtggatagtcacatattttgttttgttgaattcttttttttaagagtcttaaaatatctgactcgtaatttcataggctttaaaactggtagtttagtgctatggttccccaatgtgattatttggtcattggattcacctgaagagcttaaaaaaacaaaacaaaacaaaacaaacagaacaaacttcctttccccaccaaagtttctgatttatagatttgtggaagggtctgg

SEQ ID NO: 63164 - DNA, 805 bp, Homo sapiens
cctgatttaagcgcagttgttgatcaactcatgggcttggtgggtgtgatggttgattttatgtattaacttggaggctgcttttgaatgagattaacatttaaatcagtgaactttgggtaaagaagattgccctccatattgtagctgagcctcatctaatcagttgaaggcctaaatagaacaaaaagaccaacctctcctagcaagagggagtttttcagtaatgtctttggacttcatctgcaccactggctcttctggatctccagcttgctggaccgcaatgcaggttttggacttgctagcctccataatcacgtgagccaattccttatagtaaatctcctcctatatgtaaaaatatactattggttctacagtgggcaatgaaattgacaggaaagtaagaaagaagattgaaacatcagactagttcttgtgaggaaacttctcktggaagcccctgtggccaggactggggcatgggtgtgaggaacagtatgatcatcattacagtggtgccagggtgtcaactacaaaggctgccaaattttgtattgaatttagtggatagtcacatattttgttttgttgaattcttttttttaagagtcttaaaatatctgactcgtaatttcataggctttaaaactggtagtttagtgctatggttccccaatgtgattatttggtcattggattcacctgaagagcttaaaaaaacaaaacaaaacaaaacaaacagaacaaacttcctttccccaccaaagtttctgatttatagatttgtggaagggtctgg

SEQ ID NO: 63165 - DNA, 675 bp, Homo sapiens
cccaaaacatgaatggctcaagtgacataggtgcttttcccacccttccaggtttggtaagcaggtgcaggtgaacgtatcattcagcatccagaattaaagttttctctggtgtctgagagtcatccttgggaaatctcaatggattcaatgcaattcaagaacagcgacaacatatacatgtacatgcttttcttatctttggtccctttctcttacaaatgagagtaaacaatatctgcttaattgcttaactgagagtctggttagacagaatctcattaaaaaagagcaataatgacttaagttttctgttggacagatagagagagatggacacacacacgtagcagattgcttttctctatacaagttgaatttatctcagcagcttcctcttggttctttaagaagaaaatataagactttgccagcttaaaaaatttcataattggttatttggagctaagatcatctgattgtcatgcttaattgtgcaaataatgtctctaayttttttttttagcctcccaaatcattggcaatgtttaagaaaaggaatctatataccttcctatgatacttatatagttttctgattttaaattgccttttcttcacagtaaaagattgtttaaacttatcaaaatcactttgattttacacttagagtca

SEQ ID NO: 63166 - DNA, 1984 bp, Homo sapiens
aaagcaagagatcaaacttgcagcctcaagaccttttataactggcctaagtccattcataagggtggagccattatggcctaatcgcctctcaaaggtgccacctattaacactgttgcattggggattaagtttccaatatttgctttttgggggacacattcaatccatagcacctacaaagactttaaaactatccgggttttggccaggaacggtggctcacgcctgtaatcccagcactttgggaggccgaagcaggtggatcacgaggtcaggagttcgagagcagcctggccaacacagtgaaatcccatctctactaagaatataaatattagctgggtgtggtggcacccttctgtaatcccagctactcgggaggctgaggcaggagaatcgcttgaacttgggaggcggaggttgcagtgagccgagattgtgccactgcacttcagcctggccacagagcaagactctgtcttggaaaaaacaaacaaacaaacaaacaaacaaataaaacctatccagctttcttcccttgatatttgggaaacagtagctacgcctgaacttgctacagggtgttctttgttttgcatttttgtatcccttcggatacatggaagacttctttagttatcagaaaaagccatttattttctgagaccaccagtggagagttgcactaatccctaggcaatcccaactagagacacaatggaaatgcctattattaaatgagagacaagaagagccaagcagtaaggcttctgcaactcagaaaaaatggggcctgggtgctttgagagagcatctaaaagctggtcctgcaaagcctttggtgctcttcaaggctccccaggaaaatgcatttcatgtcaaagagcccaagcctaaatgggccagtattgaggtatttgccacattggacaggttcttgatgcttctccagaatgtgccacaaggcttaatttcagacattccttggatattagctgctctaatctcatactcaatattgtaattattataattatctctttaccatcatrataatccagtctctccttgaactactcaaatcaaggcagaccaatctgtggtaggatatattttaaaattctaacatttgtatatttgatattggatttttttttttactattagaaagtctttcatttgtgtgaattgtaatctgtcttcccatgactgctatgctctgaatttttttttcttataaatcactataacatatgtgtgtgcaaccaggcacaatctgttccctgtatcaaaatgcaaaatgtgcatatccttgactcagcaatccccattgtagaaaccttctctacagaaatactagcacagaggtagaaaataaaggtatgtgaggatgttcattggggtgccataatagtaccctccctaattttggaatagttcaaacaaaactagccagaccatttgacaggcctgctagagagagggattcctgcatcaggtggaagcttggattggttacctcaaaagcctgtccggttataagtccttggtttgctcatttatggggagagagtggagcagactgtcctggtcccactttctgctttctgagcttctctgctgagcaggagaaaaagatgaacctccattatgcagtaggagagggagtccagtgcacctgccacacatatgatgtttgcagactgcccagtgaagccacccaagagcattcttctgtagtcacaaaacctacaaggcctgccacagagacagtaacagggacaacagcagggttgggagtagcaggggcagcagcaggccccagagtagtgctgggcgcttggctgcatccaagtccacatgtccagaacagatagcacagcaatgtcaggggcagccagcaagggcccaggaggaaaaggagccaggatggtcacagcaggaccaccagcgcgtcctcagtgggtgttaaattagctg

SEQ ID NO: 63167 - DNA, 653 bp, Homo sapiens
atccccagagcttgcagtagggaacccagccctgtcaccaccttgagtgaggctttctggggccctgagcagatgactcagttgakccagagtttttgagagtggggctctgacctacagaactgtgagacaataaatgaaattgctttaagccactccatttgtagtaatgctatagcagcaataggaaacctacaccctgacatgtcaactaactactgcaagccaatgtgaatacgaccttcatggagtgtgtcccaggccatgggcagaagagggaatagccagctctgctagggaaagtgaagaaggcttctcagagaaggcatgctttgggtcctctagaggtggagcctgagatgagattccagtgcaagcaatggttttgggtgatgttcccaggaatcaacagtaagggagtgacagagtgagacagaaaaaaggaaagaagtcagtaaaagtgtgtgcggtggctcatgcccgtaatcccagcactttgggaggctgaggtgggcagatcatgaggtcaggagtttgagaccagcctggccaacacggcaaaacctcatctctactaaaaatacaaaaattagccgggcatggtggcgggcgcctgtaatcccagctactccggaggctgagtcgggagaatg

SEQ ID NO: 63168 - DNA, 669 bp, Homo sapiens
ttcattggagacagagcttgaagaattttatttgttttttatttttatttttatttttgtagagatcaggtctcactaagttgcccaggctggtcttgaactcctgggctcaagcaatcctcccacctcagcctcccaaagtgatgggattataggtgtgagccaccatacccacccaaaaaattttaaaggtcaaacaacagtgaaatcagaatgatttacagtagtccccccttatgtgcgattttgctctctgcagtttcagttgatctcacccaaccgtggttcaaaaatattacatggaaaactccagaaataaacaattcataaatttcaaattgtgcaccattctgagtattgtaatgaaatctcatgctgtcccactccatcccacctgggacattaattacccctgtccagcgtatctgaactgtacatgctacctgccccttagtcattcagtagccttttcagttaccagatggactgttgtggtatcacagtgcttgtgttcaagtaacccttattttacttaytaatggccccaaaacacaagagtagtgatgccagcaagtcagatatgccaaagataggccacaaaatactttctttaggcaaaaaggtaaaagttggccaggcacactggctcatacctgtaatcccagcact

SEQ ID NO: 63169 - DNA, 700 bp, Homo sapiens
tacttctactttcctcaagcccttcatcttttcagttacgccttccctgtcctgtatcaccactctttcccatccacatttaaaaagaatgctttttaaagcctttcactattggttatcctctagctaccaccatttctatgaatcctttcacagtaaaacttctggaaaattagctttatttctcacttcttatcaattcttcaactcagtcctgactggttactatactcatcacttcactggcacttctcttattagagtcatcaacgatgtacacgctgtcagatgtaaaagatatgtctgtgtcttcatttagcccagcttcttagcaccttttaaaatacttaaagactttttccttgaacactcttcttggctgtcttcagagaaattgcagaaaccrtattctcttggtttctcaactacttcactacctgttccttctcagtctgtttatctttctttaccttttctctaaatactgaagtaaattacagttcagttctaggctcactcttcttcatacattttttatacattttcttcctaagtaatctcattaattaccagagttcttttttttttttttttttgagacaggatctgtgttgcccaggctggagtgcattggtacgatcatagctcatggcagcctcccccttcccgggtctcaggtaattgtcctgccttagcctcc

SEQ ID NO: 63170 - DNA, 630 bp, Homo sapiens
tgcatcagctattgccccttcattattaggagccagagtaatattttcaaagcatatatcagcccttggctccagatcctttcagagcaaaagccgaagtctttgtggtgtcttaaaaagcctgatcagcacctctccttttccccaaaccatctctctgcccccctttgtgatcacatttgctacygttgactcctctggagccacactgacctcattgctgtgtctgggttatgtccggcaagctcccacctcagggcgttttgcagttacagttccttctgcctgaaatacccacgtggttcactctctgagttccttcaggtcctttcaaactatcactttattggagaagcctttcctgaccattctgtgttaagtaataattttccaccttgtattccttttctcctgctttattatgttccgttgtacttaccaacatctaatatatatattttttgaaatgtttccaagctataagtctaatatgttttgaactgtccagtatcgtagccactaatcacttgtggctattgcctacttaaaatgttgttagtctacttgaggaactaaatttaatagaggaactatatttgtaactgtatttaatttcggttaatttaaatg

SEQ ID NO: 63171 - DNA, 630 bp, Homo sapiens
tgcatcagctattgccccttcattattaggagccagagtaatattttcaaagcatatatcagcccttggctccagatcctttcagagcaaaagccgaagtctttgtggtgtcttaaaaagcctgatcagcacctctccttttccccaaaccatctctctgcccccctttgtgatcacatttgctactgttgactcctctggagccacactgacctcattgctgtgtctgggttatgtccggcaagctcccacctcagggcgttttgcagttrcagttccttctgcctgaaatacccacgtggttcactctctgagttccttcaggtcctttcaaactatcactttattggagaagcctttcctgaccattctgtgttaagtaataattttccaccttgtattccttttctcctgctttattatgttccgttgtacttaccaacatctaatatatatattttttgaaatgtttccaagctataagtctaatatgttttgaactgtccagtatcgtagccactaatcacttgtggctattgcctacttaaaatgttgttagtctacttgaggaactaaatttaatagaggaactatatttgtaactgtatttaatttcggttaatttaaatg

SEQ ID NO: 63172 - DNA, 671 bp, Homo sapiens
tgaaaagaagctatgttatctttcaactcttggattgtttttctggcttccttggattgggtttcaactgtctgttgaattttgttgagcttctttgctatccagattctgaattctaggtctgtcgtttcagatatttcaatatggttaggatatattgctggagacttagtctgatcatttggagatatggaaacactctgactttttgaattgctggaggtcttgcactgattccttatctgagagggctggtgtttctttatctttttgaaattgctgtcatttgaagggggctttttgttcttatgttctttttytcttttgagggtttgactgtggtatgtgttgtgtatagtcaattggcttcatttctgggtgttttcagggggcccaggctctgtatggattccttagttgtggctagttttctgcattgtttcacagatgatacatggtgaaggaatttgtttttgtttggtggcgtaatttaagctgagatccagtagatggcacttgacaataaaagccagcagataggcttttactcagccataggcctcctttgtatttcagtgtgtacacagcagtactctggggagagggagatggtagtggtggtggcaggggaagatgagtccctcacaaaatccattcctaggccttaggga

SEQ ID NO: 63173 - DNA, 671 bp, Homo sapiens
tgaaaagaagctatgttatctttcaactcttggattgtttttctggcttccttggattgggtttcaactgtctgttgaattttgttgagcttctttgctatccagattctgaattctaggtctgtcgtttcagatatttcaatatggttaggatatattgctggagacttagtctgatcatttggagatatggaaacactctgactttttgaattgctggaggtcttgcactgattccttatctgagagggctggtgtttctttatctttttgaaattgctgtcatttgaagggggctttttgttcttatgttctttttttcttttgagggtttgactgtggtatgtgttgtgtatagtcaattggcttcatttctgggtgttttcagrgggcccaggctctgtatggattccttagttgtggctagttttctgcattgtttcacagatgatacatggtgaaggaatttgtttttgtttggtggcgtaatttaagctgagatccagtagatggcacttgacaataaaagccagcagataggcttttactcagccataggcctcctttgtatttcagtgtgtacacagcagtactctggggagagggagatggtagtggtggtggcaggggaagatgagtccctcacaaaatccattcctaggccttaggga

SEQ ID NO: 63174 - DNA, 673 bp, Homo sapiens
catgagcatgtgagagtgtatgagtatgtgagtgtgtgtgtatatatgagtgtgyatgtatttatgtgtgagagcataagtgtaagcacatatgtgtgagtgtgagtgtatgtgtgtgcatgtgtgtatgcaaattaagaaaaggctgagctttgtattgggttttagcagtgtggaacagtgatgggaaacagaagtgtgaggggtctgcctcaggggtctgggggtcagtttccactgagatttgaatcgatctcattcaagtccatgggttagggaagacttaagtaagctcccagtcacagggctgactgacttacagtaagccaataaaaagaggtcagaacacccgtggtggagtcaaaataggacaaggaatcagatactctgcatcccagccctaattctatgtctgtctgttgaatcttggccaaattatttctccctctttgggccttagttccttcctacataaaatcaagactttggaccgtgtatgatctttaagcccttttcagctttaacactcctttggatagagttttataatttatttttattaatttttatgacccctcatttcctggcaaattgggataataatctgcctaagagctgttatgaagatcaattgaaatcatatttggaaatggactctgcaaactgcaatgca

SEQ ID NO: 63175 - DNA, 569 bp, Homo sapiens
  misc_feature (1)...(569): n = A,T,C or G
gatnnnnnnnnnnnnnnnnnnnnnnnnnnnnnnnnnnnnnnnnnnnnnnnnnnnnnnnnnnnnnnnnnnnnnnnnnnnnnnnnnnnnnnnnnnnnnnnnnnnnaatttcctataatttatctccctcaataatagaagaaaaatacaaaataaaaccaaaacatcatagaaacaaaaataaaattggaaggagcatcagaaattttctagaggaggggtggaccaagatagcagaatagaagkctccactgatctgggcccacccccaccacaagaacaacaatttaacaactatctatttttaaaaagtgcctttacagtaaccaaaaaccgattcccaggcaagatggcagaataggaacagctccagtctgcagctcccagcgagaccaatgcagaaggcaggtgatttctgcatctccaatgagttacctggcttacctcattgggactggttagacagtgggtacagcccacagagggtgagccaaagtagggtggggtattgcctcaccagggaagttgaagagatcggggaactccctccccaagcccagggaagctgtgag

SEQ ID NO: 63176 - DNA, 1549 bp, Homo sapiens
catcagaaaagcttctctcagaattaggcagggagccccaggatgcctcgtccacagaggccagctgtggtcctcagcaccatccaagtgggtgctcaaaccatagccatggcaccagagtagaaagccttcccygtgggcacctcccaccccaacacacacacacagagcatccacatttgagaaactcctatttaaataaactgaatagacttttatattatagaatttcttggattctttgatatagtgatgtgttttagaaattttgaagagaaaataagcatttcccaaacttgctagactataaatttttatatttttccaaagcatttcatggagcttatgttgcacaaaatattttagaaaatgctgaatttaaaaaaaaattaaaacttaccagttaaatctcatgtacgtttgcatatttaaaagcattcaaatcttgagaggggcatttggagacaatggaccctccctgcctgtatcttactgattcataggaggaaagaggaaaagggctcacagggagaatgaatggctgatttctaaatctcaaatgtctttcctggctttattatatttttccctcttacaaatgccaataatgatgaaaacagatgatggactaatctgatccaattgcattactgggatccaggctggttttgaacaatttgagaaaaacacacactgcccagactttacctcttcaggaaagatgtctttgtttttaaagctctctgtgaattttcagacagctaagatatgaaccatgaatgtcaactagaattctctggggatccagttcttatctcattctgttgcttctcacttacttggaagacctgaaccaaatgcaaggtttgaatgtgctatgcatttggacacatcagtcaaggatatcttagaaattcactatatccccattcaactgacatatatagagaaccatctatgactcagcattgctccagagggacagaaagatggtcttacccgctatgaagataggcagatatacaagtgcacagtcagctagctatgttaagagctcagatctgcctctgattccctgcaacatcagagatttgccatccttataaaaacaaaaaattagcttgtgacccttttataacatgtatagccacttttgtgagccaccacacatcctgcttccgacttctttacaattgtccatgcctctcacccactggcctgtcttccctttctcagtcctgccttactgcctagacctaaataagaatctcagcaaaccagctctggctctttgcttctcttagtcacaatctgaaccatccctctggttctgctgttctctcacctgtacttcctgcacctgctgactttgattggcccctctatgcaccctcttgccctcctgctcctaccctacagagaatcctggggattgatggccgtccctcccaccatacagagctgcagttagccctaattgtgagggttgattggcaaacagcctgtgaatggctgcactgttggcctcctccacccccaccagcggcag

SEQ ID NO: 63177 - DNA, 727 bp, Homo sapiens
ccatcttcagatctctaaactacagtgaatctaagctacaagttgacctagactagggtcggcaaatctttgggccagagaaaaaaatattttgggccttctggatcacagtccaaaaacacatcacaggaccaaaaacagtcatagaccatatgtaaaagaaaaaaaaaaagggtggcccctgtctgtgttgcagtaaaacattattgacaaatcgatgccaggtttagcctgcaatcagtttgccagctcttaacctagtcayaaactaacttcacatgtaggtactggttgatgtggaatggtcaggggaaaagtgggacagccctgatgctcccatactcgtcctccataagatgccaagaactaggtattccaccattagaaagtcattccattgaatcaagcattgatccatggagggaaaaaaagaggtgcctatcaaaatgcaagtaaaaggaataattgataaagattaagctttaatttgaagtggcatatagtgtaccttcctgctgactggccttgacttagctggaggacacccagcacctgcaggagggactattgaaaatggattgagcatgggaaaaggggaacagatctgatctttctctcaggtcttccacctccaatctgtccacttagactccttcccctgctatgttataatccacttccaagccaagatcccttcatcacaaagagcaaaccagaagagtggatc

SEQ ID NO: 63178 - DNA, 673 bp, Homo sapiens
acctatttctctatttaacacacactttatacttttgtaaaggcctttggaaaccctttgttgcaccagcaggtacttgtggcagaaaggtagaactgctttagccccacaaagcccagcagctgtgactgcccagataatgaggctggggctcgcccacctcttcacagctggggctttatttgatcttcataacaagtattgggatagacattattatcctcctttacagatgagaaaactgagccctatgaggttgagttattcacccttttccagactggtctgggtccttcctggatatgtaacaccctctctgaggctttgaaagctctgtattatggratacatggtagcctctcagggaccttttgaagtctgcatgtttattgccataaatggctgacagaatgaaagagacactggtcgttgggaggcaatggctgttttctccatttttccaaaggggagactaaggcccaaggaacattgttccttccacaccatctgctggtaactgtcttctccagtctcaaaagctgccccatcaacctctgtttcttgaacggcttgttctcatccagcactggctgggctttgggggaggaggtgcttctctgatttgcacttgcatgtgaatcatctggagagctggttaacaacgcagatttgg

SEQ ID NO: 63179 - DNA, 673 bp, Homo sapiens
acctatttctctatttaacacacactttatacttttgtaaaggcctttggaaaccctttgttgcaccagcaggtacttgtggcagaaaggtagaactgctttagccccacaaagcccagcagctgtgactgcccagataatgaggctggggctcgcccacctcttcacagctggggctttatttgatcttcataacaagtattgggatagacattattatcctcctttacagatgagaaaactgagccctatgaggttgagttattcacccttttccagactggtctgggtccttcctggatatgtaacaccctctctgaggctttgaaagctctgtattatggaatacatggtagcctctcagggaccttttgaagtctgcatgtttattgccataaatggctgacagaatgaaagagacactggtcgttgggaggcaatggctgttttctccatttttccaaaggggagactaaggcccaaggaacmttgttccttccacaccatctgctggtaactgtcttctccagtctcaaaagctgccccatcaacctctgtttcttgaacggcttgttctcatccagcactggctgggctttgggggaggaggtgcttctctgatttgcacttgcatgtgaatcatctggagagctggttaacaacgcagatttgg

SEQ ID NO: 63180 - DNA, 606 bp, Homo sapiens
tggggtggaatctaacctctctgaaagttatatggcagtctgacacttggaaaaaagtcatgttattatcaagaaaaagagtaggatggtttttggatagttagctaaaagtgtcttccatggtatttttagaagaattacaaagaaaaagaacaaatgcaagtctttagtacttaactcatagtagatactcagttactcatgccttgttaccatatggggcatgtgatggtctcacatggtgaatgargatttctctctcagcaagtgccaatagcgtcatcattgagaaacatgtaagggaaaatacatattctgaagaattctcctatagtaatagtagttgtagtagtagcagctgcagcaaaactgttttctaacttgaaataaaataaaaagctaacactttctgtttagcatgttttgaatttggaggctatgtataggtaaaatagaatctatctaaaccgaagaattacatgatacatttaacaaaaatacaaattatgtgtgctttttattttgtttctgttttcagtgaatgaactcattcttaaacagaagcaaagatttgaggaaaagaggttcaaattggaccactcagtg

SEQ ID NO: 63181 - DNA, 422 bp, Homo sapiens
ttatataattataatatataataaatatattatttatataattataatatataataaatatattatttatataattataatatataataaatatattatttatatttataacatacttgttattaataaatatttcattattaaaatatattttaaaataaggccaatataatattataaaatgcttaaagcatcatttcagcattcatcatattatttattttatatragtattacaagcttttttaaaagctttttttcaaaagtacataataaaaatctatatttttcacagtttaagagatataaaggcttttatgtctttggaagtatttattaaaaattacatcttaaatactctacagtggaaagtaagttagcctataatcctgataggggtcagagtaataacacagaatgga

SEQ ID NO: 63182 - DNA, 1864 bp, Homo sapiens
accatttatagaagagaaatgctgaaagataatkaacatgaaagatgccaaatgaagtgtttcgcactcattagatattcaaatattaagtcagacagagcaaggaaggggaaacaagatgttcctggactgcagatggcggtattgtaggcggaagtttggcaatacctaaagatgctgaacatgcacatactccatgacccagcagtctcacttcttggcttatgtccaagagaaattctggcataaacatatatgaagacttcttattgaaagcttgtggcacataatactgaaaaaagagaaacattgccaaagttgccaatagagaaatgaatgtatactttatagtagatttgggtggtggaacactttacagctgttaaaataaataaataagatttatatttagcaacatggctagaactaaaataatgttgcatgacaaagaaaaacagaatgaaaaatgttacatggtatataatgcccgcaaaacgtaatgccaaatattatttatgaatacacttacataaagtaaaaggtaaagtaaaattagtatggatatatatcaaatttaatgacaataactgttttgatggtagaggatagggactgaacctataatgcacatattagggattccaaatttacctgtgtcatttactcctcaataaatagaggaaactgatgttacaattctgtaagacttgggtattttgatatcgcttgcataaagattgttataatattttagtaatatgatattttgtaaaaacatgtaaataaatagtaaaaaagtgaatgtgagtttataagttgtacgtaaacattcttgaactacaagtgaaaaactaattgcaaaaataaacagattgcaatgaaaaagctagtaagtaacaagaaacaaaagctaccaaactctcagccataactaatagttaggggtttgggagtgagggtataaaggaaggaggagaaggaagaagggagaagtcagaataaatttatagcattctatgagtatcttcttgtctcaatcttattaaaatcatcaaacatctagcaagatagtaatcttcacaaagtcaaaataccagtgtaaaccgaattccagaaagttaaaacaagccccagtgtacaaaatgttcttttacctttagagcatttaaacatgcataaaagtagggaagacagaaatttagacttagaatacgaccaacaggagatcctccacagaataagccgatactgcaaaaggtaagagtgaaccccagggctgctgtggcaccgctgttggggcactgttcatgcagttttccatgtcaatagtgcctgctgggctatgcaatgtgtcagtattgggagaaagaagtaaaaatgtctccatcaaccacctcttaaggaaagttgtggagaggcagaaaggaataaagattcaagaaagcagtgaacatgtgtacatttaaatgagcaatagctgtgcaaaagaacagtaatagtgggaataagtaaagaaggatgtaaatgaagtcaaagtattcaaatttctttgtgctatttgggaggagagtgaaagtactggacaataagtgctctctaggtgggaagggaagtgggaggaaggtgctaggagggagaaaatagcataggcaaagtttcaaattaaatttaaaatttaaagcatctgttatgtgtatatatttgtgtattgaggaatatacaaaagaatgatcactagaattaatgttttttatccctctgatggatttcattggataccatgttccaggcactgttctaggaattgatttagaaatgacttaagaaaaagacatgctttctaagacaacactttccagagagt

SEQ ID NO: 63183 - DNA, 1864 bp, Homo sapiens
accatttatagaagagaaatgctgaaagataattaacatgaaagatgccaaatgaagtgtttcgcactcattagatattcaaatattaagtcagacagagcaaggaaggggaaacaagatgttcctggactgcagatggcggtattgtaggcggaagtttggcaatacctaaagatgctgaacatgcacatactccatgacccagcagtctcacttcttggcttatgtccaagagaaattctggcataaacatatatgaagacttcttattgaaagcttgtggcacataatactgaaaaaagagaaacattgccaaagttgccaatagagaaatgaatgtatactttatagtagatttgggtggtggaacactttacagctgttaaaataaataaataagatttatatttagcaacatggctagaactaaaataatgttgcatgacaaagaaaaacagaatgaaaaatgttacatggtatataatgcccgcaaaacgtaatgccaaatattatttatgaatacacttacataaagtaaaaggtaaagtaaaattagtatggatatatatcaaatttaatgacaataactgttttgatggtagaggatagggactgaacctataatgcacatattagggattccaaatttacctgtgtcatttactcctcaataaatagaggaaactgatgttacaattctgtaagacttgggtattttgatatcgcttgcataaagattgttataatattttagtaatatgatattttgtaaaaacatgtaaataaatagtaaaaaagtgaatgtgagtttataagttgtaygtaaacattcttgaactacaagtgaaaaactaattgcaaaaataaacagattgcaatgaaaaagctagtaagtaacaagaaacaaaagctaccaaactctcagccataactaatagttaggggtttgggagtgagggtataaaggaaggaggagaaggaagaagggagaagtcagaataaatttatagcattctatgagtatcttcttgtctcaatcttattaaaatcatcaaacatctagcaagatagtaatcttcacaaagtcaaaataccagtgtaaaccgaattccagaaagttaaaacaagccccagtgtacaaaatgttcttttacctttagagcatttaaacatgcataaaagtagggaagacagaaatttagacttagaatacgaccaacaggagatcctccacagaataagccgatactgcaaaaggtaagagtgaaccccagggctgctgtggcaccgctgttggggcactgttcatgcagttttccatgtcaatagtgcctgctgggctatgcaatgtgtcagtattgggagaaagaagtaaaaatgtctccatcaaccacctcttaaggaaagttgtggagaggcagaaaggaataaagattcaagaaagcagtgaacatgtgtacatttaaatgagcaatagctgtgcaaaagaacagtaatagtgggaataagtaaagaaggatgtaaatgaagtcaaagtattcaaatttctttgtgctatttgggaggagagtgaaagtactggacaataagtgctctctaggtgggaagggaagtgggaggaaggtgctaggagggagaaaatagcataggcaaagtttcaaattaaatttaaaatttaaagcatctgttatgtgtatatatttgtgtattgaggaatatacaaaagaatgatcactagaattaatgttttttatccctctgatggatttcattggataccatgttccaggcactgttctaggaattgatttagaaatgacttaagaaaaagacatgctttctaagacaacactttccagagagt

SEQ ID NO: 63184 - DNA, 1022 bp, Homo sapiens
ggatcgtttgagaatggaatgaattaaatgcttgtgaaatcctttcagcagtgccccagtaagcgctgcctaaatattagagagagccgtgttattcctggtggaaaaataacatgcatcagaaccagtcagttttgtccttaaatcctagttcttcacttcttgtcttgttaaattcattgagtctcatctttttcatctgtaaaatgaatgtaatacctagtctcagtagttgtagtaaggtgcagtgagaaaataatgtagcatgcctggcatataataaaatgctaataagtggcagtttatattaacataattgtgtaaataggaagactacaaattagctgacttgtttagttagtcaagccagccaacatatatacaattttaagctcatttccccaaatatcctctgagacaagccttgttaaaattgttgaacaaatgtctaaccagtgaactttgtgcttgcctttcaagaaaggcgtactctttgcctttgccaatacacgacttccactcctatggagttaarctgagaaacatgacttcatagaccatgagaattgcatgcaggctgaaattatggagaacaagctcctcattcacagatgaggtcagtgagattcacaaaggttaaactatccccccagagttgcacagctatttggccaaatttcttccaggaagctggactgaccccagcccatactgtttcttccattacattgcatttagtatttatatatgctcattttggatacttgtttatattacttcagggatgttctctctagcataggcatataaattttccccaagtcctatgattcttgaaaagcagaatcttggttgtttttttttttttttttagtccctgttaagcagatgcattcgtgttatgaacaaattgatgaatatttatttaaccagtgaaattgttatgtgtttcatatagactgaaaattctagtgcgtgaggaggaagtggagcaagatggtctaacagaagcctcctgtgat

SEQ ID NO: 63185 - DNA, 975 bp, Homo sapiens
tgcataatgctattaaacactgctatttctatttgaatatgagtaactatacagcaaattattacttttatcttctttttcaaaagaaatgttgctaaaggaagtattaaggttttttttaattttaggaattgcataaaatggacagggtacatyaggtgaatattctatgtgtgtttctaatgttttgatcttggaaacttaagtggacacatctaaaaatgatgatagtatcaattcctcataccaatttggtaaaaaacaaaacatatgctgtctgtgcacatcagaattagaagtaaatcactcactctctctctctgtgtgtatgtgcgtgtgtttatagagagaaagagtgcaaaattaaatatagttccttgttaattaaagtcatgaaaatatattgctctaattttaaagttatttaaggtattttttaattcatacattagccacgttattaatgagcaattacacatgctatattatagactatgtttttaacaaccacaaataagtttatagtaaggttacaatagtcacatactatgacacaaacatagccgtttagctgcacctgaagagcaatttttctagaattgtagatttcatgattcttttttccatgaaaagaatttactatcgcattgatttaatgattctttttccataaggattatttactgaaagctcaatctataaagtaatctcacagtaactaaacgaggacatatgtgacgctggaggaccaattcttgtttctcttaaacctggctgtaccactaactgattgcatatatttaagcaagttaaataacctctcctgtctcattttccttctctgtattacggaaatgatactagtgcataatttatatttttgttatgaagaataccagcaataatatatgtaaatggttcagtgactgacaaagagttgaccctcaactaatgttaacttacgataaccaaatg

SEQ ID NO: 63186 - DNA, 975 bp, Homo sapiens
tgcataatgctattaaacactgctatttctatttgaatatgagtaactatacagcaaattattacttttatcttctttttcaaaagaaatgttgctaaaggaagtattaaggttttttttaattttaggaattgcataaaatggacagggtacattaggtgaatattctatgtgtgtttctaatgttttgatcttggaaacttaagtggacacatctaaaaatgatgatagtatcaattcctcataccaatttggtaaaaaacaaaacatatgctgtctgtgcacatcagaattagaagtaaatcactcactctctctctctgtgtgtatgtgcgtgtgtttatagagagaaagagtgcaaaattaaatatagttccttgttaattaaagtcatgaaaatatattgctctaattttaaagttatttaaggtattttttaattcatacattagccacgttattaatgagcaattacacatgctatattatagactatgtttttaacaaccacaaataagtttatagtaaggttacaatagtcacatactatgacacaaacatagccrtttagctgcacctgaagagcaatttttctagaattgtagatttcatgattcttttttccatgaaaagaatttactatcgcattgatttaatgattctttttccataaggattatttactgaaagctcaatctataaagtaatctcacagtaactaaacgaggacatatgtgacgctggaggaccaattcttgtttctcttaaacctggctgtaccactaactgattgcatatatttaagcaagttaaataacctctcctgtctcattttccttctctgtattacggaaatgatactagtgcataatttatatttttgttatgaagaataccagcaataatatatgtaaatggttcagtgactgacaaagagttgaccctcaactaatgttaacttacgataaccaaatg

SEQ ID NO: 63187 - DNA, 642 bp, Homo sapiens
gggcaaagttccaggcaaggaactgctgtctttcttaagcctcagcaataaagtttggatattttcatctgtgtacttccataacttagacaaaaattaaaatttagtttaaaaaagggaaatagccttcaatggttttcataacatcttttgcccttccagaaaaaaactggcatgccaagttgccaagtttcaagggactataaggaaaacagcaaaaaataaaaataaaaagagagacagtaaaagttttctgctgcgtcttctccctccccagtgaatatctggggtccctcatcatttcctccacagtgggcaggtagattcagacctccagcctagaggatcccctcacagcagcatgcagacgaaggaggtaggaggcaggtaggttttccagcagggagagtggggattagggatttagctagtcattattgagtgcttgctaaatgccaagcagtatgcaaagaactggactctgtgtttgctccaatccttccaggaaccctgtgagatactgttatcttcactttyggatgaggacattgaggctaactgaggccaagtgactttccagagatctcttagttaacaagtggcagagctgctatcggaacccagacatgtctgccccccaaa

SEQ ID NO: 63188 - DNA, 600 bp, Homo sapiens
aggctctttttttgctttgtaatggagtcttgctctgttgcccaggctgaagtgcagtggcacagttatggctcacggcaccctcaatctcctgcactcaagcgatcctyccacctcagcctttcaagtacctgggaccacaggagcacaccaccacgttcagataatttttttttattttttgtagagatggggtcttgctctgttgctcaggctggtctcaaactcctgggctcaagcagttttcccaccttagcctcctaaagtgctgggatcacaggagtgagccatcacgcccatcctgggctctttctacatatctgctcaatgacatttagctagtacatcctcattgtcacacttgttaccttgtagttacaagatggctgctgaatagccagataggggtatttgctgtttcaggaaataccgctatcggggcattcattagtcagaactatgtcacatgacctgtcctgagggaagggaggttgaataaacaagtgttttttgctgggctggcctctgtcccccaggctggagtgcagtggtatgatcatagctcactgcaggcttgaattcctgagctcaagcgatcct

SEQ ID NO: 63189 - DNA, 600 bp, Homo sapiens
aggctctttttttgctttgtaatggagtcttgctctgttgcccaggctgaagtgcagtggcacagttatggctcacggcaccctcaatctcctgcactcaagcgatcctcccacctcagcctttcaagtacctgggaccacaggagcacaccaccacgttcagataatttttttttattttttgtagagatggggtcttgctctgttgctcaggctggtctcaaactcctgggctcaagcagttttcccaccttagcctcctaaagtgctgggatcacaggagtgagccatcacgcccatcctgggctctttctacatatctgctcaatgacatttagctagtacatcctcattgtcacacttgttaccttgtagttacaagatggctgctgaatakccagataggggtatttgctgtttcaggaaataccgctatcggggcattcattagtcagaactatgtcacatgacctgtcctgagggaagggaggttgaataaacaagtgttttttgctgggctggcctctgtcccccaggctggagtgcagtggtatgatcatagctcactgcaggcttgaattcctgagctcaagcgatcct

SEQ ID NO: 63190 - DNA, 1994 bp, Homo sapiens
aaaccggacaactatactacaacttgcagccacctgaatgtttctgtaaaaagctgctagacatttatatgaatttggttcagggaagggagcagggctagaggtttttagcatcagaatcagtaaagagtagttctgttttgcagagcagtggctcattatggactctggacagtgaggagygtcaataccctgatgataatctgtgtgggacaccagtgatgattctcatgttttcctgtcccctgaggatggcatggaagacacactgcacggctgcaggagggggggcgtccgggtacatgtaaatagcagccaagtgttcaccccatgctgctcccttgaagaaatccaaggtgccttccaatttttaaaatcaaaatgccaactttctgttcttacctttcctgcagattcctctgttatatataaagcttagacaaagaagctcttagtgtctttatgggtttgaaccaaacaaacaaactcataaatataagggccaaagatcattgtaggatgccactgagttgctcaaagttcaggtttatggttcatggctggtcacatgacattcagtggtgagagtgcagggaatgtcgttcattcatccaccatggactaaggccaatcacgtgtcatgcctagtggtagaaataggtatataaatagatatttctaatacaaaatcctcttatcgagaagctttctaatgtgtcttggccactagaaaaacatggtgggtctagagaaagaaaaataattttcttctttcaaaggtaacgcattaacctctttgtaatcatttggcagctagtatctaggttaagggcaactgatttacgtaagatgagcaataaagaaaatgcattaaaaggaatttgtccagatttccactttgtagtgagtggcaagaaaccaaagcaaaacacaacaaaacgaaaaccccgcaagtataactagcagaaaaagcttgggattccaatggtatttttagtcttttgaattaatctacaggtaaatgacttgaaccagtatgtcaaaagtgactgggcatagtggaatacagaaatgggcgctgaggacaaagacggctcaaggtcttacacagatcaggagcaccagcaaactttgagtcactttgagaattttgaaaggaaatgtaaagtagtggccctgaggataggattaaatgtaataatcatgttttgtggaagggtaaatggcaaaaacacagcgtgggcaagataggctgatttcatgtacaatgcacattcgctgaagtaatatttagaagcagaaaaaatggatacgtcttgggaaggggaatgtaataaaaccccacatcaacagcaaattattttgtcacgtgaagctgatgcaacatgaaaaatggatgagaagtgcggtacctcctgttgcgatcgtgtagaacatgtgggcagctacagagcagagctgtctcccatgagaattcatagcattaggttacagccctggctggaccaatgcagggacagctcctgcaagctggacgcagtggaaggtgaggggcgggccacgggtgggggaagtgggagtgcatggggaggggcctctggccaggagctctctgggactgcctggtggagagtttatacctggttataccaggaaatgctctgtcttgtgctgattcactatttggactttaaaatctggtaattacaagggcaacaacttcacattcattttggtcacttttatacatttcggtaaattcagtatttggggggctattacccaggacaaagaaatcgggttaacagaatgcaggagatgcttttgagcacgtgctcctgattgtacagattctcccgtttggccaggcacggtggctcgcacttgtaatcccagcattttgggaggctggagcaagaggattgcttgcttccaggagtttgagaccagcttgggcaacatagtgagaccctgtctctacaaaaaataaaaaa

SEQ ID NO: 63191 - DNA, 686 bp, Homo sapiens
caggcccagactctgcaggccttcactgatcctggccacccagaaaggctgcagcctgcgggcaccagccgggccacatgcccagtgccagctagggcccaccgcccatccttcacacagggctgctgggtaggtgcccctcacacccccaggatgtcagtgctcacctcgagcaaagtgccccagcttggccttgggaggcggtcatgtcccggggcatgatggagagctgtccaactgagagaragggagggagggaaggagggagggaaagagacagagagagagagagagagagaggaggtgtgggctctaaggctgccttagtggagttgtgcgtggcctgcacctcaccaagcctagccactctcaccgctctgagtggctcacaggcttgtgagggccccgtcgctgcctgctgggtccccaccagggctccctctaggaatgcgccatggctgctatgacaatttgcacagcccagtggcttaaacaccacacatttataccacaggtccagatgaatcctacagggccaaggtctaggtgtgctggaggccatgctccctccaggcttgcggggagaacttccctgcctcttctagtctctgcatccctgagctctcggctcctcctccgtcttcagggccagggcgtagcatctgctctctcagcctctgcctctg

SEQ ID NO: 63192 - DNA, 726 bp, Homo sapiens
atcagaaagttcttctttcttaaaatctgttcttgaattattcattcttctctagctttttgttgatctattttataattttagaaaaatcagaaagtaacttgaagtatctgtcatctctagaggtttacctccctctttgtggycttcagaatgccataacaggcttttcccatgctcatcacatggtttctatgtatgagacctcaccacaggagctgtggtccgccgggagcaggcatctgtggatggcgccttattccgggctgctgggacctgtgcgctgccagtggcactccacggcggtgatttcctagctcagtgttgcagctccagatggtgggtgagacactaggaccactttgtgaacagcgagggcttggggtttgcttttctaccatgtccagggctgctcttcatggggaatgtttctcacctgacgtcatggctgaagccaacttagaacctctctagccgtatggggagtatgtgagtgatacagatgttaattagctcagtggagccactcccctatgtagacatgttacaaaacattatgctgtacagaataaatataggtcatttttatgtgtcaatcaaaagagaaactaattattaaaaaaaaaacctctctactaaagcagaaacctcagctccagtcccagaagacacacaaggctgctcctgtcctgtgtatgttaaacctacctcacaaatgcaaggggc

SEQ ID NO: 63193 - DNA, 704 bp, Homo sapiens
acaatgtgtgatgatttaagtgagattaaggtttgtgcaattacagtatggaaggaggttggaagaaagatcatatggcataagggggtcagtggtaagggacatagaatatcaagattttaggtaataatggagtggtagaatgagacttctaggcataaaggagtaattaggacctggacaggttaggttgtaggacctaatcagccccaggctataaagagcttcaaaacaagaagataactcaacaagtgtcatcaaagaggcaccagatgatggtatatctccctgccactacaatgagaacaaatcaggagtcaggatgaaatgaaatctctatgaagaatttgaagaattcacactggtaacagaattttgagctcagtactgtaaagagtgaatcactgacagttaagttgcaaagaacattttacaaagaaccaagggacccccacaggccaataaccaagcaacaagcatttatcgggcaactaatagaagaaatgaagactaataaagatgtgacctccactccagagagcttacacattaayatgtatcatgaataatgtgagaacctgttcagtcagacctttccctagtcatagaagaagagactgggctaagagataatagcagctaacatttactgggcatgtcctgcttgccatgtgcccccctaaacacatgtgttttttgataca

SEQ ID NO: 63194 - DNA, 729 bp, Homo sapiens
gcacgttcgagtttgagaaccactgatatagctaatacagactgtgtgacttgctgggtgtagaaaaagcagctgaagaaaatcattttggagactggtaaatcttttgcagtcaaccaaaaaactaccccagagattaaattcagagtattaatcaactgttgatgtctgcatttgaaaagtgttgtgcacacagtttcatttgattctttaattcattctggaaggtagataaagcacaaaatcttgtcccaacaagcacaaggattcaacaaaggttactcagtaacagttgagggtggcaatgatgaggcaaatgaactcagtcttactgcaatacctgcccccatactccccttccaacgcagcattgtaggtctttaaatctagaagggacctgataattgatccatcttcctatagaagcttttccttcctacagaagcatctttctgtagaagcttttctcattgttcccctctcttcagcrcactcccattcatgaccatatttcagctcactatcaagaatccatgggtaccaatgggtagttatgttggtgtcctcactatcaagaatccacactgttccttcatccctatgagaatctggagaagtggggaagcaagcggcctttgtccctaacctcaagaggaccataagcccagcaatctagccaacactaaaggtaccattgtctccattttaaagatgagcaagccaaggatc

SEQ ID NO: 63195 - DNA, 985 bp, Homo sapiens
tagcctcctaagggcagctccttgggaagatgagatgatctggacactgaactaattcaggggaatgggaacttccggccccagatgcccatggtgtgatatatgcacttccacatcatgtgggcagagygcagccactccagaacttctagccctgggagacccgcactgtctgtgtgttttggatgtgtaacctgaagaggtgaaagcgtgagcagaaaagggagtgcacctggcgggtttagagggcaaggtggagatgaacctcgttggctgtgaccaggtcccaacctggaagtggtgaccaagaagggtgaactcagagatctggacattgaagaccgggttaaagtgtccaaacactctgttaggtttcttattccctatgttaaaagataaacttaggcacactgaaattgtaatgagtttatttgagcagacagtgattcatgaattgggcagcactggactccaagtgattgggcttcacctgggggacaggaagggaaacttttataaggtgttcacagaagcaagagaaagaaaatacattcaataggttaaagtggaaagcttctagttagaggttattttggtggtttctgattggttaagcttaagttttgttttactgtttacactgagttgggctttgttttgcttacctagcattgggacagtctcagcctcatgacttctattagttttttttagttttttttaaacacctacttggccacaaaccccaccctactttttgtgttagctgtaaatagtaataatagtagcaaaaatttctatagcacttcctgagttccaggcatcatccaaagcactttacaggtattaattcacttaatataatcatccctatagctctttgaggaggattctaacattatcttcattttgcagatatagaaactgaggcacagtgagggtcctttttcttatctctcctggcaaatgtggggcctccgttatg

SEQ ID NO: 63196 - DNA, 985 bp, Homo sapiens
tagcctcctaagggcagctccttgggaagatgagatgatctggacactgaactaattcaggggaatgggaacttccggccccagatgcccatggtgtgatatatgcacttccacatcatgtgggcagagtgcagccactccagaacttctagccctgggagacccgcactgtctgtgtgttttggatgtgtaacctgaagaggtgaaagcgtgagcagaaaagggagtgcacctggcgggtttagagggcaaggtggagatgaacctcgttggctgtgaccaggtcccaacctggaagtggtgaccaagaagggtgaactcagagatctggacattgaagaccgggttaaagtgtccaaacactctgttaggtttcttattccctatgttaaaagataaacttaggcacactgaaattgtaatgagtttatttgagcagacagtgattcatgaattgggcagcactggactccaagtgattgggcttcacctgggggacaggaagggaaacttttataaggtgttcacagaagcaagagaaagaaaatacattcaataggttaaagtggaaagcttctagttagaggttattttggtggtttctgattggttaagcttaagttttgttttactgtttacactgagttgggctttgttttgcttacctagcattgggacagtctcagcctcatgacttctattagttttttttagttttttttaaacacctacttggccacaaaccccaccctactttttgtgttagctgtaaatagtaataatagtagcaaaaatttctatagcacttcctgagttccaggcatcatccaaagcactttacaggtattaattcacttaatataatcatccctatagctctttgaggaggattctaacattatcttcattttgcagatatagaaactgaggcacagtgaggstcctttttcttatctctcctggcaaatgtggggcctccgttatg

SEQ ID NO: 63197 - DNA, 2055 bp, Homo sapiens
tctaactgaagagaatgtaataagcagaactagcttagaccaaccaagacttacctctaagtcccaagggggaggagtgaccacctgaacaaaatagacatgtgcccagagaaggcagggagtatggatgaaatgctggaaagtaccagcaatgctgttccaccaacccacagagcaggaacatggaattctccctgccagggtcagtaggggaggtgatctgatttgacctgtccgagagcacatgttctgacttctttttgggggcagggaataggacatttcttctaagtggaggaaatagcacgaataaccctgtggggagctgctttgcacagaaacagaagctgctgtggctgtagcacaggtgtgcattgggtgggggcaaacaggagaaacctgaatgatgatcaggaccagtggagaaaggcctggctgccaggcaacaagcagccgttattttaacccagaggttcagacaaagcaaggtattattggcatagtttctcactcagttaatggaggcattactgtagaaagatcaggtccagaaaatgtttcaagatgccgtgaccaaaaatatgtccttgggggcctgctggagggatgtggctagcctcagagggacatctttggcaggggcattgagtgtgatgggtactggtggtttatcagaatccttaaaagcacagactctggggtcagactgcctggacacacggcctgtcttcgctttctgctgctcaccttgcctcagttctctcacctgtgaagtggggataataattgtaaatattccatagggttaaataagttattcatgctggcatgtggacagccctctgtaattgttagctgttattgttgttaagggctgagaagggagtggagatgcattatcatgaggattctaatgaggaagcaagtggcaatttcgttgtgtggatttaaatttttttcccataaactgtagctgacagttgcttctaaatagaaggcaaaaggcccacagcttccaattacctgaaaattagcccacataccatctttgcctcaactgccaagtgacattcatggaccttccttttacctacaaagttgagtttgtaggtaactctacagatctaattggtaatctactaatattaattagagaagctcattagtttaagtgattagagctatgacccctacagtaaatattattaaagactaaagacctgattaaccaagattaaagtaagagagttgcaaattttcacctgacctaagaaaaccttttgctctccttctttcctgccctttcagagcttctctgttttccagacactataaaaaaccctaatgcttgcttgcaaaattagatcagtgtgggggttatcaaaatttgaagtccttgtacaattagcatacacagaagggatacaaagggaagatttcaaagaaattgacaactgcatacaatttggaaatgttctcactgattttgatttgcttaatttctaattaggacaaaaatttcaaacacacaaactattgaaagaataatacaaagaatmcgcctctgccctacacccagatacccagttccaacaactgttaacaggttaccatatttacttcctctctctctttctggtaatcatttgaaaacaagttgcagatatgttgacactatatagcttcaacctatatctcctgagaatgaagacattctcctacttaatcgtgagatcatcattatgcctaagaaaattaacaagaattccctagtatcatctaaaccaggccttatccagatttctctatttttagaagtatgatccaattatgggtctgctagtattgtttttaatggagagaagtgtgtgtatatctgtcactaagcttatgaaatgtgtgtgtgtatagtgctcatgtatgtttgtgtgtgacgtgtataagtatgaatgcatacatgcatatatgtgtgtgagcagtgttttgtgtccacatgtgtgatgtgtacatgtgcttgtatgtgtacatgcatgtgtgtgtgtgcatgtgtgtatt

SEQ ID NO: 63198 - DNA, 834 bp, Homo sapiens
atgcatagcaaatcacctcaaaatttagcagcttgaaataactactgtattgtactcatgaattttgcaagttaggaatttgaacaggttgkggtaggtatggtttgtgtctactccatacatctgaggcctcactgggaagacttgaaacctgggaatatctcaaagactggggctggaatcatctaagctctttcactcacatgtctggctcctggactagaatgactcaaagactatgatctgtgactagagcatctgtctgtggcttctccatggggcttgggcttccttacaacatggcagcctcagagcagtggaacttcttacacagaggctcagttctccaagcccttgggttccagtgaacaaagtagaagttgcctggtcttttatagcccagcctcagaagtcacagagcatcactttttgccatactctattagtagatgcagtcagaagcccacccagattcgaagggagaggatgtagagccccacctgtcaatgagaggagcattaaagaatttagggtctatgttttaaaagcattgcaactcctctcaaactcagttttcttatctgtaaagtggagataatcatgcctatcttctaaggttattataaggcttacatgagataaggtatttcaagtgctcagtgcagtgcctggcaccactcaataaatctcaacttttattattagaagtaacattagcaactaatgtttgtcattaggagtaaaaagtattttctgcattctttgcatggtaggcatatgtgcccagcttcatgcttgggggtgtaagggaagcctagaacccattctctgtta

SEQ ID NO: 63199 - DNA, 1059 bp, Homo sapiens
gcatacagttcctttactacttattgctaatttgagagctagagtcaggtcaggtgaaaagtagagctctttaaaaaatccaaagagaggtagagccaatgggagagtagcctcctggttctgagattttattttgcaaaggattttcacattgctagcttctgctcagtggctctttgaatagaagtattatacatatttagacaaatgtgcccctactcgtggattattcctcccttatgacagcaacagacatacagattatatatatattaataatatatttatataatttgtttttcaaagttacgttggaaaatctgaaaatggagaaaagaatcacccataataatcttactgtttcaccagaactatggatagctttctggggtatggcagccaggttaggaggtataacttatgtacagaaaaacatcacctttttcgaggaatacggttctatgaattttaataaattcagagtcatgtagccaactccacaatcaagagasagaacagcctcgtcaaaaatgtttccttttgtgctcctttgcagtcaatcttctttctccacataaagctcctgacaacaccttatctgtcctctgtctctataattttgcattttccaaaatgtcatataaatatttagaataatgtagtatgtagcctctcatgtccggcttctttcacttagcataatgcttttggggtttatctatgatgcacgtatcagtagttcattcctttttattgctgactaacattccaccgtatggatgtaccacagtttgattatccattcttcagtggatgaacattcgagttattttcattttttggcaattatgattaaggtgctataagcagctttacacatacacatacagccttttggttgcatgtgaatattctctttgataatattctctttcatgtctcttgggtaaatactcaggagtgggactgctaggtcatatggtaagtttatgtttagcttcataggaaactgcccagttgctttctgaagtggctgcaccactttgtcgtagtagcatc

SEQ ID NO: 63200 - DNA, 509 bp, Homo sapiens
taatgtgtatttttttgtagatacggggtctcactgtgttgcccagggtggtttcaaaatcctgggctcaggcgatccttccgtctcagctcccacggtgctgtgttaccggcgtgtgccccagtgcctggccgtcttggaggtcttgtttctctgggtttatgcctcaaggtggcgcctgctcccctgtgctccctggtagcctggtagtgagcctgcttctcacacagtcatacctggttgtggtcccacagtgggaccaccctgttgggttcagaacaggagatgggggcccctcgagtctgtgtgggggctgtggacagggttgggagaccttggctctgtgggggactgtggacaggggatggggggccttggccctgcgtgggatgggttgggggtccgtgcccttcctggccctgggtggacaggtccaggtggcactcggcatagggctgagatgggtgcagagggctgaggcccccaggcctctccyggcttggtttccc

SEQ ID NO: 63201 - DNA, 635 bp, Homo sapiens
ctgccggtgcccacaggccccgtgggtgggtgctgctgtgagcctggggtggtgggccctgctctccaggctctgagcctcagtttccccatctggaaagggggacagtgatggggctcccagcgggctgctgtgagggtgggaggatggaggagtgccctgagccccctggcatcccacacccgcccccaggagcctagacrtgtggatcggcttctcgactgtgcagcgggtggaggtgggcccagcgccgcagggcgaggccttcagcctggagagctgccagaactggctgcccggggagccacacccagccacagccgagcactgcatctggctcgggcccaccagccggggtgcccggcgcgtgtggccctgcccggcgtggacgtgagccggcctcagctggtgctgccgcggctggcgctgcctgtggggcactactgctttgtgtttgtcgtgtcatttggggacacgccactggcacggagcatccaggccaatgtgacggtggcccctgagcgcctggtgcccatcactgagggtggctcataccgcgtgtggtcagacacacaggacctggtgctggatgggagcgagtcctacgaccccaacctggaggatggcgaccagac

SEQ ID NO: 63202 - DNA, 597 bp, Homo sapiens
ctgaaaagcaactgagacttggttttgcaaaggagagccagttgaacagtgcctgagtctcactctagtcaccaacacagatttaagtaagctgcttctcaaaccagctggtacraagaaaagtccaggttcctaccataccattagagtgtagcgttgtctgctgagtagtgagtagctggtgcagtgcacaggtggcaaaaataatacaaacaactacaatggagatggttcctagttcagaacagaagttcccaggaccaggctaaaagtgatgattgcagtagtaaagcccccaaaagtctgaatcaggcaaagaatgtgaggcaatctaaaaaaagaaaaacaaatagtaacctgcttgcagagaaaaaatttatacatggaagagcttcactagacattcagcaatctatcaactacagccaagctatagaatcactgattgatatggtttatttgtttgcacaattgttgcttgttcgatttccttttttatctaattttgtccccaggttttttttttccccaaaatgatgtcctaagaaacatatattgtgtgcagtaatgatacactgatatttatcatcatttgca

SEQ ID NO: 63203 - DNA, 597 bp, Homo sapiens
ctgaaaagcaactgagacttggttttgcaaaggagagccagttgaacagtgcctgagtctcactctagtcaccaacacagatttaagtaagctgcttctcaaaccagctggtacgaagaaaagtccaggttcctaccataccattagagtgtagcgttgtctgctgagtagtgagtagctggtgcagtgcacaggtggcaaaaataatacaaacaactacaatggagatggttcctagttcagaacagaagttcccaggaccagkctaaaagtgatgattgcagtagtaaagcccccaaaagtctgaatcaggcaaagaatgtgaggcaatctaaaaaaagaaaaacaaatagtaacctgcttgcagagaaaaaatttatacatggaagagcttcactagacattcagcaatctatcaactacagccaagctatagaatcactgattgatatggtttatttgtttgcacaattgttgcttgttcgatttccttttttatctaattttgtccccaggttttttttttccccaaaatgatgtcctaagaaacatatattgtgtgcagtaatgatacactgatatttatcatcatttgca

SEQ ID NO: 63204 - DNA, 597 bp, Homo sapiens
ctgaaaagcaactgagacttggttttgcaaaggagagccagttgaacagtgcctgagtctcactctagtcaccaacacagatttaagtaagctgcttctcaaaccagctggtacgaagaaaagtccaggttcctaccataccattagagtgtagcgttgtctgctgagtagtgagtagctggtgcagtgcacaggtggcaaaaataatacaaacaactacaatggagatggttcctagttcagaacagaagttcccaggaccaggctaaaagtgatgattgcagtagtaaagcccccaaaagtctgaatcaggcaaagaatgtgaggcaatctaaaaaaagaaaaacaaatagtaacctgcttgcagagaaaaaatttatacatggaagagcttcrctagacattcagcaatctatcaactacagccaagctatagaatcactgattgatatggtttatttgtttgcacaattgttgcttgttcgatttccttttttatctaattttgtccccaggttttttttttccccaaaatgatgtcctaagaaacatatattgtgtgcagtaatgatacactgatatttatcatcatttgca

SEQ ID NO: 63205 - DNA, 2390 bp, Homo sapiens
tacagctgcttttttaaaagaagatgcagaaagagtacacacactctcaaaagaagaattaattgttcataagccaaaaaagatggtgcttcttgcttctaggtctcaggggaatatcttttggtctctggcaaaagtaaaagtataaaaggaagaaagtggctttggacttagaaagaatcgggttctcattaagtgactttgcataagcatcttcttgtatacaagcctccgtctcttcacttgcaaaatagaagtaacagccccttgctctttgggaaggcatgaaatagatacaaagtgttttccccaggccctactcctaatgaaaggtggcaatagtaggtgtagggaagtatggaagaaaaaaatggagatggacagggggccctgaccagtagaaaagaggtgttttgtttccttgtttgtttggttttggttttttgttgttgttgttttcagatggagttccactcgttgcccaggctggagtgcagtggcgcaatctcggctcactgcaacctccacctcccgggttcaagcgattctcctgcctcagcctcccgagtagctgggactacagatgtgtgccactatgcccggctaatttttgtattttcagtacagactgggtttcactatgttggccaggctggtctcgaactcctgaggtttttaagatgtgatgctactgcagagaaatgatcctcccacctcagcctgctgtgggagccctgggatactctgaatctgtcacaaaggagagattccccccaatgagcccagcctgaaaaatcactgccaacacctcctaccaggatgaaggaaggaggagccacaggcccataattaaggcatgtaagggaactatggccacagaagcagaaccctggactccactcctggctctggtagaaatgccccaaaaaaccacttcccttttctttatttttaaaatcattattgatatataataattgtacgtatttgggaggaacatgtatttggttttgttttgttttgagatacagtctcatctgggctcactgcagcctctgcctcccgggttcaagtgattctcctgcctcagcctcccaagtagctggaattacagatgtgtgccaccacacctggctaatttttgtattttcagtagagacggggtttcaccatgttggccagactggtttccaactcctgggctcaagcgatgtgcctgcctcagcctcccaaagtgctgggattacaggcgtgagccacctcgcccggccacatgtgatattttgatgcatgtatgcaatatgtttgaggctctggatggctcaattgccccgatttgaacattacacttcaattttctcgacttttccctcttcataaaagaagttctaacagtcaactacaatgcctctccaggcctttgttttctcatcccttgagtggaacataaaacatgtaactgcttatatcacagagatgcttcagggctccagggagaaatgtgcaaaatcaatgtctctgtcaattgcaaagcactatacaaatgaggggacacagcagtgccttgtcatcagctgcttggcgtttcccagatgattcgcaggttttagcagttccagaagcttgattcaaactcccaaaattcaactgttttatgtgcactgtctcagacccataaatgctccagaaaccatctgcctacccttgacacttatttcttttcaggccatatcctgagcccatttttatgaattaagtccttctgacacctggactattcatcaaccagccacctaaaaatggcacaaaggcatcagccacagcttaatcatgtggcacccagcagatgcccaggaaatatgggattaactggactgactcacaaacacatccaataatccattagcttccttggctcaggttggcttggcaagattcacagagggaatttcttaaaaaaaaaaaatcaatgcaaaaccaaaacaaaagtgtatgctcttaaaacttaggaggacagccaggtrtggtggctcgcacctgtaatccccatactttgggaggccatggtgggcggatcacttgagctcaggagttcaaggccggcctgggcaacatggcaaaaccccatctctacaaaaaattgcaaaaattatccaggtgtggtggtgtgtgcctatagtcccaactacgtgggaggctgatgtgggaggatgtcttgagcccaggaggcagaggttgaagtgagctgtgattgtggcaattcactccagcctgggcagcagagccagaccctgcctcaaaaataacaataacaaaaaaacttatgaggacaacaaacgtctccccgtgcctatcactagaacggtgaaatttagaacacagcagaagca

SEQ ID NO: 63206 - DNA, 2390 bp, Homo sapiens
tacagctgcttttttaaaagaagatgcagaaagagtacacacactctcaaaagaagaattaattgttcataagccaaaaaagatggtgcttcttgcttctaggtctcaggggaatatcttttggtctctggcaaaagtaaaagtataaaaggaagaaagtggctttggacttagaaagaatcgggttctcattaagtgactttgcataagcatcttcttgtatacaagcctccgtctcttcacttgcaaaatagaagtaacagccccttgctctttgggaaggcatgaaatagatacaaagtgttttccccaggccctactcctaatgaaaggtggcaatagtaggtgtagggaagtatggaagaaaaaaatggagatggacagggggccctgaccagtagaaaagaggtgttttgtttccttgtttgtttggttttggttttttgttgttgttgttttcagatggagttccactcgttgcccaggctggagtgcagtggcgcaatctcggctcactgcaacctccacctcccgggttcaagcgattctcctgcctcagcctcccgagtagctgggactacagatgtgtgccactatgcccggctaatttttgtattttcagtacagactgggtttcactatgttggccaggctggtctcgaactcctgaggtttttaagatgtgatgctactgcagagaaatgatcctcccacctcagcctgctgtgggagccctgggatactctgaatctgtcacaaaggagagattccccccaatgagcccagcctgaaaaatcactgccaacacctcctaccaggatgaaggaaggaggagccacaggcccataattaaggcatgtaagggaactatggccacagaagcagaaccctggactccactcctggctctggtagaaatgccccaaaaaaccacttcccttttctttatttttaaaatcattattgatatataataattgtacgtatttgggaggaacatgtatttggttttgttttgttttgagatacagtctcatctgggctcactgcagcctctgcctcccgggttcaagtgattctcctgcctcagcctcccaagtagctggaattacagatgtgtgccaccacacctggctaatttttgtattttcagtagagacggggtttcaccatgttggccagactggtttccaactcctgggctcaagcgatgtgcctgcctcagcctcccaaagtgctgggattacaggcgtgagccacctcgcccggccacatgtgatattttgatgcatgtatgcaatatgtttgaggctctggatggctcaattgccccgatttgaacattacacttcaattttctcgacttttccctcttcataaaagaagttctaacagtcaactacaatgcctctccaggcctttgttttctcatcccttgagtggaacataaaacatgtaactgcttatatcacagagatgcttcagggctccagggagaaatgtgcaaaatcaatgtctctgtcaattgcaaagcactatacaaatgaggggacacagcagtgccttgtcatcagctgcttggcgtttcccagatgattcgcaggttttagcagttccagaagcttgattcaaactcccaaaattcaactgttttatgtgcactgtctcagacccataaatgctccagaaaccatctgcctacccttgacacttatttcttttcaggccatatcctgagcccatttttatgaattaagtccttctgacacctggactattcatcaaccagccacctaaaaatggcacaaaggcatcagccacagcttaatcatgtggcacccagcagatgcccaggaaatatgggattaactggactgactcacaaacacatccaataatccattagcttccttggctcaggttggcttggcaagattcacagagggaatttcttaaaaaaaaaaaatcaatgcaaaaccaaaacaaaagtgtatgctcttaaaacttaggaggacagccaggtgtggtggctcgcacctgtaatccccatactttgggaggccatggtgggcggatcacttgagctcaggagttcaaggccggcctgggcaacatggcaaaaccccatctctacaaaaaawtgcaaaaattatccaggtgtggtggtgtgtgcctatagtcccaactacgtgggaggctgatgtgggaggatgtcttgagcccaggaggcagaggttgaagtgagctgtgattgtggcaattcactccagcctgggcagcagagccagaccctgcctcaaaaataacaataacaaaaaaacttatgaggacaacaaacgtctccccgtgcctatcactagaacggtgaaatttagaacacagcagaagca

SEQ ID NO: 63207 - DNA, 2390 bp, Homo sapiens
tacagctgcttttttaaaagaagatgcagaaagagtacacacactctcaaaagaagaattaattgttcataagccaaaaaagatggtgcttcttgcttctaggtctcaggggaatatcttttggtctctggcaaaagtaaaagtataaaaggaagaaagtggctttggacttagaaagaatcgggttctcattaagtgactttgcataagcatcttcttgtatacaagcctccgtctcttcacttgcaaaatagaagtaacagccccttgctctttgggaaggcatgaaatagatacaaagtgttttccccaggccctactcctaatgaaaggtggcaatagtaggtgtagggaagtatggaagaaaaaaatggagatggacagggggccctgaccagtagaaaagaggtgttttgtttccttgtttgtttggttttggttttttgttgttgttgttttcagatggagttccactcgttgcccaggctggagtgcagtggcgcaatctcggctcactgcaacctccacctcccgggttcaagcgattctcctgcctcagcctcccgagtagctgggactacagatgtgtgccactatgcccggctaatttttgtattttcagtacagactgggtttcactatgttggccaggctggtctcgaactcctgaggtttttaagatgtgatgctactgcagagaaatgatcctcccacctcagcctgctgtgggagccctgggatactctgaatctgtcacaaaggagagattccccccaatgagcccagcctgaaaaatcactgccaacacctcctaccaggatgaaggaaggaggagccacaggcccataattaaggcatgtaagggaactatggccacagaagcagaaccctggactccactcctggctctggtagaaatgccccaaaaaaccacttcccttttctttatttttaaaatcattattgatatataataattgtacgtatttgggaggaacatgtatttggttttgttttgttttgagatacagtctcatctgggctcactgcagcctctgcctcccgggttcaagtgattctcctgcctcagcctcccaagtagctggaattacagatgtgtgccaccacacctggctaatttttgtattttcagtagagacggggtttcaccatgttggccagactggtttccaactcctgggctcaagcgatgtgcctgcctcagcctcccaaagtgctgggattacaggcgtgagccacctcgcccggccacatgtgatattttgatgcatgtatgcaatatgtttgaggctctggatggctcaattgccccgatttgaacattacacttcaattttctcgacttttccctcttcataaaagaagttctaacagtcaactacaatgcctctccaggcctttgttttctcatcccttgagtggaacataaaacatgtaactgcttatatcacagagatgcttcagggctccagggagaaatgtgcaaaatcaatgtctctgtcaattgcaaagcactatacaaatgaggggacacagcagtgccttgtcatcagctgcttggcgtttcccagatgattcgcaggttttagcagttccagaagcttgattcaaactcccaaaattcaactgttttatgtgcactgtctcagacccataaatgctccagaaaccatctgcctacccttgacacttatttcttttcaggccatatcctgagcccatttttatgaattaagtccttctgacacctggactattcatcaaccagccacctaaaaatggcacaaaggcatcagccacagcttaatcatgtggcacccagcagatgcccaggaaatatgggattaactggactgactcacaaacacatccaataatccattagcttccttggctcaggttggcttggcaagattcacagagggaatttcttaaaaaaaaaaaatcaatgcaaaaccaaaacaaaagtgtatgctcttaaaacttaggaggacagccaggtgtggtggctcgcacctgtaatccccatactttgggaggccatggtgggcggatcacttgagctcaggagttcaaggccggcctgggcaacatggcaaaaccccatctctacaaaaaattgcaaaaattatccaggtgtggtggtgtgtgcctatagtcccaactacgtgggaggctgatgtgggaggatgtcttgagcccaggaggcagaggttgaagtgagctgtgattgtggcamttcactccagcctgggcagcagagccagaccctgcctcaaaaataacaataacaaaaaaacttatgaggacaacaaacgtctccccgtgcctatcactagaacggtgaaatttagaacacagcagaagca

SEQ ID NO: 63208 - DNA, 2390 bp, Homo sapiens
tacagctgcttttttaaaagaagatgcagaaagagtacacacactctcaaaagaagaattaattgttcataagccaaaaaagatggtgcttcttgcttctaggtctcaggggaatatcttttggtctctggcaaaagtaaaagtataaaaggaagaaagtggctttggacttagaaagaatcgggttctcattaagtgactttgcataagcatcttcttgtatacaagcctccgtctcttcacttgcaaaatagaagtaacagccccttgctctttgggaaggcatgaaatagatacaaagtgttttccccaggccctactcctaatgaaaggtggcaatagtaggtgtagggaagtatggaagaaaaaaatggagatggacagggggccctgaccagtagaaaagaggtgttttgtttccttgtttgtttggttttggttttttgttgttgttgttttcagatggagttccactcgttgcccaggctggagtgcagtggcgcaatctcggctcactgcaacctccacctcccgggttcaagcgattctcctgcctcagcctcccgagtagctgggactacagatgtgtgccactatgcccggctaatttttgtattttcagtacagactgggtttcactatgttggccaggctggtctcgaactcctgaggtttttaagatgtgatgctactgcagagaaatgatcctcccacctcagcctgctgtgggagccctgggatactctgaatctgtcacaaaggagagattccccccaatgagcccagcctgaaaaatcactgccaacacctcctaccaggatgaaggaaggaggagccacaggcccataattaaggcatgtaagggaactatggccacagaagcagaaccctggactccactcctggctctggtagaaatgccccaaaaaaccacttcccttttctttatttttaaaatcattattgatatataataattgtacgtatttgggaggaacatgtatttggttttgttttgttttgagatacagtctcatctgggctcactgcagcctctgcctcccgggttcaagtgattctcctgcctcagcctcccaagtagctggaattacagatgtgtgccaccacacctggctaatttttgtattttcagtagagacggggtttcaccatgttggccagactggtttccaactcctgggctcaagcgatgtgcctgcctcagcctcccaaagtgctgggattacaggcgtgagccacctcgcccggccacatgtgatattttgatgcatgtatgcaatatgtttgaggctctggatggctcaattgccccgatttgaacattacacttcaattttctcgacttttccctcttcataaaagaagttctaacagtcaactacaatgcctctccaggcctttgttttctcatcccttgagtggaacataaaacatgtaactgcttatatcacagagatgcttcagggctccagggagaaatgtgcaaaatcaatgtctctgtcaattgcaaagcactatacaaatgaggggacacagcagtgccttgtcatcagctgcttggcgtttcccagatgattcgcaggttttagcagttccagaagcttgattcaaactcccaaaattcaactgttttatgtgcactgtctcagacccataaatgctccagaaaccatctgcctacccttgacacttatttcttttcaggccatatcctgagcccatttttatgaattaagtccttctgacacctggactattcatcaaccagccacctaaaaatggcacaaaggcatcagccacagcttaatcatgtggcacccagcagatgcccaggaaatatgggattaactggactgactcacaaacacatccaataatccattagcttccttggctcaggttggcttggcaagattcacagagggaatttcttaaaaaaaaaaaatcaatgcaaaaccaaaacaaaagtgtatgctcttaaaacttaggaggacagccaggtgtggtggctcgcacctgtaatccccatactttgggaggccatggtgggcggatcacttgagctcaggagttcaaggccggcctgggcaacatggcaaaaccccatctctacaaaaaattgcaaaaattatccaggtgtggtggtgtgtgcctatagtcccaactacgtgggaggctgatgtgggaggatgtcttgagcccaggaggcagaggttgaagtgagctgtgattgtggcaattcactmcagcctgggcagcagagccagaccctgcctcaaaaataacaataacaaaaaaacttatgaggacaacaaacgtctccccgtgcctatcactagaacggtgaaatttagaacacagcagaagca

SEQ ID NO: 63209 - DNA, 901 bp, Homo sapiens
aaaattaaatggtacatcactaccctaattggaaagccagtcctgttaatcataaatagaaggtaactgtaaacataagtgtgtaactatttaccaagtagaagcagctaacaccccactaatgggatgccaacaccctttggaaaccctgatttctagcccacttgctccatacaagtggaaataggctgagaaacagagaggaacaaggcaagatggagtcagggctcagaagcctgctgtatggactccacatctaagcccatcacactgtgccctagggccattaagaaagggcaggtaggctcayatctgtaatcccagcactttgggaggccaaggcgggcggatgacttgaggtcaggagctcaagaccagcctggccaacaccatgaaactgcatctctactaaaaatacaaaaaaaattagccaggcatggtggcacatgcctatagtcccagctacctgggaggctgaggcaggagaatggcttgaaaccggaaggtggacgttgcagggagccaagatcgcgccaccgcactccagcctgggcgacagagcaagactccgtctcaaaaaaaaaaaaaaaaagaaaaagaaaagaaagaaaaaaaaacaaagggcaggtaggagacagtcattttccacaggttggcccttttcaaagcagatatctaaaatgcctctagtcagtcctcacctagcctggtcctcagcaggcaggttagagtcagggttaacgcaactccctgcacttgctctgcccccttaggacaagtcacttcacctctctgggtctcagtgaactccatctgcaaaatgagcataataatgtctgcctcacagggtcactgagaggatcagacaggataaaggtaaacacatcttgtggctttgaat

SEQ ID NO: 63210 - DNA, 901 bp, Homo sapiens
aaaattaaatggtacatcactaccctaattggaaagccagtcctgttaatcataaatagaaggtaactgtaaacataagtgtgtaactatttaccaagtagaagcagctaacaccccactaatgggatgccaacaccctttggaaaccctgatttctagcccacttgctccatacaagtggaaataggctgagaaacagagaggaacaaggcaagatggagtcagggctcagaagcctgctgtatggactccacatctaagcccatcacactgtgccctagggccattaagaaagggcaggtaggctcatatctgtaatcccagcactttgggaggccaaggcgggcggatgacttgaggtcaggagctcaagaccagcctggccaacaccatgaaactgcatctctactaaaaatacaaaaaaaattagccaggcatggtggcacatgcctatagtcccagctacctgggaggctgaggcaggagaatggcttgaaaccggaaggtggacgttgcagggagccaagatcgcgccaccgcactccagcctgggcgacagagcaagactccgtctcaaaaaaaaaaaaaaaaagaaaaagaaaagaaagaaaaaaaaacaaagggcaggtaggagacagtcattttccacaggttggcccttttcaaagmagatatctaaaatgcctctagtcagtcctcacctagcctggtcctcagcaggcaggttagagtcagggttaacgcaactccctgcacttgctctgcccccttaggacaagtcacttcacctctctgggtctcagtgaactccatctgcaaaatgagcataataatgtctgcctcacagggtcactgagaggatcagacaggataaaggtaaacacatcttgtggctttgaat

SEQ ID NO: 63211 - DNA, 901 bp, Homo sapiens
aaaattaaatggtacatcactaccctaattggaaagccagtcctgttaatcataaatagaaggtaactgtaaacataagtgtgtaactatttaccaagtagaagcagctaacaccccactaatgggatgccaacaccctttggaaaccctgatttctagcccacttgctccatacaagtggaaataggctgagaaacagagaggaacaaggcaagatggagtcagggctcagaagcctgctgtatggactccacatctaagcccatcacactgtgccctagggccattaagaaagggcaggtaggctcatatctgtaatcccagcactttgggaggccaaggcgggcggatgacttgaggtcaggagctcaagaccagcctggccaacaccatgaaactgcatctctactaaaaatacaaaaaaaattagccaggcatggtggcacatgcctatagtcccagctacctgggaggctgaggcaggagaatggcttgaaaccggaaggtggacgttgcagggagccaagatcgcgccaccgcactccagcctgggcgacagagcaagactccgtctcaaaaaaaaaaaaaaaaagaaaaagaaaagaaagaaaaaaaaacaaagggcaggtaggagacagtcattttccacaggttggcccttttcaaagcagatatctaaaatgcctctagtcagtcctcacctagcctggtcctcagcaggcaggttagagtcagggttaasgcaactccctgcacttgctctgcccccttaggacaagtcacttcacctctctgggtctcagtgaactccatctgcaaaatgagcataataatgtctgcctcacagggtcactgagaggatcagacaggataaaggtaaacacatcttgtggctttgaat

SEQ ID NO: 63212 - DNA, 901 bp, Homo sapiens
aaaattaaatggtacatcactaccctaattggaaagccagtcctgttaatcataaatagaaggtaactgtaaacataagtgtgtaactatttaccaagtagaagcagctaacaccccactaatgggatgccaacaccctttggaaaccctgatttctagcccacttgctccatacaagtggaaataggctgagaaacagagaggaacaaggcaagatggagtcagggctcagaagcctgctgtatggactccacatctaagcccatcacactgtgccctagggccattaagaaagggcaggtaggctcatatctgtaatcccagcactttgggaggccaaggcgggcggatgacttgaggtcaggagctcaagaccagcctggccaacaccatgaaactgcatctctactaaaaatacaaaaaaaattagccaggcatggtggcacatgcctatagtcccagctacctgggaggctgaggcaggagaatggcttgaaaccggaaggtggacgttgcagggagccaagatcgcgccaccgcactccagcctgggcgacagagcaagactccgtctcaaaaaaaaaaaaaaaaagaaaaagaaaagaaagaaaaaaaaacaaagggcaggtaggagacagtcattttccacaggttggcccttttcaaagcagatatctaaaatgcctctagtcagtcctcacctagcctggtcctcagcaggcaggttagagtcagggttaacgcaactccctgcacttgctctgcccccttaggrcaagtcacttcacctctctgggtctcagtgaactccatctgcaaaatgagcataataatgtctgcctcacagggtcactgagaggatcagacaggataaaggtaaacacatcttgtggctttgaat

SEQ ID NO: 63213 - DNA, 561 bp, Homo sapiens
aatgctttttctgtgtctcatacattttgagatgttgtgtcttattttcatttgtttcaaggatttttaaaattttatccttaattttctccttcatccattggtcattcaggagcatgtttaatttctatgtattagtatagtttaamatgttcctctattgttgatttccagttttagtccattgtgttcagattagatacttggtatgattttgattttttaaaaaaatttgtgatacttggattgtgtcctaacatatagtcaatcctggaaaatattcattcctacttttcattggagtgtgtttttattagcaacataaaattggaagcagccatactgcagtagcaaatctaggcattttatttaccaagatatttgagttatagccctaagttttataaactcaaggtgaagtggagaagaaaagttataatttattgaatacttactatatactaggcactgtgctaagtaagcctgcgagtacacataactgcattgagacctcccagcacccctatgagtagttcttcttaacatccacattttacagat

SEQ ID NO: 63214 - DNA, 561 bp, Homo sapiens
aatgctttttctgtgtctcatacattttgagatgttgtgtcttattttcatttgtttcaaggatttttaaaattttatccttaattttctccttcatccattggtcattcaggagcatgtttaatttctatgtattagtatagtttaacatgttcctctattgttgatttccagttttagtccattgtgttcagattagatacttggtatgattttgattttttaaaaaaatttgtgatacttggattgtgtcctaacatatagtcaatcctggaaaatattcattcctacttttcattggagtgtgtttttattagcaacataaaattggaagcagccatactgcagtagcaaatctaggcattttatttaccaagatatttgagttatakccctaagttttataaactcaaggtgaagtggagaagaaaagttataatttattgaatacttactatatactaggcactgtgctaagtaagcctgcgagtacacataactgcattgagacctcccagcacccctatgagtagttcttcttaacatccacattttacagat

SEQ ID NO: 63215 - DNA, 561 bp, Homo sapiens
aatgctttttctgtgtctcatacattttgagatgttgtgtcttattttcatttgtttcaaggatttttaaaattttatccttaattttctccttcatccattggtcattcaggagcatgtttaatttctatgtattagtatagtttaacatgttcctctattgttgatttccagttttagtccattgtgttcagattagatacttggtatgattttgattttttaaaaaaatttgtgatacttggattgtgtcctaacatatagtcaatcctggaaaatattcattcctacttttcattggagtgtgtttttattagcaacataaaattggaagcagccatactgcagtagcaaatctaggcattttatttaccaagatatttgagttatagccctaagttttataaactcaaggtgaagtggagaagaaaagttataatttattgaatacttactatatactaggcactgtgctaagtaagcctgygagtacacataactgcattgagacctcccagcacccctatgagtagttcttcttaacatccacattttacagat

SEQ ID NO: 63216 - DNA, 3015 bp, Homo sapiens
tcccagaatgaaatgcctagtgatggatcaataaccccacagggaagccaccagccagcaagccctacacttagatacagaactcccaaacaccttgttgtactttttccacatgtaaacagtctgagatcaacaggaataaatcacaccccagacttgatgccctaagcgagatgagaggatagaacagctatggaataagactgggatgttatcaaagggaatgcagcagcaataaaatagtcatggatggggtcagaagatcaaactgaggaaattatgcagaaagtagaacaaaagcacaaaaatacagaatatgatttcacaatgagaggattaaaccaggargtctagcacctgacattgaactgaagcaaggattcaaagtatttttttatgctgtggacccacaatcagatgaggcatatggatctcttctcaaaataatgctgttttaacaagtgaaaaaattattttattaatagactttatttttagagcagtttaaggtttatagaaaattggggggaaggaggaagagaggaatgaagacagaataatattttaaagcacataaaatgcatagaagtacaaaggaaactgatcatattgaaatatagttgtcaaaatatcaaaaaacaaaatagggatatagcaatgtatgtgctttttaatgagcacattaaataacaagaagggcagaatgactgtaattttgaagtagtgatgagcatgagtgctattttaagatatttgcatcaatgtgatgtgagatgagcatatctgttttttggttttctgtttttgtgacaggatcttgtctgttgcccaggctggtgtgcagtgacactatcatagatacctcactgcagcctccaatgtccaggctcaagtgatcctcccgcctcagcctcccagagtagctgggactatgggtgtgcaacaccacacctggctaaatatctgggatttctatagatgaccagaagactactgttttaatcatgtatttgtcgaactaagtgcctttgaaaactatgtgtgtgtatcacttttacaaaggaccataattaattaaaaaataattagaaagtataattttatttttattcaggtagaagaagtgaatgaaagaaagtttaatgagagtgatatagagcctcaagtgtgagatgaggtgaacgactttgaaatagcaagttcttaagtttgtatggtactttacagtttgcagtgtgcgcttttcacacattccattatgtgattttcacaagaacttctaagagaaggcagtacagatattatccacacattcagtttataaatgagaaagtgagtcaaggctcaaaatcaggtgcttgagtcctaatccagtgcagctttataggtgagaaaggttggaggttctcatgtgtcccagcaaggctcagagacccattgacacaaggctgatagtcacaagaagcagagttattggctgggcgtgatggctcacatctgtaatcccagcattttgggaggtcaaggtgggaggatttcttgagcccaggagtttgagaccagcctgggcaacaaagtgagactccatctctacaaaacatttttaagaaattaaccaggcgtggtgatgcatgcatgtggtcccagctatgtgggaggctgaggcaggaggattgcttgatcccaggaggtcaaggctgcagtgagccatgtttgtgccactgcactccagcctgggtgacagagtgagaccctgtctcaaaaacaaaacccaaacaattggagttgccatttgaggttcaactctcaggccagaggtagagttcaaaggagctgctgggttgagatctttttaaatagggtgtccctaggagacaagagtccaaagtttcagaggggctctcttttgctgcctggaaaaacatccctggtcttgatatcatcaccccggcctgaagttatttctaagtcctccccatcatcccttccaagagcccatcccagagcccttgtctgctagtgtagcgagtctctgacattcttgttttatgcctccgtgtggccctagtggagctgtcaatcatggtgcctggcctccttcacacagttgggccaagaatggtgtcacatccctggacacagtgactcgtccaaggggtggatgcacagaatccaggccagttgggggcctcccatggaatcttctgattggaggtggaaagctagtttttcttagttttaaatcattaagggtttatatctggagttgctaggagctattttctctggcatgtggagagaacttttctgatgtaaaagagagtgctattaaaatagagacagtgaaaatgagatggagagagagaaagagaaggaagagagggagagagatgaggggagaggggaaaaaggatgggggaggggacagaggagaaggaaaaagggagagggaagagaggagaggagagacatctcctggatccttagtgggtttcacttcctatcctgggtttggttcctggaacacttcatttcattctgtgagccatttcagtatccttcccatccaagaaagccaagaatacccttcttgctgaagccggtttgaactgactcttgtctcttgcaacccaaaaggtcctgactgcctaccaggggcccccaggcattatcggatgtcaggatttgcttatgaaacccctccttttccctgctaaggcctttggtacccccagaacatgcagcatcctgagacaccctccaagctcctcagcacccttcctgggcctcctcaggcatgctctccacagatctatgcttggaccttcttctctgattccagactgtcatctgttcatttattcagcaaacatttataagcatggtggaaacacagcaaccagtagaatggaaataaagacatgcctaactatgagtcaatgtaaaaagtaatttacttcttaaaataaatgaaaagctatgagaggtcagaggaaagagtgaccattatgggtg

SEQ ID NO: 63217 - DNA, 662 bp, Homo sapiens
cagccatctatgagccagatgtgagccctcaccagatacttggatcttgatcttggacatcccagcctccagaactgtaagaaatacatttctgttgtttatgggcccctcagtctatggtattcagttatagcagtcccaaaggactaagacaatcttgtggggttgatcaaccatgaacgcttagaaaacaaagtagagtcagaagcaaactgctgataaccactcaagcaccactcaggaagagagggctgtagtcagaaacacagctggaccattcccaggacagataagttccaccttgcaatgattgcatagcccattaatcatttgaattattttatgctacttgctctgatgccatgctcaccaactccacttcagatctcagtttccatgtagaaaatgaccagcctctctcaccctcaccctgcccgaaggagacgggagtaytagtttccttgtactgtgtcgtgctagctttttaatggattgcatctgtttggggagcttgattaaagggctcccacctctgaagatcaatttgactctccttgccctgaaaaatcttgtttctgtgcctgtgagactgagccagatgttcccctggaggcctcttgggagccagcaagatggcctttctggcacatttcctctcttct

SEQ ID NO: 63218 - DNA, 1668 bp, Homo sapiens
ccgcattctcgaactccagtttgcatcagaatccactggaaggcttgttcaaacacagaacaccaggccccagcccctgtttctgactgagtgtctccggggcggggtctgggcacctgcctttctaacgggttcccaggtgactccaatgccgctggttcggcccctcgctgagaagcactgctttcagttaaatatcctcaatgcccagaacccctccccccgctgcatctaatcagtccttatctgtccgacaccagatcagccccaaaggcttctttttgatgtggtttctaatggtctcaacccccgactcctgttacctcctgatgagcaggcaggttccaaactctgtggctcacacaatggctgctccataaatgcccaaccagcagagtcagtggctggcttctcagcaggggcaagtgaaagggagccgggattgcagtcccggagctcaaggctggacaatgacccggatgacattcacgccactgctgcataaatgtgctgctgagaacctagcctggatgagttcacgcggattcctgagcgggtgtccccactgttccccccaactcccaccccgcaccaagcaggaactcggctcaggcaggtggagcacgtggctcagagcatcacagctggcaagcaacaaggctgggattcaccctgagtcaggctcctttcagaggctgtaatgtcacacggcctcctgccccacaaggactctgacagtgcctgaatgagtgtgtgagagaatgaatgaatgaatgaatgaatacacaaatgccagaaaagagaggaaaggaaacgtcgtttgattgttcccctgtattacgctcctgaggctgccaacacagactcaggggcttagaacaaatagaaagttattctgtcatggtcttgaaggtcagaagttggtcaaggtatcaatggggacatgctccctctggaggccatggagggcggatccttcctgcctcttccagctcctgggggcctaggcactccctggcttgtgactgcattgctgccgtctctgccagcatcatcttcccaagctttctcctctgtgtcttctcttttcagaaaggcccacccagataatccaagatgatcccatctcaagatcgttacttatatctgcaaagaccctttttccaaataasgttaacagtcacaggttccagggcgtggcataaatctctctactgggggccaccattcagcccactacacccctcacatctgagatctgtttgagttctcatcagtcattcaacaaacactgagtgcctactgtatgcaggcactggagctcaaaggtgaaagagaaggctcctccagagaaggggacggtcccgtggggagctcaagaagagacaagccacccaagcccaatgggaggaccggactacgagacccaagaatggaggtgaatctggaggggcttcctggagaaagtgtgggggctgaggggatatctgtgcaccattggtgaagggctgggaggatgttctgggaagtggagactcccagtggcaggtgcatgagccagtgctcccgggaagggccccggggactggggttccctaggatagagacctaggtcagcgctgagctgggaaaaggcttaaactcttgtgtcccactcgctggagggtc

SEQ ID NO: 63219 - DNA, 542 bp, Homo sapiens
cggatccatgtggtctgctgagatggctgagtctggcattcagatgtgccacccaacagaagaggccctggagggacgccccctttgctgggtggcagccgtgggattccggggtctgccttggaggtcctggagaggatgtcgtggccctggccctagactcaagctgcctgggtccagttcagcccggccactcctgctgtgggccctagccaggggccttcactccaccgactgctgtgtgtttggtacatggtgtcacccaggccatgtgcttagccatgtgcctgacagccagygccggtgtcagccattacagggacacacgtgcctggaggttgaggccacgttctgtcacctaggcccactcgtggtcctgggctgggccaaaccccccttcgaaaggattcctttttgcccctggcataggctctcattgtcctagtgaacagctacatctttttaacaagccagaaaaggccagctggcagtggctctgcctgaaatcccaagactggctggccgaagcaggaggatcactt

SEQ ID NO: 63220 - DNA, 542 bp, Homo sapiens
cggatccatgtggtctgctgagatggctgagtctggcattcagatgtgccacccaacagaagaggccctggagggacgccccctttgctgggtggcagccgtgggattccggggtctgccttggaggtcctggagaggatgtcgtggccctggccctagactcaagctgcctgggtccagttcagcccggccactcctgctgtgggccctagccaggggccttcactccaccgactgctgtgtgtttggtacatggtgtcacccaggccatgtgcttagccatgtgcctgacagccagcgccggtgtcagccattacagggacacacgtgcctggaggttgaggccacgttctgtcacctaggcccrctcgtggtcctgggctgggccaaaccccccttcgaaaggattcctttttgcccctggcataggctctcattgtcctagtgaacagctacatctttttaacaagccagaaaaggccagctggcagtggctctgcctgaaatcccaagactggctggccgaagcaggaggatcactt

SEQ ID NO: 63221 - DNA, 639 bp, Homo sapiens
accaagaagaagtgagattggcgtatctgaacctcttaatgggtaagtgggcacaaaaacgtcctgctcccccacagtggcaagtagagttcgtctgcagtttcaactccactgaactggtagcgttgctgtgttaagaaggattctgagcctcactgggagcggagccccctgactagtcagaggacggatgaggatacgggccaccccaggtctgggttgattgactgtggtggagagagcgttcttgtgtatatctggttagatatttggggatgcctctctgtagggaaggccaagcttctgagacggagtgctagatagaggttggagtgcttgggggagtcatggcacgaggtacaattgaccatgtctttggtgccaaagatctcaagcayccgggaacgctgggtttaggaaggagctggtacagtcctgctgttggccctgaggatcctggctatgggaggtccagatgcagacaaagggcctgccccatcccacgccacctggaggtctaaaactcacccacgatctcggtgcagtcctggggcatgtgcagtcccttggcatctcggctctcccacgtggatgctgctgtgaccacctgcttttggaactttccccttcatcatttcg

SEQ ID NO: 63222 - DNA, 542 bp, Homo sapiens
ttttaattgctttatgcctttgccattgttctggttgttataaaatatactttttaaaaatttactttctacattatcgtttaagcttattttctgtattgtagtgaatttctttgtttttttctctttttttktggggggggggcgggtgcggggctgagggggacaggatctcactgtgttgcccaggctggagtgcagtggcacaatcacggctccctgcagccttgacctcccgggctcaggtgatcctcctgagtagccgggactacaggcttgtgccactacatctggctaatttttgtattttttgtggagatgggggtcttactgtgtagcccaggctagtctggaactcctgggctcaagcagtccacctgcctcggcctcccagagtgttgggattacaggtgtgagccttgcgcctggcctggagtgaatttcagactaaaaccagtaccttcctaaggttatacagtttttaactaacccaatctctgttctgatttgattcactcatgattgcatgcggctgtatgcca

SEQ ID NO: 63223 - DNA, 542 bp, Homo sapiens
ttttaattgctttatgcctttgccattgttctggttgttataaaatatactttttaaaaatttactttctacattatcgtttaagcttattttctgtattgtagtgaatttctttgtttttttctcttttttttkggggggggggcgggtgcggggctgagggggacaggatctcactgtgttgcccaggctggagtgcagtggcacaatcacggctccctgcagccttgacctcccgggctcaggtgatcctcctgagtagccgggactacaggcttgtgccactacatctggctaatttttgtattttttgtggagatgggggtcttactgtgtagcccaggctagtctggaactcctgggctcaagcagtccacctgcctcggcctcccagagtgttgggattacaggtgtgagccttgcgcctggcctggagtgaatttcagactaaaaccagtaccttcctaaggttatacagtttttaactaacccaatctctgttctgatttgattcactcatgattgcatgcggctgtatgcca

SEQ ID NO: 63224 - DNA, 741 bp, Homo sapiens
agtgggaaagcatacttcactagatggatgagtgagggaggctgtgagattttaaaaaaataaataaaatccccagagacgtagctaacagaagagctctatctgtagggtgcattaagcatccccacataggctcgtaagtgagatggctgtttaggtatccatcagggacactcaagggtgaaagagggcactactgataatttcggtggaccaacaggtataaatcaggactgcaccaagcaaactaaaatgttgcctattaatgaggcaaaagtctttgyttgtctgactgtcttagcctgtttgtgttgttataaaggaatacctgaggctggacaatttataaagaaaagaggtttatttggcttgcagttctgcagactgtacaagaagcatggcaccaacatctatttctgatgagggcctcaggaagcttccattcacagtggaaggcaaagggaagctgacatgtgcagatcatatggtgagagaggaagcaagagagagaggaggtgccaggctgttttcaacaaccaattctcccatgaaataagaatgagaactccctcattcccatgagaacagcaccaagccattcatgaggaatccgctctcatgacccaaacacctcccaccaggctccacctccaacattgtggatcaaatttcaacaggagacttagcagggacaaataaaccgtaactaaaccatggcaagaacagacctgtgttttccca

SEQ ID NO: 63225 - DNA, 546 bp, Homo sapiens
tgaatgtacaccagtcttggctgtttcctgtatttctttaaaagtctacatagggggtattgggcatagtggctcacacctgtaatcccagcactctgggaggccaagatgggtggatcacctggactcaggagtttgaaaccagcctggagaacatggtgaaatccccatctcagcaggaaaaaaaaaaaaaaaaaaaaaaccacaaaaattaaccaggcatgttggtgcatacttgtggtcccagcaactcaggaggctgaggkgggtggaaagcttgagcccgggaggctgcagtgagccatgatcatgccactgcactccagcctgggtgacagagtgagtctcaaaaaaaaaaaaaaaaaaaaaaaaaaaggcctcggcaggcaggagtagttgcctcccagttgtttggggctagattcatccacttgcaacatgatttgaatcacgcatttttcctctttccttccaggtatctctcagggctgatgggcttctcagagaggcaggtaaacttgggaaaacaggctgaaacacatatca

SEQ ID NO: 63226 - DNA, 1672 bp, Homo sapiens
  misc_feature (1)...(1672): n = A,T,C or G
atgctttttctccctttttggtcaggcatagataggtgacttgctttagccaaagaagcatgaactgtcacttcaagggggagatttacaagccagtgcaggtggattcctgctttctcctgacatcatgatcatggactcacatgacaaaatggatcctccatcttccagcatctctgattgagactaacaagggccctgacagccttttctggacttgtagtatgtgcaagaattaagctttttctgtatcaagtcaccgtgttatgggggttgttcctcactgcaggagaaccttgttcatccgtattagaacagtgtggtgtttcatgttagcagagtgtatcaggatcttttgtttttttttttttttaaattaaggatgctgtatgagtcttttctcatactactgagaaagacatacccaagactgagtaatttataaaggaaagaggtttaatggactcacaattccacatggcggtggaggtgtcaccattatggcagaaggcaaacaaggagcaaagtcacatcttacantgtggcaggcaagagaacttgtgcaggggaactcccctttataaaccatcagatctcgtgggacttactcactatcacagaaacaacatggcaaagacccatccccatgattcagttacctctcaccgggtccctcccatgacgtgggaattatgggagctataattcaagatgagatttgggtggggacacagccaaaccatatcagatgcaaagttatgcatatgttgatcagctcaatttagcctttccatcatgtttacatatttcaaaataatgtgttgtgcacaatatatatgtgcaatttttgtcaattaaaaataaattaaaaaaattaaaaaatggctttcccacagctgtcgacttccatccccatgtgtggctctccccaggggctcccttcttgttctccccagttgcagacctcagacaggagtctgcttgtcttcctaggcccttgtcagagtggaaggtggccctccaccacaccagcccactttccagttatcaaaaaggatctttgatttaatatttccagagcaattttggtgatttccattcaaatctgttttttgtcataactaccttgcttgcctatgggacatgttcccatttcagtgcatacttgacctttaccataaatcacatatttgtaaactgtaccctcctgctgttttattrggcatggagaagcagtcttttctttttcttgatggcctgggttgaccagatcctgacttttgtggagacattaaagtgctagaaatgataatggtgaaagattcagaagttgaaggagatataaggagagaaatggacaattcttttggtaattgaatgaaataagactcttaggaaaattctccccagtggcaatgttgtaagaaacaccaggccgggcacagtggctcacacctgtaatcccaacactttgggaagctgagacaggcagatcacttgaagtcaggagtttgagaccagcctggccaacatggttaaaccccatctctactaaaagtacaaaaattagccagacgtgatggtgcgtacctgtaatctcagctactcaggaggctgaggcaggagaatcacttgaacccgggaagcggaggttgcagggagctgagatcac

SEQ ID NO: 63227 - DNA, 676 bp, Homo sapiens
ggtttgtaatcacccttagatatcagttgcatagtaaattcaggatgataacgtgcctcagaataatctcaatagagcaatgagcaatggaaaagtacagctctcattgttgacagtacactaagtaagcggctattagagtgtgagttccctctttcctttaccttttttttwaaaaaaaaaagatttttaagtctttaaaaaatctttccttgggctcctgcttggaaccaaagcagtcaaaatcagttttctgaaccagagagaaatgcctctacctgatgccatccagataatgcacattctgtgtctgaactgccctcccggtggcattgacctatccttctgcagcagctgctggtggaagatgatgagcttcacctgtgtttgccatgcaggaacatgagcaatacagaagctgtccatgcaactctgctggcctctcaccatacggtcaaggtcaccacgatgcaggtggatggcaacctgcagtcagtgctccaggcctctaaggaactcaagcaaaagtatgcctggacagtcctcatgaaatggtatctctgatttctatttcaagatggcagactgagcactcggtaactgccttttccttccacatcgaatctggaatacacatatgtgagtgcaattacagaagtttggagtggcatcaggg

SEQ ID NO: 63228 - DNA, 727 bp, Homo sapiens
atggacatgtctatggtcttgtcctgagtcctaggacagagcagccagaattgccttctataggaaagacaactgggactacaggcaactgtcttctgcttgaggacagatgaacataactgagacagggtttcattcttactgacatcatggtgatatgttgtggtaggcttgggttctgcctaacactagagtttccttatgaaaggaacatagaaatatggcaagggtggtatactaattgaaagcttcagtccctcttcaatttgtcacctctactaagattcagtgagaacagccagagcggctgagaacagattggatgctggtaggggaaaaataattggatcacatagccwggtccaactagctaaaaatctctagatgggatggatatatacatacatacatatatatatatatatatatgcactttcattggcctgggttccttcaggatatcctggccaggtttgtttgtttgtttgtttgtttgtttgtttgttttttggcagagtctcactctatcaccaaggctggagtgcagtggcgcaatcttggctccttgcaacctatctttcctgggttcaagtgattttcatgcctcagcctcctgagtagctgggattacaaacatgcatcacaacgcccagctaatttttgtattttcattagagtcgaggtttaactatgttggtcaagctggtctcaaactcctgacctcagg

SEQ ID NO: 63229 - DNA, 727 bp, Homo sapiens
atggacatgtctatggtcttgtcctgagtcctaggacagagcagccagaattgccttctataggaaagacaactgggactacaggcaactgtcttctgcttgaggacagatgaacataactgagacagggtttcattcttactgacatcatggtgatatgttgtggtaggcttgggttctgcctaacactagagtttccttatgaaaggaacatagaaatatggcaagggtggtatactaattgaaagcttcagtccctcttcaatttgtcacctctactaagattcagtgagaacagccagagcggctgagaacagattggatgctggtaggggaaaaataattggatcacatagccaggtccaactagctaaaaatctctagatgggatggatatatacatacatayatatatatatatatatatatgcactttcattggcctgggttccttcaggatatcctggccaggtttgtttgtttgtttgtttgtttgtttgtttgttttttggcagagtctcactctatcaccaaggctggagtgcagtggcgcaatcttggctccttgcaacctatctttcctgggttcaagtgattttcatgcctcagcctcctgagtagctgggattacaaacatgcatcacaacgcccagctaatttttgtattttcattagagtcgaggtttaactatgttggtcaagctggtctcaaactcctgacctcagg

SEQ ID NO: 63230 - DNA, 727 bp, Homo sapiens
atggacatgtctatggtcttgtcctgagtcctaggacagagcagccagaattgccttctataggaaagacaactgggactacaggcaactgtcttctgcttgaggacagatgaacataactgagacagggtttcattcttactgacatcatggtgatatgttgtggtaggcttgggttctgcctaacactagagtttccttatgaaaggaacatagaaatatggcaagggtggtatactaattgaaagcttcagtccctcttcaatttgtcacctctactaagattcagtgagaacagccagagcggctgagaacagattggatgctggtaggggaaaaataattggatcacatagccaggtccaactagctaaaaatctctagatgggatggatatatacatacatacatatatatatatatatatatgcactttcattggcctgggttccttcaggatatcctggccaggtttgtttgtttgtttgtttgtttgtttgtttgttttttggcagagtctcactctatcaccaaggctggagtgcagtggcgcaatcttggctccttgcaacctatctttcctgggttcaagtgattttcatgcctcagcctcctgagtagctgggattacaaacatgcatcacarcgcccagctaatttttgtattttcattagagtcgaggtttaactatgttggtcaagctggtctcaaactcctgacctcagg

SEQ ID NO: 63231 - DNA, 767 bp, Homo sapiens
ttatgaaatgagaccaccacttctcctgttgtccttcccagcttctccccaacctccccttttccctagtttataagacaggagaaaagggagaaagcaaaaagttggaaagcaacagaggtaagataaatagctagatgaccttggcaccaccatccggccctggtggttaaaataataataataatattaacccctgaccaaaactactggtgttacctgtaaattccagacattgtatgagaaagcattgtaaaactttttgttttgttagctgatgtatgtagcccccagtcatgttcctcacgcttacttgatctattatgaccctttcacgtggaccccttagagttgtaagcccttaaaagggctaggaatttctttttcggggagctcggctcttaagacgtgagtctgccgacgctcccagccaaataaaaaacttcttccttctttaatttggtgtctgaggagttttgtctgcgactcatcctgctacaacgtgactaawcagtggcagaattagggttgaaattcaagcctctgtgtgttccaagtcacagtgtttctatattcccataacaaatttccatttgtctgtttgagaatgaatgcaatcttaatatctttcatgagtaatactatcagattgctgaggttgaatcttgactctccaacctggtagctatgtgaccctgggcaagccccttatcatcttgagccccagtttccttatcattaaaatggggataataacaatagtaccc

SEQ ID NO: 63232 - DNA, 820 bp, Homo sapiens
  misc_feature (1)...(820): n = A,T,C or G
actnnnnnnnnnnnnnnnnnnnnnnnnnnnnnnnnnnnnnnnnnnnnnnnnnnnnnnnnnnnnnnnnnnnnnnnnnnnnnnnnnnnnnnnnnnnnnnnnnnnnaatctcgttctaaagcagataccctcttacagcaggatgggcagactggtgcaaaagtaaaraaatgggcccaagtgactttagcccaagcatcctctccccatgtaaactgttgggcttgccttaatttaaaaaaatacgttattcatggaagggccatgagccttgttacacaattctaagtgaatcacagattagcccccacttccttttttagaaaaagggaaaggataatataaaaatacccacatatcttctctccagattcacagttattaacattttcccacatttgctttgcctacttttctttctaagaaataatatatacatatatttacctacacacatacataagtcatgaacatatatgggtctatatttttaaatttttattttatttttaattgtggttataaacgtatcacattaaatttactatcttaactatttttgtgtccagttcaatagtgtgaagtatattcacattgttgtgcaacagatctctagaactttttcattttgcaaaactgaaacttgatggccagaaacaaactaattctccttctccactctccccgtccttggcaaccactttcttactttctgtttttataattttgactactttagatatctcatgtgagtggaaaagtgctgtatttgtgcttttgtgactagcttatataacttagcataatgtcctcaaggtttatg

SEQ ID NO: 63233 - DNA, 820 bp, Homo sapiens
  misc_feature (1)...(820): n = A,T,C or G
actnnnnnnnnnnnnnnnnnnnnnnnnnnnnnnnnnnnnnnnnnnnnnnnnnnnnnnnnnnnnnnnnnnnnnnnnnnnnnnnnnnnnnnnnnnnnnnnnnnnnaatctcgttctaaagcagataccctcttacagcaggatgggcagactggtgcaaaagtaaaaaaatgggcccaagtgactttagcccaagcatcctctccccatgtaaactgttgggcttgccttaatttaaaaaaatacgttattcatggaagggccatgagccttgttacacaattctaagtgaatcacagattagcccccacttccttttttagaaaaagggaaaggataatataaaaatacccacatatcttctctccagattcacagttattaacattttcccacatttgctttgcctacttttctttctaagaaataatatatacatatatttacctacacacatacataagtcatgaacatatatgggtctatatttttaaatttttattttatttttaattgtggttataaacgtatcacattaaatttactatcttaactatttttgtgtccagttcaatagtgtgaagtatattcacattgttgtgcaacagatctctagaactttttcattttgcaaaactgaaacttgatggccagaaacaaactaattctccttctccactctccccgtccttggcaaccactttcttactttctgtttttataattttgactactttagatatctcatgtgagtggaaaagtgctgtatttgtscttttgtgactagcttatataacttagcataatgtcctcaaggtttatg

SEQ ID NO: 63234 - DNA, 725 bp, Homo sapiens
ttaattaatgtgatagatattaattaaatgcctaccatgtgcaaggagctkccctaggtcctttgactatcatggtttttattatcaaggaggttacagtctggtagaagagatattactgtacttcaatgattatataatgaacagcacaaaggtttaagtgccctaaaagaagtgcttagaagtgctgtgaaaggttctatgaatgcagaaattacttctggctggtttaatcaggaaagattttttggggggtggtgtagggaggtagggtttgcattgatacaggttaaagagaggtggagaggaaaggtggtcaccgcgagatgaaacagtaggaataggctgagagggggaagtgctgggcttgccaagcaattctgatctctggttcctccctttagtgacttcctgtcttgctttttggtggggccacacttacgtcaataattacatacttttcatttatgtgtgtgtatatccttttccctcctaaccagactgtagcatccacacagctgcccataacaggttctcaataaatatctgatgagttccttgttaatattaattactattctttaagatttatatagtgaccatttccaagaagacttgatatcttttgcaaataaaagcttgtagtgaatgtgtgttgggatgcctgcctgtccatagcccctttctctgggaactgctctttcatttcagtttgagatatagtc

SEQ ID NO: 63235 - DNA, 926 bp, Homo sapiens
acttaggataatggactccagctgcatccatgttgctgcaatgggtgtgatttttttctttttcatggctgcatagtattccatggtgtatatgtactacattttcattatccaacccactgttgatgggcacttaggcacttaggttgagtccgtgttttccttctcatgaatagcgctgtgatgaacatacaagaacatgtctcctttggtaggacaatttattttcttttggatatacatccggtaatagttttgctggattggatggtagttgtgttttaagctctgtgagaaatttctgaacttctttccacagataatagtttcctaacagcataaaatacaagtattttgtctaaaagttggtctttggaaaatactagtagaaatattaaaaaaatgacattacttattaaaaattattttgttcaattgtccatttttttgttcatatattcattcaaaacacttttttttggcaccaataatacaccaggaactgggaagctaaggcaagtaagacagagacccttttctaaggatttttcatttgttatgagagtatttcaaaaataaagaagactttatacttcttttaagactctagctccagctgtctctgggctcacatttcagaaatgaagcctggaaaatttaggtcgtagagcttcctcatggtccataactttaggtggtcttgtggaatatggaaatgaggagacaaaaagaaaggggaagcccattttgtgttaggacttgtactgctgcatactccaatccccccaacatctcccttgcgcagaaacatctagactattttttaagagmaaatgttttagtacagatacaactaatgataaactatatagctctctggactgataaacagaaaaatgagaccacactccttcagcatttacctt

SEQ ID NO: 63236 - DNA, 1234 bp, Homo sapiens
tgcatagaagttccctgtttaaatatagatgaggtgtctagaatagaaatagacaagtctacaatgaatttgggtggccattgggtatcattaactcgatcccttactaagctatgcctaatttcccattattgtaaattggaaaatatcttaattatcatacaaaaattttgtgaatatggatcatgtacatgaagacactttcaaatgacttcagatacatgcaattgttaatatcataaattatgaaagactagtttattgccagcaaaaaaagcactagaaaacataaaatcctctatgtctattatctagaattggaattttaaaatattactctctcaatccatgaggtacagacagtcagtaactggtatctcagatctgtttttttaatctcctttgcactatgtttgggtccacataactagttccgaccaaagcaatgtgacgtgacatgacctgtgtcaattctggtttgaggcagtaacaagccaatctgtttcatcagcaacgtgtcttcctaccattgagaaacacagtggtcttgtgttccagatatctagttactaaatgaatgaaagaaacatttgaactgcatagagtttcaatgagtataaattaatcctatatagtgcttagcccatatattttgtagtttatttcttactacaagatagcttagcctatctttatcaatacacaccaagtctcactattattcagtagcgctgcattacaattgtttaaaaaacaaacaacaaaaatcttttaatccctgggtaccaaatgtttcaaccaatgtttacctttctctggcaccattctttgacataaactctattgaaatccatgtctataagcgaccatgctatcttgattcttagcagcttcgctttctcattcctgtccctgaagtgatgtcccacccatcttcacagacataatccaaacagttttcaaacgcaatgccattkgcaatacatgctagaaaatctctatccaaagttagcaaaatgaaaatccattcatattaaaaaaaccctcagttgtctcaaaaatgttagattttcagagaatgaaacttctcatagaatcataatcctttttttgaaagctctattactctgtgataattgaacaagcatttcaccaattaaaagacagatttgtttttgtccaaaatgcagatgactataaactttcatttgcttgctcaattgaatttcttcaa

SEQ ID NO: 63237 - DNA, 1077 bp, Homo sapiens
aggcctcctctccctctgttctccagaaaggtacccctgccagctcaaatatctgtgggacatgtgagggtcctctgcagctaggatcccataggtccacagcaagagtgggcagtgccccagtcccactcacctcttccccaagagcttttcagggccaggaacaagccctggtgttcaggcatcctacacagggttctcagctttctttttcttcaggttcaatatttgcatctttctccattcacattctgcattttctctctgaagatctgctccaattatgctgacttagtcaaaatccctgtttctttccatgggagtggcacttccctggtgcgtctggtcggccatcttgaaaaggatcccgtgatcttatttttgacttaatatttgtgcatttcttttgaacctgcctagcaaaatggacataaacaatagaaacaaacaatggaataaaaatgaggagcttgaaattagaatctgcgtgacttgaatttgaattctggccctgcattctattgaattggtaatttagattttttcggagattaaattctmgttttttctttgtttactgttgttgaaatggaacgcattttatttccgactttacacacataaatccctgtgtacatacttatataaatatacataaaaacacatgcacatgtatgcatatacatacacaggacattttgcttgcccctccctctgcctagaaggttttccctcatatgtttccttgattctcctcatcatttccttctgatattttcttgaatgttatcatctcagtagtcttccctagtcaacctgtgtaaaatttcaactctctctcactttgtcttgctttttcatattgcttttcccttctcatttcttgtgttttcctttttctcccatttcagtgaggaaagtaataaatatatatgtatataaatacatatattgtgtgcataaatacatacataaaagtatgtcaacatattaagaaaattcctgcaatattttgttttattataataataaagtattccttaataaatccacatttttaaaattttattcaatttc

SEQ ID NO: 63238 - DNA, 654 bp, Homo sapiens
tttcagtcttggtagtttacgtggtctatgttgcaactactcaactcagccactcatctctgaggaagcagaagtagacaatatttaaatgaatgtggctgggttgtgataaaacttacttatgaaacaggcagagggccagattttacttgtgagccagagtttgccttcactgcataaggataagaataactcagatgaccactgatacagagtgaacctaggaaatccagtggaaccttaggttaatgatgagctgtaacaggttttgtaaagtgttttgtttaataatggcaatattggcaatactactatatttgcattcaactgttttatttagaaaaatttgtttacagtagttattctctttattgttatatctatcattattgtttttaaaaatcatttacagttagtgatagctacttaagaatttacttataagttttatcaagttagaaaaggagaagcaaactgtgaatttttcagtgggcatcgttcattttttctgtatttcttgtgatcaccttttattttaagcatgtaagtastataaaatatttattgatcaagtaggtatttttttgaagatatgtatttgtggccaagatcagatagtctgaaaagaaaaaaatataagtcagaaaaaagaca

SEQ ID NO: 63239 - DNA, 905 bp, Homo sapiens
ggaaatgtaacaaatattcaatattcaatgtgatatgaataacctaagagactatttcatataactcactttcaacccctatctgcctcttatttccataagcttttaaagagttttattttattccagtattgtgcaattgaaaacaactttcaatcagttaatatatctgaaatgactagaagcgataagaaagaatttaaaatggttatgtatgtaaaatacaataattttacagatattaaataaataaaatgactttcatacttttctcactcatcgagattagtcattaccttgacaggtgtattagtcagttttcgcactgctataaagaacacctgagactgggtttataaaggaaagaggtttgactctcagttccacatggctgaggaggcctcaggaaacttacaatcttggtggaaggtgaaggagaagcaagtaccttgtytgcaaggtggcgggaaagggagatagcaggggaaaccgccacttacagaaagagcagatctcatgattacagcatggggcaaaccgcatccatgatccagtcaccttccaccaggtcactccctcggcacaagaggagtacagtttgagaagagatttgggtggggacacagagccaaaccatatcaacaattgcaaatgtatttgcattaatgttgctgtaatcaaaccaagtagtcactgtttttagcaacacctgtccacggaggcaggcaattagctgagtatacagatctggctgtggtatgcccaactatctgattattcctattaatattctgtgtggtgaccaaagcacatgctccaaaactttttccaaagcttgattttagatactctcaatgtataaatttttttttctgactgcattttacaaaattaattatttgtaa

SEQ ID NO: 63240 - DNA, 737 bp, Homo sapiens
tgtagaaccaaaactctacacacattaaatagtaattctccattcctctctgactctagctattggcaactattgttctactttttgtctctatgattttgactactctatgtacctcatagaagtggaatcctatattttgtgactggcttatttcacttagcataatgtcctcaaggttcaattcccctttcatttttataattttttcatttacatttaaacttttattttttttatttttttattttattttwttttttttttgagcctgagtcttgctctgtcgcccaggctggagtgcagtggtgcaatctcagctcactgcaaccttcgcctcccaggttcaagtgattctcattcctcagcctactgagtagctgggattacaggtatgcaccaccatgccccagtagttttttgtatttttggtagagaggggtttcgctgcattggccaggctgatcttgaactcctgggctcaagtaatccgcctgcctcggcctcccaaattgctgggattacaggcatgagccactgtgcctggcctaaacttttaatttttctcatatttattttgatgtctgacatagataaggacttaatttaatgctttttaaaagtttggccgagtttttcaacattatttgttgagcactcaatcccttttccaaagatttaagatatgattgttttgattaatatttccttgattttttatgtttattaaccatttt

SEQ ID NO: 63241 - DNA, 567 bp, Homo sapiens
tctagagccttaccacttcccaatcaagaggtagagtctaattcccctcccctttgaaccacggcaggtttgtgattggcttacagctaacataaaatgatgaagtaacactatgtggcaaggctaggtcaagaasgtgatgcaacttacactgggagagctagaatagtcattcttgaagtctttagctgccatgaaagtaatccaactgccttgaaaaaaatccacactaacccactgaaagagaggaaatggagaggccttgataccacatgaaatgccagggtccatctcatgggctccagtccttcctcccctcatgttctaccccaaccacctcagactacaactgcatgagagatttcaaagccagaactgcccagccaaaccctaatatgactataatctgatctatttaactgaatcacaagtggcagaaaattatcaagttccagcaagcattgctgcactgcttataacaatgtttagttggttacatacgggaatgcagtagacaactaatgcccacaaagctggaaatacaaaatggaacaacacgcagaaagg

SEQ ID NO: 63242 - DNA, 606 bp, Homo sapiens
gcccatccagattaagggtgggtctgccttccccagcccactgacacaaatgttgatctccttggcaacaccctcacagaaacaccccgggttaatagtttgcgtccttcaatccaatcaagttgacactcagtattaaccatcacagggtccatcctccttttgcaaggtgagaataacaaggacataaaggcaaatggcctgataatgaatggaaagaacataattagtttcaacattaaaaggagaaatattttcaaccttcaaaattataatggcgttaataatgatctcagataatacttcaaaacaagattttttgtcataatttatacaattgtatataataggatgttgagaatgaatgcttagcagcctagattaatggtgaatgacacaattggtgaagaacataattgttttacaattctatactctaaatagagctgcaaccagttgaggctaaaatgtcctccaagcattattaaatytgtaggccaattaaatctgctaccctgatcataacaccagccatatgtcccatatagagtccttctcctgaacccatggttgtaagcagttaatttgcggagagggttcatcagg

SEQ ID NO: 63243 - DNA, 606 bp, Homo sapiens
gcccatccagattaagggtgggtctgccttccccagcccactgacacaaatgttgatctccttggcaacaccctcacagaaacaccccgggttaatagtttgcgtccttcaatccaatcaagttgacactcagtattaaccatcacagggtccatcctccttttgcaaggtgagaataacaaggacataaaggcaaatggcctgataatgaatggaaagaacataattagtttcaacattaaaaggagaaatattttcaaccttcaaaattataatggcgttaataatgatctcagataatacttcaaaacaagattttttgtcataatttatacaattgtatataataggatgttgagaatgaatgcttagcagcctagattaatggtgaatgacacaattggtgaagaacataattgttttacaattctatactctaaatagagctgcaaccagttgaggctaaaatgtcctccaagcattattaaatttgtaggccaattaaatctgctaccctgatcataacaccagccatatgtcccatatagagtccttctcctgaacccatggttgtaagcagttaatttgcggagagggwtcatcagg

SEQ ID NO: 63244 - DNA, 2217 bp, Homo sapiens
agctttttccccttactagatgaattctatcctgaaaatctatgcatttgctaaagttgacatccatccattttttagaagatcagaacacatttcactatgtagcaacaggaaatcgaggaagcagatgaaacatgmaattgaatctcatgagtgataaagagaacaattacagtacaatcactttaaggtggtatcatggagccagtccctcaaacagcatgaacagaaaaatcttaggactatgacaaaacatattgacaaataatggctggcaaataatggatgaaacttccttaataagtttttattgtacttgtatttcctagtatgaatcgtaatgatacccatatattagattttttttcccactgaagactgttgggattgctatttttactttatttataatacaattgaaatactatatattttcaccttaattgccaaatacactcctggctttcattgttcacactaggctaaatgaaactcactcgcattttagtgcccatagtattggtacagaatatttcttggcacatttacaaaataaaagtgtatgtttatgattgaatttgcataaagaaatataggcctgtgctagagaaactgtacttgacctctcatttaatgctcgcttcaaccacgggtcctaggatccagtctatgaaactgctgtttaacatatttgtcatataattcattgttttgctgttgtattagtaaatgtgcactaagctaagatgctatggcatgaaatactcaaggaaaagcttgtagcttgtgaggagtttatttctctctcacctaatgctgcaggtagggcagttatcttaggtctgtgtggcactcttctctattttttgattgagagactcaggaccatgtgctcccacagcttactcaccactgacgtgagagagggccagttgtcatctccaggggagcagcatcccaaaaagaaagggatacatgaataaaatatgattaaagagacctctttcagaaatgagacacttctacttaccttccattggctggtcaaatgattacatctgagtgcaagacagaccaaagaaagcagtttgaccatgtgcccatgatgaagggctggaggaaaaatttcttctagaaagctaacagtatcttgtgcctgtattcattttcttaatttgtactatgataaatgtccttatttggtactgcagatattattaggagttcttagtaagagaaatataccattccaacaaacattattattccattaattagttgatacaattcatgataaaaagaatgaatgcagatgttattcacttgtgtattcattctgtttttctcgccaaaggacaattcctggagggtacagattttgccttgtaagctcagcatgcagtagtgtgagtgtgactgaaatagtctatgaacatgtcaacactttggttatggcatgaagaaatgtggctaggtgaaattgtcaggaagatttttaccacctaaaaagaagaaaactatataaattaacagtgctttgatgatgccaccagtgatttagcacttatttatgacactaaacttaaataaaaatatgtgcaaacaacagtatctgcaaattaaaagcagcttaataaagattggtccagatgaagtggtaattcactaccatgtcatatgaggacttgtagctcattagtttatgggataaaagagactcatgagaatatgatagctgttccagctgtttccaatattcaaagagacacatgttgctctttctggccctccaaagaaaatcttgattacttggttaaaagttcttagctcaatttaaataaacacactctataagtgatgacagcagtggcccatctggagtggctgctgcaaagatgccggcagcagcaggggagatgtggctgtgcttcatggagccagggggagccagtgggggccaggaacaggtggaagccccaccctcttccaagttggaagggtgagaccaacctcccaggctcagctacagcctcccagcccagctgtacctttggactgtgctctcagggaccaggaagaccccctgcccttgcaggctcaaaaatgcctgctcctgcaccctggtctctccccattcccagcacctgcatcgatttcggagcaaagttgaggctgaacctagctgttgttgggacctggccgggtgtgtgtgtgctt

SEQ ID NO: 63245 - DNA, 658 bp, Homo sapiens
tctgtggggaaatgaaagaaagaagtaggactgagaagaaaaatcattgaaaacctggaagttgcaacaaacatttcaaataatcccacaaggacctgtaaaggtggcatacacttttaaaactgttgtataaagaagcaaagtgtatcagcctttatattttcgatgttgactaatattgattgcaagttattccaagaaggagcatgaccttggacacggctgatagaaatttctatagaatgacttggctaagagccctgagatgccaatgcttctagcacctaaaggaacaaatgctttagtcttgaaggaggaatctggacagtgcaccgtgtcatctactgcagtcataaggctraaattgctatcaactgaaaatattcttggatgttataatacttgttcctgtcataaccacttataaatttgcttgaatgatggttccaaattctcattaagttttgatatagaaagctgcaaactggagctaagcatacacaagttgagctacaaaactatggatacaatatatgaattcatgtcttaataatttatatctagccaattactatctgaagtaacaattaaaggtatgcctgaattattgtagcaatttttagtagatgccaacatgtctctgtgtgtatgtgtatat

SEQ ID NO: 63246 - DNA, 780 bp, Homo sapiens
tttttttttttttttgagacagggtctgtcacccaaggtgggatgcaatggcaagatcacagctcactgcaaccttgagctcctgggctcaagcgattctcctgcctcagcctcccatagctgggactacaggcatgcaccaccatgcttggctaattttttttttttgtagagatggggtcttgttatgttgaccaggctggtctcaaactcctgacctcaggtgatcctcctacctaagcctcccaaagtgctgggattataggtatgagccactctacccaacccaggaaagttaaatcttttgcaagccttgatcaatcagaaataaaaagaaaaaaaaatggatcacttatgattcaacaatgttggctcctcatctgttatggactgaatgcgtgtgtcgaaatccccaatgtgctggtattagaaggtggagcctgtgggaggtaattaggtaatgagggtagagccctcataagtrggattgatgcctttataaaacagaccctagaggatgggcacggagactgagatgggaggatcacctgagcccggaaggtggaggttgcagtgagctgagatcataccattgcattctagcctgggtgacaaagtgagatgctgcttttaaaaaaaagagagagagagagagcaagagagagagagaccctagagagttctccagccatcctcaaccatgtgaggctatggtgagaagttagccatctgcaaacccaaaagagagcctcactaacaaccaactagctgccacctgga

SEQ ID NO: 63247 - DNA, 780 bp, Homo sapiens
tttttttttttttttgagacagggtctgtcacccaaggtgggatgcaatggcaagatcacagctcactgcaaccttgagctcctgggctcaagcgattctcctgcctcagcctcccatagctgggactacaggcatgcaccaccatgcttggctaattttttttttttgtagagatggggtcttgttatgttgaccaggctggtctcaaactcctgacctcaggtgatcctcctacctaagcctcccaaagtgctgggattataggtatgagccactctacccaacccaggaaagttaaatcttttgcaagccttgatcaatcagaaataaaaagaaaaaaaaatggatcacttatgattcaacaatgttggctcctcatctgttatggactgaatgcgtgtgtcgaaatccccaatgtgctggtattagaaggtggagcctgtgggaggtaattaggtaatgagggtagagccctcataagtaggattgatgcctttataaaacagaccctagaggatgggcacggagactgagatgggaggatcacctgagcccggaaggtggaggttgcagtgagctgagatcataccattgcattctagcctgggtgacaaagtgagatgctgcttttaaaaaaaaragagagagagagagcaagagagagagagaccctagagagttctccagccatcctcaaccatgtgaggctatggtgagaagttagccatctgcaaacccaaaagagagcctcactaacaaccaactagctgccacctgga

SEQ ID NO: 63248 - DNA, 780 bp, Homo sapiens
tttttttttttttttgagacagggtctgtcacccaaggtgggatgcaatggcaagatcacagctcactgcaaccttgagctcctgggctcaagcgattctcctgcctcagcctcccatagctgggactacaggcatgcaccaccatgcttggctaattttttttttttgtagagatggggtcttgttatgttgaccaggctggtctcaaactcctgacctcaggtgatcctcctacctaagcctcccaaagtgctgggattataggtatgagccactctacccaacccaggaaagttaaatcttttgcaagccttgatcaatcagaaataaaaagaaaaaaaaatggatcacttatgattcaacaatgttggctcctcatctgttatggactgaatgcgtgtgtcgaaatccccaatgtgctggtattagaaggtggagcctgtgggaggtaattaggtaatgagggtagagccctcataagtaggattgatgcctttataaaacagaccctagaggatgggcacggagactgagatgggaggatcacctgagcccggaaggtggaggttgcagtgagctgagatcataccattgcattctagcctgggtgacaaagtgagatgctgcttttaaaaaaaagagagagasagagagcaagagagagagagaccctagagagttctccagccatcctcaaccatgtgaggctatggtgagaagttagccatctgcaaacccaaaagagagcctcactaacaaccaactagctgccacctgga

SEQ ID NO: 63249 - DNA, 780 bp, Homo sapiens
tttttttttttttttgagacagggtctgtcacccaaggtgggatgcaatggcaagatcacagctcactgcaaccttgagctcctgggctcaagcgattctcctgcctcagcctcccatagctgggactacaggcatgcaccaccatgcttggctaattttttttttttgtagagatggggtcttgttatgttgaccaggctggtctcaaactcctgacctcaggtgatcctcctacctaagcctcccaaagtgctgggattataggtatgagccactctacccaacccaggaaagttaaatcttttgcaagccttgatcaatcagaaataaaaagaaaaaaaaatggatcacttatgattcaacaatgttggctcctcatctgttatggactgaatgcgtgtgtcgaaatccccaatgtgctggtattagaaggtggagcctgtgggaggtaattaggtaatgagggtagagccctcataagtaggattgatgcctttataaaacagaccctagaggatgggcacggagactgagatgggaggatcacctgagcccggaaggtggaggttgcagtgagctgagatcataccattgcattctagcctgggtgacaaagtgagatgctgcttttaaaaaaaagagagagagagagagcaagagagagagagaccctagagagttctccagccatcctcaaccatgtgaggctatggtgagaagttagccatctgcaaacccaraagagagcctcactaacaaccaactagctgccacctgga

SEQ ID NO: 63250 - DNA, 716 bp, Homo sapiens
tcttcctgtagccctcatataatctcttagctgggaaaaggggggctttggagccagctgaaccacctagaataagtctcctgaggtctcagagcctcagtttctcctctgtaaaatggggtcccacagggccccacaccatcttagatgttagagataatacatgtaactaacttatacagaataaaaaaataaacaagcatcagctgctgctattcctgtgccttgtctttccagcggaggggggtctttctggtccctccaaagctcatccctgcatgtgctccacacctgtaccactgagaccccaaaatgtggagctgcctcggtcaagtgttccagggtctgattcaggagagctgcccctcccaccacctgatggtaatccctctcccttccttcccggaggacagacaccttcctttctcatccacctggactccctgcccggagagcagcaggggctggacscccccagggctgcctttgtgcggctgccaacacacaacctgttgcttttaagaacaggccccttgccagctccagctgcctcagggacaagctgtttaatggagcctagagttggctccagggaagacaatgaattttaatgcttccggacacagcagtctggcagaacccagcctcccaggcatggccatgaggagcttagaaattgtggggcccaacccccatcctggacccctgagttcagg

SEQ ID NO: 63251 - DNA, 834 bp, Homo sapiens
ccttcttctcaacacaatttgagtacctactatgtgctaggcatcctgctaggctcggccaagggtgggaggaagaaacagcactggacagagacagacaagtgcaagggctttgttctcgcagaactcctcttctcatagagacagagagaaatacaaaacaagatcatctcagaggctgtcttctaagagctaaaacaggcartgggagctactttagatttgggccatgggagaaaacaaagtttctctaggtggtgacgtttttgctgagataggaatgaaaggaagacagccgagtaaagatctagaggaagtctgggcgcggtggctcacacctgtaatcctagcactgtggtaggccaaggtaggaggatcacttgagcccaggagtttgagaccagcctgggcaatatagtgagacctcatctctacaaaaaaatgaaaaattagccaggtgtggtggtgtgcgcctgtagtcccagctactcaggaggctgaggtgggaggatggcttgagcccaggaggtcaaggctacagtgagctgtgatcatgccactgcactgcagcctgggtgacagagtaagacctgtctcaaagaaaaataaaaaacaaaaaatacaaaaaacagaaaagatccagaggaagaacatctgggcaaatgggaaaggaagatcctgaggaagctcaaagtgtttcatcttgtcacaccaaagtggcatacagtgttaggccttctgagtagaggtatggtccctggaccagcagcatcgacatcacccaaaagcctgttagaaaggcagactctcaacccatcccagatctactaacag

SEQ ID NO: 63252 - DNA, 1456 bp, Homo sapiens
ccaccctttcctcccccttctcccctccccaacatctgctttcctacaactgcttcatttctcctacttcttttttcactcttgccagtaagtcaagtgacagccaggaaaaaagcaagtcatgatgcccactcagctcatgtggctcacatgaataagcactgcattccaggaagcaaaacagttgaaatcccaaactttcaagtgattgtacatacattatgtgacttccctgaaacttaagtaagtattaacataaccaacagctaagagaaagttatttttctgtttattacagaaacctattattcactttttttatgcaggaagaaagtgaggctcagggcctatctaagtccatgtgggctgctataacaaaatattgggaggcttataaacaacagaaatatacttcccaaggttctagggttgggaagtacaagatcaaggcaccagcagattcagtgtctggtgtgggcccttttcagggttcatagagggtgccttcttgccatgtatgctcatggcagaagaggtaagggatctctctggggtcccttttataaaggcactaatctcatttatagacactccaccctcgcgacctaatcatctccccaaaggcctccatttccagctaccatcaccttgggggtcaggtttcaacacaggaatctgggggagacacaaacatcaagaccatagcaagggggactagaaaggcttcaggagacaaaaagccccactgggatccaagtccaggtctctgcctccatccatccactgagctgcatggcctggcctgagaggacatactgtccaatggctcaagaagagagtgatagcagtcttttggcgcttctcaaaatgtcccaacgatggctctgcctccctgcctgaggcaggtccccagctgctgtctcggtccccatttctgcaggatggtttctccacattgtcagtgccacagaaggggctctgagggcctggatgggaggagcctgtgacaatgtcactgacagcagcagatcaacagcaccaccacacaccagccacatgctccagggcatgtgtggagcctgtagacacaggcgcaagtgctcccacacagaggggaacaccatcgagggggtttaacacagcacacgctaccacccagtcttgggtctgatgccagaccaaagcctatgagctgaaccaaggcttcatacttgcctgagcaatctgagtgcagcgtctaaggagcccactgggcaatatatgtaaacacagtaatgaaggactcaaaagcygagtgcaataatgtgggagaagccacagccatattcagttcctggaagaccgagcggctcccttagccacataccctgcaggagcagctggggagttatggccctcatatccccaacaacgacggcattatatttttggaatgagaaggtgctttgttattgcc

SEQ ID NO: 63253 - DNA, 1308 bp, Homo sapiens
atattctgtataaagagaataaatgtaaatttcaattctatcttttccaaatcatcaaaaattccagtcatggtgggtcacgtgaatcagcttcctagaacctcacagaaacatgaagtaaggactgaagagaggccgggcrcagtagctcaaacctataatcccagcactttgggaggcccagatgggcggatcacctgaggtcaggagctcgagaccaacctggtcaacatggcaaaaccccgtctctactaaaaatacaaaacttagcagggcgtggcggcacgtgcctgtaatcccagctactcaggaggctgagacaggagaattgcttgaacctgggaggttgcagtgagctgggatcgtgccactgcactccagcctgggcgacagagcaagactccgtctcaaaagaaaaaaaaaaaaagaactgaagcgagcaccctcaagtgtcaagcatgcttttacacacccggcagctacagggaaagcctggaggcttggctcctctaatcgtttcttcctgcttgttctccaggtcattctgcccacaggtgaagtctctactctactctggtatcaagcaggcctgggcaaaccttgttcatgtcaggattctggaggggagaatcagctcaacaataccaacccacagcaatgaaacgggcgttccacaaatgcacacacaccacacaacaccgaatgcaaatccgtgggacagcattcaggtgcaaaacaagtagaaactgagtagagacaaacgggccagccactgaccttgccaaaccttgcagacaagggagaaagcaattcactgagttaagccaagtacagagacatcaccttatgcacaagttctatcatacataaaattactttaatcataatagttttaactctaagataagttgcaaagactcagaaatgaagtttacttttattttatctttacaaaaacaattctttttaaagaaacttcgtgatggcgccaagatggcagtactttctttcctaagtcataaaaacagtcagaggtaacctacctctgaggccctgaactagccagggaaaaacagatacggacgccaaatatttgctgaccaccaggaccttacgatataattgggggttgggactcttctataatctctacacggagtagcagcctggttgcaaggagggtggagcttttacgaagggccacttctattataccacagctttgacttcttacattgtatgttactgatcaataaaatagcaagatctttaattcacccattagttaagattgaaaaaggatgcatt

SEQ ID NO: 63254 - DNA, 613 bp, Homo sapiens
cttggatcccgaagcttccatggcctctcagcacagcaaatacggctgcttgttggggcctgagggcttctgtgtagtatctggaggactcccccacacacacccccttcatgcatgcacacccacaacacacaacacacacataacacatatcccatacacactgcatataccacacacatcacacactacacacacatcacacacacayccatagcacacatactacatacaccacacacatcacattcacaaacatcataaacacaccgcacacgcatccctggtcaggagagtgtcgggatctggctaagccgatggatggggctccagcccctcactctgtacttcaagtgggaaaggacagatgtctacctgagatcccacctgaagaaggtgtcctgtggccacatgaagtggtcccggagagggacctcctttgggcatgaccaggtccctgcacatgctctccaggtgcgtggggcattttgacggtactcgccatccccgaggctggcatggctttcccctccccagggccagtgcccttgagagccagctcagcctcattgcctcctccccggcgtctgggtggacagctcatggccctggc

SEQ ID NO: 63255 - DNA, 1431 bp, Homo sapiens
atcatgcctgagttgtgagcactgcatcaggaggtgttttggatcatccctgaggcatgagcactggaccaggaggtctgctggattatccctgagttgcaagcactgcaccaagatgtgtcttggatcatgcctgagtgtgagcactgcagcaggtggtttttttttatcatccctaggtgtgagcactgcaccaggaagtatcttggatcatgtctgagttgtgatcgctacaccaggaggagtcttaaatcatatctatgttgtgagcactacaccaagaggcattttggagcatccctgaggtgtgagcactgcaccaggaggtgtctttgatcacgcctgagttgggaacactgcaccaggtgttttgtaacatacctgaggtgtgagcactgccttggatcatcactgaggtgtgatcactgcagcaggaggtgtcttggatcatccctgtaatgtgagaactgcacaaggaggtgttttcaatcatccctgacatgggagccctgcaccagatgtcttggatctcccyggggagagagcactacttcaggcagtgtcttgggtcatttttgaggtgtgagcattgcaccaggaagtgtcttggattatccctgaggtaggatcactgcaccgggaagtgtcttgaatcatctctgaggtgtgagcactgtaataggaggtgtcttggatcctccctgagatgtgagcactgtaccaggaggtgtcctgaatcatcagaggaaacagtactacaccaagagatgtcttggatcatgcctgaggtgtaagcactgtatcaagacaggtctttgatcatcccggaggtgtgagcacttcaccaggaggtctttggatcatacctgatgtgtgaacatttcacccagaagtatcttatatcatgtctgaggtgtgccccatgtaccaggtggtgttttgtatcatctctgaggtgcaggcactgcaccagtaggtctcttggattatgccagaggtttgagcactgctccaggaagtgtcttttatcatccctgagatgtgagcactgcaccaggaggtgtctgaaataatctctgaggtgggagcactgcacagggaggtgtcttcattaaaccccaagaagggactactgcaccaggaagttttttggataaccctgaagagggagtactacaccaggaggtatcttggatgttaactaagttgtaaccactgcatcaggaggtgtcttaagtaatctctgaggtgggagcactacaccagaaggtgtcttggatcatccctgaggtgcagacactgcaccaggagatctgtaggattatgcctgaggtttgagcactgcaccaggaagtgtcttttatcgtccctaagttgggagcactgcaccaggaggtgtcttggatcatcacttaggtgggagcactgcac

SEQ ID NO: 63256 - DNA, 552 bp, Homo sapiens
cccaccataataagccatacagccaagtaaatgtttttgagaaaggtgaggctgaaggtggcagttgcctgagctactgggaaggctgctggctgtgtgtctggtggatggtggatgccccagcctgactcagtggggatttcggggagaatgatgacaatggttgggggtgggtaggggcctagaccaggggctgtgggactgagcttggtgtggagcaaggcatggccagttgcacctgcctccttcagaggtctgtcstgagctctgtggctctgcagctgctgtgccagctcggcaggcagcagctgtgtctggcctggcacctctggtggagccatcctctcatcagcagccccagccactccatggctcttgctgccttgccgggaaagcagactgtcacccttttgttctgagcgagccactgggggtcttggctgatgtaggagtggggagggaggaggcccaatgctgtgaaactggacgtcttgatgctagtgttgtgagacagtttgcacacacttcgtgctgatggctgccaggtctgca

SEQ ID NO: 63257 - DNA, 552 bp, Homo sapiens
cccaccataataagccatacagccaagtaaatgtttttgagaaaggtgaggctgaaggtggcagttgcctgagctactgggaaggctgctggctgtgtgtctggtggatggtggatgccccagcctgactcagtggggatttcggggagaatgatgacaatggttgggggtgggtaggggcctagaccaggggctgtgggactgagcttggtgtggagcaaggcatggccagttgcacctgcctccttcagaggtctgtcctgagctctgtggctctgcagctgctgtgccagctcggcaggcagcagctgtgtctggccwggcacctctggtggagccatcctctcatcagcagccccagccactccatggctcttgctgccttgccgggaaagcagactgtcacccttttgttctgagcgagccactgggggtcttggctgatgtaggagtggggagggaggaggcccaatgctgtgaaactggacgtcttgatgctagtgttgtgagacagtttgcacacacttcgtgctgatggctgccaggtctgca

SEQ ID NO: 63258 - DNA, 703 bp, Homo sapiens
caaactcctctcaggtactgagcactcctgtgtgccaggcccagctctactggcacaaactcatggaaccatcaccagccctgggaatgggtactattattatctcattttcagagcaggcaactgagactctgggaagcagctaaccttggaaccggaactgggtctctctgataccagaccctggcttgctcctaccacattgtcttgaaatcctttgtttacagctcgccttcccctctcggctgcagaaggcctgtctcagtctcattcatggttttcttctactcccagggtcccaagtgtcaaaatctgcctaaggagcaaataaatgaatgagcctacaaggcaagcccctcttcgccttccgggcccagttcacgccttggttggcatctccagttggaggtggaattgggagggggctggacagaggaatttcaagctgcctgagggtcagaagcagagaggagggggagaagggggagaaagcgaaagtgaagtgagctgggagcccctgtgaggaggcgcagacagggaaggaaatctcccggtaataattcatcggctcaggaagcagcagcctggcctggggctgtgtgtgggaccagccctgcggggagggggcccatgctggctgtttycctcctccccaaagcccagcctggctggggtcacggtcaaatgctggcggtggggggat

SEQ ID NO: 63259 - DNA, 687 bp, Homo sapiens
tcctgcctcagccaggactacaggcacatgctaccacacccggttaattttttttggtagagatggagtttcccaggctggtctccaagtcctggcctcaagtgatcctcccacctcgatctctcaaaacactgggattacaggtatgagccccactgtgcctgacctgtttttctcctcacctcactgtgctctgtctctcctcctccttctttcctgccctttgtcaaatattcctggggcttctgctgttacctctccctgaatgagaagctgaggtctaggaaaatccccttctccaccccatctacaaccagatcctaaaacagcagccttctggtgcttcgaggcaggttttctttgcttacttgtcttcccttgagtaacttactgtttcccataagaagtggaaacagaactagtatagtaggctagagacttggttacaagtctctgtcctgttaattaactcttagtatgattaygcacagtcacttcccctcttaggactcatttccccccataaaaataccaggggacctttgggctgggcacagtggctcactcacgcctgtaatcccagcactttgggaggccaagtcgcgcagatcacttgaggtcaggagcagatcacttgaggtcaggagttcgagaccagcctggccaacacggtaaaaccccatctct

SEQ ID NO: 63260 - DNA, 567 bp, Homo sapiens
ctctttttggaactgaatgagccccttcaaacagcaggcttttggaatcctgtcagtttcctcgtttaccacagagacaatatctgcgcactaaatagtttcccaactataaccctccaaaatcaggctgggcgcggtggctcacgcctgtcatcccagcactttgggaggcggaacgaggtggatcacttcaggtcagaagttcaagaccagcctggccaacatggtgaaaccccgtctctactgaaaatacaaaaactagccaggtgtggtggcacacacctgtaatcccgggattacaggaggctgaggcaggagaatcycttgagcctaggaggtgaagattgcagtgagctgagatcgtgccacagcactacagcctgggcaagagtgagactctgtctcaaacaaaacaaaacaaaaaagtcatttgcatcaagtcagccacttcctgcagagtctgttgaagagcacacacagaaaaacaaattgcctaagagcaaggtaccctggagtactccgttaaggggctgatctcattaccgtagtttaggattcaggtgccaa

SEQ ID NO: 63261 - DNA, 1120 bp, Homo sapiens
ggctccagggcaaactggttactgatctgcctctaagattgttctctgtcctcactctgaccctccaggacagcaaagcagcatccatttacagtactgttccctgttaattcctcttcccactcaatactgctaatgtgacgcctctccctgagaacttgaaatatgacttctgtgagttttgcatgtattttgccacgtatttgcctcattttcatcaatctggctctgaatgtccccttcagtaaggcagccaaatagaagaaacacaaaattctaaaaactacttccttcaatacctttttttcatggaatttcccccccctaatttggtagacaaggaaggacagtcagtcccaacttcagaattctgggttttcctgtgtaaacaccacagatactagagccttgcttcagggactcaaaggcttgaaccctaagaaacattcccctctggtggcacctcctaaaattccatgttgttacttcaagcaatggaattaaaaagaaaaaatctgcattttgtttagaagccaatgatccagagggtatggattatttaaagattcttttcaatttttctcattttatcatgtgttttggcaagaaaagaaggggcatccaaataaatttctttgtaatttaagatatgatgaaaaggatgatgggtaagatattgaaacccaagaggaacgtgacttagaatcatatctcttaaaaatatacacagatgcactcatgtatgatagcagattaaaatgacatggacaacccctccttccactacaagattgagaaaatagaacraaatttgttttaatagagccaagctttaaagaaagaacaagaaatgtccaggtgccacaaagaattcaaaatctggaatataagccttaagggctggtagttgaggacaggaaacagctttagctctttgcaagggagtgaacctagaaacctagaagattgttgaacaaagcacagaaccttccattgctccctgcagcctcacactaccagaatactgcctgtcagcccagagcaaaaacaaactaccggcggggcggggcggggcggcgggagaggcggtgcttttcggcaggatgaggaagctacttga

SEQ ID NO: 63262 - DNA, 739 bp, Homo sapiens
aggaatcatctcttcatattagttattgtcaaatgtgttgttcctgagtaattcatatctcccactgygagaaaagggtggcaatcttgttattattcaagacctatagcttgtcagaacctgtctgtgttgagacgttctgactcttcttgcctctaaagtccccagtgctatttgtttcatgctggctacatcattactcatgatgctgtaccatccatcctgctgcctgtgaatactggcttctgatggctttttcagaggtcgtgccggtgcttctttgaaggcgaccacaaatgcacagagtatgcaggaaaatgtgcacagtcatttattttatggtcaggtaaatttaccctttggaactttatggtataaatatagaacaacacattttccaaccatgtcttctcttgaacccttgaggctgtaatcacagcactcctaaaatgtgatctcttttcatgttgactgcacccctggtttcctcacactgtttccagtggtggagcaagaagagtgatcccatttaggcaaggaatccctgacccttatctggctcagcttaacctgggagggcacagtcatcacatcagctggaggaaagaatgaacatggattggaagagcctgctggtgttgcagaacaacaatccggaaagcccttggaggaggtgggtgaagccaccttcgagcactatggtgcagcctgcagagggatgggggatggccctgggttt

SEQ ID NO: 63263 - DNA, 739 bp, Homo sapiens
aggaatcatctcttcatattagttattgtcaaatgtgttgttcctgagtaattcatatctcccactgtgagaaaagggtggcaatcttgttattattcaagacctatagcttgtcagaacctgtctgtgttgagacgttctgactcttcttgcctctaaagtccccagtgctatttgwttcatgctggctacatcattactcatgatgctgtaccatccatcctgctgcctgtgaatactggcttctgatggctttttcagaggtcgtgccggtgcttctttgaaggcgaccacaaatgcacagagtatgcaggaaaatgtgcacagtcatttattttatggtcaggtaaatttaccctttggaactttatggtataaatatagaacaacacattttccaaccatgtcttctcttgaacccttgaggctgtaatcacagcactcctaaaatgtgatctcttttcatgttgactgcacccctggtttcctcacactgtttccagtggtggagcaagaagagtgatcccatttaggcaaggaatccctgacccttatctggctcagcttaacctgggagggcacagtcatcacatcagctggaggaaagaatgaacatggattggaagagcctgctggtgttgcagaacaacaatccggaaagcccttggaggaggtgggtgaagccaccttcgagcactatggtgcagcctgcagagggatgggggatggccctgggttt

SEQ ID NO: 63264 - DNA, 739 bp, Homo sapiens
aggaatcatctcttcatattagttattgtcaaatgtgttgttcctgagtaattcatatctcccactgtgagaaaagggtggcaatcttgttattattcaagacctatagcttgtcagaacctgtctgtgttgagacgttctgactcttcttgcctctaaagtccccagtgctatttgtttcatgctggctacatcattactcatgatgctgtaccatccatcctgctgcctgtgaatactggcttctgatggctttttcagaggtcgtgccggtgcttctttgaaggcgaccacaaatgcacagagtatgcaggaaaatgtgcacagtcatttattttatggtcaggtaaatttaccctttggaactttatggtataaatatagaacaacacattttccaaccatgtcttctcttgaacccttgaggctgtaatcacagcactcctaaaatgtgatctcttttcatgttgactgcacccctggtttcctcacactgtttccartggtggagcaagaagagtgatcccatttaggcaaggaatccctgacccttatctggctcagcttaacctgggagggcacagtcatcacatcagctggaggaaagaatgaacatggattggaagagcctgctggtgttgcagaacaacaatccggaaagcccttggaggaggtgggtgaagccaccttcgagcactatggtgcagcctgcagagggatgggggatggccctgggttt

SEQ ID NO: 63265 - DNA, 851 bp, Homo sapiens
agaatttcaacgctcatatgtatttttgtgagtcaccacgaaaacagttaaactgatcaaccgttttccaaactgcagacaccaaattgaaatcacaaagcactttctttttttcccctaagttgactcttctattcctgcctgctgtgctttatgtcagcaagtgaccctttcctgtattataatgcagtatagtatagatgcatcatgtaagaccagagagaaaccgattccaaaaccacctttcctcaagccgccgtttgtaacgaccatatgggyggtttgaaggacacagagagagcctactgacacttcactttcgctacacgtggtgatttttccagtgcttccggagacactgaaatttagttccaaacattgccttagaggattcttcattttattcattctaccgatgatccactcagaaaatcaaacctgagtacggagacattggagaagtcgttaaagtattggaccaagtcggttcgtcacgagtgacaaagttattccacactctacttgtacatactctgctttgccttcatgatggcaaagagtaatttttcgctatagagtaaaaacccgagatttattacggaatcagcgtgaaccttcccagcacagctcacagagcatacgccaaaaattacagtgtgattcagtttcaaaaattgtctgtagtgacctgtgaattcacagctcgtgaggacattctttagttcggctgaagccaaaaaacctggaaccatcgaaatgggaagaagtggagtctgccaaattctgcctcttacactttcagctaccacgccatgttcaactattgtacttgataaggattggaaacttaa

SEQ ID NO: 63266 - DNA, 1596 bp, Homo sapiens
tctatccctttcccaccataaacacaaccacactggttattctgccaaccctaatgtgaagtgacttgtggatacagagtctattcatacagagtctattcatattgtagaaagtagagatcaatgtatgttcatagcaaactaggaggaacagcccaggtgacagggaacattgcaaacatggaactgccagcccgtgagttgaaatccatgtacaagatgctcccacacactgagccccttccaacccaccccagacttaccagcaggagaagatgcaaaccgaaatggtcactcctctaccagggatgctctgggagcatttttctctcccaaagtgacattcatggaaatctgcgtgtagccttcgggggaagctgaggtttttgaactaatggtcttatgtgcctgtcactgaagcccccccgtgtgttttttaccttgatggagggggtgagccttctttccattgcctgctttggaaatgccatgaagccccgtgaagccagccctgagttcactgagttgctgaaccgaggactcagcagctaccttcatactattggcttcatgagtaaaagcaaagcagagtaaagaaaacaaacaaataaacaacacaccaaccmaaggcccttatttcaatacacggtgcacaggcttctctgacaacttatagtataaatttaatgcccatgcctgcaatgcatataccacacacagaacaggaatttccaggataatcaatactcacaaaataagttcacatttctcttttaaaaatagagatcattttgtaaaaaacctttaggttcatcccaaaattgggtagaaggaacataggtccccaatatcctctcaccacacatatgcatagcccccttcactatgaactttctgccccagagtggtacattgtctacaacctttcaacctacatggacacatcactgtgactccaactccatcgctctccttaggattcacttgagtgttgtatattccatggattcaagcaaaggcataattgcatgtatccaccattattgtattctatggactagtttcacttccatgcaatcgtactctgtccagtctctgcacttctgcttcactctcggtcccttgcaaccactcaactattgacttgtgtattcatatttaaagtgtggacacatctcgttgtatatatttcttatgtgcaaaatgctgttttaaagtatgtacacattgtctaatgtctaaatctaggtaattgacattcattacctcacatatatattactgtggtgagaacactgcacatccatgttaatagcatttttcaaaaatacgatctgttgttaagtcatcatgttatacaataatccttgaacttattccccctatgtaactgaaatgttgtgtattttgaccaatgtcttctcaaattccccaccccctgccaccacagccccaaacaaccacctttcttctctttgacatccatcagactacctttgtgatgttctacatagcattgagattatgtggtatttgtgttcctacctatgcctgacttatttcacttagcatgatgttctccaggtgtacccatgt

SEQ ID NO: 63267 - DNA, 1596 bp, Homo sapiens
tctatccctttcccaccataaacacaaccacactggttattctgccaaccctaatgtgaagtgacttgtggatacagagtctattcatacagagtctattcatattgtagaaagtagagatcaatgtatgttcatagcaaactaggaggaacagcccaggtgacagggaacattgcaaacatggaactgccagcccgtgagttgaaatccatgtacaagatgctcccacacactgagccccttccaacccaccccagacttaccagcaggagaagatgcaaaccgaaatggtcactcctctaccagggatgctctgggagcatttttctctcccaaagtgacattcatggaaatctgcgtgtagccttcgggggaagctgaggtttttgaactaatggtcttatgtgcctgtcactgaagcccccccgtgtgttttttaccttgatggagggggtgagccttctttccattgcctgctttggaaatgccatgaagccccgtgaagccagccctgagttcactgagttgctgaaccgaggactcagcagctaccttcatactattggcttcatgagtaaaagcaaagcagagtaaagaaaacaaacaaataaacaacacaccaacccaaggcccttatttcaatacacggtgcacaggcttctctgacaacttatagtataaatttaatgcccatgcctgcaatgcrtataccacacacagaacaggaatttccaggataatcaatactcacaaaataagttcacatttctcttttaaaaatagagatcattttgtaaaaaacctttaggttcatcccaaaattgggtagaaggaacataggtccccaatatcctctcaccacacatatgcatagcccccttcactatgaactttctgccccagagtggtacattgtctacaacctttcaacctacatggacacatcactgtgactccaactccatcgctctccttaggattcacttgagtgttgtatattccatggattcaagcaaaggcataattgcatgtatccaccattattgtattctatggactagtttcacttccatgcaatcgtactctgtccagtctctgcacttctgcttcactctcggtcccttgcaaccactcaactattgacttgtgtattcatatttaaagtgtggacacatctcgttgtatatatttcttatgtgcaaaatgctgttttaaagtatgtacacattgtctaatgtctaaatctaggtaattgacattcattacctcacatatatattactgtggtgagaacactgcacatccatgttaatagcatttttcaaaaatacgatctgttgttaagtcatcatgttatacaataatccttgaacttattccccctatgtaactgaaatgttgtgtattttgaccaatgtcttctcaaattccccaccccctgccaccacagccccaaacaaccacctttcttctctttgacatccatcagactacctttgtgatgttctacatagcattgagattatgtggtatttgtgttcctacctatgcctgacttatttcacttagcatgatgttctccaggtgtacccatgt

SEQ ID NO: 63268 - DNA, 610 bp, Homo sapiens
ccatattcccttgcctgaactatagccctcataagcggagtgtcatcttacagggatgtatgtaatttgttgcttatgagcggcaatggtagtattggcaacagcagttgcgactggaccaggagcagaaaaagaggtagaattttgaatagaaggagagtcgaaaaactgaaagccagggtgagagcagacatgctgctgagcaggtctttcatgggcctgaaaaccaggctccacggcaagtgtgaaccaggcttcaagggagcctgtgactctacccgagtctgatttgtaggaaaggaaccaggcttcaagggagcctgtgactctaagtgagtgcgatttgtaggaagtggrccaggcttcaagggagcctgtgactgtaactgagtccgattaggaggaaaagaaccaggcttcaagggagcctgtgactctaactgagtccgatttgcagggaatgaaccagccttcaagggagcctgtgactctaagtgagtcagattaggagaaataggattgagggcctcattaccgggccgagaattggaagcctcttttccaagctgttcatatagcagagcctctgtaccgggctgcatagaaacgt

SEQ ID NO: 63269 - DNA, 562 bp, Homo sapiens
gagcacttaagcatcaaggacaggaccctggatgatgaaaagtgcatatttaaatttataaagtaaaaaatgaccatcagatactaataagtgatgaatacagcaacataatacttcacaaaatcattctgggtatgtttgacaaagaagaatgttacacagaaccttcttgtgctacccatgtgaagtgttcttctctctcactttagtctcaattcccaaccttacaattaccacatactcacatacacagaaaaagaaaaatwaacttattttattagaaggccatgattcacattttattctattacatcttttccatattgctgttataatagtgttgaagtgaaccctctttcaccagaagaatacctttgtgaatgtgaatagactgacactggagaagaccagctcagcacactcacttgaatgatccctttgtttttcaggcagtaaaaatgcctttgaggggggaaaataaagtgactgcggattaagcagacagctatacatggaaaaatatttgtcaattgtttgaagattacactgcatggtctacaac

SEQ ID NO: 63270 - DNA, 1018 bp, Homo sapiens
ttcttgttagatctgttagtaatgagagaaagatgggactggaacttataaaggtaaaaaatttacaactttaggcaatgcacaaccaaatgagttttatattttataaattatgctaccgagaaatgtaatatatgagtcagagagaaacttgaatggtgaattcctagaaaaatcaaacaaattctcaagcaaattaagttctgactgctgaagacctgtttgatctcagaaaatgcagagaactgtgtctatgatttagactggtaatcacttgggatatgtggcacttcctgattttatgagagaaactgatggtctgaacaatctaaattattatgggcccaaatatttaaggttctgaaacagttgcgaaaataaactaagttataacagctaaattgaaaatatgcacagagcactgattatatgtcaccaactacttgctattttccaggttacagaacatataatcaatttaaaaatacccaagaagggcattttggaggttacaaaaatttcctggggttacaagccgaacacaaccaacaaagaagattggtttttgtcagattccaagagaatgtgtactttcttcaaacccaccaggagagcagaaacagactggtaagatgtcaaagtgtcacgggagctatattttaaatgttacaattaaattcttgcctcaaagratttaagccctctgttgatatagtccaagttccttgttatatactaactcatacccacatcttctggggatcactctacttgctttgttagctatctcaacacacttcctgaagctccccctgcttccttgtatgtagtcatccatttcactcctctccagtgttctctcatctctctaaacacacacacaccagccttccattcattcatcaatttacaaacaccatattcttttcctgtaatttctcacttgacttttaccttttctgcctatgtagattacatggggcgtacatttgactaaatatagaaatatccatgcatc

SEQ ID NO: 63271 - DNA, 1297 bp, Homo sapiens
tgcattcagtagaaaccatacttccagggtctatataatcattctgtttgttttttctttcagtacagtattcagtaaattacatgggatattcagcgctttttaaaaataaaataggctttgtattagattattttacccaactgtgggctaaacgtaagtgttctgagcgtgtttaaggtaggctaggctaagctatgagtttccggaggttaggtatatttaatgtatttgcaacttagggtattttctccttatgatgggcttatcaggatgcaatcgataagttgaggaaaatgtgtaattataatcagcctgaacattctgacagggagtttaagattacacagcttatactataaagttctagttatcgacctggggcgaaatttattcttttttagtttttatttttcttatgtatttttttcttatattttaatatttattttcatctgctttcagtttcatttctaccattaactagttgtgtcactttggggaaattgtttcaccaatttgagtcttaagtattttcatctataaaatatggaattgatgagactatatgttgctaacatcctacctaacattttgtggctttttatcttttctacatctagcaataacttacaaaactctatagtctgtctttggatctctgagtacttgcataagatgcaaggatttactttcagagggtggaagtaaggaatctctgtcttatgttgtaaggtcattccagtttgcctgtatccctttgtcctgtagcagtagtttcagcttataaaaattcagatgaacttctccatctattttcatttgtttatgtatttcctgtgtcaggtttctgtatgtgtgtgtgtgtgaaaagttttaaaaagttttagagtattaaaagcaagctgcctcatcccttggaaaatctgtttaactctaagtagaagggcaggcgactcagcttgaaacaaatgcctcatagccttttagaagctttttttcctgctaattagctgtgaatgttctgtttgtttggtttctgacagagtcctagcaagcagaagcgaagrggctagaaaggaagggccctaattgtcagggagggtgacctccaggcttgtccacagttgtagtctccatgggagaagcagcttcttgggagggaggatgcttccatttatagacagttgtataaagtatagtactccctttactcttaggcaactttttttttttttttttaggtaaaagccagagctgtacagagaagattcctctattttctcagccactactc

SEQ ID NO: 63272 - DNA, 814 bp, Homo sapiens
attttcagatctggaagttatcattacacgctgccattttcttactgtaaacaacaaaaaaagtcatttttcagttaaagagggaaggaaacatttctggatctttttggtgtgtttcagagaacagcactcaaagaatcttttcttccattagtgagatagtggattcttcctaatgtaagaagggagaatatggtttccctcctctgaacatcttctggatcctctctaccacatcaggagctatctgtaagctatctgtaatctcctagagatttaggagttagaaagaaaaatgtttgtaagaaagcaaagaatgagccacaaagaaataaagtctttacccattttttccatgaacttgtcatagttttcactccggtctaccttccaagtgctgtcaaacgccatgatttcagttgagtcagcctctaggcagctagagattcaggtctgtccttgggcgagaatttattatatttcttatcttagaaccaacttcatactgtgatgtggaagcttaaagttcaggaaatcacctaactatgtcaagcaattaattaattcttattwattaattcttaattctcgttctgtacattcctgagatcttctgaaattcaactgaattaaaacatgagaagcatacctattctgtcttaaattacagtttgtgggcatacttatttcaagaattagaatgcatgccgtctgaagattgtttttctaagttcaaagtgcagactatgttggaggtaatataatttatagcatatatcaaataacatctgggaaatgagaccatgacctttcc

SEQ ID NO: 63273 - DNA, 657 bp, Homo sapiens
atgcctatcatcccagcactttgggaggccgaggtgggcggatcacttgaggtcaggagtttgagaccagcctggccaacatggtgaaaccccatctctacttaaaatacaaaaacttaactgggcatggtggcaggcggctgtaatcccagctgctcaggaatcccaattactcatgaagctcaggcaggagaatcgcttgaacccgggaggcagaggttgcagtgagccaagatcatgccactgcactccagcctgggcgacagagcaagacccwgtctcaaaaaaaaaaaaaaagaaaagaaaagaaaagagaaaagaaaataccagctccaagactgcaatttgtcacacttactgtaaggccacggtgtgatttttatctatgtttgatgtggttgcttcaagtactatgctcaccactgaacacttggcttcattaatagacaaaaaccaaattttaaatttgtcccagttttcccaattttgggaagagaggccaaatgttagaccacacacaattccagcggatttcaggccaacaaagccttgatgtgtctagcccacttagcttattaacggactaaaactgcatttgtaattaattccatttcatacagaagccggaagtctctacctgaggctgaaataagaaag

SEQ ID NO: 63274 - DNA, 657 bp, Homo sapiens
atgcctatcatcccagcactttgggaggccgaggtgggcggatcacttgaggtcaggagtttgagaccagcctggccaacatggtgaaaccccatctctacttaaaatacaaaaacttaactgggcatggtggcaggcggctgtaatcccagctgctcaggaatcccaattactcatgaagctcaggcaggagaatcgcttgaacccgggaggcagaggttgcagtgagccaagatcatgccactgcactccagcctgggcgacagagcaagacccagtctcaaaaaaaaaaaaaaagaaaagaaaagaaaagagaaaagaaaataccagctccaagactgcaatttgtcacacttactgtaaggccacggtgtgatttttatctatgtttgatgtggttgcttcaagtactatgctcaccactgaacacttggcttcattaatwgacaaaaaccaaattttaaatttgtcccagttttcccaattttgggaagagaggccaaatgttagaccacacacaattccagcggatttcaggccaacaaagccttgatgtgtctagcccacttagcttattaacggactaaaactgcatttgtaattaattccatttcatacagaagccggaagtctctacctgaggctgaaataagaaag

SEQ ID NO: 63275 - DNA, 657 bp, Homo sapiens
atgcctatcatcccagcactttgggaggccgaggtgggcggatcacttgaggtcaggagtttgagaccagcctggccaacatggtgaaaccccatctctacttaaaatacaaaaacttaactgggcatggtggcaggcggctgtaatcccagctgctcaggaatcccaattactcatgaagctcaggcaggagaatcgcttgaacccgggaggcagaggttgcagtgagccaagatcatgccactgcactccagcctgggcgacagagcaagacccagtctcaaaaaaaaaaaaaaagaaaagaaaagaaaagagaaaagaaaataccagctccaagactgcaatttgtcacacttactgtaaggccacggtgtgatttttatctatgtttgatgtggttgcttcaagtactatgctcaccactgaacacttggcttcattaatagacaaaaaccaaattttaaatttgtcycagttttcccaattttgggaagagaggccaaatgttagaccacacacaattccagcggatttcaggccaacaaagccttgatgtgtctagcccacttagcttattaacggactaaaactgcatttgtaattaattccatttcatacagaagccggaagtctctacctgaggctgaaataagaaag

SEQ ID NO: 63276 - DNA, 503 bp, Homo sapiens
cccctcactgaggggcagacctagaatttccttcttatgtaaaatacaaacccaaagtctgttggtggcagttaggaaagtgctagaaatgcaatggggcatccccccgccctgcttcccaattatttcctaatggcttttagacattcaaaacggttttgatcaggtgaataagtcaatacgtttttccattgtgaaggaagtagattgctcataataataatagctatagcggcagccgcagcaggaaatattttctgttcaaaaggattggctgtctccatccccatctgcccaggtgagaccaggagtgtggatgagtagagcttttccgttcacctatcctttaaactagcatttaattctgaatagaatagatatttttaatatttctcaattattaaaacatggcctacctaggtacaccattagaacaactctgtagaatacggaggtatataaacatcagccaataatcccccrgttgagtagtgattgtaggc

SEQ ID NO: 63277 - DNA, 503 bp, Homo sapiens
cccctcactgaggggcagacctagaatttccttcttatgtaaaatacaaacccaaagtctgttggtggcagttaggaaagtgctagaaatgcaatggggcatccccccgccctgcttcccaattatttcctaatggcttttagacattcaaaacggttttgatcaggtgaataagtcaatacgtttttccattgtgaaggaagtagattgctcataataataatagctatagcggcagccgcagcaggaaatattttctgttcaaaaggattggctgtctccatccccatctgcccaggtgagaccaggagtgtggatgagtagagcttttccgttcacctatcctttaaactagcatttaattctgaatagaatagatatttttaatatttctcaattattaaaacatggcctacctaggtacaccattagaacaactctgtagaatacggaggtatataaacatcagccaataatcccccagttgartagtgattgtaggc

SEQ ID NO: 63278 - DNA, 754 bp, Homo sapiens
catggtttccagggaggagctcttgtgggtttttttttttatttttatggatacataatagttgtacatatatatggggtacatgtgatacttggatgtgagtatacaatgtgtaatgatccagtcttggtaattgggatatccatcacctcaaatattgatcatttctttgtattgggtacattccaaatctactctttgagttattttgaaatatacagtaaattaytgttaactatagtctccctattgtgtggctgatcactagatcttactgcttctatttttgcacccgttgattgagatgtttaccaaagatgagtggtggtcaagaagggtacctcccacttttgcttccacttgctccaggaaggctctcactctccgtggctccaaaggcacattggagaggtaatgtctaggccaggccattcagcaaatagaagacaagcaaaaacaacagaccttatcagcgcctctcctaactcccctagcctgggaagctctgcctctgaggctcagtgagcctggatttgcatggaggaaggaggaagggaagggagggagccacaaggagcccagggcagcttgcctgctgcacaggcagccagggagaaagtgacaacagagacagatgagcccggcagctagggcctgctcttacacaaactgccttcatcagcaacttgccgctaccatcagtcaatcctcttgcaaaggtacatttgtacatttcctttcccagtaacccaat

SEQ ID NO: 63279 - DNA, 723 bp, Homo sapiens
taaaatgtgctgcatcatgtcttctcctctttcttcccaaatttgtatgttgaagtcctatctcctggtacctcagcacgtgactgtatttggagttagggtcttaaagagatgatgaagtcaaaatgaggctattttggtgggccctcactcaatatgactgatgtccttaaaagaakaatagataaagacacagatgggtacagagggaaggaagatgtgaagacacagggggaatatggcctctacaagccacaaagagatgcctcagaagaaaccaatcctgtcgacaccttgatctttgacttccagcctccagaattgtgagacaatacatctgtgttgtttaagccagcttgtctgtggtactttattacagcagcctgagaaaactaatatacaaggctaaattacttaatactcatcttgtttagaggcactgtggggaatttcatagcaaccttgagaggatagggcttactgaagggaccatccaacctggggtgtggtcacagtctaggcttgaggcttgcatgttattgtctgggaattgattgaggacgagtgcatgggtttcacctatagttttctagataccatgagaggatgctcatttatgctgccttatttaatcctcccattaacccggtgaagtagggattatactttccatttattgatgaggaagcagaggcccagggggttaagcgacttgacccgggc

SEQ ID NO: 63280 - DNA, 569 bp, Homo sapiens
aattccactcgcctgtgtctgccaaatggacctaaacttcagttcaattggaatggccttaaatgtatactcaaggaagaggatattaacacacttacctggctagagctctaaagccattagccaatcatttagtgataatttgatccctatctttctcatgttttattttctcatgtggttttaaatccaggagtggaaaaataggttgttatttctatgaaccctaacactctagcacctagggttttcacataggttgtgggcctctgagagaacacaccatttgtcctagaacctagtataatatattgcagatagtaaattttgttgaatatttgttggatgcttgacagaaagcttaatgaatcaaatatttctttgacctgccattcaaacctttttattccagtcttgactctgggataaattatctgtgtgctytttaatagatcttttcctcttcctgggtccttggtttctccatgtgaaaaatgaagagcagctttgtctacatgttctgaagatcctttcagctctgccattctaggatgctggaacacagatgc

SEQ ID NO: 63281 - DNA, 687 bp, Homo sapiens
tgtggccaggatctgccctgtttcctccagctcacagagcattccctctctcttcagaaaccccacagcccttatcgtctctgtcacttagtcaaacacaggttgctatagcaaagtactgtaaattgggtggcttataaacaacagaaacttatttctcacaattctggggactggaagtctcaaatcagggtgacagcatcatcaggttatggtgagggtcttcttccaggttgcagatggcttgcttctctctgtgtcttcgcatggcagaaagagggtgagaggattctatcatcacctggagggtaaagatttcaacatataaattataataaacagtctattttcaggttgmttctggcttcctcaagcctgactttcctcatagctgtgattttcttcatattgctttcccttaaacacaagtcaggtctgtcctttaatgttctataatgtggtttataaaacactattgaagacttgtggaatgagaaaggaatgacaatgcagatgagtattaccagatacagttgctcctagcatcctcagctcttgcctgtcttccagttgtgatgcccagagtagcacccgtatggtttggctgtgtccccacgcaaaatctcatcttgaattataatccccataattcccacgtgtaaagggcaagaccaggtggaggtaatg

SEQ ID NO: 63282 - DNA, 687 bp, Homo sapiens
tgtggccaggatctgccctgtttcctccagctcacagagcattccctctctcttcagaaaccccacagcccttatcgtctctgtcacttagtcaaacacaggttgctatagcaaagtactgtaaattgggtggcttataaacaacagaaacttatttctcacaattctggggactggaagtctcaaatcagggtgacagcatcatcaggttatggtgagggtcttcttccaggttgcagatggcttgcttctctctgtgtcttcgcatggcagaaagagggtgagaggattctatcatcacctggagggtaaagatttcaacatataaattataataaacagtctattttcaggttgcttctggcttcctcaagcctgactttcctcatagctgtgattttcttcatattgctttcccttaaacacaagtcaggtctgtcctttaatkttctataatgtggtttataaaacactattgaagacttgtggaatgagaaaggaatgacaatgcagatgagtattaccagatacagttgctcctagcatcctcagctcttgcctgtcttccagttgtgatgcccagagtagcacccgtatggtttggctgtgtccccacgcaaaatctcatcttgaattataatccccataattcccacgtgtaaagggcaagaccaggtggaggtaatg

SEQ ID NO: 63283 - DNA, 635 bp, Homo sapiens
cggccaccctggcaattccagtcaaatggcaagccagactcgctttgccggtcccttcctctcctgcccctgcagccgccaggaatggaacagtcccgcggtggggactgtgggaggcgcacgcgcgaggagtgtagggtgggggtgctggcggcggctgctttggcggcggttggtggccgtgcgggcggggagggagggggaggagagaagaggaggtggagaaggcttgggctcgcgccgctgaaggtacgcgtgagggcctgcgctggagccggcttgacagggtctgagggggagtggagaactgggcgaggaggttcccgtgggtgagcgcgtacgggatggctggctcgcgggacggccgaaggtggtggttggtgggagcagccagcgacgagcccgtagacactcgtacgcgtgcgggctgacgtgcgcgctacatggccggagtcgggcgaagcgggggrccgtggggaagaacgcgaggagggaggagtgggaggttgggggtgtcgctaggcgcccttagctccctccctctggaggagctgccgcggccactctgctgccgccgctgccgccgccattttgggttcgctttgcgaggggagacgatcccagtgtcggttgcg

SEQ ID NO: 63284 - DNA, 1003 bp, Homo sapiens
ttttactggagtgggaatatgaactgttggcagagggtcaaccctaaagctggaaaagctgagaaaaatctttatggcagatgccaaaacttctaaagatacaatgattgtaccatgttggctctgccttggggaaaatggaagttaaatacatagcttgtgatagtatgatagactatccgtgcaattgcttttcttgtttgcacgttgtgtgtgtgtgtgtgtgtgtgtgtgtgtgtgtgygcagaatatgttaacctcatttctgatatcctttcggtattacttgtagaacagctactagtaaccattccatttctttctattagttttcctccaactgaaatttcttcaccattcgctctggataggaaacaatttctgtgtttttctttatcttatgttcatttgtttaaaacaccaccatttgggtggtttttaaatctcagtttttattgttgttgttgttgcactggattgggtatgtctcacacatgtttggttcagggatcagcttaaggcttgtgaagattcacatgcagaaatatgaaatcctattccccagacctctcccttcttgatcttccctcttaaattcaacttatggtacctctttccctggttctctaaccagaaatataatgcaatttttgcaccaccatgttgctttgcagaggtctgtctttgggcaaagccacaggaagtgaaaaaatgagaaaaatctctctgtttgtgtcatttgtctcaaatgatgactcttttcaataatctgcctgcttgtgtttacttttcagagtctttaatctgtccagagattatagaggtcatcagggaagggatagataatagagacttgtactgttggtagtcactgattttttttttttttgaaagctattttcactggcaatcaaactccagtttgataattattttattttagagttttagatatggcattttaccatcttgtgtttttcactctttctgttaaaaagacagc

SEQ ID NO: 63285 - DNA, 1593 bp, Homo sapiens
tctggaggctggacgtccaacacccaggcgtggcaggtcatgctcctctgaggctcagagtggagtctgggctcacttttcccagttctggggcgagggggtgtgggagtggggtgggcaacctctggtatttcttgccttgtagccgcctcactccaatctttgtctctgttgtcacatggcctctttctccctgtgtctgtctctgtgtctctcctcatcttcttataaagacatcagttacactgtagtagtgtccaccctctatcctcagtatgacctaatctcgactccattgcatcagccaggagcctatttccaggtgaggtcacacattcacaggacacagtgggtagcacttggatttatcatttaatggggactaattcaaccaataaccttgcctgatccaggaaaacaaacataaatatgcattgttgagcacatattcaatgtgtttctcttctgttctctcttcacttctgaataaatcagcagcccaggtttctttcttctcctacctatatctttccatgcatctttaacttggaaattaaaatacttttcccatctgcaataatcacatccatttcattcttgagagaaagcgcaagggaatttttgcagccagtggtgcttttctgccttctccaccaccatgacaaaggccaggtctctgatctcagcatcattcctccaatcaggcctcctcctccccttattctggaaataggactgcacaaaacaaggggtgaggtgggtgtgtcttatgagagtacctcctggactagtcaattcattttgttttcttctaccttggctcatctgagcccatcactttgctccttacatggtagagggaaaaacatctggagaggagttcaaacgggagcactgctgggaaggaaaaatgatgccttaactctgctgcgaaataacccctgtccctgtcatggatcctgctctcggccaagctctgacacacagctccgaggatggatgactcggcagcygcaacacacgtcggcttgtctggctgcagacaagaggcatgtttgatttgtgtgtttgctgaagctcagtaacaggcagaatcttttctctacccttggaatagacacagaagaatccactaacttacggaaagagaaaatccaccctgttaacaaatttaggttttccccacagccctcccatttctctggcctctgaggtgctatttggaaagacttatagattagcatctgggaagctttccaaactgcttgtaaaatgaatagaaagaaggaaaagataacaagccatattaggctgttttcatctctttaaccacaacactgtggtgagctgagatcaagtcatgttttctagggtttcttgtagaagattagatttctagtttgtacatctgctcgggtctaatcgctcacctgtttccactcctggctgtgtacagcagaagctctaattcatttgtctgcaataacagggggtgagtgtgcatgatgggagtgtgtccccagcctcaatatattcctgcttcttggacagagatttttgctcagagtaagaatgcatggtcatctcaactct

SEQ ID NO: 63286 - DNA, 1282 bp, Homo sapiens
tcccatttggtgcacattcctctgattgatccccagccttcacctgttttacatatgcctacccttttctaattggtcttctacactgccgtgcccacctttgagtggtacctttgctttagctttctttgcatattcacaaaccaatcagagtggactcctgtattctgagcccataaaagtcccggactcagccacactgagagagaaaccacccaactgagggggtgagggaccacgtcgcatcccctctcactgctgagagtgttccatcactcaataaagttatgctctgccctcctcagtcttcaatcgtcagtgtattctcattcttcttggatgctggacaagagctcgagaaccactgaacatgggtacaagctataacacaggcgagctggggcacaccaggcccagccatgggctaagccagtgtgcaagttagacttgacccaggcgggctgagtagatggggtgcccccgctgtgagcccagcaaaagggccaagaaaaatcctgtgtcatttgaagagcagattcattaattttatcagttacaaaaggcctttcaattggcttccaatcattgatatccctcaacaaaaatcagaataaataggcccttacctgaattcggtgttttttcacttcatggaagggagaatttgggatggcctgaagataacttttttgtgtgttttgaaaataagatrgaatctttgcctagagctgaaagtgcaggagttacagcatgttgtctgaatagttgtactcaacctctgggctagaacaagacaggatgacgactaaaacacagtatgcaagcttagaaagtagttattatgggctacgaaacctgtagtttgaaagcttggctgtttttatgtttcctgtttttttctttgctgtttctgttttattctctctctcagagtttgttaaagatcttttggaaaagtctaacctgtgtcaccattccaaagagaattgttgaagagagtgcctgacttcggatggagctttttgttttaaacaaccgtagtattggtatgttttttctcaaaacaacttatatttcctagactacaatgtaatacatatttttcacagacaaaaataaagagaaatgtaacataatgaatccattctaagagacttttaaaaaatttttggtatctttccacaatacatagactgataaccttgactgaatcacattgcatatgttttcataaccatttattcataaatatatttcatgaaatcactggtggcagagaggt

SEQ ID NO: 63287 - DNA, 1282 bp, Homo sapiens
tcccatttggtgcacattcctctgattgatccccagccttcacctgttttacatatgcctacccttttctaattggtcttctacactgccgtgcccacctttgagtggtacctttgctttagctttctttgcatattcacaaaccaatcagagtggactcctgtattctgagcccataaaagtcccggactcagccacactgagagagaaaccacccaactgagggggtgagggaccacgtcgcatcccctctcactgctgagagtgttccatcactcaataaagttatgctctgccctcctcagtcttcaatcgtcagtgtattctcattcttcttggatgctggacaagagctcgagaaccactgaacatgggtacaagctataacacaggcgagctggggcacaccaggcccagccatgggctaagccagtgtgcaagttagacttgacccaggcgggctgagtagatggggtgcccccgctgtgagcccagcaaaagggccaagaaaaatcctgtgtcatttgaagagcagattcattaattttatcagttacaaaaggcctttcaattggcttccaatcattgatatccctcaacaaaaatcagaataaataggcccttacctgaattcggtgttttttcacttcatggaagggagaatttgggatggcctgaagataacttttttgtgtgttttgaaaataagatagaatctttgcctagagctgaaagtgcaggagttacagcatgttgtctgaatagttgtactcaacctctgggctagaacaagacaggatgacgactraaacacagtatgcaagcttagaaagtagttattatgggctacgaaacctgtagtttgaaagcttggctgtttttatgtttcctgtttttttctttgctgtttctgttttattctctctctcagagtttgttaaagatcttttggaaaagtctaacctgtgtcaccattccaaagagaattgttgaagagagtgcctgacttcggatggagctttttgttttaaacaaccgtagtattggtatgttttttctcaaaacaacttatatttcctagactacaatgtaatacatatttttcacagacaaaaataaagagaaatgtaacataatgaatccattctaagagacttttaaaaaatttttggtatctttccacaatacatagactgataaccttgactgaatcacattgcatatgttttcataaccatttattcataaatatatttcatgaaatcactggtggcagagaggt

SEQ ID NO: 63288 - DNA, 1282 bp, Homo sapiens
tcccatttggtgcacattcctctgattgatccccagccttcacctgttttacatatgcctacccttttctaattggtcttctacactgccgtgcccacctttgagtggtacctttgctttagctttctttgcatattcacaaaccaatcagagtggactcctgtattctgagcccataaaagtcccggactcagccacactgagagagaaaccacccaactgagggggtgagggaccacgtcgcatcccctctcactgctgagagtgttccatcactcaataaagttatgctctgccctcctcagtcttcaatcgtcagtgtattctcattcttcttggatgctggacaagagctcgagaaccactgaacatgggtacaagctataacacaggcgagctggggcacaccaggcccagccatgggctaagccagtgtgcaagttagacttgacccaggcgggctgagtagatggggtgcccccgctgtgagcccagcaaaagggccaagaaaaatcctgtgtcatttgaagagcagattcattaattttatcagttacaaaaggcctttcaattggcttccaatcattgatatccctcaacaaaaatcagaataaataggcccttacctgaattcggtgttttttcacttcatggaagggagaatttgggatggcctgaagataacttttttgtgtgttttgaaaataagatagaatctttgcctagagctgaaagtgcaggagttacagcatgttgtctgaatagttgtactcaacctctgggctagaacaagacaggatgacgactaaaacacagtatgcaagcttagaaagtagttattatgggctacgaaacctgtagtttgaaagcttggctgtttttatgtttcctgtttttttctttgctgtttctgttwtattctctctctcagagtttgttaaagatcttttggaaaagtctaacctgtgtcaccattccaaagagaattgttgaagagagtgcctgacttcggatggagctttttgttttaaacaaccgtagtattggtatgttttttctcaaaacaacttatatttcctagactacaatgtaatacatatttttcacagacaaaaataaagagaaatgtaacataatgaatccattctaagagacttttaaaaaatttttggtatctttccacaatacatagactgataaccttgactgaatcacattgcatatgttttcataaccatttattcataaatatatttcatgaaatcactggtggcagagaggt

SEQ ID NO: 63289 - DNA, 1282 bp, Homo sapiens
tcccatttggtgcacattcctctgattgatccccagccttcacctgttttacatatgcctacccttttctaattggtcttctacactgccgtgcccacctttgagtggtacctttgctttagctttctttgcatattcacaaaccaatcagagtggactcctgtattctgagcccataaaagtcccggactcagccacactgagagagaaaccacccaactgagggggtgagggaccacgtcgcatcccctctcactgctgagagtgttccatcactcaataaagttatgctctgccctcctcagtcttcaatcgtcagtgtattctcattcttcttggatgctggacaagagctcgagaaccactgaacatgggtacaagctataacacaggcgagctggggcacaccaggcccagccatgggctaagccagtgtgcaagttagacttgacccaggcgggctgagtagatggggtgcccccgctgtgagcccagcaaaagggccaagaaaaatcctgtgtcatttgaagagcagattcattaattttatcagttacaaaaggcctttcaattggcttccaatcattgatatccctcaacaaaaatcagaataaataggcccttacctgaattcggtgttttttcacttcatggaagggagaatttgggatggcctgaagataacttttttgtgtgttttgaaaataagatagaatctttgcctagagctgaaagtgcaggagttacagcatgttgtctgaatagttgtactcaacctctgggctagaacaagacaggatgacgactaaaacacagtatgcaagcttagaaagtagttattatgggctacgaaacctgtagtttgaaagcttggctgtttttatgtttcctgtttttttctttgctgtttctgttttattctctctctcagagtttgttaaagatcttttggaaaagtctaacctgtgtcaccattccaaagagaattgttgaagagagtgcctgacttcggatggagctttttgttttaaacaaccgtagtattggtatgttttttctcaaaacaasttatatttcctagactacaatgtaatacatatttttcacagacaaaaataaagagaaatgtaacataatgaatccattctaagagacttttaaaaaatttttggtatctttccacaatacatagactgataaccttgactgaatcacattgcatatgttttcataaccatttattcataaatatatttcatgaaatcactggtggcagagaggt

SEQ ID NO: 63290 - DNA, 1282 bp, Homo sapiens
tcccatttggtgcacattcctctgattgatccccagccttcacctgttttacatatgcctacccttttctaattggtcttctacactgccgtgcccacctttgagtggtacctttgctttagctttctttgcatattcacaaaccaatcagagtggactcctgtattctgagcccataaaagtcccggactcagccacactgagagagaaaccacccaactgagggggtgagggaccacgtcgcatcccctctcactgctgagagtgttccatcactcaataaagttatgctctgccctcctcagtcttcaatcgtcagtgtattctcattcttcttggatgctggacaagagctcgagaaccactgaacatgggtacaagctataacacaggcgagctggggcacaccaggcccagccatgggctaagccagtgtgcaagttagacttgacccaggcgggctgagtagatggggtgcccccgctgtgagcccagcaaaagggccaagaaaaatcctgtgtcatttgaagagcagattcattaattttatcagttacaaaaggcctttcaattggcttccaatcattgatatccctcaacaaaaatcagaataaataggcccttacctgaattcggtgttttttcacttcatggaagggagaatttgggatggcctgaagataacttttttgtgtgttttgaaaataagatagaatctttgcctagagctgaaagtgcaggagttacagcatgttgtctgaatagttgtactcaacctctgggctagaacaagacaggatgacgactaaaacacagtatgcaagcttagaaagtagttattatgggctacgaaacctgtagtttgaaagcttggctgtttttatgtttcctgtttttttctttgctgtttctgttttattctctctctcagagtttgttaaagatcttttggaaaagtctaacctgtgtcaccattccaaagagaattgttgaagagagtgcctgacttcggatggagctttttgttttaaacaaccgtagtattggtatgttttttctcaaaacaacttatatttcctagactacaatgtaatacatatttttcacagacaaaaataaagagaaatgtaacataatgaatccattctaagagacttttaaaaaatttttggtatctttccacaatacatagactgataaccttgactgaatcacattgcatatgttttcataaccatttattcataaatayatttcatgaaatcactggtggcagagaggt

SEQ ID NO: 63291 - DNA, 1250 bp, Homo sapiens
attagctaacatgcttaatatgcaaattactctaataattttttaacacatttaagaaatatttggtagacattcactcatatctactagctaaaatgagcatggaatttttatgtactgctgatgagagtgtaaatttgttcaacttttctggaaagcaatatacgtcacatatcatgtcttaacatgtttctattctttgatccagtaaagtccatttctagaaatctaaataagagttaataatatgatcaaagatttatgcaaaagaatgtctaataatataagaatagttaagaaaatcaagaaacattcatgaaatgagctattttgttattaaaattttttacaaaaatttatcatcagaaaatattaacataactctaagtttttaaaaaagccagcatgttaaaaaatgtactcaggttcacaatttcttatctgcaattctgaaatccaagaaatttacaaaaaccaaaagactattctgtaactataattaaacagcaaaacatgaccttaactaatataaaactatagactttattcatcttatttattgtgaatagctgaacattaattatttgtaaaaataattaatgtatttgattatacagtctaatcccagattatactggaggtatcatacaatatacagtttaccaaattacctttttatattcaatcatttctcagttcttaatcacatttggttccaaaggtttcagataagggattgagggtttaattttcaaaaatgttatccatttgtatataataatccttaattctatctaggtagttagaagggtgcgaaatagaaaggcagagaaaggaaagagttcagggataaaggaatggaggaagtgttctagaatattagtagtgatctatgagaagtggaattacaggtgatttttgtttatttttcaatattttgaattttctaaaataarcaagcttttagaatcaattaaaacaaaaaatactataaaaatatcattttaaaggtcatttttcactattagaaactctttatgaaaaacacaaagaaatgcttaaccaaggttgtatttaaattatgacaaatttaaacttagtggaagatatattaacggattttagtgtaaatatatatatacatatacacatatctatgtagttggtatttacttcaatttagcttgcacttccgtacccatgtaaatgcacacatatatgtaaatatttacacatataaagtatatgca

SEQ ID NO: 63292 - DNA, 687 bp, Homo sapiens
taacatggtggctattatgatccaatttttaccacttaactctgcaatcttcaaaatgtataaactatctttcatgcttccccwgcagataactttaaaaaatgccatcaagtactgctagaaaatgttacttctctttttgaaaattaaaagttaagtgaacccaaaaagtattgtgaatttataaagaaattttatcctgttagaagtaaaagtcactttacaaaactgaattcaaattttcagctcacaggaaaaattcctgtgagttggagtttctcgtgctcagtcctagattacttccttttaattttacatgctaacctggggtaatctcaatcatacccatgattccagtaaacattaatatgcacattgattatgtatttcatcttcagcccagacatctcccataagttttggatccctggatacaaatgtgtacctggcatttacacatgaatcttccaaagatacccaatgcacaacaggtctaaaaacaaatccatgatgtttctaaaccatcactttttttctgtctttgtttttaagtcttaccaaagggtaatagtatttgtaaaaaaggaagatacataggagcttggattaattgtcagatctaaaactttcattgcaaagtactgtattccttgatgtagttcagacttttcatttggggtaaattcc

SEQ ID NO: 63293 - DNA, 687 bp, Homo sapiens
taacatggtggctattatgatccaatttttaccacttaactctgcaatcttcaaaatgtataaactatctttcatgcttccccagcagataactttaaaaaatgccatcaagtactgctagaaaatgttacttctctttttgaaaattaaaagttaagtgaacccaaaaagtattgtgaatttataaagaaattttatcctgttagaagtaaaagtcactttacaaaactgaattcaaattttcagctcacaggaaaaattcctgtgagttggagtttctcgtgctcagtcctagattacttccttttaattttacatgctaacctggggtaatctcaatcatacccatkattccagtaaacattaatatgcacattgattatgtatttcatcttcagcccagacatctcccataagttttggatccctggatacaaatgtgtacctggcatttacacatgaatcttccaaagatacccaatgcacaacaggtctaaaaacaaatccatgatgtttctaaaccatcactttttttctgtctttgtttttaagtcttaccaaagggtaatagtatttgtaaaaaaggaagatacataggagcttggattaattgtcagatctaaaactttcattgcaaagtactgtattccttgatgtagttcagacttttcatttggggtaaattcc

SEQ ID NO: 63294 - DNA, 559 bp, Homo sapiens
tgtatgcatcatttattgcaagacaaagacattctaaaacctttttaatcaatgaagccttgaatttgactggaacttttctttgtgtaccactacactttccctaaaagttgtctctgctttagacatttgttagtagtgccaatttgagagacatttgccaaataatgtgtggatgaatttttagcgctttcaaagaaaagaaacacaaggtagcctaggaatttatagggaatccattatttctttatgtattgtaattagactaaataaatggccctttagtaacattttttccccaccctgcccctctaacttccttctttctcttgttctgtcttcttgccttttgaggtgttaaagcaattaagtaaaaaaaaaaaaaagaaaaagaagcctgacttgtcatctttcatggtgactggaaaatcaatattcagcctcytccagtcagagaaggctagtaaatccaaagattggaccctttaacatgaacgatttgcaaaaccaatttactgggaattacttaaaaatgcccatgccaaatctattagttata

SEQ ID NO: 63295 - DNA, 481 bp, Homo sapiens
ggaatggtatgcatttattggagttttagagattataaatttttatgactgtaaactagagtaactagtttgtaaggtgatgacaacatataaaaatgttaaaataattgggcaaccactaaaagtggcaatactgcatacttttttctttmatttaataatatttattaagtactgtgtgccaggtagtgagaaagcatcaggaatacaattttgaacttaaagaacacatgatgcctgatttagaaggcttactaccttactaccctgtggatgaaataaacactagttaaataatcacataaataattaatacattaaaattaaaatgtgataagtgctgcaactgaaaggtagaaggtacatgagaacatttaataagaattgaccttcttaggaaggtgagtaaaagattccttgagtaggtgaatttgagctcagatcagaaggaagtgttaacttaatggagattaagagtttg

SEQ ID NO: 63296 - DNA, 481 bp, Homo sapiens
ggaatggtatgcatttattggagttttagagattataaatttttatgactgtaaactagagtaactagtttgtaaggtgatgacaacatataaaaatgttaaaataattgggcaaccactaaaagtggcaatactgcatacttttttctttaatttaataatatttattaagtactgtgtgccaggtagtgagaaagcatcaggaatacaattttgracttaaagaacacatgatgcctgatttagaaggcttactaccttactaccctgtggatgaaataaacactagttaaataatcacataaataattaatacattaaaattaaaatgtgataagtgctgcaactgaaaggtagaaggtacatgagaacatttaataagaattgaccttcttaggaaggtgagtaaaagattccttgagtaggtgaatttgagctcagatcagaaggaagtgttaacttaatggagattaagagtttg

SEQ ID NO: 63297 - DNA, 1946 bp, Homo sapiens
atactcaggcaatggactatttttattttagagactgagaatccaaaacaaagtggtgcaaaaaaaaaaaaaaaaaaaaaaaaagaataataataagaagttaatttgcttaagcagcagagtctgtggtcaagtggtttctttgactttcaggggctgtctcaatccagaccctttcaagcctatttcatccactctattccaataaatgtactttaaggataaatagttcaacaaatatcgtaaagggctagtatgctggaatttattatgggaatgaattgtttcagtcagcagttgacttataagctgaatgtatgattgtctttatgtgtgtggtatatagaagtatgtctatatgtctaagtctaatagcacacctacccatggtatgtaaatattaaagcagaccaacatggggaaaagcaaatgatactttctttagagaacgggaatttaaactctgctactgctgctgcaagttttatgtaataatatcagtgccatctgtcaacattttcatgtaatttgttgaggtcatgtatttcaagtatttcaaacaaaataaagaagttgaattattctttaattagtgttgagactgtgcaagaaaaacaaggatgttagtacacagtaatgaactacaaccagatacaaatactaaggtagaagtaattttctaatatattaatatttttataggaaataatattttctgccctttttcaacattattaacccttccattctgaagagatattaacacgccatcttaatcattaaataaactcacatatatacagtcattaatctagagacacatggtactatgggaacagatttttagaataaattaaatgttccatattttttaatgaagtaagacattttgttgttcatagtcttgagttgtcatcctggtttgcgaccttcaactgacttcccaggtacatgtgtgtagatagtctctttagactgttttagcacaagtatcactgcagagatttttccatttttttaagctttctttgtaaaatgatttatgtttttatacaaataactttattcatttatttataactatttttaaaacaccatagagttcatatcactttcgtgtttaaaatcattcagtggcttcttgatgcatttatgataaaattcatagaaaaatgccatgtatgggctttgataattattataatccagtccttaactagtgtggactttctcaggactcctttccctgtgcctttttcctttgtttactactcatctgcttaccacttatcctgtctacctggtgttctgtccattactcaaattactaatatgcttcccattgcaagtatgtgttgtttgcagtacttggaaatcttttactcctatttttcccttttcattctttattcatattattcccaagctattcattcaacamatgaatagcatgaggataatatggacacacactaaataccaggcattagaaatgcagcagtgaatacaaaacaaaaaaacaaacaaacaaaaaagtctaggacctcttagagcttgcattttagagtaatggaaacaatacattaacgatatagttattgcaatagaatgccatgaagtgataagtgcaatacaaaaaaaatcaggatagaaaatagaatggaaagcaagtgcaatttaaaatagattgtctagcgaagaccttctcaagaaggttacatttgagcagcaatctaaatcacaggggagtatgtgaatacctagaatagagtggtctaagaagagagaacaacctaacaaaagccctgaaaggaagaggcagcatcatattttcaaaggccaatgagtagaccagtatagctggagcatggtgaggaagacagaaagccacaggtagtgtaggcaaagggaaactaggggccagattatgtagattccattattca

SEQ ID NO: 63298 - DNA, 1946 bp, Homo sapiens
atactcaggcaatggactatttttattttagagactgagaatccaaaacaaagtggtgcaaaaaaaaaaaaaaaaaaaaaaaaagaataataataagaagttaatttgcttaagcagcagagtctgtggtcaagtggtttctttgactttcaggggctgtctcaatccagaccctttcaagcctatttcatccactctattccaataaatgtactttaaggataaatagttcaacaaatatcgtaaagggctagtatgctggaatttattatgggaatgaattgtttcagtcagcagttgacttataagctgaatgtatgattgtctttatgtgtgtggtatatagaagtatgtctatatgtctaagtctaatagcacacctacccatggtatgtaaatattaaagcagaccaacatggggaaaagcaaatgatactttctttagagaacgggaatttaaactctgctactgctgctgcaagttttatgtaataatatcagtgccatctgtcaacattttcatgtaatttgttgaggtcatgtatttcaagtatttcaaacaaaataaagaagttgaattattctttaattagtgttgagactgtgcaagaaaaacaaggatgttagtacacagtaatgaactacaaccagatacaaatactaaggtagaagtaattttctaatatattaatatttttataggaaataatattttctgccctttttcaacattattaacccttccattctgaagagatattaacacgccatcttaatcattaaataaactcacatatatacagtcattaatctagagacacatggtactatgggaacagatttttagaataaattaaatgttccatattttttaatgaagtaagacattttgttgttcatagtcttgagttgtcatcctggtttgcgaccttcaactgacttcccaggtacatgtgtgtagatagtctctttagactgttttagcacaagtatcactgcagagatttttccatttttttaagctttctttgtaaaatgatttatgtttttatacaaataactttattcatttatttataactatttttaaaacaccatagagttcatatcactttcgtgtttaaaatcattcagtggcttcttgatgcatttatgataaaattcatagaaaaatgccatgtatgggctttgataattattataatccagtccttaactagtgtggactttctcaggactcctttccctgtgcctttttcctttgtttactactcatctgcttaccacttatcctgtctacctggtgttctgtccattactcaaattactaatatgcttcccattgcaagtatgtgttgtttgcagtacttggaaatcttttactcctatttttcccttttcattctttattcatattattcccaagctattcattcaacaaatgaatagcatgaggataatatggacacacactaaataccaggcattagaaatgcagcagtgaatacaaaacaaaaaaacaaacaaacaaaaaagtctaggacctcttagagcttgcattttagagtaatggaaacaatacattaacgatatagttattgcaatagaatgccatgaagtgataagtgcaatacaaaaaaaatcaggatagaaaatagaatggaaagcaagtgcaatttaaaatagattgtctagcgaagaccttctcaagawggttacatttgagcagcaatctaaatcacaggggagtatgtgaatacctagaatagagtggtctaagaagagagaacaacctaacaaaagccctgaaaggaagaggcagcatcatattttcaaaggccaatgagtagaccagtatagctggagcatggtgaggaagacagaaagccacaggtagtgtaggcaaagggaaactaggggccagattatgtagattccattattca

SEQ ID NO: 63299 - DNA, 1946 bp, Homo sapiens
atactcaggcaatggactatttttattttagagactgagaatccaaaacaaagtggtgcaaaaaaaaaaaaaaaaaaaaaaaaagaataataataagaagttaatttgcttaagcagcagagtctgtggtcaagtggtttctttgactttcaggggctgtctcaatccagaccctttcaagcctatttcatccactctattccaataaatgtactttaaggataaatagttcaacaaatatcgtaaagggctagtatgctggaatttattatgggaatgaattgtttcagtcagcagttgacttataagctgaatgtatgattgtctttatgtgtgtggtatatagaagtatgtctatatgtctaagtctaatagcacacctacccatggtatgtaaatattaaagcagaccaacatggggaaaagcaaatgatactttctttagagaacgggaatttaaactctgctactgctgctgcaagttttatgtaataatatcagtgccatctgtcaacattttcatgtaatttgttgaggtcatgtatttcaagtatttcaaacaaaataaagaagttgaattattctttaattagtgttgagactgtgcaagaaaaacaaggatgttagtacacagtaatgaactacaaccagatacaaatactaaggtagaagtaattttctaatatattaatatttttataggaaataatattttctgccctttttcaacattattaacccttccattctgaagagatattaacacgccatcttaatcattaaataaactcacatatatacagtcattaatctagagacacatggtactatgggaacagatttttagaataaattaaatgttccatattttttaatgaagtaagacattttgttgttcatagtcttgagttgtcatcctggtttgcgaccttcaactgacttcccaggtacatgtgtgtagatagtctctttagactgttttagcacaagtatcactgcagagatttttccatttttttaagctttctttgtaaaatgatttatgtttttatacaaataactttattcatttatttataactatttttaaaacaccatagagttcatatcactttcgtgtttaaaatcattcagtggcttcttgatgcatttatgataaaattcatagaaaaatgccatgtatgggctttgataattattataatccagtccttaactagtgtggactttctcaggactcctttccctgtgcctttttcctttgtttactactcatctgcttaccacttatcctgtctacctggtgttctgtccattactcaaattactaatatgcttcccattgcaagtatgtgttgtttgcagtacttggaaatcttttactcctatttttcccttttcattctttattcatattattcccaagctattcattcaacaaatgaatagcatgaggataatatggacacacactaaataccaggcattagaaatgcagcagtgaatacaaaacaaaaaaacaaacaaacaaaaaagtctaggacctcttagagcttgcattttagagtaatggaaacaatacattaacgatatagttattgcaatagaatgccatgaagtgataagtgcaatacaaaaaaaatcaggatagaaaatagaatggaaagcaagtgcaatttaaaatagattgtctagcgaagaccttctcaagaaggttacatttgagcagcaatctaaatcacaggggagtatgtgaatacctagaatagagtggtctaagaagagagaacaacctaacaaaagccctgaaaggaagargcagcatcatattttcaaaggccaatgagtagaccagtatagctggagcatggtgaggaagacagaaagccacaggtagtgtaggcaaagggaaactaggggccagattatgtagattccattattca

SEQ ID NO: 63300 - DNA, 1946 bp, Homo sapiens
atactcaggcaatggactatttttattttagagactgagaatccaaaacaaagtggtgcaaaaaaaaaaaaaaaaaaaaaaaaagaataataataagaagttaatttgcttaagcagcagagtctgtggtcaagtggtttctttgactttcaggggctgtctcaatccagaccctttcaagcctatttcatccactctattccaataaatgtactttaaggataaatagttcaacaaatatcgtaaagggctagtatgctggaatttattatgggaatgaattgtttcagtcagcagttgacttataagctgaatgtatgattgtctttatgtgtgtggtatatagaagtatgtctatatgtctaagtctaatagcacacctacccatggtatgtaaatattaaagcagaccaacatggggaaaagcaaatgatactttctttagagaacgggaatttaaactctgctactgctgctgcaagttttatgtaataatatcagtgccatctgtcaacattttcatgtaatttgttgaggtcatgtatttcaagtatttcaaacaaaataaagaagttgaattattctttaattagtgttgagactgtgcaagaaaaacaaggatgttagtacacagtaatgaactacaaccagatacaaatactaaggtagaagtaattttctaatatattaatatttttataggaaataatattttctgccctttttcaacattattaacccttccattctgaagagatattaacacgccatcttaatcattaaataaactcacatatatacagtcattaatctagagacacatggtactatgggaacagatttttagaataaattaaatgttccatattttttaatgaagtaagacattttgttgttcatagtcttgagttgtcatcctggtttgcgaccttcaactgacttcccaggtacatgtgtgtagatagtctctttagactgttttagcacaagtatcactgcagagatttttccatttttttaagctttctttgtaaaatgatttatgtttttatacaaataactttattcatttatttataactatttttaaaacaccatagagttcatatcactttcgtgtttaaaatcattcagtggcttcttgatgcatttatgataaaattcatagaaaaatgccatgtatgggctttgataattattataatccagtccttaactagtgtggactttctcaggactcctttccctgtgcctttttcctttgtttactactcatctgcttaccacttatcctgtctacctggtgttctgtccattactcaaattactaatatgcttcccattgcaagtatgtgttgtttgcagtacttggaaatcttttactcctatttttcccttttcattctttattcatattattcccaagctattcattcaacaaatgaatagcatgaggataatatggacacacactaaataccaggcattagaaatgcagcagtgaatacaaaacaaaaaaacaaacaaacaaaaaagtctaggacctcttagagcttgcattttagagtaatggaaacaatacattaacgatatagttattgcaatagaatgccatgaagtgataagtgcaatacaaaaaaaatcaggatagaaaatagaatggaaagcaagtgcaatttaaaatagattgtctagcgaagaccttctcaagaaggttacatttgagcagcaatctaaatcacaggggagtatgtgaatacctagaatagagtggtctaagaagagagaacaacctaacaaaagccctgaaaggaagaggcagcatcatattttcaaaggccaatgagtagaccagtatagctggagcatggtgaggaagacagaaagccacaggtagtrtaggcaaagggaaactaggggccagattatgtagattccattattca

SEQ ID NO: 63301 - DNA, 1050 bp, Homo sapiens
gaaagaattagtttaaactgcattatcaaatgtaaggatcttccttctttttaaacaaccaagcatcattgctgatctctgacttggagacaattaattcggttgctagagttgatcatttcattcatttataaatgatatcaagtcaaatcttttgacttactgtgctaaaaagaatacataattactctggggtttaaattttattcatactgactggtaagaaaaagggtaatatactgatcatctattgatactgattaatctaacaaccagataacaataatcaaaaagacttattagtattcacaattagcattatctgaatagatcacataatctgttaaagtttttaatggctaaacagtaatcattaagaaaacacaagcttcatggctctactcaaaatgtgaacattatctcaagggcagattataaagctctcaaattttttttcaaaatatagtacattgaagaagcactcataaatgggagtgctttttccacatactataaatgggaggcaaacaaaaggaaaataagatttctgccagactttactactgtgttagggaagataaaacatgtattataaaacactttgataagaataatggaaacggtaataaaaattccatgtgaactattagcactgagaatctatagtcagcccctaacttactcacaggttatgttcatttctatttatttatatatrtatatttttttttttttagagacaaggatcttgctatgttgcccaggctggccttgaactcctgagctcaagtgatcctcccgccttggcctctcagtaggctgggaatacaggcacgcatcactacacttggaagattgtgctcatttctaaactgccatttagaacttagatagcaagtgcaaaaatcaaaacaatacgcaaagcatctggtgcagtccatggcatacaatagctaccaataaatggtatgttgaaacaaaactcagggcttacgtctgatgtttctattccaattcagatgcccatgctgaacaatggggacagtggag

SEQ ID NO: 63302 - DNA, 1050 bp, Homo sapiens
gaaagaattagtttaaactgcattatcaaatgtaaggatcttccttctttttaaacaaccaagcatcattgctgatctctgacttggagacaattaattcggttgctagagttgatcatttcattcatttataaatgatatcaagtcaaatcttttgacttactgtgctaaaaagaatacataattactctggggtttaaattttattcatactgactggtaagaaaaagggtaatatactgatcatctattgatactgattaatctaacaaccagataacaataatcaaaaagacttattagtattcacaattagcattatctgaatagatcacataatctgttaaagtttttaatggctaaacagtaatcattaagaaaacacaagcttcatggctctactcaaaatgtgaacattatctcaagggcagattataaagctctcaaattttttttcaaaatatagtacattgaagaagcactcataaatgggagtgctttttccacatactataaatgggaggcaaacaaaaggaaaataagatttctgccagactttactactgtgttagggaagataaaacatgtattataaaacactttgataagaataatggaaacggtaataaaaattccatgtgaactattagcactgagaatctatagtcagcccctaacttactcacaggttatgttcatttctatttatttatatatatatatwtttttttttttagagacaaggatcttgctatgttgcccaggctggccttgaactcctgagctcaagtgatcctcccgccttggcctctcagtaggctgggaatacaggcacgcatcactacacttggaagattgtgctcatttctaaactgccatttagaacttagatagcaagtgcaaaaatcaaaacaatacgcaaagcatctggtgcagtccatggcatacaatagctaccaataaatggtatgttgaaacaaaactcagggcttacgtctgatgtttctattccaattcagatgcccatgctgaacaatggggacagtggag

SEQ ID NO: 63303 - DNA, 1050 bp, Homo sapiens
gaaagaattagtttaaactgcattatcaaatgtaaggatcttccttctttttaaacaaccaagcatcattgctgatctctgacttggagacaattaattcggttgctagagttgatcatttcattcatttataaatgatatcaagtcaaatcttttgacttactgtgctaaaaagaatacataattactctggggtttaaattttattcatactgactggtaagaaaaagggtaatatactgatcatctattgatactgattaatctaacaaccagataacaataatcaaaaagacttattagtattcacaattagcattatctgaatagatcacataatctgttaaagtttttaatggctaaacagtaatcattaagaaaacacaagcttcatggctctactcaaaatgtgaacattatctcaagggcagattataaagctctcaaattttttttcaaaatatagtacattgaagaagcactcataaatgggagtgctttttccacatactataaatgggaggcaaacaaaaggaaaataagatttctgccagactttactactgtgttagggaagataaaacatgtattataaaacactttgataagaataatggaaacggtaataaaaattccatgtgaactattagcactgagaatctatagtcagcccctaacttactcacaggttatgttcatttctatttatttatatatatatatttwtttttttttagagacaaggatcttgctatgttgcccaggctggccttgaactcctgagctcaagtgatcctcccgccttggcctctcagtaggctgggaatacaggcacgcatcactacacttggaagattgtgctcatttctaaactgccatttagaacttagatagcaagtgcaaaaatcaaaacaatacgcaaagcatctggtgcagtccatggcatacaatagctaccaataaatggtatgttgaaacaaaactcagggcttacgtctgatgtttctattccaattcagatgcccatgctgaacaatggggacagtggag

SEQ ID NO: 63304 - DNA, 1050 bp, Homo sapiens
gaaagaattagtttaaactgcattatcaaatgtaaggatcttccttctttttaaacaaccaagcatcattgctgatctctgacttggagacaattaattcggttgctagagttgatcatttcattcatttataaatgatatcaagtcaaatcttttgacttactgtgctaaaaagaatacataattactctggggtttaaattttattcatactgactggtaagaaaaagggtaatatactgatcatctattgatactgattaatctaacaaccagataacaataatcaaaaagacttattagtattcacaattagcattatctgaatagatcacataatctgttaaagtttttaatggctaaacagtaatcattaagaaaacacaagcttcatggctctactcaaaatgtgaacattatctcaagggcagattataaagctctcaaattttttttcaaaatatagtacattgaagaagcactcataaatgggagtgctttttccacatactataaatgggaggcaaacaaaaggaaaataagatttctgccagactttactactgtgttagggaagataaaacatgtattataaaacactttgataagaataatggaaacggtaataaaaattccatgtgaactattagcactgagaatctatagtcagcccctaacttactcacaggttatgttcatttctatttatttatatatatatatttttttttttttagasacaaggatcttgctatgttgcccaggctggccttgaactcctgagctcaagtgatcctcccgccttggcctctcagtaggctgggaatacaggcacgcatcactacacttggaagattgtgctcatttctaaactgccatttagaacttagatagcaagtgcaaaaatcaaaacaatacgcaaagcatctggtgcagtccatggcatacaatagctaccaataaatggtatgttgaaacaaaactcagggcttacgtctgatgtttctattccaattcagatgcccatgctgaacaatggggacagtggag

SEQ ID NO: 63305 - DNA, 415 bp, Homo sapiens
tagttgattgttaggcaagattaagcatggaaaatacatgaatcatttacatgaattattaaaatattctggactgtctatctaatcccagttataatttgataaagtcttgtgttcctttttatgattttatgattattgctttctatatctgtctaagaaatatttgcctcatccacacaaaaggacattctcttatgttttctctcacaagttttccagaaaaatgggctttttgaaaaaaaaaagcacttctcccattttgaattacttyggtgctttgttaaaaatcagtccattggccaggcgttgtggctcacccctgtaatcccagcactttgggaagctggggctgatggatcacctgaggtcaggagttcaagaccaggctggccaacatggtgaaactctgtct

SEQ ID NO: 63306 - DNA, 1822 bp, Homo sapiens
tggtaatgcaaacaggatgaccctcagaatcctgaattcaggatggttgggttagagtaaacaacgggtatagcacatacaaaaggagatagacggggttttatatgacctatatatattcaaatttgtataaaaggtattctcccaaatgattcatatccatttcagttttatatgaaacaaaacaaacaaacaaaaacacaccaaaaacagcaggaatgaaacagaaaagcaactgtatttgatgaaataattcagagaggaaacattggagcaaatatctgaaaaatggcacccatttctgagaataagtgagagaggcagccaatgtctttaatttttttctattcctctatttctctgggattatgataccatagagagagaatttgtgtaagttgctttcaatttctaatcaatgggttgcagttagggtttgttttcataagtaacttccactacttagagtgcaattgtggagctatacctccttgaaactacaaaacagctgaatcattcctatcctcatccaagtcctcctttgaaccccaaaatccaaagaagtccaaagttcaaagaaatatgaccactagtatcttttcccacatggtcagtttgttgactttagtctttgtaaaataaagcagcctcagggtaaaatggtattctcaaatyagctttactatttctagatgaatatattactttgggtttattttgtaatgaaaaagaatacagatttaattatggtcatagtcaaatgtgttctctgagaaagatacggcagtgtccttgcacatatttgcttataaagttacccaagctgacttcatttgcagtcactcagcagcttccttctaacagtcaagtcaaaaatcatgaggctcagttgctgtggcagtctgcagaacaagtatggtggcagtacggctgtagaaaccacaaagtatgctgataaaacgagttatttgctcagtaatctttcagaagataaatctagaacagaagatgtgatactctacaaatattattccttttctcccattgtataaggtctcaatccttagaaaatttttaaaaggttttactaaagatgtctcgtgaaataggtattgttatatccattttgggagagggcaaagcatgcatcccaaatacatttacagaactgtaagtttggaaaggatatgaaatacattggctcaactcttttctatgcacaaaaaaaaaaaaaaactagctgtgagagataaaatggctttctcaaagtcacatagtgaacaagcagagacgatcagagaatgcaggttcttcttccatgctctttcctatagcttgcagctgcattgtgctactaaatattcagaagaaaattaaaataatttttaaaaacttataccttggccaatttgaatggtttcccacacagataaagcatccccctaggtcatacacagtatcctcttaggcatatacttgcccgcatatatgcagtcctcacagtagagtgcactgcatagatgaagaaataattatacctgcatatggtttatccatgaatagaagagcattatctctaaaatttttaaacaaagactttcatttcttttgtaccacaaaagcattctaaaatttagattccggcatcagagcatgggactgagaagaatatttcagagtgcacatagccaagtcatctcactttatatatgaaaaaaaggctgaggtcataaaaatagaagtgacttgcatatggtcacactcagccaaattatgcctgacaaataatctttacaaagtattcatgtactatagatctctt

SEQ ID NO: 63307 - DNA, 1695 bp, Homo sapiens
cgtgactatatgtattttgtatgtaaatagtcatgaccacgtggttaagttataatgaaatcatcagaggcatggactttcttatcagagtgcattagtactggagatatgtaaggcaaaatggttttttttttctctttgtatatgactttttttttttttttttttgagaaggagtctcgctctgtcgcccaggctggagtgcagtggtgcgatctcggctcactgcaagctccgcctcctgggttcacgccattctcctgcctcagactcccgagtagctgggactacaggtgcccgccacaatgcccggctaatttttttwtatatatatatttttagtagagaaggggtttcaccgtgttagccaggatggtctcgatctcctgacgtcatgatcctcccgcctcggcctcccaaagtgctggggttacaggcatgagccactgcacccggcctgtatatgacattttgagatcagggctaaattaagataatcaggtcaaatcaccgaggtaggttagatttttgctcaaacatatttactctcttccctccgcctccatggcaggcgtgtgcttttacttttccacctgttgacttcgggcttggcgatggggcctgctttggccgcttgggctaacagcagacaagactgaaagcaagcttgaaatgtgtggtgcagggaggctcgctttcttgtgcctctgccactgtcatgagaagagcctctcccaggaatctgcggccccatctgcctgggtcccacaatgagacacttagaacagacctggacccatcacaagcaaggggccaagcccagctaaccacacttgaggcaggactgcccagctgagcccagccaaaaccagccaacccccagcaaacccaccgatgcatgggagagaatgattgttgttttgctttggaatggcttatgatgcaaaaattgctgacagacaaaatgatcatgaatgtagtggctacagatgcagatgatacaggcagattgtactgggaattcagataccatgggccctggtgctattgcctatgtgatttttccacgatagtgagcattctggataaaacacagtgtcatttcaccttcatatacacagtagttgcgttcctgaaatattcagatatattaaaactgtacaaaaataatttgcttttgtacagcgtaaatcaaagttagagtctaggctgaagtaattttaacagctttttgatctacgtaaatgtttgtgcagacaataaaagtatgtgggacgttagatggaactgtcctaaccattacaggtcacttagcacccagctgccctccaaataccagaactgtcccgcaattcttgtgaaagccaaaaacacctccacacatttccaaaatcccaccaggtgaccttggtagaaacactagaagtctaagtggtcccttccagctcaagtattatcagatttaaaaaatccgattatagtagtaatttaatcaatacatagatagtaaatattatgtgccagtaattttttttttctgagacaggatcttgctctgtttcacaggctggagtggcatgaacacggctcactgcagcctcaacctcctaggctcgagtgaccttgccacttcagcctcccatgtagctgggaccacaggcacacatcaccacacccagctaatttttttttttt

SEQ ID NO: 63308 - DNA, 1695 bp, Homo sapiens
cgtgactatatgtattttgtatgtaaatagtcatgaccacgtggttaagttataatgaaatcatcagaggcatggactttcttatcagagtgcattagtactggagatatgtaaggcaaaatggttttttttttctctttgtatatgactttttttttttttttttttgagaaggagtctcgctctgtcgcccaggctggagtgcagtggtgcgatctcggctcactgcaagctccgcctcctgggttcacgccattctcctgcctcagactcccgagtagctgggactacaggtgcccgccacaatgcccggctaatttttttttatatatatatttttagtagagaaggggtttcaccgtgttagccaggatggtctcgatctcctgacgtcatgatcctcccgcctcggcctcccaaagtgctggggttacaggcatgagccactgcacccggcctgtatatgacattttgagatcagggctaaattaagataatcaggtcaaatcaccgaggtaggttagatttttgctcaaacatatttactctcttccctccgcctccayggcaggcgtgtgcttttacttttccacctgttgacttcgggcttggcgatggggcctgctttggccgcttgggctaacagcagacaagactgaaagcaagcttgaaatgtgtggtgcagggaggctcgctttcttgtgcctctgccactgtcatgagaagagcctctcccaggaatctgcggccccatctgcctgggtcccacaatgagacacttagaacagacctggacccatcacaagcaaggggccaagcccagctaaccacacttgaggcaggactgcccagctgagcccagccaaaaccagccaacccccagcaaacccaccgatgcatgggagagaatgattgttgttttgctttggaatggcttatgatgcaaaaattgctgacagacaaaatgatcatgaatgtagtggctacagatgcagatgatacaggcagattgtactgggaattcagataccatgggccctggtgctattgcctatgtgatttttccacgatagtgagcattctggataaaacacagtgtcatttcaccttcatatacacagtagttgcgttcctgaaatattcagatatattaaaactgtacaaaaataatttgcttttgtacagcgtaaatcaaagttagagtctaggctgaagtaattttaacagctttttgatctacgtaaatgtttgtgcagacaataaaagtatgtgggacgttagatggaactgtcctaaccattacaggtcacttagcacccagctgccctccaaataccagaactgtcccgcaattcttgtgaaagccaaaaacacctccacacatttccaaaatcccaccaggtgaccttggtagaaacactagaagtctaagtggtcccttccagctcaagtattatcagatttaaaaaatccgattatagtagtaatttaatcaatacatagatagtaaatattatgtgccagtaattttttttttctgagacaggatcttgctctgtttcacaggctggagtggcatgaacacggctcactgcagcctcaacctcctaggctcgagtgaccttgccacttcagcctcccatgtagctgggaccacaggcacacatcaccacacccagctaatttttttttttt

SEQ ID NO: 63309 - DNA, 1695 bp, Homo sapiens
cgtgactatatgtattttgtatgtaaatagtcatgaccacgtggttaagttataatgaaatcatcagaggcatggactttcttatcagagtgcattagtactggagatatgtaaggcaaaatggttttttttttctctttgtatatgactttttttttttttttttttgagaaggagtctcgctctgtcgcccaggctggagtgcagtggtgcgatctcggctcactgcaagctccgcctcctgggttcacgccattctcctgcctcagactcccgagtagctgggactacaggtgcccgccacaatgcccggctaatttttttttatatatatatttttagtagagaaggggtttcaccgtgttagccaggatggtctcgatctcctgacgtcatgatcctcccgcctcggcctcccaaagtgctggggttacaggcatgagccactgcacccggcctgtatatgacattttgagatcagggctaaattaagataatcaggtcaaatcaccgaggtaggttagatttttgctcaaacatatttactctcttccctccgcctccatggcaggcgtgtgcttttacttttccacctgttgacttcgggcttggcgatggggcctgctttggccgcttgggctaacagcagacaagactgaaagcaagcttgaaatgtgtggtgcagggaggctcgctttcttgtgcctctgccactgtcatgagaagagcctctcccaggaatctgcggccccatctgcctgggtcccacaatgagacacttagaacagacctggacccatcacaagcaaggggccaagcccagctaaccacacttgaggcaggactgcccagctgagcccagccaaaaccagccaacccccagcaaacccaccgatgcatgggagagaatgattgttgttttgctttggaatggcttatgatgcaaaaattgctgacagacaaaatgatcatgaatgtagtggctacagatgcagatgatacaggcagattgtactgggaattcagataccatgggccctggtgctattgcctatgtgatttttccacgatagtgagcattctggataaaacacagtgtcatttcaccttcatatacacagtagttgcgttcctgaaatattcagatatattaaaactgtacaaaaataatttgcttttgtacagcgtaaatcaaagttagagtctaggctgaagtaattwtaacagctttttgatctacgtaaatgtttgtgcagacaataaaagtatgtgggacgttagatggaactgtcctaaccattacaggtcacttagcacccagctgccctccaaataccagaactgtcccgcaattcttgtgaaagccaaaaacacctccacacatttccaaaatcccaccaggtgaccttggtagaaacactagaagtctaagtggtcccttccagctcaagtattatcagatttaaaaaatccgattatagtagtaatttaatcaatacatagatagtaaatattatgtgccagtaattttttttttctgagacaggatcttgctctgtttcacaggctggagtggcatgaacacggctcactgcagcctcaacctcctaggctcgagtgaccttgccacttcagcctcccatgtagctgggaccacaggcacacatcaccacacccagctaatttttttttttt

SEQ ID NO: 63310 - DNA, 995 bp, Homo sapiens
tgccgtccccgccccgctgtgccctcacggtgggtcagagtctgggctcagcctaactgccgggcgctgagggtgtgagttggcttggaagtggcttttggggctcctgtatttttacccgcctctttccctcaccagtgtgctgcctagaaaatactccttcctcggaacgcggtgtttttcaacttacttgagaaacattcagagcaagtctccactcttgtggttttggctccaggactatttcatctcttttggggggaaggggcagaaaagtaggcaaagagaagaatgcatggtattgaatagttctcgttgacaagtacttggggatttcatttgttgatttgctctcccttcaaaaataaaaaattagggagaaaaacagtgtaattcttgcctgcgaactagactcagtttttctctaacttacagaaagtgggcgtktccagctcaaagctcaggttttcactgcaagggtaaccgcgcaagagatgtcaaagtcctcaattctctgagtcccttccttgttttagtctcaggtttgtaatattcacaacgtagacagcaactgtaccgacaatagcattttctttctgaagagaccggttttcaaaaattatttataagtagtcactgccggaatgttgtaacagagagaaaagaaacattcattaaacacagagaagccggcgtggtggcgtgcacctgtagttccagcacttggggggccgaggcgggctgatcgcttgagcccaggagtttgagactagcccgggcaaaaatgatgacactccgtctacaaaaaaagaaaaacagctggggacacgcaactgtagtcccagctactcgggatgctgaggcgggagaatcgcttgaggctaggaagcaggatctcagtgagccatgattgtgccagtgcgcttcagcctgggcgacagagggagaccctgtctcaagaaaacaaaacaaaaaaccctaacaaaacaaaaaac

SEQ ID NO: 63311 - DNA, 608 bp, Homo sapiens
gctcataaccgaagatgtcagcctcccctgtcccgaacgcagtgtgtggaaaggtactgatgcagtgtcatttttctttattagtttagctgtcattttttttgttattgcctttttctgtgcctttaagtttactttcatttatttatttttattgtagttacatatataatataaaatttgccattttaatcattttcaagtgtgcaattcagtgacattaagtacattcatgttgttgtgtaaccattgcccctattcgcaaaactttttcatcactccaaacagaaactgccaccattatgctrtaactcctcattctacctcctcccaaaccctagtaacctctgatttatttttgtgtgtttttttttttttttttgagacagggtctcactctgtgttgcccaggctgaagtgcagtggtgctgtcacgactcactatagcctcaacctcctgggctcaaccagtcctccacctcagcctcatgagtagctgggacttcaggcacacgccaccacacccagctaatttattattattttttatagagataaggtcttgctatgttgcccagaactcctggtctagaactactgggctcaag

SEQ ID NO: 63312 - DNA, 746 bp, Homo sapiens
ccttcccctggtaaaatgccagaaaaggtattcacatacctttgaaaaaaaatcaagtactttggaaatgacattaaacaacttttgaaggtttaaccttccaccgtgtttggctattaaggttatagacttccataagataaggacttgtgaatatatatactcaaaaaggctacagctgaatgtgggtattcaataaatgcttgaaaccaagtataaaataacaaaatagcaaactgtgacttgaactgattagctctgtttctaagcactagagtgctttagtaaaagcaaaacattgaggctgggcacagtggctcacacctgtaatctcaacactttgggagccaaagccgaggtttgcttgagcccaggagttcaagaccagccagggcaatatagggagaccaccgtctctacaaataattacaaaaattagcccagtgtggtggcacgcaactatggtcccacctmcttgggaggctgagatgggaggattgcctgagcccaggtggtcaaggttacagtgagctatgattgcaccactgcactccagcctgggtaagagagggcgaccccgggcgtctcaaaaaacaaacaaaaactgacctttgttttggaaaagaggttacaatcagacttaataggaaaatatctttagaaactcacaatgatttcatatttaaattagtatttaccaaagtttccattacatataataggtctgtgaaattctcaccctctta

SEQ ID NO: 63313 - DNA, 685 bp, Homo sapiens
tccaagactcactgtgaggacttgccacagcccggaaatgcagcatcttcattcatcgacagcgggcagttggattactgttgtttgggtgggttggttggttggctggctggctggttggttttttggcagaattccttggtaagtggcaggcaaggacatgaaaaaagaaaagcagattctggtaagcacctttaccaagaagagtagaccacacataaccagtcatggattttcagatcccttgcctttgctgcaggagctgttacttctgcctttgtcaccttcagccaactgtatcctcagtttcacccctactcttgcttaaagctcccttcagttttctttaaaattcccccctttttttttatcacttccatacacctatccgttctctccaatccagatcattgtctttccttctttttgcagttasgaatttacctatacgatttctcccaacatcctctgaggtgcttctgaccactgattttattttccacttgctctccttaactccttttcctggacctggacaatcaagataaatgcatattagattagatagtaaacaaacaacattcaaatgtaatgaatgcactggaccttttggaagtgtttctgcaaataagaatttaagggccgggcgcgatggctcacgcctgtaatcccagcactttgggag

SEQ ID NO: 63314 - DNA, 682 bp, Homo sapiens
tgataactcatccrtaataagagctaacacttacaaagtgcttattatgtgccaaacaagtattaacttgctcatcactttattttcacaacagccctatgaggtagagatggttattattctctgttttacagatgaggaaactgaggcaaggagaggcttaaggatttgcacaagggcacacaggtagtgcatggcacagccaggaataagtgggtcttcagagtctatgctcttaacctctataccacagaacattctatagttttactgttttcctgcagagggaacattaagccctccagggtctagttttggacattaagaagcagatattaactcatttccgtttctttaacactccaggcctttgcacatgctgttcccttagctgaaaacactgttctctgccattgcacagtggcttcctttcattcttcagtttgggtttaagtgctacctcctgagccagatccatcctgcccatcctgatgaatccaacccctctcccccatcgtgttgttctcgagcactgaaccctgttgatgtatgtatttgtttgtttgcttacgtagtttctgcttccccagctagaccaaaaagtccaagaaggcagagcacacatctgttttactcatcactgtttgcttagggcattcagggctcctagcacatagtagaa

SEQ ID NO: 63315 - DNA, 1801 bp, Homo sapiens
tttggtgagttccagttctttgacacttttttttgagaggcctgaaggtggcttcctgaggaaggaacttggataaaacaaatacctgtttcaagctttaacagcagaagcatcaatttctatgtttgtctaaaaacaattgtctatgggactatttcaaataggtgtcaatttttattgactgcttttctgcatctcttacaataatcttgtgattttttttgatctgttaatgcagtcaattcattatgttttattatyttcttttctttttttttttttttgagatggagtctcatactgtcggccaagctggagtgcagaggtatgatctcggctcactgcaacctctgtgtcctgggttcaagtgattctcctgcctcagcctccgaagtagctgggattacaggctcctgccactattcccagctaatttttgtatttttggtagagatgggctttcgccatgttggccaggctggtctcgaactcctgacttcaggtgatccacctgcctcagcctcccaaagtgctgggattacaggcatgagtcactttgcccagcctatcttcttttcttatttattgatagatttagtttgccaatgttttgttgattgatacattttgtatcaatgttcatgagtgaaatcactttgtaattttcctttttcaaactgtctttggtttttggtattagttgtttattctagccttataaaatggaaagagttatctatttttctatttcatggaataatttatctaagactgcaatgatatgtttactttgaggaaagattttaaactatgggttcaattttttaaattttcctaaaacaattattttttctcctacattttagtattttatacatgaaaaattttaatatttcatattttctaagaattttcccttttcacctgttttcacttgggggtgcataaatatttataacattttatctttgtaatatctgcagcaactacaattatgtttactttttttattcatgatatagttttaaaaaatgattgctcttttccttttttgatcagtattgccagaagttagttaactttatgaggctttccattttttttaatgtgtttattttttaaattttagagtcaggtttttacgatgcatgttgcccaggctggagtgcagtagcatgatcatggctcaatacagccttgaactcctgggttcaactgatcctcctgacgtagcctcccaagtagctgagactaacaggcacatactaccatgcccagctttttataagactttttcaaagaaccaactttggatttattgatcctctctattgtatgtttatatttaaatctattcatcatttctactctttttttttttttttttttgagatagagtctcgctctgtcgcccgggttggagtgcagtggcgcaatctcggctcactgcaagctccgcctcccaggttcacgccattctcctgcttcaacgtcccgagtagctgggactacaggcacctgccaccacgcccggctaattttttttgtatttttaatagagacggggtttcaccctgttagccaggatggtctggatctcctgacctcgtgatccgcccgcctcggcttcccaaagtgctaggattacaggcatgagccactgtgcccggcctcatttctgctcttaacattatttcttctttggttgggtgggtttatttctagttaactctaacactcacagttttgatcttggaggacccagatcttcagaggaccaaatctccttatatttcttacc

SEQ ID NO: 63316 - DNA, 1801 bp, Homo sapiens
tttggtgagttccagttctttgacacttttttttgagaggcctgaaggtggcttcctgaggaaggaacttggataaaacaaatacctgtttcaagctttaacagcagaagcatcaatttctatgtttgtctaaaaacaattgtctatgggactatttcaaataggtgtcaatttttattgactgcttttctgcatctcttacaataatcttgtgattttttttgatctgttaatgcagtcaattcattatgttttattattttcttttctttttttttttttttgagatggagtctcatactgtcggccaagctggagtgcagaggtatgatctcggctcactgcaacctctgtgtcctgggttcaagtgattctmctgcctcagcctccgaagtagctgggattacaggctcctgccactattcccagctaatttttgtatttttggtagagatgggctttcgccatgttggccaggctggtctcgaactcctgacttcaggtgatccacctgcctcagcctcccaaagtgctgggattacaggcatgagtcactttgcccagcctatcttcttttcttatttattgatagatttagtttgccaatgttttgttgattgatacattttgtatcaatgttcatgagtgaaatcactttgtaattttcctttttcaaactgtctttggtttttggtattagttgtttattctagccttataaaatggaaagagttatctatttttctatttcatggaataatttatctaagactgcaatgatatgtttactttgaggaaagattttaaactatgggttcaattttttaaattttcctaaaacaattattttttctcctacattttagtattttatacatgaaaaattttaatatttcatattttctaagaattttcccttttcacctgttttcacttgggggtgcataaatatttataacattttatctttgtaatatctgcagcaactacaattatgtttactttttttattcatgatatagttttaaaaaatgattgctcttttccttttttgatcagtattgccagaagttagttaactttatgaggctttccattttttttaatgtgtttattttttaaattttagagtcaggtttttacgatgcatgttgcccaggctggagtgcagtagcatgatcatggctcaatacagccttgaactcctgggttcaactgatcctcctgacgtagcctcccaagtagctgagactaacaggcacatactaccatgcccagctttttataagactttttcaaagaaccaactttggatttattgatcctctctattgtatgtttatatttaaatctattcatcatttctactctttttttttttttttttttgagatagagtctcgctctgtcgcccgggttggagtgcagtggcgcaatctcggctcactgcaagctccgcctcccaggttcacgccattctcctgcttcaacgtcccgagtagctgggactacaggcacctgccaccacgcccggctaattttttttgtatttttaatagagacggggtttcaccctgttagccaggatggtctggatctcctgacctcgtgatccgcccgcctcggcttcccaaagtgctaggattacaggcatgagccactgtgcccggcctcatttctgctcttaacattatttcttctttggttgggtgggtttatttctagttaactctaacactcacagttttgatcttggaggacccagatcttcagaggaccaaatctccttatatttcttacc

SEQ ID NO: 63317 - DNA, 1801 bp, Homo sapiens
tttggtgagttccagttctttgacacttttttttgagaggcctgaaggtggcttcctgaggaaggaacttggataaaacaaatacctgtttcaagctttaacagcagaagcatcaatttctatgtttgtctaaaaacaattgtctatgggactatttcaaataggtgtcaatttttattgactgcttttctgcatctcttacaataatcttgtgattttttttgatctgttaatgcagtcaattcattatgttttattattttcttttctttttttttttttttgagatggagtctcatactgtcggccaagctggagtgcagaggtatgatctcggctcactgcaacctctgtgtcctgggttcaagtgattctcctgcctcagcctccgaagtagctgggattacaggctcctgccaytattcccagctaatttttgtatttttggtagagatgggctttcgccatgttggccaggctggtctcgaactcctgacttcaggtgatccacctgcctcagcctcccaaagtgctgggattacaggcatgagtcactttgcccagcctatcttcttttcttatttattgatagatttagtttgccaatgttttgttgattgatacattttgtatcaatgttcatgagtgaaatcactttgtaattttcctttttcaaactgtctttggtttttggtattagttgtttattctagccttataaaatggaaagagttatctatttttctatttcatggaataatttatctaagactgcaatgatatgtttactttgaggaaagattttaaactatgggttcaattttttaaattttcctaaaacaattattttttctcctacattttagtattttatacatgaaaaattttaatatttcatattttctaagaattttcccttttcacctgttttcacttgggggtgcataaatatttataacattttatctttgtaatatctgcagcaactacaattatgtttactttttttattcatgatatagttttaaaaaatgattgctcttttccttttttgatcagtattgccagaagttagttaactttatgaggctttccattttttttaatgtgtttattttttaaattttagagtcaggtttttacgatgcatgttgcccaggctggagtgcagtagcatgatcatggctcaatacagccttgaactcctgggttcaactgatcctcctgacgtagcctcccaagtagctgagactaacaggcacatactaccatgcccagctttttataagactttttcaaagaaccaactttggatttattgatcctctctattgtatgtttatatttaaatctattcatcatttctactctttttttttttttttttttgagatagagtctcgctctgtcgcccgggttggagtgcagtggcgcaatctcggctcactgcaagctccgcctcccaggttcacgccattctcctgcttcaacgtcccgagtagctgggactacaggcacctgccaccacgcccggctaattttttttgtatttttaatagagacggggtttcaccctgttagccaggatggtctggatctcctgacctcgtgatccgcccgcctcggcttcccaaagtgctaggattacaggcatgagccactgtgcccggcctcatttctgctcttaacattatttcttctttggttgggtgggtttatttctagttaactctaacactcacagttttgatcttggaggacccagatcttcagaggaccaaatctccttatatttcttacc

SEQ ID NO: 63318 - DNA, 1748 bp, Homo sapiens
actattagttcacaagattagatttttaagaaacattctgaattgagatattcacaggagtttcgtccttcaggagaaaaattatatattaattccagtagtacaagtatttaacaactggcatagcagagtaccaatgaatcaatgagacactcagccaataaaaatggctgcccgactggttggaacaagagcaagttgtaagcaacctgtgagttcattcagggcagcctggctgtgatatctaccatcactgcagagagtatttttgaaacgctgcatctaatgccacggatgcatttatgacccaagccagaatgccagctgtgatgtgtgttatagttatatgtagcttgatcctgaacagtaattctcccacttgatcataaaccagaatcaccagaactggccccaactggcctgggttttttctaaatctattctaaaaaaataatcataggcaatgcagtgagcctagaaggaaggtcccactggtaggcattatcctgctgggggtctgcccttctccaggctccttttcttctccctgccagaggcaaggggagtggaggcaggtcctgggagwcaggctgagtgaggagggggcatctccccagggatcccaggagtgagtcacccaaataaacagataaagactgtaattcagaggcttcttaccaggtcccttggatggatgcaaaaacatgcatccatgtcaagggactggtaagaaaatgcgggcagatcagagtttctcaagggtgcttctaaaatgcctaacactaaaatgcagtgtttcttaaaaatgcagattcctcggccctgccccacatctaatgaatcagaatctctgcgagagaggctgggttccacaatttataccagtttgcaaggtgatctcttgcagactaaagtttgagaaccattgagactacacagtgtgacttgggagaggaatgagacagagagaagtactagctgcatcaggtaagactgcatgcctggcgtcacgtaacagggccagtgtaagggactgaagggtttcctaaggaatagaatctatctttttcttcaattatcatagattgcatagaacctacatagtttcagtataaaagtggcatcatccagcaatactttccaaatcacttctgaaagcagaaagcaggaatgaaaagataacattttacagcaactcttcaagggagaataaaaatgcttttaataatattcttactttacccctactctgatttttttacctgctatattgcaggtaaactatattaaattaactgtattaagtttactgtactaagtcaactatattaagtaactatattaagttaaaagatgattgtgcataggaatgaacttgaaggcgtatttcagagccacccaaataaatcggcgtggctagtatagagaacgaaaatactaactgctcttccctaagaatttaccaggactggtgtccaggttgtctacacctcccaggagatgggtagcaaagttctgggttcctatgacagctttacagatatgcaacacagaatctcctactttaaaaaaaatagtcatcctttataaaagccaaaagttgtaagataatgttaatgtaacatcatcaaagctacaacctgattgtgccaacttaaatcacttatgaaagtgacatgctacaatgagagcatatagagcagggaacaagagccccgagagtttcgagaagcctggactgcttctat

SEQ ID NO: 63319 - DNA, 1748 bp, Homo sapiens
actattagttcacaagattagatttttaagaaacattctgaattgagatattcacaggagtttcgtccttcaggagaaaaattatatattaattccagtagtacaagtatttaacaactggcatagcagagtaccaatgaatcaatgagacactcagccaataaaaatggctgcccgactggttggaacaagagcaagttgtaagcaacctgtgagttcattcagggcagcctggctgtgatatctaccatcactgcagagagtatttttgaaacgctgcatctaatgccacggatgcatttatgacccaagccagaatgccagctgtgatgtgtgttatagttatatgtagcttgatcctgaacagtaattctcccacttgatcataaaccagaatcaccagaactggccccaactggcctgggttttttctaaatctattctaaaaaaataatcataggcaatgcagtgagcctagaaggaaggtcccactggtaggcattatcctgctgggggtctgcccttctccaggctccttttcttctccctgccagaggcaaggggagtggaggcaggtcctgggagacaggctgagtgaggagggggcatctmcccagggatcccaggagtgagtcacccaaataaacagataaagactgtaattcagaggcttcttaccaggtcccttggatggatgcaaaaacatgcatccatgtcaagggactggtaagaaaatgcgggcagatcagagtttctcaagggtgcttctaaaatgcctaacactaaaatgcagtgtttcttaaaaatgcagattcctcggccctgccccacatctaatgaatcagaatctctgcgagagaggctgggttccacaatttataccagtttgcaaggtgatctcttgcagactaaagtttgagaaccattgagactacacagtgtgacttgggagaggaatgagacagagagaagtactagctgcatcaggtaagactgcatgcctggcgtcacgtaacagggccagtgtaagggactgaagggtttcctaaggaatagaatctatctttttcttcaattatcatagattgcatagaacctacatagtttcagtataaaagtggcatcatccagcaatactttccaaatcacttctgaaagcagaaagcaggaatgaaaagataacattttacagcaactcttcaagggagaataaaaatgcttttaataatattcttactttacccctactctgatttttttacctgctatattgcaggtaaactatattaaattaactgtattaagtttactgtactaagtcaactatattaagtaactatattaagttaaaagatgattgtgcataggaatgaacttgaaggcgtatttcagagccacccaaataaatcggcgtggctagtatagagaacgaaaatactaactgctcttccctaagaatttaccaggactggtgtccaggttgtctacacctcccaggagatgggtagcaaagttctgggttcctatgacagctttacagatatgcaacacagaatctcctactttaaaaaaaatagtcatcctttataaaagccaaaagttgtaagataatgttaatgtaacatcatcaaagctacaacctgattgtgccaacttaaatcacttatgaaagtgacatgctacaatgagagcatatagagcagggaacaagagccccgagagtttcgagaagcctggactgcttctat

SEQ ID NO: 63320 - DNA, 988 bp, Homo sapiens
taatcttcacaaatgcctgtgagtgtcttgctattataattcccaatttatgatcaagaacatggaggcactgctgcagggcgccatggcttgtgtctataatcccagctacttgggaggctgaggcaggatgctgaggtgggagaattgcttgagaccaggagttcgagaccaggctgagccacatggccagactcctatctctaaaaaaattaaaaattaaagaccatgaaggcactgagaggttaagcaattttctcaagatcacagctaaatcatggaaaggccaggactgaactcaattcaggcactagccttaaccactaagccctgtagcccctgagagagatgtacagaaaagattgtgcaacctgctctgttccaggctttgccctcagaaagtcccttatagtaaatttgaatttctcctacttctgttacagtccatttcctcttgcactgctccaggctggagaagaattcggtgtagcagcttctgagaagttgaaggaggggccaggcagaaactgtcctagagtaagcactgaggggagcaatgcacttggcatactcagagctgaaacacttccagtggaggtcacctgcagccactggcagccttatttgcattttctgaagccccctcttttccccatccttggagtcaasgtacatttacctgctgagaagtcagaagtctccctctgatgcaacacatgtggcattttctgaagctgatagtgttcatggaaaagggcaaagaatgcttttatgcccattcagagaagaagtcccttaaataaacagtgttttctgtgccttggaacctgcaaacccggggactcagtcctactcatcacaggctaattccccggcatgacatagccttctagctcaattgagcatgtccaaaatgtgagcatgttagaggcttgttaaaacacagattgctgggtcccaccccacgggttccataggtctgagatgg

SEQ ID NO: 63321 - DNA, 988 bp, Homo sapiens
taatcttcacaaatgcctgtgagtgtcttgctattataattcccaatttatgatcaagaacatggaggcactgctgcagggcgccatggcttgtgtctataatcccagctacttgggaggctgaggcaggatgctgaggtgggagaattgcttgagaccaggagttcgagaccaggctgagccacatggccagactcctatctctaaaaaaattaaaaattaaagaccatgaaggcactgagaggttaagcaattttctcaagatcacagctaaatcatggaaaggccaggactgaactcaattcaggcactagccttaaccactaagccctgtagcccctgagagagatgtacagaaaagattgtgcaacctgctctgttccaggctttgccctcagaaagtcccttatagtaaatttgaatttctcctacttctgttacagtccatttcctcttgcactgctccaggctggagaagaattcggtgtagcagcttctgagaagttgaaggaggggccaggcagaaactgtcctagagtaagcactgaggggagcaatgcacttggcatactcagagctgaaacacttccagtggaggtcacctgcagccactggcagccttatttgcattttctgaagccccctcttttccccatccttggagtcaaggtacatttacctgctgagaagtcagaagtctccctctgatgcaacacatgtggcattttctgaagctgayagtgttcatggaaaagggcaaagaatgcttttatgcccattcagagaagaagtcccttaaataaacagtgttttctgtgccttggaacctgcaaacccggggactcagtcctactcatcacaggctaattccccggcatgacatagccttctagctcaattgagcatgtccaaaatgtgagcatgttagaggcttgttaaaacacagattgctgggtcccaccccacgggttccataggtctgagatgg

SEQ ID NO: 63322 - DNA, 647 bp, Homo sapiens
ggatccagactgaaggagccacccccatttggaatatgctgttcttgttgcaaactgggggaaaaaggccagataaggaatggcttttaatgcttcctctcagactgtgttatggtttttttctcacattctattagccaaagtaaatcagtggccaagctgacctcaatgggacaagtaaatataattcttccaaatggaagtcctgcaagtcataggtcaatggtgaggatatataaaacacttacaggaagggccctaataattgggagcaaaamcacaatccatcgcattcatttatactctttctaagcttttggcatttgggtttggaaatctaatttatttaggagtcttcttcaacaccttctagtgatgagatttctttaacccagttttcagtttcctttctttaaaattataatgagatgtgatgtgcgttgaagaaaccccagaagtgagaaactctcatcactacaatggtgatgtagacagtggaaaactgttcccagttgcctctaagtccatcgtgctatactgctggaatcaggtatcatacataatctttctgctgagaattgataggtccagcttgttctacatccaaataataattcaaccaatgatttgtgagcacctaccgggca

SEQ ID NO: 63323 - DNA, 716 bp, Homo sapiens
  misc_feature (1)...(716): n = A,T,C or G
tgttgcatgtctaacatgttccagtgaccattcaattgtggattacagagaactgtcattgtccaaattagaggcaggaatttcagtcctgtgggaagcatccaaaaagttcttcagcacagataggtttaggaataaaactggagatcttttragtggttctcatttttataagcttggtcatgaacttatctgccccttagttatttttagaattgatttcatgctcaggtcaatcatttcgcagtgaagaatataccatttctcaaactgccttctttccaaattttatgactagagttcagcctgagttccagaatcagctgatgaacatcactcaatggagcatattaactagaattgttgtctccatctgggtctcttccaaatggtcttgtcaaatgcaatcagagcatcatatattagagaatatgttatatcagcctccacttaagttactcatagattgtccttgacccttctcatggctcttctctcttgtaggtggtattattggtaacataatttgctctgacaaaagcaaataaaggaaattttagacctgtattattcaactggataaaactgaaggttcagaagtgattgcaaatattgnnnnnnnnnnnnnnnnnnnnnnnnnnnnnnnnnnnnnnnnnnnnnnnnnnnnnnnnnnnnnnnnnnnnnnnnnnnnnnnnnnnnnnnnnnnnnnnnnnnnt

SEQ ID NO: 63324 - DNA, 716 bp, Homo sapiens
  misc_feature (1)...(716): n = A,T,C or G
tgttgcatgtctaacatgttccagtgaccattcaattgtggattacagagaactgtcattgtccaaattagaggcaggaatttcagtcctgtgggaagcatccaaaaagttcttcagcacagataggtttaggaataaaactggagatcttttgagtggttctcatttttataagcttggtcatgaacttatctgccccttagttatttttagaattgatttcatgctcaggtcaatcatttcgcagtgaagaatataccatttctcaaactgccttctttccaaattttatgactagagttcagcctgagttccagaatcagctgatgaacatcactcaatggagcatattaactagaattgttgtctccatctgggtctcttccaaatggtcttgtcaaatgcaatcagagcatcatatattagagaatatgttatatcagcctccacttaagttactcatarattgtccttgacccttctcatggctcttctctcttgtaggtggtattattggtaacataatttgctctgacaaaagcaaataaaggaaattttagacctgtattattcaactggataaaactgaaggttcagaagtgattgcaaatattgnnnnnnnnnnnnnnnnnnnnnnnnnnnnnnnnnnnnnnnnnnnnnnnnnnnnnnnnnnnnnnnnnnnnnnnnnnnnnnnnnnnnnnnnnnnnnnnnnnnnt

SEQ ID NO: 63325 - DNA, 753 bp, Homo sapiens
agactgaaggagccacccccatttggaatatgctgttcttgttgcaaactgggggaaaaaggccaaataaggaatggcttttaatgcttcctctcagacatggtatgtgttatttttttttctcatattctattagccaaagtaaatcagtggccaagctgacctcaacgggacaagtaaatataattcttccaaatggaagtcctccaagtcataggtcaatggtgaggatatataaaacacttacaggaagggccctaataattgggagcgaaaacacaatccatcacattcatttatactctttctaagcttttggcatttgggtttggaaatctaatttatttaggagtctccttcaacaccttctagtgatgagatttctttaacccagttttcagtttcctttctttaagattataatgagatgtgatgtgcgttgaagaaaccccagaagtgagaaactctcattactacaatggtgatgtagacagtgaaaaactgttcccagttgcctctaagtccattgtgctatactgctggaatcaggwatcatacatgatctttctgctgagaattgataggtccagcttgttctacatccaaataataattcaacaaatgatttgtgagcacctaccgggcactgtgccaagtgtggaagacacaaccttcagtaactcaagtttcccttcaggaactgacagcttaattgggaaacaaataaagtaagaaggcaattgcattatggag

SEQ ID NO: 63326 - DNA, 1592 bp, Homo sapiens
ggtatctatgttggcttctgctgctcctaaaacagaagcttatttgatactatgataactgtgatatttcttgacatctgaaaattttataaaatttcagtttctgtaataaagttttattggaacatagtcccaatcattcattatatattgtccttaaatgctttcacactacaatggcagagttgagtagctgcaacagaaactatatgcccacaaggcctaaaatgtttactatcctgttctttacattaaagtttgctgattcctgctctgtgccattttttcatacccatcctctgcaccacataaaggatttcagccaaaacctttctgtaaatagtctcagggtagtttaatacacatattcagatttcagaatcccagtttagccttctgaaggtaggatctcctacatttgtgtgtgtgcktgtgtgtgtgtgtgtgtgtgtgtgtgtgtgtgtagacagaaaagtttctggaacatggctttgtggattttacagacttcttttggctttacagtatactctgatttttctgtaataaacttgtaattattttatgctaagaagctaaattggagactgaaggtcaggagcagaagcgggctcttagttcatcaggatcctataatatcagccatgatgtaaagtttttaaaagttctgagaaatctcaataatatattttcttatattccttatatttccttcagaattttttttcagcccatcattcaggatcctctaaagtataatttctatcaacaacctcaaatggattttctactattctcctcttaagccaaatttttgtatcttactaccattatgttttactcatattatccactctctggaaatgccctgctaaaagtttactttctatagtaagcctttcctaccaccatcagagccctgttgtgccaattcctttatttaaatgcttccagtgtccaggtttgtacacagtacaggcttgcctgaaccatttagttgacatttagcctagattcatttgtatggctacttacttttatacttttgttctgcctttccaaatgcatgacaagaatctcaagaccatatctaaaattctttatattccctgcatctagcacaagtcacaaggtctctatgtaaatgatgatgtcagtaggatagagcatggcagcagactttattctctcacatgaactgccagaaaacttttcaaatctgacaaatgagagaagaactaggtaacaggttcaccagaattttgcaaaagtaatcatagtttctaactagagacctaacgttttaagtcagaagtaaaatcaagtctgttgaaggacttaaagaaatccccgtgtctctaccagtgggccccacaagggctcagacaagctctaggatttcaaatcagatttcctaaaagtcttctctgaatgattgatattgtatattatgaaaagggattgattctttaaccactcaaaggcatatcctacaattgcttttcaaaatacatttaatgaaaatttgacttgaagtttaactattggataatataatctgattatatttctatagtctcactttattatag

SEQ ID NO: 63327 - DNA, 665 bp, Homo sapiens
tgtttctggtcttccttccctttggaccatttctctgatagacacmgtttcttgtactttggcccaaataattactttcccctttgtgtttctgtttccctttatcctctcccccattttaagaatacacaatttctcaatcagcaattattaaacctttctcaagtcaaccaaaccttttctggaagctgacactaaatatacatggctgtaaacttgctgaggagtggaggaggggtgagtggggatgacaaacctggaaactgaacttgaaatctgtctcagatcccaaggataccacacggggaaaagccagccagtgtgagattcctttctttattttccttaggttctcaggggataatttgtactgaaggttactttctatagaaagccttgagaacactacctcttaatcatatttagaagcatataaaaaaggtcgacaaggccaatcttgatttcttttttctttgatgtagtcacagagaattttgaaggaaagatggggtctctgagtccccattaataaataaaagtaagtcctcatgtacattcatgtacagggtgctgagagctcacatgtggaggggccatccctatggccatagagtcctgccatggtcattgtcactaacagttgtcactgctgtagcagggtccca

SEQ ID NO: 63328 - DNA, 1088 bp, Homo sapiens
ttcatctaaatgccaaccttatgaggtagacactgttaatagagctgttttatagtccattaaagttaggcctagagagatgattttcctgaagtcatacttccaggatgtggcagaaacaatgcaaacacaggactgtgtgaatccagagggcagtgatcttggggagcagggagaggggacaggaaaagggatattacttagagattcaagaggtagagtcagaatcagcatgaattagttattaattagattgggggtgtcaaggatgagcttctggtctctggtttggtgctggagggggtggatgtcatgctctcattcatggatagtagcaatgcagtggacttcatggagggccatgttggatgagtayggggtttaagaagcagtggtgagatagggaagagtgggagctctcagcaggcaggacagtctgagccagggcctagggtgagtctcacatggaagaccctgagcgcggccagaaggaacagagggttaccgctagggaaggtggggctgcttggggagtatagagctatggcatggggtgggggatccctggtgcccaggagagttgggacttgccagtaatggagccctcagaatgcacgatgtgcagatgtaccacttctgcctgaacaaagcaacatatgctgtataagctatgctgctatcctgggcagggacacccctgaggaaggaccatggtgcgcgcagtcagcagactgtagagacaggagggtttcaagcaagatttcgagccacagagggaaatagtgggattttggcacagactctgtgctttaggaaggagaagtactctggggtcccaggaaagagggaaagcagcgtctctgagaagttgtgcatagccccagatggggtaataatcccttagtcacttgtctggagcctccttgacaccagcaactgtgtctcatccattgtacccccagcgcctagcccaatcctgttctcttgaattcacacctcaccaaccccatgaacattcagagctggggcaatgaatgatgcccaacaccacagaccatgcatgtggtaaggttagccagggtcacaga

SEQ ID NO: 63329 - DNA, 535 bp, Homo sapiens
tggaggaaaggaccgggcacaagtggctcacacctgtaatcccagcactttgggaggcagagtcaggcagatcacttgagatcaggagttcgagaccagcgtggccaaaatggcgaagccctgtctctactaaaaatacaaaaactagctgggcgtggtggtgtgagcctgtagtcccagctactcaggaggctgaggcacaagaatcacttgaatcgggatgtggaggctgcagtgagccgagattacgtcactgcactccagcctgggtgacagagcaagactttgtctcaaagacagagaaaaaaaagaattatggaggaaacacaccacttgttcttattcttggttgtgtgtgtgagactgtataggggtgggggagatagaagtattcacytacagagaagaaaagaattaacttagtagatggactctaaagaagttggttctgaaaatcacaattgggccaccccaatcttctctcattaatgtgggagatgttccctggatgccccctttccccataccatcaatg

SEQ ID NO: 63330 - DNA, 642 bp, Homo sapiens
attatttcctaggctttctgcaaagataacatcctggaatttcttttcattgcattcctaggttgggtcctttttactagctcacatgtttcattctctccaatgtatatccttaaattttttttcagaaaaatatggaagygaaataaatgtgagttcttgcatctctgaaatatctattttactctttcatgtatttgtctggtatagaattatagattcaaacaactttctgttccgactttgaaggtactgcttcaatatcttcttgtgtacctttttgctgatgacaaaacagatgccaatccaattctcattcttgtttaggtaacctctgttttccttctctggaaacttttaggctcttcctttaatctttattattccaaaatcttgaaggatttgtcataggcatttgaaccagagcaactccatcttgaataggtgctgagacctactgggctgcacttccaggaggttatgcattgtaaatcacaggatgagataggaggtcagcaaagatactggtcataaagaccttgctgataaaacaggttgcaggaaagaagctgactgaaacccaccaaaaccaagatggtgacaagtcacctctggtcgtcctcacggttcattacacactaa

SEQ ID NO: 63331 - DNA, 499 bp, Homo sapiens
gtcagggactatcatattgccatatttatagagtgcttaccaagtgctaaatgtatttcatctcatgcaatcatcctaacagccctgtactattaccaatcccagttgacggatgagaatacttaaaacacagagaagtaacttgcccaagagtataatgctattaagggttgaagcaggaatcaaactagaaggtgagcttgtagccactacattattcccatcttagttttccaccagggggttaccgggtagataatgactctattaaccaaaatggagatgtgagaagtatgtacccctccccactacaccccaaactttggtagataagaggggtgggaatatgactttttccatttgggacattctgaatttgaawcaacaagtggaaatgtgagtctggagcttgaagcagagatggcctcattttataggtgaggtaaccgaggtagaagttaaccaacatgcaacctccttcccaaagctttgcttgagc

SEQ ID NO: 63332 - DNA, 858 bp, Homo sapiens
tcagaatcccttccaaaataagatggtaagcaggagcctcgtaaagcgcctgtaccatctccaccagaacccactgctccgtggcagtcgccatagttagccgcttccttccatacgctgtctcatttctatctcactgttcagcttagctgctgtccagacaaatgtttctcaaaatttgagtcacctatagacccaagcaaagggaagaaaaaagaaaaagacaaaagaaaaatctatgcattttagtttgtgagatgctggtgtaaggactgtaagccccattcgaggacaatgtcttgtaaatttttaattatctcagcaaaaaaaattagaagttttatgttttggaatggcaaaataactgagattaatatcacaatggagttcaaattttcaaattctcataaaacatatcaacatccaagaatatacctacagatatacctgtctttggatctcaatgtgagaaacaataaaccaggataaatagaagtgtggggccaagatcaagaggagggcacagtaacctctgggtgttwagtagaaaggacaaacggccaatgagaaaaggatggagatagcacaaaactgggaagatctacgattgtaatctcatgcctgtctcttgacatgcttgtatttttatgttacaaaccatctttcaactttcttttattctcattcaaatgttttcagtgtttattcagcacttatttcagtgagaacatgtatttaatctggcattcacttattcaattaatttttattgagggccaactgtgtgcctggctaggagtagagggtacaaccatgaagaagacaaaaaatcaaaacagacacagggttttcttttat

SEQ ID NO: 63333 - DNA, 654 bp, Homo sapiens
attatcaaattgctcctcagaaaatcattgagacaactggtagtccaagcatcaggtaattactcatttactatttgctaatattaggaattatcactgtttcaaaatcttagcttatttgataagaaatgacactgcatcctattgacctggtttttccttattatatagccaaatatattttatgttttgtcctctgtgaattatctgttcataaacatttttatattttccatatatgtatattataagcttttttatggagaaaggatattattctttacctggtacttacattttttcagtttttatttgctttcagaatttttgatgtctctgatgaatagttttaatttttatgttgtccattatagaaaactttatatcttcttttgcttttgaacttcaaaagttatttccctattcccaaatgagataaatattctcttgtatttttctagattttaatgatttgattttttattcttcttcatgttcaactctttatagttatgaattaattaattagctagttaattaatttttcattcaccatgtgaatagaatctaagtccattgttttttcaaatactatagttaatcagtrttccagaaccatgaattaatagtttagcctttctcccctcattaaaa

SEQ ID NO: 63334 - DNA, 546 bp, Homo sapiens
cctattcccttctaaatactgtggaccggtgcttctcatcttttgccaaaagaacaaggatagcatgtttgtccctcatctgtcaaatcctctttttgaatatacacttggaaggcaggtagataggtatatctcacaccctaattcctaatatagggaagatttttttttttttttwaatcttacagccttgttcttaggagcacagcacagcaatgaagatgcaggctctggagccacacccctgcagtcaaaacccagccctctcatttcctaaagtgcatccctgggcaaattacatagatttttctctgtctttgtttcccaatctgtaaaatggagataataaaaagacaaacctggccaggtgcggtagctcacacctgtaatcccagcactttgggagtccaaggcaggtggatcatgaggtcaggagatcaagactatcctggccaacgtggtgaaaccccatctctactaaaaatataaaaattagctgtgcatggtggcgcacgattgtaatctcagctgcctgggaggctgagg

SEQ ID NO: 63335 - DNA, 546 bp, Homo sapiens
cctattcccttctaaatactgtggaccggtgcttctcatcttttgccaaaagaacaaggatagcatgtttgtccctcatctgtcaaatcctctttttgaatatacacttggaaggcaggtagataggtatatctcacaccctaattcctaatatagggaagatttttttttttttttaaatcttacagccttgttcttaggagcacagcacagcaatgaagatgcaggctctggagccacacccctgcagtcaaaacccagccctctcatttcctaaagtgcatccctgggcaaattacatagatttttctctgtctttgtttcccaatctgtaaaatggagataataaaaagacaaacctggccaggtgcggtagctcacmcctgtaatcccagcactttgggagtccaaggcaggtggatcatgaggtcaggagatcaagactatcctggccaacgtggtgaaaccccatctctactaaaaatataaaaattagctgtgcatggtggcgcacgattgtaatctcagctgcctgggaggctgagg

SEQ ID NO: 63336 - DNA, 755 bp, Homo sapiens
ggatccagtttcagctttctacatatggctagccagttttcccagcaccatttattaaatagcgaatcctttccccattgcttgtttttgtcaggtttgtcaaagatcagatagttgtagmtatgcggcattatttctgagggctctgttctgttccattggtctatatctctgttttggtaccagtaccatgctgttttggttactgtagtcttgtagtatagtttgaagtcaggtagcgcgatgcctccagctttgttcttttggcttaggattgacttggcgatgcgggctcttttttggttccatatgaactttaaagtagttttttccaattctgtgaagaaagtcattggtagcttcatggggatggcattgaatctataaattacattgggcagtatggccattttcacgatattgattcttcctacccatgagcattgttatcaaaggaaaatctcaggaaaattgaacaaccagtgaaatagcattgccccctatcttcccatcaacctagaacagaagggaactcacctgtaccttggtacttgagagatgagacagctactactgcccccattttactgataaaaaaacaaagtgcctccagaagtcataactagtgaggaatgagcgaaagttgaggtgagggatggagatagttagctcttctccttcattctccatctcatacaaaaggaacttccgctgctgacactggagagggaagtgttaaaaacctttactctttc

SEQ ID NO: 63337 - DNA, 866 bp, Homo sapiens
ggaggctcactgttctctggttctttgacctttcagatctctcatcagtgggatctcactgggaccctgcaggtgaaggaatctgggaaacgtggcttctgggcttcatgaccctttggtataggagagcacttagggagctgtgcatcaacaagcaatatgtgacttgggtcacagaggatgtggctgcagcaaggagattagttagggggttgaatcaaaagcccaagcacgagatgttggtgccatcatcacgtcactgcccaattctccttcctctccaaggcctccaaacctgctctgaggcttggcagggaaagtgagccagactgaggacaggagaaagggctgccggaaacaaacgcaagggacacacagccctgtcccgccaggtgtgactccaggtgccaggtgtgactcctgccaggtgtggctcccggatcaggatggctgctcttcactcactggcatttgggtgagaagggcactgagatggagcagggataaccaatccagaagacagaaaccctggcttggagccctttccagccatttcctaattggatgtatgacttttctagggctgccggaacaaattaccacaaacttggyggtttaggataacagagattcattctctcacagttctggaggccagaagtctgaaatcaaggtgggtcggcagggccgtgggggaagtctctaggggataattcctctttgcctcttgcagcccgtggtggtgtctggtgctccctgaggtcgtctctgcctctgttttcacatggtcttctcctcatgcctcgcatttcaaatctccctctgctttgctctcacttttgcagctatcattggatttaggatcc

SEQ ID NO: 63338 - DNA, 561 bp, Homo sapiens
gtttttctggttccttggtttctttttccttctttacttcctggggttttctagtaatttcmgcctgaattctcactgtctccactttgattcctgagttttttttgtgcagccacagggtctaaaagcacaggcagagagttggcacagcctgtgctctgctggaattcaggtgagtcaggagtgcctgaatggaaaaatgtgtttgctcctctatactcccagccagctctctatgaagcttccttaattaaaggagtgtggtattagcaaataaaaggacggcagaccagcgaaagaatgtaaaggcctgaaatacagccaggtacacatggagatagagcaaatgatacagaccctaagtcagcaagtaaaagatggaaccctcaaataaatatttttgggacaaatagatagctatttagaagtaacattcaatccattcctcactctccacactagaatagtatatgacaaatgtaacaaaaatctaaatgtagaccaggtgcagaggctcatgcctgtaatcccagcactttgggaggccgaaaagggaggatc

SEQ ID NO: 63339 - DNA, 561 bp, Homo sapiens
gtttttctggttccttggtttctttttccttctttacttcctggggttttctagtaatttccgcctgaattctcactgtctccactttgattcctgagttttttttgtgcagccacagggtctaaaagcacaggcagagagttggcacagcctgtgctctgctggaattcaggtgagtcaggagtgcctgaatggaaaaatgtgtttgctcctctatactcccrgccagctctctatgaagcttccttaattaaaggagtgtggtattagcaaataaaaggacggcagaccagcgaaagaatgtaaaggcctgaaatacagccaggtacacatggagatagagcaaatgatacagaccctaagtcagcaagtaaaagatggaaccctcaaataaatatttttgggacaaatagatagctatttagaagtaacattcaatccattcctcactctccacactagaatagtatatgacaaatgtaacaaaaatctaaatgtagaccaggtgcagaggctcatgcctgtaatcccagcactttgggaggccgaaaagggaggatc

SEQ ID NO: 63340 - DNA, 633 bp, Homo sapiens
accctctccccaatatgaccatctagattgttaatgttgccactttgtgggtttttttttaatgtgttacctgctgtgctttctacttccaagaatttttggctgttcctcatttacttcctttccatggcaattttatagatgggctggtctkctggatatctaaggacaataacggtgatttctaatgttattgtctgtgttctgcattggctctttttcctcagagaggggaaactcacttgggtgaagtttgctttttttttttcatattaccagttgttctaaaacaatccagtgactcttgactgtaatatagattcatgcttatcattgcagatatcgaccagaggttcttaaacctggctgcaattggaatcacccaagaagcttttaaaaaatctgggtgctggggcctggtccccatgtgtactgagtctggagcaaggcttgggcattgcttgggcattagtagctcatcaggtaaccttaaggagcagccggtcttaagagcagctacttgaaataaccagcgtgggacttgcagtggcatcctggatgtagcaacatggcggcctcgttattttcccacctgcgcctcatcctagaatggcctgctttctctgattttga

SEQ ID NO: 63341 - DNA, 633 bp, Homo sapiens
accctctccccaatatgaccatctagattgttaatgttgccactttgtgggtttttttttaatgtgttacctgctgtgctttctacttccaagaatttttggctgttcctcatttacttcctttccatggcaattttatagatgggctggtcttctggatatctaaggacaataacrgtgatttctaatgttattgtctgtgttctgcattggctctttttcctcagagaggggaaactcacttgggtgaagtttgctttttttttttcatattaccagttgttctaaaacaatccagtgactcttgactgtaatatagattcatgcttatcattgcagatatcgaccagaggttcttaaacctggctgcaattggaatcacccaagaagcttttaaaaaatctgggtgctggggcctggtccccatgtgtactgagtctggagcaaggcttgggcattgcttgggcattagtagctcatcaggtaaccttaaggagcagccggtcttaagagcagctacttgaaataaccagcgtgggacttgcagtggcatcctggatgtagcaacatggcggcctcgttattttcccacctgcgcctcatcctagaatggcctgctttctctgattttga

SEQ ID NO: 63342 - DNA, 633 bp, Homo sapiens
accctctccccaatatgaccatctagattgttaatgttgccactttgtgggtttttttttaatgtgttacctgctgtgctttctacttccaagaatttttggctgttcctcatttacttcctttccatggcaattttatagatgggctggtcttctggatatctaaggacaataacggtgatttctaatgttattgtctgtgttctgcattggctctttttcctcagagaggggaaactcacttgggtgaagtttgctttttttttttcatattaccagttgttctaaaacaatccagtgactcttgactgtaatatagattcatgcttatcattgcagatatcgaccagaggttcttaaacctggctgcamttggaatcacccaagaagcttttaaaaaatctgggtgctggggcctggtccccatgtgtactgagtctggagcaaggcttgggcattgcttgggcattagtagctcatcaggtaaccttaaggagcagccggtcttaagagcagctacttgaaataaccagcgtgggacttgcagtggcatcctggatgtagcaacatggcggcctcgttattttcccacctgcgcctcatcctagaatggcctgctttctctgattttga

SEQ ID NO: 63343 - DNA, 633 bp, Homo sapiens
accctctccccaatatgaccatctagattgttaatgttgccactttgtgggtttttttttaatgtgttacctgctgtgctttctacttccaagaatttttggctgttcctcatttacttcctttccatggcaattttatagatgggctggtcttctggatatctaaggacaataacggtgatttctaatgttattgtctgtgttctgcattggctctttttcctcagagaggggaaactcacttgggtgaagtttgctttttttttttcatattaccagttgttctaaaacaatccagtgactcttgactgtaatatagattcatgcttatcattgcagatatcgaccagaggttcttaaacctggctgcaattggaatcacccaagaagcttttaaaaaatctgggtgctggggcctggtcccyatgtgtactgagtctggagcaaggcttgggcattgcttgggcattagtagctcatcaggtaaccttaaggagcagccggtcttaagagcagctacttgaaataaccagcgtgggacttgcagtggcatcctggatgtagcaacatggcggcctcgttattttcccacctgcgcctcatcctagaatggcctgctttctctgattttga

SEQ ID NO: 63344 - DNA, 633 bp, Homo sapiens
accctctccccaatatgaccatctagattgttaatgttgccactttgtgggtttttttttaatgtgttacctgctgtgctttctacttccaagaatttttggctgttcctcatttacttcctttccatggcaattttatagatgggctggtcttctggatatctaaggacaataacggtgatttctaatgttattgtctgtgttctgcattggctctttttcctcagagaggggaaactcacttgggtgaagtttgctttttttttttcatattaccagttgttctaaaacaatccagtgactcttgactgtaatatagattcatgcttatcattgcagatatcgaccagaggttcttaaacctggctgcaattggaatcacccaagaagcttttaaaaaatctgggtgctggggcctggtccccatgtgtactgagtctggagcaaggcttgggcattgcttgggcattagtagctcatcaggtaaccttaaggagcagccggtcttaagagcagctacttgaaataaccagcrtgggacttgcagtggcatcctggatgtagcaacatggcggcctcgttattttcccacctgcgcctcatcctagaatggcctgctttctctgattttga

SEQ ID NO: 63345 - DNA, 524 bp, Homo sapiens
  misc_feature (1)...(524): n = A,T,C or G
cacccctcccagccctggtttcaggtgtcccttcattttctgagccatctttgttgggattcccacgtgaggacttagtgttccggggagcagaaacttactgtgtttcccaggtgtccccattgcctaaagcagaagctgtggggttgaaggttttagaatgagtgtgaggcagaagccccacctgtttcttaaacacattgagatttctccttctttgggaccttttgacagagctgccccctctgtctggaagcctcttccacctgatcttgtcccattcaggtttcaactccagtgcctctcttcgaaaaggccatccctcatccctyccaaagccctccgtgggctctcatggtttttcgttcagttgctgcagctccatgacaacatcttgtcctctctagctctccgatgaattcnnnnnnnnnnnnnnnnnnnnnnnnnnnnnnnnnnnnnnnnnnnnnnnnnnnnnnnnnnnnnnnnnnnnnnnnnnnnnnnnnnnnnnnnnnnnnnnnnnnnta

SEQ ID NO: 63346 - DNA, 688 bp, Homo sapiens
ggatccaaatgcttcccaacaccaacaaaatgagccagtagattaataaagctatgtgtgctctacaacagcccctagccctatatctatgttcagagctaaattgctgcttcacttttgcctcccaaatctcacgcaaacttcttttggagccaaccctaagagaaccatccagggaagaaattattgatattgacatagctcaaaagctaccacaacacatattttttcaatatcacattttctaggctctgcaccaatttctattccrtttatcctttatattaaaacaaatatctgagaaattattttacctttgagaaaagtaaggttcagagagtcctactaatttttagaaaacttcctgaaactggcagaaatgagattcaatttaagaccaagtattttgactttagattgtaattaatctttaaattttcacttattaacattagactatccccatctgaatacttttacacaatgaatcagtagcacatggcatatccattctgggttaagagagttcactaaatgaactatttagaaagatatgtgggtagggattagggaaaccggcaaaggacggtacgtttcccatactggcaatagtaagacatcattacaaactctaaatctgaagacagaaggaaaggacggcagttactgttacccaaaggggatagct

SEQ ID NO: 63347 - DNA, 807 bp, Homo sapiens
agacccccacccccactacacacacccaaacacacacattcacagcccaagtagccccacacatatttgttttaaaggaatatcacatagggatttcatagaaaagaggctgtaaaatgtaatggttacaagaatgtgctttagaatcaaatcaacagagttgaaatgtccattcaacaactccagctrtgtgagttatataagcctcagtttccatatctgcaaacttattattaatgatatattattgattattttttattattaactgtagtcatagggatgtcttcgggggttaaaagaggtaatacaaagggcttgcaacagtgtctaccacactgtattagtccgttttcatgctgctgataaagacatacccaagactgggcaatttacaaaagaaagaaatttattggacttccagttccacgtggctggggaggcctgacaatcatagtggaagttgaaaggcatggaggaacaagtcatgtcttacacggatggtggtaggtgaaaaaagagtttgcacaggggaactcctctttttaaaaccatcaaatcttgtgagactcattcattatcacaaaaccattttttcttcttaggcctctgggcctgtgatgggagggtcttgcctgaagacctctgacatgccctagagacattttccccattgtcttagggattaacatttggctacttgttacttatgcaaatttctgcagccagcttgaatttctcctcagaaaatgggatttttcttttttgtcacattgtcaggctgcaaattttccaaacttttatgct

SEQ ID NO: 63348 - DNA, 966 bp, Homo sapiens
gcattttacaaaggctttaagtcatggccttcaccatatcagcaaagagattacagtatgtacacaaatttaaaaattattaaattttatagagagagtgatataaaatacctgttttacttacagcaagagagaatatgaatttaacarttcatattcaatagcaatttaaatagtaaaggaaatttagcccattctattccatgaagatttgtgctattgtgagtgcaaaattgaagcataaatcagttcttccttcgcttcgtactaattgtaatgttgctgtttgttatcagtataactttttattggaaaaaatgatccctaattgcggatccaattcttcatctgatgctccagttaagaaacaccagtatatgctaatatgggcatatttgtgctatggtttgaatgtgtcccccaaaaagcacatattagaaacttcatccacaatgtaactgtggtgggaggtggggcttaatgggaagtggcttagcatgtgaaagttccactttaataaatggattaatgccaattataaattgcttgtggcagcaacttcaacctcttgcacactctctccctcttcctctctatctctctctctctctggcatgctctcttttcctttcaacttctgccatggaatgacacagcaagaaagcccttgctagatgtggactctttgactttggacttcctagcgtcctgaactgtaagaaggaaatctctgttcattataaactattcagtctcaggtattgtattatagcagcacaaaataagctaggataattagctaggttggaaacacacacagattgtatattgagctccaaggtattatagtacctttataaagaatttttaagaggtagtttttattataatgatcctcaataccctgacaaccaaacatttaagtcctccagaaataccctaccactatagttgaaaccatctaaa

SEQ ID NO: 63349 - DNA, 567 bp, Homo sapiens
tagctacagagcccccacttcttccatgggtgtttgagctggcaggaggatgtgcctggagagtaggtagaggtagggcttcagcccacttggagcccaggggcttttaagcacggagcagctctggcagagggtggccataggcacacatccaccaggactccccatctccctctgagaagttctgsctccagttgactgcaggcaaagagagagcaggattgacttccccatcagacaagggcatgcttattctgaaggccctcctcctagtcagcccctcccaggtcccctgactggccatcctgcagggatatgtgcacagtgcagcctccattgtccagtctgggtgctttggggcaactgaatactttcctggtgacctgagagcattttaaattccatagggcatctggaactcaaccccaagctgcaggccagtcccggagcctccaggctggggacataggttgggagtgttgagctaggatctgtggtctgcacttatgtaggagaggagcccccactctcagagcactgagaggagtgagaagggcaggtttgtgg

SEQ ID NO: 63350 - DNA, 365 bp, Homo sapiens
  misc_feature (1)...(365): n = A,T,C or G
tnnnnnnnnnnnnnnnnnnnnnnnnnnnnnnnnnnnnnnnnnnnnnnnnnnnnnnnnnnnnnnnnnnnnnnnnnnnnnnnnnnnnnnnnnnnnnnnnnnnncccaacaccctgaattcccagaacctttaggaacacttgctccccaacccctgccctcccaaggactcgtcatttttcatctgggctctagagaggaggacagcactaagaggtggtcccgggtccagcgacatcaagcaccatagggcaggtccaacgcccagcacagctgtttagagtggacagaaacgggctcagcagggcaggccacatgaaccctagccgccctcaygcatcccttccagagcctccgctcacactcct

SEQ ID NO: 63351 - DNA, 1292 bp, Homo sapiens
tgcatattgcagtggtgacaatgagacctgtaacattttgccatgcttatgagtaaaatatgtagaagaaaaatgttgactttcaaaataacatttaagtaataaggaattttcagctcttatctcataggactactgttgttgttgttttttttttgtatgctatatattgattgaaacattgtaatgtggtacatgactgtgttttggatcaggtgtcaaaatataagtgtactttgtacaattcaacttctagaaaaaaaaaattagctgggcgttgtggagcgcacctgtaattccagctactcaggaggctgaggcaggagaattgcttgaacctgggaggcggaagttgcagtgagctgaattcacgccactgcactccaatctgggctacagagcgaaattccatctcaaaaaaaaaaaaaagaaagaaagaaagtacactgttacggccaggcgcaatggctcacgcctatcatcccagcactttgggaggcaaaaatgggcagatcacctgaggtygggagttcgagaccagcctgaccaacatgtagaaaccctgtctctactaaaaatacaaaattagccaagcagtggtggcacatgcctgcaatcccagctactcgggaggctgaggtgggagaattgcttgaacccaggagacagaggttgtggtaagccaagatcgcaccattgcagtccagtctgggcaataagagtgaaactcgtctcaaaaaaaaaagaaagtacaggtacgttttttagaatgatgatacatcatcactgactcacttggtttctgcaaccagatcctttcccgtgtctgtgcagtcatgactccattgctgccctgaggtggtatactaacccaaatcacagtctgaaagtcatttttcatttaggttcttccctgcttatctttggttgagccaggaaatgcaacttgataatgactcagcacaagctattcagctgggagccggttcctagccacatccagctccgcgttggaaatatctgaagtggtcagtctaggatagagcagtgctgctgtagcttccaggtagggtttcctgaagtgtatgcccaatgctctttctgaatcagcactgaaaatattcatgcaggacctcccccggccctacctgaccccacagagcaagagcaatacattcctctgcctgtcactaggccctgggctgccaggtttgggggatactaagtccagggaaaccaccagaagtagttccagggaggccacaggtgtgcaaaagaaggatcccatgcat

SEQ ID NO: 63352 - DNA, 747 bp, Homo sapiens
actgtgagatggtttcccaagactcaagaaagctgcctgggtgaatgagtctcgattaaacatgcctcacttgcaccatagctgagggaccccaaaaggcagcctttcctgagttatatacctcaggggccatgtgactcatttaacaaagctttgaaggacatcctgcttctgatagaaaggaacaaaggctgggctgtcccargcagttcctccctatctcaagatgttagattctccatgaaggactggaacaaggcttttgctgtttcaagcagttcctccctatctcaggatactgcactcccagcacattctacagttattcttaagaatgacaagcaagaatgaggggagtattgtgttggtccaaggccacccagagaactgtcattcagtagaaggtggtaaacctttaactgtgtagtgcctgtaaagtcaccatgggcatacagaagcaccaatcagccactcaattaacccatgtaacccaatggggagtcatggctccaatttaaaaatgtgacaccttgtcattttaattaggtgatacatttggtcacaagaaagtcctgtccaattactactaagtgaaacaggtggcgtatgattttcctggggctgaactggcctcattcagttaaaattcagtcagtccattcagcggcacccttccagtttcatgtcaacctgaagaaagatttccagcaactatcagagacttgctctcacctgcatcttgctctg

SEQ ID NO: 63353 - DNA, 650 bp, Homo sapiens
taatggttacattgggtttaccagtataatttgcataaatctcctcaactcaagatggttaacttaatcacatctgcaaagtcccttttaccataaaaggtaaaatattcactatccaaagattaggatgttgagatatttggggggaccattatttagcctactataccttctcttcaaatatgacctgatctcttgagttagaatttgttcctttttctctggatttcagaatcatgattacatagttccaatatgagaatttttagaatgacttcgaaatttggggtaatctttttacctttactgttattttcttggtgacgaaattgtgcatttcatctctgcartcaaacaggcctgaatctggacccagatctccacccatagtggagccagatacctggtccagatctcagcgttaccacctatcagtgagaagcagccccaatttttcagtttcctcagctgtaacatgtatgtaattatagtatttactacaaagatttattgtgagcattaatgaatatatggaaatggcttagaacactgataagcacatattattcactcaaaactgttagttattattactttccacttgtgagattattgtagaattaaagagacagtaaataaagctacagcac

SEQ ID NO: 63354 - DNA, 974 bp, Homo sapiens
ttattatatctgaggtaaaaacattatttgatatggaaaattattttattaacacaacaaaagattgaatttaaaatttctggagtttagaactttattatgtcttactaatattaataagatcactcagtaagcatctgctatatataatttattaagcacttactatgtgttaagcattccagtaggtactatacacatgttattactaaacctgacaagaacccttctagacagatttacaatttgaagattatgaaactaagacttatactaaataatttgccctcagtccaaaaacaagttagtggaagagcctgcatatttaaccaggtgctgtactccaggagttatttgtccacagatcaaagtgccaaaccacctccataatcctctctgacttttcttcagtgtgacacacacaaaagtgtaaattggcatcacagattatgtaggaccaatactatcaaagaaaaggggagtgatttcaaaaataattggagaattggccgggtgtggtggctcactcctgtaatcccagcactttgggaggctgaggcaggtggatcatctgaggttagaagtttgagaccagcctggccaacatggtaaagccccatctctactaaaatacaaaaattagcctggggtggtggcgcatgcctgtaatcccagctgcttgggaggctgagacaggagaatcgcttcaacccaggaggcggaggttgcagtgagctgagttcacgctactgcactccaagcctgggtgacagagtgagactctgtctaaracaataaaaataaaaataaaataaataattggagaattaatgcagttgtattaagaaaagattgggagacttattttgctagtcaatagtaaactatttgggtttcttgagaaggggaataggataattaaaatggagcttactaatatgaggcattgtaaacttgtcacatgtttaagattt

SEQ ID NO: 63355 - DNA, 1113 bp, Homo sapiens
caggcagttacagagaaccattgcttacttatttgtaataattaacctacttttcttcaaagacaaactttgcatatcaaaataatacttctcatttaatggattctaattttatccattgtgactgatgaatcagtattatcaaatttggcagtggcagattatgttttcctcatttcactaagaaatttgcaagataataaattggrttattaaattgttgtgtctcataagattcaagatttaaaacatttgtgctttgttaattaattgctgcaaattaaaaacaggagacagtcacataatggtggaatggatcagttatttcattaaacctcctctttatgatggtagattaagttaagctatgactgcattgaaaatgaagaagaggcagagctctaccttagagaatttaatttgtgcacaagaaaacctcatgaattcagattagtgtgagaagggttaatttaaatatatatggtacataggaatatttaatgtaccatatttatgtgtacttcttttaacttctaagtatgtatgacaatttctacaaagttacaaaatggttgtggaaaggtaaacctctttcagttttgcttctatcacagttaggaatttatttgtagttaatgtatgaattgttagtgtatagctcagtacttctgaagttcataaaaccattcagtgctgtgagtacataaacattttcctttgcaatcaagtttattgctattaactttattaacaaattttctcctacagactaaatacctagtaagtacaaatataaattttcattcactttatgtgattatttttatgttagaaatcaatggaatctaaataatattttcctgtctgtctcatttatacttagaatttcatcattatcagcaggaaacatttattgagtactcactatgtgccagtgactatgcaaaatatttacatgtaaaatctcatttaatcctcacagcagccctagaaacagtcccaagttacacaattaatatcatccccatttgacaagtgagaaaatggagttttgaagagattactcactgctccactgggtaaatttgctaagcagcagaggagaaatgaaat

SEQ ID NO: 63356 - DNA, 1113 bp, Homo sapiens
caggcagttacagagaaccattgcttacttatttgtaataattaacctacttttcttcaaagacaaactttgcatatcaaaataatacttctcatttaatggattctaattttatccattgtgactgatgaatcagtattatcaaatttggcagtggcagattatgttttcctcatttcactaagaaatttgcaagataataaattgggttattaaattgttgtgtctcataagattcaagatttaaaacatttgtgctttgttaattaattgctgcaaattaaaaacaggagacagtcacataatggtggaatggatcagttatttcattaaacctcctctttatgatggtagattaagttaagctatgactgcattgaaaatgaagaagaggyagagctctaccttagagaatttaatttgtgcacaagaaaacctcatgaattcagattagtgtgagaagggttaatttaaatatatatggtacataggaatatttaatgtaccatatttatgtgtacttcttttaacttctaagtatgtatgacaatttctacaaagttacaaaatggttgtggaaaggtaaacctctttcagttttgcttctatcacagttaggaatttatttgtagttaatgtatgaattgttagtgtatagctcagtacttctgaagttcataaaaccattcagtgctgtgagtacataaacattttcctttgcaatcaagtttattgctattaactttattaacaaattttctcctacagactaaatacctagtaagtacaaatataaattttcattcactttatgtgattatttttatgttagaaatcaatggaatctaaataatattttcctgtctgtctcatttatacttagaatttcatcattatcagcaggaaacatttattgagtactcactatgtgccagtgactatgcaaaatatttacatgtaaaatctcatttaatcctcacagcagccctagaaacagtcccaagttacacaattaatatcatccccatttgacaagtgagaaaatggagttttgaagagattactcactgctccactgggtaaatttgctaagcagcagaggagaaatgaaat

SEQ ID NO: 63357 - DNA, 740 bp, Homo sapiens
atggttattatgtgttacaggtctctttcatactagttaagtcccccctcscttttattttatttataccgttgacttctgcaagaagctatgttcattatcctttagaatatgccactttctgggttattccatttgcttccttgtggtgctatttaacttgttccttcatagtcattactctccatagctgaacatttcagattcatttttttaagaacacttcataagtgactgtgtgtatttcatactatgtcacatcaggtaggacattatctggttattcccttgtagtgatgttaaccttgattagtgctgacagtcttatttcttcattgaaaatttcttcatcaacctttcctataatggtttcatttatttatgatcacttcagaattcgctattttattagggatgacaaaacggtgggtttttatatttttttattatactttaagttctagggtacatgtgcacaacgtgcaggttttttacatatgtatacatgtgccatgttggtgtgctgcacccattaactcatcatttacattcggtatgtctcccagtgttaagaaaatgtggcacatatacagcatggaatactatgcagccataaaaagtgatgagttcatgtcctttgtagggacatggatgaagctggaaaccatcattctcagcaaaatggtggttttataaggttaccatttcttcaacatttattcattagaattttttgtaaa

SEQ ID NO: 63358 - DNA, 691 bp, Homo sapiens
atttaacatggataaatgtaaagttcttagaatcatacatacactttggaaaagatggggcttaatcgcactttataagacttgaaggatgtttgagaatcactatgaaactgctgaaaataccaagaaaatttaattcttatgtatataaataatgtgtctgttttacatgaatcccttctacaagcttggtatttaatatggcatatattgttttttcatagtagatttaaaatttttgatatctaatttagataacataaaattaaccctttgaaagtgtacaactccgtggtttttagtatatccacctgattgcacaacgatcaccactgtctagttccagaacatttttatcaccacaaaagaaaggctgtatccaggccgggcacggtggctcacgcctgtaatcccagcactttgggaggcygaggcgggcggatcacggggtcaggagattgaaaccatcctgggtaacacggtgaagccctatctgtactaaagatacaaaaaaattagctgggcatgatggcagatgcctgtagtcccagctactcaggaggctgaggcaggagaatggcctgaacccaggaagcggagcttgcagtgagccaagattgcgccactgcactccagcctgggcgacagagcaagactccatctcacaaaaaaataataaaaataaaataaa

SEQ ID NO: 63359 - DNA, 662 bp, Homo sapiens
atcactattttcttctatggattgtgtttttctatgaagcaacctttctaacccaaagtaataaagtttctgttatacagcttattctagaagtttgatagttttaggctttaccttggttctatagtcctttctgaattaactttcacatgttatgttaggtataaagtctttttggtttgtttgcttttgcttttgtatattggtatccagttgttctagtactagttaaaaatactatttttctttattaagctgcctttgtacatttataaaagatgaattgatcatatatgtgtaggtctgtttctaaactttctcttctattttattgatgtatttgttggtcttgaggcaaatatcacattgtcttgattattgtasctttataatgattattgattgctatacgtgcaagatcctcaactttgttgttttgcaaagttgttttgactaccttgggaactttgcatttttctagtaaccctgttttgatatagattattttgaatagggaatgttttgacttaaaaataatatcaaacttttataattaagatataagtagtgtgaaaggagagaaacatcttcattctatcattcagcccctttcaggaacctcatccaacctcaccactctaggctatcagagttagcacatt

SEQ ID NO: 63360 - DNA, 800 bp, Homo sapiens
ttttttgtttttgagacagagtgtcactctgtcacccaggctggagtgcagtggtgcgatctcagctcactgcaagctccacctcctgggttcaagccattctcctgcctcagcctcccgagtagctgggactacaggcgcccaccaccatgcctggctaattttttgtactttttttagtagagacggggtttcaccgtgttagccaggatggtctcgatctcctgacctcrtgatccgcccaccttggcctcccaaagtgctgggattacaggtgtgagccactgcaccctgcccttacatacctttcttaaagtgtaaaattagagtgtgaagacctaacagctggtgccaaaggtcagagtcagggagaaagcgtgactgaaaggacaaaggagcatctttgcactgctcctttcagtcacaccttctcatgagactgatgaagcagttctgtaccctgattctaactgggactgggtggtgatggctgaacacatctacagaaatctgtggaaacatctttatccagaaagattttcaaaggaagacagaaaaagaactataaacacaaaacaaaagacagaaagaaaaaactgaacttaaatgctgttgaaatctgtatgtacatgtgttaatagtattgtacctcttaacagcttcctcatttggaccatgcactgaggtcctggaagatattttcattaggggacactggcttaagaatacgccagaattaagtctgggcacagtggctcatgcctgaatcccagcgctttgggaaaccaaagcaggaggat

SEQ ID NO: 63361 - DNA, 800 bp, Homo sapiens
ttttttgtttttgagacagagtgtcactctgtcacccaggctggagtgcagtggtgcgatctcagctcactgcaagctccacctcctgggttcaagccattctcctgcctcagcctcccgagtagctgggactacaggcgcccaccaccatgcctggctaattttttgtactttttttagtagagacggggtttcaccgtgttagccaggatggtctcgatctcctgacctcgtgatccgcccaccttggcctcccaaagtgctgggattacaggtgtgagccactgyaccctgcccttacatacctttcttaaagtgtaaaattagagtgtgaagacctaacagctggtgccaaaggtcagagtcagggagaaagcgtgactgaaaggacaaaggagcatctttgcactgctcctttcagtcacaccttctcatgagactgatgaagcagttctgtaccctgattctaactgggactgggtggtgatggctgaacacatctacagaaatctgtggaaacatctttatccagaaagattttcaaaggaagacagaaaaagaactataaacacaaaacaaaagacagaaagaaaaaactgaacttaaatgctgttgaaatctgtatgtacatgtgttaatagtattgtacctcttaacagcttcctcatttggaccatgcactgaggtcctggaagatattttcattaggggacactggcttaagaatacgccagaattaagtctgggcacagtggctcatgcctgaatcccagcgctttgggaaaccaaagcaggaggat

SEQ ID NO: 63362 - DNA, 800 bp, Homo sapiens
ttttttgtttttgagacagagtgtcactctgtcacccaggctggagtgcagtggtgcgatctcagctcactgcaagctccacctcctgggttcaagccattctcctgcctcagcctcccgagtagctgggactacaggcgcccaccaccatgcctggctaattttttgtactttttttagtagagacggggtttcaccgtgttagccaggatggtctcgatctcctgacctcgtgatccgcccaccttggcctcccaaagtgctgggattacaggtgtgagccactgcaccctgcccttacataccwttcttaaagtgtaaaattagagtgtgaagacctaacagctggtgccaaaggtcagagtcagggagaaagcgtgactgaaaggacaaaggagcatctttgcactgctcctttcagtcacaccttctcatgagactgatgaagcagttctgtaccctgattctaactgggactgggtggtgatggctgaacacatctacagaaatctgtggaaacatctttatccagaaagattttcaaaggaagacagaaaaagaactataaacacaaaacaaaagacagaaagaaaaaactgaacttaaatgctgttgaaatctgtatgtacatgtgttaatagtattgtacctcttaacagcttcctcatttggaccatgcactgaggtcctggaagatattttcattaggggacactggcttaagaatacgccagaattaagtctgggcacagtggctcatgcctgaatcccagcgctttgggaaaccaaagcaggaggat

SEQ ID NO: 63363 - DNA, 800 bp, Homo sapiens
ttttttgtttttgagacagagtgtcactctgtcacccaggctggagtgcagtggtgcgatctcagctcactgcaagctccacctcctgggttcaagccattctcctgcctcagcctcccgagtagctgggactacaggcgcccaccaccatgcctggctaattttttgtactttttttagtagagacggggtttcaccgtgttagccaggatggtctcgatctcctgacctcgtgatccgcccaccttggcctcccaaagtgctgggattacaggtgtgagccactgcaccctgcccttacatacctttcttaaagtgtaaaattagagtgtgaagacctaacagctggtgccaaaggtcagagtcagggagaaagcgtgactgaaaggacaaaggagcatctttgcactgctcctttcagtcacaccttctcatgagactgatgaagcagttctgtaccctgattctaactgggactgggtggtgatggctgaacacatctacagaaatctgtggaaacatctttatccagaaagattttcaaaggaagacagaaaaagaactataaacacaaaacaaaagacagaaagaaaaaactgaacttaaatgctgttgaaatctgtatgtacatgtgttaatagtattgtacctcttaacagcttcctcatttggaccatgcactgaggtcctggaagatattttcattaggggacactggcttaagaatacgccagaattamgtctgggcacagtggctcatgcctgaatcccagcgctttgggaaaccaaagcaggaggat

SEQ ID NO: 63364 - DNA, 987 bp, Homo sapiens
tttctgcttgtgtaactctgcttattttgcattattttaaggcatttataattaattctgattcctcattttggactatgttttgtttctcctgaaccgtctctttcctgtaggtagagggaagcatttcatggagggccaggtccctggctaggacaaggtagagcctcacagtcatatttggtatccagcggccattgctctgccccagcctgtcatctggctgtggtgggtttggtggcccacgtctaactctacctctgtttctagactgtgacccgggaccgggggaaattagtagcagcccgtgcctccagtgccactgtggcgagccctctaggacgggcctctcacattgggctttatggtgtccgcggcctcagtgtcagtactctgctcctccccacaagcagccctgctcagtttgccctgggctggcaggctttttctctgtgttgaggtttggcatttcacctcactcctgttttcattaaaagtagacttttcctttctatttcaagttctgtggatgattttgggagaatgttttctttatatcatctgcaaatacgcttcctcatttcccacctcgactttccatcttccactttcaatcttttctttttttggaaggagggtggggtattgtcagagttgtattttccaagagccctttcaatttctccatttttgccctttatcactgtgtgtgtgtgtgagagaaagagacatacagcatacatatagaaagatgtgcaaaatgtaaatgtatatttaacaagtggttataaagccatataatatgcaacaaccacacaggtaaagaaataaagtcttaccaaaacctagcagtctcccaggtgtccctctccagtcaccacactcttcctcatgcccctaccccagtacccccaggagtcaaacacttttctgcctttastgtcatcatgtcttagctgtgtttataattttaccacctatatatgc

SEQ ID NO: 63365 - DNA, 1288 bp, Homo sapiens
ttactgtgttttattactctctcctccatctaactggaaactcattgcgaagagagagatttggatatccaccttcctgttgacttgcccagatgtctatcacggtgccttccgtatcccaggaggacgttgaacattggcaggcatgcctagctgaaagccgatgcaccgaggcctgctccatgctaaggctgtaattcttcaccccaagaatcttcattctggtcttcaagtattcaaggtaaacagtcagttgtaggcaataatgttatgtgacttcttctgtaattccttcttcttttgtatctatttttgcctgggtgggggtgggagaaaggggtgtgagaaactcaagtcctgatgtcatggtttgctcttccttttcaacattcatagaccccaggtcccagtgcccaaagagtctctttcttttatctactaattattaactggggatgcaaagcagaatctccagcttgaggcacccaaggtgtctcctgtcagagctccatttcaatagtacatgttatggtttgaatgtgtctccaaaagtttatgtgttgaacacaggagtaaattcattatggggtgagtgggtttgttataaaagtgagttcagcctcctcttgctgtgtgtcttatgtgctttcttgcactgccacctggcaccgtggaagaatgcagtgagaagcccctcaccagatgctggcccctaaatcctgaccttctcagccttcagaactgtgaggaagcaaatttctgtttattataaattacccagtctgtggcattctgatatagcagcgagaaacaaagacagcactcctctgtctgagcgtccacactctcctccctgaatcctgatgagcatattgtctgtcctccctcaggcacaagtgaagcagcctactctgcgacacaatggctcctggccctttggcattagggagggaaacacggagcagggaacccctgagtgtgctgcttcacaatgcacgatccccaggtgctgggaagggctgacaagtaagatcagagggacaaatgagaacatggggacaagttgtgagatgagggacctgtggctctggaattgtatttctgggaaactgcaaggaagctgtgtgtgtgtgtgtgtgtgtgtgtgtstgtgtgtgtgtgtgtgtgtgtctgtgtgtgtgcaagtatttgaaagaaactaaaaatagagaaattcaatcatactagtatctccaactgcttctgagtctgtgactagaccaatgataataaatgataaagaactacc

SEQ ID NO: 63366 - DNA, 668 bp, Homo sapiens
aagtacaaattgaacagtgtctgattatgacagtgggtaatataaaataaatatagactttggaaaacaaatggtattattttgagaacaaaaataaaagttcgttgtgaggctgggtgcagtggctcatgcctgtaatcccagcactttgggaggccgaggcgggtggatcacctgaggtcaggattttgagaccagcctggccaacatggcaaaatcccgtctctactaaaaatacaaaaattggccaggcatggtagtgggcgcctgtaatcccagctacttgggaggctgagacaagagaatcgcttggacccgggaggcagaggttgcagtgagtcaagatcgtgccattgcacttcagcctgggtgacaaaagtgaaactmtgtctccaaaaaaaaaaaaaaaaagtgtattgtgatgtgtcttgtaaagttttttttttttttaaagaaaatctatgctgagtttagccagggaaattagacaaaatgaaatatttagtactgttgaatttgggaattgcctgtaatacatctgtctcctgttttcatactattcaagatttatcttctgtgaagacatgttctataatttggtatttaagaaagcttgagggttggcacaatggcccatgcctgtaatcctttgggaggccaaggcagga

SEQ ID NO: 63367 - DNA, 668 bp, Homo sapiens
aagtacaaattgaacagtgtctgattatgacagtgggtaatataaaataaatatagactttggaaaacaaatggtattattttgagaacaaaaataaaagttcgttgtgaggctgggtgcagtggctcatgcctgtaatcccagcactttgggaggccgaggcgggtggatcacctgaggtcaggattttgagaccagcctggccaacatggcaaaatcccgtctctactaaaaatacaaaaattggccaggcatggtagtgggcgcctgtaatcccagctacttgggaggctgagacaagagaatcgcttggacccgggaggcagaggttgcagtgagtcaagatcgtgccattgcacttcagcctgggtgacaaaagtgaaactcygtctccaaaaaaaaaaaaaaaaagtgtattgtgatgtgtcttgtaaagttttttttttttttaaagaaaatctatgctgagtttagccagggaaattagacaaaatgaaatatttagtactgttgaatttgggaattgcctgtaatacatctgtctcctgttttcatactattcaagatttatcttctgtgaagacatgttctataatttggtatttaagaaagcttgagggttggcacaatggcccatgcctgtaatcctttgggaggccaaggcagga

SEQ ID NO: 63368 - DNA, 668 bp, Homo sapiens
aagtacaaattgaacagtgtctgattatgacagtgggtaatataaaataaatatagactttggaaaacaaatggtattattttgagaacaaaaataaaagttcgttgtgaggctgggtgcagtggctcatgcctgtaatcccagcactttgggaggccgaggcgggtggatcacctgaggtcaggattttgagaccagcctggccaacatggcaaaatcccgtctctactaaaaatacaaaaattggccaggcatggtagtgggcgcctgtaatcccagctacttgggaggctgagacaagagaatcgcttggacccgggaggcagaggttgcagtgagtcaagatcgtgccattgcacttcagcctgggtgacaaaagtgaaactctrtctccaaaaaaaaaaaaaaaaagtgtattgtgatgtgtcttgtaaagttttttttttttttaaagaaaatctatgctgagtttagccagggaaattagacaaaatgaaatatttagtactgttgaatttgggaattgcctgtaatacatctgtctcctgttttcatactattcaagatttatcttctgtgaagacatgttctataatttggtatttaagaaagcttgagggttggcacaatggcccatgcctgtaatcctttgggaggccaaggcagga

SEQ ID NO: 63369 - DNA, 425 bp, Homo sapiens
tcccacctcagcctcctgagtagctggaacaagaggctcatgccaccacatcyggctaatttttaaggttttttttgtagagacagggacttgccacattgcccaggctggcctcaaactcctggactgaagcaatcctcccatctctgcctcccaaagtgctgtcattataggcataaaccaccacaccaagaccctgggaggactatttttaaaaaattgtttctctctctcttctgcttatttatagctttcgacttttttgtgatgaccatgtattattttcataataataaatcccataaaaactatttacatttaaaacaatgtgttggcttcatagtagttacatttataatttcaaccatcaagaagattcttaaggaaaaaaatacgttcctgtgaaagggaaacaattatttttt

SEQ ID NO: 63370 - DNA, 825 bp, Homo sapiens
ggggtaaggaggaataggtggaaagagaaggaagaatctccctaattatttacatcttctttcaggaaacattccttaactccacacagaaacaaggtgaggggccagggctgacactagcaagacccctaaggacctggggcccaggggggagcggggggtttgggcaggggtggggaaggggtctgactttctggcaatgcttttagcaggttgctgttctcgtagaaatacggctcaaacttttccgaaacagtttagtagctacgattaagtaaaaaataacttaaaaaaaaaaaaaagcatggataggtctgtcacagtggctcatgcctattatcccagcactttaggaggccgaggtgggaggattgactgagctcaggagtttgagaccggtctgggcaacttaggaagaccctatctgtacagaaaataaagaagtaaaaatcagccaggcgtggtggtgcttgcctgtaagtcttagctactcaggaggctgagattggaggatcacttgagtccaggaggaagaggctgccatgagccctgattgtgccactgcactccagcytgcacaatagagcgagaccctgtctcaaaaaaaaatgagtaaaaaatatttcttccaaaggtctctcggctcacttggattacgggttcagtcatttctaagcatttcctgcagcctcagaaactcaatagtcaattatttccacgagtacaaagcttaaagatgaagagaacaagagagggaagggtaaaaggacaccaaagggccattttcacttgctcctaaataatgtgaatgatattaaatctgct

SEQ ID NO: 63371 - DNA, 1017 bp, Homo sapiens
tcaccatgcccaactatttttttaaattttttttgtagagataagggtctccctatgtttttcaggctggcctcaaactcttgggctcaagcagtcatcctgcctcagcctcccaaagtgttgggattacaggcctgagccaccacttctggcagaatgttaacattttaaacaagaaatagcatataccctaaggtacatgctttcaaaggttgatatattcataagtgagcttgttttcctactgagttgtatttttcttccttgaattccattttgaattgtaaatcaaaagtaaaattctaagccctcctaaccatctgaatggactctcctctcagccaagggtgttccatagtaaacctgaaaaaactagttcaggccatgatgggaagcaggagccagacatgcctcattataccctcctcctttttggaattactgatagaacagactctttaaatctgataagaaacatttgcaatctattctctctgaaggctgctacctagagacttcagccgcttgataaaaccttggtctcaacaaccccttttcgtagctcatacattcctttctattgacagtaattctttcaaccaattgacaaccagaaaactttaaaatctacctatgacctggagccccctccccactttgagttgtcctgcctttctggactgaaccaatgtacatcttacatgtattgattgatgtctcacgtctccctaaaatgtttaaaaccaagctgtatttgaccaacttgggcagataccacctaaggccgtgtcataggcatgtccttaaccttggtaaaataaaatttctaaattgatggagatctgtctcagatacttttgggttcacagaatgatactgagaaaataagaacggatctacgttttatcaataaaattttaaacttatattaattcataaaataagrtatggtatatctgtctttgtttatagtgcttgttttttcttttaagtttttaatctgtgttttgaaggaaa

SEQ ID NO: 63372 - DNA, 1003 bp, Homo sapiens
ccaatctgttgccccattgccgctatagggataccgtactggaccacagtgtctttgacatgcacacagtaggatagagggcagcttgagggggccaaagtgttccgactgttttcagaataatttgcttagaacacctgtttctcctgtgtttgtgggtcagggggacggtagtcagaggaggacaagactcccgctccagagcttcagaggtctgcataggagcagggacaaaaccgggcgatagattttcaaagctcaactgctttgacaccgagcaggaggtgtagaatgcatattgcaggcaccacaacagattcaggaactttgactgtcaaaccctcttccctgaaacaacatagctcttctcacagaagctgtgctgactggagtctatacgggacagcaatgttagcactctagtagcgtgtggtcaacatggatgctcgtgttggaactgtttcatctgggaacaggaaagaaagttctgcctccgacactgaaatcctcctgccccatccttgacagaggcaaccccttgtcttgtgcagacacacgtgttcctgggaagcagcctcccactcgcgaatgaaagctgtatgttttgtcctcctgtgtgaggcttgcaaaacatattccgcaactatattcrctttacgttctaaaccttaggcaaactatgctgaagaggccacagaaaatttaggggccctgggtccagatacaatctgcagtgccaatcacgagggagaatagagcctcactagactttgcaagagcacaaaatgcactcgtactgttgttagctacatacgttattggctcctcacctaacacagaatcttggagaaaagcttaaaacaactaaagatgtaaacatcaacaagagtgtccatatcctgggtcatcaagtgacaagagagtccatggatggattctccaacaatcttatattccactaatccaccccctttcccctcacttctgtaagtttctgttttcc

SEQ ID NO: 63373 - DNA, 658 bp, Homo sapiens
aatttcactttaggaatttgctcaggcagagaagctttaggccactaaagtaagagaggcaacgtgggggtttcttacatgaccctacccaatagggtagagaagaaaggtcagcagaggaggagctggagtttaaccccaaggtttttagaggttgaggaggaggtaatcaatcactatcaaaatgaaatatatttgtcccaggtcaagaaacttcagttaagagaccatcagctatggtggtagagagaataattccaaagagcccacaattgcacataatgagagaaagattcagtgttaaatagcctgccagtcctggagaaagaaagccagcatatgatggcacaattcgagtaagaaatatcccattctccttagccctctccccaaagcccacctttgcctttgtactaacttagaaagaggtttaaaaatgacagaaggaagtcaacaaactgctgagcaagagagaaagacaagtccaggtggacctgcaaaccctagagacstggcagcttccctggcacaggtcctcaccaaggcagagatcaaggtcctgtttgtttcattatccagctacacttataaaattcttttttgctttaaaaacacgcaaaatgatttctgtttcctgcaaccaaatggttttgactaa

SEQ ID NO: 63374 - DNA, 695 bp, Homo sapiens
attccctcaggtcctcaagttttactgattccccactggtggaatttcaagagcatcatttacctgtggggaagctatgactatttcactgtgtccttcattacaagaatctaaaaatctagaaattcagtccttgccaagatttgacaacggcatgtggaaacacatctcattgtcctgtgtcctggaaggctgctgagctctccactattatggccagctttcccatttattatggtagaagaagtttaaagaaaayattaagagtttgtgcaatgagcaaatggggaccccatctatgcctgggttgacttataacccacttttttgtagctatctatttagttaaaaaaaaaaaaaagccattcttccatgagcacagttatttagatccttttttccctcaatgataatgtggcaataattaggatgacaataatgcatgtttctataatttactgaacacctactttgttccaagctgtggttttttttcctagcacgtctaatatcctacttaaaattttgcagagctgataagattgactacattttaaagagataaagagagaaatgctgaggtttactaagattatgtaactttctcagggtcctatggctaatgaggaaaagctaacactaattgagtgcctaaaatgtgtgaggcctgctctatgaatccatttttcaaggat

SEQ ID NO: 63375 - DNA, 695 bp, Homo sapiens
attccctcaggtcctcaagttttactgattccccactggtggaatttcaagagcatcatttacctgtggggaagctatgactatttcactgtgtccttcattacaagaatctaaaaatctagaaattcagtccttgccaagatttgacaacggcatgtggaaacacatctcattgtcctgtgtcctggaaggctgctgagctctccactattatggccagctttcccatttattatggtagaagaagtttaaagaaaatattaagartttgtgcaatgagcaaatggggaccccatctatgcctgggttgacttataacccacttttttgtagctatctatttagttaaaaaaaaaaaaaagccattcttccatgagcacagttatttagatccttttttccctcaatgataatgtggcaataattaggatgacaataatgcatgtttctataatttactgaacacctactttgttccaagctgtggttttttttcctagcacgtctaatatcctacttaaaattttgcagagctgataagattgactacattttaaagagataaagagagaaatgctgaggtttactaagattatgtaactttctcagggtcctatggctaatgaggaaaagctaacactaattgagtgcctaaaatgtgtgaggcctgctctatgaatccatttttcaaggat

SEQ ID NO: 63376 - DNA, 695 bp, Homo sapiens
attccctcaggtcctcaagttttactgattccccactggtggaatttcaagagcatcatttacctgtggggaagctatgactatttcactgtgtccttcattacaagaatctaaaaatctagaaattcagtccttgccaagatttgacaacggcatgtggaaacacatctcattgtcctgtgtcctggaaggctgctgagctctccactattatggccagctttcccatttattatggtagaagaagtttaaagaaaatattaagagtttgtgcaatgagcaaatggggaccccatctatgcctgggttgacttataacccacttttttgtagctatctatttagttaaaaaaaaaaaaaagccattcttccatgagcacagttatttagatccttttttycctcaatgataatgtggcaataattaggatgacaataatgcatgtttctataatttactgaacacctactttgttccaagctgtggttttttttcctagcacgtctaatatcctacttaaaattttgcagagctgataagattgactacattttaaagagataaagagagaaatgctgaggtttactaagattatgtaactttctcagggtcctatggctaatgaggaaaagctaacactaattgagtgcctaaaatgtgtgaggcctgctctatgaatccatttttcaaggat

SEQ ID NO: 63377 - DNA, 695 bp, Homo sapiens
attccctcaggtcctcaagttttactgattccccactggtggaatttcaagagcatcatttacctgtggggaagctatgactatttcactgtgtccttcattacaagaatctaaaaatctagaaattcagtccttgccaagatttgacaacggcatgtggaaacacatctcattgtcctgtgtcctggaaggctgctgagctctccactattatggccagctttcccatttattatggtagaagaagtttaaagaaaatattaagagtttgtgcaatgagcaaatggggaccccatctatgcctgggttgacttataacccacttttttgtagctatctatttagttaaaaaaaaaaaaaagccattcttccatgagcacagttatttagatccttttttccctcaatgataatgtggcartaattaggatgacaataatgcatgtttctataatttactgaacacctactttgttccaagctgtggttttttttcctagcacgtctaatatcctacttaaaattttgcagagctgataagattgactacattttaaagagataaagagagaaatgctgaggtttactaagattatgtaactttctcagggtcctatggctaatgaggaaaagctaacactaattgagtgcctaaaatgtgtgaggcctgctctatgaatccatttttcaaggat

SEQ ID NO: 63378 - DNA, 695 bp, Homo sapiens
attccctcaggtcctcaagttttactgattccccactggtggaatttcaagagcatcatttacctgtggggaagctatgactatttcactgtgtccttcattacaagaatctaaaaatctagaaattcagtccttgccaagatttgacaacggcatgtggaaacacatctcattgtcctgtgtcctggaaggctgctgagctctccactattatggccagctttcccatttattatggtagaagaagtttaaagaaaatattaagagtttgtgcaatgagcaaatggggaccccatctatgcctgggttgacttataacccacttttttgtagctatctatttagttaaaaaaaaaaaaaagccattcttccatgagcacagttatttagatccttttttccctcaatgataatgtggcaataattaggatgacaataatgcatgtttctataatttaytgaacacctactttgttccaagctgtggttttttttcctagcacgtctaatatcctacttaaaattttgcagagctgataagattgactacattttaaagagataaagagagaaatgctgaggtttactaagattatgtaactttctcagggtcctatggctaatgaggaaaagctaacactaattgagtgcctaaaatgtgtgaggcctgctctatgaatccatttttcaaggat

SEQ ID NO: 63379 - DNA, 631 bp, Homo sapiens
tttcctccaatttgcagctaactatgattagttcctgcaaatgaggctttaattagacccactttgaactgatgagctcatcatggaaatgtttcttatgtctcacaggtggattcggtcacacttgggtaaagagtagaggttagtctaygacccagctgtgccccagctttttcctaatgacatattatctcaggatggagagtctggagggaagggtgtttattatttcctaatataagggtaaaaactgctcaaatcatacaaattataaaagacatgttcttagttggtcttttatttatttttcatctccttataaatgatataaagtgtcagtttctgctttcaataaatgatttccttttaagcacacaatttaaaatattttctaaaagtctaaaccatatggtagaatttattagaataaataacgtaatagtagtaacacaatattaattgttctaattaacataataaaattaatgagaaacatgattctgaagataattattcactttaacaagcagttatggagcctaaagtccagacactgtgattcacatacatgatccctaaaataaataaggcaagcttctattctcagaaagttcacaatctagtgggaaag

SEQ ID NO: 63380 - DNA, 828 bp, Homo sapiens
cactttcaatgtccaaataccaggttttttttcatgagactctgtatttactttaaatattctattaaaaaaaagagtattacagtatattactaccgagacatatttttagatgttagaactacacagaatacgtggaacatttaattttcactctattattgattaatataggcatcactatttagaagtaaaaatgtaaaagaccttaaattattttagtctaatattattgaatacttgcaaactttattactttattgtaagcaatataaataaaaccacacaatctagaaaaagactagttttcgttgaattctcattcagaatatatgaaaggagtgtcatgtgtgtccgtatagaagaccacctaaacaggtttagtgtgagcaacaaggctgtttattcacttgggtgcaagttggctgagtctgaaaagagagtcagcgaagggagatagcgaggggcagttttatagggcttgggyaggcagtggaaagttacagttaaaggtggttatctattgttagcaggggagggggtcacaaggtgcatggtggagcgatgatgggagtcattgtccaggagaagaatgtcacagggtcgattgatcagttggggcagggcaggaacaagtcataatggtagaatgccctaaggtgggttaattagttaaagcaggaactggctgtttcatttctttgtggtttttcgatggctccagacttcttggctcctgcagtccatcttggctcctgcaggccaactggacgtatatatgcaggtcacaggggttacaatggctgagcttcggctcagaggtctgac

SEQ ID NO: 63381 - DNA, 828 bp, Homo sapiens
cactttcaatgtccaaataccaggttttttttcatgagactctgtatttactttaaatattctattaaaaaaaagagtattacagtatattactaccgagacatatttttagatgttagaactacacagaatacgtggaacatttaattttcactctattattgattaatataggcatcactatttagaagtaaaaatgtaaaagaccttaaattattttagtctaatattattgaatacttgcaaactttattactttattgtaagcaatataaataaaaccacacaatctagaaaaagactagttttcgttgaattctcattcagaatatatgaaaggagtgtcatgtgtgtccgtatagaagaccacctaaacaggtttagtgtgagcaacaaggctgtttattcacttgggtgcaagttggctgagtctgaaaagagagtcagcgaagggagatagcgaggggcagttttatagggcttgggtaggcagtggaaagttacagttaaaggtggttatctattgttagcaggggagggggtcacaaggtgcatggtggagcgatgatgggagtcattgtccaggagaagaatgtcacagggtcgattgatcagttggggcagggcaggaacaagtcataatggtagaatgccctaaggtgggttaattagttaaagcaggaactggctgtttcatttctttgtggtttttcgatggctccagacttcttggctcctgcagtccatcttggctcctgcaggccawctggacgtatatatgcaggtcacaggggttacaatggctgagcttcggctcagaggtctgac

SEQ ID NO: 63382 - DNA, 828 bp, Homo sapiens
cactttcaatgtccaaataccaggttttttttcatgagactctgtatttactttaaatattctattaaaaaaaagagtattacagtatattactaccgagacatatttttagatgttagaactacacagaatacgtggaacatttaattttcactctattattgattaatataggcatcactatttagaagtaaaaatgtaaaagaccttaaattattttagtctaatattattgaatacttgcaaactttattactttattgtaagcaatataaataaaaccacacaatctagaaaaagactagttttcgttgaattctcattcagaatatatgaaaggagtgtcatgtgtgtccgtatagaagaccacctaaacaggtttagtgtgagcaacaaggctgtttattcacttgggtgcaagttggctgagtctgaaaagagagtcagcgaagggagatagcgaggggcagttttatagggcttgggtaggcagtggaaagttacagttaaaggtggttatctattgttagcaggggagggggtcacaaggtgcatggtggagcgatgatgggagtcattgtccaggagaagaatgtcacagggtcgattgatcagttggggcagggcaggaacaagtcataatggtagaatgccctaaggtgggttaattagttaaagcaggaactggctgtttcatttctttgtggtttttcgatggctccagacttcttggctcctgcagtccatcttggctcctgcaggccaackggacgtatatatgcaggtcacaggggttacaatggctgagcttcggctcagaggtctgac

SEQ ID NO: 63383 - DNA, 530 bp, Homo sapiens
ttatagtttagaaattaacacccaactcttccctacctccttcctctcctttctctaacccttcttgctccgcactgtcttgggagtaaagctgaaatgtttataaattccagttttaagaactgtcccacctctaacaccacttcctctgtaggtcacataggctcattttaaaacaaaaatcttgattgattgtctgtcataaattgaaatcatactcttttaaatgacaactaaaagggctgtaatgtagccccaaaagaaatgccttctgaaactttcctctgagcaaacaaatgaaaataaaccaatgaaaacacacaggatgggcttccctggagctacagagtcaggtctakagttgcctcagcctatgccctgctgtcttctgggttaacccaagcaaggagactggatcaaacagccctgagggctggctgttgttgcaagccaaggctagcaagagtccaacacccattaattctagtattttcataaaatttttatattttaataattttttttttggg

SEQ ID NO: 63384 - DNA, 530 bp, Homo sapiens
ttatagtttagaaattaacacccaactcttccctacctccttcctctcctttctctaacccttcttgctccgcactgtcttgggagtaaagctgaaatgtttataaattccagttttaagaactgtcccacctctaacaccacttcctctgtaggtcacataggctcattttaaaacaaaaatcttgattgattgtctgtcataaattgaaatcatactcttttaaatgacaactaaaagggctgtaatgtagccccaaaagaaatgccttctgaaactttcctctgagcaaacaaatgaaaataaaccaatgaaaacacacaggatgggcttccctggagctacagagtcaggtctagagttgcctcagcctatgccctgctgtcttctgggttaacccaagcaaggagactggatcaaacagccctgagggctggctgttgttgcaagccaaggctagcaagagtccaacacccattaattctagtattttcataaaayttttatattttaataattttttttttggg

SEQ ID NO: 63385 - DNA, 530 bp, Homo sapiens
ttatagtttagaaattaacacccaactcttccctacctccttcctctcctttctctaacccttcttgctccgcactgtcttgggagtaaagctgaaatgtttataaattccagttttaagaactgtcccacctctaacaccacttcctctgtaggtcacataggctcattttaaaacaaaaatcttgattgattgtctgtcataaattgaaatcatactcttttaaatgacaactaaaagggctgtaatgtagccccaaaagaaatgccttctgaaactttcctctgagcaaacaaatgaaaataaaccaatgaaaacacacaggatgggcttccctggagctacagagtcaggtctagagttgcctcagcctatgccctgctgtcttctgggttaacccaagcaaggagactggatcaaacagccctgagggctggctgttgttgcaagccaaggctagcaagagtccaacacccattaattctagtattttcataaaatttttatattttaataatttttttttkggg

SEQ ID NO: 63386 - DNA, 1015 bp, Homo sapiens
agagagctctcccttccctacctacactaaatagtagtgtccacttttcactgaaaacccacagtgtgcaaagtacctagttagggaattgatactatgtttgtctctaatcctccccacagccatatacaaggagggtattattatccacattttatatatgaggaaactgaggcttgaattagtgaggttagtgattcattccttagctgttatatagcagagcagtttttctattttatttttatttaaaagatttaatttaatgagtagtaaacagattaatagaaatgaataatagttaactcrtgaatgtggtttaagtttgtaaagtaaaacaaaacagaacagttttacttagtagaggggttttatgaaagtacatactaccccagacaaagaaaaaaggagagggactgaatctgttgggtaggtgagaggggaatgagaaaagctctgggggaaatactctatacgtacattgtctaatagggtagccactaaccacatgtggcttttgagctcttgaatgtgacaggtctgaattgaggggagctaaaagagtaaaagacacattttagtataaaaaaagaatgtaaaatatctaaacaaattttctattgcttatatattgaaattataatatattagatatattgccttaaaatattaaaattaattttacttgtttccttttacctttttaatgtgcctaatagaaaattaaaagttacatgtgtgactcacattatagaacataaatgtttatacttgattcctaaccaccctgggcttcttcctagtgtggcactcagagaggaggatatagggacacagccaattccatcagagaaattcctcttttgtttgtttatcaaatcaggtttctgatataaacttctttgagggaaagaatctacagccaaaatgcttgacaattctagtcttagaatattttccatgtaccctgaagacgtggaatgagaagaagaaacccagatacctttcttttcct

SEQ ID NO: 63387 - DNA, 822 bp, Homo sapiens
tttgtgtgtgtgtgtgtgtgtgtgtgttggtgggaatctctactgggtagctcctcactgtagtgggagaaaaaaatacattaaaaataatacaggggctgggtgcggtggctcatgcctgtaatcccagcacttcggaaggctgagacaggcggatcacgaggtcaagagatcgagaccatcctggccaacatggtgaagtgccgtctctactaaaaatacaaaaattagctgggcatggtggtgcgcacctgtagtcccagctactcgggaggctgaggcaggagaatcacttgaacctgggaggcggaggttgcagtgagccgatattgtgccatttcattccagcctgccgacagaacaagactccacctcaaaaaaaaataataataaaataataataawaataaaggatgctactctatgaaaatatatttaaaaggcattattttctcctctgcttggggaacagagttaaagctgttctgaggactctgaaaaatttctcagaggtctgaagtcaacagacactcccctatggcctcagtttcacatgtaatttttcttttccatgcacacatgcccctctgcaatgccctttgagattcattttcccttttaagcctgcctgcatgaggctgcatttcatacagaaattgttatctctctttattactctgttactcttcccaagaaaaagggaatactaattttattggtcagattttggaatactttatagaaaatttactattgtatgcggtcactgcaaattaagaggttgtacatatgatattgaggtatagcattgaaactctttaa

SEQ ID NO: 63388 - DNA, 738 bp, Homo sapiens
attctcttytcctcccctctcctagtaatccactggttgctctcactcagccagtgggcccaggggtgcagatctggcaaagggcaaagaagggcagacccggggggtcacaggtggggaagagtgacaaggtgagaggttcagttggtctccacgatgaagacatggagaagagagaggatgggtgtgcagagaataaaaaggggttgggtcatggcaagaaagagcacaagcaaggtgctggtgtagagaagagcaatggaaatacagtaaatgttgaaagttttgagttggatcccttgaattatcgtatgaatttgagtaaagaatagaccactccctttaagtttcagacaagtatatgcaactgcctgctctacattgccacttggatagcattttaacacaatccatccaagactgaattcctaaactttgcccaaatcagctttactcaacatctttcctatctcagctgggggcagcttgatcctttaagttgctcaggacaaaatgttagagtccactttactggaatttttctcccacagtcgtatccacataatcagaaaacttagtcagttgatattgtcaaataaacaagtagaatctgatcatttctcatcactcttattgctattaccttgctgaaatcaccattatcttttgcctgcaatattgaaataggtacttgctggtttttctgcctctgccttagtactcatgccacagtgatat

SEQ ID NO: 63389 - DNA, 738 bp, Homo sapiens
attctcttctcctcccctctcctaktaatccactggttgctctcactcagccagtgggcccaggggtgcagatctggcaaagggcaaagaagggcagacccggggggtcacaggtggggaagagtgacaaggtgagaggttcagttggtctccacgatgaagacatggagaagagagaggatgggtgtgcagagaataaaaaggggttgggtcatggcaagaaagagcacaagcaaggtgctggtgtagagaagagcaatggaaatacagtaaatgttgaaagttttgagttggatcccttgaattatcgtatgaatttgagtaaagaatagaccactccctttaagtttcagacaagtatatgcaactgcctgctctacattgccacttggatagcattttaacacaatccatccaagactgaattcctaaactttgcccaaatcagctttactcaacatctttcctatctcagctgggggcagcttgatcctttaagttgctcaggacaaaatgttagagtccactttactggaatttttctcccacagtcgtatccacataatcagaaaacttagtcagttgatattgtcaaataaacaagtagaatctgatcatttctcatcactcttattgctattaccttgctgaaatcaccattatcttttgcctgcaatattgaaataggtacttgctggtttttctgcctctgccttagtactcatgccacagtgatat

SEQ ID NO: 63390 - DNA, 481 bp, Homo sapiens
tgctgagcactttccattgaggcctgcaggtttcctcttagttgtagtaattttctattccttggggcacctttaccttatctctagggaagctccatggattataacgatctctctgatttatccatcctggagtgcagaccccacttggagacatcacagtgagcacttgccttctggaatcttgaatcaaatgaatatgcttagaatmctaagaaaacctgagactggggtatgctaccagtcagcatgctttagaatccatgtttcaaaaaaatctgactagccatgacttaaaccagtgcttttcaaactgtaacatgtattggaatcacctagaggatctttttgaaatgcagtttctgattcagtacatctggagtgaagcctgagattgcatttctagcaagctcccaggtgatgctgatgccttaaacaacaaggatttaactttttaaacatcaaggatatgtattgcttg

SEQ ID NO: 63391 - DNA, 867 bp, Homo sapiens
cctggaatttccagaccctggctctatcttctaagtcatttctgtacctggaataaaatgttgctgtagaaattattgacataatagtccccatgaggactcagagccatcaaagtgaaatctcacaataaattcagaggccacctggagaaccgcggttaaagagctttttagagatgggaaaaaaaaaactttaaaagcttaattcttcttaaatataagttcactgatcatgtttctgtaccactttcctagagtttagttctttacttttagctttgttaaataatcctttaaagcttttttgacagcaaaaatgctgcattttgtatagatgacatcactagtccaactccagccacactgaaagccaagaggttaccaagcaataaacctcagtcgggatttctgcgtgtctcggggcataaaagccttaaaacktgaggtgggtcttactgatctgtgggacaaacagtcctactgtaataccagaaacattattgatcagtttggggggaacatttttttaaaagctaattagtctttgccgagtggaattactaatgccgttttacacttagcacttagcggtgcttttcatcttcaaagtgctttgaaaacattaactaattaatcattagctaatttagcaactgacgataaaagttaagagactaagagacggcagactccacgagcgttttctgcacagaaatccctctatatgaagcaaaggcagggaaactggaggggagctgcggggcaggtcaccaggtgctagcaattttaggggacactgctcaggtaatatctgcagagaacagaaagaaaatcctttagatacacactcttggacaatcttaacag

SEQ ID NO: 63392 - DNA, 954 bp, Homo sapiens
tgcatactaatttgggcatgccagttaagagaagcaaacacattcacagcttgtaaagtttttatttactgggaagctaaagtgacagaaaaacaatttgtctaaaataagggtctgggtcagtttcataactcttgttacatcttttggaagtttccttccgtgtcatgagctgcraccttgtatcttaatgtgaaggtctgtgggaagctgaaacatgacttaggggaaatgaccttctcttagttgtgtctgggacagggagtctgacatcccatccctctccaatcaggactgcattcagtgtgcacataggtaaacaaaccaaaatagacctcacccaaaatagctccttccaagacaccctacagctctgtgtgaggccaggaaggctagtctggtttggatgctggctagggggccagcgctggtctggcatgcctcctaaggaagcaggagaagtacctgagactgttgtgtttgtgatccgacagcagttactgttccctttcctaagaaaccttggacagtctcagaggctcctttcttgtcctttgtgccagacacattcagctccctgtcctcagtagagattttagtttttctttccctttttaaaaaaaaaaaaaaaaaaaaagcagaggaagtgaatgtaatgtcacagcaagcaatacttggcgagccttgcggcaggcatccattcagaggttgtatttcatcaaactatcattttctcttattcacccaaaccactattccctcaagaggccattttctttggggttgaaaactctcatgttcactcctgatgctagaaggggcacagggatcaaagccatgaataaaattaactggctgtcagctctgtgagtgcaccaacaccctgcggtcacctgcactgaaggcaaaaagcaaaacaccagtgaagatggaagttgagacaacgctatacag

SEQ ID NO: 63393 - DNA, 954 bp, Homo sapiens
tgcatactaatttgggcatgccagttaagagaagcaaacacattcacagcttgtaaagtttttatttactgggaagctaaagtgacagaaaaacaatttgtctaaaataagggtctgggtcagtttcataactcttgttacatcttttggaagtttccttccgtgtcatgagctgcaaccttgtatcttaatgtgaaggtctgtgggaagctgaaacatgacttaggggaaatgaccttctcttagttgtgtctgggacagggagtctgacatcccatccctctccaatcaggactgcattcagtgtgcacataggtaaacaaaccaaaatagacctcacccaaaatagctccttccaagacaccctacagctctgtgtgaggccaggaaggctagtctggtttggatgctggctagggggccagcgctggtctggcatgcctcctaaggaagcaggagaagtacctgagactgttgtgtttgtgatccgacagcagttactgttccctttcctaagaaaccttggacagtctcagaggctcctttcttgtcctttgtgccagacacattcagctccctgtcctcagtagagattttagtttttctttccctttttwaaaaaaaaaaaaaaaaaaaagcagaggaagtgaatgtaatgtcacagcaagcaatacttggcgagccttgcggcaggcatccattcagaggttgtatttcatcaaactatcattttctcttattcacccaaaccactattccctcaagaggccattttctttggggttgaaaactctcatgttcactcctgatgctagaaggggcacagggatcaaagccatgaataaaattaactggctgtcagctctgtgagtgcaccaacaccctgcggtcacctgcactgaaggcaaaaagcaaaacaccagtgaagatggaagttgagacaacgctatacag

SEQ ID NO: 63394 - DNA, 954 bp, Homo sapiens
tgcatactaatttgggcatgccagttaagagaagcaaacacattcacagcttgtaaagtttttatttactgggaagctaaagtgacagaaaaacaatttgtctaaaataagggtctgggtcagtttcataactcttgttacatcttttggaagtttccttccgtgtcatgagctgcaaccttgtatcttaatgtgaaggtctgtgggaagctgaaacatgacttaggggaaatgaccttctcttagttgtgtctgggacagggagtctgacatcccatccctctccaatcaggactgcattcagtgtgcacataggtaaacaaaccaaaatagacctcacccaaaatagctccttccaagacaccctacagctctgtgtgaggccaggaaggctagtctggtttggatgctggctagggggccagcgctggtctggcatgcctcctaaggaagcaggagaagtacctgagactgttgtgtttgtgatccgacagcagttactgttccctttcctaagaaaccttggacagtctcagaggctcctttcttgtcctttgtgccagacacattcagctccctgtcctcagtagagattttagtttttctttccctttttawaaaaaaaaaaaaaaaaaaagcagaggaagtgaatgtaatgtcacagcaagcaatacttggcgagccttgcggcaggcatccattcagaggttgtatttcatcaaactatcattttctcttattcacccaaaccactattccctcaagaggccattttctttggggttgaaaactctcatgttcactcctgatgctagaaggggcacagggatcaaagccatgaataaaattaactggctgtcagctctgtgagtgcaccaacaccctgcggtcacctgcactgaaggcaaaaagcaaaacaccagtgaagatggaagttgagacaacgctatacag

SEQ ID NO: 63395 - DNA, 618 bp, Homo sapiens
tgtaagtagccttctccttggcattcttctatgggctgaggcagggcatgttaacgtctgtcttgttagttttgtaaaaatcatattgctagatgccagactgtgactgaacctgtactgtgtcaagaagctcagaagtctggcaaaagagggcagcaggccagtagctccttctggtttagtgacctatgaagttctgctcacacaactcatggccctgtggtacaaagtcagtggctggggaccctacacatgagcccaggagagcacctgtagtcagcttcctctagacctgtagggacccttcccccatttctaccactstcttccaagggatatttctggacaaagctctcttttaccaagtccaaaggatgaaaagaaagatgaaattcctaaaagggagtgcattgacttcagttacatcttagtaaaagggtttctctctgtctgacttaggaactagaatcatgtctatgggacaatagcagaggtcccctctttcactaattagctctatatcaacattggagtgctccaagaggaaagtaagacagcctgggtggggagtgggtatgactgagagtagagaagagtccttgttggtatgaccctcac

SEQ ID NO: 63396 - DNA, 729 bp, Homo sapiens
ctgtgtttcaaggtcgctgggactggttgctcctgtgtttccatctctggagttccctcgtgtctggctgctgctctctgaaccttcgcttcaccttgggggtggccttcttggtcctgtgggggatgctgtttgtcccatttcctcactgccacctctcagcatcatagtgagctgagtgctgagcctttgggaggagcattgccagtgtggccctgggcrtgagatctgtcagaggggtgggcttccttccctgtgtggctgagacagtctagtggtggcctggcccagagccaggaggatggtggttagagaggggtagctcgcctttcctctgtctgaattccagtctgggaagagcttcaggaacagtgcctgcttggatcaccctgggacctttccttctctttcctgtgactttggagtcctctgagagatttgacctaaggaatcagtaggttggaatcaaggaatcccagagctggaagggactgtgtgtggttttcttgccatccttgcccctgccttacagatgccaatccaacctggttagttccaaaacccagtcctgtgtctgaaggatactaaggagcacaccacctacatcctgaccacccatctccatgtctgaaaattccccacctcccagaaggttctgccctgacattccagttcaagctcagtggaaatgatgggaatttggaacttgaggaacatagtaggggtgat

SEQ ID NO: 63397 - DNA, 691 bp, Homo sapiens
cgatgctctagcagtttgcctggcaattgttcgaccaaagagaaagtgttgatgtcactgggctgggagatcttggaggatgagggggacccctttctgggaggcaggggaggggtatcccagatagaagctcggggaggcagaggaggtggggatagtttcttgcaagagccctctatgtcccctggtcctggggacgaagagactcccccatctgaaccatcaaaaatgtagagatagtctccagacagggagcctttgggccagggatctgagccaggctgtggcccttgggaggtagagtggttgggcggcccttcctgtggggakagtgagttgtagttaagggtaggatcagagccagagagaccgcgtaacagcttgaggtcggtccgccttcctgctggcttgctgtaaaagtctaccccaggctcatcccagctgatgagagaggggtctgcgttctgcttggctctgttctcctccttgtcatgccggagccgggacagggcatcatactccatctgcagggcttcggccatcgctagctctttgcggctgatgcccactgactccagggacttccagtgttccccattgccctgagtcgaagacatggtgaggatgggggacacaggcaacaaagtctctacttcctgccaacgtcagttctggagggttgtgacatggt

SEQ ID NO: 63398 - DNA, 987 bp, Homo sapiens
catttaatatttaataactctttgatgattgtactgataaaatatattacttttatattccaagctagattataagcttttktttattaccactatgtgggacatttcatatacttactggttaatcgattattgaatgagattatattttcagcatagatgactttttgctcaataatctgtcataacatcgaagaatggaaagctaggctattcaaggataattaagaacttactataaattgaatacagtatataattacacatggggttatgaaactttttacaccacagcatagaacgatcagaatgaattcactgttttgctgaagtgtattgctttatcacttacataaaatctgacacaaagaagttttattttcggcttggggtatatttattttattttgtaatcaaaggtaattattattactattattattattattactactattatttgagacagaatctcgctctgttgcccaggctggagtacagtggtgtgatctcggctcaccacaacccctgcctcctgggttcaagtgattctcctgcctcagcctcccaagtagctgggactacaagcatttgccaccacgcctggcaaattttttgtatttttagtagagacagggtttcactatgttggccaggctggtttcgaacacctgatctcgcctgcctcggcttcccaaaatgctaggattaccggcgtgagccaccattgtatcatgatatattcagaggcctgtagacaggttcattgaataaattaataaattaattattgtcttcatttactattgctgcaaactgacatgaacctatttattcaagatagctcttagtttttgtagataactatcaaagaagtgttagatagataatgacaattaccaacttttctcaattttaacaccataatacaatgaaagcatattacgtgctatttagcatgcaaaatagtgaagtattagtccttgt

SEQ ID NO: 63399 - DNA, 1012 bp, Homo sapiens
tggtctttattctttaaaaaatgttacttgagcattttcatgtacacctcattgtgctttatatcatagacaaatgtactaacatggaggagatataagtaaaataataaagtggccttctttgtaataagccttcagcaatacacaccattctttaaagtatgtgcttatagtcatatttttcctgcctatgtttcttttttttttttttttttttttttttgaaacggagtctcgctctgtcccccaagctggagtgcaatggcgggatctcggctcactgcaagctcckcctcccgggttcacgccattctcctgcctcagcctcccaagtagctgggactacaggcgcccgccactacgcccggctaattttttgtatttttagtagagacggggtttcaccgttttagccgggatggtctcgatctcctgacctcgtgatccgcccgcctcggcctcccaaagtgctgggattacaggcgtgagccaccgcgcccggcctcctgcctatgtttctacttcagatttctccttcatagactctgaggtggaaagaagcaagctacaccaaaatcagctcatttgaattgcaaacatgctaagggagtaaaagtctggtcaaaaaaaattgtgcaaaatagttctgagcaaaagtgctggcattcttcaataatgatatatgaaccaaggttttgttaccacagtatttgcaataaccaaaaaatttggaagtagtcattgataaatgatggtttgaattaaaatgttatattcaaataggaaaaactgttagaatttaaaaataattaggtatagttctatatgttattagtggataattcctatgacaggtaattaattggagaaaaaaaccaagatacaaaataaaatgtatttgtgtacaggccaagtgttagttatggtgggtagagtgaaggagaaatccttctgtcagtcattctgtcagtcaataaataaatattatattctgagttcctggtgccactgt

SEQ ID NO: 63400 - DNA, 499 bp, Homo sapiens
tcagcaatgatcgttsctctaaataacttgattagaatacttcaatatgtgtgactgttttatgatttttttatgtttttgtctttgatgagagggactcttgctgttacaagtgtgatagtggtatttagcttacataaaactgttttactggcttcatcctatctaattctcatttgtaacattggggcattcaaaatatcccaagtgccgacatgtgaaatacttccaaattactcgacattatttccagtagttttttttttggcctttaccatgaataaacagcaaatttcagcagtgttagagataaaaattgttgatttgtaatcttctacaggagaactgatttgtgagtagatcacacaaataaacaactttacatagcaaagtcatggattgatagagctcacctacttgcctcttactgttgttgttgttgttgttgttgttgttgttgttgttgttgtttgagacgaagaaatcttgctcttttgcc

SEQ ID NO: 63401 - DNA, 499 bp, Homo sapiens
tcagcaatgatcgttgctctaaataacttgattagaatacttcaatatgtgtgactgttttatgatttttttatgtttttgtctttgatgagagggactcttgctgttacaagtgtgatagtggtatttagcttacataaaactgttttactggcttcatcctatctaattctcatttgtaacattggggcattcaaaatatcccaagtgccgacatgtgaaatacttccaaattactcgacattakttccagtagttttttttttggcctttaccatgaataaacagcaaatttcagcagtgttagagataaaaattgttgatttgtaatcttctacaggagaactgatttgtgagtagatcacacaaataaacaactttacatagcaaagtcatggattgatagagctcacctacttgcctcttactgttgttgttgttgttgttgttgttgttgttgttgttgttgtttgagacgaagaaatcttgctcttttgcc

SEQ ID NO: 63402 - DNA, 1025 bp, Homo sapiens
tgtggctgggctcctgaagttgttaaccttaatttccctaaggagataaggtgtttataaaccaaacattggtattttcacttggatctcaaagccaggactcacattaggattatgaccttaaattctacatatcagatatgccactttgtcaaaatggtgagacagatcagagctgcctttgccatctcactatactacttttcctaacccatcgtagttggtattattttcgtcattctaataaagaatgacgaatagtagcatctttaattcgttataccccacatcttctctttctccccttttcctcattccctcaacaaatgttttatccactgtgtcctttgttgtaatcttgcctctgatcctctcttgagtgctttctgtggtgtatgtctcctttccattgctgtgttctgtcttccttcccttcctttctctctctctaacgcctatgcactcctaatccctttgctttctcgccctggtctcagggcctgacctttgcactccactcttctgtccttcccctgattcacactccctattgtattgatggcttacaggtttggagataaagcaacacctgagttgaatacttttttaaaaagttttacctttattattttaagtaaaaggaaaaagaaatctttggctcagataactttgagtttacgcacttgtaatttgcattaccagatagttacratcattgctgctaagtccattaactgttcacatacaaacattgctgctaagagctaacatttcccttgtttattacccatttatggagtatttttcttagaaacactgagtaatgactaagtttccaagctctagagttgaagtccctgcaatcaaatccttgctcagctagctgtggtaacattgggcaaattatttaacctctctaaacttcagtttcctgttgataaggctactgtatggctgagttagcctatagtgcctgccagccttctcagcctgggttctgagagggaactaagccttcctaaggt

SEQ ID NO: 63403 - DNA, 1615 bp, Homo sapiens
gcaaatccttccagctatgcatatgacctgtacacttttctatatatattctctatatgtatgttattcttcaattaaaagttcactcaaaatgcatgcacatgattagagatcaatatacactttacaaccgggcgcagtggctcatgcctgtaatcccagcactctgggaggcccaggcgggaggatcacttgagtccaggagactgatgctgcagtgaactgagattgcgctactgcaccccagcctgggtgacagaacgagactctgtcccaaaaatacatgcatatagatttatacacacgcacaccatacataagcaaaaatgcacattaaacaacgtgaagaaaagtgaatggagagaggggtaaaataaaggtgaatgcccaggtagacrtgacgtgtgagaggcctgtgggaagtgcataccgcgaaccaaggtggacgacagactcaacagttggccactgaggacaaaacagaggaatcagggggtgaggtgaaagggagatgatagggcagaagcagcccccgggccacagtggccagactaggttacaaaaagagcaactgccttcccttgtcggataggtgggaatttaaaaggttgccagcattcagcaccacaaaagtgtgggaaagtggggacttctgtgccttgtgcaatgggactttaactggaacggccctttggggtcatttcgacaatccctatggaagctttaaatatgtgacttcgttgacccagaaattctgcttctagaaaaatacttggttgaagacttgcaggcacgcacaagcatgatgtcccccgatggtgaggcggcaatgtgtgcgctagccagaaaaccggaaaacaccaaggtgtctcttcacatcagacttgtgaaataagtggagagtcgatctgatggagacagaccccacaaccactaaagaatgaggtggtggccgggcgcggtggctcacgcctgtaatcccagcactttgggaggccgaggcaggcggatcacgaggtcaggagatcgagaccatcctggctaacacagtgaaaccctgtctctactaaaaatacaaaaaaattagccggacatggtggcgggcgcctgtagtcccagctacttgggaggctgaggcaggagaatcgcgtgaacccaggacgcggagcttgcagtgagccgagatcgcgccactgcactcccgactgggcaacacagcaaggctctatctcaaaaaaaaaaaaaaaaaaagaggtggctttgtgcaaacttataatggtaaagccaattgacagggtgggggtgggagccaggtgccaaaccacaagtcccacaccctcctgtctctggaacagagaattatgatttaatacctgtatgcattcgcagcaaatctcaaggactccacccaacggtgaagaatggtcactgctggagtggagttacgcggccaggggttttctttttataccagctaacatttacattctttacggaaggcacacaccatttctgcaattttttaattaaatctgggtagcaaagatcctcccatatggtttacatctgttgggacagagttagtctaaagctgtagttcagttccttatcagga

SEQ ID NO: 63404 - DNA, 1615 bp, Homo sapiens
gcaaatccttccagctatgcatatgacctgtacacttttctatatatattctctatatgtatgttattcttcaattaaaagttcactcaaaatgcatgcacatgattagagatcaatatacactttacaaccgggcgcagtggctcatgcctgtaatcccagcactctgggaggcccaggcgggaggatcacttgagtccaggagactgatgctgcagtgaactgagattgcgctactgcaccccagcctgggtgacagaacgagactctgtcccaaaaatacatgcatatagatttatacacacgcacaccatacataagcaaaaatgcacattaaacaacgtgaagaaaagtgaatggagagaggggtaaaataaaggtgaatgcccaggtagacatgacgtgtgagaggcctgtgggaagtgcataccgcgaaccaaggtggacgacagactcaacagttggccactgaggacaaaacagaggaatcagggggtgaggtgaaagggagatgatagggcagaagcagcccccgggccacagtggccagactaggttacaaaaagagcaactgccttcccttgtcggataggtgggaatttaaaaggttgccagcattcagcaccacaaaagtgtgggaaagtggggacttctgtgccttgtgcaatgggactttaactggaacggccctttggggtcatttcgacaatccctatggaagctttaaatatgtgacttcgttgacccagaaattctgcttctagaaaaatacttggttgaagacttgcaggcacgcacaagcatgatgtcccccgatggtgaggcggcaatgtgtgcgctagccagaaaaccggaaaacaccaaggtgtctcttcacatcagacttgtgaaataagtggagagtcgatctgatggagacagaccccacaaccactaaagaatgaggtggtggccgggcgcggtggctcacgcctgtaatcccagcactttgggaggccgaggcaggcggatcacgaggtcaggagatcgagaccatcctggctaacacagtgaaaccctgtctctactaaaaatacaaaaaaattagccggacatggtggcgggcgcctgtagtyccagctacttgggaggctgaggcaggagaatcgcgtgaacccaggacgcggagcttgcagtgagccgagatcgcgccactgcactcccgactgggcaacacagcaaggctctatctcaaaaaaaaaaaaaaaaaaagaggtggctttgtgcaaacttataatggtaaagccaattgacagggtgggggtgggagccaggtgccaaaccacaagtcccacaccctcctgtctctggaacagagaattatgatttaatacctgtatgcattcgcagcaaatctcaaggactccacccaacggtgaagaatggtcactgctggagtggagttacgcggccaggggttttctttttataccagctaacatttacattctttacggaaggcacacaccatttctgcaattttttaattaaatctgggtagcaaagatcctcccatatggtttacatctgttgggacagagttagtctaaagctgtagttcagttccttatcagga

SEQ ID NO: 63405 - DNA, 671 bp, Homo sapiens
gcacccgcccttgcgctgacaccgcgggccttcctttgctctgggaacgagcgtggggagccctgttcaccctcacaccccggctccagagcggcgcggagcactccatgtttgctaaatgaaaatgaagtctcggcgcgagcgccacccaaacggcggcgtagttgcttgagaaccgcggaggcaaccgcttgggagggcgccccgaccccgaagctgcttctccaggcgcccgaggcggagagaaggcactggggtctccgtctccaccagtgatttctggtgaaacaggaaacaaaacccgggaaacaaatgggacgaaatgttggcggtwttgatgctggatgatgggaatatgggcgtgtgttttgtacctttctgttatcttcagttttctcaaaacacgaaaaacagactaagaacagcgcatagaaaacattggggcacaactaaagctcataaatgcacacgttttcataacctgaccgaggtccatgctgctgtagcgcatacccccaagaacagagggccgcgtgttcttatggccccggtgccggcccccaagcggggttcccgcaggagatagggcctggctcccgcttcagcaccgcgtggcctggagtgcagttctggcggccaagatctgagggctgtagcccgtgccctcacca

SEQ ID NO: 63406 - DNA, 1192 bp, Homo sapiens
cccatccaagaagatgtgggaggtgggcaccagcctctggggaggggaggtgccaggccacaggcagctgcagcctggggacaggtgaccccagcaccctccggggcagtcctatgactgtttcttgcttcctgccctctgacttttagaggtgggtagccctggggtcctcccaggtctggacatcatcatcccagctagaggcatggagccccccaatcacagaggaagagacagtggtataagaggctccttatgtcgggtgtggtggctcacgcctgcaatcccagcactttgggaggctgaggcaggacaatcacttgaggtcaggagtttgagaccaacatggccaacatggtgaaagctcatctctactaaaattaaaaaaaataataataattagccgggcctggtggtgcatgcctgtaatcccagctactcaggaggctgagacacgagaatcacttgagcccgggagrtgaaggttgcagtgagctgagattgcaccactgcactgcagcctgggacacagagtgacactctctcaaaacaaaacaaaacagacaaacaaaaaagactccttagattcaaactggattccggcctcggttccactggtcataattcaactactttgcatctctaagtctctgtttctttaacttcaaaaggaagttagccttttccttgcagaggtgctgaggattaaatgagataatacgtggaaacattaggcatgtagcacacttagcagatggtggttggctccgcctgcttttccaccagtctgtggcctacagtttaaatgctgggaaaaaggacgtgagatttgatgctagggaaggaggcatggggttctaggcaagggagacagtctcttaggcctggagcaaggggccaggggcctgggcaggccacagagccccacagtgtcctcgctaccctattaatgggccaggaatctggaagccagccaccacatgtcctcatgcccagggtcttccggcaggtggagctgaagagccaagaggctccgagtctgcagcagcagccagaccagtagctggagccccagtcccacaaggagcttggatgtgcggacaagcagggtggtgagtagagccctcaggcggggtgggcaggcaggagcaggggaggctcgcactgtgcccagattcccacccccctccct

SEQ ID NO: 63407 - DNA, 1192 bp, Homo sapiens
cccatccaagaagatgtgggaggtgggcaccagcctctggggaggggaggtgccaggccacaggcagctgcagcctggggacaggtgaccccagcaccctccggggcagtcctatgactgtttcttgcttcctgccctctgacttttagaggtgggtagccctggggtcctcccaggtctggacatcatcatcccagctagaggcatggagccccccaatcacagaggaagagacagtggtataagaggctccttatgtcgggtgtggtggctcacgcctgcaatcccagcactttgggaggctgaggcaggacaatcacttgaggtcaggagtttgagaccaacatggccaacatggtgaaagctcatctctactaaaattaaaaaaaataataataattagccgggcctggtggtgcatgcctgtaatcccagctactcaggaggctgagacacgagaatcacttgagcccgggagatgaaggttgcagtgagctgagattgcaccactgcactgcagcctgggacacagagtgacactctctcaaaacaaaacaaaacagacaaacaaaaaagactccttagattcaaactggattccggcctcggttccactggtcataattcaactactttgcatctctaagtctctgtttctttaacttcaaaaggaagttagccttttccttgcagaggtgctgaggattaaatgagataatacgtggaaacattaggcatgtagcacacttagcagatggtggttggctccgcctgcttttccaccagtctgtggcctacagtttaaatgctgggaaaaaggacgtgagatttgatgctagggaaggaggcatggggttctaggcaagggagacagtctcttaggcctggagcaaggggccaggggcctgggcaggccacagagccccacagtgycctcgctaccctattaatgggccaggaatctggaagccagccaccacatgtcctcatgcccagggtcttccggcaggtggagctgaagagccaagaggctccgagtctgcagcagcagccagaccagtagctggagccccagtcccacaaggagcttggatgtgcggacaagcagggtggtgagtagagccctcaggcggggtgggcaggcaggagcaggggaggctcgcactgtgcccagattcccacccccctccct

SEQ ID NO: 63408 - DNA, 752 bp, Homo sapiens
ttgcccctggcaggtttcaggaagatctggaacagcctgggtttgccgaggtgcctggcctggtgtgggcggtctggcctggcctggtgtgggcggtctgacctggccagctcgggggcatcgtggtaaggaagaggaggtgggaaaagggcagctggcagtgatggtgtgtgggaacaagaggctgcagatgggtcagtgccgcttctgagcagtttggatttgggggcgcttgctggttatcagcaaggtgacattcctccacccctcttgcttcagcctagaagttctgcaagctccttttttatatatatatatgtgcctatatatatatatacacatatatatgtacctatatatacacatatataggtacctatatacacacatatataggtacctatatacacacatatataggtacctatatacacacatatataggtacctatatacacacatatataggtacctatatacacacatatatakgtacatatatatacacgtatataggcacctatatacacgtatataggcacctatatatgtaaaagcttcacacacacacacacacacacacacacacacacacacacacagactataaagcataatccattcttgagatctagagaggttaagtgacttgcccaaagtcacacagcaaataaatggcacaccttagacccaaaaccagctctcctgatacctagataataatattttagggtgttttttttcctatctag

SEQ ID NO: 63409 - DNA, 843 bp, Homo sapiens
gaaagcttagacttaagagtgagttgcagatgaggttgttcagcaggcagaggaaacagtagttgcaaaggccctggggcgggaagggttggtctgctcaagtgatgcaaagaaggctcctgggagtggtggctctcaattgtttgtgggcttaagaatattggttaaaatgtactttcttgaatcctacctccagaaattctgattccacaggtctagggtgcagcccagggatctgcatttttaataagcattccaagaaatttagagaaaaatatttcttagagccacatgttgagaaatattaggttaaagcctaatgagaatggcacaaaataaggtgagtcatttaacttctctaagcagctcttagctaaagtataacataggagacaggagttacagggtggcaggaagattgaaggagagaagccacacacagcatctagcatagggcctagcaggcagcgggtgctcagcaaacccctgcacgtgtattactgcccttcccaagtcaagcctatggaaccctcgaggtgtgaagaaatgagcacaaggccaggagtcaggcagcccatgttctagcctcagccaggggccactgacttgccaccccaccttgggcaagaccctttccctcactgggccagtttccccactgtaaagggagagaatgtgattaggtgactcctaccccttacctatccatcctcccatcttgaattctcatgccttgccrcccagggctccctcaccaaattcagtagtcctcagccaggctgcccattagagccaccaagagggctttttcaaacgccagtgaaatcaggaactcttgggggt

SEQ ID NO: 63410 - DNA, 1065 bp, Homo sapiens
gcatgcctccttatctcagctcacttctttcacttcccaagctcatcgggccatgtgcacctggggtgacctcagctcagttcatcaaaacctgaacaagtgctctcaggggccaagagcaccactctccttgtcctgagaccccaaccctctttccttagcatttctctctctgccccaagcctgtatgaagcaaagatggctttatagtgccttgtaagtcctacaaagggagcagcaggggcttctcagagctaccacctcctcgatcaatatctcttcttccaccctcgagggctcaataggactcattcagcaaactctggagggccgacatcacctggacagtgtcactcgtgggcctgctgtttattttcctcccactttctcttggtgcctccagctctcaccgctaacctgcacccccatccccaggtggcagccagtgtgactgctggcctccctgcagcygtgacctcggcaggcatgaggaggagggcgggctggggctctgccacccttcagctggctaatgtggaggtcttaatgaatatgaatcgcctccttctccacggagctggccccatcagattccttcacacctcgccgagcccagaaaggttactcagaattaaatgtaaatcacatatttactggtatgaatcagatcatagtgtcactttctcacaacagagaatttaatcacactgcagccccgagggcttctgctctcctggggccgtccccaccccgtcgcccttgtgggccgcacctgggaaagaagctgactgccctcccatgtcggggtgtgcatgggggtgttcccagaggctgtgaaaggacagtggccacagcgggagacctgacgctggtgttcccagtcctttggtacccaagtcacggctgccttctaatatcatgtcaatctgaagctgtcacgatgggctaggcagtgcttcacatgctgtggacacttaataactgttgagtacaggaacgtctctcctaaaaggctgctggcagtcacctctccttcctaggctcacttgtgtttcagaagccaag

SEQ ID NO: 63411 - DNA, 563 bp, Homo sapiens
aaagatagcttcactttccatggatatggttcaacatgaaaatactatgtctttgtttgctgggcccagaaaaaactcaagacagaataggcagagcttcagtatatgggttttataggcattggtgagtggaatgcttttctatagcccgtagtgtatgtatgtttaattatctatcccctctttttttaatcgtctgggatataggatatctctcctgggaaagtagatgtcccaccatgaaaggaagaattttaggaaataattattttctttagttggaattctgaaaagagaaatrtttctctttactgatactctggaataattctgagtattctagtttcaaaaattataaatgttttctaagttcttaagaatcagacaatttgtgttaattttttttctaactcatgaagaatatattactttggcatagaatatgaggtgtacaatctttgtatttagaaaatgacacatattgcattattttcttacattttttggttcagaaatgtttgatggcaatttgcttttgttttcctactaacaaactgtccctc

SEQ ID NO: 63412 - DNA, 563 bp, Homo sapiens
aaagatagcttcactttccatggatatggttcaacatgaaaatactatgtctttgtttgctgggcccagaaaaaactcaagacagaataggcagagcttcagtatatgggttttataggcattggtgagtggaatgcttttctatagcccgtagtgtatgtatgtttaattatctatcccctctttttttaatcgtctgggatataggatatctctcctgggaaagtagatgtcccaccatgaaaggaagaattttaggaaataattattttctttagttggaattctgaaaagagaaatgtttctctttactgatactctggaataattctgagtattctagtttcaaaaattataaatgttttctaagttcttaagaatcagacaatttgtgttaattttttttctaactcatraagaatatattactttggcatagaatatgaggtgtacaatctttgtatttagaaaatgacacatattgcattattttcttacattttttggttcagaaatgtttgatggcaatttgcttttgttttcctactaacaaactgtccctc

SEQ ID NO: 63413 - DNA, 968 bp, Homo sapiens
taaagaaacataaacacacacacacacaacttttccaatttgtctaaaacatatgtacttttcaactcagtccttatagcacttttatattgaagcatggcttacattccaaatctccagaaaagtcaccatctcttctttcatggcatttccaaatacacyacctttggtgtgacaagccaatcctcccacttgcttagcacagtattattaagtatatattaaaggtttaagatatttaaacaaatagcctaaacttatcgaagcaggttttgtttgtttgcatgcttttcagacaccaactggcaggaaaatttggtgtagatcttgtggctatttgccatgactggtggccaactttggaatgaatttctaatatctatggaatttcctgtaatatgagcattagctccttaagttagaagccggaaactcactttccaagttcttcctactcatgtgaaacagacttcactaataagtcacaccacctcagtctgctcaagaagaaagcaaaggcagaatgcagaaacagcatggcttttagcttctcacacagtgtctggctttctgaggaagtggaagcagaatttctcatatccagtgtcctgcctcagtggtgcaagctgcaacaatgtctgtgccaagtgacagaggaattaggttcttaccagggcagccattaggtacaaattggactttgttggctatttcccatataagcctgaattattccatctgaagattcttttatacttaaatcggctagggattatgttatttgtatcctgaaactctgactgacacctagcctcagagccatataactcaaaataacaaactcacaataattagtccatactgatatgctagatggcactaatttcttctttttcttactaaatttcttaaactgttattttttaacatcatataattcctcttgacctttcttcaactaaattgat

SEQ ID NO: 63414 - DNA, 740 bp, Homo sapiens
atttccgtcgtcccattgccttctgctccctctgtctcctttttacaacgacacttgtgacggcatttagggctcactcagataacgcaggatgatctcctctcaaatttctttctttcttcttctttttttttttttttttttttttgagacagagtcttgctctgtcacccaggctggagtgcaatggtgcgatcttggctcaccgcaacctccacctcctgtgttcaagtgattctccctgcctcagcctctcgagtagctgggattacaggcgccaccaccatgcccggctaacttttgtatttttggtagagacggggttttcatcatgttggccaggctggtctcgaactcctgacctcaggtgaatccacttgyctcggtctctcaaagtgctgcgattacagacgtgagccactgcgcccagcctcaaatttcttaaatacatcagcaatgccctacttcaaaggaggtcaggctccatggattaagacacggacatgcctttagaaggcattattggcctaccacagagtgggtatataaatatcaaaacattaagaaaagtaaactccaaatagtgggtatctttgaagacaaatgaaggagtagtaatctattttgcaaaaaaaaaaaaaagtatattattctgagtagtagttgtggaggtatttgttttgcgataattccttaaggtgtataaattttcttaggacttgaccttacatatatatgtt

SEQ ID NO: 63415 - DNA, 693 bp, Homo sapiens
ccacccatctcccaatgtcacctggggaaatatgacatcctttatgacaacatgctccaggattcatccttcaagaggtcttcagggttgatgtctcctggctttatgctaccacctgcctgtagtcataatcacctttgattctgcagtgcccagatgtctgacattcaatttcctttatattatggcctcaagctacttttctcacattagctccatttacctccatgctttaacctgtactcctgccaagtggtacacagaccatcctgtgcaaatttctctgtccacatctttgcccatgctgtcctcccttacctggagttctctcttccttttgctttctttttccaaccctttccatctttgcgctgacccctgaattccacttcctccatgaaaccttctcaggacaccaaatctagcagtrcactctttctcctctacttagtatctctaaattcctttggcgctcacatctttcctaatggttccccattagaaaagctcgccatctgtttagagagttaagacaaacacaaatgcagagatcagtagccgcatgatttaaacttcattgtacatcccctctgcctgtcctgtgggcctgtgtgaaccaagatttactggggcccatgtactattccctaccggggggagggtcttgtggcagggataactaaattggatccc

SEQ ID NO: 63416 - DNA, 673 bp, Homo sapiens
actgttgcctttcctgagaagccttccctaatctcccaggttaagttgatctttcatttctttgtgatcatggcttgtttccaccatgttattgaccacactgaattttgtattttcatttatgaatctgactccagatctgaattaggattatattcagcagtaagtgacagcaaatcaaaaaagacagtagcttatacagtgtcagtgcttatttccacatagaagtcatgtgcaagtcggcagtgcctggtcaacatggcttccctggcccagggagatggggggcttaccttgttgatccacttcccttaatgcacagcttccacttcctggtccacaatggctattctagctcagcctgttaggtttgccttctgaccagcagagaggagaaacagagggggaaggacacatctccttggtccaaggccacttcctccccagactcaaacttgtaagaacagggttatgttagtttgccaggactgacataaaaaattaccamaaacttgtggcttaacacaacagaaacttattccctcactgttttagaggccaaaagtctaaaatcaaggcatctgcagggccgtgctccctttgaaggctctagggaaggactcattccttgcctttctcccatgctttagtggttgctgacaatccttggtgt

SEQ ID NO: 63417 - DNA, 673 bp, Homo sapiens
actgttgcctttcctgagaagccttccctaatctcccaggttaagttgatctttcatttctttgtgatcatggcttgtttccaccatgttattgaccacactgaattttgtattttcatttatgaatctgactccagatctgaattaggattatattcagcagtaagtgacagcaaatcaaaaaagacagtagcttatacagtgtcagtgcttatttccacatagaagtcatgtgcaagtcggcagtgcctggtcaacatggcttccctggcccagggagatggggggcttaccttgttgatccacttcccttaatgcacagcttccacttcctggtccacaatggctattctagctcagcctgttaggtttgccttctgaccagcagagaggagaaacagagggggaaggacacatctccttggtccaaggccacttcctccccagactcaaacttgtaagaacagggttatgttagtttgccaggactgacataaaaaattaccaaaaacttgtggcttaacacaacagaaacttattccctcactgttttagaggccaraagtctaaaatcaaggcatctgcagggccgtgctccctttgaaggctctagggaaggactcattccttgcctttctcccatgctttagtggttgctgacaatccttggtgt

SEQ ID NO: 63418 - DNA, 598 bp, Homo sapiens
gcagttggtgaaattcaaatgaaatctatacatgagtcaataatactgaatcaatgttaatttcctagtttctatgattgtactatggttacataagatattataagatattcacattaggggaagctggtgaaaggtattcgagaaccttgtacagattttatagtattttgtaagtctaaaataatttcaaaatagaaagttaaaaacaagcataactccttcatctgacctatcttcctgggcatcacttagggtgctgagtgtggcagcatgtgaaattaggtggtctcaagttgacacctccacataaactacttataaacctctcccaggcacatggtcgccataatcacacttggtattatttatacacttgtgcttctccaccattagagtgaggactcttttaagaacaggagccatatcttactcaccctggtacacctgccaacgaatgcttgttgcatgcgttatatatcgtcagygctcaatatgtttggaaatttttccaaagaaaatttcccccaaggctatgttcttatggttaagtctggtcttacttgagaatagtgaataatggaatctacattcacat

SEQ ID NO: 63419 - DNA, 733 bp, Homo sapiens
cactccagagcatctggggaaaagccacctgctcctggattctaggtgtggttccagaagggaccaccatctctgctaagacacacaccatccctgccaggagcatctgtgcagggccaggacaacaccatgacaagaggaagactcaagtccttactctgccccaacaagctcttccaggtctccgggtttcccttttattctttgtgaaatgaaagscttagcttagaatcttgatgctccaagtggggtccaatgaccagcacagggcattaccagggtgctttctggaaatgcagactttccagccccacctcaagactaccacatttagatctgcattttgacaagaactccaagtgattcctgtgagcatgaaagtttaagagacaccaacttacagcatcatctctaggtccttcccaagacctacacgctgtgattcttgaaaggctcaatttccaaacctctggattgagacatctcttagaactgggggaagccaagcttctaatcaggagtggtcagaacgtggagtcacagaaggcgtctgtgaaacccaaagcccttggacaggcaacgctgggaccgggaagcgggcggaggagagcggttcattttttccataggcatgctgtgtgtgccagctgaggtctttaatgtaaaccctcctgtgctccgacctaaacaatgagcgtaattatgggctgtcttacccccttcagacacaggg

SEQ ID NO: 63420 - DNA, 512 bp, Homo sapiens
gatcaagcaataggtaagtttacaatagttgtagaaaactctatctttaaccataagtctgtgaaacttcagaatcatgggagtggcatataataaagcataaaaaggccccatgaagtcattaatttagtctgttcctttgtgattgggcaacaatgactcaratcagaccagttctgtgtcttcattacttgatcgcaaagtgtgtcaaagacctaccctgggtcctgcctaaatactactgtatgtggtttatatcattccttatgaccacctgacactttccttctcctgtgcacataggaagaccatatgtccccatcccccttgcagttgggttagggccatgtggcttagttctggccattagagtttagcagtggtgatatacccattttcagacctaatccttaagagcatccatgagacattccatccctctttttcccttagttgcaactgtggaagccacatgcggaaacaacgaagtgataagatggaagctacctgga

SEQ ID NO: 63421 - DNA, 552 bp, Homo sapiens
aaaaatacaaaaattagccaggtgtggtggcgggtgcctgtaatcccagctactcaggaggctgaggcaggagaatagcttgaacccacgaggcagaggttgcagtgagctgagatcgtgccattgcactccagcctgggcaacaagagtgaaactccatctcaaaagggcatttcttatgcaatgtggctgccaaggcaagggggtctcagaagtaaaaggaatggattttcttccaaaggtgttgctgagtggayagaagagcaaccagctgaaggagaaggagagaccctagccagatcaaaggaatcagaaagccccagcagctaagactcttggaatgtactcttggacagtcatggctagaaatgagaaagagagaaggagtccaccttgcatttgaaggcagatgtttgtctgtggctggtgtgggctgaagcggcttccttttgaaagaaggttgaagtatcgcttgtcttgtataggatataataaattcctcttcaaaggttttagcctgtaaattgttaagtacaatgagttctgagatcc

SEQ ID NO: 63422 - DNA, 1223 bp, Homo sapiens
ttgtgtgcttctctggggaggttgagtttggaaaccatagatttaaaaatagccaggaagtgacttgcaaaaatatcctgaagcaccaaaagagatcttcaagcaaaaggacctcattttctgaagaggttactgtttagcttcaacagtctgaaggcaatgaaatgccagaaatgctggccaacactgggaataataaagtagaagaatttcaacaagttaggaaactggttcttttgtcctaggagtaccaaggaaatcaagacataatgcgtaaagctgaaagtgctgacattgtactttttatttctcttcctgtttgttggaccagtttacaaagaatacagccaagagtttttctttgacaaggttcactaagggaaacacagaawccttccaagagagttttttttgggagggaggtgtgcagaatttcatttctggatccattttctcattaataggtttactatcatccagcgaatgttattggagaaatagattcaataccgtggttcaaaagcatgtttccttcaacctcacagtctgatgagttgcaaaggtatgacactggcaagacttgccagctgtgctggagttgtgtttccatattcatagaaataatctactaacctatggaaaaaaaacccaaaacagcttgcatatatatgtacattattcacaaaaagaaaatgcttctccctggtgtagagcatctgtgttaagggaaaaaatcatggatgctgggtgaataattcctggcttccctactcgatgatgaaactataaggaaagaagcgagaccccagccactctaaccatcccatccatctcagctgggaggctttaaaagcatgatgcatagtgaatgcttatgccaccaagttgttacaagtaaacactactttgacacttactgattggtttctgaataaagtctaatgtccagcctacatatgtgtgctcaataacttgtttctaatgggcactgtttgtttgagattttctgagatgtagagtatggagaaaatctcaaccagttgccatgttatactcactcccagcagcaatggtccctccaacatatgctactggagtgagaatgggtgggcagccaatcccccttaccactaaatcaaggtcctcctggacaagcaggatgttaacttccaaatcacaggaattttcaaacaaataagttgtttgatgaaaatgtgtccaca

SEQ ID NO: 63423 - DNA, 1223 bp, Homo sapiens
ttgtgtgcttctctggggaggttgagtttggaaaccatagatttaaaaatagccaggaagtgacttgcaaaaatatcctgaagcaccaaaagagatcttcaagcaaaaggacctcattttctgaagaggttactgtttagcttcaacagtctgaaggcaatgaaatgccagaaatgctggccaacactgggaataataaagtagaagaatttcaacaagttaggaaactggttcttttgtcctaggagtaccaaggaaatcaagacataatgcgtaaagctgaaagtgctgacattgtactttttatttctcttcctgtttgttggaccagtttacaaagaatacagccaagagtttttctttgacaaggttcactaagggaaacacagaatccttccaagagagttttttttgggagggaggtgtgcagaatttcatttctggatccattttctcattaataggtttactatcatccagcgaatgttattggagaaatagattcaataccgtggttcaaaagcatgtttccttcaacctcacagtctgatgagttgcaaaggtatgacactggcaagacttgccagctgtgctggagttgtgtttccatattcatagaaataatctactaacctatggaaaaaaaacccaaaacagcttgcatatatatgtacattattcacaaaaagaaaatgcttctccctggtgtagagcatctgtgttaagggaaaaaatcatggatgctgggtgaataattcctggcttccctactcgatgatgaaactataaggaaagaagcragaccccagccactctaaccatcccatccatctcagctgggaggctttaaaagcatgatgcatagtgaatgcttatgccaccaagttgttacaagtaaacactactttgacacttactgattggtttctgaataaagtctaatgtccagcctacatatgtgtgctcaataacttgtttctaatgggcactgtttgtttgagattttctgagatgtagagtatggagaaaatctcaaccagttgccatgttatactcactcccagcagcaatggtccctccaacatatgctactggagtgagaatgggtgggcagccaatcccccttaccactaaatcaaggtcctcctggacaagcaggatgttaacttccaaatcacaggaattttcaaacaaataagttgtttgatgaaaatgtgtccaca

SEQ ID NO: 63424 - DNA, 613 bp, Homo sapiens
tgtttccagcttccacttttcctgcataagcttattttgcaacacatacaagcacaaatcatatcatagcaaaccttgcttaaaagctttcagtaattttccactactcctagaataaaaccccatggcctatgagattctccatgatctctctcccctctgcctcttctacaattctcctggccttttgaaaagcaaagccctgatacttctcaaacttgttccctgcctaggccacttgcattcaccattctcagtgcctggaacacttcctctagatccgtaagtggctggctgcatcaccttactcatagctacccctcagcatccatcccattgtcctatgtcattttttataacagtttaatatataaatatgtaaacaaaattattaattttgtacacatctttcttatacactaaggtataagtttcacctatctccagcatgtaaaacagtgtggtggttggaaccattttataaaagaaataataaattcctctgtgcgtgcaaaaagtgatttaaggataacctatacatgcagatttcttcccatttatcttggcattttatttaaaggttaaaataaaaaagcatatraagacatgcagt

SEQ ID NO: 63425 - DNA, 722 bp, Homo sapiens
actctttacttctatttaccagtttattataaacaatgaaattcaggaagagccaggtggaagagatgcttagggcaaagtaggtgcagtgacgggggcagcatgaggtgtccatgccttcccagccccagcacagaagcccattaaatctcattgtccaaagatatttataatacttactcttccctttcctcaggtgggtgggctgaaagttccaatcctctaatcacttggtctttctgttgataagcccccacctgagacaatccaggagatctatcctcagtcatctcattagtacaaactcaagtgtgattgaaaggagctcattatgaacaacagaagaccttcctattgctcagaaaattccaaaggttttaggagctctgtgccaggaagcaggacaaagacaaaatatagtcatgtaccacttcatgacattctgtgtcagcaacagaccacatatgataktggccatatgatatctatggccccataagatagtggagctgacaactagtgacatcatagacatagtaacctcaaagttgttggtactcagtaatccataccccaaaatatggtgctttgacatgctgaactgatggagcctcaaggtctcaatgacctctttaaccccctcaccttgtctcttaaagcacaggataaagttgttaaattcctttatccacctaatgtctggacccaccaaggaaaacagt

SEQ ID NO: 63426 - DNA, 573 bp, Homo sapiens
gatatctcagaacacactgacttaaccaatactgggattcatttactcacattactgtaaaacctagagttgatcagcatctggtcttgtttatctgtgatttttctcagtacctgcctcatccttaggcttgctctctctctctctttttaaaaaaattgtaattgacaataataattttatatatatttatgcagtacaatgtgatgttttgatttatgtttatattatggaacgattaaatcacactaacagatccatctcacatacttatttttttgtggtggaaacatttaaagttcactttttgtaattttgaaatatacaatgcaaggctgggtatggtggcttatgcctgtaatacmaacatcttgggagtctgaggtgggaatattacttaagccaggaattcaagacagcctgggcaacataatgagatcctcacctctccaaaataaaaattttataaattacctgggtgtggtggtatgtacctatagtcccagctacttgggatgctgaggtgggagaatcactttagcccaggagtttgaggctgcagtgagctatgat

SEQ ID NO: 63427 - DNA, 573 bp, Homo sapiens
gatatctcagaacacactgacttaaccaatactgggattcatttactcacattactgtaaaacctagagttgatcagcatctggtcttgtttatctgtgatttttctcagtacctgcctcatccttaggcttgctctctctctctctttttaaaaaaattgtaattgacaataataattttatatatatttatgcagtacaatgtgatgttttgatttatgtttatattatggaacgattaaatcacactaacagatccatctcacatacttatttttttgtggtggaaacatttaaagttcactttttgtaattttgaaatatacaatgcaaggctgggtatggtggcttatgcctgtaatacaaacatcttgggagtctgaggtgggaatattacttaagccaggaattcaagacagcctgggcaacataaygagatcctcacctctccaaaataaaaattttataaattacctgggtgtggtggtatgtacctatagtcccagctacttgggatgctgaggtgggagaatcactttagcccaggagtttgaggctgcagtgagctatgat

SEQ ID NO: 63428 - DNA, 1272 bp, Homo sapiens
caggcagtctgtgagatgtttgatgtccgaggcaaacagcacattcagatccccaagctctacacctccagtgtgaccaggcacctgcaccacttcaggctcatgcaggactcacagcctttggacctcagctaaaggacttgcttctcttcagcacacggggcttgtttgtgttggggtctgagccctgagccatggtcaaggagacccccaggtctttctgaacagagacagctggcctgggggcctccctctcactgcrtgcaagaggctgttagggtgcaagactcaaggcactgagggaggctgtttcaggagggagccccaggagggtggtggagacagaagggggcagcatctgccgagggcctactgtgtgcctggcaccgtgtggggtttctggcccatatgggctaagtgaccctgcacactcctcttaggagaaaggctcagatggagaaattgcagttcaggaaggtaaagcaagctgctagcctgtggccatgttgggatctgggcctcagccttccagccacgaaggcagccaagtgtcatgaagaaggcatcacagaggcaattccaggctgtagtggtgaactttccactctgcatccccgggtgctgtgccctgtgccctgtctaaggtagccctgcgggtttctatatgtttaagttatccccagcatcaatgatgctctcctgtggatcccaagccatggagatgtcctgggacttttcatttttaggtacctaaattgaatttcccaacacatagaagcaagacagctgccctaacagactcttgcatgcagtgagagggaggccgccaggccagctgtctctgttcagaaagacctgggggtctccttgaccatgcgctcagggctcagaccctaacacaaacaagccccgtgtgctgaagagaagcaggtcccttagctgaggtccaaaggctgtgggtcctgcatgagcctgaagtggtgcacgtccctggtcacattggaggtggagagcttggggatctgaatgtgctgtttgccttggatctttatttgtgattcagaaacagtggaataaaaggaaaggaaagaaaacccgaatggccacctcagcaggatgctccaagggtagtgtccaggtggcactgactcagacatgtgggggcttcccccacccatgctcaagagccactttgccatttcaccatctctctgtcctccacacccctcagcagcaagcacaccaagaatgtgttcaccatgaagctcaaat

SEQ ID NO: 63429 - DNA, 1272 bp, Homo sapiens
caggcagtctgtgagatgtttgatgtccgaggcaaacagcacattcagatccccaagctctacacctccagtgtgaccaggcacctgcaccacttcaggctcatgcaggactcacagcctttggacctcagctaaaggacttgcttctcttcagcacacggggcttgtttgtgttggggtctgagccctgagccatggtcaaggagacccccaggtctttctgaacagagacagctggcctgggggcctccctctcactgcatgcaagaggctgttagggtgcaagactcaaggcactgagggaggctgtttcaggagggagccccaggagggtggtggagacagaagggggcagcatctgccgagggcctactgtgtgcctggcaccgtgtggggtttctggcccatatgggctaagtgaccctgcacactcctcttaggagaaaggctcagatggagaaattgcagttcaggaaggtaaagcaagctgctagcctgtggccatgttgggatctgggcctcagccttccagccacgaaggcagccaagtgtcatgaagaaggcatcacagaggcaattccaggctgtagtggtgaactttccactctgcatccccgggtgctgtgccctgtgccctgtctaaggtagccctgygggtttctatatgtttaagttatccccagcatcaatgatgctctcctgtggatcccaagccatggagatgtcctgggacttttcatttttaggtacctaaattgaatttcccaacacatagaagcaagacagctgccctaacagactcttgcatgcagtgagagggaggccgccaggccagctgtctctgttcagaaagacctgggggtctccttgaccatgcgctcagggctcagaccctaacacaaacaagccccgtgtgctgaagagaagcaggtcccttagctgaggtccaaaggctgtgggtcctgcatgagcctgaagtggtgcacgtccctggtcacattggaggtggagagcttggggatctgaatgtgctgtttgccttggatctttatttgtgattcagaaacagtggaataaaaggaaaggaaagaaaacccgaatggccacctcagcaggatgctccaagggtagtgtccaggtggcactgactcagacatgtgggggcttcccccacccatgctcaagagccactttgccatttcaccatctctctgtcctccacacccctcagcagcaagcacaccaagaatgtgttcaccatgaagctcaaat

SEQ ID NO: 63430 - DNA, 1272 bp, Homo sapiens
caggcagtctgtgagatgtttgatgtccgaggcaaacagcacattcagatccccaagctctacacctccagtgtgaccaggcacctgcaccacttcaggctcatgcaggactcacagcctttggacctcagctaaaggacttgcttctcttcagcacacggggcttgtttgtgttggggtctgagccctgagccatggtcaaggagacccccaggtctttctgaacagagacagctggcctgggggcctccctctcactgcatgcaagaggctgttagggtgcaagactcaaggcactgagggaggctgtttcaggagggagccccaggagggtggtggagacagaagggggcagcatctgccgagggcctactgtgtgcctggcaccgtgtggggtttctggcccatatgggctaagtgaccctgcacactcctcttaggagaaaggctcagatggagaaattgcagttcaggaaggtaaagcaagctgctagcctgtggccatgttgggatctgggcctcagccttccagccacgaaggcagccaagtgtcatgaagaaggcatcacagaggcaattccaggctgtagtggtgaactttccactctgcatccccgggtgctgtgccctgtgccctgtctaaggtagccctgcgggtttctatatgtttaarttatccccagcatcaatgatgctctcctgtggatcccaagccatggagatgtcctgggacttttcatttttaggtacctaaattgaatttcccaacacatagaagcaagacagctgccctaacagactcttgcatgcagtgagagggaggccgccaggccagctgtctctgttcagaaagacctgggggtctccttgaccatgcgctcagggctcagaccctaacacaaacaagccccgtgtgctgaagagaagcaggtcccttagctgaggtccaaaggctgtgggtcctgcatgagcctgaagtggtgcacgtccctggtcacattggaggtggagagcttggggatctgaatgtgctgtttgccttggatctttatttgtgattcagaaacagtggaataaaaggaaaggaaagaaaacccgaatggccacctcagcaggatgctccaagggtagtgtccaggtggcactgactcagacatgtgggggcttcccccacccatgctcaagagccactttgccatttcaccatctctctgtcctccacacccctcagcagcaagcacaccaagaatgtgttcaccatgaagctcaaat

SEQ ID NO: 63431 - DNA, 1272 bp, Homo sapiens
caggcagtctgtgagatgtttgatgtccgaggcaaacagcacattcagatccccaagctctacacctccagtgtgaccaggcacctgcaccacttcaggctcatgcaggactcacagcctttggacctcagctaaaggacttgcttctcttcagcacacggggcttgtttgtgttggggtctgagccctgagccatggtcaaggagacccccaggtctttctgaacagagacagctggcctgggggcctccctctcactgcatgcaagaggctgttagggtgcaagactcaaggcactgagggaggctgtttcaggagggagccccaggagggtggtggagacagaagggggcagcatctgccgagggcctactgtgtgcctggcaccgtgtggggtttctggcccatatgggctaagtgaccctgcacactcctcttaggagaaaggctcagatggagaaattgcagttcaggaaggtaaagcaagctgctagcctgtggccatgttgggatctgggcctcagccttccagccacgaaggcagccaagtgtcatgaagaaggcatcacagaggcaattccaggctgtagtggtgaactttccactctgcatccccgggtgctgtgccctgtgccctgtctaaggtagccctgcgggtttctatatgtttaagttatccccagcatcaatgatgctctcctgtggatcccaagccatggagatgtcctgggacttttcatttttaggtacctaaattgaatttcccaacacatagaagcaagacagctgccctaacagactcttgcatgcagtgagagggaggccgccaggccagctrtctctgttcagaaagacctgggggtctccttgaccatgcgctcagggctcagaccctaacacaaacaagccccgtgtgctgaagagaagcaggtcccttagctgaggtccaaaggctgtgggtcctgcatgagcctgaagtggtgcacgtccctggtcacattggaggtggagagcttggggatctgaatgtgctgtttgccttggatctttatttgtgattcagaaacagtggaataaaaggaaaggaaagaaaacccgaatggccacctcagcaggatgctccaagggtagtgtccaggtggcactgactcagacatgtgggggcttcccccacccatgctcaagagccactttgccatttcaccatctctctgtcctccacacccctcagcagcaagcacaccaagaatgtgttcaccatgaagctcaaat

SEQ ID NO: 63432 - DNA, 1272 bp, Homo sapiens
caggcagtctgtgagatgtttgatgtccgaggcaaacagcacattcagatccccaagctctacacctccagtgtgaccaggcacctgcaccacttcaggctcatgcaggactcacagcctttggacctcagctaaaggacttgcttctcttcagcacacggggcttgtttgtgttggggtctgagccctgagccatggtcaaggagacccccaggtctttctgaacagagacagctggcctgggggcctccctctcactgcatgcaagaggctgttagggtgcaagactcaaggcactgagggaggctgtttcaggagggagccccaggagggtggtggagacagaagggggcagcatctgccgagggcctactgtgtgcctggcaccgtgtggggtttctggcccatatgggctaagtgaccctgcacactcctcttaggagaaaggctcagatggagaaattgcagttcaggaaggtaaagcaagctgctagcctgtggccatgttgggatctgggcctcagccttccagccacgaaggcagccaagtgtcatgaagaaggcatcacagaggcaattccaggctgtagtggtgaactttccactctgcatccccgggtgctgtgccctgtgccctgtctaaggtagccctgcgggtttctatatgtttaagttatccccagcatcaatgatgctctcctgtggatcccaagccatggagatgtcctgggacttttcatttttaggtacctaaattgaatttcccaacacatagaagcaagacagctgccctaacagactcttgcatgcagtgagagggaggccgccaggccagctgtctctgttcagaaagacctgggggtctccttgaccatgcgctcagggctcagacccyaacacaaacaagccccgtgtgctgaagagaagcaggtcccttagctgaggtccaaaggctgtgggtcctgcatgagcctgaagtggtgcacgtccctggtcacattggaggtggagagcttggggatctgaatgtgctgtttgccttggatctttatttgtgattcagaaacagtggaataaaaggaaaggaaagaaaacccgaatggccacctcagcaggatgctccaagggtagtgtccaggtggcactgactcagacatgtgggggcttcccccacccatgctcaagagccactttgccatttcaccatctctctgtcctccacacccctcagcagcaagcacaccaagaatgtgttcaccatgaagctcaaat

SEQ ID NO: 63433 - DNA, 712 bp, Homo sapiens
ttttgtggccaccccaggcgtccagatatacacaggagactgtggctggggggcgatctggacagggaagtgctcaccacactctcgactttcatctgggtcatgtgggggatgggctcrgtgtcacagtgtcctgcccagcccacctggccagacctccctctgggccagaacagaggatcatgaggacagtgtgaggaagctgccctcgggccagtcggggtctgaccccagggctccccaggccccgctgggcacacgtagacttactctgctgaaccttaaaggcgattttgttatcggcatgaacgcctgttcgccttctaccagatacacgtcccagaggcgcagggtgagcccgagagagatctgtggggacagcaggtgtgaaagaacctggtccttccaggctggggctggtggctcgagctgcgcacactggggcttcagtctccagagtcagtgaccttccccatgagggtcgcctgagccctccaggacgctgggtcagacaaggtcttgaagctcctcatggggggcactcatttgagtggggatgtggctcctggagagaggggcttgcccagggcttgaggcttccctgagccctctcaagtcgggtcctggcccagtctgcccatgaggctgggcctgagccccagccattgccctgggatgacccctcttgggcagagggttttgcttgtgtgtc

SEQ ID NO: 63434 - DNA, 607 bp, Homo sapiens
gatgtcctctcgctcttgtgcccaccaactacccgcgacctctaccacgtccatcctatgagacaaaattgtctaaaggttacactgtacgcggcggctttggagaacacctgaaccgctctcrccgggctcccagatgctggctggctgcgtaacccccattccaccgccgcccccagggaaaaaggggccagacccagtggcccacagctgctcgagtctctggagtctcaagtcccaagcaggggtgggcatcttcccaaggacttgagtacagtgggacctagacagagaatcctgttgtcccccagtgccatgaaatggggacacaccggccccagcaggttgaatggtttccacctgccaagggtgaagggcccatgatgggctattccagggatgtggaggcagactggggtcagcgaccagaggtctctgtacaatcggcctcctgggatgctcagggcctcagagatgcccagtttcctacagggaacaagatctctcctgactgctcggttctactccgctgatcactttggctaccgtggctcttcagtctgaacagtgaagccactttaggaataacgcctgttgagcaggaggg

SEQ ID NO: 63435 - DNA, 607 bp, Homo sapiens
gatgtcctctcgctcttgtgcccaccaactacccgcgacctctaccacgtccatcctatgagacaaaattgtctaaaggttacactgtacgcggcggctttggagaacacctgaaccgctctcgccgggctcccagatgctggctggctgcgtaacccccattccaccgccgcccccaggkaaaaaggggccagacccagtggcccacagctgctcgagtctctggagtctcaagtcccaagcaggggtgggcatcttcccaaggacttgagtacagtgggacctagacagagaatcctgttgtcccccagtgccatgaaatggggacacaccggccccagcaggttgaatggtttccacctgccaagggtgaagggcccatgatgggctattccagggatgtggaggcagactggggtcagcgaccagaggtctctgtacaatcggcctcctgggatgctcagggcctcagagatgcccagtttcctacagggaacaagatctctcctgactgctcggttctactccgctgatcactttggctaccgtggctcttcagtctgaacagtgaagccactttaggaataacgcctgttgagcaggaggg

SEQ ID NO: 63436 - DNA, 607 bp, Homo sapiens
gatgtcctctcgctcttgtgcccaccaactacccgcgacctctaccacgtccatcctatgagacaaaattgtctaaaggttacactgtacgcggcggctttggagaacacctgaaccgctctcgccgggctcccagatgctggctggctgcgtaacccccattccaccgccgcccccagggaaaaaggggccagacccagtggcccacagctgctcgagtctctggagtctcaagtcccaagcaggggtgggcatcttcccaaggacttgagtacagtgggacctagacagagaatcctgttgtcccccartgccatgaaatggggacacaccggccccagcaggttgaatggtttccacctgccaagggtgaagggcccatgatgggctattccagggatgtggaggcagactggggtcagcgaccagaggtctctgtacaatcggcctcctgggatgctcagggcctcagagatgcccagtttcctacagggaacaagatctctcctgactgctcggttctactccgctgatcactttggctaccgtggctcttcagtctgaacagtgaagccactttaggaataacgcctgttgagcaggaggg

SEQ ID NO: 63437 - DNA, 536 bp, Homo sapiens
aggcatatctttccttctgttagatctttctttagcacaagggttttgtgttaatctaattgagctggatatgagaatttttgtttctgtggttatactctgtgaaccacaggcctcaaattcctctcctggagctggtttaccagagaatttttcttaatatcttctccttgttcaggcttagactttcccactgtgatgaaattcagaaattacatctcttgtagcttgccagcactatttcatgtttacctttactggacacttgttagcctgctgaagtggaatataggagtcatagcacaaaactccattaggaccctttatctcctattcccaacaattctacagattcctttttccctcatagtgggaatagggcaggaattcactctgtcaaccagggtggagtgcagtggtgygatctcagctcactggaacctctacttcccaggctcaagcaatcctcttgcctcagcctcccaagtagggaggcactacaggcatgccaccatgcctggctaatatttgggttt

SEQ ID NO: 63438 - DNA, 536 bp, Homo sapiens
aggcatatctttccttctgttagatctttctttagcacaagggttttgtgttaatctaattgagctggatatgagaatttttgtttctgtggttatactctgtgaaccacaggcctcaaattcctctcctggagctggtttaccagagaatttttcttaatatcttctccttgttcaggcttagactttcccactgtgatgaaattcagaaattacatctcttgtagcttgccagcactatttcatgtttacctttactggacacttgttagcctgctgaagtggaatataggagtcatagcacaaaactccattaggaccctttatctcctattcccaacaattctacagattcctttttccctcatagtgggaatagggcaggaattcactctgtcaaccagggtggagtgcagtggtgtgatctcagctyactggaacctctacttcccaggctcaagcaatcctcttgcctcagcctcccaagtagggaggcactacaggcatgccaccatgcctggctaatatttgggttt

SEQ ID NO: 63439 - DNA, 1027 bp, Homo sapiens
ctccatgtaacttatccccacctagtgattaaaagttaaaatagcaactcatacttggagagaaaagggattttatttatcacacccaaatgatgttttcttggggaaatgatacacggtatatatatgtaggccatgttttttaacatcaggttcaagatgatggctgacaatcctcctgtatccaccctgcatgataattacaagggctggagttaccagaaaggcagaaaaagaatttttaaaaggttgtttctagaagctgctttgaagacctttatgcctcaaatgactaagaattttttgtgtgccttggttttttacagttactttgagtaatgagatttgaaggcaactaatccctgacaaaatcagagacagcatgagagaataagagtcatctgtttaaagttgacacacaggcagggcaaagtttatttattcatttttaaatcctggaaggtgtatgcagaagggaactataatatccgattgtctggaacacaccccatttgaacagctgagtggagtttctgttttttgccacttcttctcatttgttcaggctgcccctgtggaccactgaacaagtaggctagttatagagctgctgggaagttcaggagcctaggtgaaattttggaaaaaggcagtggcataaaataaggtcccagggaacagatgtactactcagaattctgaagctcaaaacactttgttataatagttgttcttaggctttttattatggatgaggataaaagagtggagtaagaatctttgctattactcagtcttcttatttgagttcttctaatactgttaggccacttttgttagatcaattttattcggaagccaacagctaaaatttaggccgggatctgtgggatcatttaaattccatgtaattcatcaatttgaagaaagagttacaataattttcacccaaactattacataaaagattctttataaattaatgrtatgacttggaattcactcttttactttgtcttggttaagc

SEQ ID NO: 63440 - DNA, 531 bp, Homo sapiens
taacaattgttaacctgaccaagaaagccgtgctactttatatggtttagctgtgtccccacccaaatctcatcttgaattgtagtttctataatccctgcatgctgtgggagggacacagtgggaggtaattgaatcacgggaatgattaccctcatgctgttctcgtgataatgagtgagttctcacgagatctgatggttttataaggaggttttccccttttgcttggcayttcccatttctgccttcatgtgaacaacgacatgtttgcttccccttctgccatgattgtaagtttcctgaggcctccctagccatgctgaactgtgagtcaattaaacctcttttctttataaattacccagtctcgggtatctctttattagcagcatgagaatgaactaatacagtaaattggtactgggtagtggggtgctgctgtaaagatacctgaaaatgtggaagcaacattggaagtgggtaacaggcaaaggctggaacaggttggagggctcagaagaagagagg

SEQ ID NO: 63441 - DNA, 480 bp, Homo sapiens
caagacggcttttgaatggaaggtgacccttcgagctaagtcaccttgcttggcatatcagaaaaggaaataactaattatgtgtgggcactaaagaacaacggttgttattttgtgcactaaagatataatgtactaggaacataatactccttgattaaggttttgataaggataaccacttatcttttcctggttaattctgaagacattcttatgtttttctacattatgttcagatacttgcctaactccagtcgctaatacatatagtaaaagattagctctcacaatagttgccataaaatgaaaacaatgacacattctaagagcaattagagagttaagcaatgctctatgaaaatgcagagaargcgtgactttgcctctctgttgcatcattcctgcactattctatatgcgattaaaatttgttttgtaatctagtttattatagtagcagtgctaccattatttgca

SEQ ID NO: 63442 - DNA, 1878 bp, Homo sapiens
tgcatacaaggcgtaatctttcttcccttcaagaaacttttgtacacatctccattgccttttccacttggatttcctgtagcaaagaaacccattcatgatggccgggcgcggtggctcatgcctataatcccagcactttgggaggctgaggcaggccgattacgaggtcaggagtttgagaccagcctggccaacatggtgaaaccccgtctcttctaaaactacaaaaattagctgggtgcggtggcaggcacctgtaatcccagctgctcggtaggctgaggcaggagaatcgcttgaacccaggcagcagaggttacagtgagctgagatagcgccactgcactccagcctgggcgacagagtgagactccatctcaaaaaaaaaaaaaagaaattcattcatgcgtatgggatcaacccatttacagtcttttcacaatgcagctttgggaaaactccatttctttcgtttgtcctggccctcctggtgtacagttactgctatagaaaagtattactggcttcatttcatataaaatattagtaacttccacttatatagtggactaaaaatgtacttgatatttaagtaatctgaactaatgctgcaagcaattatgttttgtaccaccctaaagatctgaaaatacagttaattacaattcgagagtattccctatgtaacttcttgatttctttattccctcccttactcttcttcaagggtttcctttcggtatggaacttttctggcctggggggaaattgaaatgtctcctatataatagtttatggaggtcacgtatatccataacaacaaggttttcatttgctactgtttaagttgacaacttcccttcccaataaaaattcatgtacacctcttgtcttttacttccagtattcaccttaactgtttaatagaagtatcatgttgctgcgaagatacatgcattgctttaggtaaattaaagtgcatatcattacttaataccctagaaagcagaaatacattacacaagtccaattctaaaactttagtacttttctatgcagatttgtgcacatgtgagagggtatccgtttcatttagtgactgctactcagagttggaccagcgttttktgttgctaatgcactgtggtcccaaaaaagccttgcaaaaatgttgtgccctgtgtaatagcagagaagcataaaataaacttatactttataagccgtttactattgctttgtaacaattgcctactcatattttaaggaataggtgagttcactactttctgaagtttatcatagttcccttgtatcttatgcaaagtgtagtaatgatacccatagttctgcattgtgatacccttttctagagaaacccagagatgtaaaaaattgtactacatttctcagagtgttttaacatagatcagcatcacaggctatctattcttcagatataaattatacatgttaagtgttatatggtataaagtggacattttaaagctagaaataaaatggagtgtatgacagaatcctactcgaagaaatgattatagggaaggtactaggtcagacagttccccattctggtcagcaggtggcactagagtagcttggatgccaaatggaacaaagggcaaaaatagatctggatcaaaacaaactttgggtgaaagtgcaggagaggcaggtgactggttgtttacatttcaatatgtcttatctctctttctaaattgttcattgtttgaagtgaggcacacttctaggtacaactaaaagttgtactgaacctttctgtgccttggactcttacctgaaaatggatacaataataatgcctacctcatagcattattgtgagaacaa

SEQ ID NO: 63443 - DNA, 1878 bp, Homo sapiens
tgcatacaaggcgtaatctttcttcccttcaagaaacttttgtacacatctccattgccttttccacttggatttcctgtagcaaagaaacccattcatgatggccgggcgcggtggctcatgcctataatcccagcactttgggaggctgaggcaggccgattacgaggtcaggagtttgagaccagcctggccaacatggtgaaaccccgtctcttctaaaactacaaaaattagctgggtgcggtggcaggcacctgtaatcccagctgctcggtaggctgaggcaggagaatcgcttgaacccaggcagcagaggttacagtgagctgagatagcgccactgcactccagcctgggcgacagagtgagactccatctcaaaaaaaaaaaaaagaaattcattcatgcgtatgggatcaacccatttacagtcttttcacaatgcagctttgggaaaactccatttctttcgtttgtcctggccctcctggtgtacagttactgctatagaaaagtattactggcttcatttcatataaaatattagtaacttccacttatatagtggactaaaaatgtacttgatatttaagtaatctgaactaatgctgcaagcaattatgttttgtaccaccctaaagatctgaaaatacagttaattacaattcgagagtattccctatgtaacttcttgatttctttattccctcccttactcttcttcaagggtttcctttcggtatggaacttttctggcctggggggaaattgaaatgtctcctatataatagtttatggaggtcacgtatatccataacaacaaggttttcatttgctactgtttaagttgacaacttcccttcccaataaaaattcatgtacacctcttgtcttttacttccagtattcaccttaactgtttaatagaagtatcatgttgctgcgaagatacatgcattgctttaggtaaattaaagtgcatatcattacttaataccctagaaagcagaaatacattacacaagtccaattctaaaactttagtacttttctatgcagatttgtgcacatgtgagagggtatccgtttcatttagtgactgctactcagagttggaccagcgttttgtgttgctaatgcactgtggtcccaaaaaagccttgcaaaaatgttgtgccctgtgtaatagcagagaagcataaaataaacttatactttataagccgtttactattgctttgtaacaattgcctactcatattttaaggaataggtgagttcactactttctgaagtttatcatagttcccttgtatcttatgcaaagtgtagtaatgatacccatagttctgcattgtgatacccttttctagagaaacccagagatgtaaaaaattgtactacatttctcagagtgttttaacatagatcagcatcacaggctatctattcttcagatataaattatacatgttaagtgttatatggtataaagtggacattttaaagctagaaataaaatggagtgtatgacagaatcctactcgaagaaatgattatagggaaggtactaggtcagacagttccccattctggtcagcaggtggcactagagtagcttggatgccaaatggaacaaagggyaaaaatagatctggatcaaaacaaactttgggtgaaagtgcaggagaggcaggtgactggttgtttacatttcaatatgtcttatctctctttctaaattgttcattgtttgaagtgaggcacacttctaggtacaactaaaagttgtactgaacctttctgtgccttggactcttacctgaaaatggatacaataataatgcctacctcatagcattattgtgagaacaa

SEQ ID NO: 63444 - DNA, 556 bp, Homo sapiens
tttcaacacaaagcaactgtttttgtgtgaacattttccttatcattccattttarggatatggatgcattttcagtgactagcatgtgataaatgcccaataaatgtttgttagtcaatgaatggcatatagatatttctcaggcaaatgattttttaaaaatcagtatttgggctgggcacagtggctcacacctgtaaccctagcactttgggaggcccaggcgggcggatcacctgaggtcataagttcgagaccagcctggccaacatggcgaaaccctgtctacgtatataaagaagaggtcacacaatgtcaggaaactggctctgattcctgattctggtcctttttctagccaatattttaaaaaatcaaaaactgtacataacagtattaatttagggtttgtcttgaaactatggatgcaacacttaagcaatgactgattagagctgagtagcagccatccactttacaaggtgcaagcacgcacctctcacaccatgtttgcatctgtactttcactgtttcactcatttttgctacctgtcc

SEQ ID NO: 63445 - DNA, 669 bp, Homo sapiens
ctcagccttactcagcctcccaagtagtaagaactataggcaygtgccaccgggcctggctttttttttttttttttttgtagaaaagtctcactatgttgccaaggctggttttgaactcctggcctcaagcaatcctccctcctcagccatccaaagtcctaggattacagctgtgagccaccacacccagccaccacaaggtttttgtatctgctgttctttgcctaaaacactcttccttatggttcactctctcacttcttgcaggtttctttgtttaaatgccattttatcaaatagatcttccctgaccatcctagctacaaatagcaaaatagcaacttgcctcctcccattcttttattcatctttttaccaactacttttttttccaagacacttaacacctgacacacacatttgtttatatccccacatataagtatagtatattatatccccaaatagaagcgctccataagcagtttgttttgttcagtgaggtattcccaacacctagaagagtgcctatcacaggaggtgcctatcacagtaggtgctccttagacacttaagaattgtggactggcagagataaggagctaactttatcatcaagcaaacagactctttatagtataataaagcaataaaggcatgaaggct

SEQ ID NO: 63446 - DNA, 969 bp, Homo sapiens
atattttagtgataattgtgataattaattacaaaataattgctaataagcaggtaaataarccaaattataatttagagtgcatcctttgtttaaagtgaaatggatctaaattgaggatataattttgagttttaatctggggaaagttctttaacttttctgagctacagtctcttcacctggagcttagacacaccagcctggcaggggtatgtcagctgtctgcttgaaaggagaaagacagtaatctgtgtgaaatactcaccgagcacccaacatataagcaggctcttcataaataaagtcattttgaagtatccacaagtatttcttttttctaaacaaaatttctttgttttttgtttgttttgctttgcaaaggtcttgcttgctagaaagctatctgcattaagctgcttctcatcacattataaaactaaggatgatcatttttaaacaaacaaaagtatttagttatcttttcaaagtaaaatatagctttccctaaactgttttaggtgagccatgcacacaatgtgaaagaatgaagaaaccaacaaaacacttggtgaaaatgatgaattctggggcgctgattcatgtgacttgaaaaatgccatccatttcctgattcacctcaattctgttcggaactatgaaagatcatttatgtttctgcactaattgaccaattttgtcttgtctttacttccctccctagtgcttgaatttcagccacatccctaagctgccatctcagaccagaggaacagggaggggggctttctggaaagaacatcacctggaagaaatcaggacatgactgtgggccatgagtgaccttcaaaggaaagccgggtatctgtggtctttaagatgtggtaagattgtattaaaattatagaaaaaaacctcaatccagaaatcgtggcctcttgacatttacatcttaactgcattttccta

SEQ ID NO: 63447 - DNA, 571 bp, Homo sapiens
aaattgctaatatttaaaatagttgcaggcaaattacccaatttaaagtatcattaaagttgatatatttaaggacacgtgtcataacccktacaggcttttttttgagacagagtctcactttgtcatgtaggctggagtgcagtggcacaagcagggctccctacatccttggcctttcaggcccaaacaatcctcctgcctcagcctcctgagtagctggaactacagatgtgcaccaccacgctcgactactttttgtatttttttgtagagatgacgttttgccatattgccctggctggtctcaaactcctgagctcaagccacctgccagcctcagcctcccaaaatagtaggattacaggcatgagtcacctcacccggtttcttacaggcttttaataagagcatcattgtgaatacatgtctaaaatacattgtatttttaaatatgtttgaatctaccttttgcttattcttaattgtaaatgtgataaatgcaaagtcaaggaggatatcatagtaagattctcttcatatgtctgagtatttttgattaagaggatgt

SEQ ID NO: 63448 - DNA, 577 bp, Homo sapiens
tgaggtataagtgaattgttcagtagaatataattttgagttgytacttttataagtgtttaagccaatctgattgttgacataaagcaaattaaatatacacatacacacacacacacacacactcacagtgtatagtagacttaaaatatataactttttatttgttgtgttgtttgatatacttgtcattatttttataatttcattttgcatttacaaaatttattttttgtctcttttcctgacatttattaggctgacataatttctactttcctacatttcttttttctttgtaaaattaaacatcctatttttcttctcagcaattgcaattacaataacatatgtctagatgtgaatgtatcttttatccaatgcaacattaatctctgtattaaaacctagaacagtattcaccaccatttatgtctttgagtactccctcttgcattctctatataaataagaatgcctaggatgaaagccagaaactttttataatctaacttcagaagtgacatcccatcatttctgtggtgttatatattctccaaaagtgactcaaatacat

SEQ ID NO: 63449 - DNA, 577 bp, Homo sapiens
tgaggtataagtgaattgttcagtagaatataattttgagttgctacttttataagtgtttaagccaatctgattgttgacataaagcaaattaaatatacacatacacacacacacacacacactcacagtgtatagtagacttaaaatatataactttttatttgttgtgttgyttgatatacttgtcattatttttataatttcattttgcatttacaaaatttattttttgtctcttttcctgacatttattaggctgacataatttctactttcctacatttcttttttctttgtaaaattaaacatcctatttttcttctcagcaattgcaattacaataacatatgtctagatgtgaatgtatcttttatccaatgcaacattaatctctgtattaaaacctagaacagtattcaccaccatttatgtctttgagtactccctcttgcattctctatataaataagaatgcctaggatgaaagccagaaactttttataatctaacttcagaagtgacatcccatcatttctgtggtgttatatattctccaaaagtgactcaaatacat

SEQ ID NO: 63450 - DNA, 1063 bp, Homo sapiens
atttctataggaaatagtctgtaaacttatctacacttacacacataccttgatgtgacaagtatggaagtcatcattgtattcataaaaccttacaatttaaaaagtttaatcttcgatactgacttagaaccaagtgcttaggtgagttatgtaagtgacagaatgatttgacttttttttggtcagaaatataatgaattggattcatccagtagcggsttcttattaaacacatatttgtagttgatatttagaaatatattatgaagtccctagattcctgactttggattgcttaaccaactcaagttctctgactacatatatgtaaaatcttctatactgcctcagaaaaacagaagaaacaaagacaatagacattatgttgataagatgtctaatctatgctaaaatctttccactttattttgccttcacaaaaactctattaggcaaatcttattatttccattatactgataaggaaactgaggtatggaataattgaagagcttgcatattgtattactaataagtcaaagaattgaaattcagttcccaccctggctgactactgtactgaaattacagaataaaattgcagttgcttagaaccagataacaatcaatgcagatgaattttttttgcttttaatagaaggcaattgtatgtaataaataaaattttcaatattaatgttatgaaagattgacttaaaatgacaatttttagaaaggccatatactatgaacaagataggggtagaaaaaacaaaagttatccatgggtaaacttgaacaattttgagaaagaaaatggctcatcaaagatgactttccatcttgtatctccattaactttctctccgacacacaggattaaacatatttggcaggaacttttaatgatggctggtagagaacagatgatattatttattatgtgaattatacaatttagagagatggcatactggggctatttcataaatgtccagtttgggaaagtgaagtctagatacttgaagcatggttattttttgccaatgtcatactgaaa

SEQ ID NO: 63451 - DNA, 654 bp, Homo sapiens
attgctaggacatgggtcaacctaaatgtacacaattgtatattctttggagaagtagctcctccagtgttcaggtgggcctccctttctggggtaaaggtagcaggaagaaagacacgtccattgtttcggctgacattggcactgcaatagatactatacattgtctatttcctctgctatctaaccagatgcttctcagcttcagctaacaacttctttgtctcacttcagactctgaatcaaaccatcaatcttgaggtacaggagacactgattatcatgtcattttcagagtagaattcctgaacaaatctgtttagcaacacagtcgggcagggaagtacaaaaggactacaaggtgcactatctatgtttcattatattaccaatgctaccatgttttaacagtagtttcttctctttatgatgatcaggatcacttttacrtataagaacattttcttattgcctacttgtccctgaacataaggaacccacagcatcttccagaaagctataaagttcaatgggtctcttttgttttctggtggaagtttttccccttttatgggccccaactcgaaaaatctagaacgcatgttggaggacagaaagtacacattatcccagtgaaacctggagagtgatctt

SEQ ID NO: 63452 - DNA, 1177 bp, Homo sapiens
caaggcagcccaggatgcgggaccagtgccattccttcccaccgcatgagagtgccagagggggtgaagggtggagtggccctttcagcacaccacgtggtccatattttatcatctgtcacaggcagtgccacctgcattgctttcatcgaaggcaccagaccaataccatgaccacacactgtcactctggagtgccaccccaaattgaccccagagccagcccctcaatatgccaacattcaactcaaatattccaaaccgggcataatcaaaattgttccttttttggttatggctttgtgacagtcagactctacattttcacagaatcaggagaaaaggagagcacaggttacatctattgtttgtttgttttctgagatggagtcttgctctgtagcccaggctggagtgcaggggcaccatctcggctcactgtagcctccgcctcctgggttcaagcaatcctcccacctcagcctcctgagtagctgggactagaggcacacatcaccacacccagttaatttttgtatttttttagtagagacggggtttcaccatgttggccaggctggtcttgaacgaccccaagtgatccacccacctcagcctcacaaagtcctgggattacagrtgtgagcaaccatgcccagccacttctattgttttttaaggaattcttaaaggctgaaaagagacattttaacatatgccccaaataatattctctgcagtctccactgccacagaaaaacctactgtaaggacctcttgcctgctaaaagttcactgacatgccagtcatctgagacccaagaccacattttcgtatacaaacaacatgacaaaactgcagttaaattccaaggcagctcacaaaaagccatttaacccacctcgctcctaaagtcggactgggcactccagagccacccaccagccagcagggccagtgacggctcagggcatccatgctggctgcaagggtaaatgagtcctgtggggctgtgaccctgtagaagacttaaaatcagggacaaatgtagaaaaaaaatcaaggagcaaaataatttcttataaaaatagacagcagatggaaatcacttttcaactccccctttcaaggattaaggaaaggtgacctgtgctgggctggcttgatgagacaagc

SEQ ID NO: 63453 - DNA, 542 bp, Homo sapiens
agcacaccagtggtgtaatcctgtctccctctkcccccatctttatgtctctctgacctctgctttcttctacatctgctttattctcaggcagcctttcttgctggcaaagatagcccctggcaactccagaaattcattatcctaagtataatgagatcctgagatctcttaaaaaagaaatcctctctctcccagtctccatagcaatccttcaattattcagttggtccatgcccaccactggatcaatattatgcccagagattaaaggttttatttgcagctgtctggtttacaggtgaacccaaggctgcactaagaatctaggaggtgtgttcttaaagattttagggacatcccctaaagatgttatgcatactttataccatgagctatgggaacacataacagggcaaatatcctgctgtagggcatcaggagagacttattagaggaagctgatgtgaagattgagtaatcattcttttttttccctttagaaacagaatctcacttgttgcccaggctggagtacagtg

SEQ ID NO: 63454 - DNA, 445 bp, Homo sapiens
tgttcaggtacagtaacaaccatttgactacctttagccaccatgctgctctttgagtgaactatgtctttgctacatgaacaactaagatctgctttaatctttacttccttaaagagacctcaaccaaaggctcaccagaatgcaggatttatatcaagcatatttaacagccaatatggcacaggcatcaaccaatcaaaacaggtgctgagctataagcaatggttcagttgaaattgtgctcaccaactgactctcagccctgctggtygggatcaggtagtctctattcatccaagagacagtatccgatatctactgcaagacaaccagatagtcctctgggcaagtggctctcagtggaggctgattttgccttccaggggacattggcaatgtctgaagacatttttggttgtggtatctgctgggtagaggccag

SEQ ID NO: 63455 - DNA, 614 bp, Homo sapiens
ggtctttttataaaaaagcccacttaacattacaatgaaaattatagaatccgggtttttaattctcagtcccaagaatgatcagagaattgggacgtttatgtgaacgtcctcagaaatctatgtcttacatccacagcgttgatgtagtcaaaaagcacaggcagaggcaaaccttagcacacatacactgcaatgaaggtttaattctcaacctcagagcatctcttgtttgaaggttgtgaaagttagggtattgactggaaaaattggaaccctgagaaatagaattacaaaattttgttgagtatagaagactgaatttacctctaagccctgaaacccatgaggcctccctagcttcatcttatgaaatgggtcctctcagctagaagacaggtactgatctcactggaggtcatgacttgcaaagaaacaccatttctcttggagccctatttctctacctgtcatagcctccataccaaaactgagccagaccctccataccaaaactgagccaacattcctcagargaccacttggaaaatcaaacttgaaagggaaggttcagtccctaaagagatggcaaagatttatttatattagaaaaa

SEQ ID NO: 63456 - DNA, 2472 bp, Homo sapiens
tttttacaaatagtagaccatctgatataacatttgagcaaaacaagatctttataaccctttttactacagggagttaactacagtactcttgactagaatttcattcaacaaatgttaggcttgactctaagcttggtatggtgcccagtgctggagaccgtggtgagacagacagacatggcttctgcccctgctgatgagtaaattacagtgtgggatgtagaagcatggagatgacccctgaacctggacctgggggtcagggaagatgttccggtgaaagtaacatctaagctaatgcttaaagattaggtagatgttaactgctcactgccaggaggaagaggtgcatgagagcagtcaaagtgactgctggggtcagtgctagtccccatggctactatcccccttcctgtcatgcctgcccccagtgctgaccatcactggccccacctcattgcttctgtattctgcatcatcattgtcatcaccatcacctgcttccgtttggcacctacacatacgctgctcccacaacagacttcttccctgtccctggggaatcctatttcctttacagcaggggttctcaactccccaaggaacagtaccagtttgtggcctgttaggaactgagccacacggcagaaggtgagtggcgggtgagcaagcgaagcttcatctgtatttacagccactccccaccactcgcattactacctgagctcttcctcctgtcaggtatccagcggcattagattctcacaggagcacaaaccctattgtgaactgcacatgtaagggatcccggttgcatgctccttatgaggatctaatgtctgatatctgtcactgtctcccatcaccccctgatgggaccatctagttgcaggaaaacaagctcagggctcccactgattctacatgatggtgagttgtataattgtttcatcatatattacaatgtaataataatagaaataaagtgcacaataagtgtaatgtgcttgaatcatcctgaaaccatccccccaccaccccacccagtccatggaaaaattgtcttccatgaaaccagtccctggtgccaaaaaggttggggaccrctgctttgcaggcacgtttcccccactcttcttccattctttctcccaggcatagttagaccatatcctcctccatgaagacttctgtatgcatccaagaagagttagtacctccctcatttgaattccaaaaatgatggtaatcctcaccaaccccacacaagagcagctcacattcattggacatttgctatgaccctggcaccatggggctcattatgtgaactatggctcacagcaatcagatgcggagggttctcttactaacacagcccccaggccccatagtgcacaagtggggaagccggaattcaaacccaagccctctgaccccacagccatgctcagaacccctgtgcactgcctggctccctgctggaacacttctaccctaaagcacagccactcctgtggctctgactctgatccactggcctcttagctccttgaagcaagggttgggtttctcatctttagaatcctacaacactgtagtggattccctaggagagccggagagtgtggttcttgaggtgatttattgagggagggctctcaggagaactataagaaactaagggaagcaagatagggccagaagaaaactaggggaagatgtgatttcagaagtctcacctctgcctgatcccgtggggagctttggagtgtaaattacatcacagtttgtcccactcagagacaaggaggctgggctctcatagctgccacccctatcagtcactccttcctataagtcataccctaatgagagggaaggcagctcagggtgagtgagacatctcccatcaggccagggcaatgctccagaggaaggtacagccacacccacagcacctgggggcatcaccctaatgaagtgcactggcagcatctgctgcagtcatcagttttaaaaaaatattaaacagcatatgcaggcccttcttgtccagctgatttcatcctctgtagtggacactcccagaagccaagtctaatgaatcaatgaattagaaatcaatgtgtctcctgcagggctgcccacccctgccaccttttcccacaagactacactgcgcagacttcaatgggtgtccagcatccaccatcccatctgcaaagatcatggaagctgcaacacagaacattaactgaaatacaagcttgttcatcagggttttattttagcgccacactgcttccagtgaagaaaggacaggaaagaagtatggtggattgtttttttaactttgtagcacaaaagattgtggtgatccttccccaagagttgaaaataaaacatgaggagggaaaccactgcccccaaagccagtgctgctgatgagcaggtgtctgacatgca

SEQ ID NO: 63457 - DNA, 2767 bp, Homo sapiens
  misc_feature (1)...(2767): n = A,T,C or G
acggtgtcccctctttacataccctattgcacagggtcttatacatgcagcccaagctcaacagatgtttggttgattgaatgaatggatggatgcatggatggatggatggatggatggatggatggatggatggatggrtggatggatggatggatgtgtggaatgttgaatgagaacagttgaatagcatagagggtaatctgactattctgcaccttgtctgtcaacctgggataaagagtggcgatgggaaagcatggagaattcacagagtatggaaaagctcttttcatttttggcttgagcttccatttgacttgttccagaccagatgtctctagctgactttacctctggctgaaaccactccattaggggcagagaacgcatgttgggctgggtgctaacaaatctcccgggaagctccttaaaataaagattcctgaaccttgtcctctgacagattacaattcagcaggtctcaggagttagatttttaacagccttcccaggcaattctaatgggcagccagatttaggagctgccgtgggtaggaatggcagcatgacagctgaggatggagctgataattaatatggggctatcactgcagccttaacagctagggacagtgaaaatcagccgaggacaattctgaacacttatgaaatcactccaggtcagcagagacgcctggcgaggctttgccggctcgctgccccacataatagcactcacccatccagcctttgcacccctgtgggatgtgctgcataaagagaaaacaaatgggaatttctgtaatggaaaaatacaaagctgtagagggtcttcatacctgaggaaaaacaacacctcagttgacaatgctacctggacaattgggaagtaagaggtctttctggaaatcaatagaggaaggcagagcgccctccgtgcttgccccttgagccacaggagacagtgaaacatttactgtaatgaggactttacgttattaaaaccagaaaacctgctccaaaatatggannnnnnnnnnnnnnnnnnnnnnnnnnnnnnnnnnnnnnnnnnnnnnnnnnnnnnnnnnnnnnnnnnnnnnnnnnnnnnnnnnnnnnnnnnnnnnnnnnnntaaatatattgtaaagaatgtctttttgtttttccagaattatatctttgggattttggtctttcacaatttcggcagtcaggattttggcattcaggattatgattggctcccatataggatgaatcttcagcgttagttaaattgcagttccctcggtgcaatgcagggagctatttaataattttgattatttatattggtaacgtacatgagggaacatgatttggggtaaatgaagcaccatttggatgataaagtctgaactgtttttctaggccgagaaatccgtctgcccctccgaatcaaaggggaaggcatgggacctaagattcacttcaactttgaattgctggatattgggaaagttttcactggatctgcacattgttatgaggtaagcactagagttgttcattgatacttcaaacagtacttggcttttggggtttgttttatatgtttttatttgatggaaagagtatgcaatcacatttattcgccgttactcatccttgttgagaccctggagtgctcagattcttcctcctcctgcctggccatcatgaggggaacaacttttttatcttcattagccctccttcactttagtgaaagctaaaaagcatcaaagccatagtttcactggttttatcctcattgttttgtagattgcaaagggaaaactcataaatacatctccccatctgtttagtgcttgttctctgacaacataaattccacagatcagaggatagataaccttttacattttctagaacgtcctaatgagcatagctgttttcacatttcagaattttctcttaatgcactagtctccaatccatgttttaaaaaccaatcagtttctggaagagactttcctgcttcatctttccaattaattagaaaatgaaattttacaggatgtatgcatgagttattcaggatcagtgttacttcagtgtctccccatcactaaatttgtatctagggcacattttttacattacgtcagactataacccttgaaacttcattttgggaaagttccttcattgtatatgtttgtatttttatagaggtattttaaacaattatttaatgagtgacaaataggtgccagattcagattcatactttattgtgtgtgcatgtctatgtgtgtgtgtgtgtgtgtgtgatttctaatccttaccaaattgtgaaagttaggctttattacatctattttgcatatgagaaatgtggatcgtgtagtagttaatatcatacacatctcccttaatgtgtgttgagcacagtgctagtgctttgaccttcactcgttcatttagtcctcacaaaaacccaatttgtatcctagcactttgggaggccaaggcagtggatcacttgaggtcaggagttcaagaccagcctggccaatatggtgaaattcaatcactactaaaaatacaaaaattaccagggcatgttggcaggcacctgtaatcccaactacttggaagactgaagcaggagaatcacttgaactcaggaggtggaggttacagtgagccaagatcgcgccactgcactccagcctgggcaacagagtgagactctgtctcaaaaaaaacaaaaaacaaaaa

SEQ ID NO: 63458 - DNA, 2767 bp, Homo sapiens
  misc_feature (1)...(2767): n = A,T,C or G
acggtgtcccctctttacataccctattgcacagggtcttatacatgcagcccaagctcaacagatgtttggttgattgaatgaatggatggatgcatggatggatggatggatggatggatggatggatggatggatggatggatggatggatggatgtgtggaatgttgaatgagaacagttgaatagcatagagggtaatctgactattctgcaccttgtctgtcaacctgggataaagagtggcgatgggaaagcatggagaattcacagagtatggaaaagctcttttcatttttggcttgagcttccatttgacttgttccagaccagatgtctctagctgactttacctctggctgaaaccactccattaggggcagagaacgcatgttgggctgggtgctaacaaatctcccgggaagctccttaaaataaagattcctgaaccttgtcctctgacagattacaattcagcaggtctcaggagttagatttttaacagccttcccaggcaattctaatgggcagccagatttaggagctgccgtgggtaggaatggcagcatgacagctgagratggagctgataattaatatggggctatcactgcagccttaacagctagggacagtgaaaatcagccgaggacaattctgaacacttatgaaatcactccaggtcagcagagacgcctggcgaggctttgccggctcgctgccccacataatagcactcacccatccagcctttgcacccctgtgggatgtgctgcataaagagaaaacaaatgggaatttctgtaatggaaaaatacaaagctgtagagggtcttcatacctgaggaaaaacaacacctcagttgacaatgctacctggacaattgggaagtaagaggtctttctggaaatcaatagaggaaggcagagcgccctccgtgcttgccccttgagccacaggagacagtgaaacatttactgtaatgaggactttacgttattaaaaccagaaaacctgctccaaaatatggannnnnnnnnnnnnnnnnnnnnnnnnnnnnnnnnnnnnnnnnnnnnnnnnnnnnnnnnnnnnnnnnnnnnnnnnnnnnnnnnnnnnnnnnnnnnnnnnnnntaaatatattgtaaagaatgtctttttgtttttccagaattatatctttgggattttggtctttcacaatttcggcagtcaggattttggcattcaggattatgattggctcccatataggatgaatcttcagcgttagttaaattgcagttccctcggtgcaatgcagggagctatttaataattttgattatttatattggtaacgtacatgagggaacatgatttggggtaaatgaagcaccatttggatgataaagtctgaactgtttttctaggccgagaaatccgtctgcccctccgaatcaaaggggaaggcatgggacctaagattcacttcaactttgaattgctggatattgggaaagttttcactggatctgcacattgttatgaggtaagcactagagttgttcattgatacttcaaacagtacttggcttttggggtttgttttatatgtttttatttgatggaaagagtatgcaatcacatttattcgccgttactcatccttgttgagaccctggagtgctcagattcttcctcctcctgcctggccatcatgaggggaacaacttttttatcttcattagccctccttcactttagtgaaagctaaaaagcatcaaagccatagtttcactggttttatcctcattgttttgtagattgcaaagggaaaactcataaatacatctccccatctgtttagtgcttgttctctgacaacataaattccacagatcagaggatagataaccttttacattttctagaacgtcctaatgagcatagctgttttcacatttcagaattttctcttaatgcactagtctccaatccatgttttaaaaaccaatcagtttctggaagagactttcctgcttcatctttccaattaattagaaaatgaaattttacaggatgtatgcatgagttattcaggatcagtgttacttcagtgtctccccatcactaaatttgtatctagggcacattttttacattacgtcagactataacccttgaaacttcattttgggaaagttccttcattgtatatgtttgtatttttatagaggtattttaaacaattatttaatgagtgacaaataggtgccagattcagattcatactttattgtgtgtgcatgtctatgtgtgtgtgtgtgtgtgtgtgatttctaatccttaccaaattgtgaaagttaggctttattacatctattttgcatatgagaaatgtggatcgtgtagtagttaatatcatacacatctcccttaatgtgtgttgagcacagtgctagtgctttgaccttcactcgttcatttagtcctcacaaaaacccaatttgtatcctagcactttgggaggccaaggcagtggatcacttgaggtcaggagttcaagaccagcctggccaatatggtgaaattcaatcactactaaaaatacaaaaattaccagggcatgttggcaggcacctgtaatcccaactacttggaagactgaagcaggagaatcacttgaactcaggaggtggaggttacagtgagccaagatcgcgccactgcactccagcctgggcaacagagtgagactctgtctcaaaaaaaacaaaaaacaaaaa

SEQ ID NO: 63459 - DNA, 1243 bp, Homo sapiens
cctctattaatgaccatatcattagaagctttggttgtaagcaacggtaatcctgactcaaacttacaaaaaaaaaaaagaaaagaaaaccagaatttgttggttcatgcatctggaaagtctaggttcaggcttcaggcacagcttgatccaggacttgaataacatcacctgcacctagtgtctcttccatcatccctcggctctgccctctgccatattacctccattctcagtcgggtcctataygcacatggttgcaagatgactcagcagctccagctcttcatatgccaggttcaagtctagtgggaggaagtagagtcctaggaaattttttgctgtaactcactggcactggttgaatcctgtgtccctcaactatggtctggggaactcactgctactcctgagccaggctgaatgtcagagataggctagttcccagagggaaatggaaggtacctgaccaaagaaagggagaatggatgctgggcagcaaagaacaaagattccaccttcatgactgatcaggctcattgcatttctcttgctagtcctaagccaaagagatggacatctaattgtgaaattaggtaccacctgcatggaagggtatttgaggaacaagaccaccttaccaatgccctgagacctgataagctggtttactcctcaggcactgtggaaaagcaactcacaaccagacttcattcccagaatagccccgtcaccatgcagccctaagcaccagctgtgcaggcaccttcccgttttctgtatgaaaggcaacctgcctatttttgaagccttagagtaagaccatcggtacagtgtgaacagttcacatctttacattgggaaaatctcttttaacagctttccagaccacaaagaatatgtccaagtaggaaatatttcctgtagatagatgtatatggccaaatcttcaacatggagctattgggagcaatgaaaggaagctgccgtaatcttgaccaatagcagtaactatgattgagtacccaccatgtgccaggcatcattctaactcattacgtgtcatacagcaaccccagagagtgaggatgaatacccgcttttagggatccaggcacctgagcccacacagcagatcccagaccccatttgtttttgttactcatttcaactttgattttaaattcaggggatacatgtgcagatttgttacaatattgcatgaggctaaagtttggggtat

SEQ ID NO: 63460 - DNA, 692 bp, Homo sapiens
agtatggtgttctttacccaaacgtttatggatgaactaaaactttgttaccatatagggtgttatcaaaactcatttccttgggttttgttctgtccatctggacagggaaataaagctttttagaattcttcaaaggcagtagaacatcccaattctgactccaaactcctttcagtaaggtaacctamagatcacagtagaaatcagagctcatagaccccatatgtggctgcctgcactgccccagtgtgacaagactcaaatgatctggacaacagtgtacccctgtgaaagcacttacccagggagatggcgattggtcttcttgaagctctcataaagcatgagttttccaatgactgatatttcagtcatgttgcaaatgggaaaaaatgtgtaagtatattacataatgaagatgtggcacataagctcatttatttatgaatcacctctatccaggaaagcaccagttagaaatcctgatcttttgggtttttttgtttttgtttttgttttttttattattatactttaagttttagggtacatgtgcacaatgtgcaggttagttacatatgtatacatgtgacatgctggtgtgctgcacccactaactcgtcatctaacattaggtatatctcccagtgctatccctcccccctccccccaccccacaacagtcccca

SEQ ID NO: 63461 - DNA, 692 bp, Homo sapiens
agtatggtgttctttacccaaacgtttatggatgaactaaaactttgttaccatatagggtgttatcaaaactcatttccttgggttttgttctgtccatctggacagggaaataaagctttttagaattcttcaaaggcagtagaacatcccaattctgactccaaactcctttcagtaaggtaacctaaagatcacagtagaaatcagagctcatagaccccatatgtggctgcctgcactgccccagtgtgacaagactcaaatgatctggacaacagtgtmcccctgtgaaagcacttacccagggagatggcgattggtcttcttgaagctctcataaagcatgagttttccaatgactgatatttcagtcatgttgcaaatgggaaaaaatgtgtaagtatattacataatgaagatgtggcacataagctcatttatttatgaatcacctctatccaggaaagcaccagttagaaatcctgatcttttgggtttttttgtttttgtttttgttttttttattattatactttaagttttagggtacatgtgcacaatgtgcaggttagttacatatgtatacatgtgacatgctggtgtgctgcacccactaactcgtcatctaacattaggtatatctcccagtgctatccctcccccctccccccaccccacaacagtcccca

SEQ ID NO: 63462 - DNA, 692 bp, Homo sapiens
agtatggtgttctttacccaaacgtttatggatgaactaaaactttgttaccatatagggtgttatcaaaactcatttccttgggttttgttctgtccatctggacagggaaataaagctttttagaattcttcaaaggcagtagaacatcccaattctgactccaaactcctttcagtaaggtaacctaaagatcacagtagaaatcagagctcatagaccccatatgtggctgcctgcactgccccagtgtgacaagactcaaatgatctggacaacagtgtacccctgtgaaagcacttacccagggagatggcgattggtcttcttgaagctctcataaagcatgagttttccaatgactgatatttcagtcatgttgcaaatgggaaaaaatgtgtaagtatattacataatgaagatgtggcmcataagctcatttatttatgaatcacctctatccaggaaagcaccagttagaaatcctgatcttttgggtttttttgtttttgtttttgttttttttattattatactttaagttttagggtacatgtgcacaatgtgcaggttagttacatatgtatacatgtgacatgctggtgtgctgcacccactaactcgtcatctaacattaggtatatctcccagtgctatccctcccccctccccccaccccacaacagtcccca

SEQ ID NO: 63463 - DNA, 692 bp, Homo sapiens
agtatggtgttctttacccaaacgtttatggatgaactaaaactttgttaccatatagggtgttatcaaaactcatttccttgggttttgttctgtccatctggacagggaaataaagctttttagaattcttcaaaggcagtagaacatcccaattctgactccaaactcctttcagtaaggtaacctaaagatcacagtagaaatcagagctcatagaccccatatgtggctgcctgcactgccccagtgtgacaagactcaaatgatctggacaacagtgtacccctgtgaaagcacttacccagggagatggcgattggtcttcttgaagctctcataaagcatgagttttccaatgactgatatttcagtcatgttgcaaatgggaaaaaatgtgtaagtatattacataatgaagatgtggcacataagctcatttatttatraatcacctctatccaggaaagcaccagttagaaatcctgatcttttgggtttttttgtttttgtttttgttttttttattattatactttaagttttagggtacatgtgcacaatgtgcaggttagttacatatgtatacatgtgacatgctggtgtgctgcacccactaactcgtcatctaacattaggtatatctcccagtgctatccctcccccctccccccaccccacaacagtcccca

SEQ ID NO: 63464 - DNA, 1497 bp, Homo sapiens
ggcatcctcaacaatttgcaggccttttgcatgcttgatctctcttgtgcatatcaagtttgttcctatcaccaccccaccctcatctcaattctcaggggtccagttcctctgagtccttccctaaattcccactagtgcaccaaacccaggggccctccccacattcctctgccctcaggctgcagcttctgctctcccaagtccccccagagggtttcagaggtcagcgaacaggtgtctggccacactactcccctctacggggccaagaaaagggattgcttggggtcgggttccctttcctgagaacttccgcattgaccccataatgacctcagtgaccagaggaaggaatccttaggggctgcactgagtcctagctctaaaataagaggggaaagggagcagacccccagaggagagcccacctcctgagaggtcagaggctggaggccgagagggagctcatgggcgggcagaaagagaaagggggtgctgaagccggggagccctgcgaggggctgcgaccgcacctccacctgcgattggttctcaggctcagggcaaacgccaaacctgcccagcaacagccctgagcagagggaggggagcttcggggaagtcagctgagccggcaccgcccagctctgggcttccaggaatcgctgggagggccccagcctccaccccacccctccctgggtctcaggactctgccttcggccttctatacctactgggcgggctcggatcccgtttccctggccccccacatctgtgattccctgctgaggcctctttaggctcagcagagacgttggaactgggctttccttgtggccccctttcctcgctccctgccctgggctgacgtcagttttatcttccttctccattcccttttgcctccttccccactcgctctcctcttaagatgtccamattcttccttctcagccactttcaacccagagaaagcccgagtcccaaagcaacaggaagatgtgcgggggaccgcgagtgtggggacatcctgccgcctcgggcaactctgtcgtcccccacagggttcaggtgctcagaaaacagcagccactgagttcactgtttccgcaggccccgtattcccggccgtgctcagctgggcttgtggagtcgcgagcgggggcgctcctgcggcaccgcccctcctgggcagcccggcttccaggagagactcggcctcagtctccgaatggcaggggtctgggagaggatgtgatggcaaaggcctgcccctctcaggccgcctctagcaagttctctaccttgagagaagcgagtaggaggaggaaggaggccaggctgagccatctctgaggaatgtggctttggcaggacatccagtgctgccccgctcctccctcagccccgcccagggccctggagccgggccgggctcctcctcctccaggggaagggctcggggcaggaatcccttccctttccccaccc

SEQ ID NO: 63465 - DNA, 1629 bp, Homo sapiens
catagccgacaaggaagagctcatttctcatttgtcatgaccatctttaataaaaaataaattagttctgggtgggaaccatttcaggaggcagggagtggggctaggggctgggcggggtggtgggggagcggatgctcacatttctctttttcaccctctgcccagctgggccttgctctggagaggcagtctctttcctcctgccttcctgagtaaggcaggattggcagtggctgaccccagccctagctaattagggaggcaggggcagagatactaggcaaatgagaaggggtcagagacacagggcggcttagaagatgtgaggtctgaacatgagaaatgaggcttagggcacaaaactggagttggtggggagaccacactctaagtagctcagattagcaaggaactgcagacttgctttcctttccacctaggaaagtctcaaggaaacaggtcttgtccttctcagtctgtgtaacctctttttgaaaagtgatacacgtttgagcacacacatatccatgcagtcccaaaagcacacctgaggcatatgtgcacacacccatcacaccaccacatgggcctgaccacagccctgaaagtcactttgtgtcagtcaccttgccaccctctgtyacctggaggacatccctgctgagactgggacaggctggagagccagggggttcagagtgggccgatcaatgggtgaccgatggtggcacagaaaaccgtgaaggtgccccggacccctttcaggagggatcctggggagaccgctccaggacatgtgcgcaagagcggcaacaggtggctgtgtagtaggggtagacgcagagccgggcctgtaccaccagggggcaatgtggagagctgtccttgcattgatcatctggggacagaggaggccagtgggcacaagagagtcaccaggacccacccgtctgggaatgggtgtgctgcccattcccactggtcctttctcatctcctcccatacttcagctaatccactgtattggggattggggagagggggctctttaccagggcgctggctgcagggttggctgttacaggggcgcttcctggagggccgcagttgaggagggcatcgggtgctgagggtctggttggtgctcaggcactggacctcccgtgtctgcgttcccccttggcaggagcgagaacactggggcgaccccagccatcatatcagacctttgccaggcccgggattctccttaacccctggctgccacctctctccccaaaaggtggtggtggggaccctcctaggacattgtgaaatcccaaatggagagggcccatctttcctccaagtctataagaagtaggacagtggtaacgcttggctgggcttattctggggcacagagagacctggagggggtacagcgagaggagctcccctcccctaggggcccaggctgagcagggcaggacagcgcagccagacactcactgggctccagggcgtggaaaaccatcggtcctggcaggcctgccttgacagggctgcagggcagggggcctggggaggtgagaacagttgctcggagaagtcacgttgaactccgtccccagtttggatacacag

SEQ ID NO: 63466 - DNA, 1838 bp, Homo sapiens
caagcataaatccagtccagatgtcagtcacgggtacaaacatagctgaaaggttttttcattttaagggcagtagtcctttgaaatagttaatgtaactgttgctgatacattaataacagtacctctagctgtcacatactaatgtggacttctgatcaagactggctcagtaaaggaagttaccaaatgagcctcaatctatttcaagtcatatctagtcccgtacccctcattctccttccttagtatttgaagacaacaggttcagttggcagatattgttcatggacccttgaggttgtttttaaccattcaacctgttttactgaattcttgataacaggaattggatttgcagggagaacagggataccggaaagatctatactgatgttccctgagaggccaatagagaagatgctgtctgaatttttctaatggagttgtacttgtctttgtattgagtttctcctcttccgttttggttttcttggtcctttcttctttatgaggcaagaatatcctctagactccaactataggattagatatgtttgttgctgagtttcctgaaggtctggatggcttatgagacatgttgaagaaacaactctggcgaccatggcctttggtgatggagaaatggcaggctgagagacagcgtgaggaatactttcgtttaatgcaacccctgaactttcattgtattcacctgttgcaaggaaaattcagtagcctgtatgttagccacagatgctgtcattacagccaaggcaggactgtttctaccctgagaactgctaatcaatgggcctgtcttcatagtgctagtagatgaaggcacagacatgctgttttcacagcctgcagacaagtcaaagctgctgtcgttcaaatctgtcaatcttctaccttctgttgagtgtgctttcttgtcctgaagcacatgatgaggcagcagctggtgaagttcctttcttcttaaatgcattgcagtaattttcatacccatctcaaacatcttactattcactgcttgcctataaacagtatctgtgaaagactggatatcataggtgagatcaatgctgagaatttcagarttatctggcttttttagccctaacccaatcacccacattgtacgaaattcttccatatcaggattttctttgggtgctggaaatgactgtggattcacatgtgccagtgtaataaattcattcttctccaagctcccaaccaggattcggatctttgattccaccaagcccacccattctaaatgttgtttttctgttgatgcacttgccagaagtacaatataatgcttgtacttttgaaagaagcttggagcttcaaagagtttggaccactctgccttacttagcaaaatctcgtgtgtgatagcaagcccctgtttaaactcctcaatcatgaccatcctggttgaaatagacacgttgtatgtggagttctgctgtgggtatgctggtgtgatgataggcataagatggtacctatcactgggatttactcttgggtcccatacaggcaaattaagattccgttcttcaggctccttcagtaacactgggtttggccattcccattctgaaaataccaagaagaatttccgtacaagagttgacgctactgcatttggataaagctgacaagttcttgctactagcatggcccaggaaacacctccgaggaaacctaatatattggaatagatattgtggcacttggcccacagtttgatggctctcagagtcagcctgaagttgtcaatgtttggcactagatgtaaaatttcatcggttacccgg

SEQ ID NO: 63467 - DNA, 596 bp, Homo sapiens
tggccacagtgactggccccaccctaggactcatcccttctgaattcccgccgaccacccggtgtgacatccgagcagttcaggactgagaacaaggccttgtagccaggaaccctccagccccactgagccgctctgcactgggcctgtctctgccccactggtctctgatggtgtctccgggtaactggagctcccccagcccggcagagctggacgcaagctcctcccagggctggagccgactgcctccctgcaggaatcacgggacccaaacggcctgtgtgcgggctgctctctgcccccaggaacaggagcrcctttcaggcggcggaagagtgcgtgcatactgagctcctagctcccagcacagaattcaggccacagaaatgaatcaatgcggaggaaggacttagaaggtgtcaggtggagccagggttcctgttcagagatgttctccacggtgacccggggctgcgggggggcatccaaggccccatcgcctctgcgcctcccgccatcccgtactctgttttgttgaggtgttaacacataatgcagatgaagggagatgtgtgtataatctacacattata

SEQ ID NO: 63468 - DNA, 904 bp, Homo sapiens
gccacagtgtatgttgttcccctccctgggtccatgtgatcttattgttcagctcccacttataagtgagaacatggagaacatgcagtgtttggttttctgttcctgtgttagtttgccggggataatggcttccagcttcatccatgtccctgcaaaggacatgaactcattcctttttatggctgtatagtgttccatggtatatatatgcaccacattttctttatccactctatcagtgatgggcatttgagttgagcccgtgtctcttctattgtgaatagtgctgcaatgaacatacgtgtgcaggtatctttgtaacagaatgatttatattcctttgggtatatactcagtaatgggattgctgggtcaaatggtgtttctggttctagatctttgaggaatcaccacactgtctcccgcaatggttgaactaatttacattcccaccaacagtgtaaaagcgttcctgtttctccacaacctcaccagcatctgttgtttcttgactttttaataatgtccattctgactggcgtgagatggtatctcattgtgattttgatttgcatttctctaatgatcagtgatgttgagctttttttcatgtttgttggctatgtgaatgtcttcttttgagaagtgtctgtttatgtagcaggacttttttaatatcaagtagttcatgggtcagaattgaagagtagaaaagaaaagaaggggtcacatcaaagggagacttagaaatctttctggctcacagtctcaaaacatctttttctggcatcmccactattataaattttgtgaatgcctgttctaggtcagaaaagaaactataataaaccttgaccctaaaagttgtgtaagatttttttgaggttctggtcctacagga

SEQ ID NO: 63469 - DNA, 748 bp, Homo sapiens
aaagctgagggttatttgctggcagtactcccagaacttggtaagagcttcactcctgagggagaatttaagtgcctcattactgtgtccattacatattttgtttctgaatcctctacatgacccgttaaacacaattataaaatgaaaaaaatacccagaaacagtgctaagaaagcccctcaatagaaaytgtgggcaaatgtcctttgtagctcatgaagaaggttgtccccatcagagggaaaaaaatatggctgctgagttttagaacatttatttaaagatagagttttgtctatttacttctatcagaaattatcagtgtgtctatgactcaaacttcctctaagtttttatgttcatacattcatattctttgagtcatttgttcaacagtaaaatcatctataaagttagtctaatcccagcaaaatttccaccacagctttcttttttggaacttttcaaactaatctcaaagtgtttgtggaataaaaaatttgcaaaaataaccaaaaaccttttttagaaagaaatatataaatggtgtggggaaacatgccttaccaggtatcaaagcataaaataatgttacaggaattcaagaagtatatatctgccctaaatttagcaaaaagatgagtgaccaatatagaaattacaaataagacttatgaatataagaattaacatttttgacaagtagtaaaatgaaggaatgttccataaatgttactaaaatata

SEQ ID NO: 63470 - DNA, 748 bp, Homo sapiens
aaagctgagggttatttgctggcagtactcccagaacttggtaagagcttcactcctgagggagaatttaagtgcctcattactgtgtccattacatattttgtttctgaatcctctacatgacccgttaaacacaattataaaatgaaaaaaatacccagaaacagtgctaagaaagcccctcaatagaaattgtgggcaaatgtcctttgtagctcatgaagaaggttgtccccatcagagggaaaaaaatatggctgctgagttttagaacatttatttaaagatagagttttgtctatttacttctatcagaaattatcagtgtgtctatgactcaaacttcctctaagtttttatgttcatayattcatattctttgagtcatttgttcaacagtaaaatcatctataaagttagtctaatcccagcaaaatttccaccacagctttcttttttggaacttttcaaactaatctcaaagtgtttgtggaataaaaaatttgcaaaaataaccaaaaaccttttttagaaagaaatatataaatggtgtggggaaacatgccttaccaggtatcaaagcataaaataatgttacaggaattcaagaagtatatatctgccctaaatttagcaaaaagatgagtgaccaatatagaaattacaaataagacttatgaatataagaattaacatttttgacaagtagtaaaatgaaggaatgttccataaatgttactaaaatata

SEQ ID NO: 63471 - DNA, 744 bp, Homo sapiens
acaaagctgtatttctcaagactctagggagtaatccatttccttgcctcttctagtttcttaaggccacctgcattacttggctcatggaaccttttctccatctttaaagtcagcaaggcggaatctctctgaccgtcttcatttttgacaacttctttgactacagctargaatggggtggagtggaaatattttgaagggataatggtgatgagattgtgtccatctggagaatcccagataaactcccactttaagacttataactcaatctcatctgcaaaggtaacatatgtatcaagggatctaagggttaggatgtggccacccttaggaggccattattctgcctgccatcatagccaagcattaggaatgaggaacacactcaaaatatcaagaaacaaaagtatggtactggacaggggaatgctcagttctaatgtattctgaactactgtgggtcagacctgtgtacaatggctcttgtcttaaggcccgtaaagggcaagttcagtggtctaaatgagaagtgattcactggcctgaactctgccagtaatggggaatggaatattatagacagcagtgcccatggtgccctgagactgactattcctttgcctcaataagtgcaagctgaatgaatgaattgatgagtgagatgtcaatcaaataaacaggactgaacaacagtctggatacagaaggcagaaaaggggaaaggatttttagaaactt

SEQ ID NO: 63472 - DNA, 804 bp, Homo sapiens
ttagtgttggcagagactatggagtttatgcagtcctaccctatcatttttcaatgaagagactgagacatggggagttaagggacttgacttgcccaagacacatagttgtttactgacagtcaggccaaaaacatttcccaactcccagcccggaactctacagttcagcatgctactgccgtcctctactgaaaattaacactaactcagcctggaacatagaagaattcagcatctgtggggagtgaaagaaaagatgaatttagagctggaaatcaatctgggaaaagaaaagaggaaacggatgatttgtcattgtgacttgttggtcaaggttgtataagatattttgtgtcagttactcccctgtgcattcctacaaaatacaatggaattattttkttataattccccagggtttatatttatatgtacaggttttatttgcttggtgaattctccatgtacaagtcatctccaggtgtagattggtttgtggatggcattgctattgaaccttgtcatttacatgggtctgactttccttctctaacagtaaagtatgctccaggggaatcttcttcatgggatactcctaactgagggtcagaagtaggcttaagatgtaagaattatcgtctattaacccttgtattctgataatctcatggaaaacttgggccatatgtgggacttttaatcaggctaatgaattaggtaaaataattttctttatttggaagcacagagtaatttgaagtaaaccagtagcaaataagatacaataaacatgtcccaata

SEQ ID NO: 63473 - DNA, 635 bp, Homo sapiens
  misc_feature (1)...(635): n = A,T,C or G
atatgcaaaagaaaaataatcattctaccaaagacacatgcactcctatattcattgaagtacttactattcacaatttcaaagacatgctatcaatataggtgcccatcaaccatggattggataaataaaatacagtacatatatataccatggattactacacagccataaaaaggaatgaaatcatatcatttgcagccacatggatgcagctagaggccatattctaagtaaattaacacagaaacagaaaatcanagacatcatgtttctcacttacgagagctaaacattgggtactagtggacataaagatagcaataataaacactaaggactaatggagtgggcagagaggataaggagaaagggttgaaaaactcactaktgggtactatgctcaccatctgggtgatgggattgttcatatcctaaaccttaccatcacacaatatatccatgtcacaaacctgctcatgtacccccaaatctaaaataaaagttgaaattactaaaaataaataaatgggatttaaaaatcatagttatcagcattatgttaagtgcacagagaaaagattagaaggaaatgtgataaaatagctaaagttggaaaaatgcatagatggcag

SEQ ID NO: 63474 - DNA, 635 bp, Homo sapiens
  misc_feature (1)...(635): n = A,T,C or G
atatgcaaaagaaaaataatcattctaccaaagacacatgcactcctatattcattgaagtacttactattcacaatttcaaagacatgctatcaatataggtgcccatcaaccatggattggataaataaaatacagtacatatatataccatggattactacacagccataaaaaggaatgaaatcatatcatttgcagccacatggatgcagctagaggccatattctaagtaaattaacacagaaacagaaaatcanagacatcatgtttctcacttacgagagctaaacattgggtactagtggacataaagatagcaataataaacactaaggactaatggagtgggcagagaggataaggagaaagggttgaaaaactcactagtgggtactatgctcaccatctgggtgatgggattgttcatatcctaaaccttaccatcacacaatatatccatgtcacaaacctgctcatgtacccccaaatctaaaataaaagttgaaattaytaaaaataaataaatgggatttaaaaatcatagttatcagcattatgttaagtgcacagagaaaagattagaaggaaatgtgataaaatagctaaagttggaaaaatgcatagatggcag

SEQ ID NO: 63475 - DNA, 2157 bp, Homo sapiens
tgcatattttgtctaaatattgataaagctttagaatataagagctggagtgaacctaagaggttttgtagcccggcaatttccaacccaggatgtgtctcagaatcacatagagaggtttcagattcccagccaggcacagtggaatgtggctgtagtcctggtgactgggaaggctgaggcaggaggatcactggacccccagagtttgasgccagcctggggcaacatggtgagacccctgtctctaaaaaataaaaagtaagtagaaaatacaaatcacagattcctgggccttttccttcccctgccttccccaagtgattctaattctatgtcagttttggctgcttgcaaccagttatggagaccagggatcttgatcaatctcttcatctatctgatgaggaatctgagacccagagaagtaagaggtacagtgatttctctaaggttacacagtgtatgagtccatttgcacactgctgataaatacatacccaagattgggaagaaaaagaggtttaatggactcacagttccatgtggctggagaggcctcacaatcatggcagaaggcaaggaggagcaagtcacatcttacatggtggcagagaagagagagcttatgcagggaaactccccttttcaaaaccatcagatctcttgagacttattcactatcatgagaatagcacaggaaagacaagccccctgattcaattacctccctctgggtctctcccacatgtgggaattgtgggagatacaattcaagaggaggtttgggtgggggtacagccaaaccatatcccacaggaatatgttacaagtgaagatagtctatggacactgtaaaattgaccccattagctatatcccaaactagttcattattttagaatctattttgtgtgtttgcatgcatacagcaatgcttcacatatctgcacaccacttatgtggcattccaaatatggttaagaacaaacaaagtgaaaaagacctgcaagcagccaaaattggtactaaataaaccacacataatcctccaagtctttttaaaagcctcttctcttgcttctctatctagtgaggcataggtgactcaaaatctttatctccaagcccggcccttctgctgcactatagtgtcgtgtctccaaaagcctagtggaccactcacagatacccagtcggcaccttcactcagtgtgttcaaaattaaacgtgtgctttccccctcccaacccctctcctgctttgctgctctgtttatgactctactaaggttcaaaatcatagagatgtgtgtggtgtcttccctctcccttgcctccccaaatataatggattatttctccgcccacatttcataatccagtttgccatctctgttcattccctctgcccctgccctagttagtgccttcatgccctttcacctggactattgtaatagtctcctgcctgatcttgtgtcctctggtctctccctactccaatccattttactcactgttgccagattaatcttcctgaggcacagctctgattatgttactctcctactaaaaactttcaatagctccccactgtctcctgaataaagtccaaattccttgccctaataatcaagtcctttcactttctggtcccaatatacttttaccgctttatttcccactacttatcttcacacattccatgctcaagttaaactcaattacttctttgcagaatctttaccctttgattcttccatgcttttctcatgatagagtaatgttctttccttctatctctgtatgctcaaatcctgcttgtttttcaaagcccaaatccagtgtcatcttttctgatgaagccctcagttagccctcctctgagctccaagaataccttatctgtactacttttatagagcatttcacttttcactattaattctagcaaagtagacacatgtctcagctccgttgctagattaaaacttctagggcaagacatgtcttatctgtgtatcctctccagtgccaagtatacaagtgcacgactcacaatatttgtcaagtgaatgagttcatgtatgtactttacacacaatcaaaacatgtttttttgttttattgtctaaagaagattagaaataatgca

SEQ ID NO: 63476 - DNA, 2157 bp, Homo sapiens
tgcatattttgtctaaatattgataaagctttagaatataagagctggagtgaacctaagaggttttgtagcccggcaatttccaacccaggatgtgtctcagaatcacatagagaggtttcagattcccagccaggcacagtggaatgtggctgtagtcctggtgactgggaaggctgaggcaggaggatcactggacccccagagtttgacgccagcctggggcaacatggtgagacccctgtctctaaaaaataaaaagtaagtagaaaatacaaatcacagattcctgggccttttccttcccctgccttccccaagtgattctaattctatgtcagttttggctgcttgcaaccagttatggagaccagggatcttgatcaatctcttcatctatctgatgaggaatctgagacccagagaagtaagaggtacagtgatttctctaaggttacacagtgtatgagtccatttgcacactgctgataaatacatacccaagattgggaagaaaaagaggtttaatggactcacagttccatgtggctggagaggcctcacaatcatggcagaaggcaaggaggagcaagtcacatcttacatggtggcagagaagagagagcttatgcagggaaactccccttttcaaaaccatcagatctcttgagacttattcactatcatgagaatagcacaggaaagacaagccccctgattcaattacctccctctgggtctctcccacatgtgggaattgtgggagatacaattcaagaggaggtttgggtgggggtacagccaaaccatatcccacaggaatatgttacaagtgaagatagtctatggacactgtaaaattgaccccattagctatatcccaaactagttcattattttagaatctattttgtgtgtttgcatgcatacagcaatgcttcacatatctgcacaccacttatgtggcattccaaatatggttaagaacaaacaaagtgaaaaagacctgcaagcagccaaaattggtactaaataaaccacacataatcctccaagtctttttaaaagcctcttctcttgcttctctatctagtgaggcataggtgactcaaaatctttatctccaagcccggcccttctgctgcactatagtgtcgtgtctccaaaagcctagtggaccactcacagatacccagtcggcaccttcactcagtgtgttcaaaattaaacgtgtgctttccccctcccaacccctctcctgctttgctgctctgtttatgactctactaaggttcaaaatcatagagatgtgtgtggtgtcttccctctcccttgcctccccaaatataatggattatttctccgcccacatttcataatccagtttgccatctctgttcattccctctgcccctgccctagttagtgccttcatgccctttcacctggactattgtaatagtctcctgcctgatcttgtgtcctctggtctctccctactccaatccattttactcactgttgccagattaatcttcctgaggcacagctctgattatgttactctcctactaaaaactttcaatagctccccactgtctcctgaataaagtccaaattccttgccctaataatcaagtcctttcactttctggtcccaatatacttttaccrctttatttcccactacttatcttcacacattccatgctcaagttaaactcaattacttctttgcagaatctttaccctttgattcttccatgcttttctcatgatagagtaatgttctttccttctatctctgtatgctcaaatcctgcttgtttttcaaagcccaaatccagtgtcatcttttctgatgaagccctcagttagccctcctctgagctccaagaataccttatctgtactacttttatagagcatttcacttttcactattaattctagcaaagtagacacatgtctcagctccgttgctagattaaaacttctagggcaagacatgtcttatctgtgtatcctctccagtgccaagtatacaagtgcacgactcacaatatttgtcaagtgaatgagttcatgtatgtactttacacacaatcaaaacatgtttttttgttttattgtctaaagaagattagaaataatgca

SEQ ID NO: 63477 - DNA, 1128 bp, Homo sapiens
cccttgtgttcccttgtcttagacactgggaagctgaatattcaatctcccagcttttgtgtgtagcttaaggtaggtagcagggcaggcagtctttgccaataatatgtacatagaacttcctgggaaaggttctcttctctaattaaaaggcaaagccttggagaaggaagttttcggccattggctcgtcctccgtgcctgtgtatgggatataggaggagtatcaggtggattacaaccatgaggacactgtgaggacaaaagccacttcctcagggtgcttggtcagaacaatcggaggacctgggctctggcaacgtcatggaactgccatcctagtcccagactgcacatcactggatgtcctgcccaatatggtgaaaccccatctctactaaaaatacaaaaattagccaggtgtagcctgcaatcccagctactcgggaggctgaggcaggagaatcccttgaacccaggaggcggaggttgcagtgagctgagatcatgccactgcactctagcctgggcaacacagcaagaccctgtctcaaaagagaaaaaaaaaagagaacaagagtaagtaggaaaaacagttagaaaattgtcctggytagaacttaggattcattttgagaagtacaggaagataaatatgagcagaagaaagcagagacagattatggaggaccataaatgttcatttagaaacgagatccacgggtaggaaacaattgcatgttctgtagaaggcaagagatacggtatgctttcatacgagttgtccggcacctcttctactataaataaaaaaggaaatagacttaatcaaaacaagccaagatgactttttaggggagtacttttgctaacatgctgtttcttggattgtaaatcctgaacaccaggggcaattcctgtgcctgcttgatatacagttcccttgctggaaacctcaggtcggtgaggacagtgtttgtggaataaagggaagaggaatttgtttcttgccttgatgcactttcagcaactttgcatccttagggctactatttcttaagatttgacaaggaatagaaaggtatattacatctgggataggaatagagcattagaaaagtatttgat

SEQ ID NO: 63478 - DNA, 1128 bp, Homo sapiens
cccttgtgttcccttgtcttagacactgggaagctgaatattcaatctcccagcttttgtgtgtagcttaaggtaggtagcagggcaggcagtctttgccaataatatgtacatagaacttcctgggaaaggttctcttctctaattaaaaggcaaagccttggagaaggaagttttcggccattggctcgtcctccgtgcctgtgtatgggatataggaggagtatcaggtggattacaaccatgaggacactgtgaggacaaaagccacttcctcagggtgcttggtcagaacaatcggaggacctgggctctggcaacgtcatggaactgccatcctagtcccagactgcacatcactggatgtcctgcccaatatggtgaaaccccatctctactaaaaatacaaaaattagccaggtgtagcctgcaatcccagctactcgggaggctgaggcaggagaatcccttgaacccaggaggcggaggttgcagtgagctgagatcatgccactgcactctagcctgggcaacacagcaagaccctgtctcaaaagagaaaaaaaaaagagaacaagagtaagtaggaaaaacagttagaaaattgtcctggttagaacttaggattcattttgagaagtacaggaagataaatatgagcagaagaaagcagagacagattatggaggaccataaatgttcatttagaaacgagatccacgggtaggaaacaattgcatgttctgtagaaggcaagagatacggtatgctttcatacgagttgtccggcacctcttctactataaataaaaaaggaaatagacttaatcaaaacargccaagatgactttttaggggagtacttttgctaacatgctgtttcttggattgtaaatcctgaacaccaggggcaattcctgtgcctgcttgatatacagttcccttgctggaaacctcaggtcggtgaggacagtgtttgtggaataaagggaagaggaatttgtttcttgccttgatgcactttcagcaactttgcatccttagggctactatttcttaagatttgacaaggaatagaaaggtatattacatctgggataggaatagagcattagaaaagtatttgat

SEQ ID NO: 63479 - DNA, 660 bp, Homo sapiens
agagtgtgttatgtgtttctaaaatcgcatttaatgatatcagattgtaagtgttctaggacattattatgtttttgagatttatccatgttaatacaattatttctattttaatcatttaaattgctttctagaatgattaagccacaatttgtgatttattaccttactatgaacatytaggtgatttcttttagaaacaatgctgtagtaaatatccctgaagaattgctcaggaaatacacctaccttgggtgaccagggtgttgatgtatgggcactttctgtcacccaggctggaagtgcagtggtgtgaacatggctaactgcagtctcaaatgcctggcctcaagtgatcgtcctgccccagcctccggagtagttgggactacaggtgtgagccatcatgcccaactactttttaattgtatttgttattgacaaattgctctatgaaggagttgtaccagcttacgctctcagcagtagtattgaaatttccatttttcacatcttctccaaaacttgccagatattaaaattgtcacccatatgatgggtatgaaatgacacctcattgttattttgctttgtactaaccttatagcaagtgagatgaacatatttctatgtatttattgatcatttgggattctattt

SEQ ID NO: 63480 - DNA, 1667 bp, Homo sapiens
tgactgattccagctcagatattaactaaatctgggaaggacagtggagagccaaaactaagttaggaagaaatataaatatgtccagaaactaggcaatctygtatgagcaatgtcagtgtattcaaaaaagtcactaaaagcaataaataagtgacaaaccttatcatctaaactatagaagttttgatagtgaaaaagagttctattaataactatcaggacaacataaactgagctgttccagaaaataatttgtaagatcactcttgttaggtagagagagggtgggctacagagaaatacacatcaaaataagtgtgtataactgagaaacagttatgaatgaggaaacaatggtgtgacaagaaagttaagatgaaatgctagtacagtcacaaggtcacagaagtccacaggtgaagagagtcaattgagctgctcagagacagaggaagaattgactggaagctaaaatgcttaaccttcaagacaccttccaagattttagcaatttgttcacatgattctatatctcataaagtaaggaaaagtggtcgggcatggtggttcatgcctgtaatctcagcactttgggaagtggagatgggaggattgcttgagcccaggagttcaaggccaagagctatgattgtaccactgcactccagcctgggtgacagactgagactctgtttcaaaaaaaacaataaaaaagaaagaaagagtaagaaatgtctgtattcttttacttaaagatgctccactaagttgtaggagcataaggctccacaacagctgtatgcattcggcttgcaaagctgattcttctacgtggatgccactgggctcctagacttcaatgccagtcttagaccactagaaacaaaaggttttcagaaataccaacattactcctttaaattcttaaatttttctcaggccacaattatcagaagtgggctgagcagtcagcgttagagaactcacacacgctgcaccaaactagccatggaaatgtcactgactgagtggtccatggaagaagttatgccctgaactcaaaagagagggttggaggagctctagatgagtatgcctaatgtcccaatatccaagcgattctgctggtcttctctgtggatgaagccagatactatccatcagttttgaaaagtctcacttaactgtcttaggacaggtattccccagtacctaagggtcagctcaggagcttcctcccagtggtgccgagcaaactctcccttttacccacaccccttgaaccacaaagaggctctgaagactgaagagcaggagaagaggaagaagagttggaattttctagaaaaggtcttgggatactccagaatcaaatgccagcctgtgctgaagcaaaaaaaaaaaaaaaaaagacccgtaatctgactcactttcttaaactgagccagtggagggaaaaggggagatgacaatttctccctcagaacaatgaacctctgagagctgagtgggaggaattagtgacaataacatgatgtctgtcaacttttgaaaaattggaatcaggaaatccaaaagtaaagttgaaagaagacaaattaggtatatcaagatttgacacattactgaacacctgctaatgaaaaaagaagtatttactttta

SEQ ID NO: 63481 - DNA, 1123 bp, Homo sapiens
  misc_feature (1)...(1123): n = A,T,C or G
cttgctaaaatacaaaaattctgattaagtaaatctaggtgggacctgagattctgcatttgtaaaaagaccctcaaagaaacatattctgcttgtctatggacaacattttgagaagaaaggacctagcaagccctgngatttggcttacttctaggtggatgagataagggcttatacaagctctgaggaaaccccggaattaagccagttgccctatgggacagacccatggctgctgctgcccatgagggtggttctgagagccctgccaagcctactcaaatggwcacacccaggaacagatgaagtggctttaggcggcagcttaccctcttatgacattatggtaaatgcaatgatctggaactgccagaggtgtttctgctaattctgcctttgggttttgggaaatgcctccctttttaagttttaccacttttttctacccctgagttttgttttgaccaaggcagagtttccactttacagtctaatctaaaactagacagacatgtttaggtcccacattttatgtgaaagctatgtttcccctctgtcacaaggcaaagtgttcatctcaaaatgcacatcttacaataatatcttcttaatacactatgaggctgaacacctcagcttacaaaatcacttggtgatgaaatatggcagaaaagtatcctcaaactgaaatgttcaatcaatgaaaaataaatgtttcccattgtggaaactgagcataacgcaccaatatcttctgttccaggaactggcaaccttcttctgtaaagagctagatagtaaatatattttaggctttgtagactttttaatctctatcacaattactcaactctgtcaccttagcacaaaagcaaccatggacaataggttaaaagaaaaaaagggaaaaactgtgttccaataaaatttttataaacatgatttcactgtaggccatagtttgccaacctctattttaatcaatatacagagaaaaacatctaggcatttattttccaagccaatgtcctgtcttattaaggtaccactttggaagataatgcttatgatccaccagctgtcagacacacacttaatgctggtcttctttctttcagtg

SEQ ID NO: 63482 - DNA, 1046 bp, Homo sapiens
actcatctcttaccaggcccctacttatagcctggaaactgttggtatgcaacatacacagataggcaggcccctttctggactctgttcacttttgctgatactctgtaaaatattttctcaccccaaatatgtctatattttctccccagcatttgtaacccatattgagtaagttgctttttccatgtctcagtttcctcatctgtcaaatgggccaatagtacctattgtcacaaaattattgtgaatattgaaatgtaagcaaagtgctttgaacaatactgacacttagtaagtgctgaactgtaattattgctattattagccatttttaattagtcagaaatcagagtgtgaagggctgattaactgaagcttcttgccttaaatactgatggtctagaagattttattttctgtacctgattcattgttcctctctatcttattagctgacatggagatgaaaacttagcctccactctgttgactatagccaccaccactgttttggtcacagtctaagtttgtcatcacccacattgaaaatcttaaaatttaatttctgactttttgatcacaagtttctttacttctgccacgctgcaacctgacttttatattctgcccctgaccccccgccccgccctacacagtctgagagcccacagcattggctttacttcatccttcagttatatccaagatcatccacttgccagttttcacctgcagaattatttaattataactatctgaaagctgttaagagcctgctgaggtatattgtctgtctatacagtcctgaaatacacatacgaatattaatatgacattttctaacacamctttttactaacaacaaattttttttttcctcttctccaatatatttcatttatagaggagaagcaatatgatcttaggaagtaattggcatcaaatactaaatgactgttttcagacttctctgtgctgagaattttatggtcatctaaaaactattccatatatagcagtaaatatggacatacaagtccctc

SEQ ID NO: 63483 - DNA, 682 bp, Homo sapiens
gatggaagaagtcaacctacacttgagtagtggttacacagtggtactgagcaccactgtgtccagctaggctgaagaccagcagagcatctgagacccacttgcatgcacctgcgtcagctttctcacgccctgcatcacctgcccaaggacagccaccgtgtcagcatcactatccccattccctcctcatttccatggccattatcctagctcaggactttatgctatcccccagctcaagcactgtaaacgtttcctcatttgtactcctgaactattttcttcccttcaatatccaccaactcactgaagctatcaaagctttgttgtaattaaaatctgagtttgtcacccactagttcaagatccttccatgactctccactgctgagccatctgtatttctcctttgcaagcaccataatactaagatttttattttactttttgtctgggayagggtctggctctgttgctcaggctggagtacagtggtgagaacatagctaactgcatcctcaactttgtgggctcaagcaatcctaccacctcagcctcccatgcagctgagaacacaggtgcatgccaccatgcccagttattttttatgtttatttttcatagagacaacatggtctcatttttttgcccaggctggtttcaaactcctggtctcaag

SEQ ID NO: 63484 - DNA, 682 bp, Homo sapiens
gatggaagaagtcaacctacacttgagtagtggttacacagtggtactgagcaccactgtgtccagctaggctgaagaccagcagagcatctgagacccacttgcatgcacctgcgtcagctttctcacgccctgcatcacctgcccaaggacagccaccgtgtcagcatcactatccccattccctcctcatttccatggccattatcctagctcaggactttatgctatcccccagctcaagcactgtaaacgtttcctcatttgtactcctgaactattttcttcccttcaatatccaccaactcactgaagctatcaaagctttgttgtaattaaaatctgagtttgtcacccactagttcaagatccttccatgactctccactgctgagccatctgtatttctcctttgcaagcaccataatactaagatttttattttactttttgtctgggatagggtctggctctgttgctcaggctggagtacagtggtgagaacatagctaactgcatcctcaactttgtgggctcaagcaatcctaccacctcagcctcccatgcagctgagaacacaggtgcatgccaccatgcccagttattttttatgtttatttttcatagagacaacatggtctcatttttttgcccaggytggtttcaaactcctggtctcaag

SEQ ID NO: 63485 - DNA, 1138 bp, Homo sapiens
caagcttcccaaggtgcttccgtcctggtacaaaaagctgaaaatgtcatcgcatttgcaaatgaacagaaacctcccactcaaagagcatcagtgccactgtggctcactgaagcagctggcaggagccttcctctcactgccattgctttgtggttagaataatacacacatagtcttttyatctaatgacgttggcaagtttaactttctttgcaaaagtaacaatgctttgccttcaaccagcagactgttctctctttctttggaaagggcagaatggtttctatttactcctgatagggccagtcacctgcaacctctagacatgtcttcacttcagctttaccccatgctgtataaactccataggtcacagtggctttgatattcttcagctatgaaagtctgaattctagattgagatgctggccccatcaagcacatctttcttggcgttttttatttgtcaaggagggatgggctcaaagcagaatactttacacccctcatgatttgcaatgacctagcttcaatcttttctcagatttaatattttctgagtaaggggccctgaactctggcaagaggtggcttctgggtaaaggcagtacaggaaatctccaatttactggggctctttccatgatttttgaagcatgaagggaccatcatggtgactggtttacagcactgactaatccagactaaccagttcattttgtcacagagaactcccagagtgtggccaaaagtgttcgctagagattctaccagaaactgcacttacattgtattgcaagcttgccaaatgtacatcccagaaaaggctaacactcaggacagctcattacatgttttcatctattctgcaggaactaggaccacggaaatgagaaactctagttataaactttactgacactttaaatacaatagatacacaaggctgggttaagtattatcctccatctagcaatggcaatctggttggtaatcgtgcactaacactaaggtagatgttctgagatatataagctatcctgctcagatataacacatcgatgccttttacatcaaaactcactgaatgagctgtgtagaggcctgtctacaagtgcactcagtgaataaaatt

SEQ ID NO: 63486 - DNA, 1138 bp, Homo sapiens
caagcttcccaaggtgcttccgtcctggtacaaaaagctgaaaatgtcatcgcatttgcaaatgaacagaaacctcccactcaaagagcatcagtgccactgtggctcactgaagcagctggcaggagccttcctctcactgccattgctttgtggttagaataatacacacatagtcttttcatctaatgacgttggcaagtttaactttctttgcaaaagtaacaatgctttgccttcaaccagcagactgttctctctttctttggaaagggcagaatggtttctatttactcctgatagggccagtcacctgcaacctctagacatgtcttcacttcagctttaccccatgctgtataaactccataggtcacagtggctttgatattcttcagctatgaaagtctgaattctagattgagatgctggccccatcaagcacatctttcttggcgttttttatttgtcaaggagggatgggctcaaagcagaatactttacacccctcatgatttgcaatgacctagcttcaatcttttctcagatttaatattttctgagtaaggggccctgaactctggcaagaggtggcttctgggtaaaggcagtacaggaaatctccaatttactggggctctttccatgatttttgaagcatgaagggaccatcatggtgactggtttacagcactgactaatccagactaaccagttcattttgtcacagagaactcccagagtgtggccaaaagtgttcgctagagattctaccagaaactgcacttacattgtattgcaagcttgccaaatgtacatcccagaaaaggctaacactcaggacagctcattacatgttttcatctattctgcaggaactaggaccacggaaatgagaaactctagttataaactttactgacactttaaatacaatagatacacaaggctgggttaagtattatcctccatctagcaatggcaatctggttggtaatcgtgcactaacactaaggtagatgttctgagatayataagctatcctgctcagatataacacatcgatgccttttacatcaaaactcactgaatgagctgtgtagaggcctgtctacaagtgcactcagtgaataaaatt

SEQ ID NO: 63487 - DNA, 644 bp, Homo sapiens
aatacaatatatacaaaaaaatattacacatacataacttttttttttagacagtgtcttgctgtgttatccaagttggagtgcaatgtcgtgatcacagttcactgtaaccttaaactcttgggcttaaactatcttcccgcctcaacctccactacaagcagtaattaaaaaaaaaaaaactagggagctgggtgcggtggctcacgcctgtaatcccagcactttgggaggccgaggcaggtggatcacaaggtcaggagttcaagaccagcctggccaagatggtgaaacccatctctactaaaaatacaaaaattagccgggcgtggtagcaggtgcctgtaatcccagctacttgggaggctgaggcaggagaattgcatgaacctgggtggcaraggtggcagtgagccgagatcacaccactgcactccagcctgggcgatagagtgagactccgtctcaaaaaaaaaaaaaaaaaaaatttttttttttttttggctgggtgtggtggctcatgccttgtatccccagcccttttgggaggtcgaggcgggcagatcacctgaggtcaggagttcgagaccagcctggccaacatggtgaaaccccatctctactaaaaatataaaattagctgg

SEQ ID NO: 63488 - DNA, 639 bp, Homo sapiens
ttcattcattcatcccacaagcattcactatttaatatcaacaggaactatttttggccccaggattacagagatgaagagaataaaagtctcgaggccgggcacagtggctcacacctgtaatcccagcactttgggaggccgaggcaggcagactgcaaggtcaggagttcaagaccagcttggccaatatggtgaaacccccatctctactaaaaatataaaaaattacctgggtgtggtggtgggagcttgtagtcccagctactcrggaggctgaggcaggagaatctcttgaacccgggaggcggaagttgcagtgagctgagatcttgccactgcactccagcctgggcaacagagtgagattccagctcaaaaaaaaaaatctccaattatatgaagctttctttctagagactggccaagacattggtcactgcccacgagttgatgaccaagtgcaccacctgaagctctgttcattgggaggacttcaactcggcattgtcttccaaagttattcccaagtgagccatcgtgtagctgccatccatttttgacttgcacccccataaccaattcaccaactcagaaaccaagctcaggctttttcctcctccattacctacttataag

SEQ ID NO: 63489 - DNA, 639 bp, Homo sapiens
ttcattcattcatcccacaagcattcactatttaatatcaacaggaactatttttggccccaggattacagagatgaagagaataaaagtctcgaggccgggcacagtggctcacacctgtaatcccagcactttgggaggccgaggcaggcagactgcaaggtcaggagttcaagaccagcttggccaatatggtgaaacccccatctctactaaaaatataaaaaattacctgggtgtggtggtgggagcttgtagtcccagctactcgggaggctgaggcaggagaatctcttgaacccgggaggcggaagttgcagtgagctgagatcttgccactgcactccagcctgggcaacagagtgagattccagctcaaaaaaaaaaatctccaattatatgaagctttctttctagagactggccaagayattggtcactgcccacgagttgatgaccaagtgcaccacctgaagctctgttcattgggaggacttcaactcggcattgtcttccaaagttattcccaagtgagccatcgtgtagctgccatccatttttgacttgcacccccataaccaattcaccaactcagaaaccaagctcaggctttttcctcctccattacctacttataag

SEQ ID NO: 63490 - DNA, 1827 bp, Homo sapiens
tggttggcgtattgtgaccatctcaataaactttagttttttttttttttagaataaaggcagatcatgggttaatttattttcatcaaattatgagacatgtagaaaatcggtaaactatatagctgtttttcactgaatgtaatgtcttaatttataacctctaagaatgctaaatgatatatatcatctatgtattgcaayctaattaactggatggctcttttagagaggaatttactctgatttgcttggcactagcacacattcctaggcataatagagagtaaaaagacttgcaaatgtgaagaagaaagatttacagaatctttcttctattcctaccctcctatcccctcaaacctttataatccctgatggcccagtattcctgaatctctctaccttgcctcagacctgcttactaaaatgtccattagaaaatccaagcctgtcttactgaccatcctggagcaaacatttaatttggtggcaggttagtcatattgaacattgttctaggaggcacagaaccatgagtcatcctatcattctatgaggtcttgtactgattcctaacttagatccaacaaccgtttttctgattttatttaattccctatttcctggttcataaccatggccatgtaaaagcttcaggttcttgcttgccacaagctactgttcccaagtaatggcagatgagcaagtatgtgacatcatccaactatagatgcttatgagcaaataccttggctacaaaaacctctttgctgggacagaaatatttagaaatgtccctttcactgtatatgagtgttttcactgtatatgagtttaaaaatatctgataaaaatgcctcgttttttccttctttccttttaggtactataaacatgattgtagtacagatgatgttttagaattgaaaatagagaaaccattttacattctaaagtatattcatttactttaaaaatcataattgttaatttcttcataagtatatatattttaatttagttactgtatgcaggctacattccatgcattttacatatattagttaatttaaccatcataaaatcttgtgagattgacgctattgctatctctagtttgcaggtagagaaactgagagtgcccaactaaaaactgattaagacaagatctaaatgtgggctatctagctccagaaaatgagctctttaatattataccttactaacagcagcaatgatttacaaacataataatgccctttctaacagcatgtaacaaattcacttttatttttttctggcatttaaacactgtcaaacactaatactattgctattggattcactttttttaaaaatttaattttgttgagaggtaccccaccagaaggaccctgatcattatcatgctatcaataattaaggtttttttttaagttttcaaaacagtcaatctgaagtcatgttcctctaatacagtgtatttctttggatctcaatttttcttctgagatactttttccttgaaaagacccttccacttagaggattttctgtatagtaaatctccatctttatttcctgcttcttaagcagctactcaacatttaaaatttttcttttcttttctttctttctttctttctttctttctttttttttttttttttgagatggagtttcactcttgttgaccaggttggagtgcaatggtacgatcttggctcaccacaacttccgcctcccaattcatgtgattctcctacctcagcctcccgagtaggtgggattacaggcatgcaccaccatgcctggctaattttt

SEQ ID NO: 63491 - DNA, 668 bp, Homo sapiens
tgggatagcagtgctttttaacgatatttatcttgtgcaattagacatctcaaatgtcagatgtttttatcagaaaaaaatgaaaatatgcaaataaatacatgatgcctaaagcagttctttcttgggcttaattccacaaaaatattcagcatttgctgatgataatagctcagcaggtgttaaaaaatttgtaaatgttgagttagttatatttttaaatatttgtatttttcaattcacagggctaaagagcaacttaaatattacgaaagcactctatgtttacttattgagttaacaatttaatagtatagtacttgtctattctactagaagtttatttaagaaaagagttatacttcatgagaaatatccaaagataagtcaacatcaacaaatatatatttgtttattagaggaaaaagcacatttctttgctaaaataaataatagaacatattacttgaaagtcaccttggaattccactcaatgattaacatgcaaaaggcctgaagtaaaaaggacaacccatgagtggaatgataaaaatatatctgggggaggcatcacagctgccacygaaaaatactccttaatccaattctacaaacattcattgagcaaccactatgtgcccagcactgtgcttaaagttgagaataca

SEQ ID NO: 63492 - DNA, 532 bp, Homo sapiens
atatattttatatatgtgtgtgtgtcataacgtgtgtatatatatatatatatatatatatatgatacctatatgagtgtacttttataatgccttcaaaagacatttgattgtgacatagcactcaaagtgacaggggttgctctctcaagttttgtctaaatgactggtacaactaatcaaggattttcatttttaatgggtataatcaattgtagatgtcttcarctgatgccaaggacttattggcaagtcacactgcactatgagcttcaggtctggtatttcctttatatatcaaaatgcttgagatgtacacgaagaaacagagtcgttgaacagttttcctaagatcattcagcaagtgatttcacttcaggtttaagtttctgaattgactctacttaaattattgtactcttaatctgtacaaaatattgctttacataagccctaatgctcagcccaaataaataatgagcactaaagttttgacggtatcacaaataaattattgtttcataatgattaa

SEQ ID NO: 63493 - DNA, 532 bp, Homo sapiens
atatattttatatatgtgtgtgtgtcataacgtgtgtatatatatatatatatatatatatatgatacctatatgagtgtacttttataatgccttcaaaagacatttgattgtgacatagcactcaaagtgacaggggttgctctctcaagttttgtctaaatgactggtacaactaatcaaggattttcatttttaatgggtataatcaattgtagatgtcttcagctgatgccaaggacttattggcaagtcacactgcactatgagcttcaggtctggtatttcctttatatatcaaaatgcttgagatgtacacgaagaaacagagtcrttgaacagttttcctaagatcattcagcaagtgatttcacttcaggtttaagtttctgaattgactctacttaaattattgtactcttaatctgtacaaaatattgctttacataagccctaatgctcagcccaaataaataatgagcactaaagttttgacggtatcacaaataaattattgtttcataatgattaa

SEQ ID NO: 63494 - DNA, 532 bp, Homo sapiens
atatattttatatatgtgtgtgtgtcataacgtgtgtatatatatatatatatatatatatatgatacctatatgagtgtacttttataatgccttcaaaagacatttgattgtgacatagcactcaaagtgacaggggttgctctctcaagttttgtctaaatgactggtacaactaatcaaggattttcatttttaatgggtataatcaattgtagatgtcttcagctgatgccaaggacttattggcaagtcacactgcactatgagcttcaggtctggtatttcctttatatatcaaaatgcttgagatgtacacgaagaaacagagtcgttgaacagttttcctaagatcattcagcaagtgatttcacwtcaggtttaagtttctgaattgactctacttaaattattgtactcttaatctgtacaaaatattgctttacataagccctaatgctcagcccaaataaataatgagcactaaagttttgacggtatcacaaataaattattgtttcataatgattaa

SEQ ID NO: 63495 - DNA, 672 bp, Homo sapiens
  misc_feature (1)...(672): n = A,T,C or G
ggaatctcttatggtaaaatcccattgtttctcaggaaataaagaaagacgtggtgcaattaactgaaaaaaaaaatggcagaaaaatatggacctatcacaaggacccaagaaggatgagcagaataatttgggtgtcctctcttcggcataatgtctagtannnnnnnnnnnnnnnnnnnnattgctcctggagaacatacagttgtgttgccactcacctggcaaagctgcaattctacccctgggaattctgtgggacctaagactacccttcggaagtctaaattcatttcaattacataaatgatggagaataactttctattgtctccctggtactgtctcaactagtactctagaaataaagcattcaagaaaagttaggttatcagtccagagcagaatccagaataacagtaaacctattacatcactgtttaattctccacataatctaactctagacaaatttgcctcacctctttcctttctcagatgaaaggtgattgacaartaaacttaatcatgttaatatgatcttatccatgattttcctttgttcttaaagatgaaacgtcaaaattgatacaaaagaattttgtgcagtcaggcccctacaaatatctccaatctcatctcctatcaggctattctttacttcctgggatc

SEQ ID NO: 63496 - DNA, 581 bp, Homo sapiens
tttcattacactataagcaaataaatacttgctaagccaacagatatcacagaatttgaaaagtatttaagggaaaaaacatacatacaatagaatagcttgaactagtggtctagactacctacccaatgggactttttgttatatgccatttcataattaatcgaaatggtatataattctagatggggccacaagatcaattgaatcatgagtcagaagtccaggtgtattcactctggaaaacatctcaaaaacacaatcttaggttctacaataacratgttatttatagaagcagctggaatggtcacacatcttgtgacctctggccacataacccctgaggagtaagggattacagaaactactcagtttggttttgggaagcactactatcatccttgttttaagattaaactataagctaaattcctcccaaagtttgcttggcctactacgcccaggaatgaccaaggatggtttagaggtcagaagcatgatggagtcaactatgtcagacttatctcactgtcataatttgtcaaagggatttttttctttctttttatttattatta

SEQ ID NO: 63497 - DNA, 756 bp, Homo sapiens
tctggtccagggcacagctcctgcagctggtcttcttgttacagtagtacatggggttatccttggggcaattctcatacctaaaaatggagatctagaacacagtggacaaaagcttttcttttgtatccacagagagaacttatggtgaggaccaacaggatattatagacaacaaaatctaattgaggaagcaaactgcaaataaatagatagacagatagatagatagatagatagatagatagatagatagatagatagacagacagacagacagacagacagatagatagataagttgcagtagctctgcagtggggaacactgcaatggaatgttctgctcaaggacatgcttttaactggcaaggaagcagcccactcttttaaacaccatgcctcaacctgctcatctgtaaaatgggaatgttgaacttggtgcttttcaaatgctcacttcaaaagtctgaaagttttctattttatgaactgtatgagactgacaaaaaaaaaagtcttgtaagctgtcaaaaactataaaagcctgggtcatcttrtaacttaaatttaaaaatctatatatgatgagcagtgagattatgccaaaccaagatataaaacaaggagattttgcaaagtctgtcatttccacagttcaatatgggccgctgtacacctgactcactctcaaaccctaactttatcaaaacctggcactggtaaagtgaggtcactatcagatgcctcaaaccaa

SEQ ID NO: 63498 - DNA, 553 bp, Homo sapiens
ccagtattttcagtctttatcctttggttccctgtgagatataaatagattattgaagcttctaggcctcttgcatgaaggggccttaaaatgttatacggttgaatatgattataaagttgcaaaagtaaaatagttttgcgctcttgttcttaagcttcaggcccaacaaaactgaatctacccccatataaaagaagttcatcagattctcttatagcctatagaggtaccaaatgggacagggcttctcgcaacttggacacagctaaggacagagctaattgctacactaagagtcacatcttgaattgaccaaataattctattctttccataactaggcctcaggtctggttctcaatattacaggttcaggaactagattttaagcagtytgaccaaggtaattaaccactgggagattaatgcaaactaaccaaactcacaaaagactataaaaagaatgtctatttcttaatgtacaagaaggaatcaataccttaacattaatgattaataccttaatattgactagggtatatggtagaca

SEQ ID NO: 63499 - DNA, 1071 bp, Homo sapiens
tgtttccaagttgaaaacctttgggtctttctatgcgaacggattgaagaaacggtaagtatagtacgttttaaagcttctattatctcgttctttgatctaaaaaaaaatccaaacctttttttttttttttttttttttttttttttttttttttgagacggagtttmactcttgttgcccaggctggagtgcaatggcatggtctcggctcaccgcaacctctgcctcctgggttcaagcgattatcctgcctcagcctcccaagtagctgggattacaggcatcaccaccacgcccggctaagtttgtatttttagtagagacagggtttctccatgttggttaggctggtctcgaactcgcaacctcaggtgatccgcccgcctcggcctcccaaagtgttgggattacaggcgtgagccaccgctcccggccctttaatctgtcttaaacaaaataaaaaattagcattctccaaatatttttatcaaaattgttgcttttagaaccatccagaaataacaccttgcccattggccaggtttctttttcgtttgtattacctttccgttcaagagtagaaggcatgagaagttatagtttatgagtaactgtttcaggaaacaggaggctttgtaggctgtgatacttttaaagtatttgtggacagtgtcacttgaaaaagcaggtgtgttcaatgtggtgtgtccagatatgcaattggttgggagaataaacttgaagcagtcaacttgcattaatgttagcttgggatatgcttcagaacacctcagacatgcttaaagtcattttttttggttcactttgtgctttcaaatattgaggacatcaattacaaaatgttttaaaataatccaggttatagattcaagctatttttgtcattggtatgataaacctaaagcctagtgcttaataaaacatactctcttaatggaagagaaaaaaattaagaagggatagaattatatggagattttttttttcaaatacaaacagtttattaaaaaatagttaatggaagtggaatagaaggtaaaatgtcaa

SEQ ID NO: 63500 - DNA, 1071 bp, Homo sapiens
tgtttccaagttgaaaacctttgggtctttctatgcgaacggattgaagaaacggtaagtatagtacgttttaaagcttctattatctcgttctttgatctaaaaaaaaatccaaacctttttttttttttttttttttttttttttttttttttttgagacggagtttcactcttgttgcccaggctggagtgcaatggcatggtctcggctcaccgcaacctctgcctcctgggttcaagcgattatcctgcctcagcctcccaagtagctgggattacaggcatcaccaccacgcccggctaagtttgtatttttagtagagacagggtttctccatgttggttaggctggtctcgaactcgcaacctcaggtgatccgcccgcctcggcctcccaaagtgttgggattacaggcgtgagccaccgctcccggccctttaatctgtcttaaacaaaataaaaaattagcattctccaaatatttttatcaaaattgttgcttttagaaccatccagaaataacaccttgcccattggccaggtttctttttcgtttgtattacctttccgttcaagagtagaaggcatgagaagttatagtttatgagtaactgtttcaggaaacargaggctttgtaggctgtgatacttttaaagtatttgtggacagtgtcacttgaaaaagcaggtgtgttcaatgtggtgtgtccagatatgcaattggttgggagaataaacttgaagcagtcaacttgcattaatgttagcttgggatatgcttcagaacacctcagacatgcttaaagtcattttttttggttcactttgtgctttcaaatattgaggacatcaattacaaaatgttttaaaataatccaggttatagattcaagctatttttgtcattggtatgataaacctaaagcctagtgcttaataaaacatactctcttaatggaagagaaaaaaattaagaagggatagaattatatggagattttttttttcaaatacaaacagtttattaaaaaatagttaatggaagtggaatagaaggtaaaatgtcaa

SEQ ID NO: 63501 - DNA, 1071 bp, Homo sapiens
tgtttccaagttgaaaacctttgggtctttctatgcgaacggattgaagaaacggtaagtatagtacgttttaaagcttctattatctcgttctttgatctaaaaaaaaatccaaacctttttttttttttttttttttttttttttttttttttttgagacggagtttcactcttgttgcccaggctggagtgcaatggcatggtctcggctcaccgcaacctctgcctcctgggttcaagcgattatcctgcctcagcctcccaagtagctgggattacaggcatcaccaccacgcccggctaagtttgtatttttagtagagacagggtttctccatgttggttaggctggtctcgaactcgcaacctcaggtgatccgcccgcctcggcctcccaaagtgttgggattacaggcgtgagccaccgctcccggccctttaatctgtcttaaacaaaataaaaaattagcattctccaaatatttttatcaaaattgttgcttttagaaccatccagaaataacaccttgcccattggccaggtttctttttcgtttgtattacctttccgttcaagagtagaaggcatgagaagttatagtttatgagtaactgtttcaggaaacaggaggctttgtaggctgtgatacttttaaagtatttgtggacagtgycacttgaaaaagcaggtgtgttcaatgtggtgtgtccagatatgcaattggttgggagaataaacttgaagcagtcaacttgcattaatgttagcttgggatatgcttcagaacacctcagacatgcttaaagtcattttttttggttcactttgtgctttcaaatattgaggacatcaattacaaaatgttttaaaataatccaggttatagattcaagctatttttgtcattggtatgataaacctaaagcctagtgcttaataaaacatactctcttaatggaagagaaaaaaattaagaagggatagaattatatggagattttttttttcaaatacaaacagtttattaaaaaatagttaatggaagtggaatagaaggtaaaatgtcaa

SEQ ID NO: 63502 - DNA, 526 bp, Homo sapiens
ccagcctgggcracaaagagtgaaactccgtctcaaaaaaataaataaaataaataaataaataaaaataaacattgttcagtggttggtcttcactaaaacaatgaactatatataacagaaatatctgaagaaaaaaatacgtatgccaagtcatttataggaaccatgtatgggctgcattatgggagttcattattttggatcatctgtattttccataatgtgcacagcatgtatttgtttttaattgtggtaaaatacacatatttcatgtattattttcaaaataaaaagagcataagtcaagggagccaaacacaatgtacgaagttacaaacactcctagctagactgatcttttcaagtcttacatcaaaatcccataaagcatttctctagcactcctgtccctcctttaaagctttttcccctcttgtgttcctatccttcatataacattttacttctccaattatacaagtgaggaacttcagattcttcaatactaccccttttctcacca

SEQ ID NO: 63503 - DNA, 596 bp, Homo sapiens
caaaagtcccccaatccacaccacttacccttagtcacgtatgcaacttctactggtttcccccaacccctagacctttaattgaataaatatttactaaatgtctacaaagggccagtcctaaaatgtatacgactgtgaaatagacaaacagggtttttagccagtcctaaaatgtatacgactgtgaaatagacaaacagggtttttagcctcttgaggattgaggtcccctcagctggggatacaagatagcaagaggtgagtttaagacaatggataaaagcaatgctagaggcatatgggagcaccagattctgacagagtgggagagaagtcttccagactgaaaactgaagaataagcaggcaccaggatgtggatggaaaatgatcctgagcttacctttcattcataatttccttccttctttggctatytatttgattcataagatgtttccaaggtcatttcattttcttattattagagtttaattaaatgataatttaacctaaatataatttcattttaccacgatgtttctagggtatctcagagtaaatgcttcttttgattgataaataaattttaga

SEQ ID NO: 63504 - DNA, 639 bp, Homo sapiens
tatgggaaagcaaaaccaactctataaaactctcattgtatcacctagtaatcctaagtgggtaaaaataaaacccagaaacgactaggttgcagattgttagatgtgccagtacccctacctcttgccacttcggcccatacacacacctctataccctgtgccactatcctaactcaggccttggtcatatctcactggactcccacaacttcccagtctagtctcctacataacaaggctactctattccatcctccaaaggaattgtgtctctccttaaagacccccattggcttctccttygctcataatctgaagttctagcctcttagcatgacctactcccatctactctatttctggattcatctcctgcctcactctaacacatacagcattgcagccacactgagtttcttgctactgtcaaataggctgtgtatttctaaaagccatatcttgtgcactctagtccctctaacagaacaatgactgttctcctggcaaattcctcttcactgttcaatgctcatgtcacatccttgggtaaagccttgctgaccccctcctaacagccccgccagcaccttgctcattccctaattataagagacataagtgttgtaattatgcatg

SEQ ID NO: 63505 - DNA, 1391 bp, Homo sapiens
aaaactgagtgtagaatcaataaaattatcactattatgaaattcaaagttcmcaatctgtggaaaaaagaggttaaaaaaaaacaagaagtaaccatgaaccacataagaaactctcatggcagggaaaatattccctcaggaaagtaaatgataaatatctttacattatgtcattgagctgttatcattcacatcatttcattttcaattttaaggaaaaaaatacttacttctgaacgcttgttccaatattagctaaaaattcttccagttgttcattaagattttcagaacccatcttaaagaaacttatctggagagtggggagtggggggaattgaacaatacaaaaatagattaagcaatacttaaagtaaatcatataaacaatctctaagacacatggttaagtaaaaaacaaaggaatattcccatttgtgtaaaaatacattgtagtttgtgacttctactgcacagggagccattaaggaagttagacttaaattccactgcatatccttttatattttttgaattggaacaagtaatatatacatatggttaacaatcttttaaaattggaaaataaattttaaagtatttccaataaattatataaagtatttcatgtttactacaaagataagttttctatctgaggaataatcagtaaagtactcttttacctaaatagattcaatttttttttttttttttgagacagggtctcgtctgtcatccagactgcacaataaaacctcactgcagcctcagcctcctaggctcaagggatccttccatttcagcctcccaagttgctgggatcaccgaggcatgctaccaagcccagctaattttttcattttttgtagagatggggtctccctacgttgctgaggctagtctcaaactcctggactcaaatgatcctcctacctcggcctaccaaagtgctcgattataggcataaggcaccgtgcctgccctcaattttctttaaactcttgatttttaggagactgacactttgtcttatactacccaaattttctagcccccttcctgatgtactctttgggcacgttggagttcatctattatttttaactcaggaagtatgcaaggaatatgggataaactcaaacttgtttattctttttcagatctattatgaagcaagtgtttagttgaagctctagcaataggtgtaactctgaaattcatttagttctctcagtccccagctatggtgaacaagtggtttcatttacctaaaatatttgaaatcttcatttgcaaggaaaaccattcttcctaacttccttaaaataatagtctgatgacattttaaaaataacttcttaaaacacagacataaacaaggatgt

SEQ ID NO: 63506 - DNA, 1391 bp, Homo sapiens
aaaactgagtgtagaatcaataaaattatcactattatgaaattcaaagttcacaatctgtggaaaaaagaggttaaaaaaaamcaagaagtaaccatgaaccacataagaaactctcatggcagggaaaatattccctcaggaaagtaaatgataaatatctttacattatgtcattgagctgttatcattcacatcatttcattttcaattttaaggaaaaaaatacttacttctgaacgcttgttccaatattagctaaaaattcttccagttgttcattaagattttcagaacccatcttaaagaaacttatctggagagtggggagtggggggaattgaacaatacaaaaatagattaagcaatacttaaagtaaatcatataaacaatctctaagacacatggttaagtaaaaaacaaaggaatattcccatttgtgtaaaaatacattgtagtttgtgacttctactgcacagggagccattaaggaagttagacttaaattccactgcatatccttttatattttttgaattggaacaagtaatatatacatatggttaacaatcttttaaaattggaaaataaattttaaagtatttccaataaattatataaagtatttcatgtttactacaaagataagttttctatctgaggaataatcagtaaagtactcttttacctaaatagattcaatttttttttttttttttgagacagggtctcgtctgtcatccagactgcacaataaaacctcactgcagcctcagcctcctaggctcaagggatccttccatttcagcctcccaagttgctgggatcaccgaggcatgctaccaagcccagctaattttttcattttttgtagagatggggtctccctacgttgctgaggctagtctcaaactcctggactcaaatgatcctcctacctcggcctaccaaagtgctcgattataggcataaggcaccgtgcctgccctcaattttctttaaactcttgatttttaggagactgacactttgtcttatactacccaaattttctagcccccttcctgatgtactctttgggcacgttggagttcatctattatttttaactcaggaagtatgcaaggaatatgggataaactcaaacttgtttattctttttcagatctattatgaagcaagtgtttagttgaagctctagcaataggtgtaactctgaaattcatttagttctctcagtccccagctatggtgaacaagtggtttcatttacctaaaatatttgaaatcttcatttgcaaggaaaaccattcttcctaacttccttaaaataatagtctgatgacattttaaaaataacttcttaaaacacagacataaacaaggatgt

SEQ ID NO: 63507 - DNA, 1391 bp, Homo sapiens
aaaactgagtgtagaatcaataaaattatcactattatgaaattcaaagttcacaatctgtggaaaaaagaggttaaaaaaaaacaagaagtaaccatgamccacataagaaactctcatggcagggaaaatattccctcaggaaagtaaatgataaatatctttacattatgtcattgagctgttatcattcacatcatttcattttcaattttaaggaaaaaaatacttacttctgaacgcttgttccaatattagctaaaaattcttccagttgttcattaagattttcagaacccatcttaaagaaacttatctggagagtggggagtggggggaattgaacaatacaaaaatagattaagcaatacttaaagtaaatcatataaacaatctctaagacacatggttaagtaaaaaacaaaggaatattcccatttgtgtaaaaatacattgtagtttgtgacttctactgcacagggagccattaaggaagttagacttaaattccactgcatatccttttatattttttgaattggaacaagtaatatatacatatggttaacaatcttttaaaattggaaaataaattttaaagtatttccaataaattatataaagtatttcatgtttactacaaagataagttttctatctgaggaataatcagtaaagtactcttttacctaaatagattcaatttttttttttttttttgagacagggtctcgtctgtcatccagactgcacaataaaacctcactgcagcctcagcctcctaggctcaagggatccttccatttcagcctcccaagttgctgggatcaccgaggcatgctaccaagcccagctaattttttcattttttgtagagatggggtctccctacgttgctgaggctagtctcaaactcctggactcaaatgatcctcctacctcggcctaccaaagtgctcgattataggcataaggcaccgtgcctgccctcaattttctttaaactcttgatttttaggagactgacactttgtcttatactacccaaattttctagcccccttcctgatgtactctttgggcacgttggagttcatctattatttttaactcaggaagtatgcaaggaatatgggataaactcaaacttgtttattctttttcagatctattatgaagcaagtgtttagttgaagctctagcaataggtgtaactctgaaattcatttagttctctcagtccccagctatggtgaacaagtggtttcatttacctaaaatatttgaaatcttcatttgcaaggaaaaccattcttcctaacttccttaaaataatagtctgatgacattttaaaaataacttcttaaaacacagacataaacaaggatgt

SEQ ID NO: 63508 - DNA, 1391 bp, Homo sapiens
aaaactgagtgtagaatcaataaaattatcactattatgaaattcaaagttcacaatctgtggaaaaaagaggttaaaaaaaaacaagaagtaaccatgaaccacataagaaactctcatggcagggaaaatattccctcaggaaagtaaatgataaatatctttacattatgtcattgagctgttatcattcacatcatttcattttcaattttaaggaaaaaaawacttacttctgaacgcttgttccaatattagctaaaaattcttccagttgttcattaagattttcagaacccatcttaaagaaacttatctggagagtggggagtggggggaattgaacaatacaaaaatagattaagcaatacttaaagtaaatcatataaacaatctctaagacacatggttaagtaaaaaacaaaggaatattcccatttgtgtaaaaatacattgtagtttgtgacttctactgcacagggagccattaaggaagttagacttaaattccactgcatatccttttatattttttgaattggaacaagtaatatatacatatggttaacaatcttttaaaattggaaaataaattttaaagtatttccaataaattatataaagtatttcatgtttactacaaagataagttttctatctgaggaataatcagtaaagtactcttttacctaaatagattcaatttttttttttttttttgagacagggtctcgtctgtcatccagactgcacaataaaacctcactgcagcctcagcctcctaggctcaagggatccttccatttcagcctcccaagttgctgggatcaccgaggcatgctaccaagcccagctaattttttcattttttgtagagatggggtctccctacgttgctgaggctagtctcaaactcctggactcaaatgatcctcctacctcggcctaccaaagtgctcgattataggcataaggcaccgtgcctgccctcaattttctttaaactcttgatttttaggagactgacactttgtcttatactacccaaattttctagcccccttcctgatgtactctttgggcacgttggagttcatctattatttttaactcaggaagtatgcaaggaatatgggataaactcaaacttgtttattctttttcagatctattatgaagcaagtgtttagttgaagctctagcaataggtgtaactctgaaattcatttagttctctcagtccccagctatggtgaacaagtggtttcatttacctaaaatatttgaaatcttcatttgcaaggaaaaccattcttcctaacttccttaaaataatagtctgatgacattttaaaaataacttcttaaaacacagacataaacaaggatgt

SEQ ID NO: 63509 - DNA, 1391 bp, Homo sapiens
aaaactgagtgtagaatcaataaaattatcactattatgaaattcaaagttcacaatctgtggaaaaaagaggttaaaaaaaaacaagaagtaaccatgaaccacataagaaactctcatggcagggaaaatattccctcaggaaagtaaatgataaatatctttacattatgtcattgagctgttatcattcacatcatttcattttcaattttaaggaaaaaaatacttacttctgaacgcttgttccaatattagctaaaaattcttccagttgttcattaagattttcagaacccatcttaaagaaacttatctggagagtggggagtggggggaattgaacaatacaaaaatagattaagcaatacttaaagtaaatcatataaacaatctctaagacacatggttaagtaaaaaacaaaggaatattcccatttgtgtaaaaatacattgtagtttgtgacttctactgcacagggagccattaaggaagttagacttaaattccactgcatatccttttatattttttgaattggaacaagtaatatatacatatggttaacaatcttttaaaattggaaaataaattttaaagtatttccaataaattatataaagtatttcatgtttactacaaagataagttttctatctgaggaataatcagtaaagtactcttttacctaaatagattcaatttttttttttttttttgagacagggtctcgtctgtcatccagactgcacaataaaacctcactgcagcctcagcctcctaggctcaagggatccttccatttcagcctcccaagttgctgggatcaccgaggcatgctaccaagcccagctaattttttcattttttgtagagatggggtctccctacgttgctgaggctagtctcaaactcctggactcaaatgatcctcctacctcggcctaccaaagtgctcgattataggcataaggcaccgtgcctgccctcaattttctttaarctcttgatttttaggagactgacactttgtcttatactacccaaattttctagcccccttcctgatgtactctttgggcacgttggagttcatctattatttttaactcaggaagtatgcaaggaatatgggataaactcaaacttgtttattctttttcagatctattatgaagcaagtgtttagttgaagctctagcaataggtgtaactctgaaattcatttagttctctcagtccccagctatggtgaacaagtggtttcatttacctaaaatatttgaaatcttcatttgcaaggaaaaccattcttcctaacttccttaaaataatagtctgatgacattttaaaaataacttcttaaaacacagacataaacaaggatgt

SEQ ID NO: 63510 - DNA, 1859 bp, Homo sapiens
  misc_feature (1)...(1859): n = A,T,C or G
cattaaatcatctctagattacttataatacctattacaaagtaaatgatgtaaataatttaaatgctgtattgcttttatttaaatttttctttttatactatcttttctcttattttctttttttttattttttaagacggactctcactctgttgcccaggctggagtgtggtagtgtggcaacctccacctctcaggttcaagtgattctcctgcctcagcctgggattacaggcacgtgccaccatacctggctaatttttttgtatttttggtagagatggggtctccccatattggccaggctcatcttgaactcctggtctcaagtgatccgcccgcctcggcctgcaaagtgctaggattacaggcgtgagtcccctgcacccggccttattgtcttttttttcaaaaattttcatctgattggttgaacctgcagttaaggaggaacaactgtacttcattcgctaaggctgggttctagatctagctgctccatgaggacttccttgcttaatttttttttttctggactgatttttatctaagcttctaaagtacggatagccttaacataaatttcttttctccctggttaaaatgagaatttacttaactgccaaccttcacagtgctaggtgcacaggaggtagtcaggtacttaattaagcctgctgaaactccagggagtacccccagggacatgcagaactgacctgtacctcaggacttcaggttgaaaccttggatcgaggctgtgtagttggaccacaataattataaatctctcatagaattgccttccctgaattgaattgaattttaaaaccttggcattttttgagggttgaggaaattaattctctactgcatttgctatttaaaaaaagttgtgggaggacattgtctgtcacatcactcaaggtccccttacataaagtcccacattttttttaaataattctgtgccagataagccctgtttccacagagtatctcttatgccactgggcgtaagagcacaatatatgttagctctctttccattttggaaaccataggtctgactgggtttcccttttccccctgacagtcagaaagctcagataaattaattaaagcataatcacatgcattaaagctttatcacatatataattgttgtgtatgttgacatacatattttcctttccagtgttttaaaatttctccttagattttcttagttgctattttaaagctttgttctaataataaaaatgtttgtagtcattatgaattttgggaaatagaaaaaaagaagtcgccaatactcttataacgcagtgattttagcattcataaagatttgaatatataattttccttctatatctttagaaattgccaagtaaaacagtctagaagtcacagtggcttcaactgctcattctctcatgtaaaagaagtcctgagataggcagtctagatctgatatggtggctccattaagttgtcaagaattnnnnnnnnnnnnnnnnnnnnnnnnnnnnnnnnnnnnnnnnnnnnnnnnnnnnnnnnnnnnnnnnnnnnnnnnnnnnnnnnnnnnnnnnnnnnnnnnnnnnaaagaattatcccaaatgtcaatagtgctgaggttgagaaaccttgtgggccgaagcaataatatatgtgatattgcaggcttaaagtgtgattatagttattctaattacattaaaatcatttcataaggattacattttattatttttatttattaattttttgagacagagtcttgctctgttgcccaggmtggagtacagtggcacgaccttggctcactgcaacctccatctcctgggttcaag

SEQ ID NO: 63511 - DNA, 668 bp, Homo sapiens
gtcactttcctatttttttaattatctccagttcttggggttatgagtcctactgtttggagaatctcctgactctgtcatagtgacagtttagctcctatgattttttttttttttaattgtgagcttatctttaactggcactgttttcatatgtaagccctgagttacrgttgtttcaatggacatgtttatttctgctgggttttgaggggtttcattagtccaagattagttttcttcactataattttgtgacctaaggtttttgtacttcatggagagtttaacttgggttctgcctagccacacacttggagctttaggcaaagataagcttccttattgtttcactgagccagtgactgaagttttcttgcctctttttgacataattgactgtccggggcacagactctattctagggttccaagtccaaccccctgctttgtgttccttttcatcacaccacctgaacccacacagttgttacagaagcagacaaacaaataaataaacaaaatttagtcattaagtgatggaccttacatctaggtctgaaatttccatgagatgccttgacatcagctgaaatttttcattctgactttgggtacctcttcatttctggaaataaatggggagtggggatgtctcttttcttcat

SEQ ID NO: 63512 - DNA, 1328 bp, Homo sapiens
ccaaaaagttgtctactttcagaaatttcctaaaatgacttacttaactcattttagaaaagtcttgttccttgtatagttgaatcaaggccccaccatggtcaaaatgtcctaggttcaccatctacattgcttactaagtcatgatcagcagcacttcctttcctttaacactctgtagataaagcctttgagaattttatcagatttgaataatatttcttattgccacctttcaggaaagctacttaggtcaagaacagttaaaatcaattaaataatgagttacatataaaatttaccacacaatgaagtgttgggttaaacaattttctttctaatcttttattttaataatggagtctcactgttttagttataattaaagaaaaagaggtgtttattcctggtattatgaaagcctgtctagctgatatggtattttatgttttttaaagaagagaaattccttaaaaaataagaatacactgtagtttacagagtctctaaagtgagttttaaagagattaactttaattaattataaatgtgattgcaagatattaaaattaataacccaattcttagctaaaattaattgaaaatgatgcttaatgcacagkttgcttagcaattacatttttatattttcacattaattttccaaaaagctcctgctcagtttatgcatgatagcaaaaaacagctcattatgattccaaaacaattttttctggggtttgtaagcaacatcttgttaaaacaaaaacaaggctttaaatctctagttcttaaccattctattttatttgatatatatttattagacagagggtcttttgagaatctggtaaaagctatggccccttattccagaaaaagacagatgcaatcatattcacaattttgtcccatgctcatagagggtttcctgacaacttgatgtctttctgtggaccacccaactaaccaaagacccaaagttaagaactactgtcccaaaacaaagcaaacaattatggtaaggtcaggagacatgtcaatgtttttgctttgtaggaactctttattttcttattaagttaaatccattggtggaataaaaagaatattttatggattttttaaaatttatggagctaaatttacaaaggtgtttagaggtggaaaacacatgatggtacattttaacacagaaaatggggaagacacggtgaaatgtcatcctttagccatttatttcctaaaaggcctcaaaagatcatgtttccatgtgtttaacaatctgctaaaataacaacaagcctcccactcataagtgctgccat

SEQ ID NO: 63513 - DNA, 1786 bp, Homo sapiens
atattgagattgggcaaacagattactgaggaggtgtccatttggggcagttatttttgcattaacaaaggattcacagtagtattcccagaaatgttgtgaatcgcaactctggcatggtttacaaaaattcagattgtgatcaactcattcaggaatacatctgttactaagtgatgggcaatataaaatagtggttaagctctgtcatttaaaatctgtatattttggggcaagttacatggtctctctaaatctgaatttcatcctttgtgaaatggacaatgaagcaactttcctcacagtttgttgtgaagtttaaatgagataatgcatatataatacatgccccatacattgtggatactcaataatagacatgattgtggctgtgtttatagaaaatgcagtacctaggaataattccataatacctcacaattctacttgttcttttctcattctcgattctttgaactcttatccctgcacaactttggcacagccttccacttccctcattttcaaatcttgacctttcttttgggagataaatagcactacaccttcatattctccaataaaatgttaacataaccacttggactaaaacctggatgtcctctgaggaccttattactcggcaaccctcttgctctctcttcttcttagcgcattctacccttcacaaccgggaggagacatcgtgtccccctctacactatgctgtctttaaatcaaagtttcccttcttcctcctacactgcatctttgaggctcaatccttctagatagatcgtcatctttttcccatggtgatcatttacagagcttttcctaggcactttccatctttcactaacttttggcctcagcattttttttttttttgaggtggagtctcagttttgagatggagtctcaatctgtcacccaggctggattgcagtggcacgatctcagctcactgcaacctctgcctcccgggttcaagcaattctcctgcctcagccttctaagtagcygggattacaggtgcacgccaccatgcctagctaatttttgtatttttagtagaggtggggtttcaccatgttggctgggctcgtctcgaactcctgacgtcagatgatccacctgcctgggcctcccaaagtgccgggattacaggcatgagccaccacgcctggcttggcctcagtatctttatttcctgtcatcattcttgggaacttggcttgtcagcttcttcacttctctttgcagtgacctttccatctccacccactccaaaatctcaaatgcatatattcttctctccaaccacaacttcccataattctggtgcttcctacttcatggcagtaaatccattgatcctgtttcttactcataatccttcaactcatgtatcttatcactttccttcctttctagcttagatttggtgatacattaacttaatttctcccttccaaatattcaaatgctcttgccctgtctccttctgctgtataaactttgtaaaattctaatcttggtttgacttttcttgccctttccatatctgctcatgaagaagggagcagatatagcttgttcctcatagctgaggaataaaccaaaacatcagacctcaaatggcatctgaacatgactccataattctacattaaaaaaattaatcagtattttaaaatttgttttactctcatttctttccttctcattttagctaataacttagtgtcatcacgaacatagaaactataagatggagactttg

SEQ ID NO: 63514 - DNA, 1558 bp, Homo sapiens
agaggtagtttaaatcctccagaacacagtcactgcccacagtggtaaatttattaattgacaaacctgggatatatcatggagggtaaagatttaagagatccttcaggtcatggtcttttcttccaggaaattcatctcatgagaaatgaaaagaaaaaaaaaatatgccagtggcatgtacactgctggaaccttcaaaatctactgctttgacacttccacatttttcttgctattacaaacatcatctcttccttgctagagatgttaccgcctccagcaaagtctggataagctagggtggcagacacagttagtaagggacatgaagaatggggaaagaagaagatgggagcagggcctgtcttgcctgggaacgctcacatagatgcatttgtctggtggaccagctggagatggaggttttaatatggyctcacccacatctggggtcttggcaaagatggctagaaagctgggacatctctttccatgtggtttctcatcattcaggcatcaagcgcaagcttctttacatgacaatttattctaagaaggtgggaatggaggctacaaggcgtttaaggcctaggctctagaatttccaggtgtcacttcttctactttctattcatcagagcaagtcacaaaggcagctgagagtcaaaggagaagtagatgtattgcatgctaggaagatcagaacatcacattgcaaaaggctatggacacagagattcatcctgtattgagggccactattaaaacagtagccataccagaaacgtttcccttcacttggctaattcatatttgtcatatggctgtcagtttgtttgccacttccttctgggatcccgtgatctcctgggcctattcctcttttttattttttacttttgagaactagtcttgctctgtcgcccaggctggagtgcaatggtgtaatcccagctcacctcaacctccccctcccgggttcaagtgatcctcctgcctcagcctccagagtaactgggattacgggtacacaccaccatgcctggctaatttttgtaattttagtagagatggggtttcaccatgttggccatgctggtctcaaactcctcacctcaggtgatccacccacctgggcctcccaaaatgctgggattacaggcgtgagccaatgcgcctggccctattactcttatagcccttatcagagtctctgaaatcacccgtttccatgtgcgtcttctccagattgtgagtccaccattttatctctagggtatagtgcagtgcctgggacctgggaagattccactaaatattagttaaatggatgaggctcaaagagctgagaatcttatccatgattacacagaaaataaactcaggtgcacttccaggggatcttacctcaggaaaggaagacattacatcaactttttaaataatagtgattaatacaatggaatgatcgtcttactttggcttacaacaatcaggacgtaactttggcagtggtccttctcattgtcaggtttgttctggggaaaagtctgcc

SEQ ID NO: 63515 - DNA, 1558 bp, Homo sapiens
agaggtagtttaaatcctccagaacacagtcactgcccacagtggtaaatttattaattgacaaacctgggatatatcatggagggtaaagatttaagagatccttcaggtcatggtcttttcttccaggaaattcatctcatgagaaatgaaaagaaaaaaaaaatatgccagtggcatgtacactgctggaaccttcaaaatctactgctttgacacttccacatttttcttgctattacaaacatcatctcttccttgctagagatgttaccgcctccagcaaagtctggataagctagggtggcagacacagttagtaagggacatgaagaatggggaaagaagaagatgggagcagggcctgtcttgcctgggaacgctcacatagatgcatttgtctggtggaccagctggagatggaggttttaatatggtctcacccacatctggggtcttggcaaagatggctagaaagctgggacatctctytccatgtggtttctcatcattcaggcatcaagcgcaagcttctttacatgacaatttattctaagaaggtgggaatggaggctacaaggcgtttaaggcctaggctctagaatttccaggtgtcacttcttctactttctattcatcagagcaagtcacaaaggcagctgagagtcaaaggagaagtagatgtattgcatgctaggaagatcagaacatcacattgcaaaaggctatggacacagagattcatcctgtattgagggccactattaaaacagtagccataccagaaacgtttcccttcacttggctaattcatatttgtcatatggctgtcagtttgtttgccacttccttctgggatcccgtgatctcctgggcctattcctcttttttattttttacttttgagaactagtcttgctctgtcgcccaggctggagtgcaatggtgtaatcccagctcacctcaacctccccctcccgggttcaagtgatcctcctgcctcagcctccagagtaactgggattacgggtacacaccaccatgcctggctaatttttgtaattttagtagagatggggtttcaccatgttggccatgctggtctcaaactcctcacctcaggtgatccacccacctgggcctcccaaaatgctgggattacaggcgtgagccaatgcgcctggccctattactcttatagcccttatcagagtctctgaaatcacccgtttccatgtgcgtcttctccagattgtgagtccaccattttatctctagggtatagtgcagtgcctgggacctgggaagattccactaaatattagttaaatggatgaggctcaaagagctgagaatcttatccatgattacacagaaaataaactcaggtgcacttccaggggatcttacctcaggaaaggaagacattacatcaactttttaaataatagtgattaatacaatggaatgatcgtcttactttggcttacaacaatcaggacgtaactttggcagtggtccttctcattgtcaggtttgttctggggaaaagtctgcc

SEQ ID NO: 63516 - DNA, 1558 bp, Homo sapiens
agaggtagtttaaatcctccagaacacagtcactgcccacagtggtaaatttattaattgacaaacctgggatatatcatggagggtaaagatttaagagatccttcaggtcatggtcttttcttccaggaaattcatctcatgagaaatgaaaagaaaaaaaaaatatgccagtggcatgtacactgctggaaccttcaaaatctactgctttgacacttccacatttttcttgctattacaaacatcatctcttccttgctagagatgttaccgcctccagcaaagtctggataagctagggtggcagacacagttagtaagggacatgaagaatggggaaagaagaagatgggagcagggcctgtcttgcctgggaacgctcacatagatgcatttgtctggtggaccagctggagatggaggttttaatatggtctcacccacatctggggtcttggcaaagatggctagaaagctgggacatctctttccatgtggtttctcatcattcaggcatcaagcgcaagcttctttacatgacaatttattctaagaaggtgggaatggaggctacaaggcgtttaaggcctaggctctagaatttccaggtgtcacttcttctactttctattcatcagagcaagtcacaaaggcagctgagagtcaaaggagaagtagatgtattgcatgctaggaagatcagaacatcacattgcaaaaggctatggacacagagattcatcctgtattgagggccactattaaaacagtagccataccagaaacgtttcccttcacttggctaattcatatttgtcatatggstgtcagtttgtttgccacttccttctgggatcccgtgatctcctgggcctattcctcttttttattttttacttttgagaactagtcttgctctgtcgcccaggctggagtgcaatggtgtaatcccagctcacctcaacctccccctcccgggttcaagtgatcctcctgcctcagcctccagagtaactgggattacgggtacacaccaccatgcctggctaatttttgtaattttagtagagatggggtttcaccatgttggccatgctggtctcaaactcctcacctcaggtgatccacccacctgggcctcccaaaatgctgggattacaggcgtgagccaatgcgcctggccctattactcttatagcccttatcagagtctctgaaatcacccgtttccatgtgcgtcttctccagattgtgagtccaccattttatctctagggtatagtgcagtgcctgggacctgggaagattccactaaatattagttaaatggatgaggctcaaagagctgagaatcttatccatgattacacagaaaataaactcaggtgcacttccaggggatcttacctcaggaaaggaagacattacatcaactttttaaataatagtgattaatacaatggaatgatcgtcttactttggcttacaacaatcaggacgtaactttggcagtggtccttctcattgtcaggtttgttctggggaaaagtctgcc

SEQ ID NO: 63517 - DNA, 597 bp, Homo sapiens
cagcaacgtttcaccagtgttctagtgttctcacaacgattttctatttcctcctttccttttgcatctattatttggaattattctgtaagaagttgtcctttctctaccatttacttttattcaatcatttatttatatcagtatggactaaattgtgtttattttattctgcttcataattcaatattttattttgtctgaaattggtctagctttggccattggtagctcttttaggttggctcctgtgttctctcaatgtgcccccccgcttttcttgagtacttactttttggtaccatgacatcctccaggctcatcttcttttatccctccccagccctagacaaatcacttttccaaggagctctgtaattgtattaaaccatagtggtggatagtttgaaccctctcctttcattcagggaatgagaacagaggcagaagagcagctaaggaacttcagwtgagtccaacattcagagactgagtagagaagaggttgggagccaacaaatgaaaagagaaggaaccacgaaagaaatgggagcaaacttagagcatggtatcagagaagctgagaagacattctca

SEQ ID NO: 63518 - DNA, 537 bp, Homo sapiens
ttttccctgccctcccctatcagacaccagcaatgttctttacagtaatgggarcatgaaccgcactgacctcttcctaccaaactgaaacagggcaggcagtgcagccttcctttgatgcaaaggttgaactaaactctcctgaatgtatcttgaacccctcaagtttataaatcacttggtaatcttggccctgcttttcgcaatgtgattctgcaggatccaaaaagttccaggaatgggctttttcaacaagtcccctgtaaatgctgactgtgctttcccagacacattattagcattagcgagagaaagcaggcacagcagagtcccttacacccaccacatttgtcacaaaacaaatacatctggtacaaataaagacaaccaatcatcatgctgaaatattttttgttggcttttttaagtttacagggacaacagaagacagcaatatctgagtaagtctgctcttgggaaatgtgtatgcatgtactaaaaaaatgtttattaagcaggtactatgtgctctggagc

SEQ ID NO: 63519 - DNA, 537 bp, Homo sapiens
ttttccctgccctcccctatcagacaccagcaatgttctttacagtaatgggagcatgaaccgcactgacctcttcctaccaaactgaaacagggcaggcagtgcagccttcctttgaygcaaaggttgaactaaactctcctgaatgtatcttgaacccctcaagtttataaatcacttggtaatcttggccctgcttttcgcaatgtgattctgcaggatccaaaaagttccaggaatgggctttttcaacaagtcccctgtaaatgctgactgtgctttcccagacacattattagcattagcgagagaaagcaggcacagcagagtcccttacacccaccacatttgtcacaaaacaaatacatctggtacaaataaagacaaccaatcatcatgctgaaatattttttgttggcttttttaagtttacagggacaacagaagacagcaatatctgagtaagtctgctcttgggaaatgtgtatgcatgtactaaaaaaatgtttattaagcaggtactatgtgctctggagc

SEQ ID NO: 63520 - DNA, 1095 bp, Homo sapiens
cacaacatattttccttattttttattttattttttttgaggtagggtctcactctgttgcccaggcagaagtgcagtggtgcagtcatggctcactgcagcctcaactacctggagtaaagagatccccctgcctcagccccgagtagctgaaaccacagctgcctgccattatgcccagctattttttttttttaatttgtagagatgaggtcttactgtgttgccaatgctggtcttgaacccctgaggtcaagcaatcctcccaactcagcctcccaaagttctggaattataggcatgagccactgcatccagccatatcttttaatgacaacattgcagggctaattcaatttttcctggaatgatttaatggcatttattgttattgtcctcacctacaggcagtggcagtatctagttttccctctcaaaatgttcaggggataatattcagtatctttaattaatgagattccagggccatcaactcggcatctctgtaaagacataaaaataacaagacaaacaayagaaaataggcaacacaaaggaaagctgaaggtgtcagtgaaacttctctaacacaatacactttaaagaaatatgtactttaacaatcctatcggattttttattgttaactgaaattataagttgcagtagagctgagaaatggaactttaacccaaataaagcatggctatctagccggttaattcaaggggcccaatctactgatttcttctcagaacatgaggcagaggccatgcagtgttcgaggtgagaagtttccaactgtgcagtaattgctagtagcacacaataaacaaatgttcttaccaaaaggcagatagactgaaattgctagagccaggacaataaatgcacagagaaatgaattaaagaaatacattctaattgaatgcattgtacaacttatcaccacagaccaaagctaatacttaatataattctcagaaagcaggagaacatgcaataatctgacacgtgcaactgcataaacggcataaaattaaatgcagtggaactataaagtaatgagactgttgaggtgtatatgtgtttacg

SEQ ID NO: 63521 - DNA, 1936 bp, Homo sapiens
tgtccccagcatctgtatcaccttgcagcttttgtgaacagtgtctgctgtttttcctcgttgagttaggcaaacagagatcatcattttgcttcagtactttagatatcctccagcctgattagaacacatttacacaatcatttgcaaataagacctgttctgtttcctctgattcaagggggaaatagtagccagctgctactgctcatgactaaaattattgccacactgagcaggatgtagagcaagggtgagtaaaaataccacaacactctatgactgttttgtaaacagctttgtcttgattgaaaatttacttggatgatataaacctttggctattttccagacctcttacaaagttggttcagttagtttctggtagtttattcaggggaggaagggcagcttagtgctcccaagtcttggggagcttcgtgcttctagtctgccattttgctgatatcacttcccttatatctacttttagaacatttttctaaaaggcttgtttggattagtgggtggtaacatgtcaaaattattgttttttaattgccagtaacactccacatgttccataactttaccaaggagatatattttttattttgtaagcattttgtttcttcaacgtgccacttcagatattgaaggttttgaatttggataagttttatagggtaaatgtattagctattcttattatattttcttagatatttagaaaacatttctaagtgagggaactaatattgtctgaaatttataatataaaaaataaaaaataatcaatggctgattataatgtaggatatatttgttatcctgagattctaataatttcaggaaatacttccagactaccttatataaattttcaagttttcttttttccatcctagagaatgttaaactttggttttgtctccctgttctaatttcccccattcttctactgaaaaatgtaaaatgtatttctaaaaagtgttagtgcatttgcatgtttattgttttctcctctccattcattacaaatgcatggattatttttaggcaagcagcataggctattgccgaggttgataaatcatattgctcagtagcactgggcaagatttgctgcctagcttactgacctcccaattgtatcactttttctgatatcctgagttaggagattttaaatcttgcaatcccaaycttttcactcattaagatgttgctcattcaattttatattaactttccacagtgtttatattccctgccagttgtataaacaaagaggatgttttggagaccttgaggagtttgacattattaacaatttaaaaaatttcctggatcagacaaatttggaaaaaaggaagaacaaagaaatgaatgcttttaacatgttagcggtagtcagagccacagcctgtacaaaccaagggtttcagggatggagacatagagtatacgtctgatcagaaacaaattttctcacggtatgattcttataattatctaaataacatacgtgtttgatgatttattcttatttgtttcatgtgtctcttactggctttccctctccttcagcagcttgtctttttctaccaccaacatcaaatcctaaaaacctagactttgaacaaatccaacaaaagagtctcatgtcacttactgaagacatgacaaaatactagactcctaatacatgtttcacaaatattaattttgaatttaagtaaagataggtaggaactaatgggaaactgaaaattataatagacttttcttcaataatgttatattaatagttaacatccacattttcaaaaaatttgtatttcataacagattttgatgtgcattacataattttcatccccataacagctctgtgtagtagatgctgctaatgtttttaattataattattatg

SEQ ID NO: 63522 - DNA, 1936 bp, Homo sapiens
tgtccccagcatctgtatcaccttgcagcttttgtgaacagtgtctgctgtttttcctcgttgagttaggcaaacagagatcatcattttgcttcagtactttagatatcctccagcctgattagaacacatttacacaatcatttgcaaataagacctgttctgtttcctctgattcaagggggaaatagtagccagctgctactgctcatgactaaaattattgccacactgagcaggatgtagagcaagggtgagtaaaaataccacaacactctatgactgttttgtaaacagctttgtcttgattgaaaatttacttggatgatataaacctttggctattttccagacctcttacaaagttggttcagttagtttctggtagtttattcaggggaggaagggcagcttagtgctcccaagtcttggggagcttcgtgcttctagtctgccattttgctgatatcacttcccttatatctacttttagaacatttttctaaaaggcttgtttggattagtgggtggtaacatgtcaaaattattgttttttaattgccagtaacactccacatgttccataactttaccaaggagatatattttttattttgtaagcattttgtttcttcaacgtgccacttcagatattgaaggttttgaatttggataagttttatagggtaaatgtattagctattcttattatattttcttagatatttagaaaacatttctaagtgagggaactaatattgtctgaaatttataatataaaaaataaaaaataatcaatggctgattataatgtaggatatatttgttatcctgagattctaataatttcaggaaatacttccagactaccttatataaattttcaagttttcttttttccatcctagagaatgttaaactttggttttgtctccctgttctaatttcccccattcttctactgaaaaatgtaaaatgtatttctaaaaagtgttagtgcatttgcatgtttattgttttctcctctccattcattacaaatgcatggattatttttaggcaagcagcataggctattgccgaggttgataaatcatattgctcagtagcactgggcaagatttgctgcctagcttactgacctcccaattgtatcactttttctgatatcctgagttaggagattttaaatcttgcaatcccaatcttttcactcattaagatgttgctcattcaattttatattaactttccacagtgtttatattccctgccagttgtataaacaaagaggatgttttggagaccttgaggagtttgacattattaacaatttaaaaaatttcctggatcagacaaatttggaaaaaaggaagaacaaagaaatgaatgcttttaacatgttagcggtagtcagagccacagcctgtacaaaccaagggtttcagggatggagacatagagtatacgtctgatcagaaacaaatwttctcacggtatgattcttataattatctaaataacatacgtgtttgatgatttattcttatttgtttcatgtgtctcttactggctttccctctccttcagcagcttgtctttttctaccaccaacatcaaatcctaaaaacctagactttgaacaaatccaacaaaagagtctcatgtcacttactgaagacatgacaaaatactagactcctaatacatgtttcacaaatattaattttgaatttaagtaaagataggtaggaactaatgggaaactgaaaattataatagacttttcttcaataatgttatattaatagttaacatccacattttcaaaaaatttgtatttcataacagattttgatgtgcattacataattttcatccccataacagctctgtgtagtagatgctgctaatgtttttaattataattattatg

SEQ ID NO: 63523 - DNA, 1284 bp, Homo sapiens
acccttattttaagacgtcagttagataacacattatgttacatgatttaattaatatcttaggtccaagaatttgtagtttgaattatgcttcattgtcataacgcgatcatatgatccaaatatggcccatatggtttaagacatggagcttttaagagtgaaagatgatgaaacaaatactaaaccagttaaaatacctggacaagagcaaaactgaactgtcccaaggaagctaggacatataattatcctatttacaggataattataataaaatcgaagtgacagccttagaaataggtgaattacctcaactttaagtaagtccaattatatctaatttgagtggaaaatgagaaaaagagacattaatgagttattaaccagtagttaagatcattattatggtatttgtgaaacttcccagctaaagtatctgaaaatactgccaactatcgcaatacaagaacaatgtttgtgtcaactgctcagaaacaaataggcaagctctttactcacattgtacaaatgaagcctgcaatgtattttaaacatacagagatgtattttctgacatcagcatctgagaagagtgcatgtgtgagttggggagacctccttgtttttaacagattagcaaaacttcatcttagtccccgatttccttcaagtttccaaagcttacaatgggtttataaaatgactgcatttctcattatttctttatagttaaaagaaaagcacacctatgcttgttaatgtttggtctttacaaggcatatgtgcttctgtgctcaatagcatgcccagatttgcattgaggatgagttttctggaccttttctagtaacgtatgtagttattattgactttgtgatggtcagaaaaacaaaaacaaaaatactttaatctaaaataattatcatctcaaaattatattaacaagtttaattaatgaacagaggcatagccaccattgtgcattacatataattttatggataataaatggatagagtatttctctgcgtcacctccatgatgaggactatctgaaatctgccttattcactgttgccaagacctgaatcttaagaaacattcatatatttgttgaatgtgaaaacaatgaacaaatgaaagtttggaatggttttagtggcaaattatttccctttcttgcagatagaacttggacaggcagctgcttaagggtcaggcgttacmtgtggttcacttttctgacaatctactaaacaagtttttcttctcttcttatca

SEQ ID NO: 63524 - DNA, 1227 bp, Homo sapiens
tgcatcagaaataacatttttttttcattaaaacaaaaagaaattatatattcaggatgtggtttaatttcaaaacttagggccagaaacgtcttcagtagtgaaaacctcgaatcatcttaaagtcctccttttactcaacctctcaggtaccaccagtcacccaggactagaggctctaacttcaaaacacctttagaatcagaatattgtttcctctgtcactttctcacttaactctgtcaccttctatctgatgttgaagctttgcaggtggtttagttgccctaatatcactgcttcatctccagcactacagtattttctatctcagacatgtttgaattgcatcaccctgctactaaaaaaagtgcaatgactgaccactgcctacaataaagtaatactcctkagtatgtcatttaaagctgctcaaaattggccccaaattatttttctggcatcatctgtgccactctttccagccccacccccagacaccctatattagaccactctgaatcacttactcttctccaaatatactatgcacactggtatctcctagctttggctcatgttgttccttctgttcaaatttccttttctccctttttttcacagttgatatattatgcttgtttctaaacctggataaaatatcagctccttttttaatccgcacagctcccacccgcagaagcagttaattcgctcgttgtactttcataattctgtctaattcctaactatgcacttagcatgtagcttgttgtatttgtctgtctcccgaagagcagcaatcagattttatttacctttacaagtgcagcagctggctcagtgcctggcatgaataggtgtttttggattgtttatgaaagcagatctggacaaaggtggggtacatcttcgtaacattagacaaaagatcatggtcaagagttgcagtcatgtagtcctgctatgtttatgttctggaattcaataagcaacatctggatgtggacttgagctactaatgaggcttctgttggcatatccaaggggctctagtaaatagcacaggtttagcaaatgggtttacaaatgcagatagaagccacattgaagattacatgcaaggagtcagattgacaccaagcatatgctaaaggacagctgctactcttggaaacaagaataagtattttacttcaacactcccaatgtgccaggcactttata

SEQ ID NO: 63525 - DNA, 1019 bp, Homo sapiens
tacttaaacattcaactgtatatgtttttgctctttcttatctacctttggttttatgtgtactattatacatgtacagctaatgaaggttattatatgccagaaactattccatatttttcatttaatctacgaggttggtttctatcattagctttctcatgctatagtacaaataagaattcaaaagtcaaagagtaataccccaaatcatacatcaaagaaatagccaaccctaaatttgaatccaggtcttctctatctaaagcttgtgaccttaattactatattattctcctccacaaatactctataagtgatcgcttgattagtattctcaaccagaggatgtggaaattggttgtaatggaaatagcattatatttatataatccctaaaaggatatttaaaactgtatatgcttcctaaaaatcttttatttttattttttattattattayaatttttcagacagagagttttgctcttgttacccaggatggagtgcggtggtgtgatcttggctcatggcaacctccacgtcctgggttcaagtgattctcctgtctctgcctcctgagtagctgggattacaagcacaacctcctaaaaatcttttaaatattccatgttttatggtgatgcactgggttgttacaaaactgacatcaataaatcacacctcgctaaattcatcccctgtgtgttcccttccacactgaaccatggctgatgttaaaacttgcttagataaggagaatctaagtgtttcattgtgaaagttgtaatgcttggccttaagaggcattgtactttatgctttggttctgcggttgctctgagatttcatttaaaaaagctcagactagccccctaaaggatgagaggccacatgaagagacaagccctggaaaataaaagaattaaaaaatagagagaggtccagccagatcccagccttgccaatcataccagctgagacagtagatttttgaatgaggccatcttgcatgttcc

SEQ ID NO: 63526 - DNA, 1019 bp, Homo sapiens
tacttaaacattcaactgtatatgtttttgctctttcttatctacctttggttttatgtgtactattatacatgtacagctaatgaaggttattatatgccagaaactattccatatttttcatttaatctacgaggttggtttctatcattagctttctcatgctatagtacaaataagaattcaaaagtcaaagagtaataccccaaatcatacatcaaagaaatagccaaccctaaatttgaatccaggtcttctctatctaaagcttgtgaccttaattactatattattctcctccacaaatactctataagtgatcgcttgattagtattctcaaccagaggatgtggaaattggttgtaatggaaatagcattatatttatataatccctaaaaggatatttaaaactgtatatgcttcctaaaaatcttttatttttattttttattattattataatttttcagacagagagttttgctcttgttacccaggatggagtgcggtggtgtgatcttggctcatggcaacctccacgtcctgggttcaagtgattctcctgtctctgcctcctgagtagctgggattacaagcacaacctcctaaaaatcttttaaatattccatgttttatggtgatgcactgggttgttacaaaactgacatcaataaatcacacctcgctaaattcatcccctgtgtgttcccttccacactgaaccatggctgatgttaaaacttgcttagataaggagaatctaagtgtttcattgtgaaagttgtaatgcttggccttaagaggcattgtactttatgctttggttctgcggttgctctgagatttcatttaaaaaagctcagactagccccctamaggatgagaggccacatgaagagacaagccctggaaaataaaagaattaaaaaatagagagaggtccagccagatcccagccttgccaatcataccagctgagacagtagatttttgaatgaggccatcttgcatgttcc

SEQ ID NO: 63527 - DNA, 2664 bp, Homo sapiens
ttcccagagatgggtcagtgccctggacctcaatagaggtgcctgggtttcctgggggtctgcacagtctctgtgagagaagagctgtgatgaattctccagggtaagcctgaagaccaggggttctcaatgtatagctgtaggattgcttaatagctggtgtttatgaatgcctggaatgtgactgcttacctttcaactctttcacatatgggtaaactgaggttcagagaggtccagaatgctgctaaggttaactatataaagagtggagaagctggagtttgcattccaatctgttaaccttcaacaaccctactccttctgcttggctagtgtttctaaagtgtgcagatgaggtatacaaaattgattttaagttttagtttggcaagtttaaaaataagaattcttatgtttaacttgaattagacaaagaccccagttggcacatgagacctgcaattctgtagatatcattgcttaacatatatagtgtgtatattaaaaaaaaaaaagtcaatttgtgaaaatattaaggtgatacgtgaacacagccctcctgaataaatctaattttggagtgcagggtcctccctatcattctgcttaaattgactacggcttctgatcctggcctgccaactctatatttatttagcrcccagttctccaaccaacccctgtattactgagactgaattatgaaatagtaaatattcacactgcagttttgtgaaaaaagcatgcttagttgccaaatactttgtccatttagtctgagttctgttagtctctcaggttcctctaaaaaacatatacatttttaaaattaaccaatagtcagaattattaaccaataatcagaatttgtaggtatttcctttaaggtgtacaaagtcaaatgagagtacatatgtctgcttttcaaactagggtacacataaggggcaagtgttaaccaagattaccatgatgtgtctttctagaggaactattacaatatctcaaggaggttaagatttttgtattgcaatgaaatgcggaatgagaatgcataatttatattacgattaatgatacaacatgagactaaaccagttcagtgtcatgactgaacaaagtttaagtttgtgttagcaaaaagcaatgtgaaaatgcaaagcagtgttcaaatgtaagtcattacccttatcaagttttagaatccttggtctccaggaagccaaatagcctcaggacttatcttgcagggttgtatttcctcaaggctatcaggtaggtgaaacagtgtaaactgaggaaagtgttttaataatgatgtatgaattatccaaagaaagtatattctgagaggtcttctgaaaaagctattctagaatccagaggctcagctgaagacactgatgataatcctcacgaaagaaaataatcagatgtgggctctaaattcccctcaaaccaaatgacaagctccctatatatagctgggcctaattactataaccactgtctcccatgacatttcttttgctttttctacttatcccgtattactttagttagataaaatattccaggtgtcttgcttattgctatattatccactgtaaaggtattttattattatgccaatattaagattttcttctatgaataaagccaacatctttttattagcaaagtgctaacagaactggaccaaagaaattacaattccattctcatttcctgttataactccacctaagatatcttaaatgcctgcatacatcacaaagcctaccagggggtggtaagtgatttttcaattagagtaacccttcagttttcaatgaaagaaatcattattgcatttctgctgaaactaattacttgtatctttttttctttcttttctttctgaggcggagtttcaggctggagtgcagtggcgtgatcacagctcactgcaacctctgcctcctgggttcaagtgattcttctgcctcagcctcctgagtagctggcattacaggcgcatgccaccatgccccgctaattttttctgtttttagtagagacggggtttcaccatgttggccagactggtcttgaactcctgacctcaagtgatccacctgccttggcctcccaaagtgctgggattacaggcgtgagccaccgcgcctggccacttgtatctcttttatctcacttccttggaagggttttccaaatgcagcaaccctactttgagtaacacattggatctgtttagcatactactgaaactcaatatccacaatgggagtaacagctaacattcaatgttattctgtgccaggccctattataagcccctattatttaaaatccatatgtcaactcgtttacacctcacaaaactctgaggcaggtattacttgtatttaacagatgcgggggttaagtaatttgccgatggtcacacagcagctgcactcctctactgcctctcttcgtgttctactttatgttagtctactgttcatctgctggttccacaaattagatgtatgcttatattctcagtattggttttcacaaaaaatgctgtatgaaagcaaatgacatacatactttgtaagctttcaaatgttacataaacgtcaaatagcttattaaagagaaatactactggca

SEQ ID NO: 63528 - DNA, 603 bp, Homo sapiens
tcctccgctctctgccttctgggttacatcgagcctcttagcaactattgtgagtgtcatgaaggttgtgtcccatttcagtgacagccccatgaaacatattttatgatccaaactttgtatatggcaagtttaatattttcctgctgtttttaacatcactgaatttttcactatatgatyacatttaataaaggtatcagaacaaattagaaattctgttaatttgaaaaagacaaaacagattaaatcaatcttatcttatgtgttagaggaggccagttaaaaatacagagactgacccaccaaccaggaggcaccgtgtcttcgggtggcactaactttatgcctgtgacctccaccgtgcccagtggtgcagaaaccgtatgtgaggggatctgggagcatggagagtcactgcaacctgtcccgtgacagctgagatctgggttgggtctcctgaattcaggattctgagtccagtggagtgatggcaggttgccccatcctgccgcatgctttgaggggaccctatcgctgctgccctgcactctcaggacttattcgctggacagagtgggcagaaaagagttccttcatgga

SEQ ID NO: 63529 - DNA, 2995 bp, Homo sapiens
gcatcagagcagggcgaggggctttggaaaggcctgactagatgatggaggttcctaaggcctaggaggaaaagcatctcatctctcagcagatcacacagttgcctctacctggcatttgctatggtacagaaaccccagagactcttctacctcccctgctttctctgtaggaatgaggaagagcaggcatacatatggaagcttcttacacagctcatttgcctcattggtctgttccaacctggggtttcaagggaagacccacaagaacttttctacactgttccagcctttgttcaggccttcctcattggacccagtgtattctgtgtgacatttcagccatgtttccagaatgactgtgaaataccctgttcccatccaccctggaagtgggttcccacatagcacggaggctttcccccctccccagttgtcgtgtgcccttgcaggtcctgttcatgcagaggcctgccaggagccctggctgctgtgtcgtttggtttgagccctccctgtccactggagtttccttgattcacaccttcttccttaacaaggtgtccttttaagaatgacaataaaacatattttattcagaagccaggaaaagactcataaaaacacttcattgaaattcacctttgtgaaagattcatctcccagccccctttaaccagcacagctgtcatgaacaactttttctgtgttttttttttttcttcttgtccctcccaccccatttcctctccctactccagcaagggcttatctttcaactgtggaaaagccaccaattaaactgtactccaaagcttatcaaaatattcagtcagtaaaattatcttataattagcctcactgtaagccagaacgttttaatcccaggaaatgtaaagttatccggcatgtgaaatctgtaaattgctcatcctgaccttctgtctacagtttctacttttatttctttcccaaagtaatttcttccttgttcttcaaattcttgattgtctctgaggcatcttcctcttctgtttgcttaagtttcaaagaaaatttactcctagttgagatagagaattgaaaaattcaggtgattgtgatgtgcaatcaacctgattttatatatttcataccttcactttgaactgttctttttgcaaacgtaagtctctgattgctgatggcttgccctcgttggtcctgtactttggatgcctgcagtggtatgcatggctgaattattctggaaccaagctattcaaacagtatctgggggattctgcaggacgtcgagctgggcagtggcgttggactttttaatttcaaccatttctcttctcatagctctccctcccctttcaccctcccacagcctggggatcctcctatcatcttgcaccacctgggacagcaccatgaatgttacttccccaccccatcctatttggaccaacatcaagggaaccataagtgatgtttggggatcttaagcttaaggtgcaacttagactttggctacagaaatgatattcagatgatgcttaggtttgttgttgttgttgtttgttgttgttgttgtttttgacggagtctcactctgtcacccaggctggagtgcggtggcgcaatctcagctcactgcaagctccacctccccaggttcaatcgattctcctgcctcagcctcctgagtagccgggattacaggtgcccgccaccgcacctggctaattttttgtattttagtagaaatggggtttcaccatcttggccaggctggtcttgatctcctgacctcgtgaatgggctagtgaaacttacataggcatgtttgacctggtcatcacttgttgtatgatgaaatattttcaaagttcccagaactcattgaaaaattaaattttggaatgtactaacatttcaataaatggagtattgcctgtatatagtgctattagtggtagttattatttatagaatttttcctatcacacaataggcacacgcatacacacacagagataagaacacacaaatacataaaaattgcttcatccttacattaattctgtgagaaagtaataaatttgcccattttacagttgggaaaattaaggctctgacagtttcaataacttgctgatgcagctgaacttgactggctggcctgacccttgtaatcccttctgtgaactagccagggcccctgtcatatgatttgacccccacttatgcctgagagatttcctcatcatccctgcagagtaaagaggaaatcacagcttcacctcaacctccacttgttgctgtgcccagcaattgcatgcaccatatcttgatgtcacacatgaatttcaggcttgatttatttgctgacctcagagctcagagctgaggcttgcccgccttgagcttatgggatcagtgtgaaggctgtgatgatccgcatagggagactctggcccaggtggcctgggctccacttggtgctcctagggtaggagatagaggggggaccagctcccaggatcccaccatgtgtgggcgtgttctcctaatgccaaccttggaatcagctacatgcgtgttctcctaatgccaaccttggaatcagctacatgctgcaatcccatcctttcacaactgtgtcttggagctaaaagacccctattttggaagccattcctattgagagacacctcctgtctaatccacaactaaatattttacgcctctgtaagactctttcaaaatacaaattatctgtaagagctaagttgaaactaaatatctgtcattaaaatgtgttatttttgaagcattagctgtagggcattttagaaaatctttaaaacgtaattggccgtatcaagttaattttcttgtgtgaattctgcatactcttgatattacttaatttgtttttctctctttttaattacagcttgggttgaygatagccattcgctatagccacaggtaaatgttt

SEQ ID NO: 63530 - DNA, 889 bp, Homo sapiens
atacttgcatgctcacatgcgggaggatggtctcaccctgaacgctgttcatttgaataaaggagagctaacagctgaagcaccactgcatatgcaygcaaacaaaatcaggcctcctttgggcctcaagtcctctgttgccacacaagagcccctccggctctgaggcaatcctgccccctctgtgtctgcagcagcctgagaggcactgctggctggccaagggtacaggattttagtgacttctttccctcctctgcacattcatcgcctttaaggtccccaaatccattcttcttcaagagtgaacccatcctcccagtattgtcattttggaaccacgttttcctgtccccctttccttcatcccctcttctgtctactaaaggagtctgctggggctttccccaccatctctcttggtcctgacgcccatgttagaattttggaagcagatctgatctgcttccaaattccaaatctggtcttagatttagaatctaaagtctcaaatcttgatgccaaaggtatccctacccacacaaagaggaccccttccctcaactctggcatctgggtttggggtcaacatgacaaggaaaatggtaatcgataggaaaacagtatggcccctcctcaaaaacttaaacttagagttaccataggattcaggaattccacttctgggcatgtacccaaaagaattgaaagcagggtgtcaaagagatatttgtacatccaaattcatagcagcattattcacagtggcgaagaggtggaagcgacccaagtgtctactgatggatgaatggagaaacagaacgtggcctatacatgctatggaatattatcccacagaagggaatgaaattctggtacattctacaat

SEQ ID NO: 63531 - DNA, 1339 bp, Homo sapiens
catttcaaggagaaggctgggcattggggtggctgcttcagtaatgggcagtgggacccttccagctctccacaaggtctgtagccacacacagctgcccttgtcctcagagctgtggtccaactgaaatcatgccctgtacccaggtcctatgtcccctgacatatggccacagagagacagcttattgctaaaaaactacccagtagggagaactcagaagatctatatggcatggttcctggacactttacagcagatgttaaagtgtgttgccctgaatgtcagcctcaaaagcatccttaaagcatccccggttccctcaaagtcctatatggtcctgtaattcttgactttcttgaaatactttcgcagtttgccacagagtcccttattgatctacaccacacctcagacttgcagagaaaacagctcttaaaatctagcatagggtggatctgatcttcctaacaagctgctatccattgagcagagagtagcaaaacacttttagtccgtggaagagacttcatttgctgcattaggttaaatgaatcctctacatgatgttctggctaataggtgctcagcctctgaacggggttcctccgtcagcttggtctcagctttccttccctttctcttgcctctctgcagaatggcatctggaatggggtgtggaggtggggcttctgtccccatgactgaagaataggcacttggatttgcaaggtggttctgatcttccccagtctccactgggttacctccagcctgccctggcctggctccatggggacatgaggagccttggaggtctgaggctagcaggggctctggcctttatgtggccaggtgtttattttgcaaagcccagacgaggcctgtgctgggtggtctgtgctggataccatacccaaccatatgccaaaccaggagtcggctggcctcagtgacaggcccagggtcttcagargtcccttgtcaactggagtaggggtgtctgaggtaccattctaggcttcctaagtgggccccatcacccccctccaccttccacagtactcccgaaaacccctgggtttctggccagggcatcctcgagctggtgaacgggtgatgacccagggaaaaccagcaacagaataacatgatctaccaggttgtggccctggaggagaaatcttggcactcctaagaagtagaaggcgccagagagctgcgcgcaggtctgaatactgtctggaagaagaggccccctgccccagaaacaccctgtcccagccccatctcccagtgcagggtaacatgacaaacagataaagtttgaacttaatgc

SEQ ID NO: 63532 - DNA, 583 bp, Homo sapiens
cccctagtttctcctttttttcccccagttcttccctccctcctccctatcttagccttgtattatatgatagtctgagatactaagaagcaacatagaagaatcaagaackgggttttttttagccaatccagatgtgagtaaacaaatacaaagaagaaataaatgtaaacagcaatccttcgtcttctactcctcagaaaatatcaactgagacatttcaggggggtgagtttagagccaggtccacatgtgccatatccttgcacagtcctgcacgatgagaaattatgcgccttttattgagagctgactttgtgcctggaactgtgcaggacactgagcacccagagatgggcaaggcacactccctgccccatgaattcatgccctaagcccctgcagactggccccagctcacccctccagcaacctctcgtgccacttcctaccacacatccttcaaccgtagtgacatggaagggactgggattcagaactaaaaactccatagacacagatgaagaatgaggcatttaacccgagtggttctgtgcagagagaaccactctttcggagttag

SEQ ID NO: 63533 - DNA, 776 bp, Homo sapiens
cctaaaatatacccctgcctttaaaagccctgaccttcaagccatggaggaggtcagcatttgagcaacagctgcctagtcctccttgcttgtctcctgcagagaaatatctccccttctcctgctgcaaacctcagtatagatacctgtcttattgagccagatgagtggaatcccatttggtttcatagcgaaacccagacaagggctcactgaggacttgaatgcaaattcacccattttyagcaagtcatgtctctgcgggatagcctgagagtctccctccctctgggataacatggactgaagtcattcaccctggggtatgggcagctctctgcaggagagtaacatgtatttatttattcagtaatgtcaggatcacatgagatttgtatgcattgggggtgggtgagagggcagagaggggaaaagggcatacaaggaggtgagaaagccggattgtggtcaagctacttcaaggacttgctccaattttatgctttagaattgaggtcagatctaatctcagactcagtctgagtaggcgaaatgtccctatgcattaagaagagggaggagaatctaaggttaatgtaatttagaaggatttagattagagaaggaaaaaccacctctctctgccatgaccctcatggcaagcagtacaaattgaacccaccacgcccacacacagcctcagatcaccctaaacacagcatttcagaaatctagtatcaatcaataggcttggtccttgaaagaaaacctactta

SEQ ID NO: 63534 - DNA, 1543 bp, Homo sapiens
tttcccattaagactgcacacagcctcaggaccttgctcaacacagcgccccagggagccaatgctcctaaatcggctggctgtgagatgaatcccctttgttactcttgcactaggaggttcttcttgaggaaatgttgcactgtttataattcatctctttgctataacaatgtagtgcaaagcacacggctgcatgatagggcctgcaagagaaaaatgccttgcaaattatacattgatggcttttgctgttgatgtttctgttgctggaaactggcattaatggagtggccttctctcatatcattttcttgcctttaaaagttgcctttgtccctgtgacttgaccatctgagtaattagatgcatcttatgcagagatcagttgcttcagcccccttgacagcctctgcctgactcatctctgtccctcacaagcagacctcatcatctcataggattctgaaatgcctctaaaggccctttgtgccaggattctttcacagctgcaagcataaatgatattttggaatcttcacccaaattttacacttttgtttaactcaatattggacacttgaaaggacaggcctcctggaacccagagaatcaatcgccagggttttactttctaaatgggaagacaaaatctgcttcagaaaattgaagcccaggggtttttagcccaacaaaatgccttcaaagccagccagtaaaaaacactcacatattaactttagggtcttaacgacttcaaaccttatttttttaagtcctagattccattccttaccccacaattctttagttcctttctcttcatgatgagatttagttatcagagccagttggccctctgaacatttttctggtgtctggaaacaggatcacttttcagggaccaaaaaatttattttctctagctaacctcataaaatgcagacttctcatgtctatcatacgtcttaattcttatctgtaagtgtatgcccacgatatgaccatcaaaattttcatttctttgaaaagatcgaagctagattaagaaggcaagtgcagcgttcgctgcaatatcaagtggtcataccaaaaatgtacaaagaaataaaaattacagtggagataaagcacagaggtacaaaagtttgaggcctctctctataccaaaatctcattccaacctccggccaaatgcttcagagccactacactaccagaaaagacctgcttcagctgctagctgtaaccatcgaagcagagcccctgtggccttcakttttcgtgagggttgctgggctgctaaccataaaggctcacccaccacactctcatcccaaagggtgctggattccaaagttaacactggagaattccaaaagcacctcacctccaactcattaacatgcagtcctggattctaaacattcctctacttaataaaaacaggaatgaaggagaagagaatgtagggtgaggaaagcattatttttgagacatttacttgatagcattttaagcccaggagacaaaccctggtcct

SEQ ID NO: 63535 - DNA, 1271 bp, Homo sapiens
tctgtaattatgagtcataatgatctttataggctgcactaaattggtgaagaagagttactgttattgacaaagcattgacctgaacattagtggtggaagagctaattatattttttcctgaggagtgggacttcttttctagttatgaatcacttagaatcgaggcctttattaaataccttttcacatctgaatataaacagaactgagcctcccaagcacatcctttatcttcacataattacagatgtataaaaatttcaaaacacattctagaggcttttttttagtgtttcaaagacagtgatgagggttttgcaaggtgactgaagaggctgatatatattttgtgaaagcaagctgtctgcaggatacactcccatgtctgaaagactgagacctatttttagctgggcatgctgggattcacgtgtggagccaccattagcgttaatagagctctgtgcggctgactactgtgtgcaggcagcccagaaaatgtactctttagagcaatggaatcttcaagcgagctttaaatcatagccttatcatacttgcatgttattggcaagcctgcctaaaaatagaatctcattactttaattctacagtattcttaggtgagccgacctttattattaataacagcatttcacacacacacatatatatatatatatatatatatagcactgtctgcttaagagaacttcacaaattatacacataaaactttcctagcttaatgtaacaagctatgggtaaagggggcaggaggtaggtggtaagyagtggctcccactctccatccagggtggaggactgagaaaatgtcactaggtggctctaaacaaagccactctttgaagttgagccatttgcccaacaagcattttaattctgtgaaagtatgttgtatttttcattgataatttgtaaggccctggggacagtcacagcaaccctgagaataataggctgcttctatgatatattttttgtttatctattcaggtcttagctgagtcttggaaacaagagccacaataaaaatgcatgccttttccactctccaaaccacgagcttgctctgaggagcctttctctaagcttatgaacccaaactcagctatcgagaatagaaggaggatggaacattatcagccatctatgcacttacaccaattacttaccaaggttgtgtgaatggttagtagagttagtagctgtggtttccggataaatgtagagtggatatgtaaata

SEQ ID NO: 63536 - DNA, 1025 bp, Homo sapiens
ccatgtgtcagttcttcagcccatcaaagaaccctgcttttacattctgagtctattttctcctttcccgactcagctaattttgctctgggcctgcctctgctcctcattccaaatccatcagtagttgcatgaaacttggtaactgcaaggcagtccccaatttaattgggtctagttctccacagagcattacgtttgagcctacagcgggctgcaagttgtccaacagcctgtacttctttgataactgaggtgccttaaatgtcctcacttctgggataccaacttctggaatgtgcacaagacagttctcctgtcttgaatcaarggccaggaggtaagtccctccttaagcccgaggatcatgaaaatctctcctgaccccactaacttcattcccaaacatgatgtctttgcttaatgaaaaagccttctctcactaaagaaactcctagcatagtggtaggtacactccaaagccctatgaatacttacttacacaattgaatgcgataaaaacgcttaggatccacaagctccctgggctgttttggaggatgtggaggggatgaatgttgctcaattttaaaatatcagtaccgttcttccctctgtcccagcataacctattcttgggaattttctaatggttaccacttcctttttcatgattagtgtcaaggttagcaacaagctgttataattccaagactctgcttttgcagttgcttctgagaatcactgactagttccctctcacaggccaaggaaacgccattttacttctcagaatgaatgctcctttggtgaagggcacataaagggaagtttcttttcttgtttgcttttgtttagaattccctccggggttacacacatcatcctgttctaattccctggcttcttggggaaacactcaggccatgacaggaagagaagggacacaggccccaagctcatggacagggagatggcatgagggtcctctgcatctgggctgcccatttggtttcctcgttggc

SEQ ID NO: 63537 - DNA, 642 bp, Homo sapiens
tccaaatgctaatgtaaccccaaagaactttacaaagcggaattcttagttttcacaagtgtggcccagcctccctcttgaatctttttggttgtggaatcgaggtgttctgtttaattatccagtgtgactgactctgtggcagggacggtaagagccttccctttttacttgtgagaggagaagtttctctcataaagaaacctccaggcctgtttgaatttctcacagtgtggayttcccctcctctcggcagctgttgttagtattaaactgactagaaaggggtttatttcttgaaagtcttagaagccccaagagaatattctgatttttctttttccctctcctctccccacgcagggagtcattccttccttcctaaatacaacatggtgagttacatgcaggcaaatcctagctgtgggaggttttatatcctgtctgcatctaagtcactaagagaaaggaccaagttcttcctttgctaatcttattatctggcttcttggtttatatttctcatgtaaaacttaaggactgggttaggtttgtgaataaacagttttgagagagcatgttaaggacatgatgtaaaggacaacttttgcaaaatgttgacaatagcaacatttttgcttg

SEQ ID NO: 63538 - DNA, 642 bp, Homo sapiens
tccaaatgctaatgtaaccccaaagaactttacaaagcggaattcttagttttcacaagtgtggcccagcctccctcttgaatctttttggttgtggaatcgaggtgttctgtttaattatccagtgtgactgactctgtggcagggacggtaagagccttccctttttacttgtgagaggagaagtttctctcataaagaaacctccaggcctgtttgaatttctcacagtgtggacttcccctcctctcggcagctgttgttagtattaaactgactagaaagggrtttatttcttgaaagtcttagaagccccaagagaatattctgatttttctttttccctctcctctccccacgcagggagtcattccttccttcctaaatacaacatggtgagttacatgcaggcaaatcctagctgtgggaggttttatatcctgtctgcatctaagtcactaagagaaaggaccaagttcttcctttgctaatcttattatctggcttcttggtttatatttctcatgtaaaacttaaggactgggttaggtttgtgaataaacagttttgagagagcatgttaaggacatgatgtaaaggacaacttttgcaaaatgttgacaatagcaacatttttgcttg

SEQ ID NO: 63539 - DNA, 632 bp, Homo sapiens
ttaaaactagttttccaatttttttaaaaagcagaatacacagtatataacattcaaaaaaaaattttttttttttttggagagagtctcactcggtcgcctaggctagagtgcaggtgcaatcttggctcactggagcctctgcttcctgggtttaagtgattctcctgcctcagcttcccgagtagccrggattacaggcacgcaccaccatgcccagctaatttttgtattattagagacagggcttcaccatgttggccaggctggtctcaaactcctgacctcaagtgatctgcacccccttggcctcccaaagtgctgggatttacagacgtgagccaccgcacacagccagattttcttttttttgagatggagtttcactcttgttgcccaggctgtgcaatggcacaatcttggcacactgcaacctccacctcccagtttcaagcgattctcctgcctctgcctcccaagtagctgggattacaggcacctgccaccacgcccggctaatttttttttgtatttttagtagagacgggtttcaccatgttggtcaggctggtctcgaacttctgacctcaggtgatacacccgtcccagcctcccgaagtgctgggataaca

SEQ ID NO: 63540 - DNA, 632 bp, Homo sapiens
ttaaaactagttttccaatttttttaaaaagcagaatacacagtatataacattcaaaaaaaaattttttttttttttggagagagtctcactcggtcgcctaggctagagtgcaggtgcaatcttggctcactggagcctctgcttcctgggtttaagtgattctcctgcctcagcttcccgagtagccaggattacaggcacgcaccaccatgcccagctaatttttgtattattagagacagggcttcaccatgttggccaggctggtctcaaactcctgacctcaagtgatctgcacccccttggcctcccaaagtgctgggatttacagacgtgagccaccgcacacagccagattttcttttttttgagatggagtttcactcttgttgcccaggctgtgcaatggcacaatcttggcacactgcaacctccacctcccagtttcaagcgattctcctgcctctgcctcccaagtagctgggattacaggcacctgccaccacgcccggctaatttttttttgtatttttagtagagacgggtttcaccatgttggycaggctggtctcgaacttctgacctcaggtgatacacccgtcccagcctcccgaagtgctgggataaca

SEQ ID NO: 63541 - DNA, 476 bp, Homo sapiens
aaacaaaatgtaacattcttctactcttaaaactggtgtggctgcagaaactaactttttagtgttctaaggagaggggattataggaaggaacagcattgataccaaggctccaaaacaacagacaagatcggaattcaaatctgaatagcaccgagtataatttaatcagcaaagctcactcctggttatattcttgtataccagtccaaccacgtggaaggagttgggtccaaccacatggaaggagttactctgtgcaccataattcagagggaaaacgttaacactctgaagtccacctaaacaaaggtgaccagggttattaaggaaatggtaatgtttaayttcaagaagagaaactggaaataaactggtctttttcaaggtatatcagttaggtgggaataaactaattttttctattttagccacagagcaaaagtaggatgggccactgagaagttgcagggaag

SEQ ID NO: 63542 - DNA, 778 bp, Homo sapiens
gacttctcaaaggaagtcctctcagaagaaatcagcaatggagatagggttttttttccctatctctgctgggaaactaagtaatgtagggattagatttcagatgaagtctcagcttcaacctgatcctgcggggaggtggagaatgtaaattatacttcagaacctcagtaaagacttttactctccacttgtgagttattggttacgaaccacaggatgagggaaggtgaattgctagataactccagctccttggataaagcaggttagaacacccaaagggagtttcccaaaactgagttgcaggtgcaggtcattagagaaaactcacattgaaactggggggaaagacacacagaaaargtaagaagcatccaaaaagatccaatattcactacgatttcttacaatgaatctggtactgtggtaaagagttagagatttagaaataaatacatttcctgtataaatctgtaaaaaaaaaaactgactctattgcaatatgataaatactgcattaaaaatgtacaaagggtaaagagctcacagataaaaggatgattaattattggagctttttcaaatattttattattgagataacaaggatctcattgccaaatagactcatatgaatactagatcttagtatcaaacttttttaatatctcaaagatgcaagtgaacacaaggcataagcaaaaaagggggaaaaaaatctaggaaatccaaaaccttcccaggacattccagctggatcaagactcactctgac

SEQ ID NO: 63543 - DNA, 742 bp, Homo sapiens
tttagcttaaagtgtagcttaaaatcatgcttgaattggttaaaatgatgctatgtggaaaaaagatattaaaatcttacaaatgtttaacatttagcttaatttttacctcttgtttcacacaaggatttttttaaccatttcaacaagcattattttatactacaattattgtagacactataggataatccaaattctgacagcagggaggaatagtagcacaaaggaaatgcagtggtagttctagatccaacattcattatagtttctctcttttaatataactttgagtacatagtctttcaagtccattttaatttctaatctgtgcctgtgcccataatcatttttacagtgctctagaatgaatacattttgaggaaagataatatcaagaagatgggtaagttatatgttaatctttaggaatttggtggtaaactttcataatcttaccaagaagtacacattgagtctctttttaaaatgtcttctaagtcctcacgtgttagatggtgtaataaaggtaaagagaagggttgtaactgaccacaagaaattttacatctaatattrgataggaccacttaaagaaaatttcagaaaacttaaagccaggcaccattctcattcttgagtttaagatgtaaaagaccaagtttctgtaagtctggggatcataatgcaacagaaaggataatgatgttcaaaaatcaatagaaggatgccaatacatata

SEQ ID NO: 63544 - DNA, 1070 bp, Homo sapiens
catcacagaaaatttaaaaaaatgcaaaatgtggacagaatcatgaagagacaaggaagataccgtgagaaagtgtagcatgtgtttagtgagtgttctcatagaagaagggaactgggaagggacaatatgtgatggtattttggctgaaagttctctagacttttgtaagacactaatccgcatattgaaaaattccatgcatgctaagcaagctacaatggagataaacctacacctacgtatctcctagagaaatagcaaagaatcaggaagggaaaaatatttcaattagcactagaaaaatcaaattacctttaatcatattgaaatcggaaagaatgaaaggtaaaataaaaaatattatttgttaataataataatgccattctgaaattctcaaccaagaaaaatattcatcaacctatggctaaataacatatttagagagaaaaaacaaagcaccaccagcagaattccactaaagaaactaaaaagaaactctgaaaacatgcttcagaaaggttgaagttctgaaatcaaagaatgaatacagagcaaaataaacatacaggtagatctaaataaaaaattaggtgttgaaacaaaaagatatttaaaattagataagcactgcaatatgtatgttaggaagcaaattattagggctgaagtattcaatgaccccttaattgtctgacaagagcagaaaggtgagtatgactttgcaacytttttttttttttttttttttttgaggaggagtctcactctttcacccaggctggaatgcggtggtgccatctccgctcactgcaacctctgcctcccaggttccagcaattctcctgcctcggcctcctgagtagcggggattacagccgcgtgccaccatgcctggctaattttcgtatttttagtagagacggggtttcaccatgttggtcaggctagtttccaactcctgacctcgtgatccacacgcctcggcctgccgaagtattgagattacaggcgtgagccactgcgcgcgaccgattttggaactttaataaattcagtggacatta

SEQ ID NO: 63545 - DNA, 1011 bp, Homo sapiens
tttttttaatgtctaagggaaattctgaattctacattgttaggatctggattttgttttatttctttaaagagagatgaactttgttttcaaatgcagttaagttatctgagatcaatggtgatattgtttgcttttaaatgtgattataatggcttcagagccttgactctagaactgattcaccccgctactaaggtgtgattattctgagaactctatctgctattataagtttctcactctggctggagcacatacgggttcttctaaggcccatatgacctccaggaatttctctggcccattgctaatgaagactcatttttctatctcatggagttttactttatgtaggcacagttcagttctcactcaaggactccagagaacctctatgtaaatctccacagttctctctctgtgcagccctcttctctctgtcagtctgccttgatgattctagtcaccttggcctacataaactttgatatcttgctcttaaattcagcaaatcatgatattctctctcggattgtctcataccatgctggaggctggaaatcactttcagtaagtatgctggcacaataaagggtatatattgttttctttctctcagaaatgacagttttgggctgcctatttttttcatgcaataaaaacagtttatatacttgttctggatttctagacgtttmcaaaagttgcataattctggtaatcattaattctttatcggcaacagttgaattctcagagacttgtttaactgcccagatgacaattatcctattgctttattcttcaaatctagtaagtgaatcaaagtcagtcttagtgatgatcagtatctctatatttttgtctaaaaaacagaatgctattttaatctatagattcaagtgtcattttatctctttgaagttttcaacaagtaatgtttccagtattaatgttctttcttattcttcaaaacatcaagtaggcagaggttgagtctccattgtc

SEQ ID NO: 63546 - DNA, 1011 bp, Homo sapiens
tttttttaatgtctaagggaaattctgaattctacattgttaggatctggattttgttttatttctttaaagagagatgaactttgttttcaaatgcagttaagttatctgagatcaatggtgatattgtttgcttttaaatgtgattataatggcttcagagccttgactctagaactgattcaccccgctactaaggtgtgattattctgagaactctatctgctattataagtttctcactctggctggagcacatacgggttcttctaaggcccatatgacctccaggaatttctctggcccattgctaatgaagactcatttttctatctcatggagttttactttatgtaggcacagttcagttctcactcaaggactccagagaacctctatgtaaatctccacagttctctctctgtgcagccctcttctctctgtcagtctgccttgatgattctagtcaccttggcctacataaactttgatatcttgctcttaaattcagcaaatcatgatattctctctcggattgtctcataccatgctggaggctggaaatcactttcagtaagtatgctggcacaataaagggtatatattgttttctttctctcagaaatgacagttttgggctgcctatttttttcatgcaataaaaacagtttatatacttgttctggatttctagacgtttacaaaagttgcataattctggtaatcattaattctttatcggcaacagttgaattctcagagacttgtttaactgcccagatgacaattatcctattgctttattcttcaaatctagtaagtgaatcaaagtcagtcttagtgatgatcagtatctctatattkttgtctaaaaaacagaatgctattttaatctatagattcaagtgtcattttatctctttgaagttttcaacaagtaatgtttccagtattaatgttctttcttattcttcaaaacatcaagtaggcagaggttgagtctccattgtc

SEQ ID NO: 63547 - DNA, 657 bp, Homo sapiens
ctatggtttcaacaaatgaagaggcttatgcaagagaaaaccaccacctaacaaaagattttcaatgtgatcatcattgctacttttcactagcaattatccagtcaatatattgtgaactgctttgttactatggtgatttatttaaacttactgatcctttgattatctcaaaaatatgaataataccaattttataaacttgttctaaaaattaaatgagagaaaaataatcctccttctctatatattgaaaacctacaaaattagtaacattgtgtccagatttttacacacttaccttattgaagcctcatcacatccccgtcttttaaattacaggattattcccagatttttaaacacttaccttatgcaagtctcataacaatcccatcatttgtagatgagcaaactaaggttcagatgagttaaaaacacattcaccatcaaaycataatgagtgaaggaactgggattcaaatccagttctctctaacaccaaaggtggtgcaatgtagtgaagaccaagttatacccagcacatggagggatcaaaacatgtggattccctttctatacccttttacatgtgaatctcaatggctttcactacctcagaacaatcctaaactccctccgaggttgccttgcaga

SEQ ID NO: 63548 - DNA, 1079 bp, Homo sapiens
tattaagccrtgaatgagatgattacaacatgatctgtaagaatcacgagagttgttagacatgggtccaaatttggccccaagttttctggcagccaacacaaagaaggaaattacataagtagataatctacagtcccactaaaataaaaataaactagttttcaggaatatcacaagcagccctgggaaagagaaaatcccttcattctaatataagactacctagaatgtcagtgagttggacactaatctaattagttttttaagcacatcataattctcaatcaatagattgtgccttaatatctattctcatcaacagattgagaattatgatgtgcctaaattccctaagaagttttattaatatgctgcagttttaactcagcactttagtaagtggtctgaaacagaatttctgccattgatttattaggggtaataaaggaaagtttctgtaatcaaaggctggctgtacacaagccaatatagatccttcaaagcttcttaaaacctttaaagttgccaaagtgcacggtgactctcaaatttaggtgacgtttaaaaaatcaaagaaatttatcaatgaactggtattatatagaacataatttgagaagtcctctgctagatatctgaaacactgcctaactcacattagaatcttgatgacttatctggaaatgacctttactgtgcaaacttggtaaaataaaataaaataaaataaaatacaagaagaagcacgatgatatgcaacagatagtgactggtgattgggtattgtaattttcatccaggaggcagatggaaaaagtgcgactagaattttcactggagatgtcagaggtatttgaaccagagtgacctcatcttgaatagggactaagtaaaataaggctgagatctgctgggctgcattctcaataggttaggcattcttagtcacaagatgagataggaggcacaagatacaggttataaagacctcactgataaaactggttgcagtaaaggagccagcctgaaacctccaaatccaagatggcgttgaaagtgacttccggtcatcctca

SEQ ID NO: 63549 - DNA, 1079 bp, Homo sapiens
tattaagccatgaatgagatgattacaacatgatctgtaagaatcacgagagttgttagacatgggtccaaatttggccccaagttttctggcagccaacacaaagaaggaaattacataagtagataatctacagtcccactaaaataaaaataaactagttttcaggaatatcacaagcagccctgggaaagagaaaatcccttcattctaatataagactacctagaatgtcagtgagttggacactaatctmattagttttttaagcacatcataattctcaatcaatagattgtgccttaatatctattctcatcaacagattgagaattatgatgtgcctaaattccctaagaagttttattaatatgctgcagttttaactcagcactttagtaagtggtctgaaacagaatttctgccattgatttattaggggtaataaaggaaagtttctgtaatcaaaggctggctgtacacaagccaatatagatccttcaaagcttcttaaaacctttaaagttgccaaagtgcacggtgactctcaaatttaggtgacgtttaaaaaatcaaagaaatttatcaatgaactggtattatatagaacataatttgagaagtcctctgctagatatctgaaacactgcctaactcacattagaatcttgatgacttatctggaaatgacctttactgtgcaaacttggtaaaataaaataaaataaaataaaatacaagaagaagcacgatgatatgcaacagatagtgactggtgattgggtattgtaattttcatccaggaggcagatggaaaaagtgcgactagaattttcactggagatgtcagaggtatttgaaccagagtgacctcatcttgaatagggactaagtaaaataaggctgagatctgctgggctgcattctcaataggttaggcattcttagtcacaagatgagataggaggcacaagatacaggttataaagacctcactgataaaactggttgcagtaaaggagccagcctgaaacctccaaatccaagatggcgttgaaagtgacttccggtcatcctca

SEQ ID NO: 63550 - DNA, 1079 bp, Homo sapiens
tattaagccatgaatgagatgattacaacatgatctgtaagaatcacgagagttgttagacatgggtccaaatttggccccaagttttctggcagccaacacaaagaaggaaattacataagtagataatctacagtcccactaaaataaaaataaactagttttcaggaatatcacaagcagccctgggaaagagaaaatcccttcattctaatataagactacctagaatgtcagtgagttggacactaatctaawtagttttttaagcacatcataattctcaatcaatagattgtgccttaatatctattctcatcaacagattgagaattatgatgtgcctaaattccctaagaagttttattaatatgctgcagttttaactcagcactttagtaagtggtctgaaacagaatttctgccattgatttattaggggtaataaaggaaagtttctgtaatcaaaggctggctgtacacaagccaatatagatccttcaaagcttcttaaaacctttaaagttgccaaagtgcacggtgactctcaaatttaggtgacgtttaaaaaatcaaagaaatttatcaatgaactggtattatatagaacataatttgagaagtcctctgctagatatctgaaacactgcctaactcacattagaatcttgatgacttatctggaaatgacctttactgtgcaaacttggtaaaataaaataaaataaaataaaatacaagaagaagcacgatgatatgcaacagatagtgactggtgattgggtattgtaattttcatccaggaggcagatggaaaaagtgcgactagaattttcactggagatgtcagaggtatttgaaccagagtgacctcatcttgaatagggactaagtaaaataaggctgagatctgctgggctgcattctcaataggttaggcattcttagtcacaagatgagataggaggcacaagatacaggttataaagacctcactgataaaactggttgcagtaaaggagccagcctgaaacctccaaatccaagatggcgttgaaagtgacttccggtcatcctca

SEQ ID NO: 63551 - DNA, 1079 bp, Homo sapiens
tattaagccatgaatgagatgattacaacatgatctgtaagaatcacgagagttgttagacatgggtccaaatttggccccaagttttctggcagccaacacaaagaaggaaattacataagtagataatctacagtcccactaaaataaaaataaactagttttcaggaatatcacaagcagccctgggaaagagaaaatcccttcattctaatataagactacctagaatgtcagtgagttggacactaatctaattagttttttaagcacatcataattctcaatcaatagattgtgccttaatatctattctcatcaacagattgagaattatgatgtgcctaaattccctaagaagttttattaatatgctgcagttttaactcagcactttagtragtggtctgaaacagaatttctgccattgatttattaggggtaataaaggaaagtttctgtaatcaaaggctggctgtacacaagccaatatagatccttcaaagcttcttaaaacctttaaagttgccaaagtgcacggtgactctcaaatttaggtgacgtttaaaaaatcaaagaaatttatcaatgaactggtattatatagaacataatttgagaagtcctctgctagatatctgaaacactgcctaactcacattagaatcttgatgacttatctggaaatgacctttactgtgcaaacttggtaaaataaaataaaataaaataaaatacaagaagaagcacgatgatatgcaacagatagtgactggtgattgggtattgtaattttcatccaggaggcagatggaaaaagtgcgactagaattttcactggagatgtcagaggtatttgaaccagagtgacctcatcttgaatagggactaagtaaaataaggctgagatctgctgggctgcattctcaataggttaggcattcttagtcacaagatgagataggaggcacaagatacaggttataaagacctcactgataaaactggttgcagtaaaggagccagcctgaaacctccaaatccaagatggcgttgaaagtgacttccggtcatcctca

SEQ ID NO: 63552 - DNA, 574 bp, Homo sapiens
tagccttatttatgtcagataaagcctataatytttacctgttagtttaaaacttggttgccaagcattttaatcatcgataatctatactacaaataggattatcactgatcaactattgaaaaaattataatggcaacaaaatttaaataatggaacaatgtgctttttttccctccagaaacttttctttagcttactccatggaaatcatacattgcttttttcagttgactcatttgctctgttaacatgattccataggaaacagatttatttattaccaaaaataacagccatgttattttagcatgaatgcccctgcagaacctagctttcccaaagaatttttttaatgagaacatccaaagtatttctcacttgattaatcaaacatgcaatctctgaactatattcatagttttccagtataatgctgtgtttcaaataatgcctacattgagtacttaaaattagtgtattcatttatttattatacaatcatttaataagcacctactctgtagcagtgtgtcatgctgtagctatgaagactgattagtcttgcttcttt

SEQ ID NO: 63553 - DNA, 571 bp, Homo sapiens
ctcaaaccaaggatggcatcattatataacactgggtggaagccaggatacccaggaagagcaagactgaaaataaatggtaggagagattcaaggaatgccttgctttatatgcctttggagaggcaagggtctggcccaatgaggtggraagggagtctacaagggaagtgatcaaccagagaagagtgtgagagggttcagaggaaagtatagtggtgggatattcggagcattaaccaatgatccaaagtctagcctcttatgttgacaataataaaacagcttgggtggtaggagctaggtttcccaaccccaaactggaaatggatttcctgtgctgggaaagttggagggaacaggtgagcaccaatgtattatcaagtctctgaggcctatatccccattggttctttgtgtcctaacaccatatgctgagctctgggatggtggcagcaaaccaccatcgatttgtggaatttaaaagctgacaaaatctgttccccatcttttggatagagcttacagtcacaagaccccaggaaagacacagctgagtggtgtttctaag

SEQ ID NO: 63554 - DNA, 571 bp, Homo sapiens
ctcaaaccaaggatggcatcattatataacactgggtggaagccaggatacccaggaagagcaagactgaaaataaatggtaggagagattcaaggaatgccttgctttatatgcctttggagaggcaagggtctggcccaatgaggtggaaagggagtctacaagggaagtgatcaaccagagaagagtgtgagagggttcagaggaaagtatagtggtgggatattcggagcattaaccaatgatccaaagtctagcctcttatgttgacaataataaaacagcttgggtggtaggagctaggtttcccaaccccaaactggaaatggatttcctgtgctgggaaagttggagggaacaggtgagcaccaatgtattatcaagtctctgaggcctatatccccattsgttctttgtgtcctaacaccatatgctgagctctgggatggtggcagcaaaccaccatcgatttgtggaatttaaaagctgacaaaatctgttccccatcttttggatagagcttacagtcacaagaccccaggaaagacacagctgagtggtgtttctaag

SEQ ID NO: 63555 - DNA, 623 bp, Homo sapiens
ttccatgctaacctcaacctcagagtctgcttccggaagaatcaaaggtgggtttatcagatttatccttctcccttgaattgactaacattgcagtatgttttgctattgctagctcatctccaaatcaccagaaaattatgcccagatactctcttgtccaaacacctcctgtctcttatatatgagtttaatatattgttttatttcactttgatgctattcagattgaccacttatcaacatctcatactgtcttttgtcaatcaatgtcagtaggtcttggttttttagcagggattcattcttaccatagcgtaagtgtgagaaggcagacgaaaatgagtcccctgggtttcgagagtctgcttcatgcaggagatccactatgcttatgggaattgatttttatcaagaaagctctaatgctgctatttaagttatcaagtcgggctttttgggtttcatgttcccaagggaagagaagaagagcttgtccacaattactctgggagaggtatcagctctagtatagatttaaaagtacaatagactactctatctataaattacattcctccaatattccgtaaaataccagaattcctaagttcatttkgggg

SEQ ID NO: 63556 - DNA, 549 bp, Homo sapiens
tgatttcaatagaaacactttaggtmtgatatttactgctttgtctgcccaaaatatcttaatgagaggtgtttgagaaaggtttgaagccttatctcctgcaaaggctatttttcagagctacattaaattgctctctacctttatctcttttgaagggatttgctaaaacctgtattcaacatgcaaccaaatcaatattcacacttttcccaaccagttcaactattattacagtgtctgttgacatgaagtcaactatcacaggttacagtttgaaaatgttttgtaatagcatatccaagtttagcaaaggttagggtccagtgctgaaagcagaaactattcttgatattagtgacagaaagtgacttagtacaaaggattaggtgcttacaaaattgttggaatttccagaggtcactcaataagaaggggaaggtgaagagtgagtgagtttatgtagacagtgtcccgttttacatgttcacagctatgcccatttaccgtccctcaaattgtcctctctttctatatattggtcaaaaa

SEQ ID NO: 63557 - DNA, 549 bp, Homo sapiens
tgatttcaatagaaacactttaggtctgatatttactgctttgtctgcccaaaatatcttaatgagaggtgtttgagaaaggtttgaagccttatctcctgcaaaggctatttttcagagctacattaaattgctctctacctttatctcttttgaagggatttgctaaaacctgtattcaacatrcaaccaaatcaatattcacacttttcccaaccagttcaactattattacagtgtctgttgacatgaagtcaactatcacaggttacagtttgaaaatgttttgtaatagcatatccaagtttagcaaaggttagggtccagtgctgaaagcagaaactattcttgatattagtgacagaaagtgacttagtacaaaggattaggtgcttacaaaattgttggaatttccagaggtcactcaataagaaggggaaggtgaagagtgagtgagtttatgtagacagtgtcccgttttacatgttcacagctatgcccatttaccgtccctcaaattgtcctctctttctatatattggtcaaaaa

SEQ ID NO: 63558 - DNA, 549 bp, Homo sapiens
tgatttcaatagaaacactttaggtctgatatttactgctttgtctgcccaaaatatcttaatgagaggtgtttgagaaaggtttgaagccttatctcctgcaaaggctatttttcagagctacattaaattgctctctacctttatctcttttgaagggatttgctaaaacctgtattcaacatgcaaccaaatcaatattcacacttttcccaaccagttcaactattattacagtgtctrttgacatgaagtcaactatcacaggttacagtttgaaaatgttttgtaatagcatatccaagtttagcaaaggttagggtccagtgctgaaagcagaaactattcttgatattagtgacagaaagtgacttagtacaaaggattaggtgcttacaaaattgttggaatttccagaggtcactcaataagaaggggaaggtgaagagtgagtgagtttatgtagacagtgtcccgttttacatgttcacagctatgcccatttaccgtccctcaaattgtcctctctttctatatattggtcaaaaa

SEQ ID NO: 63559 - DNA, 1844 bp, Homo sapiens
aaagagtaaatgcttacaactgtgtgtatgtctgtgtgtgtgtgtgtgtgtgtgtgtgtgtgtgtctgtgtgtctgtgtgtagaaaatcagaaatttctggaaatttatgaagctatgttttttacttatctagagatttcactagaacaggtaagaagtatgaatatacttctctttttgtaccctccttcatgccacaatctagtaccacaaactaaatccctttataataagctaaaatgtctgttactgacttgagtatcacccttttcagaaagtcgctgatgacaatattcagctattggcccatttaacagtaagtgctaataaactcatattgaccacacctcaactgacacagtttaaaagctatacatttatagatgctggttaatggagactctataagtagaaaagattatgaatttcttgacagtaaaattaaatgcaggaaaaatatgctttaacatattataaaatttaagaaaaactttaaaaaacaaaacaaatcaaagaataattttagttactaggaaataagtgttagaatctctcatttatatttgataagcaggttgtttttattgccataaagatattggtatatatgtattatatttatttatctttccatacatgcatatatctacacctatatttatagatatagataaatatctgtgagtgagatagagagaaagtgagagagaagttaggttttttccccctttacctaaygtcttatgttttgtctgtattcagaagcatgttattgtcagaaatttgcttgttgaatgctcttgcaattaaaatatctataaatggtcaaaatatatcttgagccttttaagatcaatacaaaacttagattgtgtggttatctttgctaaaactaatgttgaaactatatgcaaatacagagaggtaatgctatcttcaactgagtttttacatgtaattttgactgtactgtaaaagggagaaaaagaactctcaaaagcctttgctgctcacaaggtttcatttatttaaagattaataatatgattgcattacaaaaatcaaccagatgaatttaagtttattaagggtacaatagggagaaataaacctaggaaaaacttcagtaagaatttacgttccaaaggatcattaggtagcttattattagggttagtaggcaattgatggaatgttcaataaaacctgaaatagtctaatgtccttaggggattgatttagagagtaaaactattcccacatctctgtttccctatctaatttacatatcaaatgaatgcttttttaagattaaatgattttaaatccctagtttttgtatttgagtctaaggaagtacccagaggttaaaaataacataaatgtagcatattctgtctttcagaaactgagtctcatattgacaattaaatctgaaaatacgtttttttttaaaaatcagccttctaggacgctcttgctgtgttgttagaagggaaggaaattgacttcattgctatttaagtttgtaatttcagttattatttgttgagcaaaaaaaaagtataagtagttctagatcaggacacttttctattcctttaagtatttataaaaatttccatcacttttcaaacattacactgtaaaactgtattcaaagtgtaatattttccaaggagttctcagaagacaaatgtttctaaatgtgtagcaaatggctccaaatggtttgagagtatttggagcaaaaaggtaatagattctttgaagacattttttcagggatttaaaaattgtgattttttttttaaataatcatatcaagttcttatataatgca

SEQ ID NO: 63560 - DNA, 1844 bp, Homo sapiens
aaagagtaaatgcttacaactgtgtgtatgtctgtgtgtgtgtgtgtgtgtgtgtgtgtgtgtgtctgtgtgtctgtgtgtagaaaatcagaaatttctggaaatttatgaagctatgttttttacttatctagagatttcactagaacaggtaagaagtatgaatatacttctctttttgtaccctccttcatgccacaatctagtaccacaaactaaatccctttataataagctaaaatgtctgttactgacttgagtatcacccttttcagaaagtcgctgatgacaatattcagctattggcccatttaacagtaagtgctaataaactcatattgaccacacctcaactgacacagtttaaaagctatacatttatagatgctggttaatggagactctataagtagaaaagattatgaatttcttgacagtaaaattaaatgcaggaaaaatatgctttaacatattataaaatttaagaaaaactttaaaaaacaaaacaaatcaaagaataattttagttactaggaaataagtgttagaatctctcatttatatttgataagcaggttgtttttattgccataaagatattggtatatatgtattatatttatttatctttccatacatgcatatatctacacctatatttatagatatagataaatatctgtgagtgagatagagagaaagtgagagagaagttaggttttttccccctttacctaacgtcttatgttttgtctgtattcagaagcatgttattgtcagaaatttgcttgttgaatgctcttgcaattaaaatatctataaatggtcaaaatatatcttgagccttttaagatcaatasaaaacttagattgtgtggttatctttgctaaaactaatgttgaaactatatgcaaatacagagaggtaatgctatcttcaactgagtttttacatgtaattttgactgtactgtaaaagggagaaaaagaactctcaaaagcctttgctgctcacaaggtttcatttatttaaagattaataatatgattgcattacaaaaatcaaccagatgaatttaagtttattaagggtacaatagggagaaataaacctaggaaaaacttcagtaagaatttacgttccaaaggatcattaggtagcttattattagggttagtaggcaattgatggaatgttcaataaaacctgaaatagtctaatgtccttaggggattgatttagagagtaaaactattcccacatctctgtttccctatctaatttacatatcaaatgaatgcttttttaagattaaatgattttaaatccctagtttttgtatttgagtctaaggaagtacccagaggttaaaaataacataaatgtagcatattctgtctttcagaaactgagtctcatattgacaattaaatctgaaaatacgtttttttttaaaaatcagccttctaggacgctcttgctgtgttgttagaagggaaggaaattgacttcattgctatttaagtttgtaatttcagttattatttgttgagcaaaaaaaaagtataagtagttctagatcaggacacttttctattcctttaagtatttataaaaatttccatcacttttcaaacattacactgtaaaactgtattcaaagtgtaatattttccaaggagttctcagaagacaaatgtttctaaatgtgtagcaaatggctccaaatggtttgagagtatttggagcaaaaaggtaatagattctttgaagacattttttcagggatttaaaaattgtgattttttttttaaataatcatatcaagttcttatataatgca

SEQ ID NO: 63561 - DNA, 1844 bp, Homo sapiens
aaagagtaaatgcttacaactgtgtgtatgtctgtgtgtgtgtgtgtgtgtgtgtgtgtgtgtgtctgtgtgtctgtgtgtagaaaatcagaaatttctggaaatttatgaagctatgttttttacttatctagagatttcactagaacaggtaagaagtatgaatatacttctctttttgtaccctccttcatgccacaatctagtaccacaaactaaatccctttataataagctaaaatgtctgttactgacttgagtatcacccttttcagaaagtcgctgatgacaatattcagctattggcccatttaacagtaagtgctaataaactcatattgaccacacctcaactgacacagtttaaaagctatacatttatagatgctggttaatggagactctataagtagaaaagattatgaatttcttgacagtaaaattaaatgcaggaaaaatatgctttaacatattataaaatttaagaaaaactttaaaaaacaaaacaaatcaaagaataattttagttactaggaaataagtgttagaatctctcatttatatttgataagcaggttgtttttattgccataaagatattggtatatatgtattatatttatttatctttccatacatgcatatatctacacctatatttatagatatagataaatatctgtgagtgagatagagagaaagtgagagagaagttaggttttttccccctttacctaacgtcttatgttttgtctgtattcagaagcatgttattgtcagaaatttgcttgttgaatgctcttgcaattaaaatatctataaatggtcaaaatatatcttgagccttttaagatcaatacaaaacttagattgtgtggttatctttgctaaaactaatgttgaaactatatgcaaatacagagaggtaatgctatcttcaactgagtttttacatgtaattttgactgtactgtaaaagggagaaaaagaactctcaaaagcctttgctgctcacaaggtttcatttatttaaagattaataatatgattgcattacaaaaatcaaccagatgaatttaagtttattaagggtacaatagggagaaataaacctaggaaaaacttcagtaagaatttacgttccaaaggatcattaggtagcttattattagggttagtaggcaattgatggaatgttcaataaaacctgaaatagtctaatgtccttaggggattgatttagagagtaaaactattcccacatctctgtttccctatctaatttacatatcaaatgaatgcttttttaagattaaatgattttaaatccctagtttttgtatttgagtctaaggaagtacccagaggttaaaaataacataaatgtagcatattctgtctttcagaaactgagtctcatattgacaattaaatctgaaaatacgttttttttwaaaaatcagccttctaggacgctcttgctgtgttgttagaagggaaggaaattgacttcattgctatttaagtttgtaatttcagttattatttgttgagcaaaaaaaaagtataagtagttctagatcaggacacttttctattcctttaagtatttataaaaatttccatcacttttcaaacattacactgtaaaactgtattcaaagtgtaatattttccaaggagttctcagaagacaaatgtttctaaatgtgtagcaaatggctccaaatggtttgagagtatttggagcaaaaaggtaatagattctttgaagacattttttcagggatttaaaaattgtgattttttttttaaataatcatatcaagttcttatataatgca

SEQ ID NO: 63562 - DNA, 509 bp, Homo sapiens
caggcctgtgctgctttttaccagtggtacatccttgagtcaaattacagagtgacttctagctggctgtcactgtcctagtggagtrgaaagaggcccagacattccggttatcccagcagagcccagggtagtccagcccagctaacccaccagctgactgcagctgcatgagtgagcgtaggtgagaccagcacaatccacagaattgtgggaaacaataaatcattgttttaagccactaaattttagggtggtttgttacacagagaatacataagtgagactccaaacttcccacgacctcaccactaccaccaccccacaacacacacgcacacacacgcccttgagcatctctctggcttgccagtggcaatcactgaccgctttgctgttcctgtcttcatcttacccgacattaaaactcaccctctactttggcctggcctgcaagaaccttgcagtccattaatgggtttgaaaacagactcatactttggttcata

SEQ ID NO: 63563 - DNA, 509 bp, Homo sapiens
caggcctgtgctgctttttaccagtggtacatccttgagtcaaattacagagtgacttctagctggctgtcactgtcctagtggagtagaaagaggcccagacattccggttatcccagcagagcccagggtagtccagcccagctaacccaccagctgactgcagctgcatgagtgagcgtaggtgagaccagcacaatccacagaattgtgggaaacaataaatcattgttttaagccactaaattttagggtggtttgttacacagagaatacrtaagtgagactccaaacttcccacgacctcaccactaccaccaccccacaacacacacgcacacacacgcccttgagcatctctctggcttgccagtggcaatcactgaccgctttgctgttcctgtcttcatcttacccgacattaaaactcaccctctactttggcctggcctgcaagaaccttgcagtccattaatgggtttgaaaacagactcatactttggttcata

SEQ ID NO: 63564 - DNA, 509 bp, Homo sapiens
caggcctgtgctgctttttaccagtggtacatccttgagtcaaattacagagtgacttctagctggctgtcactgtcctagtggagtagaaagaggcccagacattccggttatcccagcagagcccagggtagtccagcccagctaacccaccagctgactgcagctgcatgagtgagcgtaggtgagaccagcacaatccacagaattgtgggaaacaataaatcattgttttaagccactaaattttagggtggtttgttacacagagaatacataagtgagactccaaacttyccacgacctcaccactaccaccaccccacaacacacacgcacacacacgcccttgagcatctctctggcttgccagtggcaatcactgaccgctttgctgttcctgtcttcatcttacccgacattaaaactcaccctctactttggcctggcctgcaagaaccttgcagtccattaatgggtttgaaaacagactcatactttggttcata

SEQ ID NO: 63565 - DNA, 509 bp, Homo sapiens
caggcctgtgctgctttttaccagtggtacatccttgagtcaaattacagagtgacttctagctggctgtcactgtcctagtggagtagaaagaggcccagacattccggttatcccagcagagcccagggtagtccagcccagctaacccaccagctgactgcagctgcatgagtgagcgtaggtgagaccagcacaatccacagaattgtgggaaacaataaatcattgttttaagccactaaattttagggtggtttgttacacagagaatacataagtgagactccaaacttcccacgacctcaccactaccaccaccccacaacacacacgcacacacacgcccttgagcatctctctggcttgccagtggcaatcastgaccgctttgctgttcctgtcttcatcttacccgacattaaaactcaccctctactttggcctggcctgcaagaaccttgcagtccattaatgggtttgaaaacagactcatactttggttcata

SEQ ID NO: 63566 - DNA, 801 bp, Homo sapiens
ccctggaccacagtggctctctttgcgtccaagagaacaatcttcccccagattgctggccaagtcgcgactgcgtgttagggatcccacagccaagttgtggtttkatgacagagtttggaaccatatgtggttcacgttcactcagtccggagacttggggaatctcttataaatgttctcagcaaaggcacagtggctgcccacatcctgggacacccagaaaactggggaagatgagacctctggcttccacaagacagccaagcgcctgggagtggcccctctgcactggcctccctcaggcccagcacacgctgctcctgcctgtccccagagtccctggggagtttgacttctcttcccagacccctctgaaacaaggagaccttgccatgtacagccttccctgtcctcagacgagtggaatcacctgaccactgtcctgtattagactgaactatagtcattcattgagtcaataattatttattcaattattatttattgagcaccagctatatgtacagccttccctgtcctcaaataagtagaataacctgtctaatggcctgtattatattgagctatagtcattcatttattcaataataatttattgagcaccaactatatgcactaggattctagcatatagcagacagatggcctatataacatgtacaccatataaaagacacagtccccatattccaggagcttctaatttcctagaggagaaaggcaataatcaataattaatactattaatcatttcattataattctgacaaatgcttt

SEQ ID NO: 63567 - DNA, 801 bp, Homo sapiens
ccctggaccacagtggctctctttgcgtccaagagaacaatcttcccccagattgctggccaagtcgcgactgcgtgttagggatcccacagccaagttgtggttttatgacagagtttggaaccatatgtggttcacgttcactcagtccggagacttggggaatctcttataaatgttctcagcaaaggcacagtggctgcccacatcctgggacacccagaaaactggggaagatgagacctctggcttccacaagacagccaagcgcctgggagtggcccctctgcactggcctccctcaggcccagcacacgctgctcctgcctgtccccagagtccctggggagtttgacttctcttcccagacccctctgaaacaaggagaccttgccatgtacagccttccctgtcctcagacgagtggaatcacctgaccactgtcctgtattagactgaactatagtcattcattgagtcaataattatttattcaattattatttattgagcaccagctatatgtacagccttccctgtcctcaaataagtagaataacctgtctaatggcctgtattatattgagctatagtcattcatttattcaataataatttattgagcaccaactatatgcactaggattctagcatatagcagayagatggcctatataacatgtacaccatataaaagacacagtccccatattccaggagcttctaatttcctagaggagaaaggcaataatcaataattaatactattaatcatttcattataattctgacaaatgcttt

SEQ ID NO: 63568 - DNA, 643 bp, Homo sapiens
ttttagacggagttggagttttgctcttgttgcccaggctggagtgcaatggcgtgatttcagctcactgcaacctccacctcccgggttcaagcaattctcctgcctcagcctcccaagtacctgggattacaggtgcccgccaccatgcccggctaattttttgtatttttagtagagatgggctttcgccattttggccagactggtctcaaactcctgaccccaggttatctgcctgcctcggcctcccaaastgctgggattacaggcatgagccaccatgcctggccaaatcatggattctttaaagtgatgtcaagaagataattcttgaaaggatcaaaggatggcttcacaagtcaccaaacatttcccttaggtgagggtctccagacagaatgtggaatgaaacacagttttgacaagcaaacctcttagaattgtgtgatggtctgtaacatttggtgaaccatgcctcctggtacttacaccctttcataacccgctcccttgaatctggactggccctggggctcattttaaccaatggactgtgatggaagtaatgcaagctccaggcctaagcctgtcaacttctgcttttcactcttggaaccagccaccatgctctaagaagccc

SEQ ID NO: 63569 - DNA, 942 bp, Homo sapiens
ggtaaaataatgaaatgctcttgcaactgtagaatattatttttctcctttgtgctatatatttatagcatttaagcaaccatgtcatttactcaggttttcttatattagttgatcagatcttttttcccttggtatcatagtctgacataattatcaataatacagaaaggtgatataatcattattttacagaacaaatcctttttctgaaatcctgtgtgtctgtgtgtgcagatatctctaacagataccttaatcattttcattggaataggaattaaragtcattttgcaaataaggtaagtctagactcccaaaataaaaattcttatgatcaaatattcatagattatgaggttattacatgcgaggcactgctctaagcactttacataggtcatatccttttatgctgagagtggtttttattatgatcccattatataggtgagggaattgaaacacagattaagaaatgggcccagcctagtgtggcagtgcccagtggcagagctcggatcagaccccagtggtctggctgtagagcccgtgctctaatcattttgttacactgcctctcagatgcttccactctgctttcttccatgtgcaaactattgtgtgcaatcctgtatatgatgatgatagtattttatttttttctgtctgagaagactgttatttttcataaaagagagttttcttatgtgatatgaattaaggttcataaggttagttttcgaagttgcattctttgtatcaagaatttatttttccattgtttaaattattggatagatgttgctatcggagctccacaagaagatgacttgcaaggtgctatttatatttacaatggccgtgcagatgggatctcgtcaaccttctcacaggtaaggtactattctatttccaaaagaagcattggttataatgca

SEQ ID NO: 63570 - DNA, 584 bp, Homo sapiens
cctgatgcttctcyacgtggccctgcatgacatgccatgcctcctgtctctaggaatctgtgagtataaacctcttccttcatgacgatcattcctgtgtctgctgtcttaccatacccgagtaaaacaaattctgggaacatttgaatacatttccttttacctaagaaatagttcatgttggccaggcacagtggctcacgcctgtaatcccagcactttggggggccaaggcaggtggatcacaaggtcaggagttcaaggccagcctggccaagatgttgaaaccccatctctactaaaaatacaaaaattagctgggcacggtggcaggagcctgtaatcccagctactcaggaggctgaggcaggagaatcgcttgaacccgggcagcagaggttgcagtgagttgagatcgcaccactgcaccacagcctgtgtgacagagtgagactccatctcaaaaaaaaaaaaagaaaaagaaaaagaaaaagaaatatttcatgtttacagtagaaatagctttctcaggctgcttcctgtctataaaagttcgggcatatagaggcctcctcatttcctac

SEQ ID NO: 63571 - DNA, 584 bp, Homo sapiens
cctgatgcttctctacgtggccctgcatgacatgccatgcctcctgtctctaggaatctgtgagtataaacctcttccttcatgacgatcattcctgtgtctgctgtcttaccatacccgagtaaaacaaattctgggaacatttgaatacatttccttttacctaagaaatagttcatgttggccaggcacagtggctcacgcctgtaatcccagcactttgggrggccaaggcaggtggatcacaaggtcaggagttcaaggccagcctggccaagatgttgaaaccccatctctactaaaaatacaaaaattagctgggcacggtggcaggagcctgtaatcccagctactcaggaggctgaggcaggagaatcgcttgaacccgggcagcagaggttgcagtgagttgagatcgcaccactgcaccacagcctgtgtgacagagtgagactccatctcaaaaaaaaaaaaagaaaaagaaaaagaaaaagaaatatttcatgtttacagtagaaatagctttctcaggctgcttcctgtctataaaagttcgggcatatagaggcctcctcatttcctac

SEQ ID NO: 63572 - DNA, 584 bp, Homo sapiens
cctgatgcttctctacgtggccctgcatgacatgccatgcctcctgtctctaggaatctgtgagtataaacctcttccttcatgacgatcattcctgtgtctgctgtcttaccatacccgagtaaaacaaattctgggaacatttgaatacatttccttttacctaagaaatagttcatgttggccaggcacagtggctcacgcctgtaatcccagcactttggggggccaaggcrggtggatcacaaggtcaggagttcaaggccagcctggccaagatgttgaaaccccatctctactaaaaatacaaaaattagctgggcacggtggcaggagcctgtaatcccagctactcaggaggctgaggcaggagaatcgcttgaacccgggcagcagaggttgcagtgagttgagatcgcaccactgcaccacagcctgtgtgacagagtgagactccatctcaaaaaaaaaaaaagaaaaagaaaaagaaaaagaaatatttcatgtttacagtagaaatagctttctcaggctgcttcctgtctataaaagttcgggcatatagaggcctcctcatttcctac

SEQ ID NO: 63573 - DNA, 642 bp, Homo sapiens
aagcacaactccccacatccgtgcactaggtacagcttagtgaccaacaccttcggtactgctaaggatccctacagaagttctgcctctactgtcaactagcagagctatgaggccttggcccagacccatcacctctctgggattcaatgccctcatctctagaactatgtggcctccagagtctgtttgctctcagaatctttgacgtcatgattccttaccataacaagtatcatttataaatgaaggtaaaaatggtcaactttaaaattaataataataatagtatgagaaaataaattcagtaaaactaggcctcttagacagacaatcaaaatgcaacagaaatcyctgaaagattcaattgcttcagtttcttagaacccagtgagtaaatagatcatcttgtagggggtctttaatgaatcacttttcctctctcaagtcaatgtttgattggtgtgtgtgtctgtgtgcactgtccctctagttagagttcctctagaaacaagaatagattcttttccatctcaatgtctatcacataataatccatcacaaacacttgaagactgataactggcttaaatcttttattgacaaaattatataaatcctatttgtctgcactgtaaaaaa

SEQ ID NO: 63574 - DNA, 642 bp, Homo sapiens
aagcacaactccccacatccgtgcactaggtacagcttagtgaccaacaccttcggtactgctaaggatccctacagaagttctgcctctactgtcaactagcagagctatgaggccttggcccagacccatcacctctctgggattcaatgccctcatctctagaactatgtggcctccagagtctgtttgctctcagaatctttgacgtcatgattccttaccataacaagtatcatttataaatgaaggtaaaaatggtcaactttaaaattaataataataatagtatgagaaaataaattcagtaaaactaggcctcttagacagacaatcaaaatgcaacagaaatccctgaaagattcaattgcttcagtttcttagaacccagtgagtaaatagatcatcttgtagggggtctttaatgaatcacttttcctctctcaagtcaaygtttgattggtgtgtgtgtctgtgtgcactgtccctctagttagagttcctctagaaacaagaatagattcttttccatctcaatgtctatcacataataatccatcacaaacacttgaagactgataactggcttaaatcttttattgacaaaattatataaatcctatttgtctgcactgtaaaaaa

SEQ ID NO: 63575 - DNA, 2545 bp, Homo sapiens
aaaacacactgaattcctaccatgagccagtcactgtgctggccacggaggcatgaatggccccagccctcatggagtgcccagtccagagtgagtaacagtcatgcaatctggatatcaaggacagagtggtaagggctgtggtggagtaactacaagggaagctaagactactcttaggagggacacctaatctgatttttgtttgtcatatagagcttcctggaggaattgactcctagatttgtggagacctaaaatgagtggagaaaagtgttccacacagggtgaacagcacatgaagtctggaaatgaaattcatgactgtgtcttagactgtgagttaggaaacagtgagagatgagtcagaaaaggtkggcagaatccaggctgtatgatctttgaagccataaatacatcttttgacttattcaaaagcatactggagcagtgaagggactcatgctgaaaagagcagcgagatttgtgcttggactggtcattccatttacctgaagatggcaagttgaacacaggcagaaatctccccttccactctatcatatggagttgatatcagtatattaaaattgtattactaaatacatcttatgcttgaaaataagaaaagggaaatacaaatcagaaatccagaagcttgccaaaaagtgaggggagaggaagtagacaggaatccatgatagtaataagggcctaaatccattgggcttttaggggactgggattgtggaactggagcctttcaatatttggaagcagggctgacaccattctatctgcccatggctgggggctgaaaggggctacctgttctcagcagggtccagagttcctctgccacacagaaacaaagtaccacaacagaaattttgtgggtggcttaaacaacagaaatttattgccttgcagttctgaaggctagaagtccaagaccaaggtgtcagcagggttagttctttctgaggactgtgagggatcatctattccatgcctctttcctagcctctggtggtctcagacactccttggctggtagatgatgttctttctgtgtcctcacactgcttttcctctgtgtgtgtctctgcctcttcagatgccatttcttccataaggacactagtcatcttggattagagagactggtctctaccgattttttttaaatgcctcatgctaagagtgtctaaggagggaaagtacaaactgtctggaaataaggcaatcctttgtttacctggtctaagcctggtctggagctctccctgatacagagctggggatgaggcaactgaaggaacatatatcaggagactgtcacaacccagaatgcatgtaggagaaacctgtgaaagatgagtgtaagataattagaaagtatttgaggaagagcaacatcattaaagatagacaacaaacagcatgaatgggataactgatacttgagcagttatagctaatgcaggaataaagaaagaactttaaaataaatatatgattatccaagagacaaagtaggaaatggcaactgtaaaataagctggagaacaaattaccaaacttgaagatcaacctaaagaagtctctcagaatgcagcacgaagaaatagagaagacaaatagcaaagaaaggttaagagatcatgagaatggattcagaagattcagtatacatttgatgaaatacgtaggagagaattttgaatggccaatatatgaatgagaattttccagaaggaagtatagatatgaatctttgagttgaaaaaaatcccatgaagtaataaagaggcaaaaaatatgtatatagatattatgctcaaactttggaacattagatacaataagagcacccctaaattctgtcagagatatgatattgatcagcagtccccaacatttttgtcatcagggacaggtttcatggaagacaatttttccatggatgggggaggggttggtttcgggatgattcaagtgcattaacatttattatactttatttctattattacattgtaatatataatgaaataattatacaactcactataattagaatcagtgggagccctgagcttgttttcctgcaactagatggtcccatctgggggtgatgggagacagtgacagatcttcaggcattagattctcataaggagtgtgcaacttggatcactcacatacacagttcacaataggatttgtgctcctatgagaatctattgactccactgattggacaggaggcagagctcaggtggtaaggtaagcactggggagcagctataaataaagatgaggctttgctggctcacctgctactcgcctcctgctgtgtgccctggttcctacaggtctgtggcctgggggttggggaccccaatacaaagtaaaagaataaacattaaaataatgtcatgttttctattaacaatattagatgccataaacaacaggacaatatctaaaaaactcagagaataatatcctttaatacagaaatatttattattctaaatta

SEQ ID NO: 63576 - DNA, 695 bp, Homo sapiens
gactccatctcaaaaaaaaagaatttaggcttagagaggggaaggggaaactttcacttttacttgatataattcacttgatataattcactttcacttttacttgatataattctatattattaaataattatccctttaaataaaaagttaatcatttttataagcttcatatcaattgatccttataacaatactatgatgtagcaggggcagttactattaacttgtattttaacagatgaataaatgaagtcattcctacacattaaaagtatcttttgatctggaacaagtaagataaaatgagaggcaaacatataatgagtgctttcagtgagtaaggaatacactaggaaaaaagctsttacaaatatcctaataatgcctaacatttctctaaacccttattgattagaaaccattttcaaagttatagtttttattgattattcttttgaaatagtttgtgtccattcttttcttcctaaaggtatctcttccatgcaggtcttcatggttcatgtttcaactaccaccagatccttcgctcctgccaatcattcctgccccagtatgttcttcacctcacttgattttactaaaacattgcttggatcacgtcatcataaagaccttaggttggaaagagcctcaaatgcagcctctcgcctggctcaggaatcttttcaaga

SEQ ID NO: 63577 - DNA, 775 bp, Homo sapiens
gtgttacattgttttattacttgtatttattcatttggtctagaaatatattgtgagattatatttggtgggggtgagtttggtaataatgtatcataaatcacagagtattttcagtaattttcagcaaatttagatacatagaaaagcaggttttgtgggtagtgaggtaatattcttggacaaaagctatagggtacatttgtgtttgacttatcccttgtgaaacatggatagctctgtggcatttcatgtacacaaaataattcatgcgcttgcagtaatgaaccctgtgcaggatttccttcaatgcgtactcaatagggagctctccactgcttgtgatattgtaagtctctcagctcactcagccatctaaatgtaaaactcatcactcagggccatcatcttgcactcaggaacactctccagagaactgggcgtccataaagcaatgaatggattatatactcattcatatatgtggatttttcttctcttctgatgtagtattgatcatgtttttcatttgatagtaacccaaataatggaarctactaatagaagttgtaaatattgcttttatttaaccatttcataacatatctgagcattcacactactggaaatcgctttttaaaatgccagaaatgaccacattgtgttttgatcttcttctaagtataggaaaaggcctaccacattgaaatgctaatggtgtccactgagataaatcacaggctttgtggtttatccaccaagaacaatagccagt

SEQ ID NO: 63578 - DNA, 1021 bp, Homo sapiens
ccaatctcttaggttaaaaggttgttattttgatttattactagtagcgctgactatcttctcatacatttattggccatttgtatttctctttttgtgtgtgaatagcctccacttttctattggggctattctcttttctttttgatttaaaaaggctattttcaattaaggatatgaattttttgtcacatgttatrtacttctccaatttattattaactttggtcagagtcatttttaccatatttcattcacaagttttaaagtcgtcaaatgtatttttccctttatatttctggctttcaagacatacctgtaaagtccttatttaatctaagtgttagtttttatttatttggtatatttttattttttggagacaggttctcactctgtttttttctttaaatttctagctttcatgccatacttatctaatctaagtattagtttttatttatcttttatatttttattttttcaaggcaagatctcactctgtctcacaggctggagtgcaacgacgcagtcacagctcactgcagcctctgcctcctgggctcaagtgatcctcccatctcagcctccctagtagctgggactacaggcacacaccaccatgcccagctaattgtttttatttttttgtagagacaagatctccctatgtttcctagattggtctcaaactcctaggatcaagctgtcctcttgcctcagcctcccaaagtgctgagatgacaggaatgagccaccactgtgcccagccgaggatttttaaaaatgttcttcaacttactctggtacttaatggtttttcagtaactatttttaagttaacattttcttggccactctgatagatgtcagaggtccaaattagctcttcattctagacgctcatagtcaagtgatgaggacgtgcataaaaacactcttaacaccatacatgctttcataccagcttgatgagcaaaaagagaagaaaggcgatacctacgttttgctgtagatttgg

SEQ ID NO: 63579 - DNA, 1005 bp, Homo sapiens
tctgaaccctgtayatgaccattatctttttttctgaagaaatttttaaacattttcccccataaatttaattatgttattgttatctagtttttctttaatcaggtgcaatacatataataacattaacctttttaaagtaaataattcagttccatttagtacattcagaaggttattcaacctatagcactatctaattccaaaatatcttatcaccctccccccaccaaaatcttgtacccattaaacagtcattctccatttcttatttcccctggatcttggcaaccatcaaactatttttgtgtctatgggtttacctaccttggatattttacataaatgagaagataattacctagttttgaaaccactgttattcaaaaaatattttgaaaattattttttagatgccattggcctgggtgccaggacctctgcatttaactcttgattcttgcagggactggtgcataaattaacacaaatggcaaattctttaatttcatttcaactgcaacccagtatatttctgttaattaataagaatcgcctatagacaacaagtgcaactgagttttctattcataacaggataacattattaagcatgtacttattctctccataaaatattatgtctttacacctttataagattaaaagaatgaatagatgatgatcataattattacctttatagaattatctttatagtatttacaaaaattctgccagtaacttttttaacattaccaaaatagagttggtaattctggtttgaggaattttcccaagcccttatgattcaggggtggcagagcttaaattcaaacccatgtcttcctgggaacaatgaaataactttgcaatattcaacatttttcttttattggcatctactgtcaacaattagacacctgtaaataataagtgcaaatacagctctgataacatgcaaagcccatctctttctagagcattctgccttttgcctataag

SEQ ID NO: 63580 - DNA, 576 bp, Homo sapiens
  misc_feature (1)...(576): n = A,T,C or G
gtnnnnnnnnnnnnnnnnnnnnnnnnnnnnnnnnnnnnnnnnnnnnnnnnnnnnnnnnnnnnnnnnnnnnnnnnnnnnnnnnnnnnnnnnnnnnnnnnnnnncatcagcactgggcacagggcactggtgggggtagtgctgcctgcgtcagggtgtgattttgaaccatcagcggtggcagcacaggagtgtactgggtcgcagacagttgtgtgcacatttgcactggcaatgggcgacacggctgagtgcctgcacattagcaagggaggagaggacagtgggttgcgctcacgctgagaacagcagtgggttgctcctgcacatgagtgccagcagaggaggggagctggggtcttctcrtataggcagcagcaaagaggtgggagggtagccatgggtatgtgccaacgaagtagcgcagggaagactatggtgggaagaaggtgcaagtggactaatgctcatgggcaggggcccctctgctggagctctcaggcaggagcagtctgccagcgaaggagctatgatgagggcccgaggaagcaccctgtttaggcaagcaccaggtccag

SEQ ID NO: 63581 - DNA, 746 bp, Homo sapiens
cggtcaccccagtccaacatctgcagctgtgtaaaactttccatagttgaaaatcactgccttcaagcatacatctgggacaaaacccttaaaaaatgagctggggattgagcttaccaaatccctagggcctaaaacttactggcctcccttaaaccttgggtctaggtttacaggttagatgtttccactgaaatcctttatacttttgactataggggaaattctatcagacctgaactcactatttaggctttgttgttggctatctttaatgggaaaggagacrgcattcagatctccttagagttatgtcagaacagcaggttagtaggaactgcccacagggtgggacagaagttgtaagagctacctcctgggaaacaaaaatcatgcaacactctttgccctcctaggatgtcactttgcatttagttcaggacagcactgctctcatccttcccgccttctagataataaaccagcagggcatgagggtgcttggtttttcttttaggatctagcaatgcagttcatcagtgcctggtcgcatttcacctaaagaacctattccccaactccctgcatgttcaggactccaggaggatggataaccctgggaggtctggacacccaccaagcctggcctgaccatagagcactctgccctccctgcctctctagctctgcttgaacactgcagatccctggctcactggccccacagctctttaaattttctggta

SEQ ID NO: 63582 - DNA, 2958 bp, Homo sapiens
atttctattataagcaccacaatacatagttttattcctttaaaaacttaattattttaagaataattttcagcacagtggaggaagtcgtgctaccccgcagagttggcgtgtgttctagattcatcctggtaccaccatgtcgaaggtttcctttaagatcatgctgacatcggacacgcagctgccatacaaagtactcagtgtactttgtactttcctgaaagtacacctttcacagcagtcttaaagtttgcagccgaagaatttaaagctcctgctgcaacaagtgcagttattaccaatgatggaataggaataaatcttgcacagactgctggaaatgtttttctaaaacaaggttcagaactgcggattattcctagagatcatgttggaagttgttaatatctgctacttggaacatacgattgcctttcagaataaatattggtattttttgttgttgtaaaattgaaatcaggcatttaacatactatgaaaacactaagagtcaatgaataatgaaaggtgactcatctgtccctttttgttgttcatactcttcatatgaagagggaatgcataagaattaaggctactactgtcacagaagatcatagtctttgctacctcacaacacaaataggtagttcattggggggaaatgaattagccaactgtgttaactgcaaggttctgataattttttttttgagaacaatttggaacattaaaatttactgaatcttatatattcatctgacttaaaaatatacaaagaattacggatcctggatggcaatttgcttgatagcatctgatttgcagactcatagtttgatttttaattaaatatataggttatgatgaagtcaatagacatatcagtgaacaattaactatattaaatttttatcatttactttttctaagattaaaacctcatgtattatataaatttcagtttagtatccacaaaaaaattaaaataataatgtaactcttatgtgtataaattgatgtctcataccaggttttaatgttggacttgcagaatccaatatttgtaatggtgggaattcacaatacagtagaagcatcctttgctgagttatagattcctttatcaatctcttttgatacaacttttaaaacaagtatcttcaagaaaccattggtgttttgaggataatatttctaaatagcattcaggaagagaatattattgcacagaagatctgatgatcaaaaaaaaaaaaaagctcaaggagatgcagattgaaagtgctgacaagttatatttattgaagatccaacttttaaggaagtgctaagattagtcactcatgtgaataagaagccaggaaaggaaagatggggaaacctagatgaccaggcttctgttaaggaggaaagcaacggaggaaaacagtgaaggggaacagaaaagtgtagcaaagtgttacagaaaagccaactggatagacaacactgcagaaggtagaggttggggagaactgaaagggaaaacaaaatacttgacatagtcttaagtagtagaaggcaattagagaaaactaagtatctactggccttgtcaacatacagacttcaaaataccccttatgagaatccaaagaatgatgtgtgtaagggaagattttatgtgcccttccagaagaaatcagtatctatgtaaatcttgaaagatgaaatcaaagctcataatgattcagaatcagtgcttgccctgctgtattctgtctgaacggtgaactctggaagcagggattgtgtctgtctggctctttttagagctggaaatgtagtggctttcattaaatacttgctgtgaagtctctctaagaccaattattatcttagcatgtttcagtatcttctctgttataggctctaggttcattggggaaaaagatataagaaaattcaacagactcagcatttgaagtgtgccattggtagttgtttatgaagttaccagatattcatatatgtgacaaatgaacagcaggattatgaattatcaaaggaaaagacatttgctgaggtgaaaaactctggtgtttgaggaagtttttatttttataaaataaaaatattttaaaattttaaaatcttataaataaaatctttaaaatattataaaataaaaatatttaaaatattttattttaaaatctgatgttcaaacgcccgtttcttacaataactattgagcctcagttaaccagaaatttgtgaacatccatttcctgactttttgctttaaattttttctccactgtttctagcacaaaagtttgcctgctgtgttgcagaaataaatttatgttgtcctctgccataaagtgatatatttaatatttttattctttgtttttgaaaattatattgtaagttcctaaaaacattttattaaacaattagacattttgttattaaataaatgtgatctgtaatttctttgtgcagaatgatttgaagtattgtatttagtttacatgcattgtgggttcataattaatatccaatgaaaatacattttgttatattgtaaaaaaagaataattttaacagtaaaaaagagattttttatatttatctgcatatttactatcttctgtgctcttcattcttttttgtagatctgagtttcattcaggtatcattttccttccagctaaagaacttcctttartattttttcataagaaagatcggctggtgacaaattccctcagattttcagatttcctttttttttttttttgtctgaagtcattactttgcctccatttaggtaggccttttttgtggttgttataggattctaggttgacaatcttttagcacgttatagatgcatggttctggatttggtacaggtttgcacagactctctgtaaacatgttaaagaaaaatggagaagctgc

SEQ ID NO: 63583 - DNA, 2958 bp, Homo sapiens
atttctattataagcaccacaatacatagttttattcctttaaaaacttaattattttaagaataattttcagcacagtggaggaagtcgtgctaccccgcagagttggcgtgtgttctagattcatcctggtaccaccatgtcgaaggtttcctttaagatcatgctgacatcggacacgcagctgccatacaaagtactcagtgtactttgtactttcctgaaagtacacctttcacagcagtcttaaagtttgcagccgaagaatttaaagctcctgctgcaacaagtgcagttattaccaatgatggaataggaataaatcttgcacagactgctggaaatgtttttctaaaacaaggttcagaactgcggattattcctagagatcatgttggaagttgttaatatctgctacttggaacatacgattgcctttcagaataaatattggtattttttgttgttgtaaaattgaaatcaggcatttaacatactatgaaaacactaagagtcaatgaataatgaaaggtgactcatctgtccctttttgttgttcatactcttcatatgaagagggaatgcataagaattaaggctactactgtcacagaagatcatagtctttgctacctcacaacacaaataggtagttcattggggggaaatgaattagccaactgtgttaactgcaaggttctgataattttttttttgagaacaatttggaacattaaaatttactgaatcttatatattcatctgacttaaaaatatacaaagaattacggatcctggatggcaatttgcttgatagcatctgatttgcagactcatagtttgatttttaattaaatatataggttatgatgaagtcaatagacatatcagtgaacaattaactatattaaatttttatcatttactttttctaagattaaaacctcatgtattatataaatttcagtttagtatccacaaaaaaattaaaataataatgtaactcttatgtgtataaattgatgtctcataccaggttttaatgttggacttgcagaatccaatatttgtaatggtgggaattcacaatacagtagaagcatcctttgctgagttatagattcctttatcaatctcttttgatacaacttttaaaacaagtatcttcaagaaaccattggtgttttgaggataatatttctaaatagcattcaggaagagaatattattgcacagaagatctgatgatcaaaaaaaaaaaaaagctcaaggagatgcagattgaaagtgctgacaagttatatttattgaagatccaacttttaaggaagtgctaagattagtcactcatgtgaataagaagccaggaaaggaaagatggggaaacctagatgaccaggcttctgttaaggaggaaagcaacggaggaaaacagtgaaggggaacagaaaagtgtagcaaagtgttacagaaaagccaactggatagacaacactgcagaaggtagaggttggggagaactgaaagggaaaacaaaatacttgacatagtcttaagtagtagaaggcaattagagaaaactaagtatctactggccttgtcaacatacagacttcaaaataccccttatgagaatccaaagaatgatgtgtgtaagggaagattttatgtgcccttccagaagaaatcagtatctatgtaaatcttgaaagatgaaatcaaagctcataatgattcagaatcagtgcttgccctgctgtattctgtctgaacggtgaactctggaagcagggattgtgtctgtctggctctttttagagctggaaatgtagtggctttcattaaatacttgctgtgaagtctctctaagaccaattattatcttagcatgtttcagtatcttctctgttataggctctaggttcattggggaaaaagatataagaaaattcaacagactcagcatttgaagtgtgccattggtagttgtttatgaagttaccagatattcatatatgtgacaaatgaacagcaggattatgaattatcaaaggaaaagacatttgctgaggtgaaaaactctggtgtttgaggaagtttttatttttataaaataaaaatattttaaaattttaaaatcttataaataaaatctttaaaatattataaaataaaaatatttaaaatattttattttaaaatctgatgttcaaacgcccgtttcttacaataactattgagcctcagttaaccagaaatttgtgaacatccatttcctgactttttgctttaaattttttctccactgtttctagcacaaaagtttgcctgctgtgttgcagaaataaatttatgttgtcctctgccataaagtgatatatttaatatttttattctttgtttttgaaaattatattgtaagttcctaaaaacattttattaaacaattagacattttgttattaaataaatgtgatctgtaatttctttgtgcagaatgatttgaagtattgtatttagtttacatgcattgtgggttcataattaatatccaatgaaaatacattttgttatattgtaaaaaaagaataattttaacagtaaaaaagagattttttatatttatctgcatatttactatcttctgtgctcttcattcttttttgtagatctgagtttcattcaggtatcattttccttccagctaaagaacttcctttaatattttttcataagaaagatcggctggtgacaaattccctcagattttcagatttcctttttttttttttttgtctgaagtcattactttgcctccatttaggtasgccttttttgtggttgttataggattctaggttgacaatcttttagcacgttatagatgcatggttctggatttggtacaggtttgcacagactctctgtaaacatgttaaagaaaaatggagaagctgc

SEQ ID NO: 63584 - DNA, 747 bp, Homo sapiens
catttggctctactcttcattgttttcattccaggacccagacaaagcagccaaatctgggtcattgcctatcttataccagaaggraaaaagaacatggcagaaacactcaatgactcttaagagttcttcttggaagtaacacacgttatgcctgcttatacttcattgatcataacaagtcacattgccaagcctgagaccaatggggcacagaatatgatctacttctgggtagggatatcaaccttatcaaacaatatttcaatttatcacaccatcttttgctccaagatgactgtaccagattctggcatcttgtcaacatttcagccagcagaaaagaattcacactcttttcacgagcacaatatgaaaattatacacattaccttccaatattccattggccaggccttgggaacaagccatatctatctgctttggagcatgggaaatacagtttgtggttttttgttttggggtatttttttgtgtgtctatcttccccactacccccaaaaccatacagttcttacctgggcatccctatagtgggttttttgttttgttctgtttttctttttaatgtggtccaataattgtgtcttacttggaatttagtctcaacactattgaataaataacaaaaatccagtctccactataggctctgcacagctgccaatgctaacgtggaagatggcaaggagccctgtgccttgtcctctcactctgggagcacag

SEQ ID NO: 63585 - DNA, 747 bp, Homo sapiens
catttggctctactcttcattgttttcattccaggacccagacaaagcagccaaatctgggtcattgcctatcttataccagaagggaaaaagaacatggcagaaacactcaatgactcttaagagttcttcttggaagtaacacaygttatgcctgcttatacttcattgatcataacaagtcacattgccaagcctgagaccaatggggcacagaatatgatctacttctgggtagggatatcaaccttatcaaacaatatttcaatttatcacaccatcttttgctccaagatgactgtaccagattctggcatcttgtcaacatttcagccagcagaaaagaattcacactcttttcacgagcacaatatgaaaattatacacattaccttccaatattccattggccaggccttgggaacaagccatatctatctgctttggagcatgggaaatacagtttgtggttttttgttttggggtatttttttgtgtgtctatcttccccactacccccaaaaccatacagttcttacctgggcatccctatagtgggttttttgttttgttctgtttttctttttaatgtggtccaataattgtgtcttacttggaatttagtctcaacactattgaataaataacaaaaatccagtctccactataggctctgcacagctgccaatgctaacgtggaagatggcaaggagccctgtgccttgtcctctcactctgggagcacag

SEQ ID NO: 63586 - DNA, 747 bp, Homo sapiens
catttggctctactcttcattgttttcattccaggacccagacaaagcagccaaatctgggtcattgcctatcttataccagaagggaaaaagaacatggcagaaacactcaatgactcttaagagttcttcttggaagtaacacacgttatgcctgcttatacttcattgatcataacaagtcacattgccaagcctgasaccaatggggcacagaatatgatctacttctgggtagggatatcaaccttatcaaacaatatttcaatttatcacaccatcttttgctccaagatgactgtaccagattctggcatcttgtcaacatttcagccagcagaaaagaattcacactcttttcacgagcacaatatgaaaattatacacattaccttccaatattccattggccaggccttgggaacaagccatatctatctgctttggagcatgggaaatacagtttgtggttttttgttttggggtatttttttgtgtgtctatcttccccactacccccaaaaccatacagttcttacctgggcatccctatagtgggttttttgttttgttctgtttttctttttaatgtggtccaataattgtgtcttacttggaatttagtctcaacactattgaataaataacaaaaatccagtctccactataggctctgcacagctgccaatgctaacgtggaagatggcaaggagccctgtgccttgtcctctcactctgggagcacag

SEQ ID NO: 63587 - DNA, 747 bp, Homo sapiens
catttggctctactcttcattgttttcattccaggacccagacaaagcagccaaatctgggtcattgcctatcttataccagaagggaaaaagaacatggcagaaacactcaatgactcttaagagttcttcttggaagtaacacacgttatgcctgcttatacttcattgatcataacaagtcacattgccaagcctgagaccaatkgggcacagaatatgatctacttctgggtagggatatcaaccttatcaaacaatatttcaatttatcacaccatcttttgctccaagatgactgtaccagattctggcatcttgtcaacatttcagccagcagaaaagaattcacactcttttcacgagcacaatatgaaaattatacacattaccttccaatattccattggccaggccttgggaacaagccatatctatctgctttggagcatgggaaatacagtttgtggttttttgttttggggtatttttttgtgtgtctatcttccccactacccccaaaaccatacagttcttacctgggcatccctatagtgggttttttgttttgttctgtttttctttttaatgtggtccaataattgtgtcttacttggaatttagtctcaacactattgaataaataacaaaaatccagtctccactataggctctgcacagctgccaatgctaacgtggaagatggcaaggagccctgtgccttgtcctctcactctgggagcacag

SEQ ID NO: 63588 - DNA, 747 bp, Homo sapiens
catttggctctactcttcattgttttcattccaggacccagacaaagcagccaaatctgggtcattgcctatcttataccagaagggaaaaagaacatggcagaaacactcaatgactcttaagagttcttcttggaagtaacacacgttatgcctgcttatacttcattgatcataacaagtcacattgccaagcctgagaccaatggggcacagaatatgatctacttctgggtagggayatcaaccttatcaaacaatatttcaatttatcacaccatcttttgctccaagatgactgtaccagattctggcatcttgtcaacatttcagccagcagaaaagaattcacactcttttcacgagcacaatatgaaaattatacacattaccttccaatattccattggccaggccttgggaacaagccatatctatctgctttggagcatgggaaatacagtttgtggttttttgttttggggtatttttttgtgtgtctatcttccccactacccccaaaaccatacagttcttacctgggcatccctatagtgggttttttgttttgttctgtttttctttttaatgtggtccaataattgtgtcttacttggaatttagtctcaacactattgaataaataacaaaaatccagtctccactataggctctgcacagctgccaatgctaacgtggaagatggcaaggagccctgtgccttgtcctctcactctgggagcacag

SEQ ID NO: 63589 - DNA, 1854 bp, Homo sapiens
  misc_feature (1)...(1854): n = A,T,C or G
tctcctaatagatctccatctgcatttaatgcttgggattactttactggtgaactaaacctttaattctattataattttccatagactcaagagaattgacatctggtgttaaaaaacaaaaaatcatacaaatgactgatatgtatcattttccttattaaatatggaagaaaggggaggaggatgcagaaatggttggctaaaagctccagagaaaaacttaacagattttatgattttgcggaaggtaagtccttgacctcttcattttcacattcagcaggtatgaaagtttcttctgttacatatggttctatcattcattcatagaattttgacagaaagctgtagaactgaaaaaaagcttgatatacaaactactagctgtattggcaattttacatgaaggcattactgaccctccacagcttctttctattaaccattcagatttatgcaactaccattatcccaggggttactcaaagacattgacaaaagatctagcagcattctgtccattcaatataactacttttaacatctaaatattttcaggattaactttggttgaagcatacttgaatgaattacatattaataccatcatcacctcatttgatcctcatgttacccccatcagacccaaagagtcaatacattaaactatttggtagatgaaaactcaggcttctgaaagctaagtgactttgccagaatcacacagtaagttaattgctcagtcaaggcatgagagtcagataaatgattcccaaaccagggatccttttatgttattacattgcctaaaaaactggcattcaaatggaatttagagggcatttaatctggccatctcatttgattgatgaataaattttctggctaagaatctacacatttgtttagtgctttatatactcagcatcagcatcagtataaattaaattttctattatgttctcagcctgattcacactttttagaaaatataaaacttatttcatactcaaataatttactaaccttgtgtagttagtaaattattactactaatattacatctctatttttgaaatttacattcaatatatttatttcattaggatgctactaatgaaattaacttttttttaaaaaaaaggtgaatcatctcatttttatcaggttcactacatatatatgaagtagttgataaatgactcagcgttggccaattgcaagaataccacttaaaagtaaatggttattactgaagagtgaattatatattttcattttgtagacttaacatttaaaatggaagatggtgggaagcacacacatttctcagtcttgttggaaaagcaaatgacaacgagattttctgtttcttgtttcgttttgtttttagatgcattagcaagacaggtgtgggtagaatggagtagccatgaacatagacaaaaagtggagagagtgaaaacatatcagagtgaaaaaacatagataaatgtaagggagaagaaagaaaaaaaaataaagaacaatatttaaagagaacaaaataaatagagccagaaagaaacagagaaggggaaaagaacaggcaacaaattaacagggaaaagaaatcacaaccagaaaaaaaaagaaaatgaactgcttattgatgaataaagaaagagagaaaargaaaaataaggaaggaggcggagtaagcacataagatctctaaacacttggctccagcagcccatctgaccacactnnnnnnnnnnnnnnnnnnnnnnnnnnnnnnnnnnnnnnnnnnnnnnnnnnnnnnnnnnnnnnnnnnnnnnnnnnnnnnnnnnnnnnnnnnnnnnnnnnnna

SEQ ID NO: 63590 - DNA, 547 bp, Homo sapiens
tgcttacctctgtgtgaactaatggaaccagygttttggccctacagagtgaaggacaggatactggaagaagacagtccaaggcattgttacccagtcatccccagtcaggtcttgtttgaaactccaacagtttagtaatatactagtaagtcaatttgtagctctacttgaagaaggtttgtgccaaacaagatagtttcagtaactaagctatgttgagtgatgttcaaaacaattgttctaaattttattctatgtcagagcaaggttccaatgaatatcaatgcaaatatacaacacatttaaatggtttttaattacattctatttatacagttagcaaatgttgatcacatcttattaaaataggtccatctaggagactgtgaacaaatttctaggtttgtcattaagaatccctgaatctactgaattttagaatttcgacacaattcacattttttccaaataattatttctactgttttataaataactgtatattgataatgtttgctcaataatattgagatgttatttactg

SEQ ID NO: 63591 - DNA, 547 bp, Homo sapiens
tgcttacctctgtgtgaactaatggaaccagcgttttggccctacagagtgaaggacaggatactggaagragacagtccaaggcattgttacccagtcatccccagtcaggtcttgtttgaaactccaacagtttagtaatatactagtaagtcaatttgtagctctacttgaagaaggtttgtgccaaacaagatagtttcagtaactaagctatgttgagtgatgttcaaaacaattgttctaaattttattctatgtcagagcaaggttccaatgaatatcaatgcaaatatacaacacatttaaatggtttttaattacattctatttatacagttagcaaatgttgatcacatcttattaaaataggtccatctaggagactgtgaacaaatttctaggtttgtcattaagaatccctgaatctactgaattttagaatttcgacacaattcacattttttccaaataattatttctactgttttataaataactgtatattgataatgtttgctcaataatattgagatgttatttactg

SEQ ID NO: 63592 - DNA, 1102 bp, Homo sapiens
caagagcaccatgttgaatggtttatgtgttagtcaactaagaacctccttgttctcccaccctacctctgcttttccggggtcccccctccsacccccctgcagacatcccagctgcaacagcccaagcccaaggagggaaggaaccttacctttgaatgaagttccaagttttgcttattacactaacattgaactgcatacagaactaaatggagactgtccttgtcactgatcatacctggaggatctgtattatctaaaagtgaccagaaaagttatgggacttctcagagttttcatccaggtttaggaaaagaaataacttgcagcataggtttaaaggagcatcttggggaaaaaacaaaactgtttttttcttgcactacataaggttctgagcagccaacacagttatatccatatcactctataggtttccaagcagccctgtgaagaaggtcaaattgttactcccagttcacagatgaggaaatcaaggagctgttccaagctggaaaggcaggcggcaggattcccacagcccacagccctgcactcccccaacatggactagatccaatgcccccagcttgctcctcaagcaatgatagcacctccatgagggaatcaactttattcccaggacctcacttggtgtttgacacctagccggtgttcagccttgagcaagtggaaagcacccaaccatggaatacagcatagctacattttataggcatttaccaaatattggccaaacagaaactaactggtcactcccgtctcctcttgccccacctcttgcattatgttatgttatgttatgttacgttatgttatgttagtgtaacccattacccccaaaactgtgtaataattccactgtgggagagaccaagtgtccgccaatatccactctccccatcttccttcctctagctaaatctctagaagtttaactactcacaaactggcctaactgaagactacatttcccggactcccgtgcagctagccatggtcatgtgaccaaaggccaaccaatgggatgtgaatggaaatgacccatgctacttcctggttgtgaacttaagatgaa

SEQ ID NO: 63593 - DNA, 575 bp, Homo sapiens
tggggcaagagtggttaatagaaacagctaacaaatcaaagascttccttcagggattccctgccaccatcagggcaaagttctgacttgacagcctggtaacacaaggcccctaatatttgacacccaacagtcctttccaatctcatccttcaccatgctactttccatttcctcattcaccaatcatttctactgaatgtctatagatccccagtctttaacgttgtctaatacttccataccttggctcattctttcaccttgtctgatactctttcgccttgtctgtgtggctatgtgaggctcgagttcttctcttagaaatatttcctgacatccttcctcttgggcccttcaatacacccctctctaacccacaccaaatctgcattaggctccctccttcatgcacacctctatcaaacttcttagagggtactgtcaattccaaaactagggaatgcttgccacattataggtactaaaatggtcattagtttccagttctgtgttcctcctagagcagagtcatttttctttctcttctttttcttctattttgtctaagaatc

SEQ ID NO: 63594 - DNA, 474 bp, Homo sapiens
gaattcacaaaatgcacayacacgtgtctccatatctaccagttacctcagtagcttataacaccatatatggatagatgtgttatgagccacatctagccatatctggtgtgctatgagacacatctagccatatctggtgttataacctttcatcagacttcatataatcctccctttactgcttcacaatatatcaccagctgaaactctctgatgtccggtctcacaatcaactttttagcttgtttcaagaagtgccatgtttattgtagtatttttgtatgttatcatcatttaaaatgtgaaaaactgtgcttttagttatctttttctatctttctttttttatgtaactgctgacgtttttgagtgttgagaagttttaagtttgagtattatcccactgacctcatttctcccctaagccctgtacttttactgtgagattttacatggtggagtaatttttag

SEQ ID NO: 63595 - DNA, 668 bp, Homo sapiens
ggatcccttcacttcagcactactgacattttggcctggatagttatttgtagagggaagtgtcctgtgtgtcgttggatgtctggcagcatcccyggcctctaacatctagatgccaatagcacctcccttccattgtgacaaccaaaaatgccttcagactttggcaaaattgcttccagttgagaaccactggtttttgacattttaaacaaatagttttaattctgaagtttgaattatatcagggcaatggtccttcgctgtttgggaattcaattgtggagatacaagcgggaattcaattcagtaatcccatctgctcctcccctactcttattcccttccttccattgtttcttttgcaaatcccaaggatggcttctacccaataaaaacagtctcgtgcacaggaagggacttgttcctgggccatggcgcccccttcgttgtcatcagatgtctctccttcaagtcaaaattttgtctagccctgattatcgtactatctcccaactaaaaacaaaacctatttaattggctctactattaaataacaagcacaccatgttatgaacattgtttctatatttacaaatccaaaacatgattgaaaatgtcactctcggctttgcagcagctgctgccaccaccaggagccccaaact

SEQ ID NO: 63596 - DNA, 668 bp, Homo sapiens
ggatcccttcacttcagcactactgacattttggcctggatagttatttgtagagggaagtgtcctgtgtgtcgttggatgtctggcagcatccctggcctctaacatctagatgccaatagcacctcccttccattgtgacaaccaaaaatgccttcagactttggcaaaattgcttccagttgaraaccactggtttttgacattttaaacaaatagttttaattctgaagtttgaattatatcagggcaatggtccttcgctgtttgggaattcaattgtggagatacaagcgggaattcaattcagtaatcccatctgctcctcccctactcttattcccttccttccattgtttcttttgcaaatcccaaggatggcttctacccaataaaaacagtctcgtgcacaggaagggacttgttcctgggccatggcgcccccttcgttgtcatcagatgtctctccttcaagtcaaaattttgtctagccctgattatcgtactatctcccaactaaaaacaaaacctatttaattggctctactattaaataacaagcacaccatgttatgaacattgtttctatatttacaaatccaaaacatgattgaaaatgtcactctcggctttgcagcagctgctgccaccaccaggagccccaaact

SEQ ID NO: 63597 - DNA, 668 bp, Homo sapiens
ggatcccttcacttcagcactactgacattttggcctggatagttatttgtagagggaagtgtcctgtgtgtcgttggatgtctggcagcatccctggcctctaacatctagatgccaatagcacctcccttccattgtgacaaccaaaaatgccttcagactttggcaaaattgcttccagttgagaaccactggtttwtgacattttaaacaaatagttttaattctgaagtttgaattatatcagggcaatggtccttcgctgtttgggaattcaattgtggagatacaagcgggaattcaattcagtaatcccatctgctcctcccctactcttattcccttccttccattgtttcttttgcaaatcccaaggatggcttctacccaataaaaacagtctcgtgcacaggaagggacttgttcctgggccatggcgcccccttcgttgtcatcagatgtctctccttcaagtcaaaattttgtctagccctgattatcgtactatctcccaactaaaaacaaaacctatttaattggctctactattaaataacaagcacaccatgttatgaacattgtttctatatttacaaatccaaaacatgattgaaaatgtcactctcggctttgcagcagctgctgccaccaccaggagccccaaact

SEQ ID NO: 63598 - DNA, 668 bp, Homo sapiens
ggatcccttcacttcagcactactgacattttggcctggatagttatttgtagagggaagtgtcctgtgtgtcgttggatgtctggcagcatccctggcctctaacatctagatgccaatagcacctcccttccattgtgacaaccaaaaatgccttcagactttggcaaaattgcttccagttgagaaccactggttttygacattttaaacaaatagttttaattctgaagtttgaattatatcagggcaatggtccttcgctgtttgggaattcaattgtggagatacaagcgggaattcaattcagtaatcccatctgctcctcccctactcttattcccttccttccattgtttcttttgcaaatcccaaggatggcttctacccaataaaaacagtctcgtgcacaggaagggacttgttcctgggccatggcgcccccttcgttgtcatcagatgtctctccttcaagtcaaaattttgtctagccctgattatcgtactatctcccaactaaaaacaaaacctatttaattggctctactattaaataacaagcacaccatgttatgaacattgtttctatatttacaaatccaaaacatgattgaaaatgtcactctcggctttgcagcagctgctgccaccaccaggagccccaaact

SEQ ID NO: 63599 - DNA, 668 bp, Homo sapiens
ggatcccttcacttcagcactactgacattttggcctggatagttatttgtagagggaagtgtcctgtgtgtcgttggatgtctggcagcatccctggcctctaacatctagatgccaatagcacctcccttccattgtgacaaccaaaaatgccttcagactttggcaaaattgcttccagttgagaaccactggtttttgacattttaaacaaatagttttaattctgaagtttgaattatatcagggcaatggtccttcgctgtttgggaattcaattgtggagatacaagcgggaattcaattcagtaatcccatctgctcctcccctactcttattcccttccttccattgtttcttttgcaaatcccaaggatggcttctacccaataaaaacagtctcrtgcacaggaagggacttgttcctgggccatggcgcccccttcgttgtcatcagatgtctctccttcaagtcaaaattttgtctagccctgattatcgtactatctcccaactaaaaacaaaacctatttaattggctctactattaaataacaagcacaccatgttatgaacattgtttctatatttacaaatccaaaacatgattgaaaatgtcactctcggctttgcagcagctgctgccaccaccaggagccccaaact

SEQ ID NO: 63600 - DNA, 1412 bp, Homo sapiens
tgcaaacaggataatgtagatatgatacataagatggcaaacactatgagtacacactctcttagaaatttggtaaaatacggccaggcgcggtggctcacgcctgtaatcccagcactttgggaggccaaggcgggtggatcacaaggtcaggggttcgagaccaggctgaccaacatggtgaaaccccgtctctactaaaaatacaaaaatgagctgggcgtggtggcgggtgcctgtaatcctagctattcaggaggctgaggcaggagaattgcttgaatccgggaggcggaggttgcagtgagccgagatcgcaccactgcactccagcctgggtgacagagagagactctgtctcaaaaaaaaagaaagaaagaaagagagagagagagagagagagagagagagagagaaagaaagagaaagaaagaaagatagaaagaaagaaagataaagaaagaaagaaagaaagaaagaaagaaagaaagaaagaaagaaagaaagaaagaaaggaaaagaaagaaagaaagaagaaagaaagaaagaaatttggtcaaatacaaagtgcttctgaaaactagtctcccataaataactttcataaagttccatcatattcctataatgtcttttaaataaatctagtgagatgttgctaaaacggcaaactcaaagatgacatcaaaattagcccaataatgaaatttgtccatcttagaagcattttacattgatatttagaggtatagttttccacttctagagccaatttttcctaagtcattttttctaaaacatgtttggaagattgaggcccaaacagcagacatctgggccctccctaatagaacaggttttattagattcccaacccagtgaaagcaaagaaacaaaaatgtgcttttcgaagawggccgaataggaagagctccagtctgcagctcccagcaagatcaacagagaaggcaggtaatttctgcacttacaactgaggtacccagctcatctcattggggctggttagacagtgggtgcagccggcagagagcaagcagaagcagagtggggcgtcacctcacccaggaagcccaaggggttggggaactcccttccctagccaagggaagacatgaggaactgtgctatgaggaacggtgcattccagcccagatactacacttttcccatgtgctttgcaacctgcagaccaggagattccctcgggtgcctataccaccaaggccctggattgcaagcacaaaattgggtggccgtttgggcagacaccaagctcgctgcaggagtttcttttcataccctagtggtacctggaatgccagcgacacagaaccgttccctcccctggatagggggctgaagccagggagcccagtggtctagctcagtgg

SEQ ID NO: 63601 - DNA, 1412 bp, Homo sapiens
tgcaaacaggataatgtagatatgatacataagatggcaaacactatgagtacacactctcttagaaatttggtaaaatacggccaggcgcggtggctcacgcctgtaatcccagcactttgggaggccaaggcgggtggatcacaaggtcaggggttcgagaccaggctgaccaacatggtgaaaccccgtctctactaaaaatacaaaaatgagctgggcgtggtggcgggtgcctgtaatcctagctattcaggaggctgaggcaggagaattgcttgaatccgggaggcggaggttgcagtgagccgagatcgcaccactgcactccagcctgggtgacagagagagactctgtctcaaaaaaaaagaaagaaagaaagagagagagagagagagagagagagagagagagaaagaaagagaaagaaagaaagatagaaagaaagaaagataaagaaagaaagaaagaaagaaagaaagaaagaaagaaagaaagaaagaaagaaagaaaggaaaagaaagaaagaaagaagaaagaaagaaagaaatttggtcaaatacaaagtgcttctgaaaactagtctcccataaataactttcataaagttccatcatattcctataatgtcttttaaataaatctagtgagatgttgctaaaacggcaaactcaaagatgacatcaaaattagcccaataatgaaatttgtccatcttagaagcattttacattgatatttagaggtatagttttccacttctagagccaatttttcctaagtcattttttctaaaacatgtttggaagattgaggcccaaacagcagacatctgggccctccctaatagaacaggttttattagattcccaacccagtgaaagcaaagaaacaaaaatgtgcttttcgaagatggccgaataggaagagctccagtctgcagctcccagcaagatcaacagagaaggcaggtaatttctgcayttacaactgaggtacccagctcatctcattggggctggttagacagtgggtgcagccggcagagagcaagcagaagcagagtggggcgtcacctcacccaggaagcccaaggggttggggaactcccttccctagccaagggaagacatgaggaactgtgctatgaggaacggtgcattccagcccagatactacacttttcccatgtgctttgcaacctgcagaccaggagattccctcgggtgcctataccaccaaggccctggattgcaagcacaaaattgggtggccgtttgggcagacaccaagctcgctgcaggagtttcttttcataccctagtggtacctggaatgccagcgacacagaaccgttccctcccctggatagggggctgaagccagggagcccagtggtctagctcagtgg

SEQ ID NO: 63602 - DNA, 1412 bp, Homo sapiens
tgcaaacaggataatgtagatatgatacataagatggcaaacactatgagtacacactctcttagaaatttggtaaaatacggccaggcgcggtggctcacgcctgtaatcccagcactttgggaggccaaggcgggtggatcacaaggtcaggggttcgagaccaggctgaccaacatggtgaaaccccgtctctactaaaaatacaaaaatgagctgggcgtggtggcgggtgcctgtaatcctagctattcaggaggctgaggcaggagaattgcttgaatccgggaggcggaggttgcagtgagccgagatcgcaccactgcactccagcctgggtgacagagagagactctgtctcaaaaaaaaagaaagaaagaaagagagagagagagagagagagagagagagagagaaagaaagagaaagaaagaaagatagaaagaaagaaagataaagaaagaaagaaagaaagaaagaaagaaagaaagaaagaaagaaagaaagaaagaaaggaaaagaaagaaagaaagaagaaagaaagaaagaaatttggtcaaatacaaagtgcttctgaaaactagtctcccataaataactttcataaagttccatcatattcctataatgtcttttaaataaatctagtgagatgttgctaaaacggcaaactcaaagatgacatcaaaattagcccaataatgaaatttgtccatcttagaagcattttacattgatatttagaggtatagttttccacttctagagccaatttttcctaagtcattttttctaaaacatgtttggaagattgaggcccaaacagcagacatctgggccctccctaatagaacaggttttattagattcccaacccagtgaaagcaaagaaacaaaaatgtgcttttcgaagatggccgaataggaagagctccagtctgcagctcccagcaagatcaacagagaaggcaggtaatttctgcacttacaactgaggtacccagctcatctcattggggctggttagacagtgggtgcagccggcagagagcaagcagaagcagagtggggcgtcacctcacccaggaagcccaaggggttggggaactcccttccctagccaagggaagacatgaggaactgtgctatgaggaacggtgcattccagcccagatactacacttttcccatgygctttgcaacctgcagaccaggagattccctcgggtgcctataccaccaaggccctggattgcaagcacaaaattgggtggccgtttgggcagacaccaagctcgctgcaggagtttcttttcataccctagtggtacctggaatgccagcgacacagaaccgttccctcccctggatagggggctgaagccagggagcccagtggtctagctcagtgg

SEQ ID NO: 63603 - DNA, 1412 bp, Homo sapiens
tgcaaacaggataatgtagatatgatacataagatggcaaacactatgagtacacactctcttagaaatttggtaaaatacggccaggcgcggtggctcacgcctgtaatcccagcactttgggaggccaaggcgggtggatcacaaggtcaggggttcgagaccaggctgaccaacatggtgaaaccccgtctctactaaaaatacaaaaatgagctgggcgtggtggcgggtgcctgtaatcctagctattcaggaggctgaggcaggagaattgcttgaatccgggaggcggaggttgcagtgagccgagatcgcaccactgcactccagcctgggtgacagagagagactctgtctcaaaaaaaaagaaagaaagaaagagagagagagagagagagagagagagagagagaaagaaagagaaagaaagaaagatagaaagaaagaaagataaagaaagaaagaaagaaagaaagaaagaaagaaagaaagaaagaaagaaagaaagaaaggaaaagaaagaaagaaagaagaaagaaagaaagaaatttggtcaaatacaaagtgcttctgaaaactagtctcccataaataactttcataaagttccatcatattcctataatgtcttttaaataaatctagtgagatgttgctaaaacggcaaactcaaagatgacatcaaaattagcccaataatgaaatttgtccatcttagaagcattttacattgatatttagaggtatagttttccacttctagagccaatttttcctaagtcattttttctaaaacatgtttggaagattgaggcccaaacagcagacatctgggccctccctaatagaacaggttttattagattcccaacccagtgaaagcaaagaaacaaaaatgtgcttttcgaagatggccgaataggaagagctccagtctgcagctcccagcaagatcaacagagaaggcaggtaatttctgcacttacaactgaggtacccagctcatctcattggggctggttagacagtgggtgcagccggcagagagcaagcagaagcagagtggggcgtcacctcacccaggaagcccaaggggttggggaactcccttccctagccaagggaagacatgaggaactgtgctatgaggaacggtgcattccagcccagatactacacttttcccatgtgctttgcaacctgcagaccaggagattccctcgggtgcctataccaccaaggccctggattgcaagcacaaaattgggtggccgtttgggcagacaccaagctcgctgcaggagtttcttttcataccctagtggyacctggaatgccagcgacacagaaccgttccctcccctggatagggggctgaagccagggagcccagtggtctagctcagtgg

SEQ ID NO: 63604 - DNA, 1220 bp, Homo sapiens
atatatatatatatatatacacacacatacatgtatatatggagctcttatatatgtgcatgcctgtgtgtgtgygtgtgtgtgtgtgtgtgtgtgtgtgcgtgcgtgtatgcatacatataattatataaatattccctcaaaagggaaacacagtgattttagtgttagctcttttggaatgcttatgcaagcaccaggaggcctctcaatcactgagcttttcacattaggtgataccctacactacctggacaatgttgtagtagttttatgcttctgatagggaatcttgaggctaagagaaattacattgaaatgcgttgtttctgtgtatgccctgtgtgatcttatgcttctgagaaggtttggtaggctttgctcattgaaacaggaacttgatgtaaccagtaagtatgtggatatttagagcatgtgaggtcttcctcactatctgcaagccatctgaaatgctacaggtgtcagaagtaaaaccagtaaccctgatattggcagtagaaatgcaattggcatgaagttaccactgcagccacagttagagtttagaaagggtgttgagacaccaaatgtgggactggtgaactgaagatggctggatggttatccaataactgaggcatgagtctgaagagtatttgaaaggctactctgagagaatcaaattagtggaatttgtctcctgtttccatacctctgattggttgagctcaaaggggtactaaagaggacacaaccaagggcaaggtggctcaagttggttttctgttttctcctaatgacatagccaaggtgacaggaatgactgagaataccgaaaatctattgaaaattcaaaagaatgaggtgggcctggaagacctcctctatgcactattaaaaactggtagtcacaagaatataggcagaaattatcaaggtttaaagcgagtggaggacagaggacagagctcttaaatgtattacttctcattcctaaccctacctctacaattggctaagaaacaagaggagctgtaaaacaaagagaaataaattaatgccaagttagtataggttcttcttaccttccttgaaaaaaaggccaaagaggagaagactggttccaatgtaaagtttctatacagtagcaactctgttttaagatatttgctaaatctctctccgtgaactctaatcttagcctatatgatttggaaaaa

SEQ ID NO: 63605 - DNA, 1220 bp, Homo sapiens
atatatatatatatatatacacacacatacatgtatatatggagctcttatatatgtgcatgcctgtgtgtgtgtgtgtgtgtgtgtgtgtgtgtgtgtgcgtgcgtgtatgcatacatataattatataaatattccctcaaaagggaaacacagtgattttagtgttagctcttttggaatgcttatgcaagcaccaggaggcctctcaatcactgagcttttcacattaggtgataccctacactacctggacaatgttgtagtagttttatgcttctgatagggaatcttgaggctaagagaaattacattgaaatgcgttgtttctgtgtatgccctgtgtgatcttatgcttctgagaaggtttggtaggctttgctcattgaaacaggaacttgatgtaaccagtaagtatgtggatatttagagcatgtgagrtcttcctcactatctgcaagccatctgaaatgctacaggtgtcagaagtaaaaccagtaaccctgatattggcagtagaaatgcaattggcatgaagttaccactgcagccacagttagagtttagaaagggtgttgagacaccaaatgtgggactggtgaactgaagatggctggatggttatccaataactgaggcatgagtctgaagagtatttgaaaggctactctgagagaatcaaattagtggaatttgtctcctgtttccatacctctgattggttgagctcaaaggggtactaaagaggacacaaccaagggcaaggtggctcaagttggttttctgttttctcctaatgacatagccaaggtgacaggaatgactgagaataccgaaaatctattgaaaattcaaaagaatgaggtgggcctggaagacctcctctatgcactattaaaaactggtagtcacaagaatataggcagaaattatcaaggtttaaagcgagtggaggacagaggacagagctcttaaatgtattacttctcattcctaaccctacctctacaattggctaagaaacaagaggagctgtaaaacaaagagaaataaattaatgccaagttagtataggttcttcttaccttccttgaaaaaaaggccaaagaggagaagactggttccaatgtaaagtttctatacagtagcaactctgttttaagatatttgctaaatctctctccgtgaactctaatcttagcctatatgatttggaaaaa

SEQ ID NO: 63606 - DNA, 319 bp, Homo sapiens
atatgatttcaaggaatctagggaaaggatctagctccctaaacatttccaacaggttattgcagttttgaattttcaccaatatggagtcaattatttgggttaccattggtatttttctatcaaataacttctatgaaccataatatgtaggctggagtcactcacactttaacatacatttattcatcagatctctttctttttgaaaacagtattcagaaatcatgaatgtttggtrtagaaagataattgggtcaaaaaaagtaattttgagagacagcattcttcctatgatgactattggtaggacaacact

SEQ ID NO: 63607 - DNA, 1250 bp, Homo sapiens
tgcataagaagagttcaggaaaatgaattactatgacctggaagagtttttaaaaatgtcagcagtttttatatttcataatacataaattaggaagagaagatgagattaggaataagaaacagaatatcagcatctccaagacatgtttgaaggacagtgagatgactttttattcttataagtaaaaattttaaaaataaaatttaatttggctttggttataattaataaaaattgcttgttataataagacttcaaggaccaggatcttataaaaccaaatactgttaattatcaaagaactaggctataaaatatcaataagataacataggggaagttagagaacatacgcactctagagattatgaaagaaccaggaaataagggctaattataaataagatactttaaatatatactactttaattcttattatcttcaataaggcaaggcaataagtatagattttctacttctctcttttttttttttttttttttttccaaacaaagtatcactcttgtcgtccagcctggaragtgcaatggcatgatctcaagagtctcactgcaacttccgcctcccgggttcaagcaattctcctgcctcagcctcccgagtagctgggattataggcacatgccaccacgcccagctaattttggtattttcagtagagacggggctttgccatgttggccaggctggtctcgaactcctgacctcaggagatccgcctgcctcagcctcccaaagtgctgggattataggagtgagccactgtgatcggctgagattttctgcttcttcaatgcaagttattaagtggaataagttttcaaatattaaacaaaaacacttttgcaatttcagaggaaactaaactcatctagaagcttatcaaatatatttttcttttaatttatagaacacatatgatgcagaaaaggtaatttgtgcatcaaaatggtgaatgtgttaaatcaaactcttgcataatcaagtatgttgactcttacgtcaacataagaaaactcagattctttaagtccccttgcagaccacattttaaagtgtgctttactgattaaaacacaaaggcaacacaatactttgatgaattgattgctttcaaatatgaagaattaagacaaaatgtattagcgttagttagatgactagtggtaaacctgggaaccccaggataagatattttggcatcctcacatatgcagaaatattc

SEQ ID NO: 63608 - DNA, 1136 bp, Homo sapiens
gcccccctccttcatgatccatgctttaagagcttccccaaggcatgcagagcaagctgagaagaggtagacaagcctgcagacctttcaaagaagtggggtggcttgggaagtaaaagaagatctggagataggagttcctaaaaagcagacaagagattaccgaggggttccccacagctccagcacacagcagctgcaaaaaaaatgcagtggaattactgagggacattatgggcttgatggaggacagggaatgcttgtgccaagccaccaaggatcatgctgtggcagttgtgaccagatagactatacttttgccaaggtgaaaggatttccctactaaatcctttactttccactttgtttaaaatgagtttaacaccaagaaaatagttgtctctatgtccttatttctaatcttcctgctcaaccatgaactgcactaaacacactcagacccatctaacctaaaattgagaaagggaggttctcactcctggagagagaattactgaaagggcggccctcatacagttcagggtcatacccccaatagctggttttatatttgaaagcagacactgggactctgacctttgcagagataaaagggatactttcctaacccagagaggccaaaggagcacaggacgcccaggccgagggcagtgaagcttgcagacccaggctgtgcaacccccacagcaggtctcctcacgggatagatagactattggccccaattcctcagccctacatgcacccaccccttgccatggtttcgttgtgggtggaggktactttcccagcccctggctttgggcttgcccacgtgtcttgctctggccatggaatgaagcacaaaggagagcctgccagttcgtaacccacgcctgaagacgccttaggcggttctgcggaccccgtgcacttccaccttcagccagaaggccttctctggtgcagccgttgcttcagcctcggtccaaaaggatcggagccccctggccgatccgcaggcctgcagggagccacagagcgcagcggccggcccagcgttcaagcccaagcacaggcctgcaagaactttcttccaactgccgtttgggatggttgattaggacgcgttgctg

SEQ ID NO: 63609 - DNA, 1136 bp, Homo sapiens
gcccccctccttcatgatccatgctttaagagcttccccaaggcatgcagagcaagctgagaagaggtagacaagcctgcagacctttcaaagaagtggggtggcttgggaagtaaaagaagatctggagataggagttcctaaaaagcagacaagagattaccgaggggttccccacagctccagcacacagcagctgcaaaaaaaatgcagtggaattactgagggacattatgggcttgatggaggacagggaatgcttgtgccaagccaccaaggatcatgctgtggcagttgtgaccagatagactatacttttgccaaggtgaaaggatttccctactaaatcctttactttccactttgtttaaaatgagtttaacaccaagaaaatagttgtctctatgtccttatttctaatcttcctgctcaaccatgaactgcactaaacacactcagacccatctaacctaaaattgagaaagggaggttctcactcctggagagagaattactgaaagggcggccctcatacagttcagggtcatacccccaatagctggttttatatttgaaagcagacactgggactctgacctttgcagagataaaagggatactttcctaacccagagaggccaaaggagcacaggacgcccaggccgagggcagtgaagcttgcagacccaggctgtgcaacccccacagcaggtctcctcacgggatagatagactattggccccaattcctcagccctacatgcacccaccccttgccatggtttcgttgtgggtggaggttactttcccagcccctggctttgggcttgcccacgtgtcttgctctggccatggaatgaagcacaaaggagagcctgcyagttcgtaacccacgcctgaagacgccttaggcggttctgcggaccccgtgcacttccaccttcagccagaaggccttctctggtgcagccgttgcttcagcctcggtccaaaaggatcggagccccctggccgatccgcaggcctgcagggagccacagagcgcagcggccggcccagcgttcaagcccaagcacaggcctgcaagaactttcttccaactgccgtttgggatggttgattaggacgcgttgctg

SEQ ID NO: 63610 - DNA, 1136 bp, Homo sapiens
gcccccctccttcatgatccatgctttaagagcttccccaaggcatgcagagcaagctgagaagaggtagacaagcctgcagacctttcaaagaagtggggtggcttgggaagtaaaagaagatctggagataggagttcctaaaaagcagacaagagattaccgaggggttccccacagctccagcacacagcagctgcaaaaaaaatgcagtggaattactgagggacattatgggcttgatggaggacagggaatgcttgtgccaagccaccaaggatcatgctgtggcagttgtgaccagatagactatacttttgccaaggtgaaaggatttccctactaaatcctttactttccactttgtttaaaatgagtttaacaccaagaaaatagttgtctctatgtccttatttctaatcttcctgctcaaccatgaactgcactaaacacactcagacccatctaacctaaaattgagaaagggaggttctcactcctggagagagaattactgaaagggcggccctcatacagttcagggtcatacccccaatagctggttttatatttgaaagcagacactgggactctgacctttgcagagataaaagggatactttcctaacccagagaggccaaaggagcacaggacgcccaggccgagggcagtgaagcttgcagacccaggctgtgcaacccccacagcaggtctcctcacgggatagatagactattggccccaattcctcagccctacatgcacccaccccttgccatggtttcgttgtgggtggaggttactttcccagcccctggctttgggcttgcccacgtgtcttgctctggccatggaatgaagcacaaaggagagcctgccagttcstaacccacgcctgaagacgccttaggcggttctgcggaccccgtgcacttccaccttcagccagaaggccttctctggtgcagccgttgcttcagcctcggtccaaaaggatcggagccccctggccgatccgcaggcctgcagggagccacagagcgcagcggccggcccagcgttcaagcccaagcacaggcctgcaagaactttcttccaactgccgtttgggatggttgattaggacgcgttgctg

SEQ ID NO: 63611 - DNA, 566 bp, Homo sapiens
aaatgccacactattgaggatttttttgatcactctgattgtcatgagtaagttgtgctttttcaaaagcagttttttcctacaatgtcatttcctgcttctctggctctgattttcaatgaattgataaattgtaaatcttgttttcctcttgtttttgtttagctaaaatgttgaagggcaagggagaggatggttatttataaatcttgtatctctctgaaaacacaacttgcattttccttaatctgaytgacatgactccaaatatgaaaaacaactttcataaagcacaaaagaaaatttccttgaatttacccttttttattgtgggtaagaggcaataggtataaattttcaacttattttttgaatgttactcactattaaccaccatattttaaaaaattaattgaagaactaatgtagtttattatttaatttattcaacaaatgtttattgagtggcaactaggtcccaagtactgttttaactactgaatatacagatgtacataaacgaaacaaaaatctctgctgccctggagtttacattctgtgggact

SEQ ID NO: 63612 - DNA, 835 bp, Homo sapiens
tgaatccagaaactactagagaaatcaacactctactgaaatactcttgttataaatacagatacgtgggggatgattaccaaatgtggttgggtttttagtggaacgtttatggaaattactttatttgggttcaaatgcttgtattgccactggctaacaagttgtctcatttcctgagattcagtttccccatctataaaatacaacccttaatgcctgactaatagaatgtgataaaaataagataatggatgtgattatggagacagtacttcattgtaatttatagcatgagctctggaatcagtctgtttgggtcgaatcctgtctctactacctattagacaggtgaccttatacttgtctctctgaattagtttcctaaggctgccgtaacaaattaccaaaactggatagcttaaagcaacagaaaagtactctctgatagttctggaagccagaagtcaaaaatcaatgtgtcggcaatgctggttgcctctcaggggctctgagaaagaatctgttccatgttttcctcctagctctggtggtgaccagcaatccttgggttccttagcatgagacagtgtaacagcaatctctgtctccatctttacagggtattcttccctatgtctcctctgtctctgtcctcttttctcatcaggatgccagttatactgggtttaaggtccgcttaattcaatatgacctcatcttaaccaattatwtctttagaggccctatttccaaaaaaggtcacatccatagatactgggggttggggcttcaacatttctttttaggtacacaattcaatccacaacagttt

SEQ ID NO: 63613 - DNA, 1282 bp, Homo sapiens
ttcctaatccccggaatctgttaacattatgtcatatacaagaaggagtttgtacatgcaattacactaaggagcttgagatggaaagattaacctgtattaactgggtgggccctaaatgtaatcataggtgtccttataagagaaaggcagagggagatttgactacaagaggagagagtgatatgatggcataagcaggtgtggaagagatgtgccttgagcatggaggaagtaggcacaagacaaagcataaagtcagccccaagatgctatgaaaaggcaaggatacacactctcccttcagagctccagaagcaaccatccttgcctatacctgacctttaggtgaaactgattttaaacttctgacttccagaactgccagagaataaatttgtgttgttttaagctactaagtatttgttacagtggcaacaggaaactaatatgcttcccattttggaagacggttcttacacaatgaaacataaagtccaacaagcaaagaaaagcaatgatgactggggcctttagagagcatgtattctggggtgatcatgcagacgtctcaggacaggaggaatgcgcccagctggcaatcaggtactgagatgagaggccctggtgggtccttccttaccaaaagacaggagaggatgctctgaaaagtaagcctgcgatacataattggttgcatttgttttagctggagcttaatatgaattgtctgtatcagtagaagagctcatattggtttctttaaaatttaaaggcatctctttttgtaccctccagatttttcaaacctgagatgaatattgttctttcatttgtttgcagtgaaagaaccaaatagtaaatttgggattttatagcttgaggctaaaatattgtttgcatatacaaatattcaaagtcagttaaatctgttcacattttcctcaattcactgctcatcttctaagttctagctactttgcatcaatattcaaagcctttcatgayttgaaacatacctcatctcactgtacctggcaacccatcctgtagactgtccagatagttgcagtttcttaaatgcaccctgcatttcttgcttcgttgtttttgcaaatactatgccaattccccgaaaggttctctcttccctccatcaaccccctccactagtagaccagaaaaatgtctaataatactcattctttaaggcccaaatgcgaaatatcatcaattccatgaggcttctctgaactagagttctatactccctcctttgtgt

SEQ ID NO: 63614 - DNA, 409 bp, Homo sapiens
tttttgcagttcagttatactcccccatccactttcctcctacagatttttttcactttagcatccatcactttatataattgagtacttcattgggtttatttgtttcatcccacagaatgtacactctatgagataattttttttgcactgatctttgctgtcccttgcacctagawtaatgcctggcacatgtaaatatttaatacacttttgttaaatgaaccaactgagccaaatttacacagtacttaggtgaacctggggttcctttggaaaagatcagaaagcaatacagtgttcaaattctagaagccagaggtaaatcttgatgttcagtggtagttgagtaggaaaaggataaaaatgagagaagctcggccaggtgcggtggctcacgcctgtaatc

SEQ ID NO: 63615 - DNA, 409 bp, Homo sapiens
tttttgcagttcagttatactcccccatccactttcctcctacagatttttttcactttagcatccatcactttatataattgagtacttcattgggtttatttgtttcatcccacagaatgtacactctatgagataattttttttgcactgatctttgctgtcccttgcacctagattaatgcctggcacatgtaaatatttaatacacttttgttaaatgarccaactgagccaaatttacacagtacttaggtgaacctggggttcctttggaaaagatcagaaagcaatacagtgttcaaattctagaagccagaggtaaatcttgatgttcagtggtagttgagtaggaaaaggataaaaatgagagaagctcggccaggtgcggtggctcacgcctgtaatc

SEQ ID NO: 63616 - DNA, 1454 bp, Homo sapiens
  misc_feature (1)...(1454): n = A,T,C or G
aataataaaagcaaaatacatgaaggcacccagttctgtaagctcttaaattcaaatactccaatatgattagctttgattaaacaataaataaaacataccctgatgggtaattttgtcatggagcctctacattcttaatgaaatccatctgaacattgcttaatacagtagtagaagagtgctaattaaacctgacttcaacaaatgctttattttacctcatctacataaataaggtgtgttcacagttntaaaacatgacatgaatatgaagattaagctacacattggattgtaggggaggatacctggatttggctcactccactaaaccaaaatatcaccagccattattatctaaaagaaatactgcacacatctcagctgaacactgatttttccaaatgctttacgtttaaaaaatagtaataatgtagtgtttggaaataatgtgtaaaaatagagtgtgaagcattattaggaacagatttataaacagaggcagagggtatctacatgaaaaaacatggctaagctctgctaataatcaagtctttgaaacaaaagctcgctggatctttagctcctccaaagcaagagattttgttcattcatcttcttatccccagggcacagaaaggtaacacatgggaagtcattgaggaaggttaaataaataaataggtgtttccactgaaattatacccagtaagatgcattcaataagattcaagtacccagttaaccattgctgagaattacttattctgtaaaatttgatgctataattggatttcctaggaagttttgagactatgtggtgaaatactctagcaatctcatggtccaaagcaccaaagacaaaaaatcagtcttagcattgtaggttgsgtaggcataattttagtttgaagtttaaaatatgagtctcggcggggtgtggtggctcatactttgggaggccgaggtgggtggaccacaaggtcaggagttcgagaccagtctcgccaatgtggtgaaacctcgtctctactaaaaatacaaaaattagccgggtgtggttgtgagcgcctatagtcccagctactcgggaggctgaggcaggagaattgcttgaacctgggaggtggaggttgcagtggagccgagatcacaccactgcattccagcctgagcgacagagcaagactccatctcaaaaaaaaaaaaaataaaaaaataaaaaaaaatatatatatatatatatgagtctcaagtccttgttcttttgtggacaaatttctagattgctctataatacaaaacaggctgcagtcacttgagattgtgatggtggaaacttattaaaatatgggaaaaactgtaggtttaataatgtgcctgtgggctagatattcagacatcatgggtcacatttgtgctatttaccagcattgcatcaactgttcaag

SEQ ID NO: 63617 - DNA, 1454 bp, Homo sapiens
  misc_feature (1)...(1454): n = A,T,C or G
aataataaaagcaaaatacatgaaggcacccagttctgtaagctcttaaattcaaatactccaatatgattagctttgattaaacaataaataaaacataccctgatgggtaattttgtcatggagcctctacattcttaatgaaatccatctgaacattgcttaatacagtagtagaagagtgctaattaaacctgacttcaacaaatgctttattttacctcatctacataaataaggtgtgttcacagttntaaaacatgacatgaatatgaagattaagctacacattggattgtaggggaggatacctggatttggctcactccactaaaccaaaatatcaccagccattattatctaaaagaaatactgcacacatctcagctgaacactgatttttccaaatgctttacgtttaaaaaatagtaataatgtagtgtttggaaataatgtgtaaaaatagagtgtgaagcattattaggaacagatttataaacagaggcagagggtatctacatgaaaaaacatggctaagctctgctaataatcaagtctttgaaacaaaagctcgctggatctttagctcctccaaagcaagagattttgttcattcatcttcttatccccagggcacagaaaggtaacacatgggaagtcattgaggaaggttaaataaataaataggtgtttccactgaaattatacccagtaagatgcattcaataagattcaagtacccagttaaccattgctgagaattacttattctgtaaaatttgatgctataattggatttcctaggaagttttgagactatgtggtgaaatactctagcaatctcatggtccaaagcaccaaagacaaaaaatcagtcttagcattgtaggttgggtaggcataattttagtttgaagtttaaaatatgagtctcggcggggtgtggtggctcatactttgggaggccgaggtgggtggaccacaaggtcaggagttcgagaccagtctcgccaatgtggtgaaacctcgtctctactaaaaatacaaaaattagccgggtgtggttgtgagcgcctatagtcccagctactcgggaggctgaggcaggagaattgcttgaacctgggaggtggaggttgcagtggagccgagatcacaccactgcattccagcctgagcgacagagcaagactccatctcaaaaaaaaaaaaaataaaaaaataaaaawaaatatatatatatatatatgagtctcaagtccttgttcttttgtggacaaatttctagattgctctataatacaaaacaggctgcagtcacttgagattgtgatggtggaaacttattaaaatatgggaaaaactgtaggtttaataatgtgcctgtgggctagatattcagacatcatgggtcacatttgtgctatttaccagcattgcatcaactgttcaag

SEQ ID NO: 63618 - DNA, 1454 bp, Homo sapiens
  misc_feature (1)...(1454): n = A,T,C or G
aataataaaagcaaaatacatgaaggcacccagttctgtaagctcttaaattcaaatactccaatatgattagctttgattaaacaataaataaaacataccctgatgggtaattttgtcatggagcctctacattcttaatgaaatccatctgaacattgcttaatacagtagtagaagagtgctaattaaacctgacttcaacaaatgctttattttacctcatctacataaataaggtgtgttcacagttntaaaacatgacatgaatatgaagattaagctacacattggattgtaggggaggatacctggatttggctcactccactaaaccaaaatatcaccagccattattatctaaaagaaatactgcacacatctcagctgaacactgatttttccaaatgctttacgtttaaaaaatagtaataatgtagtgtttggaaataatgtgtaaaaatagagtgtgaagcattattaggaacagatttataaacagaggcagagggtatctacatgaaaaaacatggctaagctctgctaataatcaagtctttgaaacaaaagctcgctggatctttagctcctccaaagcaagagattttgttcattcatcttcttatccccagggcacagaaaggtaacacatgggaagtcattgaggaaggttaaataaataaataggtgtttccactgaaattatacccagtaagatgcattcaataagattcaagtacccagttaaccattgctgagaattacttattctgtaaaatttgatgctataattggatttcctaggaagttttgagactatgtggtgaaatactctagcaatctcatggtccaaagcaccaaagacaaaaaatcagtcttagcattgtaggttgggtaggcataattttagtttgaagtttaaaatatgagtctcggcggggtgtggtggctcatactttgggaggccgaggtgggtggaccacaaggtcaggagttcgagaccagtctcgccaatgtggtgaaacctcgtctctactaaaaatacaaaaattagccgggtgtggttgtgagcgcctatagtcccagctactcgggaggctgaggcaggagaattgcttgaacctgggaggtggaggttgcagtggagccgagatcacaccactgcattccagcctgagcgacagagcaagactccatctcaaaaaaaaaaaaaataaaaaaataaaaaaawatatatatatatatatatgagtctcaagtccttgttcttttgtggacaaatttctagattgctctataatacaaaacaggctgcagtcacttgagattgtgatggtggaaacttattaaaatatgggaaaaactgtaggtttaataatgtgcctgtgggctagatattcagacatcatgggtcacatttgtgctatttaccagcattgcatcaactgttcaag

SEQ ID NO: 63619 - DNA, 828 bp, Homo sapiens
ctctggatcctccatctaccaaaaatgaatatagtgacatggccacgcacctgaggaatccttttacttcccacaggtatggggctatagtttcaaatatttgcacaaaaaatatttaggccaggcacagtggttcatgcctgtaatcccagcactttgggaggccgaagtgggtggatcacttgagrtcaggagtttgagaccagcatggccaacacacaaaaccccatctctactaaaaatacaaaaattagccggttgtggtggcacacgcatgtagttctggctactcaggaggctgaggcagggggatcatttgggcccaggaggcggaggttgtagtgagccaagatcactccactgtactccagcctgggtgacgggagtgaaacattgtctcaaaaaaaagaaaagaaattatttagatttgcacatctgtttatccaacctcatctcattcatctcccctctaggctccctgaagcccaggaccggcagttccttaaggaactgtgtgttggcatgcctcagtgcctttgcacaagctgctgtttctgtctggaatctctagactccttctaatcttcctcagctgaatgctgcccagcccacttcagcttaatcatgctccctttgtcctgaaggcttcccggagaagccctccatcttcttcagccagcctgagtgcaggctcccctgtgccctcccatacccactgggctcacctctgtcacagtgttgctcgtgctcggctgtccttcctctgtaaagtgagctccttaaaggggacactgactagcagagtcctcagcagatactgggagctgc

SEQ ID NO: 63620 - DNA, 784 bp, Homo sapiens
ataattgcctccaggagcacctgctttaacttcttccaatactgacctcctatcgtgaggtctgtgttactagtttcactatctgttgagcactctttgattttatgattaactttggtttgtttgttttttgagacagggtctcattctgtcacccaggctggagtgcaatggcgagatctcggctcacagctcactgcagcctctgcctcctgggttcaagcaattctcctgcctcagccttccgagtagctggaactacaggtgcccatgatgacgccaggctaatttttgtaattttttgactcctcattcttgaacatggttatagtatgctaagttggcaagcacattgaaaacttctcatctttggttcctgacttttgttgtccctgctgagaagttagctgggtttttgttttttttgaaaataagctgtttttcattctctgtggctgcttttaagattttcttattgcttttagtgttactttttactgtgaggtgtctggacctagatttctttttatttatcttatgtcaaatttataggacttttttttttttgagacagagtcttgctctgtctcccaagctggagtgcagtggcccgatctyggctcactacaacctctgcctcccgggttcaagcgattcccctgcctcaccctcccgagtagctgggactacaggtgtctgccaccactcctggctaatttttgtatttttagtagagacggggtttcaccatattggccaggatggtctcaaactcctgatcttg

SEQ ID NO: 63621 - DNA, 673 bp, Homo sapiens
agctgtgacttaaaaaaaaaaaaagtgtgttgaccattctagataaatgagtgcccattgcctaagggatgggaaagaggcttcttaggctctggtcggaaatgtgtcaaagctggcctgggtgtgagggcaggggatggcctcgaactctgtagcaggtggagaatgggggtctggtggagcacatcacataagtgtgtgtgtgtgtgtgtgtgtgtgtgagtgtgggcatatgtttgggtgtgtgggagtgtgtgtggaggggcgagcctgtgatgagcatgtgtgtcagggtgtgtgtgagcatgtgtgtatgtgagtgtggtgagcgtggtgtacaggtgagtgggtgtgcatgagcgtgtgcagtatgtatgtgtgggtgagcatgcatggatgagtgtgtgtacaggtgagcatgtgtgtgacagtgtgtgtgagcatgtgtgtaagtgggtgtgggtgactgcgtctgcaggtgtgtattgcagcaaagggagtgtggaaaaggaggaggggttttgtctrtttcagggggagagcagcccatgttttgcagacatgttccagtaaaatgtctggcttgatttcaaaagcccaaagatggtttcgttgtcgatatgggcaggtttgatcctttcgaccaatgtggctcttgggagttgcttcagtg

SEQ ID NO: 63622 - DNA, 673 bp, Homo sapiens
agctgtgacttaaaaaaaaaaaaagtgtgttgaccattctagataaatgagtgcccattgcctaagggatgggaaagaggcttcttaggctctggtcggaaatgtgtcaaagctggcctgggtgtgagggcaggggatggcctcgaactctgtagcaggtggagaatgggggtctggtggagcacatcacataagtgtgtgtgtgtgtgtgtgtgtgtgtgagtgtgggcatatgtttgggtgtgtgggagtgtgtgtggaggggcgagcctgtgatgagcatgtgtgtcagggtgtgtgtgagcatgtgtgtatgtgagtgtggtgagcgtggtgtacaggtgagtgggtgtgcatgagcgtgtgcagtatgtatgtgtgggtgagcatgcatggatgagtgtgtgtacaggtgagcatgtgtgtgacagtgtgtgtgagcatgtgtgtaagtgggtgtgggtgactgcgtctgcaggtgtgtattgcagcaaagggagtgtggaaaaggaggaggggttttgtctatttcagggggagarcagcccatgttttgcagacatgttccagtaaaatgtctggcttgatttcaaaagcccaaagatggtttcgttgtcgatatgggcaggtttgatcctttcgaccaatgtggctcttgggagttgcttcagtg

SEQ ID NO: 63623 - DNA, 622 bp, Homo sapiens
ctcgctagagtcatttgggcgtggggcgattgtggtgcagagaagcagcagcagcagtgccagacagccctgaacgcatcttcctagagatgcgttctttctccttccagaagggcagttccagaatgtgtgcaattttaaccttttcattcttgtttaagattcatttttaatgggtaatatccacatcaatgtttctttctcccccacaacaaaaatcttggcaatttgggggagagttaggcaaaaataaaatgaccagattgaattaagtattatgcctycctgttatctttagactatgcgaatggtattgaaaagtaagaggcgtgtcagcgttttgaagtcagatctacaggccatcatcaatcaaggcactttggctacttctaagaaagccctggcaagtgaccggagtggcgcagatgaactggagaacaacccagagatgaaatgtaatcttccttctgcagcttgctttattggcgtgttgggcatagatttggggctagcatggccatcgttaactcatgaatttcttaataggggtagaactttataactccgatgttctaagttgtctgctcacacttctcttcctgtagtgggggtgatgaacacc

SEQ ID NO: 63624 - DNA, 1114 bp, Homo sapiens
ctctccttcttacccctcttggcccatctgtccccacctttttgtctttagttcctcttacattctcttcttttctcgtctactctctcccttccttagctttcctttaccaacagtaaatatatattttaaaaacattgtcattcatcattctcaaactactgaagcaattcttcagagtccctgtacgccagaaaactaaggattggattgggagcctgtatggtgtgtttgcatgtgmgtgtgtgtacgtgtatgcacatgtgtgcacacgtgtgtgtcagtgagtgtgcagtgagctggaaagcaggccagtaatttcattccccttgtccttgcagttgtgaaagtgtgaccgagtgaggaataagtctgcaaatttccaacacaataaaaataaattaaaagaagagaaaaaaattgtgattttgatttcaaaaaagctgtctcctttccaagtatagtagttatatacttgattctatttgctctatcaacaactgtagtgatttggaaccatgatatacccagctacctaatttcaatggaaaggagggaattcatggagataattactgagaggctagtgatgccgcaaattaatacatataacttgtgcggcataacatgctagggagagagattagcagaatgattctcatttcaaagagaaactgaggaagggctagcacacagcctgcacaaccccagggaggggttagttccaagagctgaccttagttgtcacttttcccaaacctccacaactgcttaagccttatgcaagtttgtgcatcttagatcaggttacttaaatgcttacagtccaagtttccttagctctaagatggagataataatagcacctgttgtaataagattgtggtaaggattaaataaaatgcactttgcacgaggcctgacccttaagaagaagtcaataaatctgggctgcatttgtagcttgaattcctccgctcatctctcggttaacatctccttctccgtcttcccactcctctttgctgttttcttctctctgccccttgatttatcttgtgggctccttcgacgggcacaatccttggctgtcagggtcgggcaggctctgaga

SEQ ID NO: 63625 - DNA, 1152 bp, Homo sapiens
gccaaggtgcctctagagacagaaagatccaagagcaactcctgcctccacctcttcctctgtcacctcccccattctccatatctgtgtctataaaatgggatggtgataatagcactgacctcgtggagggccatgacagcaaccatgcaaccaagcatgcctggaacagtccagatggcgcttgttatctgagggtgactgttaagagcaacccttgttcagcctcaaaagtgcctgatttggacgacaaatgacacttttgccaatgcagcattctggaagcgctttgcaaatgtcgtttctcaggatggtgctctacttctctgtgcacatagacyatgggacagattcaagggcagcgctccatgcattgcccccggtcgggagatttcttaagctacaactctgggcaatggtagaaagagggacggagccctagcctgccagatgaaaagagctgactttggaattcacctccctctccctttccagcatggaccatgggccttgatcccacctaggtgttgggctgtgatgggcaggacaggaatcacggtttaaggggttgttgcaggtgatgctgggtgggcctttctctgtgtctgaaagctcgtgaaggaaaggcaacccagtcacccaggagtggactcaatgccggaacaatggatcccttgcacaagtccagctgcattgctgacctatgtggcctttccaaactgtgccatacgtagagcctgttgcttcatctttcagcaaatagttattgagagccctctgtgtctcaggcctggtgctggatgctgccacagaggcccctgccctggtggaataaaggaaactggtaattgcacattgatcttctatgcagacatcttactgacacttatcagtgctaatagattttttttattttgatcttttgcattatgatgtgaaaatattatctgcaaataataataataataatacttctcctctcaatgcctgagagacagcatttttaaggtagaaaaatgtatatcctggaaccagatcacttggattcaaattccagcattgccacttagaagctgtgtgacttttaacaagttacttaacctctctgtgctccagtttcctcatctcatgtaatgaacttaggacagtgcc

SEQ ID NO: 63626 - DNA, 1262 bp, Homo sapiens
tgcaacttttgttaggctctgagctttgtcctcagccatatctgccgtgggactctggaaaatgaggggttgctgcagttataccatctgaatagctacagggactttctgattttttctatgcgtgctctcaattgtacattcagagatttcagtttctcattttccttttgtacaccttctaaggctgtgagaagaagccaagagactcaacagtctttatagtcactgctgtaaccatagcaattaagtgcctctgccactgacctcccagcatctccccttccacctgcatttcatctcctrccactgctagagacaacttgaataactgatgtcaccacttgtcctggattatttgttttctgttttttcctggcaaagtggttctacctgtgtttctcaacaacatgatcaatctaatcctggaatcccacttcaggatctcaatagaaaacagaatgctcaaattgggatagttgaggaaaaattcatgaagggttatagaggcctaacccagtgatgatgaggagcagttactgggacttggagacaggcataactgtggaaagggttgctggaaagaagctgggatcctaagttaagcaacacagtcatcacttttgacattttcctctaatattttgtgcagttatgcagcaaattgtatttcaaaggtaaaccttatttaaaaccccatagcatcatatgactcctatttttaaaagtctgcaaaataattacatccctttctttagttatccttatcatattactacagctgatggaattcagttaagcagcattggttgtctattcaaaactaaattaatatagtgaggatttattttaagttttcattatttttttttacatcatagcccttgaaacatgacagtttgtcattccatgtatttgcaggatttttttttaagaaaaccatcctgattctctattttcttactttcaaataccatcacagtataatttattttaatcccttatcctgtgggtcacttttatctgatgattgctttcatttaaattttaattggggtttgaaaactctttttatggactggaggacaataagtaaacttttgtagtatggcagggtgatctatagtccaggaaatcaatatctaggcttctatatgcaggagctgttcaaggcaggaactattttcttatttatttttgaagtcacattagagttccaaatgtataattatacaggattccataagttaatagtataggct

SEQ ID NO: 63627 - DNA, 1262 bp, Homo sapiens
tgcaacttttgttaggctctgagctttgtcctcagccatatctgccgtgggactctggaaaatgaggggttgctgcagttataccatctgaatagctacagggactttctgattttttctatgcgtgctctcaattgtacattcagagatttcagtttctcattttccttttgtacaccttctaaggctgtgagaagaagccaagagactcaacagtctttatagtcactgctgtaaccatagcaattaagtgcctctgccactgacctcccagcatctccccttccacctgcatttcatctcctaccactgctagagacaacttgaataactgatgtcaccacttgtcctggattatttgttttctgttttttcctggcaaagtggttctacctgtgtttctcaacaacatgatcaatctaatcctggaatcccacttcaggatctcaatagaaaacagaatgctcaaattgggatagttgaggaaaaattcatgaagggttatagaggcctaacccagtgatgatgaggagcagttactgggacttggagacaggcataactgtggaaagggttgctggaaagaagctgggatcctaagttaagcaacacagtcatcacttttgacattttcctctaatattttgtgcagttatgcagcaaattgtatttcaaaggtaaaccttatttaaaaccccatagcatcatatgactcctatttttaaaagtctgcaaaataattacatccctttctttagttatccttatcatattactacagctgatggaattcagttaagcagcattggttgtctattcaaaactaaattaatatagtgaggatttattttaagttttcattatttktttttacatcatagcccttgaaacatgacagtttgtcattccatgtatttgcaggatttttttttaagaaaaccatcctgattctctattttcttactttcaaataccatcacagtataatttattttaatcccttatcctgtgggtcacttttatctgatgattgctttcatttaaattttaattggggtttgaaaactctttttatggactggaggacaataagtaaacttttgtagtatggcagggtgatctatagtccaggaaatcaatatctaggcttctatatgcaggagctgttcaaggcaggaactattttcttatttatttttgaagtcacattagagttccaaatgtataattatacaggattccataagttaatagtataggct

SEQ ID NO: 63628 - DNA, 695 bp, Homo sapiens
acactctgattgggtggcttacaaacaacagaaatttatctcttgcagttttggaggctgggaggtccaatatccaagcactgacagatttggtgtctggtgagggccagcttcctggttcatacatagccatcttctcactgcattctcacatggtgcaaaggatgagggagctctctggagtctcttttataagagcactaattccattcttggtttggggtgggggctctgcactcatgacctaatcacctcccaaaggtcctacctcctaatgtcatcacattgaggattaaactttcaacatatgaattttggagggtcataaacatttagtttataaaaaagggctgcttggtgtatcatggccactgaataaattttgagtagcaatcttacctggtatgccattgcatttatatatgattgccactaataactcaaattactgaatttatgttgtatcgatgatgctgttttcctagtcttagtattagtagccaaatggccttggattaactttctcaatattattcattcattcattcattcaacrtttattgaataccttactaaatggcaagctctgaattaagctttgagaatccaagaagactaagactttgttcccacctttcccttcagcttccctttcctaagatagacataataaaacaattgcatcacaacatgat

SEQ ID NO: 63629 - DNA, 1036 bp, Homo sapiens
attgtctacatggagtttctcagaattaagaaaaagcacaattactctgtagttcaccctaatagttatctaaactaaggaaagggggaataaatgaaaaaaagtaacattttatcataatgttgtttttagatagcatatatagcatttactttaccagttcattgtaagttggcaaacatttagaacttgaaatgaaatcagagctcatctggtttagtttcattgagtagmggaaatggaagcctaaagggagtgaatgacccatggaaggaaagaacctaggacctggctttcaacctaggaaccagagctttggagtaacacagacctgggtttgagttctgcctctgccacccatacccttgaaactctgggtgaattatttagctgctctgtgtttattttctaatccataaaatgaaattataagacattgatcttgtagttatgaggcatatatgagattgcaaattaactagcaaggcgtctagcacatagaaatcccttgatcagtgttaaatctgtagtgtcccaaaaccttgaatgaattagtagtaagctgaaaaacatgaagatcatcctagtatataaaaatcatactttcctctcttgtcttcttactgttagtttttgggtaaaccagtaattccatttttcaacaaattatttggataattattgattcatataaagttataagaaataacagaaagaacttgtgtacagtttcccccaatggtaacattttgaaaaacttaataaaatatcactcaataatttgatgttatgaacaacaaatattttactggtgctaatatctattaaaacatcagaaaattcaattttatgtaatttgggactaaagcaatatcctgaatttcagtatctgttggaaccattagacaaatggatctagtgccacagacagctgactttgctctgacttggtgaccttggccaaggcacttaatttttatgctctagagctaattataaattgggacaaaagtactcatctctgcttaattcaggg

SEQ ID NO: 63630 - DNA, 1036 bp, Homo sapiens
attgtctacatggagtttctcagaattaagaaaaagcacaattactctgtagttcaccctaatagttatctaaactaaggaaagggggaataaatgaaaaaaagtaacattttatcataatgttgtttttagatagcatatatagcatttactttaccagttcattgtaagttggcaaacatttagaacttgaaatgaaatcagagctcatctggtttagtttcattgagtagaggaaatggawgcctaaagggagtgaatgacccatggaaggaaagaacctaggacctggctttcaacctaggaaccagagctttggagtaacacagacctgggtttgagttctgcctctgccacccatacccttgaaactctgggtgaattatttagctgctctgtgtttattttctaatccataaaatgaaattataagacattgatcttgtagttatgaggcatatatgagattgcaaattaactagcaaggcgtctagcacatagaaatcccttgatcagtgttaaatctgtagtgtcccaaaaccttgaatgaattagtagtaagctgaaaaacatgaagatcatcctagtatataaaaatcatactttcctctcttgtcttcttactgttagtttttgggtaaaccagtaattccatttttcaacaaattatttggataattattgattcatataaagttataagaaataacagaaagaacttgtgtacagtttcccccaatggtaacattttgaaaaacttaataaaatatcactcaataatttgatgttatgaacaacaaatattttactggtgctaatatctattaaaacatcagaaaattcaattttatgtaatttgggactaaagcaatatcctgaatttcagtatctgttggaaccattagacaaatggatctagtgccacagacagctgactttgctctgacttggtgaccttggccaaggcacttaatttttatgctctagagctaattataaattgggacaaaagtactcatctctgcttaattcaggg

SEQ ID NO: 63631 - DNA, 1036 bp, Homo sapiens
attgtctacatggagtttctcagaattaagaaaaagcacaattactctgtagttcaccctaatagttatctaaactaaggaaagggggaataaatgaaaaaaagtaacattttatcataatgttgtttttagatagcatatatagcatttactttaccagttcattgtaagttggcaaacatttagaacttgaaatgaaatcagagctcatctggtttagtttcattgagtagaggaaatggaagcctaaagggagtgaatgacccatggaaggaaagaacctaggacctggctttcaacctaggaaccagagctttggagtaacacagacctgggtttgagttctgcctctgccacccatacccttgaaactctgggtgaattatttagctgctctgtgtttattttctaatccataaaatgaaattataagacattgatcttgtagttatgaggcatatatgagattgcaaattaactagcaaggcgtctagcacatagaaatcccttgatcagtgttaaatctgtagtgtcccaaaaccttgaatgaattagtagtaagctgaaaaacatgaagatcatcctagtatataaaaatcatactttcctctcttgtcttcttactgttagtttttgggtaaaccagtaattccatttttcaacaaattatttggataattattgattcatataaagttataagaaataacagaaagaacttgtgtacagtttcccccaatggtaacattttgaaaaacttaataaaatatcactcaataatttgatgttatgaacaacaaatattttactggtgctaatatctattaaaacatcagaaaattcaattttatgtaatttgggactaaagcaatatcctgaatttcagtatctgttggaaccattagacaaatggatctagtgccrcagacagctgactttgctctgacttggtgaccttggccaaggcacttaatttttatgctctagagctaattataaattgggacaaaagtactcatctctgcttaattcaggg

SEQ ID NO: 63632 - DNA, 706 bp, Homo sapiens
tttgcgaaaaagttctgatcaattcagaaacattcaaacgatctataataaaaagccaacaattcttctgcatgaaaacaaatactgaaaaatatatatccctttgaaaaaaacatacgctcaatttttatttttcctaaaaggttatcttagcctgtttttctttgtaaagaggattacctggccrggcgtggtgctcatgcctgtaatcccagcactttgagaggctaaggtgggcccatcacttgagcccaagagttccagaccagcctgagcaacacaggaaaactgtctgtactaaaaatacaaaaattagctgggtgtggtagcgcacgcctgtaatcccaagtacttgagctacttgggaggctgaggcaggaaagaatagcttaaacccaggatggtggcggggagctgagctacagagtaagactgtctctaaataaataagaggaatacctgagaatccgtattcctggtttatttggctcacaattttgatggctggaaagttcaaggttggacatcttatggtcaaacccttaggctggctagtgaaaggggggtctgagtacagagatcacatgatgtaaatgggagcaaaagagagaagggagaggtgccaggctctttttaacaactataactcatggaaacaaagagaatgagaacttatgctccccaaggagggcataacctattcatg

SEQ ID NO: 63633 - DNA, 801 bp, Homo sapiens
aaccttcctctgggaatttttgtctaatgaggggaaaaacacctcaagtgagcatgcacacaacttcagtaaacacactgtgtatgcaccccttcccaagtgctggcgggccactgtgcctgtggacagcctgccgcaagggagaaatcaagggaggagaaactcaaatcccggaaccaagccaatgtattaaaatcccaagccaaaggttggacggggcacttggatctctcaaggaacccacttgaccctcttccaagtgtgctttgcttcctttcactcaggctctaaaactttttaataaactctcacttttgctctaaaacttgcctcagtctctccctctgccttaaacatacttctgcccctcagccaaattctgtcctccagagaggcaaggatcactttcgctgcagattcgcgttggtaacaatagtacttgaaagcatggttctgcatgtccaagcaaattttctgagagccggtcttgtaaatctgcttcatcacccttttctggctccgtctctgttctggcagggtgagtctttaaatcccttttggaatcctctggtggaattgctggttattttaattaatgttgtacatctgtatttttgcttcatacctcatcaaacttatgatgctcaaagcaggcaattccaagcaaattcactcttcaaagatagctgcctaattttgtgtggtgtttttcagtttgttgtttaaagagttccaggtttgtaaagtaagggaaaaataagcaagtgggaaactcatgtrttttattccctgctggatccc

SEQ ID NO: 63634 - DNA, 724 bp, Homo sapiens
gaaggttgcacgcagcctcgcctcacttctgtgaccgtactcctggtactcactgtaattatggaattgtgaagtgtcacccactcaggaagccagaagcctttttctcgttgagtgtacgccacaggggactgatgctgtggccctagatgagagggacacagcaggctcttgttgggaggggacccgcttctctgcctctattctctacttttgttgtttaaaggtaaaagtccgaaaatgttgccatagtgacagcaccaaatgttgatcaagtccattagatttgcccagaggtgcgctyagctcacccacagtactttcagaacagttctttgttccctctctccttcgtgcaagaaacgtggcacccccgccggaacctggtgccccgcaggctgcggtgtggccatccgcaaatggcgactcacttcacgtcggtcctggctcctcacgctgcctgctcaaacctttttatcaagcgcaggccagcgaggccccacctcttccccacgtccactgtccacatcatgccctcagcctctcctgaccacctctacgcagtgtttttccaggccgccgttgacggtgcaggggtgatggcaagagaccactcaaattcagaagctgagtcatatcctctgcttatctcagattgggttcatcaggatgctgagtggcgacagaaacccaacttccagctgtgctgaaagggaccccggag

SEQ ID NO: 63635 - DNA, 1449 bp, Homo sapiens
caaaatgtttaagatgcacagaaccccagctctgtggaaagtattttaacaattttcttatgccccatccatgtcccaaatattaggatatttgcctttttattattgattcaaaagtgctcttcatatattggaaatattatccctgtgtctcttaatttgagaaggttttccttggggagactcaggactgcgctctgctgagaaagtctggtaattattgtgcttcttaatgaactgaggtgtatttctagttgggcccatggactgaatccgatcagagaagttaacttgcaaagctctctcattagcagattgctttgtagatgcatttttcctggtaacagtaaaatagcttcattcaaatggcaaaaaaaaaaaaaaatggaaatataaatgagtctaactcggattcccagttctttgtgtcataaaagaaaaagaaaacagtcaaatgaagaaaaaaatcctggatttatgctacaacttccatgtgtttttttatatcagagaaggaagtgtgaagacagaaatgggaatatatatcaataatgaaacaccaaatgtctatggtattgaaccaatctaaagctttccacataatattatcagaaattggaagtggaaagcaaaaacaagatttcatctcctctcctagccagtccaacaccatcatctgctccgtgtctgctgcctactttacacatggatcccttcaccctgcccctgcagaaaaatccgggtcctggaactttggcctcaatagcagagtggytgtaggaagaagtgttggaagatccagaggtcagagcaggtagcccagtatggtggctgagcctggtatacctggtagttagagctggtgccaggatacctgcctgggccaagtcctggttctgctatccaacaactgcaaggggaaggtcatggtcaggatgtagactgcactcacctggtgccagagactgttctatattctttactcctattcatccacataatccttgcaacaacccatgtggcagatttttatttgtattatataaatgggaaactgaggcacagaaggtcaaataacctgcctaaaattacagagctagttagtgagagagctagaattcaaactctggcggtctgtttccaaagtctatggatcataagacacgttcgatagatatcaacccaacagaccaccaaaagatatgaactgtctgtctctggccatctctgtgacattgagcaggctatataaatagacttctgaatgccagttagcaaaatttttcaaatatttttatagtgccaagaaagtgctgcttgactgggattattaggaattgccttgcgtttagaaagcatgacatatgccaccattatattcagagcaatggcaaagagtgattaaatgtaccagctcccagacatgagattcaaaataatttttagctg

SEQ ID NO: 63636 - DNA, 987 bp, Homo sapiens
aaaattgagtatattaactacaacacacatacacacacgtacagagtagaatgcagaaaacactcagtgctgaagatcacactcaacccagtctttgcttctaccttcttcccaggaaatatcttgcttgagcatctgttgctcccaaatgtctcacttttggagatctcagtctgttcctgagaggtagctggcattacaagaaagggaacttcagcaaagaaagttttgattttgccacgaattgtcacatgttgactttgggaaggaaaaagatagacttcatttttgtttaatgatgcaaggagaagatgacaacctctttgggaaatgccttgtttagcttgtagtgaacacaaggatcatactctcttataagaaaacatctagagctttaattcagagctttcatcaccagttaagagatttaacaagtggagtgcaatgcagagttatcacatagggcatacagaaatttggggctttggttgaaaagaactggaggtgattgcaggatggtaatgagagtcagggaactgcttcagtgatacactcaacactatttccagaagagcaaagggcaatagtttgaattagaagtgttacacaacattttagcatcatcatattaacttcagcacggccaaagatgccttcstctatctctattcttataaattcaagatacttgaccaccctgtggctgttttctaatctttaaaatgggtgtaataaaaatacatatattctaagtttgatgtgagtatcaaatccatcagaatgttcttggtgacaggaaactgggcccaaagtgtcttcaccagtgacgtttgttgatatactataagactaaatgtccatgaacaggactgcctacaacggaggcctgatcctagactcatacgaggtccatctattgctttccttttggattcattttcaactctgtgtgttgggtctggggaaatttaggctcatcaactcatc

SEQ ID NO: 63637 - DNA, 1200 bp, Homo sapiens
cccaggctgactggtgtcttttacgggaagggagagggagacttggatacagaggcacatggcatagaaggcgatgtagcaatggaggcagacattggagggacacagttacacactaaggagcaccaagaatttccaacagccatcaggaactgggagactcatgaaacagactcgccctgagagcatccaggagagtccaaccctgccaacaccttgatttcagacttctggcctctagaactgtgagaggataaagttctctcccagtttgtgctaatttattatggcagctctgggaaagtaatgcaccttcattcacaggctgatgcacactcagtgaaatcaatgatggtttccagctgcactcagcttgcctcccgcacatgggctctggaggaggaatgctttcttgccttgtttttgtgtttccccagtggagggactacctaggctgcagggcaagcccattcctcagcctgctccatcctccctctcctcatggaaggaagaggagcttagtgcacagagaggcaacataacaagcttagcccaagctgctgcttcctctggcagcctccggcctgcaagggggtgtcttctcatctgctctgggttgggaaggcaggctcggggcagcacagagccaggccctctggactcaccattatgaagccaaatctccagggatccactttgtcagtgtcagagcagatgttttaatctctgctgtctatctcctgcacatatgataggacatcacctcataactgctcataaagagagttcccagaagctaagtcactcgtctgaggccactcagtgatgtgaaatggcagaatcagccttggcacccccagtctctatcttcattcaaggaattcctacccagtctgccatcctacacgccaccaccctgaggcagaccggaggccccgcagcactyagaattcttttcccaaaggcgagaattatccagttatcgggactggcttttctccatctttattaacagtgagctgagaacacgtgtgatagggggattaaggacttgctggcccaaacagcagcagaactttcttttctccaaggtcctgcaggacaagggtttcttttcaccatgattagcttagaccaattaggatctagcccctgggatggtggacggggccagcagaggagcataaataaatggtcaaa

SEQ ID NO: 63638 - DNA, 690 bp, Homo sapiens
tctgtgtgttcagtttgtgacaaatgtttgctgtctaatgtggtctgttactatttagcccatgcccggcctcttccattcctttctgtgttcttcacataatgctttctctaccttatctaggtatgacagcccctatattgaattgtgcatatccccctcatttgtttctttttcttattgtccatagttggattgaatattcttaaacaatacagcaaacacacaatgcaagaatcaagctattatttctccttcttcccaactgaagggtggcatttcaggtatcttccatttggaccagtattgattgcatctagaagagaatgggaattccgtctcttctgttgaaaaagcataaacatccttcttccccctgttttggttctccctgaaattgcagactgttgagaagcctgagggaaytgatgtcctttaaaatggtagctgccaatgagatttcttcatcaagggatagggtgggtttgtttccttctttagcagaagcaaaacaccaatcaattcccacttgtttcgtccaggtaagagccatgttttttttttctttcttttttttcagacaaagtctccttgcccaggctggagtgcagtgacacaatctcagctcaccacaacctctgcctctgggtttaagcgattctcttgcgtcagactcctgagtatctggga

SEQ ID NO: 63639 - DNA, 780 bp, Homo sapiens
  misc_feature (1)...(780): n = A,T,C or G
tctctctctttctctctctgctgtgagccacagtggttttcttggaagtgatagaccatataattctcacatgtcaaggttttaagccaaagccctcaggcaccacttctgattttcttgaaggatcaaaaataaaaggttgcaaccctcacagccgtaggctcctgcagcaactctttggtgcacctgtcaccctgatacctgggaggaggctctgagtccatgctgtgggaaggtgctggccttcatggatgggcctcccctggtgtgtccactgtggacctgagtgggtgtcccagagccctggctctcccttcttttcctctagaaagggaatcggcatgttcccaatcatctctgagattatctttattcttcaaggagttgmagtggctcttgccaagtgccctggggtcttggacatctgcctagtggccctgtagagacctccaccctccagacagctcagaatttgctaaagaaaatgtgaattttggagtccagggctagaaaatatgacatgggcacatagtgtcatgttttgaaaagtaaggtttagatgccttactgattatttgtgtgtatgtgttgtgtgtgtgagtattgtgtgtatatgtatgggtgttgtatgtgcatgtgtgttgtatgaacgctgtgtgtttatgtgagtgctgtttttatgtgtatgggggtgcatgtatgtgtgttgtgtgtgtgtcgtgtgtggaagtgtgtgtgtgtanatgtgtgtatgtgtgagagtgtgtgatgtgtttatgc

SEQ ID NO: 63640 - DNA, 780 bp, Homo sapiens
  misc_feature (1)...(780): n = A,T,C or G
tctctctctttctctctctgctgtgagccacagtggttttcttggaagtgatagaccatataattctcacatgtcaaggttttaagccaaagccctcaggcaccacttctgattttcttgaaggatcaaaaataaaaggttgcaaccctcacagccgtaggctcctgcagcaactctttggtgcacctgtcaccctgatacctgggaggaggctctgagtccatgctgtgggaaggtgctggccttcatggatgggcctcccctggtgtgtccactgtggacctgagtgggtgtcccagagccctggctctcccttcttttcctctagaaagggaatcggcatgttcccaatcatctctgagattatctttattcttcaaggagttgcrgtggctcttgccaagtgccctggggtcttggacatctgcctagtggccctgtagagacctccaccctccagacagctcagaatttgctaaagaaaatgtgaattttggagtccagggctagaaaatatgacatgggcacatagtgtcatgttttgaaaagtaaggtttagatgccttactgattatttgtgtgtatgtgttgtgtgtgtgagtattgtgtgtatatgtatgggtgttgtatgtgcatgtgtgttgtatgaacgctgtgtgtttatgtgagtgctgtttttatgtgtatgggggtgcatgtatgtgtgttgtgtgtgtgtcgtgtgtggaagtgtgtgtgtgtanatgtgtgtatgtgtgagagtgtgtgatgtgtttatgc

SEQ ID NO: 63641 - DNA, 780 bp, Homo sapiens
  misc_feature (1)...(780): n = A,T,C or G
tctctctctttctctctctgctgtgagccacagtggttttcttggaagtgatagaccatataattctcacatgtcaaggttttaagccaaagccctcaggcaccacttctgattttcttgaaggatcaaaaataaaaggttgcaaccctcacagccgtaggctcctgcagcaactctttggtgcacctgtcaccctgatacctgggaggaggctctgagtccatgctgtgggaaggtgctggccttcatggatgggcctcccctggtgtgtccactgtggacctgagtgggtgtcccagagccctggctctcccttcttttcctctagaaagggaatcggcatgttcccaatcatctctgagattatctttattcttcaaggagttgcagwggctcttgccaagtgccctggggtcttggacatctgcctagtggccctgtagagacctccaccctccagacagctcagaatttgctaaagaaaatgtgaattttggagtccagggctagaaaatatgacatgggcacatagtgtcatgttttgaaaagtaaggtttagatgccttactgattatttgtgtgtatgtgttgtgtgtgtgagtattgtgtgtatatgtatgggtgttgtatgtgcatgtgtgttgtatgaacgctgtgtgtttatgtgagtgctgtttttatgtgtatgggggtgcatgtatgtgtgttgtgtgtgtgtcgtgtgtggaagtgtgtgtgtgtanatgtgtgtatgtgtgagagtgtgtgatgtgtttatgc

SEQ ID NO: 63642 - DNA, 780 bp, Homo sapiens
  misc_feature (1)...(780): n = A,T,C or G
tctctctctttctctctctgctgtgagccacagtggttttcttggaagtgatagaccatataattctcacatgtcaaggttttaagccaaagccctcaggcaccacttctgattttcttgaaggatcaaaaataaaaggttgcaaccctcacagccgtaggctcctgcagcaactctttggtgcacctgtcaccctgatacctgggaggaggctctgagtccatgctgtgggaaggtgctggccttcatggatgggcctcccctggtgtgtccactgtggacctgagtgggtgtcccagagccctggctctcccttcttttcctctagaaagggaatcggcatgttcccaatcatctctgagattatctttattcttcaaggagttgcagtgkctcttgccaagtgccctggggtcttggacatctgcctagtggccctgtagagacctccaccctccagacagctcagaatttgctaaagaaaatgtgaattttggagtccagggctagaaaatatgacatgggcacatagtgtcatgttttgaaaagtaaggtttagatgccttactgattatttgtgtgtatgtgttgtgtgtgtgagtattgtgtgtatatgtatgggtgttgtatgtgcatgtgtgttgtatgaacgctgtgtgtttatgtgagtgctgtttttatgtgtatgggggtgcatgtatgtgtgttgtgtgtgtgtcgtgtgtggaagtgtgtgtgtgtanatgtgtgtatgtgtgagagtgtgtgatgtgtttatgc

SEQ ID NO: 63643 - DNA, 780 bp, Homo sapiens
  misc_feature (1)...(780): n = A,T,C or G
tctctctctttctctctctgctgtgagccacagtggttttcttggaagtgatagaccatataattctcacatgtcaaggttttaagccaaagccctcaggcaccacttctgattttcttgaaggatcaaaaataaaaggttgcaaccctcacagccgtaggctcctgcagcaactctttggtgcacctgtcaccctgatacctgggaggaggctctgagtccatgctgtgggaaggtgctggccttcatggatgggcctcccctggtgtgtccactgtggacctgagtgggtgtcccagagccctggctctcccttcttttcctctagaaagggaatcggcatgttcccaatcatctctgagattatctttattcttcaaggagttgcagtggytcttgccaagtgccctggggtcttggacatctgcctagtggccctgtagagacctccaccctccagacagctcagaatttgctaaagaaaatgtgaattttggagtccagggctagaaaatatgacatgggcacatagtgtcatgttttgaaaagtaaggtttagatgccttactgattatttgtgtgtatgtgttgtgtgtgtgagtattgtgtgtatatgtatgggtgttgtatgtgcatgtgtgttgtatgaacgctgtgtgtttatgtgagtgctgtttttatgtgtatgggggtgcatgtatgtgtgttgtgtgtgtgtcgtgtgtggaagtgtgtgtgtgtanatgtgtgtatgtgtgagagtgtgtgatgtgtttatgc

SEQ ID NO: 63644 - DNA, 714 bp, Homo sapiens
gatccagaagtcaaatgtagataaatttatttccacccccaggctgaattcatgtgacctaaggccaggaagacccccatttctgatattatttccggtcctgtccagcctgacatcttataatctgctgtcatttttatttagctggtttaaatcttttgtttggggcamttgcataacagccctgagagtgggcgtctcctccagtgttgcttgctgggcacttgacttgcctcccactagtcctgaatgtgttgtcatagcctctcgcctttaaaagtcaggatgatctttccaaaattgaagttgaaatcactgcctctgcttaaaccctatcgcttctttcccttgccccaggatagagtccaatttccttcattcagcatatgagtctgtacgggatgcagtgcaaagatctcaaactgcaaggtgtacagcatccaactcagacactaattttaatcagcctaccaatttgaatattttgattgaaaggtgcacatttctacttctcttgaggaaagagaagttacttttcatgccttaattctttcctcagtaaaatgggggcaataatatagaaaataaatacaacagtgcttgaccagtgaatgccatctttagcattacgtcaactgatgtccacgggcctggcccaaatcagctggagctgaggagtggttccctgcctcacaggagcaagaggtcatagct

SEQ ID NO: 63645 - DNA, 721 bp, Homo sapiens
ttatatctggtctcaggaagtggttaattcaatttatcaaatactccagattcaataagtaaagcattacatgacaaactctgctgttttctttctttcgtgacagctcacatgctccatgaagttaacgtttccaaggttctgtgagatttcacatgcaagggtaggattcctttttttggaccattcttatttcttccagataaaatttagtgatagtattaattctggaagcagaaaagggtaaatgaaatataaacagaattttatgaataatataatggttttgactttgcctcggtgaagacataaaatagacatttaaatatatgttgtactctgtcagagtttgatcttccaattcaacacagtattctcaaattcactcctttgccagggaaccaaatatacattttatgtgtgtatctcccaccataaaaatgaccttagcagatcaatgataagttcttcaataaccagactcttttatatatatatatatatatawaatatctttatatatatataaaatatctttatatatatataaaatatctttacatatatataaaatatctttacatatatataaaatatctttatatatattttatatacagtgaggaaaatatcagccatactttcatatgatcttatcaatactttctatagatacctccccttgggataataataactgcaccactcataaagacacttt

SEQ ID NO: 63646 - DNA, 567 bp, Homo sapiens
aaattctcaatcttcatttaaagtattcccttttcacttgtatagaggattacaatttttccctccatggcagtgagatttactatatacacttctacatatgccagtaatcaagattttatgatcacatataaagtgtaaaagttcctttctcttcccaccttccatccatttctgctttgaagacagtgggaactttcacaatattgagctacaaggagcacagagtaaaagacaattttcaacaaaacattttttattaagctcaccctggctctgagaactctatctcatttatataaaatgttkccaatgctaatcattttttgcatgaaaaattaaacacaccggaaatgggatcaagtgcagcctgtgtaaattactgcattgatttttatagcattattttctcccagatgatttgaggccgcgtaccaaaatataggcaacactgtataaagtaagtattatagtttaaggaaccagaggggaaattcatggagggagaataaataatgtagccaatggtaagattaacactcaagtatgcacactttcagatccaga

SEQ ID NO: 63647 - DNA, 849 bp, Homo sapiens
tacgttcttggacacacacacacacacacacacactatacaaattagcaaaagcactacaactagaattcaggtcatcttattccagatgcagtattgtttctactccaacacgttatcacacacttgataactacttagatgaattttaaatctagaaatctggtaaaggttgttcctatatttatggagataagaaagacttattaagtgactaaaggaataaacagtacamcttaaaattggaattataaattttaaaatttctcattttctcaaaagtagctttggctacttcttttttctggctacacttttaatacaaaatagcacttcatatttagtctattggtctaaccgccacaacagtttctcactgaaatagaagtaccttgtaaacaatgtgtagtgttttcacattaattatctcattaaattattataccaatctcaagaattacgggaaatattatatttcaaaggtgggaaactaagacctatataaaatcatttattcatctggagacaaaggcaagacagcagtttcctggctcctgaaaccagtgctgtttctgttgcatttaaatctaaaaatcggctgggcggggtggcccatgtctttaataccagccctttgtgaggccaaggcgagtggatcacttgagaccagcctgggcaacagggagaacccttgtcgctacagaaaacacaaaaattagccaggtgtggtggcacatacctgtagtcccagctacttgtgaggtcgaggatgcagtcagctgtgattgcaccactgcacttcagcgtgggtggcagagcaagaatctaaaaacttcatgaaatgcctatt

SEQ ID NO: 63648 - DNA, 542 bp, Homo sapiens
ctttacagggaagttccttcyggccaatcacccagccgctgtccgaggtgctgaaagcctctctctataggactcacaggtccgcccaaagccaactgtctgtctgcccaaccttgacctctgccctccagaaagaaaggaagcttgaagagtggtggaaaatgaatcagggatggcgctaagaaatcgggctttggaaacctgtcagctagtgacactctcatcgctcttctaggtccacaaatctctaccatgagagggcttcagaggtgtcatcacatatgggaatatctgtttactggttttctcctcatcttgcctttgaggcatgtgtcacaggaggacaaaggccagctctgctttccctcacagttgcatccctgcatcagcatggtcccaggcacagcgttgaaagcacgtgtctgcagaatgagtgaacggtggagggctcaggaggaagggcaggcttgagtgggacggacccgtatggagggaagtttgtgtcttctggtctacctcaggcgggctgttttaggagattg

SEQ ID NO: 63649 - DNA, 542 bp, Homo sapiens
ctttacagggaagttccttccggccaatcacccagccgctgtccgaggtgctgaaagcctctctctataggactcacaggtccgcccaaagccaactgtctgtctgcccaaccttgacctctgccctccagaaagaaaggaagcttgaagagtggtggaaaatgaatcagggatggcgctaagaaatcgggctttggaaacctgtcagctagtgacactctcatcgctcttctaggtccacaaatctctaccatgagagggcttcagaggtgtcatcayatatgggaatatctgtttactggttttctcctcatcttgcctttgaggcatgtgtcacaggaggacaaaggccagctctgctttccctcacagttgcatccctgcatcagcatggtcccaggcacagcgttgaaagcacgtgtctgcagaatgagtgaacggtggagggctcaggaggaagggcaggcttgagtgggacggacccgtatggagggaagtttgtgtcttctggtctacctcaggcgggctgttttaggagattg

SEQ ID NO: 63650 - DNA, 542 bp, Homo sapiens
ctttacagggaagttccttccggccaatcacccagccgctgtccgaggtgctgaaagcctctctctataggactcacaggtccgcccaaagccaactgtctgtctgcccaaccttgacctctgccctccagaaagaaaggaagcttgaagagtggtggaaaatgaatcagggatggcgctaagaaatcgggctttggaaacctgtcagctagtgacactctcatcgctcttctaggtccacaaatctctaccatgagagggcttcagaggtgtcatcacatatgggaatatctgtttactggttttctcctcatcttgcctttgaggcatgtgtcacaggaggacaaaggccagctctgctttccctcacagttgcatccctgcatcagcatrgtcccaggcacagcgttgaaagcacgtgtctgcagaatgagtgaacggtggagggctcaggaggaagggcaggcttgagtgggacggacccgtatggagggaagtttgtgtcttctggtctacctcaggcgggctgttttaggagattg

SEQ ID NO: 63651 - DNA, 586 bp, Homo sapiens
tgcaatatttgggacatatttatackgaaaaactcttcaaatttaactgggcatcccgtgttttatctggcagccctactagaaggggtgtgcaggaaagacctgcatttgtaggtggacaaaggggcatgttgaatcagtacctggcgcctcctgcgtttaaaggcaaactgaaccagacccaggacagcaacatggtaccaccatttcgaggggccctgggtctctcttcaggccatttgtgtagggaattccagggtgcaggtgtccagatggttctagaatggagagtgcaggatctgggtggacatagccccagtatagtcaagagggcaaaggttggggaggggggttttaaaagctcagagccaggcaggagcccagacatgtgggtctaaggatagctctgtttcggttctcttggaagatggtaagatctggcaacaattaatattgcccctgttcacctcctcactccccaatgactgacttgaattctgcttctcttctcgagtttgccatggtccccaccttgctggcttcccttttcctgtcaactcctgaggccattcgcatgtgctaaccc

SEQ ID NO: 63652 - DNA, 971 bp, Homo sapiens
  misc_feature (1)...(971): n = A,T,C or G
tgatctttgctttctacctttgtggtcacctcccattctggctctgagcttagctgtatgatgttctttaaccaatcagatgtttaaaatatattggcaaaggttcgataaaaagtcttgcatacatttctaattgctctattaccctcttgcttctgctaggaaaacaagcttatgttactatagaagaatgagagatcacctgggcaaatataagacattttagatgatccataatagaattactaacctccagtctgtctgccagctccacaaagacacaagagcaaacccaggtaagattacttcaacctggcccacatagcgaaactaagttgctgacccagggatgtgttttaaagcrctaagttttgaaatggtttgttatattgtattcttgttggaataaaggactaatgtaatcaccgtgaaaaagaaatgcaaaatctcagagaagagattatgaaataaaagcaagttgtggaatagaaagaaaataaattggaaaataaatgacaaaaattatttcataaaaaagacaatttcaaggtgcacaaagaagattatatatgacaaaaaacataataagagaaatgtagaatagctatgagaaaataaaacagggaaataaacagaagagatctaaaaaaatggaagagagaaaattatggaaatggtagaaaggtgtaggatcttaattcttagttctggaatctaaaaaataatattttaaaaatattttcaaattgcttttatgtttgtgggttctctgtattttccaggtgtgattttttaaagtattgggctttctgattatgaagctttatatccctcataaattctagggaaaatatcatttactgcatctannnnnnnnnnnnnnnnnnnnnnnnnnnnnnnnnnnnnnnnnnnnnnnnnnnnnnnnnnnnnnnnnnnnnnnnnnnnnnnnnnnnnnnnnnnnnnnnnnnnca

SEQ ID NO: 63653 - DNA, 612 bp, Homo sapiens
taaaattaaaaagagaaataagttttcctgtattaggctaacttgtcccaggcagcaacaggcacagcccagacccaggaaaattcttgctaatattatctaatgtgctctggaggctctcccagcattccctcaacatacggagaagaaaaaccaaattttcctttattttatggaatgagtttatagattcctgttctctgtaactagtgacttcaagtattgttttatctaagaagtacaacgaaggtcatgagaagcctgagtaggcctgaactacagctgcctgggcaccatagtgaaggttatgggataagcccgtgcctaggcaaacctagataacggacatctgggttgcatagcaatggttatgtgcaatcctacgttatacacctgttacaatttgattaactgtctttgtcctgcctctgtatccctgctttcacaccactgtaagcttgcktcaagctagccgacccccttttctaaagtgtatataaaagtcaagtgctgtctttgttctgggcccagtctttggacgtgagttgctgggcctgagtgcactcaataaaaggttctcctgttttaacccgagacctctcttgtcctcct

SEQ ID NO: 63654 - DNA, 612 bp, Homo sapiens
taaaattaaaaagagaaataagttttcctgtattaggctaacttgtcccaggcagcaacaggcacagcccagacccaggaaaattcttgctaatattatctaatgtgctctggaggctctcccagcattccctcaacatacggagaagaaaaaccaaattttcctttattttatggaatgagtttatagattcctgttctctgtaactagtgacttcaagtattgttttatctaagaagtacaacgaaggtcatgagaagcctgagtaggcctgaactacagctgcctgggcaccatagtgaaggttatgggataagcccgtgcctaggcaaacctagataacggacatctgggttgcatagcaatggttatgtgcaatcctacgttatacacctgttacaatttgattaactgtctttgtcctgcctctgtatccctgctttcacaccactgtaagcttgcttcaagctagccgacccccttttstaaagtgtatataaaagtcaagtgctgtctttgttctgggcccagtctttggacgtgagttgctgggcctgagtgcactcaataaaaggttctcctgttttaacccgagacctctcttgtcctcct

SEQ ID NO: 63655 - DNA, 612 bp, Homo sapiens
taaaattaaaaagagaaataagttttcctgtattaggctaacttgtcccaggcagcaacaggcacagcccagacccaggaaaattcttgctaatattatctaatgtgctctggaggctctcccagcattccctcaacatacggagaagaaaaaccaaattttcctttattttatggaatgagtttatagattcctgttctctgtaactagtgacttcaagtattgttttatctaagaagtacaacgaaggtcatgagaagcctgagtaggcctgaactacagctgcctgggcaccatagtgaaggttatgggataagcccgtgcctaggcaaacctagataacggacatctgggttgcatagcaatggttatgtgcaatcctacgttatacacctgttacaatttgattaactgtctttgtcctgcctctgtatccctgctttcacaccactgtaagcttgcttcaagctagccgacccccttttctraagtgtatataaaagtcaagtgctgtctttgttctgggcccagtctttggacgtgagttgctgggcctgagtgcactcaataaaaggttctcctgttttaacccgagacctctcttgtcctcct

SEQ ID NO: 63656 - DNA, 803 bp, Homo sapiens
cccctgccaccagcctccatcgtccaccagggataagcaagaaaacattgatttgggacttctgcagggtccttccttcacatggtgtatgctttgaaactgccacgtccccaatccaccaccatgggtggcctccttcaaagccctcagctctccacaggaaacctcctcctccaggacacctgtcatcagctccccagctgccttaatttccttcctcaaaacactctacattgcaatcatgcgaccatgcaattgttcagcatatatgttagtttcctatgactcctatagcaattaccacaaactcagtggcttcaaacaacacaaatctattctcttacagtcctggtggtcagaagtccaaaatgtgtctttcaaggctgaaagcaaggtrtcagagggttggctcctttggaaggctccagcagagaatctgtcccttgcctcttccagtttccagagctgccagctttcctcagtttgtagctgcagcactcccacatttacttccataatcacattgccttctcctatgctgatcacctgcctcctccttatgaaaacccctgtgattacattaggccaatgcagagtaatctctccatctcaagatcctgaacttaatcacatctacagagtccattttgccatatacgataatattcacatgttccagggatcaggatacagacatggtgggaaggtggtgattactcagcttaatacacagtgtgtctttcccactaggatgttagtgatcagggtctttgtgcagctaatttagtctttatgctccagga

SEQ ID NO: 63657 - DNA, 803 bp, Homo sapiens
cccctgccaccagcctccatcgtccaccagggataagcaagaaaacattgatttgggacttctgcagggtccttccttcacatggtgtatgctttgaaactgccacgtccccaatccaccaccatgggtggcctccttcaaagccctcagctctccacaggaaacctcctcctccaggacacctgtcatcagctccccagctgccttaatttccttcctcaaaacactctacattgcaatcatgcgaccatgcaattgttcagcatatatgttagtttcctatgactcctatagcaattaccacaaactcagtggcttcaaacaacacaaatctattctcttacagtcctggtggtcagaagtccaaaatgtgtctttcaaggctgaaagcaaggtatcagagggttggctcctttggaaggctccagcagagaatctgtcccttgcctctyccagtttccagagctgccagctttcctcagtttgtagctgcagcactcccacatttacttccataatcacattgccttctcctatgctgatcacctgcctcctccttatgaaaacccctgtgattacattaggccaatgcagagtaatctctccatctcaagatcctgaacttaatcacatctacagagtccattttgccatatacgataatattcacatgttccagggatcaggatacagacatggtgggaaggtggtgattactcagcttaatacacagtgtgtctttcccactaggatgttagtgatcagggtctttgtgcagctaatttagtctttatgctccagga

SEQ ID NO: 63658 - DNA, 803 bp, Homo sapiens
cccctgccaccagcctccatcgtccaccagggataagcaagaaaacattgatttgggacttctgcagggtccttccttcacatggtgtatgctttgaaactgccacgtccccaatccaccaccatgggtggcctccttcaaagccctcagctctccacaggaaacctcctcctccaggacacctgtcatcagctccccagctgccttaatttccttcctcaaaacactctacattgcaatcatgcgaccatgcaattgttcagcatatatgttagtttcctatgactcctatagcaattaccacaaactcagtggcttcaaacaacacaaatctattctcttacagtcctggtggtcagaagtccaaaatgtgtctttcaaggctgaaagcaaggtatcagagggttggctcctttggaaggctccagcagagaatctgtcccttgcctcttccagtttccagagctgccagctttcctcagtttgtagctgcakcactcccacatttacttccataatcacattgccttctcctatgctgatcacctgcctcctccttatgaaaacccctgtgattacattaggccaatgcagagtaatctctccatctcaagatcctgaacttaatcacatctacagagtccattttgccatatacgataatattcacatgttccagggatcaggatacagacatggtgggaaggtggtgattactcagcttaatacacagtgtgtctttcccactaggatgttagtgatcagggtctttgtgcagctaatttagtctttatgctccagga

SEQ ID NO: 63659 - DNA, 803 bp, Homo sapiens
cccctgccaccagcctccatcgtccaccagggataagcaagaaaacattgatttgggacttctgcagggtccttccttcacatggtgtatgctttgaaactgccacgtccccaatccaccaccatgggtggcctccttcaaagccctcagctctccacaggaaacctcctcctccaggacacctgtcatcagctccccagctgccttaatttccttcctcaaaacactctacattgcaatcatgcgaccatgcaattgttcagcatatatgttagtttcctatgactcctatagcaattaccacaaactcagtggcttcaaacaacacaaatctattctcttacagtcctggtggtcagaagtccaaaatgtgtctttcaaggctgaaagcaaggtatcagagggttggctcctttggaaggctccagcagagaatctgtcccttgcctcttccagtttccagagctgccagctttcctcagtttgtagctgcagcactcccacatttacttccataatcacattgccttctcctatgctgatcacctgcctcctccttatgaaaacccctgtgattacattaggccaatgcagagtaatctctccatctcaagatcctgaacttaatcacatctacaragtccattttgccatatacgataatattcacatgttccagggatcaggatacagacatggtgggaaggtggtgattactcagcttaatacacagtgtgtctttcccactaggatgttagtgatcagggtctttgtgcagctaatttagtctttatgctccagga

SEQ ID NO: 63660 - DNA, 1054 bp, Homo sapiens
atcctgtttgaagtggtcacatttggggtttttatgtacttgctcctattactggtgaaacttctgtgaatgggctacagaacatgaacagcctcagtggtggcagagtctcatgatttcaagttaccttatagttgagaaatagccccgcagggtaggtgatggcgtactccccacttgccattctatctggaacccggaaggtggwcaatccatattcactgaaatgaaccaagaaatgagactgtggctataaggttgaggatgttcatttgcttgtgaagcttctaaacaagatcttccgaacagttaagagaacacttggatatcattatgatggtgtgtttgctttgaaaaataaacatgaaagagaaccattatgttatagctccgctttctagtgagtaccccgtcaaggcatcatatccctctgtgtagcaatggaaaggcatttaacccaatgattgaacctctctgtgcctcagtttcctcatctctaaaataataatagaacctagctcatataactgttaagggggatcaaaggaggtaaaatgttgtgacaaaagttgcataacacagtggagtgtatttcattcattcccaagtctgaacttacgtgtagaataatgccacaatctatggccctgtgtcctgaaatgccattcctccaggcccttttggagcaagagctccaaggggctgttccctcagataataacctaggtgattggaaaccttggctagggagcacagacctggaggtcggttccagtgtgggacagttggtcatatttcccagtcaccctctgccatgcaaagtgggtgaggcagtggctctggccagttcattggcaggtggcaaaaccttgtctagtctttggcattgggcatgtgataccatcgatggccagtaggtggcacaagttgtccatcactgccgccagctttgctccattgggtgctttctcagaaggggaagatctatttctaatccagtcctggctttatggcaatgcttaatcacatggaagggaacatgcaataactactg

SEQ ID NO: 63661 - DNA, 1054 bp, Homo sapiens
atcctgtttgaagtggtcacatttggggtttttatgtacttgctcctattactggtgaaacttctgtgaatgggctacagaacatgaacagcctcagtggtggcagagtctcatgatttcaagttaccttatagttgagaaatagccccgcagggtaggtgatggcgtactccccacttgccattctatctggaacccggaaggtggacaatccatattcactgaaatgaaccaagaaatgagactgtggctataaggttgaggatgttcatttgcttgtgaagcttctaaacaagatcttccgaacagttaagagaacacttggatatcwttatgatggtgtgtttgctttgaaaaataaacatgaaagagaaccattatgttatagctccgctttctagtgagtaccccgtcaaggcatcatatccctctgtgtagcaatggaaaggcatttaacccaatgattgaacctctctgtgcctcagtttcctcatctctaaaataataatagaacctagctcatataactgttaagggggatcaaaggaggtaaaatgttgtgacaaaagttgcataacacagtggagtgtatttcattcattcccaagtctgaacttacgtgtagaataatgccacaatctatggccctgtgtcctgaaatgccattcctccaggcccttttggagcaagagctccaaggggctgttccctcagataataacctaggtgattggaaaccttggctagggagcacagacctggaggtcggttccagtgtgggacagttggtcatatttcccagtcaccctctgccatgcaaagtgggtgaggcagtggctctggccagttcattggcaggtggcaaaaccttgtctagtctttggcattgggcatgtgataccatcgatggccagtaggtggcacaagttgtccatcactgccgccagctttgctccattgggtgctttctcagaaggggaagatctatttctaatccagtcctggctttatggcaatgcttaatcacatggaagggaacatgcaataactactg

SEQ ID NO: 63662 - DNA, 824 bp, Homo sapiens
caggtcttctgcgtgtcctctgaatcaggttcgcatgtgtgcctctaatggcagtttcgagttcatcctgtgttgagataatgcctgaaggcgagaggaaaaaatatctgtggttgtcaaatcgggtggaaagtgattaatcatggagacatttacggcatgctgaactgtttcgtttcctgacctttatcccacgtgcgttaggggcaggcggggtcaagtttaaatccaagatgacaagtgtctgaggctaaggaaggtttctgctgaatacttggcttagagtcaatggctccgtgtctcacacctggtgaaaaccgactcgcaattgaaagaaacagcatgggagtgtcaaacacttgctgacttggccttgggctagagcttcttgcgagggttttagaactgacacaccctttggatgtgctgggggcatctggtttttggtgcctgagtcacaaatcctggaatacatttgcccacagtgtttccataccattggaagtgcattatggctgcttctcttagagtcctttaacctcttcctcaagagccagctttgtcaacttgatgtatctcatggcaggcatggactcatgcctgtgtgtcccattgtatccccagatcatgggatttgtgggattcagccagtgtsatttactaatcactaggtccagggccaagtttaggtgaggttcactccatctaagctgtgttttgggggagggagggtctctattttttcatttagagaagtgactagacactagaaaatgtcacagagtaaacgtatggactacagcttgttttctgaaaaggtttag

SEQ ID NO: 63663 - DNA, 727 bp, Homo sapiens
gatccaaaaaaaacagtcattgatttggaaggagatgctgttctccatctcagccagctgttaaagggacatggattgaactcscaggcagggaggggcattttgtttcccttggccacatcagcatgtttttacagttgagagagcaggagatgactctccagcctgtggcagagagaaagtgcccttggcccaactccgtggaagatgttccccaccccccttccaggagaagctcctgctggtggatgcacgaacccagctggtggcgacacaaggccagtgggcactctctgccttgctgaggcctcagcctcctggctgcgaaggccccgggttcccctctgcagccaagtctttacttccccttcaccctgaaaaacgtcttcacagactatcattcttggtctcttgactgcctttctccggtttcctttcacaatccctcagagatgggacatctctccagaggacgcctgggttgtgaggatctatggtcagaacattttggtcaatgacagattacatacaccacagtggctccctcagattataaaggagctgaataattcctatcaccaagtgacagtgctatgccatctaagcttgtgtaagtacaccctgtgatgttcacacaatgacgaaatcaccattgttaagtaaatgggtttgggagaaggttcaaacagcttccacctgccccacccttccgtttcctaagctcagc

SEQ ID NO: 63664 - DNA, 1008 bp, Homo sapiens
gctaacacatgtgcctgtgcacacttatatacatgagcatgtgtacatgtgaactcttaagtacaaacaagaggattttcctaactgctttataaattgcaaagaattctatttcataatgatttcaggacttcacattgtactgagaaatatcagtgccttttcttcaaacttgcctcttccttcttcataaccaaactccaggagccagatctctggacctctaaatagcaaattctcttaaatgcacaaagccccttgcaaagctttgaaaatgccgctgtaaaattcttacccaaagtcttcattactttcattttctgtctagggggaagagagggagtaattttatttttccagttgtttgtaattcttcaaattcaggaagaaatagaggcaatgtagagcatagcactgaccctggaactgccaagtaactcgccgtgtgctctgaaagaatctgcttctcctctctaagtctcacagtgttttaggtggcatctgggacaggcatgcttgggtacttataccagggactctcagcggccatttgtaccgggtggactctgaagtcagtttcttccagtgttctcaatgggcacttacaccaagggctgtctttagtcacttcatttccattttctataatgttctgcctcttttctctgtagagaatgtttacacaattttataatcagaacaatctaaacaaccaggtggcaatagtaagcacaaatgcgaagtatcactttgtatcactaacaatagatgaaattatttcatatggtggacatcagcatattcctaatggtcagcaagtatagaataagatttcaaatttcttatgtttttatttggatgatttttwaaaaatataatgtaattataggatagtctggctaaacccttttggcatttcagggccaaaacttgcatttgtgtctatcaaaccagcaccaagtaatgctatcttaattgttacaggcaactgagaaaaagtaagatgca

SEQ ID NO: 63665 - DNA, 1051 bp, Homo sapiens
gctcctcagccatttatccatcttcaagagaggtctagctgtgccctttccaaggaagtctcaatcttagtctggttgggcagaagtgtcatggttgactcttccttgggcactctatctcagctgtagtgtagtggccatctcctcttcctactattcctctaatgcttatacttctctttawctcttcctagccaattttttattactctgatcttctgttgataattcttgatattaaattttccctattcaaaatactgtgtgatttctagaagctaattggacatggactgatatgatcaaatttctacttttccttatcttttattgaaaccattgctgagcatcagtaggcctcttgaaatcttaagaggatagtgaaatatgagtaagaattccatcagattttaagtatttgtttacttattgataattattaaaagaattgagaactaatttgggtaccctttcagaaaagtcatccaaatcttaaaaggtaatgtaaccattaaggttgttattttccagagcttttacattgctgtacagaccctctttgaatatggttaatgccattaaataagtgaatctgttattattttatgggtcaaagtttatatacaaccttaaatcactattaaaattgaagaaaggaccgggcacagtggctcacacctgtaattccagcactttaggaggctgaggcgggtggatcacaaggtcaggagattgaaaccatcctggctaacatggtgaaaccctgtctctactaaaaatacaaaaaattagctgggcgtggtggtgggcgcctatagtcccagctactcgggagcctgtacctaaaaaccacctgtatctaaaaaactattgaaaaaagaagtcttcatttatgcacatattagcattgtcaattaaaacttacaaatcacaataaataaaacaatatgcttaacatacaaaaaaaaagtcctggaaagaggacctggattaatcattaaaaagcatatttactattgtattttaatcaatagcagctgtaatgtatgca

SEQ ID NO: 63666 - DNA, 1002 bp, Homo sapiens
gtatgtcttaagcaataactcattaaaggagtgctttttggtatttatttttcactgttgattagtattttaaaagctttttctgtgtaaagatgttaaaattttccttaaatacctctaaagatcaatataattccacaagtattttcaaaccaatttgaaattaaacaatgtgattcttactatttaattttcttcctcatcgatttggatttctctaaaattgactgggccttaggtaacagtattgccaggacagaaaagaggaggaacacattggtgctgaagtaggacaaatgtggattcaagtttggctctgcgttttttgatctgggggcccyagacacatcagtctatctaagccacaatttcctcacctatgaagtaaggataacagtattacccatctttatagggctgcattgattgagagatagcgtgtctctcatttaaagccacacagggcttagcagagtgcacacactcaatatatgttagcgatcttccaaggcagcccagattagtttggttgcagtagggtctggttcagtatataaacattggtaaagctttggtcttttaaaatagggtttcagaatctcatttttcaaaagaaattcttttccatcccaaaaccaagacaatgacccaggatctttaaacaacaattttgttttatagctttcagtgtatcatggtggagactggcataatcacagtgtagattcgtatggttctttatagtattcagagtgctagctcctatattatatcatgtgattgtagcaacaattctctgaggaaggtaaagaaaatagtgtctccagttgacccatgataaaaacagattgacagtagttacttgaaaaatctcacagggttagtcactgatgaaaataggactagattcagtactttatcttaggccagtaattcctccatatactcgctctccaaatgaactacaataattctatatttatgggagagtaaacaggaatg

SEQ ID NO: 63667 - DNA, 1211 bp, Homo sapiens
tgcatcaactttctattttctggagtacttttatattgaaaaaaagctttaaggcagtgtttttcgattttagtgtgcatgagaatcamctggaaggcttattaaaacacagactggtgggttccacttcagagtttatgcttctgtacgcctaggaggaggcctgaaaactggcctttcttacaagtcctcatgtggtactgatgctgctagttcagggacatcaatttgagaactattctttaaaaaatgtagattcagggggtacatgtgcttgtttgttacatgagtattacctgcatactggtgggggttgggcttctagtatacccatcatccaaatattggccattataccaaggaggtaattttcaacccttctagagagaactactcttaaagaatgtacccataagaatcttgagaacttgatccccctaaatagggaggaaagttagcattagctatgctaggagccttctaatcacacgtttctcccgtgctcactctctcttcttcttcctgattattattactcatgtctgccaattgtagcctgagaaagagggaacaaaagaaacatgtgattagaaggctcctactttagcattaataatactaatttttcctccctgtttcagggaccaagaaaatgatcactcttatactcattaaattcccaagccttatcaaggaagaataaaaaaacattttatctgttaccttagagagattatcagtttactaatgattataattttagtagcaaagtctaaaactgagctctactattgccaacctctgtattcttgcctacttatttctcagccctacataccttttcatggtcaatatctatggttcatttccactataagcttttgcacttgcagtcccccagccttaaatgtcactctttcctgtttattcatattcataactcctttcagaacagtttcctaagattcaatttcctccaaaatgtctagaaactttgactgctacaaataattcacttgttttgctttccagttcatagttccttatctcattttctcctattttctggtatcttctggttgatttgtcttatttttcattttgccatcttcctgtaaccatagcactcctatctaaaaccaggaggttatggagagaatcaaagctaatgatagcatctcctgtcactgcctgaacttcttggcatgtga

SEQ ID NO: 63668 - DNA, 1211 bp, Homo sapiens
tgcatcaactttctattttctggagtacttttatattgaaaaaaagctttaaggcagtgtttttcgattttagtgtgcatgagaatcacctggaaggcttattaaaacacagactggtgggttccacttcagagtttatgcttctgtacgcctaggaggaggcctgaaaactggcctttcttacaagtcctcatgtggtactgatgctgctagttcagggacatcaatttgagaactattctttaaaaaatgtagattcagggggtacatgtgcttgtttgttacatgagtattacctgcatactggtgggggttgggcttctagtatacccatcatccaaatattggccattataccaaggaggtaattttcaacccttctagagagaactactcttaaagaatgtacccataagaatcttgagaacttgatccccctaaatagggaggaaagttagcattagctatgctaggagccttctaatcacacgtttctccygtgctcactctctcttcttcttcctgattattattactcatgtctgccaattgtagcctgagaaagagggaacaaaagaaacatgtgattagaaggctcctactttagcattaataatactaatttttcctccctgtttcagggaccaagaaaatgatcactcttatactcattaaattcccaagccttatcaaggaagaataaaaaaacattttatctgttaccttagagagattatcagtttactaatgattataattttagtagcaaagtctaaaactgagctctactattgccaacctctgtattcttgcctacttatttctcagccctacataccttttcatggtcaatatctatggttcatttccactataagcttttgcacttgcagtcccccagccttaaatgtcactctttcctgtttattcatattcataactcctttcagaacagtttcctaagattcaatttcctccaaaatgtctagaaactttgactgctacaaataattcacttgttttgctttccagttcatagttccttatctcattttctcctattttctggtatcttctggttgatttgtcttatttttcattttgccatcttcctgtaaccatagcactcctatctaaaaccaggaggttatggagagaatcaaagctaatgatagcatctcctgtcactgcctgaacttcttggcatgtga

SEQ ID NO: 63669 - DNA, 1211 bp, Homo sapiens
tgcatcaactttctattttctggagtacttttatattgaaaaaaagctttaaggcagtgtttttcgattttagtgtgcatgagaatcacctggaaggcttattaaaacacagactggtgggttccacttcagagtttatgcttctgtacgcctaggaggaggcctgaaaactggcctttcttacaagtcctcatgtggtactgatgctgctagttcagggacatcaatttgagaactattctttaaaaaatgtagattcagggggtacatgtgcttgtttgttacatgagtattacctgcatactggtgggggttgggcttctagtatacccatcatccaaatattggccattataccaaggaggtaattttcaacccttctagagagaactactcttaaagaatgtacccataagaatcttgagaacttgatccccctaaatagggaggaaagttagcattagctatgctaggagccttctaatcacacgtttctcccgtgctcactctctcttcttcttcctgattattattactcatgtctgccaattgtagcctgagaaagagggaacaaaagaaacatgtgattagaaggctcctactttagcattaataatactaatttttcctccctgtttcagggaccaagaaaatgatcactcttatactcattaaattcccaagccttatcaaggaagaataaaaaaacattttatcygttaccttagagagattatcagtttactaatgattataattttagtagcaaagtctaaaactgagctctactattgccaacctctgtattcttgcctacttatttctcagccctacataccttttcatggtcaatatctatggttcatttccactataagcttttgcacttgcagtcccccagccttaaatgtcactctttcctgtttattcatattcataactcctttcagaacagtttcctaagattcaatttcctccaaaatgtctagaaactttgactgctacaaataattcacttgttttgctttccagttcatagttccttatctcattttctcctattttctggtatcttctggttgatttgtcttatttttcattttgccatcttcctgtaaccatagcactcctatctaaaaccaggaggttatggagagaatcaaagctaatgatagcatctcctgtcactgcctgaacttcttggcatgtga

SEQ ID NO: 63670 - DNA, 1211 bp, Homo sapiens
tgcatcaactttctattttctggagtacttttatattgaaaaaaagctttaaggcagtgtttttcgattttagtgtgcatgagaatcacctggaaggcttattaaaacacagactggtgggttccacttcagagtttatgcttctgtacgcctaggaggaggcctgaaaactggcctttcttacaagtcctcatgtggtactgatgctgctagttcagggacatcaatttgagaactattctttaaaaaatgtagattcagggggtacatgtgcttgtttgttacatgagtattacctgcatactggtgggggttgggcttctagtatacccatcatccaaatattggccattataccaaggaggtaattttcaacccttctagagagaactactcttaaagaatgtacccataagaatcttgagaacttgatccccctaaatagggaggaaagttagcattagctatgctaggagccttctaatcacacgtttctcccgtgctcactctctcttcttcttcctgattattattactcatgtctgccaattgtagcctgagaaagagggaacaaaagaaacatgtgattagaaggctcctactttagcattaataatactaatttttcctccctgtttcagggaccaagaaaatgatcactcttatactcattaaattcccaagccttatcaaggaagaataaaaaaacattttatctgttaccttagagagattatcagtttactaatgattataattttagtagcaaagtctaaaactgagctctactattgccaacctctgtattcttgcctacttatttctcagccctacataccttttcatggtcaatatctrtggttcatttccactataagcttttgcacttgcagtcccccagccttaaatgtcactctttcctgtttattcatattcataactcctttcagaacagtttcctaagattcaatttcctccaaaatgtctagaaactttgactgctacaaataattcacttgttttgctttccagttcatagttccttatctcattttctcctattttctggtatcttctggttgatttgtcttatttttcattttgccatcttcctgtaaccatagcactcctatctaaaaccaggaggttatggagagaatcaaagctaatgatagcatctcctgtcactgcctgaacttcttggcatgtga

SEQ ID NO: 63671 - DNA, 1002 bp, Homo sapiens
aatgtaataaagtatgaaaattcactgagacagtttcagattccagattgttactgaggtttccaaaaggaccactcatctagttccactgtgktatcaaatggaatgaaatactgctcagcaataaaaaaggaatgaactatttatacctgcaaaaacaaggatgaatctcaaagagtttgtgctgagcaaaagaggccagtttcaaaaggtagcatacggtatgattccatatatgtaacattctggaaaaggtaaaactatagtggtggagaagagcatagttgttgccaagggtgagggatggagagacagtgtaagtaagtacaagggtataggacaaaataagtttttagagtgatggaactgtttgaattgtgactgtggtggtagtttcatgaatctctctctatatatatgtatcaaaactcctagttcaaaaaagttcattttattgtttattaaaaaatgaaaagaaatcatatagcacaatgttagctcacagatgatacttcaataaatgttatgtttataaatgttaaaaacattcaaaatcctgcgcaccactctaaatctgcttaatttgattctctgagaagattctactcttacaaacaaaacaccccccaccccacaactattttccctgacgatactaaagtttaaccatatttgagaactgctagtctggcaaaaagaatatggaatctgaaatcctggagtttgcttccagtttggcttctaactactatataggaaagcagacataatccattctatcatcacttcaaaatatcctagatattttgaagctcgctttgttagtgccaccagcattcgatgaaggtaatgttagcagttcacttgccttgaatgattgctatcttcagccccttgccaaggtttacacccaattatctcatttaaacctcagaacaatcctaccagttaggtcctaaacttttactgtcatatagctagatcgcaatcagactacaaaat

SEQ ID NO: 63672 - DNA, 1002 bp, Homo sapiens
aatgtaataaagtatgaaaattcactgagacagtttcagattccagattgttactgaggtttccaaaaggaccactcatctagttccactgtgttatcaaatggaatgaaatactgctcagcaataaaaaaggaatgaactatttatacctgcaaaaacaaggatgaatctcaaagagtttgtgctgagcaaaagaggccagtttcaaaaggtagcatacggtatgattccatatatgtaacattctggaaaaggtaaaactatagtggtggagaagagcatagttgttgccaagggtgagggatggagagacagtgtaagtaagtacaagggtataggacaaaataagtttttagagtgatggaactgtttgaatkgtgactgtggtggtagtttcatgaatctctctctatatatatgtatcaaaactcctagttcaaaaaagttcattttattgtttattaaaaaatgaaaagaaatcatatagcacaatgttagctcacagatgatacttcaataaatgttatgtttataaatgttaaaaacattcaaaatcctgcgcaccactctaaatctgcttaatttgattctctgagaagattctactcttacaaacaaaacaccccccaccccacaactattttccctgacgatactaaagtttaaccatatttgagaactgctagtctggcaaaaagaatatggaatctgaaatcctggagtttgcttccagtttggcttctaactactatataggaaagcagacataatccattctatcatcacttcaaaatatcctagatattttgaagctcgctttgttagtgccaccagcattcgatgaaggtaatgttagcagttcacttgccttgaatgattgctatcttcagccccttgccaaggtttacacccaattatctcatttaaacctcagaacaatcctaccagttaggtcctaaacttttactgtcatatagctagatcgcaatcagactacaaaat

SEQ ID NO: 63673 - DNA, 1002 bp, Homo sapiens
aatgtaataaagtatgaaaattcactgagacagtttcagattccagattgttactgaggtttccaaaaggaccactcatctagttccactgtgttatcaaatggaatgaaatactgctcagcaataaaaaaggaatgaactatttatacctgcaaaaacaaggatgaatctcaaagagtttgtgctgagcaaaagaggccagtttcaaaaggtagcatacggtatgattccatatatgtaacattctggaaaaggtaaaactatagtggtggagaagagcatagttgttgccaagggtgagggatggagagacagtgtaagtaagtacaagggtataggacaaaataagtttttagagtgatggaactgtttgaattgtgactgtggtggtagtttcatgaatctctctctatatatatgtatcaaaactcctagttcaaaaaagttcattttattgtttattaaaaaatgaaaagaaatcatatagcacaatgttagctcacagatgatacttcaataaatgttatgtttataaatgttaaaaacattcaaaatcctgcgcaccactctaaatctgcttaatttgattctctgagaagattctactcttacaaacaaaacaccccccaccccacaactattttccctgaygatactaaagtttaaccatatttgagaactgctagtctggcaaaaagaatatggaatctgaaatcctggagtttgcttccagtttggcttctaactactatataggaaagcagacataatccattctatcatcacttcaaaatatcctagatattttgaagctcgctttgttagtgccaccagcattcgatgaaggtaatgttagcagttcacttgccttgaatgattgctatcttcagccccttgccaaggtttacacccaattatctcatttaaacctcagaacaatcctaccagttaggtcctaaacttttactgtcatatagctagatcgcaatcagactacaaaat

SEQ ID NO: 63674 - DNA, 1102 bp, Homo sapiens
acagtgttgccaatatcacaggataatggaagccaagaaggcagaagtggatttgcaaaaatagagtaaaactttaagaaatcatttcatacaggaaatgacccaatggttagaagcagtcttgaggagccacgatgaaaacctgggtctcctatttcctagactagtactcttctttacttayaatactgttaccaagtagaatagtgggcttgaaattaaggcaaaacttgaactgcaaatacataatcaattatagactttctctgtgcagattgacctaatatgttaattacttaaatacactgaaaagtaaaagtatcatttaagctactaatatagttatgtttactatatccccaataggttatcaaacattccttaaaatagttacattcttatttttttttgagatggggtttcactcgtttcccaggctggagtgcagtggcgcaatctcagctcaccgcaactttcgcctccccgcttcaagtgattctcttgcttcagcctcctgagtagctgggattacaggcacataccaccacagccagctaatttttgtattttagtagagatggggcttcaccatgttggccaggctggtcttgaactcctgacctcaggtgatccgcctgcctcagcctctccaagtgctgggattgcaggcgcgagccaccatgcctggccaaaatagtgacattctttatacctccaaaataaagactgaaattgttctcacacatgaggtagtgttcacaactgttcgaagtataatcactgcaataaaatatattttcacctaaatttcctggagatttcagatatctgtttagcctttattaactggaaaattcctcaactcaatgtgtacttaccaatagattctcttacgaaaatgtttgttttccaaataaataatccaagccctaaaatttcactagtattttacaatattaacttgatagtaaaagaagcattttatcaatgaagcatttttaaaacatttatatattttccaatgaaattcttattatgctcttttataaaatgagaaagcttcctatatcatcttctttgaaaggtttgtcagatttctatt

SEQ ID NO: 63675 - DNA, 549 bp, Homo sapiens
gaagaaattctcatgtgtaatgacagatagataaataaaatgtatataactacagtggaatattatgaaacctttaaactaagaaaatcctgtcatatgattcaacatgagtgaaccttgagracattatgctgaacaaaataagtctgtcacaaaaggataagtattgtatcattgcattaatctgaagtatctaatgtagtccaaattatagaaacaaaaaatagaatggaggttatcaagggcctctagggaatggggttagtgtctagaagatagggagtttggtgttggaagttgaaaaagtgttagacatctgttgcacaaaaatgtgaatatatttaaaactgaactgtacacttaaaaatggttaagtaaatttaagtaactgaatacattttatcatgacaaaataattataaaataaaaatatatacataatgcattactcttcattatgaatacctaatactccaattatttttgtcttgttggcttgctattactctttccatctattaagaacatcccaagacttttctgagtctg

SEQ ID NO: 63676 - DNA, 829 bp, Homo sapiens
cttcagtttcttcatccaaaaatgagattggcaatttcacctcccagggcttttataaggattaggtgcatggtacttagtaggtgctttgtaaatattagataagccttgatctcctgggctcaagcaatcctcccacctcagcctccagagtagctgggactatagctgcacaccatcacacccacctaatttaaaaatttttttatagtgacagagtctcgttcaagtgatcctgccaccttggccttccaaagtgttgagattacaggcatgagccgaaattcttgaacaggggccacaggatcatattacaacttcataatatttacctggagagaattaagctgatamgtgaatataacaggtgtgaatttcatcttttccctggccagagcacctgaagaagaaaacaatgatcccaatcacctttactgaagcaaatcctatcctctggttctatcttcacctgggggcctctaacatccttcgaagatgcttcgccgcaattccttccagaagtctgcagatgcttgcctgtgcttggccatgctggagtgaccacgtggatcacgtcccggctcttcttctaggggctcaggaccgctgggggtgggggtagggcagtgagaaattggaggctgatgcattacctatggacccatagtgagtaccccaaaacctagcagcttacaacagctttatgatcttacacaatttctgagggtcggaagcccagcttagctggtacctctggctcggactctcctgcgaggctgcagtcaagtcgttggctagatctgcatcattgaaatcccggaaggccgga

SEQ ID NO: 63677 - DNA, 487 bp, Homo sapiens
ctggtccccacaactgtgccttttctgttgtgtccccagaattttaacattctccagccagacacaggccaagaccgacaatgcttcacttggtgaagaccattttctgttcctccagcagcctccgtgacctcgggtgggccattcggtcaagtaatcctgaatttacctcccagtaacattgtgtctttgagccgtcatcaggcttctttcagggtagacccacgggactgtgtagaaaagggcttgaaggaggagatttgtgccggagcccctggtgytgtcaaagtcaaataaaatatacagacaaatctctaagtttaaaatgttttatttggggagcaagaatttcagtttggggcatacacacagactgggtggtcttcagtatgtccaaagagcaaagagaaggttgtaggtttcataaaaatgagaaatgttatggattgttaggaaagcaagttcattagcactagcaacgttttgg

SEQ ID NO: 63678 - DNA, 550 bp, Homo sapiens
gtatttccacctgtgtaatggggagtgcttaaaaaaagaaaaaacatgtattgaatcctacttttacttgtaattttgtaaaacaggtatctttatgtatgtgttgagaaatctggaagaatatacactaagaggtgagttgaacttaatctctctgggagacaagattatgggtgtttttatttkattcttttggctaaacatacattgattttaaaaggtaaatgcaaatatatgcaatgggaatcactttttaattaaaaaaattaaatatataaaaacactcaaaaaaaaaaaacccagtaaagtctatattcaaatcttcagcctctcatttctgaacttctgagtgctgttttattttgaatggggtcttgcccctgacaaccttcccaaccgttcccattagggcctggaaaaatgtgacctcagccgtttggaagccttcaatggttcctgggcaacatacgctggggccagtaagtgctgtgactgccagctgcacgagtccttccttggctgaggaagggtccactctacagccccgccc

SEQ ID NO: 63679 - DNA, 529 bp, Homo sapiens
tatttcacgtctctctccctgcctgccttccttttcccttcctttcccctcctcatgttttctggttgtgcccatctgtaccagctcctttccatccaccttcgtatgcacccagatttttctgttcccatctgtcctatttgttattcatcccgctgctcaacttctccagtatgttgcttcccttaagttgccattcattctcttcatgactttactaactcacttcggtctctgtctgtcaactaaacttttctaaaggttaccagttatccaatcaccaaatccatggctttttctcaaagcttagtcttgtccttgrcagaactggacactattgaccatccaaatggaaattcccctttcttggtgtctctgacaaatggtcctttgccttatcttgtgctggtggtgaagaggccctcaaagccaggcctctctattcctttgactgtctcctcagccattaacccattcttcatcctcggagtgagtgattcccaagtctttgtcttggcttaatccctaa

SEQ ID NO: 63680 - DNA, 668 bp, Homo sapiens
ctgatgttgactaaatttctaacttccacccaacacccatggtgtttctaagctccatctcttctactttgaatttgttaatttaaacatataacaaagcattacttttaccccagttaaaagtttgtatgttcatgtactttattatttcaaaaatattttttgttttttctctccaaagtatgctgtccatttctcatagcttctagtcatccacatattttttcagtttgcttcttcatttttcttcaaaaacattgatgaacccttttccactcaatactattaatagcttcataggcaataattaacacctgrtcatgtacataacaaccattggatgccaacttgaaactactaataaattctgtaagtctatgaatctctcttcttcagagctcggctttaactactgtttctttgctgaacaactctttgaatttttaatttaagccagattatcttagctcttatttttctgacacacagtgaaagtataggcatgtatccttatttttaaaatttacctttccataggtagattaaaaaaatccataggagcagagacaattagtgctttgatcaccaaagtattttcagattttagtggaaggcttgaggcatattaagtattcaataattttttaaattaaatagtgaattccata

SEQ ID NO: 63681 - DNA, 702 bp, Homo sapiens
cagtgtgctctctcattagatattcccatttgtctctgccaactgcacatgtgggaggagcctctgccacaccccagagtaggggcctccccacacattcccagtgacattccaagatggccttcaggcttgcaggacaagcctgcaagcttttccttatggagtttgactgctcccaagaggaagcagagagcttggctgccacaggagctgaaggcgggttcccaggagctcaacttgactgtgattcagtttatgccacttgcagacctttggggcaaggagaagggaatttggcttctggtaggttgggagagctatttgggctggtgttaccaaggcactgtggtcagttaacccttcctgggaggggttctacaaattcygaagcatgggaacccatgacttcttctgtcacaggccccctgatctgccaagggtgcctgcagcattatttgctagtcccagcctcccatcagctgccctgtgcttgtagaggcagcagggcagagatcacaggctggccaggtggagaataatggcatctccttcctggttctcctcccccatccaaggctgcaagatcctgcttctatttgctgccaccagcactcatgggtgagaccaaggcctcaaaaagatgggaggcttaccctcagttatgggtgggcactatcttggacttccttcttggaggagcca

SEQ ID NO: 63682 - DNA, 956 bp, Homo sapiens
cataattgagatttgtgtgttttgtttgagacagggtcttgctctgtggcccaggctggagtgcagtggtgtgatctcggctcactgcaggctcaacctccgtgactcaggcgatcgtcctgcctcagcctcctaagtaactagggccaccacaggcatgccaccacaggcatgccaccacacctgactaatttttgcatttttttgtagagacagggtctagctatgttgtccaggctggtcttgaactcctgagctcaagtgatcctttcaccttggcaagtcccaaagggctgggattacaggagtgacacctccccccaccccccgccaccaaccacatccgacttcaaatccagccccaccccagccttggcttcatcagatccaaatttattccaaatcctgattsaggctcacattttgaacccaatcttccccaaaccctaacccaaggtgtccaccccaactctaataaggtcttttagtgcaaaacccgttactaacaggatgctaattagagcacctggtaaacttatagcaacatactttctttctttctttttttttttttttttgagacagagtctctctctgtcactgaggctggagtgcactggccccatctcggctcactgcaagctccacctcccgggttctcctgcctcagcctccgaagtagctgggactacaggcgcccgccactatgcccggctaaatttgttttgtattttttggtagagacggggtttcactgtgttggccaggatggtcttgatctcctgacctcgtgatccgcccgcttcaggctctggaagtgctgagattacaggcgtgagccaccgtgcctggcttatagcaacaagctttcacccaaccccaatgtgaaccaactgcaaacccaaacataaattgacagactctccaaaatgctgtttgcaaaaatagacaagaaa

SEQ ID NO: 63683 - DNA, 956 bp, Homo sapiens
cataattgagatttgtgtgttttgtttgagacagggtcttgctctgtggcccaggctggagtgcagtggtgtgatctcggctcactgcaggctcaacctccgtgactcaggcgatcgtcctgcctcagcctcctaagtaactagggccaccacaggcatgccaccacaggcatgccaccacacctgactaatttttgcatttttttgtagagacagggtctagctatgttgtccaggctggtcttgaactcctgagctcaagtgatcctttcaccttggcaagtcccaaagggctgggattacaggagtgacacctccccccaccccccgccaccaaccacatccgacttcaaatccagccccaccccagccttggcttcatcagatccaaatttattccaaatcctgattgaggctcacattttgaacccaatcttccccaaaccctaacccaaggtgtccaccccaactctaataaggtcttttagtgcaaaacccgttactaacaggatgctaattagagcacctggtaaacttatagcaacatactttctttctttctttttttttttttttttgagacagagtctctctctgtcactgaggctggagtgcactggccccatctcggctcactgcaagctccacctcccgggttctcctgcctcagcctccgaagtagctgggactacaggcgcccgccactatgcccggctaaatttgttttgtattttttrgtagagacggggtttcactgtgttggccaggatggtcttgatctcctgacctcgtgatccgcccgcttcaggctctggaagtgctgagattacaggcgtgagccaccgtgcctggcttatagcaacaagctttcacccaaccccaatgtgaaccaactgcaaacccaaacataaattgacagactctccaaaatgctgtttgcaaaaatagacaagaaa

SEQ ID NO: 63684 - DNA, 566 bp, Homo sapiens
taaaaattatagctcatgagtcctggtaacagccctataatttggctatgctttatatccccactttaaaaatgaggaaaccgaggcacagaaaggatgaccaacatgtccaaggacacagaggtgataataagtgtgaagtcaagaatcaaacccaggtggcctggctccacagtcagtgaaggagtaaatartggtcatctccaaggtggtattcaaaatatatgacagccgaccaggcacggtggctcacacctggaatcccagcactttgggaggccgaggtgggtggatcacctgaggtcaggagtttgagaccagcctggccaacatggcaaaactctgtctctactaaaaataccaaaaatagctgggcatggtggtggtgcctatagtcccagctactggggaggctgaggtgggagaatcgcttgaatctgggaggtggaggtacagaagcgagatcacaccactgcactccagctgggtgacagagggagaccccgttgagagagagagagagagagagagagagagagagagaatatatatatatactatatata

SEQ ID NO: 63685 - DNA, 676 bp, Homo sapiens
ttctttagctttgcttcctaattcacctacctactccattgaaattgctttgtcaaggtcagaggtagctttcctgttgccattgtcctcaatttattcagtgacccagcagcatttgatagaattgacctgctacttaaatccacaaattgacttagcagtacatagtgcaggcctaaaaaatgagaaagaataatcacacacaaagttcactgtagcataatgaaaataacacttaaacacaaccatttatttatggcatagtctcattgtgtcttctagtcagaaagttaaaatattatgctgggcagttcaaactatattcatcaaaattatgtcgtttttttcctaacttagaagaatattttcttatatcaaaagttaaagtctttgcctatacttggatcttgctctcctttcaaacatgcctgaagaggtgaaaaatgttatcaagttttcaaaacaggctagtcagagkcagaggcagaggcagaggtgagagtgaaactggttttgaggtcaagtaatccattgatttcactgctccacaaattttgttctcactttctttttcacttagaacttcatgtaaagatacttaccaaatttccatttattatttaaatcattatgaaacattgcagacatgcagaattacataaaggatagacagata

SEQ ID NO: 63686 - DNA, 1418 bp, Homo sapiens
tggtttcgatttgcatttctcttatgatcagtgaggttgagctttttttcatgtaattgttggctgcatgtatgtcttcttttgaaaagtgtctctttatgtcctttgaccacctttttatggggtcgtttgcttttttcttgtaaatttgtttaagtagagtatagctggaacttttgtaattaggaaatggctttaaagtaaccatattgtgggttaggggatagaaacaatgagtacaggtgattttagaaacaaagactcgtattttatagttctctgggcctagaaaggtttcctttgtgactgggcttttttctattcctttaagaacataagcccttagagaaagagaaattttttttctttcaatggatttccccggggtgccggcttggacccaaaaacccctgactcttcaagaaaaaatcccccccaaagtacttatcatgcaaccytgtacataataggtccttcatagatttttaaaactaatttgcatctgataaagaaaaagagagaagccaggattttagtaataaatttagtggtaggaactgaaacactttttggcaggaggaggtaagaaattataggcatttctgaggccactttttcctaaaaaatgagaaagaaggaaaagaaggagaaggagaaagaaagaacgtattgcatggaaaaggtctgaaagtttactaattaacagatcactgagatgtattgtagatatcaagcatgttaggaggacctgagtgactgaatttgaaaacatggattttcagggatctatcttcctgattttctaacatctagggagttactccagggttcttcagcaagcacaatgctacaagttcggtctattattggtcccatgctctgtttactgaattcttcatctcaactcctgctgaaattccttctagaccaacttctatgggcaaatatttttcctcatgtcataagtgctttgaagtttaaagggatgctgtcttaggaggaagaaagcaagcaaacaagaaaaagtaaagaggtgaagagatgggaaggagagagcttactaggtgagagaagaaggaaagagggatacataatgatgaagatgccgattttgaattcagtgaatgaagttctaaatcgtgatatatgtgtgtatctactgtgtatggaggggagaggagagggagagagagagacaaaggtatggggagagactgtgaagtgacagaacacaaccagctctcctggaaatttaccctttcccaggtgttaggacaatgaaagaaacaaaatttccatttatcaaaagactttctgcattccaagtaatttcctagatgttttgtatcaattatcttattgaatttctattttcggatgtaagtattaccattccctcctagaggtgaagaaactgt

SEQ ID NO: 63687 - DNA, 1418 bp, Homo sapiens
tggtttcgatttgcatttctcttatgatcagtgaggttgagctttttttcatgtaattgttggctgcatgtatgtcttcttttgaaaagtgtctctttatgtcctttgaccacctttttatggggtcgtttgcttttttcttgtaaatttgtttaagtagagtatagctggaacttttgtaattaggaaatggctttaaagtaaccatattgtgggttaggggatagaaacaatgagtacaggtgattttagaaacaaagactcgtattttatagttctctgggcctagaaaggtttcctttgtgactgggcttttttctattcctttaagaacataagcccttagagaaagagaaattttttttctttcaatggatttccccggggtgccggcttggacccaaaaacccctgactcttcaagaaaaaatcccccccaaagtacttatcatgcaaccctgtacataataggtccttcatagatttttaaaactaatttgcatctgataaagaaaaagagagaagccaggattttagtartaaatttagtggtaggaactgaaacactttttggcaggaggaggtaagaaattataggcatttctgaggccactttttcctaaaaaatgagaaagaaggaaaagaaggagaaggagaaagaaagaacgtattgcatggaaaaggtctgaaagtttactaattaacagatcactgagatgtattgtagatatcaagcatgttaggaggacctgagtgactgaatttgaaaacatggattttcagggatctatcttcctgattttctaacatctagggagttactccagggttcttcagcaagcacaatgctacaagttcggtctattattggtcccatgctctgtttactgaattcttcatctcaactcctgctgaaattccttctagaccaacttctatgggcaaatatttttcctcatgtcataagtgctttgaagtttaaagggatgctgtcttaggaggaagaaagcaagcaaacaagaaaaagtaaagaggtgaagagatgggaaggagagagcttactaggtgagagaagaaggaaagagggatacataatgatgaagatgccgattttgaattcagtgaatgaagttctaaatcgtgatatatgtgtgtatctactgtgtatggaggggagaggagagggagagagagagacaaaggtatggggagagactgtgaagtgacagaacacaaccagctctcctggaaatttaccctttcccaggtgttaggacaatgaaagaaacaaaatttccatttatcaaaagactttctgcattccaagtaatttcctagatgttttgtatcaattatcttattgaatttctattttcggatgtaagtattaccattccctcctagaggtgaagaaactgt

SEQ ID NO: 63688 - DNA, 1418 bp, Homo sapiens
tggtttcgatttgcatttctcttatgatcagtgaggttgagctttttttcatgtaattgttggctgcatgtatgtcttcttttgaaaagtgtctctttatgtcctttgaccacctttttatggggtcgtttgcttttttcttgtaaatttgtttaagtagagtatagctggaacttttgtaattaggaaatggctttaaagtaaccatattgtgggttaggggatagaaacaatgagtacaggtgattttagaaacaaagactcgtattttatagttctctgggcctagaaaggtttcctttgtgactgggcttttttctattcctttaagaacataagcccttagagaaagagaaattttttttctttcaatggatttccccggggtgccggcttggacccaaaaacccctgactcttcaagaaaaaatcccccccaaagtacttatcatgcaaccctgtacataataggtccttcatagatttttaaaactaatttgcatctgataaagaaaaagagagaagccaggattttagtaataaatttagtggtaggaactgaaacactttttggcaggaggaggtaagaaattataggcatttctgaggccactttttcctaaaaaatgagaaagaaggaaaagaaggagaaggagaaagaaagaacgtattgcatggaaaaggtctgaaagtttactaatkaacagatcactgagatgtattgtagatatcaagcatgttaggaggacctgagtgactgaatttgaaaacatggattttcagggatctatcttcctgattttctaacatctagggagttactccagggttcttcagcaagcacaatgctacaagttcggtctattattggtcccatgctctgtttactgaattcttcatctcaactcctgctgaaattccttctagaccaacttctatgggcaaatatttttcctcatgtcataagtgctttgaagtttaaagggatgctgtcttaggaggaagaaagcaagcaaacaagaaaaagtaaagaggtgaagagatgggaaggagagagcttactaggtgagagaagaaggaaagagggatacataatgatgaagatgccgattttgaattcagtgaatgaagttctaaatcgtgatatatgtgtgtatctactgtgtatggaggggagaggagagggagagagagagacaaaggtatggggagagactgtgaagtgacagaacacaaccagctctcctggaaatttaccctttcccaggtgttaggacaatgaaagaaacaaaatttccatttatcaaaagactttctgcattccaagtaatttcctagatgttttgtatcaattatcttattgaatttctattttcggatgtaagtattaccattccctcctagaggtgaagaaactgt

SEQ ID NO: 63689 - DNA, 1418 bp, Homo sapiens
tggtttcgatttgcatttctcttatgatcagtgaggttgagctttttttcatgtaattgttggctgcatgtatgtcttcttttgaaaagtgtctctttatgtcctttgaccacctttttatggggtcgtttgcttttttcttgtaaatttgtttaagtagagtatagctggaacttttgtaattaggaaatggctttaaagtaaccatattgtgggttaggggatagaaacaatgagtacaggtgattttagaaacaaagactcgtattttatagttctctgggcctagaaaggtttcctttgtgactgggcttttttctattcctttaagaacataagcccttagagaaagagaaattttttttctttcaatggatttccccggggtgccggcttggacccaaaaacccctgactcttcaagaaaaaatcccccccaaagtacttatcatgcaaccctgtacataataggtccttcatagatttttaaaactaatttgcatctgataaagaaaaagagagaagccaggattttagtaataaatttagtggtaggaactgaaacactttttggcaggaggaggtaagaaattataggcatttctgaggccactttttcctaaaaaatgagaaagaaggaaaagaaggagaaggagaaagaaagaacgtattgcatggaaaaggtctgaaagtttactaattaacagatcactgagatgtattgtagatatcaagcatgttaggagsacctgagtgactgaatttgaaaacatggattttcagggatctatcttcctgattttctaacatctagggagttactccagggttcttcagcaagcacaatgctacaagttcggtctattattggtcccatgctctgtttactgaattcttcatctcaactcctgctgaaattccttctagaccaacttctatgggcaaatatttttcctcatgtcataagtgctttgaagtttaaagggatgctgtcttaggaggaagaaagcaagcaaacaagaaaaagtaaagaggtgaagagatgggaaggagagagcttactaggtgagagaagaaggaaagagggatacataatgatgaagatgccgattttgaattcagtgaatgaagttctaaatcgtgatatatgtgtgtatctactgtgtatggaggggagaggagagggagagagagagacaaaggtatggggagagactgtgaagtgacagaacacaaccagctctcctggaaatttaccctttcccaggtgttaggacaatgaaagaaacaaaatttccatttatcaaaagactttctgcattccaagtaatttcctagatgttttgtatcaattatcttattgaatttctattttcggatgtaagtattaccattccctcctagaggtgaagaaactgt

SEQ ID NO: 63690 - DNA, 1418 bp, Homo sapiens
tggtttcgatttgcatttctcttatgatcagtgaggttgagctttttttcatgtaattgttggctgcatgtatgtcttcttttgaaaagtgtctctttatgtcctttgaccacctttttatggggtcgtttgcttttttcttgtaaatttgtttaagtagagtatagctggaacttttgtaattaggaaatggctttaaagtaaccatattgtgggttaggggatagaaacaatgagtacaggtgattttagaaacaaagactcgtattttatagttctctgggcctagaaaggtttcctttgtgactgggcttttttctattcctttaagaacataagcccttagagaaagagaaattttttttctttcaatggatttccccggggtgccggcttggacccaaaaacccctgactcttcaagaaaaaatcccccccaaagtacttatcatgcaaccctgtacataataggtccttcatagatttttaaaactaatttgcatctgataaagaaaaagagagaagccaggattttagtaataaatttagtggtaggaactgaaacactttttggcaggaggaggtaagaaattataggcatttctgaggccactttttcctaaaaaatgagaaagaaggaaaagaaggagaaggagaaagaaagaacgtattgcatggaaaaggtctgaaagtttactaattaacagatcactgagatgtattgtagatatcaagcatgttaggaggacctgagtgactgaatttgaaaacatggattttcagggatctatcttcctgattttctaacatctagggagttactccagggttcttcagcaagcacaatgctacaagttcggtctattattggycccatgctctgtttactgaattcttcatctcaactcctgctgaaattccttctagaccaacttctatgggcaaatatttttcctcatgtcataagtgctttgaagtttaaagggatgctgtcttaggaggaagaaagcaagcaaacaagaaaaagtaaagaggtgaagagatgggaaggagagagcttactaggtgagagaagaaggaaagagggatacataatgatgaagatgccgattttgaattcagtgaatgaagttctaaatcgtgatatatgtgtgtatctactgtgtatggaggggagaggagagggagagagagagacaaaggtatggggagagactgtgaagtgacagaacacaaccagctctcctggaaatttaccctttcccaggtgttaggacaatgaaagaaacaaaatttccatttatcaaaagactttctgcattccaagtaatttcctagatgttttgtatcaattatcttattgaatttctattttcggatgtaagtattaccattccctcctagaggtgaagaaactgt

SEQ ID NO: 63691 - DNA, 832 bp, Homo sapiens
ttcatgtttgggttwatgtagctttccaatttgtggcccagtacagggcatggaataggtgtcaataaaggttgctgaaggactaagtgactgagtgagcatagccaggaaaccaaatattgaacaccatgtgcttcaggctaaaaatcttagtgttagccactaagatcccccaagtggaaaagatacaatttcagttactttcaataaaatacagtgagtacagcaacagagaaaggcatggggtgatataaaaacctacacatataagaactcaaattggccctttgacccaacctcgtgttggaaaaggcttttcacttctcaaaatatttgcacatctattagaagtattttcagagtcatatttgaggagtagctatttagggattacaaaatatcagtcaggtgagatgtgtccccttaaacaccatataaaaatggttcaagaaacttaagaggggcaggaggataataaaacccaggcttccataaattggaaataatggagaaaacagagctcttcaaacaactgctctagagacatcccaagagatagaaatttaagacaagatttttttaaaagtctgagtgtgaggctcaatcactattactaaataagaaaataatattacttttatatatagaacatatagttcttttaaagggggccatggatggggctcattttagtctgagaccagttgagaaattttggatggctgagatgaacacctattagtcagtggtctccagtactattatttgacctttttctatttagaactcattcaagcttatagggcatattacatttaattaattgagtgtt

SEQ ID NO: 63692 - DNA, 832 bp, Homo sapiens
ttcatgtttgggtttwtgtagctttccaatttgtggcccagtacagggcatggaataggtgtcaataaaggttgctgaaggactaagtgactgagtgagcatagccaggaaaccaaatattgaacaccatgtgcttcaggctaaaaatcttagtgttagccactaagatcccccaagtggaaaagatacaatttcagttactttcaataaaatacagtgagtacagcaacagagaaaggcatggggtgatataaaaacctacacatataagaactcaaattggccctttgacccaacctcgtgttggaaaaggcttttcacttctcaaaatatttgcacatctattagaagtattttcagagtcatatttgaggagtagctatttagggattacaaaatatcagtcaggtgagatgtgtccccttaaacaccatataaaaatggttcaagaaacttaagaggggcaggaggataataaaacccaggcttccataaattggaaataatggagaaaacagagctcttcaaacaactgctctagagacatcccaagagatagaaatttaagacaagatttttttaaaagtctgagtgtgaggctcaatcactattactaaataagaaaataatattacttttatatatagaacatatagttcttttaaagggggccatggatggggctcattttagtctgagaccagttgagaaattttggatggctgagatgaacacctattagtcagtggtctccagtactattatttgacctttttctatttagaactcattcaagcttatagggcatattacatttaattaattgagtgtt

SEQ ID NO: 63693 - DNA, 519 bp, Homo sapiens
taacatcaagcaatataattgcacttaatacaccaggcaactctaaattacatgtgtatacacatatatacacacatacgtaacttatgtatagataaaaacatacactcattccatcctcacaacagccttctttgtaaatatctagatttccattgtgcagatgggaaaactaaaggacaaagagctwgggtaactagggtctcccagctagttggtggtgaagccagaatttgaactctgacagtctggtttccaggttgtgctggtgacatccccctgccccctccacagttcacattggctttggtgcctaaactgaataaagagcacagttcaaggtgctttctgtgcccacattgcacccagtccagtggccaaatcctctgcaggtaccttgataaacatccagtaaggaccaaacaggtgcctcctgccctatttatagctcccagcatggccagctagctataattagcaaagctcccctaggactggagctaaattaaactggtggga

SEQ ID NO: 63694 - DNA, 578 bp, Homo sapiens
cccatgaaaaataatgcaggtatttttggagattcaaacacacataaaactagggcatcctgtccaccccagggagacagacaggttttcttttcttgggggacggagtttcgctcttgtcagctgtaatgcaatggcgtgatcttagctcactgcaacctccacctcccgagttcaagcgattctcctgcctcagcctcccgagtagctgggattataggctcccactaccttccccggctaatttttgtatttttagtagagacggggtttcaccatgttaaccaggctggtctcaaacccgggaccttaggtgatctgcctgccttggcctcccaaagtgctgggattacaggcgtgagtcactgcaccaggcccagacagttttttgttgttgttgtttctctctctctcctggaccagagagatctctaagtgtatctcctacctctaaagactttgccctttcagcttccattctcagcagctcagtgagacatgggccatacccagatgtataagatcagtctctaggcttcctgaagamcctgtctttcctcttcacattcctgttgggc

SEQ ID NO: 63695 - DNA, 564 bp, Homo sapiens
ttaagaattgcattattatgtacttacctaaacgttggcaagaatgctgttatttaagaataaaatcaatttcattttgggaaagagaactccttttttttttttttttgagacagagtctcactctgtcccccaggctggagtgcagcgatctcagctcactgcaggctctgcctcccaggttcacgccattctcctgcctcagcctcccgagtagctgggactacaggtgcccgccaccacacctggctaattttttttattttttagtagagatggggtttcaccatgttagccaggatggtctcsatctcctgacctcgtgatctgcccgccttggcctcccaaattgctgggattataggcgtgagccaccgcacccagccgggagctccattcttaaagacactttttgcaaacatttaccttgcaaaacatttgtagtgactcctctgtgaacaactccatgttgattgggaggtagagagaaacccactgctaaactacatccatctgtgcaggtttttctttctaataattgatattccatgaaaagaggagagg

SEQ ID NO: 63696 - DNA, 796 bp, Homo sapiens
agagatgcctgggttggagatgaactttgcccaactcccctcattaccatactaaactctcctcccagggaagagcttgcttattcaccatttcctrtacacatatgtagaagcatgatgggtaacggtgccttcactgcatttactctacctttacgtacaatgactcagctaccagcccaataaaagccctgttttcactattatttggggaggcactgctttgggaactatcccaatgttcttcttacttgctgcaagtaataaaatctctttgttaagtcctccttggttgtagtcattgagctgtcactggccaagcaatcgaactcacctgttgtgtgggtaagaaacagagccagacacaaaagtcacatactgaaggattccatttaatgagaactgtctaggatagataaatctatacagacagaaaacaagttggtagttgccaggggcggaagggaagagtaaatgaggagtaaccattcaagtggtatgaggttttcactgggggcaataaaaatgctttggaactagatagaggtaatgggtgcacaacactgtgaatgtactaagtaccacttcattgtatacaagtggtccccccttacgtaaggttttgctttctgaggtttcagttacctgtggtcaactatggtccaaaatattaaatgaaaaattccagaaataaacaattcctaattttttttttgagacagagtctcgctctgtctcgcccaggctggagtgcaatggtgcaatcttggttcactgcagcctccacctcctgggt

SEQ ID NO: 63697 - DNA, 796 bp, Homo sapiens
agagatgcctgggttggagatgaactttgcccaactcccctcattaccatactaaactctcctcccagggaagagcttgcttattcaccatttcctgtacacatatgtagaagcatgatgggtracggtgccttcactgcatttactctacctttacgtacaatgactcagctaccagcccaataaaagccctgttttcactattatttggggaggcactgctttgggaactatcccaatgttcttcttacttgctgcaagtaataaaatctctttgttaagtcctccttggttgtagtcattgagctgtcactggccaagcaatcgaactcacctgttgtgtgggtaagaaacagagccagacacaaaagtcacatactgaaggattccatttaatgagaactgtctaggatagataaatctatacagacagaaaacaagttggtagttgccaggggcggaagggaagagtaaatgaggagtaaccattcaagtggtatgaggttttcactgggggcaataaaaatgctttggaactagatagaggtaatgggtgcacaacactgtgaatgtactaagtaccacttcattgtatacaagtggtccccccttacgtaaggttttgctttctgaggtttcagttacctgtggtcaactatggtccaaaatattaaatgaaaaattccagaaataaacaattcctaattttttttttgagacagagtctcgctctgtctcgcccaggctggagtgcaatggtgcaatcttggttcactgcagcctccacctcctgggt

SEQ ID NO: 63698 - DNA, 821 bp, Homo sapiens
tccgctaggcatccatacagccttgttcatagattcattatcatatttatcacatattcttgtcgttatggctttacacatctttttcttacagtagaagtcccttgtggtgtgagaaagggtataaactgtgttccccttgattgtaatctgcagtgtcctgcattcagtaggggcttaacaattgttggtttgatgaagtttacaataaataagtaaattttaataactgatacaaactagctcacaagtgactgtggatttcctcaatttgtaagctggactctgacaaacatcccaatatggaagagttaattgattgaatagatcaccagatggaataccagatagctaaacttttgtggaacgagaatagatgcccctgaatttcattagtcttcaaatattggcccctatttccaatttttttaaaaatatcgttacttactcagctgccttccctagattccgtagactcccatatgtcttattaaattaaaggcaaaatcattaaggccaatataaactctgtawggaactagtgaaatgttacgttgcttcttttcttgagatctcctagaactggtccaggagcacttagggacaagctcagacccacctctctcaaaggtaatgatactcctgcatgtgtttcctccctatccagtctgatatccagtccttatctacccactttctctaactgagatacagagacagggatggaaatggtgattagtaacagcatggcataaatattatttaagacataaaaacagataacaacatagaaataatctggcagagtggtgaaaagtatg

SEQ ID NO: 63699 - DNA, 417 bp, Homo sapiens
agaggcagggtctctctccgtcgctcagactgtagcccagtgatccagtcaaggctcactgtagccttagcctcatacctcctgggctcaagcaagcctcctacctcagcccacccccaacccccccaacccccaatgagagtggctgacacaacaagtgcatgccatcatgcctggctaatcctggctatttaaaaaactttttgtagagacaggatctgactatgttgcccaggctggtctcaaactcctgtgctcatgggatcataccgcctcagcatcccaaagagctcagattacaggtgtgagccacggtgyccagcctcactggggtttaaaaaaaaaaaaaagcgagatttagaattgttaataaagttagatattcagttactagaagtactatatttaaaaataaaa

SEQ ID NO: 63700 - DNA, 762 bp, Homo sapiens
ataaaaaaatgttttaagtgtgtgtagggggagagtgggttggcattgcatttgtattgtacaagaacattacaaaaattaccatctattaccaccattgaatcataaaatatggagcagttttacccataaaagttagaaggaaagataaaaagaaacagagaggtcatactctcaaaatgaaggatattttaaaaacagttatatttcaattttatgaaaagctatgttgtctttattttttattttcccttggatcggtaaaacattggtctgagaaccagcttttgggaatcactsttctagaacacattctttatggtaaatgttaggtatccaacatgattgaacccacaccaggaccttcttatgagattacttccaagataatggaatttggtataagacaggtccattttggagcccattcaagggggtttatttaatgaagtagaaaagatatctcattatagggcagcctcacctataattgctctgctgagaataactctgtagcaactctctagagcacaaaaatgtggatatctcagaaagcttaatttaaataaatactagcacaggtatttctttggtgccacataatcagaaatttgggggttcccaaattctctgagtgcctgagctgtctcattgcaatctgtggatttgcatatgaatccagtatgcatttctaaaactactgctgggattcaggcattttgttattgtgttgttttttgatttgagatggagtctggctct

SEQ ID NO: 63701 - DNA, 780 bp, Homo sapiens
tttagagtgccctttaagatgaagaaatctgtcctggcatgagcctctgctgtatcaaaccagacagggcacagggtagcagaggcacccaaccagcatgtctaaaacctcccaccctaaactggaggctcatcygcaattgcatcaaaactgccaaaatagcagtgtttggggaaagggcgcaggtaagctgtgtgcattcactccatttcaggaggcaaagctgctctagaagtttaccttggtcagtcagtcccttccatccaactcaaagtggtgggagcagtgaaggggaatggtgtatatcaccagggcatacacatgcagattcccagcaacctgaggaatctgagagcagagttctggacctgcagcattaggtcacatgcagaaatactgcagctcaaaaatacaaaagacacaagactctgagaaaataattttataagggtttctataagaaaaggaattatgtctctcattaaatcatttctgggattcactatttctataaatagtggcttctacaatatttctaaaaggaaaggaatttggctctcattaaattatttctgggaaattattcaatatttcaccatataactatatattacacagttattatttctgttttccaaaataacagctacagttttttatattttaaactcaagtgaatcccacaagtactcagtacctaccatgagtatgacaccacaatggccaggcgctggggggttgtgtggcttaggactgggaaaccaaattagacctgggaat

SEQ ID NO: 63702 - DNA, 780 bp, Homo sapiens
tttagagtgccctttaagatgaagaaatctgtcctggcatgagcctctgctgtatcaaaccagacagggcacagggtagcagaggcacccaaccagcatgtctaaaacctcccaccctaaactggaggctcatctgcaattgcatcaaaactgccaaaatagcagtgtttggggaaagggcgcaggtaagctgtgtgcattcactccatttcaggaggcaaagctgctctagaagtttaccttggtcagtcagtcccttccatccaactcaaagtggtgggagcagtgaaggggaatggtgtatatcaccagggcatacacatgcagattcccagcaacctgaggaatctgagagcagagttctggacctgcagcattaggtcacatgcagaaatactgcagctcaaaaatacaaaagacacaagactctgagaaaataattttataagggtttctataagaaaaggaattatgtctctcattaaatcatttctgggattcactatttctataaatagtggcttctacaatatttctaaaaggaaaggaatttggctctcattaaattatttctgggaaattattcaatatttcaccatataactayatattacacagttattatttctgttttccaaaataacagctacagttttttatattttaaactcaagtgaatcccacaagtactcagtacctaccatgagtatgacaccacaatggccaggcgctggggggttgtgtggcttaggactgggaaaccaaattagacctgggaat

SEQ ID NO: 63703 - DNA, 642 bp, Homo sapiens
ccttccccctgcccatacttagctcagctgagtctcttggagtgggtggcatgatccatgcaagaaaggcttgacaaactgaacttcattaaaattaagaattcctctccttgaaagacatcgtcaagagaaaaataagtcaagacrtatttgcaaaacacatatctgataaaggactctcatccaaaatatacaaagaactattcaagctcaacaattagagaacacaatttaaaaatgggccaaataccttgccagacacctcagcaaagaatacatacaaatgacaaataagccaatgaaaagattcttcacattatatgtcatcaggaaaatgcaagttaaaacaattgtgagatggatgtcactacacacatattaaaatgaccaaaatccagaacactaacaacatgaaacattggctaggatgtgaagcaactggaactctgattcattgctagtggaaacaaaatcctagagccactttggaagacagtttggtggtttcttacaaaactaaacatattcttattttatgaggcagtaatcacactccttgatatctacccaaaggagttgaaaagttatgtccacagaaaattctacaaacaactgtttaaagcagctttattctttattcat

SEQ ID NO: 63704 - DNA, 821 bp, Homo sapiens
aatttttttttctttttttttgtatttttagtagagacagggtttcaccatgttagccaagatggtctcaatctactgacctcatgatccgcctgcctcggcctcccaaagtgctgggattacaggcatgagccacagcgcccagcctctagatggtaattactatagcaattctgaggaatataatttttaataatatgtcttaacttttctttgaaagtctagtttctatccattggttctctaactgcatttattaatgcttctcaaagcacatagtctccttgtacctcagagaatgtggcatttgataaccagatttcttgtctgagctggctgcaatggtgttggaaattggctctgcagctgggctggactgcagttaggaaacatgattgtagatggtgaactgtcactgctgggatgtgaaccagacwtgaatgctaagcaatagtgtccacagtttgcaacccaggaactgccaaattgacagctagactaaactgtagcagcataggaaaatgtggctagtttctccagtcagtcaatacaaagtcttatattgtactataatgaatacaatcttactgtcccaaaaactgagatgctgtcaattatgaatctcagttagattcttagcaagtatttcatgtgtgaacacccgtataagcctcataatggccctaactgtagttggtttggattagcttttacagtgaacatgcagttcattaagcttacagaaactccaacagcagctgcacatctctccatgaactatataggttttttgcattttatctaggactagatgaaaggga

SEQ ID NO: 63705 - DNA, 516 bp, Homo sapiens
ccattaaacataggcagaaaccaagctcagagtggttgagtgactagcttaaagtcatacagccaggataggtggtagagtcaggatttgaacttaggtctgcgtgactacaaagcccaccatgttgaactgttaaaatacagtcccagccgggcacggtggcttacgcctgtaataccagcactttgggaggccaagatgggcagatcacctgaggtcaggagttcgagaccagcctggccaacatggtgaaacccgcctctactaaaaatacaaaaattagcacctataggaggtgcttggtcaatgggcgctagggataatcctattctgaatgcctggcattctcgggtgactgtgagtgccctgtagggtagctcttgcagtgttttggggatggcctcttggtaggatggggagggtgaggcagccttgacaaggacttcggacatgctctgcaggacacagctgctcaggggagatgcagagttcaagcccccaygatggactcaccaa

SEQ ID NO: 63706 - DNA, 534 bp, Homo sapiens
ggcctgaagctgtaccactggagccatcagcagacgctaatattgaaggttatgggactgaatgaagtcatctagggaaatggtgtgaagaaccaagagaggagagtccatggctgaggcttcataaccccaaattatctccctctgttgtaggagctggaccctgcctggrggtgggcaggtcctcctaagacttgagggaatagatcccattcagaagttgtgaacatggctcagttaatagatacggcctgtccctcaggaaacacccagaatctgatgctgtggcatgttccacccctgaaatccctttttagccatgaagtagcattcctttctcccagcactgatctcttcccagaatagagtggccaaatgatgttttagaaaactccatgttttgggttgtcagggatatgaaaacaccaagagaaaaataaatggcagctccaaaagtctttccttcctaggagagaaggagcacctgcacactcagcccaccatgtcatattgtgttgtgattgcacgtctgtg

SEQ ID NO: 63707 - DNA, 534 bp, Homo sapiens
ggcctgaagctgtaccactggagccatcagcagacgctaatattgaaggttatgggactgaatgaagtcatctagggaaatggtgtgaagaaccaagagaggagagtccatggctgaggcttcataaccccaaattatctccctctgttgtaggagctggaccctgcctggaggtgggcaggtcctcctaagacttgagggaatagatcccattcagaagttgtgaacatggctcagttaatagatacggcctgtccctcaggaaacacccagaatctgatgctgtggcatgttccacccctgaaatccctttttagccatgaagtagcattcctttctcccagcastgatctcttcccagaatagagtggccaaatgatgttttagaaaactccatgttttgggttgtcagggatatgaaaacaccaagagaaaaataaatggcagctccaaaagtctttccttcctaggagagaaggagcacctgcacactcagcccaccatgtcatattgtgttgtgattgcacgtctgtg

SEQ ID NO: 63708 - DNA, 776 bp, Homo sapiens
ggggtcgttcagtagttgcacatacctctgggtggccatggagaatgatggatttgtaacgctaaccagcaaacagtgccaaagccagcagctcatatgggtatttttgcctgtgagttgtggtttctgatmtctctccaggatagacactcagttttgcctgggcatgatggtgcgtacctgtcatcccagctacctggggggcactgaggtgggaggatcacttgagcccgggaggtcaaggctgcagtgagccatgatcgtgccactgcactccagcctgtgcaacagagcgagaccctgtctcaaaaaaacaaaaaaagacactcagttgggagtttccactttttcatgctgttttcacctattgactgcatctgcgtttcttctgagtgtttccacagtagctgggtgttattcctgctcagtgggttgccgtggcagccttagctgtgagtgagtgacaaggcagaggtttccatttccttggctggaattagctgttaagctccccattagctgttccttttcctggtccagggatgccctgcaggactcttttccttgactgaggcatcgtcttaccttaactccccagtgggcagaaaatcttggttttaataatttgagttggtgagaatagagcaaagacacagaaggtgcttgagtttgttggggcttttgcttttgccgttaaggatggggaggaggggccctcttgtctaggatgaattgaaggtaaaggcagctaagagaaggggagtgaatgcggatcc

SEQ ID NO: 63709 - DNA, 776 bp, Homo sapiens
ggggtcgttcagtagttgcacatacctctgggtggccatggagaatgatggatttgtaacgctaaccagcaaacagtgccaaagccagcagctcatatgggtatttttgcctgtgagttgtggtttctgatatctctccaggatagacactcagttttgcctgggcrtgatggtgcgtacctgtcatcccagctacctggggggcactgaggtgggaggatcacttgagcccgggaggtcaaggctgcagtgagccatgatcgtgccactgcactccagcctgtgcaacagagcgagaccctgtctcaaaaaaacaaaaaaagacactcagttgggagtttccactttttcatgctgttttcacctattgactgcatctgcgtttcttctgagtgtttccacagtagctgggtgttattcctgctcagtgggttgccgtggcagccttagctgtgagtgagtgacaaggcagaggtttccatttccttggctggaattagctgttaagctccccattagctgttccttttcctggtccagggatgccctgcaggactcttttccttgactgaggcatcgtcttaccttaactccccagtgggcagaaaatcttggttttaataatttgagttggtgagaatagagcaaagacacagaaggtgcttgagtttgttggggcttttgcttttgccgttaaggatggggaggaggggccctcttgtctaggatgaattgaaggtaaaggcagctaagagaaggggagtgaatgcggatcc

SEQ ID NO: 63710 - DNA, 776 bp, Homo sapiens
ggggtcgttcagtagttgcacatacctctgggtggccatggagaatgatggatttgtaacgctaaccagcaaacagtgccaaagccagcagctcatatgggtatttttgcctgtgagttgtggtttctgatatctctccaggatagacactcagttttgcctgggcatgatggtgcrtacctgtcatcccagctacctggggggcactgaggtgggaggatcacttgagcccgggaggtcaaggctgcagtgagccatgatcgtgccactgcactccagcctgtgcaacagagcgagaccctgtctcaaaaaaacaaaaaaagacactcagttgggagtttccactttttcatgctgttttcacctattgactgcatctgcgtttcttctgagtgtttccacagtagctgggtgttattcctgctcagtgggttgccgtggcagccttagctgtgagtgagtgacaaggcagaggtttccatttccttggctggaattagctgttaagctccccattagctgttccttttcctggtccagggatgccctgcaggactcttttccttgactgaggcatcgtcttaccttaactccccagtgggcagaaaatcttggttttaataatttgagttggtgagaatagagcaaagacacagaaggtgcttgagtttgttggggcttttgcttttgccgttaaggatggggaggaggggccctcttgtctaggatgaattgaaggtaaaggcagctaagagaaggggagtgaatgcggatcc

SEQ ID NO: 63711 - DNA, 776 bp, Homo sapiens
ggggtcgttcagtagttgcacatacctctgggtggccatggagaatgatggatttgtaacgctaaccagcaaacagtgccaaagccagcagctcatatgggtatttttgcctgtgagttgtggtttctgatatctctccaggatagacactcagttttgcctgggcatgatggtgcgtacctgtcatcccagctacytggggggcactgaggtgggaggatcacttgagcccgggaggtcaaggctgcagtgagccatgatcgtgccactgcactccagcctgtgcaacagagcgagaccctgtctcaaaaaaacaaaaaaagacactcagttgggagtttccactttttcatgctgttttcacctattgactgcatctgcgtttcttctgagtgtttccacagtagctgggtgttattcctgctcagtgggttgccgtggcagccttagctgtgagtgagtgacaaggcagaggtttccatttccttggctggaattagctgttaagctccccattagctgttccttttcctggtccagggatgccctgcaggactcttttccttgactgaggcatcgtcttaccttaactccccagtgggcagaaaatcttggttttaataatttgagttggtgagaatagagcaaagacacagaaggtgcttgagtttgttggggcttttgcttttgccgttaaggatggggaggaggggccctcttgtctaggatgaattgaaggtaaaggcagctaagagaaggggagtgaatgcggatcc

SEQ ID NO: 63712 - DNA, 776 bp, Homo sapiens
ggggtcgttcagtagttgcacatacctctgggtggccatggagaatgatggatttgtaacgctaaccagcaaacagtgccaaagccagcagctcatatgggtatttttgcctgtgagttgtggtttctgatatctctccaggatagacactcagttttgcctgggcatgatggtgcgtacctgtcatcccagctacctggggggcactgaggtgggaggatcacttgagcccgggaggtcaaggctgcagtgagccatgatcgtgccactgcactccagcctgtgcaacagagcgagaccctgtctcaaaaaaacaaaaaaagacactcagttgggagtttccactttttcrtgctgttttcacctattgactgcatctgcgtttcttctgagtgtttccacagtagctgggtgttattcctgctcagtgggttgccgtggcagccttagctgtgagtgagtgacaaggcagaggtttccatttccttggctggaattagctgttaagctccccattagctgttccttttcctggtccagggatgccctgcaggactcttttccttgactgaggcatcgtcttaccttaactccccagtgggcagaaaatcttggttttaataatttgagttggtgagaatagagcaaagacacagaaggtgcttgagtttgttggggcttttgcttttgccgttaaggatggggaggaggggccctcttgtctaggatgaattgaaggtaaaggcagctaagagaaggggagtgaatgcggatcc

SEQ ID NO: 63713 - DNA, 599 bp, Homo sapiens
aatggagacttacatgtagagaaacagctttagagtaacttcagttggaccaaaaagctatagatttgcctgtcagatagcaaaatcaatacagacccagaaacatcagatgttagaaaatctttcctcaccagctgcaataattcattattgcaatgaatgatttccaagtttctttaattacataccactctcagaaaaatagaaaaactctggtgcacgcacccacaatatgtacatattcatttattataaattatatactgtttagaatatattgcagtcaatagttcgtatctcaaaatacaatatyaacttagggcaaggttcatcttagtggcattgaaatattaggtataaatccaaacgacaaataaccttcctgataattttgaatatttttggctgaacttcttttcagagaaggatgaactcaacattgattttaccatgtgaagtagctgcagaagagtccatctggcaagaagaagggtatcagctctgccgttttcttgtgagttgctttgttctgcattgttaatactatcttcaaaccaaacccattacaggaatcctacctatctgttgatttcatgagg

SEQ ID NO: 63714 - DNA, 649 bp, Homo sapiens
tgcatacaaatgcagtgtgtgcataggtcctataatttttagattatttgaggtaaccctgcaaaataaacataatatagaaagcttcacctaatcaatattgtagaatttgttgatttttctgccaataatcaaaaagaaataagactttgctcatgttttgcaaatttttaaaaaatagttttcatagcttcacagcaagtcttggatgtttagagttgtcaacattcagctaggaaaagctatgactgactgtttcattctgacagttcctttggaacaattatttaatgtgagaattatttaaatgtgagggtagaatgaatatagcttggtgtggcttttaaaatttagtctcaacatcttatcttccatttacatttaaaacagcgcattatcytgtgcttcctgccttccatctagagttagcccagagtttacatattgggagaaggattttgattaaagagcaaaggataaacacattaatgtgctatccttggctctgttactcgttaatcccatctgaagaaaaataatgttgttttttttttttttttttttttttttggagacggagtctggttcggttatttaggcgggagggcaggggggggaatctcgggttaactggaaggctccacctccc

SEQ ID NO: 63715 - DNA, 735 bp, Homo sapiens
aaattcgttgaggttaggaatctttatattgccaggatttagcagaatatctggcatataatagatgttcaatagatacagatcaagtgatgttctagtccagaaatataaatgcacaaaaataaaaatcctacatgtttgatctgcactcctgttggcctagtatatgtctgaagcctgcttttatttttttttcttctgcacagacaactctatgagttttgcaattttatctagaatatttctagaagaaatagtgcatttttttttccagtttatcttgtagttcaccaccatagagagttgtaattcatgggtgacattaaggatgaaaaaggaccaggctatcctttcttggctgtgtgatcttattctaattatttaagtaacttaatttacttaagttaattacttgagttttgtagtcagttatagagacataataatagtacctttcagaataaaagtgttatttccaggataaaatgaggagacataaartccatagtatggtgagttttataaaaactcaaaaaatggtaaagtaactgttttcctgattattttaactgacaatagctgtgtagtcacaaggaatctggaagctatacattcatatgcttttctttctccataccatatttaaacaatttttcaatgctgaatatagcaagagacacaatattttcaaggaaatttcagatgaattgcaagatatcttattcccagttttcg

SEQ ID NO: 63716 - DNA, 1835 bp, Homo sapiens
tctatgtaaatgattagtggaataagtattaaagcataagatatcaattggcttttgttttaaaaatacatttacataaatacgtaccaacattcatgtagaatctggccttggtacgaagatttagtggagatgaaatgcaccctgatggttatcatctgattcattaaaatactctctttactgctgagtatttgtaattcagttagatttatttcttgacatcatcctacacccccaccccccactcagggacccaatttcctctattttgcttgaaaggttgtaagtggccaagataactataagtgaaaattgtgatttcttctaaaatttagaagacacaaagtttagaagagaattggaagccagaagagattagaacatacatttcagaaacaaagtttgcaaatacgttcacgacttcggatttgcctcccctttacttctacttttgcatccataaaatttatgcacttaaaggatgacgtggtcattggctgatatataagacccataggttactggtaataatgcttccttcttttatacacaaaaaccaaaaaactcccataatataatttgatcttgagtatgcaagaatatgacagtactctgtaacactacaaatttatatcagacaaaacattcatttcttcacacatatattgggaagaatgatctctctttctacctataattaaccaaatgagcactgcctagaaggcaaaaaaaaaaaaacctacttacaaaatacagtataattttttgtacaatgtgtctaaattctacacctactgacagcttaagagtcaacagtagaaagcagatggttacttccttaaaggtatgcataattcctgtggcccaaaaacttggatgatcctgaaaatcatccagggtgctttttaaaaacagatttctggacgtggccccagacctcctgaatcagactctgcagggttacagccccaacaactggattttatacagcctgctaggcggttctggatgagtcacgcttgggaatcaatgatctagaggaaatgctgttagcacaactgcctaccaaagtcattattaaattgttttttacactaatgggatcatgtagccatttgaacacctaaatctaaggctcagggtcccaagtattgatatccactaaaaatgtaaacaaacttcacctttcacgaagtcaaaagattcccagcaagatttgaaagatgaaaaagtcagattccttccatgtgccacctcagctatcagcatgaatccaaatacrgtctctgtctaacatatctacaaagattctggacaaaatctaagacaatatatccactatggctacttgagaactttgagtatgttggaagaaaagagcactggactgggagttaggagacaggagctccgtgcccttggggcaagttacttaaccactctggattcagattcctcatttgtgaaatgagggcagagctaaatgatttctaaagacaattacaaagataagagcctgtttttgtccagaatcagagaagtgatttagaggatattcctctgattttactcggatatttatttgtccctcagtttgctcatcttcatattgtacaagtgaagtagtcaagctgcacagctacttaagatacttaaatgacataaaggaaaaggaacatattggtggaaaatccatattttttgctttaaggtatcctcacaatgaaaaattcgctaatagttcatgtagatttgaactcagcacaaacatttccataaaagagctaattaaagtatacctgataatgtttggtttcagaattagtgagtag

SEQ ID NO: 63717 - DNA, 833 bp, Homo sapiens
ctttgatctgatctgtcccactgtgtctctcatttagcttaagaacatgccttccccatcacagagtcttgtcctaagctagcctgttcatccttcagccacagctaaaaggagatgctcttactgttggctcccatgccatcaggaatggttgtaggagtgagggcgttgcgctgctgagggttgataagctggctcacagaaggcagcttgttcatgctgttcattttgttcagaggtggggagctgttaccatatgaagatggagactgtattgaggtcctaggaagacaaacatggaaataatggtgagcamgggacactgaagagtggggactattgattttcaacaggtctctgtttaaaacatggcctcaaaccaaacatttgaaaacattcttctaggattaatggtaagaagttaattttgtttccatctgagaatatttcctgaatagggagaaactgactgcgaggctatcatcaaatcatatttttcctgaatgtgcagagtgcaaggtttagtatttcctttgagaaagagaaaattcttgcctcctcttttcccttcagttgttttctccattcccttctcctcttttcccttcaactcaaatgagtttgaaaagcagttagggaaaagaattgagcaaagacttaaaggctgacgaaaaacatggatatcccaccctcaaactgcagctaaggcattccatttgtagctttctgtatattccatttgggatatgcagaaaatgactacaaacccaatcaaactgggcatttggcagctcatcttgctgtcatgcagaggcccctacttggaaacatgc

SEQ ID NO: 63718 - DNA, 833 bp, Homo sapiens
ctttgatctgatctgtcccactgtgtctctcatttagcttaagaacatgccttccccatcacagagtcttgtcctaagctagcctgttcatccttcagccacagctaaaaggagatgctcttactgttggctcccatgccatcaggaatggttgtaggagtgagggcgttgcgctgctgagggttgataagctggctcacagaaggcagcttgttcatgctgttcattttgttcagaggtggggagctgttaccatatgaagatggagactgtattgaggtcctaggaagacaaacatggaaataatggtgagcaagggacactgaagagtggggactattgattttcaacaggtctctgtttaaaacatggcctcaaaccaaacatttgaaaacattcttctaggattaatggtaagaagttaattttgtttccatctgagaatatttcctgaatagggagaaactgactgcgaggctatcatcaaatcatatttttcctgaatgtgcagagtgcaaggtttagtatttcctttgagaaagagaaaattcttgcctcctcttttcccttcagttgttttctccattcccttctcctcttttcccttcaactcaaatgagtttgaaaagcagttagggaaaagaattgagcaaagacttaaaggctgacgaaaaacatggatatcccaccctcaaactgcagctaaggcattccatttgtagctttctgtatattccatttgggatatgcagaaaatgactacaaasccaatcaaactgggcatttggcagctcatcttgctgtcatgcagaggcccctacttggaaacatgc

SEQ ID NO: 63719 - DNA, 829 bp, Homo sapiens
caccacacctggctaatttttgtatttttagttgagacggggtttcgccatgtaggccaggctggtcttgaactcatgacctcaggtgatccactcgcctcggcctccaaaagtgctgagattacaggtgtgagccaccatgcctggcccaagtaaaatcttaaccctatatttacttctctgttgtgtttattgttaatcttccttacttaaacagaagctttcttttctccctctctctctctttttttggggggtcttgctctgtcacccagggtggagtacagcagcgcagtcatagctcagtgcagcctcaaactcctgggctcaagtggtctttccctctcatcctcccaaagtgctaggattacaggtattggctgctgagctcagccctgattttaagctttctaagtgcaatactgtttgcctgttttgtgtattgctgtatttctggcacctagtagagtgcctggcatatagtagttgtgcaataactattaaatgaatgaatgaataataagagttttaagacatatatatatgaaagcagggaatatcagcccttagctttctggccaaaacaaaggagaaaaacatgaagctcacaagattcccaatgactacaagataaatcatactagatgctttggaaagrcctagatgtttctggaatgatttactgctatcacttttactcttttcttatcctccccccatcatcttcctagagggtaagagattttccatggtttaagttatgtcttacctcattccttgccaagcctggaagatcctggaaactactaagtgctccaaaaatatttag

SEQ ID NO: 63720 - DNA, 519 bp, Homo sapiens
aagtgattgatcaggagctgctttagattacttgtctcatctcatccttaaaccagtcttataagacaggtcttatcagccttgttatacaaatagggacgctaatcacagagagatgctaaataattttcccaaattcactcaattaacttctctttccatgtggttccattgtcccctgtgtattcaccaccaccgtatttctcaaactgcacatttatcattgggtgtttagccactttcctttcctgattcaaggggataaactgtgtctacctcaatgtggaacccccagcacctggcgcggtgatagactcaccatcaacacacaatgatgcttgctaaataaragcacatgcctgacccgctgttcaactcctggtgtgattgactctaaatatgaagcccctccccacgataatgggaattgaccctgaagtcatgtgccagttttaaaatcgactcacaaacaatctgaaacttttccattgagtctgttttccatcttcctgaatctca

SEQ ID NO: 63721 - DNA, 741 bp, Homo sapiens
cagcttgactgctccctggcccccagcaataagcatatgtgttaggtttttgttttggtaaagccccatctccagatgccaaatatgttgtgattgctattgctaccaaaagaaaaattacccccaaaatttaggaaattaaaaccattgtwtttctcccacaattttgtgggttccattttgggaaagctcggcaggatagttttcacttggggtctctcctgccgttgcagccagatgttggctagaactgcagtaatctaaaggcttgactggactggatatcaaagatggcagacctgtctgtctggaagttgatgcggtagccaggaacactgctgaggctatgattggaacgcccctgtctggcatttccagcatggcagtctcagagtggtcgaacttcttacatggtggctggatttgcccagagcaagtgtcccaagagagccaagcagaattggtatggctatgacagccatctagtggtatggccgtgaaagccttatggcatcatttctataggttagaagcaagtcaccaagtttagcccagattcaaggtaagagggcagagactccacctcttgatggaaggagtgtccggtaatttgcagatgttttcagactttcacagtgacaaatacgacaaaagtagaagccaacacttagtcccatatgcagccacttaaaggccctataggaccagccagctacctggtggcaagttgattacacaata

SEQ ID NO: 63722 - DNA, 689 bp, Homo sapiens
atgctttataagataaaaaaattattaatcccttattttcctcattatattatagttgctttataggtgactaataagtctcaggtgagtcagtgatataacattagattcttacatggggatcagtagatattcaagacaacctgttatttaaacctcaaattctggctttaccagaaagatctgcacaatggcagtcatcccagttctcctattcataagcttcagacctgcctgtataccctgctagctgactcaacatgaatgggagctttcagtagatgttgagcgaatatgaaagctggagaactagatggaaatctatggaataaattaccaattttttaagttgcagtgaaacaatttttatcttttttttcggattaaacatacycataatttggaaggttgaggcctcccaaatttgggaggattgcttgagcctaggagtttgaggctgctgtgagccataattgcaccactgcactccagcctgggagacagagcaaggccctgtctcaaaacgaaaaataaaaaacatatccagagagctgtaatatgttaagaaaagagagaggtattccaatgtcctagcagcacagttccaaatggcttacttctgcctaatcattcagatgttaaactacaaaatagtactagtgtgtgataaatatggataaaaggtggtg

SEQ ID NO: 63723 - DNA, 518 bp, Homo sapiens
ctcacctggtcatgagattgggcttggataacaacctcttgttctcscctgtctctgtttgttcaaggattctgctgtctacccaagagaacccaggaactctgagcaaccacactggcttcagtcagcttgcaaaactggcttttaggcttgttacctgacatacattctagaaatgaaccttctttggtacaaagatctccactgaaatttcctaaaagacatcattcccctgtaccccaagggaacctattcctagataagaatgcaaactcaccgtgaaggggtcgtaggaaggttctgggggagctgaggttgtgctctcatacaaggggttcgagatattctcaggctgctgcttgccaagagctgcaacattaatgtcctcttccgactgtttggaaagacaagcatgaaagccaggagcatccccaaagcaggagcgtctcagccaagttggcaggtaaagcaagccaccctttgcctctgggagcttttccttttttaacagtactttg

SEQ ID NO: 63724 - DNA, 1079 bp, Homo sapiens
catgataaacttataatttaataggagtgtgaatacaggttgtgcttggaatggttgtggatagacaggggttctccagccctggagaggcagtttgtgggaacagaagactaataactgtcccctgtatgaatacttcagccycacttctttccttagctagtacttaacctcactttcctcagctgtaagtgagagcaataacaccaactttggtgtccattaatggaagtctcttttctccatgcctgccaatgaggcttacaggaggtgcgctgactctacaggagcacctcattgtgtgtatttaggggatggcagggaagactggaatcactcatcttgagccaatggttaccgtttcattaaacggattgagaccctaatgggactgttgggaggttagctagagagggcccaccagaggtctatttgcatgaaagatcaggagccttctaagaaggttcttattctaaggaatcacttagttactgtaggacaaagccaattctgaatgttgcatgttgctactcgctcagatttgaagagtttatgtatcatgttgaaaccagaactaagtttttttttttctcttttttttttttttttttttggagacatcttactctgtctcccaggctcgagtgcagtggctcgatctcagctcactgcaacctccccctcccggttcaagcaattctacagccccccaggtagctgggactacagccacgtgccaccacgcccggctaattattgtatctttagaagacaagttttcaccatgttggccaggctggcctcaaactcctgacctgaagtgatctgcccgcctcagcctcccaaagtgctgggattacaggcatgagccactgcacccggccgagtaagttcttttgacttgacacagaagtttttatgagacgtgatggggaaaggactaccctgcacggcttgaacctttctgtgtgttggcacatcggagagtgcacctgaatatctccccattgtaggctgagagaacacgcacgcatgggctttgcatgggggttaggagtcttacagttttatgcatagaa

SEQ ID NO: 63725 - DNA, 664 bp, Homo sapiens
aacaaaaaagattgccttttaatatttgattagcatttgggtaatatcccaaatccaatcaaagtgatccagctataattttaggaaagcaaaacttccacatgactgaaccgaagaaaccttaaacctcattgactataatatgctcttttgggaggcagaattattgtgggtggagagtgcatgatacatatgaaaatggcaggttggaaagcgttagtcatgtgtccccaagcaaaagaggttttaaccagctaacgttcagcccacttggaactgtttacccccatggaatgtgtgtatcaaggaagtgccattaaggttatttagcctgtccctggcaatgattccatgttccctgtactaccttcccatgtttatttgccttctcacaggctactgcagtcagcctcactggatgccatttagtctcctaaatcatatgggggatttasgagtcatttaatttaatgtcttcccaatacaggaatgcacctgctatggtttgaatgtttatgtcccccaaaattcatatgttaaaattgaatccccaaagcaatggtattgagaggtgaggctcttgggagatgattaggtcatcaaagtttaaccctcatgaatgggtaagtgcccttataaaagaggcctaagggagtttgttcac

SEQ ID NO: 63726 - DNA, 1126 bp, Homo sapiens
cataactgatatctgaacaacgaagattttaaagatataatgactaatgtcattaacaaatgaaattgctctcagaatactgaaaagatgcaatgaggaaaaaacgtgctattaatattttagaagtgcttgctctgggaacacaacatttacaactccactaagagaaaacaaagggaggcagtatgaagaccatgaaatataaacaagtttttgtttgccaatgcagttgtacaacagtatgaaaatcaacaataaatactttatggcattctggtagcaaaagaagccaagcacttgggtcaacctgccattttttctctattcatgttttgttactgcttttgctctttcctcctaatctacaacttcttatcatttcttttcccttttgcctatgtttaatgtctgtttttatctaagmctgctattatcattcatctaaagggtcctttcctttttctaggcactgtattgagaaaatgtctaaactggcctgagataaccttgaatcactgttgtcaataatgttgccaaacataattccatgattcaatccaattatatattatctcaactttactcagcctttaaggggtttttttttttttccaattgtcagttctctgatttcaactacttttcctaaaagattctctagttcaaccaaatatttgttctataaaacttgatcacacatctataatatttattaatatagtacctgatatactaaaagctgcccctttaacagtatatagcctagcaagagtgacaagccctgtaaaatgtgctaagtagtttataatgaaaacacatactgaaagctataatgtaattaactagcagttaccatttgcccaactccatgttaaagacttttcaagacaccatttcgttttatcctcaaggaagaggattttgccccatttttaaaaatgagaaatggagattgttcaaggacacatagccagtgcatggcaaaagagaatttaaagcaagattttattaattccaaacctaggggcttaacagttacaagtcttaaaagaataacaaagtatgagcccaatagaaaagggctatcctgtgtttatactatattcatatcctcctatatacatgc

SEQ ID NO: 63727 - DNA, 753 bp, Homo sapiens
aattaaaaattaattacattaatgaattaaaaggaattcaytgttatctgtgaagacactgtaaaatagtagtaactaacaaagagtaaattcttagaatactggataaatatttggaacatgaacaacagtcatttaaattattttgctgctgttgttgttaaagaatatgtgctttaagccaccaccgtaaactagataaacctcaatatgtatcctctcaaagatgattttgaactttttcatgtgatactaaagaagattctgtaaatgttacatgaacaacagtcatttaaattattttgctgctgttgttgttaaagaatatgtgctttaagccaccaccgtaaactagataaacctcaatatgtatcctctcaaagatgattttgaactttttcatgtgatactaaagaagattctgtaaatgttacatggcagacgttaataatgaagcacttcaataaatagcaaataatcaatgagtgttagctgttatgttttaatatccctttgaatatttttaccaaattaaagtattaaagtttctataattttatttaaaaattaactataatataacatggatttaaaatgaaaaatggaataatttagataatttaaagtgactttctttatattaaaaacatactgtctatatttagctattaaacataccattaactaaaaaagagaatttaaattaccttactttatcagttttaacatataaaagttttaaaacacatttta

SEQ ID NO: 63728 - DNA, 795 bp, Homo sapiens
  misc_feature (1)...(795): n = A,T,C or G
gaacacattcagtctagatcttattgctgatacgttcgtgtttaacttgttggagtgttataccccacaaggagttccacaaaaattacggaggttataaaggtaaataaatagttttgtaactgttctaacacaacttgagttcactgttatttaattattctattatttcagtacccatcagaataataagctgttggtcatctcatcaaggtcaagggtagcagtaagatggaaactttagattttaaaacactcttaactgagggttccttaaaagagtaataattccaaccccttgagtattaaacanatagtaacatatatatggccgaatccttctctttatccaattcttacatatatatatatatatatataatawatccatataaaaaaacatatagtcacagactcacaccataagctggcatcaatgaatacatatctttaacattcagaaagaattcactttcctataatctgggcaaaggaaaagtgaacccctagagttatgaccacaaaagtatctaagaaatgagccaaaaatattaccaacatctaatgtcaacacaaagatagccaaaatactaatggaagttacattttctccttagcatattcagtgctttaagacatgtctagggtattcatagtaaatcaaacaaaaacaatttcaaggcaatagagatagtatgtgcacagactgagctgggaaatagtgacggatgctcaatgaggtcacagaacaaatcaacacagctgccctactgactgttcactagccaccctgga

SEQ ID NO: 63729 - DNA, 795 bp, Homo sapiens
  misc_feature (1)...(795): n = A,T,C or G
gaacacattcagtctagatcttattgctgatacgttcgtgtttaacttgttggagtgttataccccacaaggagttccacaaaaattacggaggttataaaggtaaataaatagttttgtaactgttctaacacaacttgagttcactgttatttaattattctattatttcagtacccatcagaataataagctgttggtcatctcatcaaggtcaagggtagcagtaagatggaaactttagattttaaaacactcttaactgagggttccttaaaagagtaataattccaaccccttgagtattaaacanatagtaacatatatatggccgaatccttctctttatccaattcttacatatatatatatatatatataatagatccatataaayaaacatatagtcacagactcacaccataagctggcatcaatgaatacatatctttaacattcagaaagaattcactttcctataatctgggcaaaggaaaagtgaacccctagagttatgaccacaaaagtatctaagaaatgagccaaaaatattaccaacatctaatgtcaacacaaagatagccaaaatactaatggaagttacattttctccttagcatattcagtgctttaagacatgtctagggtattcatagtaaatcaaacaaaaacaatttcaaggcaatagagatagtatgtgcacagactgagctgggaaatagtgacggatgctcaatgaggtcacagaacaaatcaacacagctgccctactgactgttcactagccaccctgga

SEQ ID NO: 63730 - DNA, 736 bp, Homo sapiens
tgggctgtctcacatcatgcttttgaatatgttctrccttagccaaagttggcctcccccattttgtctatctgggtaaatccttctgcgatcatcctctaataggtaaaggttcctcctctaggatttttttcttgactctcacaaccaaggatttttgagttcttctttattaatgtcctacggctgcctcaggacatgttctgtgagttacagatatttatttcattcttgactctgaggtctttagtgtcaggaactgtgacttcaacctccttaccaccacttcttagtctggctcctggcccatgacagatagtcagtaaatgtgaaattccggaggaaggagacggtggagggggaaattcatctccattcgtcttttaaaaaaaaaaatctacatcttgctaagggaattcaaggtcattctcttgcccacccttagctaaaatgcacagtaagctggattcttgctcaaaggaagccttgtaatggagaatattttggataccaagattagttttatgagacaaggtttatgattaaagttgagactaaatttctcatatttaatcatggaatctttgagaaagatactagtaagaagtaatatagcataggcatcaagaacaccaatcatggagacagactgccctggttcaaatcccagctctgccatttacaagctttattatttggcaagctgtttaatagctcagcttctccagctataaaa

SEQ ID NO: 63731 - DNA, 672 bp, Homo sapiens
  misc_feature (1)...(672): n = A,T,C or G
atagaagtgctcctgatcactgcataaatatgcagcaccatgcccagtacgtatagatgctcaaatatactaactattctcctagaatcagtgttccccaacctttctgtcaccagggaccggttttatggaagacaatggaatggtatggggttggagggcagggatggttttgggctgaaactgttcaacctcagatcatcaggcattagattctcataagaagcatgcaaygtgtatcccacatgtgcagttcatgatagggttcatgatcctatgagattctaatgctgccactgatctgacaggagctgagttcaggcagtaaagcttacacacctgccactcacctcctgctgttaggtgatcataacaggccaccaatcagtactgttctgcagcccaggggtcgcagactgccttaaatgattatagcctatgttttcttaactaggctaattaacattagtgaagattaatttgttttgagatcagaccagcagctaagccaaatgaatgaggaaacagctgatttggcaccagcatgttcatgaagaatgaacagtctatggattcagaagctaaatatatatgtactgaatattatgtttngcacttaatagcaacatgacttttggcaaaaactccaactgagggccggtatattcactg

SEQ ID NO: 63732 - DNA, 2105 bp, Homo sapiens
taataccaactgactagctagaaatgatagcttaaatgggcattaaagtataatagtaagagaataaagatagttaaaacaaaataaatggatataattatgttacccattattccacaacacacaaatacacacacacacacacgcaatctgtgtgtgcaaaatcaaactattcctattatgaacttaactttaaaatagaacaaaagttacatcttatttcaccatcataatcgaactaaggatggatcatgatttatttggtaccattaatgaccacatgagcctaagaattgtgtaatcctaagaagatttattaataaatgacccatagcaattttctaatataaaatgccgaattgaaaatggtttggagagagtaaaattcccaaagtagcatatgttcaaaatagtttccagaccacaaaacagaattaagacgaaggttatcacaggctaaacctatcaagaggattctgccgtctcattagtgtgcactatctcatactaataccagctggctcatgagactgtacccaagaatgaccacaaaagcaaaacagtctgcagcaaaaactgttacaaactgaaatctaggtttcctccttctttcaaaggaatatgaagtaaaagatttgatttccataaaataataaattaggaaacaatgacctaaactggagatatttttggaagactgtagcaattagtcagacggtaggtcattcctcttcctattttgcgtcaggatgcacacagatagtcttagaaaagacgtatgacgtctgtttagaaatttctctttgatgagcgactttacttgttttatgtctttattaatctaaaaggagtttactctgatttgggatgcaccctattttaaagtttcctttaacttttcctcttttagaataaatgcagctcatttgaaatactctgaaaatgcagtaaagcagaaaaaagaaagaatgacataggatcttttccctcaagtgatgaatattttgatatgctaagtggcttgaatgcctctgagaaatatcttcatatgattactctgttggttaaatacagacaagtgtgattaagtgtaaatctacacatataccataaatgaccaccggattggtgaagggcacagggggtgccagcactttgttaccgcaaattgaggggagcacttgtgagccaccctgtgtactgccagcattcttaattgagtggaaggcacagggacaagaaggcataacttggaccattattagaccttgttaaaacccagctacattgcttttctaggcaggaatgctttcttggcacactcctttccaatttcattatattttcattttcatgtgttgggcatttagattctagctctttaagtgaggatccttgagctcctcataggattttgccttcattttggttagtaatgcgaaacgcagaggatgtctgaataaaatgtcaagtaggtgggaggatgactcaagaactactcagattggatcacagtcctgccataaatgcattaaaatcctatcatgttaacccattaggcagaacttttcttcttctttcagttgccatcttataaaatgtcaattattttgtaagcataagaaaagtagttgcctaacaattccactaacactgartataaccccgaagataagacttatttcagaacttcaaaaagctgatgactttcagactgagactagttgtgtgtgcttttgtattagacagaagtccttctgataacctcctcattactaaaaattgaagagcacggtgcactaatctgtttatattgggtctttatccaagtacacaccttagtcaatgtcagaatatagaaagaaaaacctaatattgattttgaagcacggagatactaaaagtttaaacaactttttagtggcatttttttccacgttaagatttaagaaagaagacaccagagatcactttgatgatgtacttgattggattacttgactgagcccatagtgtatgaatatgttgatgaatattcttttattatagacaaaaaagtattatccccaagactattctggaaaagagaatctccattttatttt

SEQ ID NO: 63733 - DNA, 718 bp, Homo sapiens
tcctaagaaaatttatacaccttaaggaattatcgcaaaacaaatacctccacaactactactcagaataatatacttttttttttttttgcaaaatagattactactccttcatttgtcttcaaagatacccactatttggagtttacttttcttaatgttttgatatttatatacccactctgtggtaggccaataatgccttctaaaggcatgtccgtgtcttaatccatggagcctgacctcctttgaagtagggcattgctgatgtatttaagaaatttgaggctgggcgcagtggctcacgtctgtaatcgcagcactttgagagaccgagrcaagtggattcacctgaggtcaggagttcgagaccagcctggccaacatgatgaaaaccccgtctctaccaaaaatacaaaagttagccgggcatggtggtggcgcctgtaatcccagctactcgagaggctgaggcagggagaatcacttgaacacaggaggtggaggttgcggtgagccaagatcgcaccattgcactccagcctgggtgacagagcaagactctgtctcaaaaaaaaaaaaaaaaaaaaaaagaagaagaaagaaagaaatttgagaggagatcatcctgcgttatctgagtgagccctaaatgccgtcacaagtgtcgttgtaaaaaggagacagagggagcagaaggcaatgggacgacggaaat

SEQ ID NO: 63734 - DNA, 1163 bp, Homo sapiens
tcaataaaattatttcaaattatgctatggaagaatgtgtgggacaattggagcatgctcaaaacatagtgaatgtctgcaatcatttagaaaaactgtattttagtatttatttaagccaaacagatgctctccctgtgactaagcaatgttcctgtaaatatatataccacagaaatgtatccttataatcatggcacctttctttataatggctaaaacagggaatgtatccaaatgtttgtcaacagtagaatgaataaattctaaaatatttggaaagaaagctctcaggacagggcagagtgggataacatattcaaagtattgaaagaaaaaattctaattaagaacacttatatttgctaaaactctccttcaaaataaaggaaagacaaaaacattcctttatctctcctttgacttcaatttatactgcaaggatacagtaacaaaaacagcattttgctggtataaaaataaacacatagttcaatggtacagaatggggaatctagatatatagccaaacaataacaacctttgacaaatcagacaaaaacaaacacatacataataaatggtgctggaaaattgggtggccacatgtagaagaatgaaactcaccatatccaaagattaactcctggtagattagagactaaatctaagacctgagacagtaaaattctagaagagaaacctaataaaaaactcacaataaatcacagaggaaacagacattatatagaatgtgaaataaattccaaactatacttacgattaagcagtaatatgcagactctgcagggaactcaaaaaaatcggcaagaaaaaagaatcattaaaaaatggggaaactgccctttaactttggcttttattaaaaggaaggcctgaaaagacctcaaatttttatcagtatttagataagggrgatatattttaatgaaaataaatgcaaaataatatatttgaagaatggtatgtctacatatgcttgtatacatacatgtatgtacatacataaacacatacaatggaatgatacttagtcatacaacagaataaaatgctgtcgttactgtcaacatggatgatcctggaggatatattaagtgaaataagccaggcacagaaagaaaaatgctgcattatttcat

SEQ ID NO: 63735 - DNA, 641 bp, Homo sapiens
cctgtgtagtggctgtgaatatcactagaatgactgaagaggggatacattgccatttttctgggccccggagatattttcatttgcacaatgtaggtgtcaaaccagttgttaattaaagcctttccatcagttacgatctgagacttgsgtccatggctcagccttgccctgtcacttgttaccactgtggcctcatcagttgagagcggtgatgagtttctcctgattttcctcctcctccttcttcctaaccaataacctgtatttggtagacgtctgtggtatggttagggtgtgtttgtgtgcacctgagagctgtaaacctggacattgggaaagttgggaaggatgaggcaggcaagtaccttcactgagccaaatctggtgctaatgcctttgtctgtctgttgcagggcccaacatctgtaccacgcgaggtgtgagctcctgccagcagtgcctggctgtgagccccatgtgtgcctggtgctctgatgaggtaaggagcagataccagaccttgtttcttctccagactaagctgcttttgtgcagaaacagacccatgaagttatcacctccctcttgaatacacatgccccttatcccttctaagcaaaactttgatgaatttttcc

SEQ ID NO: 63736 - DNA, 738 bp, Homo sapiens
gattatgggactttttttatactagaaaatgaataagctatcaaagcctaagaaggctatatcacaagggaacagaaccaatttgaggagactggcctcaaggtgagataaattgaaactcaaaatagtagcarccgtagtaacaataatggctgcagtttattgaaatacatagaatatattaaaacacatgagtttataatgatactttaaaaatttggagaatatcaggacatcaagtcattattctgaaaattgagaaataaaggagaaaaaaatcatttatcctgcctttcttctattaactgtatgtcaaagtaaccaaattagtcaattaaggaaaattccttcttcgagaaaaacccaaatactttctataagaagcatagattaaaaaaaaaaatcctgccttgtaaccttaaaaatagctaaaagctttagatgaaagttggtgagcaacttcataatggagggatcagactgacatagcctgaacttcacacgcatcttagcattactaagagtggcaactaggtagcatgtgccttctaactgggacagaataaaaaaatacacagtacatttgcctgaagtaaactgaacctgaatctaacaagatctaactaccagattctaggaaaaatggatgataggggaatcaattaaataatgttataaagaagaattaaatccagaatgtggcatatcctatgggacttggtattgtctttttttttt

SEQ ID NO: 63737 - DNA, 738 bp, Homo sapiens
gattatgggactttttttatactagaaaatgaataagctatcaaagcctaagaaggctatatcacaagggaacagaaccaatttgaggagactggcctcaaggtgagataaattgaaactcaaaatagtagcaacmgtagtaacaataatggctgcagtttattgaaatacatagaatatattaaaacacatgagtttataatgatactttaaaaatttggagaatatcaggacatcaagtcattattctgaaaattgagaaataaaggagaaaaaaatcatttatcctgcctttcttctattaactgtatgtcaaagtaaccaaattagtcaattaaggaaaattccttcttcgagaaaaacccaaatactttctataagaagcatagattaaaaaaaaaaatcctgccttgtaaccttaaaaatagctaaaagctttagatgaaagttggtgagcaacttcataatggagggatcagactgacatagcctgaacttcacacgcatcttagcattactaagagtggcaactaggtagcatgtgccttctaactgggacagaataaaaaaatacacagtacatttgcctgaagtaaactgaacctgaatctaacaagatctaactaccagattctaggaaaaatggatgataggggaatcaattaaataatgttataaagaagaattaaatccagaatgtggcatatcctatgggacttggtattgtctttttttttt

SEQ ID NO: 63738 - DNA, 566 bp, Homo sapiens
atgaaacagcaatggcaaaacattaataattgtcaaagctatgatggtacatgagggttaattatatcattctstctgcttttgtgaatttttgaaaatgttctattataataatcttaaaccacgtacagaaaattgcaaacatttgaatttttttggcttgtcttcacatcattaaaggtaatgtaaaattggttatcacctggattttttaagtggtaaatcatatatttgtttggtttttgaggcaccaaataatccaaatttaattcaaaattttctgctcttcttgttcttggggtttcaagcaaaatagaggggatcatttgttatttaaaaatgtaaacatatacaaagatagcaagaactgtctttgtatacagcaaagatagcaatgaactcccatttatcaattacccaatttcaacaattatcaatacacagctcatcttaggacatctgtgtccctaactacttacccaactagcttattttgaagtaagtctcagactactgtatttcttctataacatgtttggtgtgctcttctaatcaaaaccataatg

SEQ ID NO: 63739 - DNA, 566 bp, Homo sapiens
atgaaacagcaatggcaaaacattaataattgtcaaagctatgatggtacatgagggttaattatatcattctgtctgcttttgtgaatttttgaaaatgttctattataataatcttaaaccacgtacagaaaattgcaaacatttgaatttttttggcttgtcttcacatcattaaaggtaatgtaaaattggttatcacctggatttttkaagtggtaaatcatatatttgtttggtttttgaggcaccaaataatccaaatttaattcaaaattttctgctcttcttgttcttggggtttcaagcaaaatagaggggatcatttgttatttaaaaatgtaaacatatacaaagatagcaagaactgtctttgtatacagcaaagatagcaatgaactcccatttatcaattacccaatttcaacaattatcaatacacagctcatcttaggacatctgtgtccctaactacttacccaactagcttattttgaagtaagtctcagactactgtatttcttctataacatgtttggtgtgctcttctaatcaaaaccataatg

SEQ ID NO: 63740 - DNA, 566 bp, Homo sapiens
atgaaacagcaatggcaaaacattaataattgtcaaagctatgatggtacatgagggttaattatatcattctgtctgcttttgtgaatttttgaaaatgttctattataataatcttaaaccacgtacagaaaattgcaaacatttgaatttttttggcttgtcttcacatcattaaaggtaatgtaaaattggttatcacctggattttttaagtggtaaatcatatatttgtttggtttttgaggcaccaaataatccaaatttaattcaaaattttctgctyttcttgttcttggggtttcaagcaaaatagaggggatcatttgttatttaaaaatgtaaacatatacaaagatagcaagaactgtctttgtatacagcaaagatagcaatgaactcccatttatcaattacccaatttcaacaattatcaatacacagctcatcttaggacatctgtgtccctaactacttacccaactagcttattttgaagtaagtctcagactactgtatttcttctataacatgtttggtgtgctcttctaatcaaaaccataatg

SEQ ID NO: 63741 - DNA, 566 bp, Homo sapiens
atgaaacagcaatggcaaaacattaataattgtcaaagctatgatggtacatgagggttaattatatcattctgtctgcttttgtgaatttttgaaaatgttctattataataatcttaaaccacgtacagaaaattgcaaacatttgaatttttttggcttgtcttcacatcattaaaggtaatgtaaaattggttatcacctggattttttaagtggtaaatcatatatttgtttggtttttgaggcaccaaataatccaaatttaattcaaaattttctgctcttcttgttcttggggtttcawgcaaaatagaggggatcatttgttatttaaaaatgtaaacatatacaaagatagcaagaactgtctttgtatacagcaaagatagcaatgaactcccatttatcaattacccaatttcaacaattatcaatacacagctcatcttaggacatctgtgtccctaactacttacccaactagcttattttgaagtaagtctcagactactgtatttcttctataacatgtttggtgtgctcttctaatcaaaaccataatg

SEQ ID NO: 63742 - DNA, 570 bp, Homo sapiens
ttcccaagtcttttgcaatacaagggttccattccccaccccacctccaatattttcatctttgtaaatcgaatggatagaaattaattgcatgacatttttttttactaaacattgtgctgataactcttcacaaataatggaatttagttacctcaataatgctattattagctccgtattatagatgaggagacaggtttagagacattcaaagaattacctgcagttgcacagctactcagtggtggaactgagatctaaacccaggcaagctgggtctccagagtctaagctcttaactactaaattgaacctcttcctagtgttgtttacagctcacagttattagattactagtgaggctgcacatctatccaaaaagataatgtacatctatttatcaaggatactatttcccaaacccctgaaggagaggcaacatagcagtgattgaaagcataggacttgacatcagtctctttgcattcaaatctggtttgcccacttactaagtgtggctatgaacaaatagctctctgaagtgaggctaataatatgcctrctctt

SEQ ID NO: 63743 - DNA, 763 bp, Homo sapiens
gctaaggcattttgctcttttttaaaaaagaaacaatggaagcatcaactaaaaactaattttaaaaaatggttaccygtagaagaaagggaagagggataaatttcaggatggaagtaagactttgtaaatgtagctttttatatgattgttaaatcaaaattatataaggtttgatataactgaaaataaaatttaaaataaccaaatcttaaactgaaactgtttaacataagcatacattggttaaataagcatacatgaaaaactttaaatgccttaaaaaataaaattttttgccaaatcttcatagattaactggatttatagtcattattagtactaatatcaatatttttatgttgaaactattatatatttaagataaagcaattgaaatgttaatattacttggaattaatatttttagtaaaatagaaaagtgatacaagtataaaataaaaaaattcaaaggctgggtgcggtggctcatgcctgtaatcccagcactttgagaggccgaggcaggtggatcaactgaggtcaggagtccgagaccagcctgcccaacatggtgaaaccccatctctactaaaaacacaaaaattagccgggtgtgctggtgtgtgcctgtaatcccagctactcaggaggctgaggcaggagaattgcttgaacctggtaggcagaggttgcagtgagctgagatcacaccactgcactccagcctgggtgacaaagcaagtctccatctaataaaaaa

SEQ ID NO: 63744 - DNA, 763 bp, Homo sapiens
gctaaggcattttgctcttttttaaaaaagaaacaatggaagcatcaactaaaaactaattttaaaaaatggttacctgtagaagaaagggaagagggataaatttcaggatggaagtragactttgtaaatgtagctttttatatgattgttaaatcaaaattatataaggtttgatataactgaaaataaaatttaaaataaccaaatcttaaactgaaactgtttaacataagcatacattggttaaataagcatacatgaaaaactttaaatgccttaaaaaataaaattttttgccaaatcttcatagattaactggatttatagtcattattagtactaatatcaatatttttatgttgaaactattatatatttaagataaagcaattgaaatgttaatattacttggaattaatatttttagtaaaatagaaaagtgatacaagtataaaataaaaaaattcaaaggctgggtgcggtggctcatgcctgtaatcccagcactttgagaggccgaggcaggtggatcaactgaggtcaggagtccgagaccagcctgcccaacatggtgaaaccccatctctactaaaaacacaaaaattagccgggtgtgctggtgtgtgcctgtaatcccagctactcaggaggctgaggcaggagaattgcttgaacctggtaggcagaggttgcagtgagctgagatcacaccactgcactccagcctgggtgacaaagcaagtctccatctaataaaaaa

SEQ ID NO: 63745 - DNA, 763 bp, Homo sapiens
gctaaggcattttgctcttttttaaaaaagaaacaatggaagcatcaactaaaaactaattttaaaaaatggttacctgtagaagaaagggaagagggataaatttcaggatggaagtaagactttgtaaatgtagctttttatatgwttgttaaatcaaaattatataaggtttgatataactgaaaataaaatttaaaataaccaaatcttaaactgaaactgtttaacataagcatacattggttaaataagcatacatgaaaaactttaaatgccttaaaaaataaaattttttgccaaatcttcatagattaactggatttatagtcattattagtactaatatcaatatttttatgttgaaactattatatatttaagataaagcaattgaaatgttaatattacttggaattaatatttttagtaaaatagaaaagtgatacaagtataaaataaaaaaattcaaaggctgggtgcggtggctcatgcctgtaatcccagcactttgagaggccgaggcaggtggatcaactgaggtcaggagtccgagaccagcctgcccaacatggtgaaaccccatctctactaaaaacacaaaaattagccgggtgtgctggtgtgtgcctgtaatcccagctactcaggaggctgaggcaggagaattgcttgaacctggtaggcagaggttgcagtgagctgagatcacaccactgcactccagcctgggtgacaaagcaagtctccatctaataaaaaa

SEQ ID NO: 63746 - DNA, 763 bp, Homo sapiens
gctaaggcattttgctcttttttaaaaaagaaacaatggaagcatcaactaaaaactaattttaaaaaatggttacctgtagaagaaagggaagagggataaatttcaggatggaagtaagactttgtaaatgtagctttttatatgattgttwaatcaaaattatataaggtttgatataactgaaaataaaatttaaaataaccaaatcttaaactgaaactgtttaacataagcatacattggttaaataagcatacatgaaaaactttaaatgccttaaaaaataaaattttttgccaaatcttcatagattaactggatttatagtcattattagtactaatatcaatatttttatgttgaaactattatatatttaagataaagcaattgaaatgttaatattacttggaattaatatttttagtaaaatagaaaagtgatacaagtataaaataaaaaaattcaaaggctgggtgcggtggctcatgcctgtaatcccagcactttgagaggccgaggcaggtggatcaactgaggtcaggagtccgagaccagcctgcccaacatggtgaaaccccatctctactaaaaacacaaaaattagccgggtgtgctggtgtgtgcctgtaatcccagctactcaggaggctgaggcaggagaattgcttgaacctggtaggcagaggttgcagtgagctgagatcacaccactgcactccagcctgggtgacaaagcaagtctccatctaataaaaaa

SEQ ID NO: 63747 - DNA, 763 bp, Homo sapiens
gctaaggcattttgctcttttttaaaaaagaaacaatggaagcatcaactaaaaactaattttaaaaaatggttacctgtagaagaaagggaagagggataaatttcaggatggaagtaagactttgtaaatgtagctttttatatgattgttaaatcaaaattatataaggtttgatataactgaaaataaaatttaaaataaccaaatcttaaactgaaactgtttaacataagcatacattggttaaataagcatacatgaaaaactttaaatgccttaaaaaataaawttttttgccaaatcttcatagattaactggatttatagtcattattagtactaatatcaatatttttatgttgaaactattatatatttaagataaagcaattgaaatgttaatattacttggaattaatatttttagtaaaatagaaaagtgatacaagtataaaataaaaaaattcaaaggctgggtgcggtggctcatgcctgtaatcccagcactttgagaggccgaggcaggtggatcaactgaggtcaggagtccgagaccagcctgcccaacatggtgaaaccccatctctactaaaaacacaaaaattagccgggtgtgctggtgtgtgcctgtaatcccagctactcaggaggctgaggcaggagaattgcttgaacctggtaggcagaggttgcagtgagctgagatcacaccactgcactccagcctgggtgacaaagcaagtctccatctaataaaaaa

SEQ ID NO: 63748 - DNA, 763 bp, Homo sapiens
gctaaggcattttgctcttttttaaaaaagaaacaatggaagcatcaactaaaaactaattttaaaaaatggttacctgtagaagaaagggaagagggataaatttcaggatggaagtaagactttgtaaatgtagctttttatatgattgttaaatcaaaattatataaggtttgatataactgaaaataaaatttaaaataaccaaatcttaaactgaaactgtttaacataagcatacattggttaaataagcatacatgaaaaactttaaatgccttaaaaaataaaattttttgccaaatcttcatagattaactggatttatagtcattattagtactaatatcaatatttttatgttgaaactattatatatttaagataaagcaattgaaatgttaatattacttggaattaatatttttagtaaaatagaaaagtgatacaagtataaaataaaaaaattcaaaggcygggtgcggtggctcatgcctgtaatcccagcactttgagaggccgaggcaggtggatcaactgaggtcaggagtccgagaccagcctgcccaacatggtgaaaccccatctctactaaaaacacaaaaattagccgggtgtgctggtgtgtgcctgtaatcccagctactcaggaggctgaggcaggagaattgcttgaacctggtaggcagaggttgcagtgagctgagatcacaccactgcactccagcctgggtgacaaagcaagtctccatctaataaaaaa

SEQ ID NO: 63749 - DNA, 833 bp, Homo sapiens
tgtttaagactacaggatcagaggggatgaaccccaaagtttaaggtgcagatggccaaggggatcatgaagctctgagattggacagtccagagaagaagagagcttctgggcacgtacctctgctttagaaatgatttcgactcatattcttccatgagcaaagaagcaacctgataggtcatgtagaaagagttgaaaaggctgtagaagagatgggctgtgtgagtagcagtgcatgggtggcagtgaatgcttggtaatgacaaagaagctggtcaattttagtcaagttagaaccctcaaaagagatacgcttatcgcccttgcttctttacaaattctacaaaccctaaaaacttttttccttttccaggagcagcagcatcagtagcagttgggtttgctcccactycagacatgctgaatcagaaattttgaggttgaggtccagcaacgtgttttaacaagccctctaggcgatgctgatgcactctcatgtttgaaacactacatactagatgacaagtttaatgttgaggtctattttttactgtgtttgatatatttttgaaaattgattatgggaaaagtattagaagaactcatttaggcctggagctgctgttggaactgattgctatgtatggaaactccagcagagcagcctttgaaaaacagattgataacaattaactctaagcaccagtgattaaccttaagtagcctaggctgctccccaaggaaccacaatttactgagagcctaagaagttgtagctatttagcatgtagattggtccaagcacaaacatttttctatttctaagattc

SEQ ID NO: 63750 - DNA, 833 bp, Homo sapiens
tgtttaagactacaggatcagaggggatgaaccccaaagtttaaggtgcagatggccaaggggatcatgaagctctgagattggacagtccagagaagaagagagcttctgggcacgtacctctgctttagaaatgatttcgactcatattcttccatgagcaaagaagcaacctgataggtcatgtagaaagagttgaaaaggctgtagaagagatgggctgtgtgagtagcagtgcatgggtggcagtgaatgcttggtaatgacaaagaagctggtcaattttagtcaagttagaaccctcaaaagagatacgcttatcgcccttgcttctttacaaattctacaaaccctaaaaacttttttccttttccaggagcagcagcatcagtagcagttgggtttgctcccacttcagacatgctgaatcagaaattttgaggttgaggtccagcaacgtgttttaacaagccctctaggcgatgctgatgcactctcrtgtttgaaacactacatactagatgacaagtttaatgttgaggtctattttttactgtgtttgatatatttttgaaaattgattatgggaaaagtattagaagaactcatttaggcctggagctgctgttggaactgattgctatgtatggaaactccagcagagcagcctttgaaaaacagattgataacaattaactctaagcaccagtgattaaccttaagtagcctaggctgctccccaaggaaccacaatttactgagagcctaagaagttgtagctatttagcatgtagattggtccaagcacaaacatttttctatttctaagattc

SEQ ID NO: 63751 - DNA, 1704 bp, Homo sapiens
ggccaagtttgaggactgcaaccaaggagcacagattcaagttgcctgaatatatgctccaattagcagtagttacaagtgggtttttaaaggaaaagagaagaggcagtttgtaagttgtttatcaagaatttacactaaggtaacataaggtattgattggctaaacattgttctttcttttctcatttcccccttttgatcaaaatttttctcttctgaaggcatcgatgaccaaaattttagatgtttgtctcatgtcattgggaaggctcattcccaggtaatctcatcccatgtctgagggaaagaggacaggtacttatggcttaagaatttagtgatggccaggcactgtggctcacacctgtaatcccagcactttgggaggccgaggtgggaggatcacttgagctcaggagttcaagactagcttgggcaacatagcaagacccccatctctacacaaaaatataaaataaaaaaatttgaaattttaaacttaagaatttagagaggtctcaaggctgaattgactggcaacataaagggacagagcaacaagatctaggccatccacttacagaggagccacagcatgttggatcatttctttcttgatgttaagacatctagaaatacaaagcataatcaacttaagaaccaaaaatattgagatgggatttttcccctgactttgaccctctttgtggacaggaactagagtggctcatttcactcagcctgcagtccatggatggctaagtgtaacagctcagtgaaggctcagggtgacagcctcctacacctgccttttttgacacctgagttcttgttcagtgtccaggaacaatcaggtcacacaaactatttgaaggatagtgtatttggaatatttattgggcgataaaagtggctctcagtaggatggggaatttgaaaggggatggtgtgggaagaaggtgatgtttccctgaagctgcactgtctgaagttagcagcgtctattcgtartttctgacactcagctgcatggatccctgatgctcagctgcacatatctccaatgttcagcagcttgcatccccaaccacttgtataagccgcttgtgttgctcttccagctgaagtctttttatgggcacaggataggggaatggcaggcaaaaaaggcaatcacttgggcagaaaaatagggccagctgtttttacttagggctgagggttcaggcttgagggtggtgtttagctgggagcccagctgttctgtatcaatatgatgcaaataaggacaattattaacaaacaatttgaaatctagatctgaaaggtgtttttatttcttaaggtaaccaatcaagtaaatcatgtaaggggtttggtctttctaatgtcttgtagccatttagtcttttgggtgattctttctaactgaatttctacttttcatcctggtctgtagaacagggtgactagctgcaggtcagctccagttggagatcttctccagtgatggaagatgtctgctcaggtagggctaactttttaaaatgagaaatgtgaattcatgagtagatggccttgagtttggctgcacaaggattggttaacaatatctgatatagtcccttccaatggggttggagagaagcttttatttgatgtcatttccagtaaacaaaatctccgggttgtaggccatga

SEQ ID NO: 63752 - DNA, 1704 bp, Homo sapiens
ggccaagtttgaggactgcaaccaaggagcacagattcaagttgcctgaatatatgctccaattagcagtagttacaagtgggtttttaaaggaaaagagaagaggcagtttgtaagttgtttatcaagaatttacactaaggtaacataaggtattgattggctaaacattgttctttcttttctcatttcccccttttgatcaaaatttttctcttctgaaggcatcgatgaccaaaattttagatgtttgtctcatgtcattgggaaggctcattcccaggtaatctcatcccatgtctgagggaaagaggacaggtacttatggcttaagaatttagtgatggccaggcactgtggctcacacctgtaatcccagcactttgggaggccgaggtgggaggatcacttgagctcaggagttcaagactagcttgggcaacatagcaagacccccatctctacacaaaaatataaaataaaaaaatttgaaattttaaacttaagaatttagagaggtctcaaggctgaattgactggcaacataaagggacagagcaacaagatctaggccatccacttacagaggagccacagcatgttggatcatttctttcttgatgttaagacatctagaaatacaaagcataatcaacttaagaaccaaaaatattgagatgggatttttcccctgactttgaccctctttgtggacaggaactagagtggctcatttcactcagcctgcagtccatggatggctaagtgtaacagctcagtgaaggctcagggtgacagcctcctacacctgccttttttgacacctgagttcttgttcagtgtccaggaacaatcaggtcacacaaactatttgaaggatagtgtatttggaatatttattgggcgataaaagtggctctcagtaggatggggaatttgaaaggggatggtgtgggaagaaggtgatgtttccctgaagctgcactgtctgaagttagcagcgtctattcgtaatttctgacactcagctgcatggatccctgatgctcagctgcacatatctccaatgttyagcagcttgcatccccaaccacttgtataagccgcttgtgttgctcttccagctgaagtctttttatgggcacaggataggggaatggcaggcaaaaaaggcaatcacttgggcagaaaaatagggccagctgtttttacttagggctgagggttcaggcttgagggtggtgtttagctgggagcccagctgttctgtatcaatatgatgcaaataaggacaattattaacaaacaatttgaaatctagatctgaaaggtgtttttatttcttaaggtaaccaatcaagtaaatcatgtaaggggtttggtctttctaatgtcttgtagccatttagtcttttgggtgattctttctaactgaatttctacttttcatcctggtctgtagaacagggtgactagctgcaggtcagctccagttggagatcttctccagtgatggaagatgtctgctcaggtagggctaactttttaaaatgagaaatgtgaattcatgagtagatggccttgagtttggctgcacaaggattggttaacaatatctgatatagtcccttccaatggggttggagagaagcttttatttgatgtcatttccagtaaacaaaatctccgggttgtaggccatga

SEQ ID NO: 63753 - DNA, 1704 bp, Homo sapiens
ggccaagtttgaggactgcaaccaaggagcacagattcaagttgcctgaatatatgctccaattagcagtagttacaagtgggtttttaaaggaaaagagaagaggcagtttgtaagttgtttatcaagaatttacactaaggtaacataaggtattgattggctaaacattgttctttcttttctcatttcccccttttgatcaaaatttttctcttctgaaggcatcgatgaccaaaattttagatgtttgtctcatgtcattgggaaggctcattcccaggtaatctcatcccatgtctgagggaaagaggacaggtacttatggcttaagaatttagtgatggccaggcactgtggctcacacctgtaatcccagcactttgggaggccgaggtgggaggatcacttgagctcaggagttcaagactagcttgggcaacatagcaagacccccatctctacacaaaaatataaaataaaaaaatttgaaattttaaacttaagaatttagagaggtctcaaggctgaattgactggcaacataaagggacagagcaacaagatctaggccatccacttacagaggagccacagcatgttggatcatttctttcttgatgttaagacatctagaaatacaaagcataatcaacttaagaaccaaaaatattgagatgggatttttcccctgactttgaccctctttgtggacaggaactagagtggctcatttcactcagcctgcagtccatggatggctaagtgtaacagctcagtgaaggctcagggtgacagcctcctacacctgccttttttgacacctgagttcttgttcagtgtccaggaacaatcaggtcacacaaactatttgaaggatagtgtatttggaatatttattgggcgataaaagtggctctcagtaggatggggaatttgaaaggggatggtgtgggaagaaggtgatgtttccctgaagctgcactgtctgaagttagcagcgtctattcgtaatttctgacactcagctgcatggatccctgatgctcagctgcacatatctccaatgttcagcagcttgcatccccaaccacttgtataagccgcttgtgttgctcttccagctgaagtctttttatgggcacaggataggggaayggcaggcaaaaaaggcaatcacttgggcagaaaaatagggccagctgtttttacttagggctgagggttcaggcttgagggtggtgtttagctgggagcccagctgttctgtatcaatatgatgcaaataaggacaattattaacaaacaatttgaaatctagatctgaaaggtgtttttatttcttaaggtaaccaatcaagtaaatcatgtaaggggtttggtctttctaatgtcttgtagccatttagtcttttgggtgattctttctaactgaatttctacttttcatcctggtctgtagaacagggtgactagctgcaggtcagctccagttggagatcttctccagtgatggaagatgtctgctcaggtagggctaactttttaaaatgagaaatgtgaattcatgagtagatggccttgagtttggctgcacaaggattggttaacaatatctgatatagtcccttccaatggggttggagagaagcttttatttgatgtcatttccagtaaacaaaatctccgggttgtaggccatga

SEQ ID NO: 63754 - DNA, 757 bp, Homo sapiens
gggcaacacagtgagaccccatctctacagaaaaatttaaaaattagctggttgtggtggcgcatgaggctgaagtgggagaatggcttcagcccaggagttccaggctgcagtgagctatgattgcatcactgcacggcagccttggtgacagagcaagaccatgtctttaaaaaaagaaaggyggttgtggggggaatacagggatgtagacatccatagtaactttagaaattaaaaaggtattttaaaatgaatatatttctaaataatatatttctaaaactaaaatccccttttttataatttattgtttcattctcgggacaaaactctcaactttacagatgtgttattttagcatatttacttatttacacccagatgtgagaatttagcccctatacatcaaaagccatttgaatagctggattggtgttttcctctttctctttctcttaattctccaagacagtcacatttctgaatgcagattctgcaggcctcattctggtagcagcccttctggagctgagcttcttggacatttgaaagtcaatctccaagacagtttatattcagtttcatatgaatattgaggagtatcagaatatgccaacctaaaatatgcctatttggcatttggcttattttgcgctaaagcccgctgagaaccagaagaccaggaaattacatttagaaagtcaatttacatatagaaatggtgcttccctctgtaccaggaggaagaggatcc

SEQ ID NO: 63755 - DNA, 757 bp, Homo sapiens
gggcaacacagtgagaccccatctctacagaaaaatttaaaaattagctggttgtggtggcgcatgaggctgaagtgggagaatggcttcagcccaggagttccaggctgcagtgagctatgattgcatcactgcacggcagccttggtgacagagcaagaccatgtctttaaaaaaagaaaggcggttgtggggggaatacagggatgtagacatccatagtaactttagaaattaaaaaggtattttaaaatgaatatatttctaaataatatatttctaaaactaaaatccccttttttataatttattgtttcattctcrggacaaaactctcaactttacagatgtgttattttagcatatttacttatttacacccagatgtgagaatttagcccctatacatcaaaagccatttgaatagctggattggtgttttcctctttctctttctcttaattctccaagacagtcacatttctgaatgcagattctgcaggcctcattctggtagcagcccttctggagctgagcttcttggacatttgaaagtcaatctccaagacagtttatattcagtttcatatgaatattgaggagtatcagaatatgccaacctaaaatatgcctatttggcatttggcttattttgcgctaaagcccgctgagaaccagaagaccaggaaattacatttagaaagtcaatttacatatagaaatggtgcttccctctgtaccaggaggaagaggatcc

SEQ ID NO: 63756 - DNA, 757 bp, Homo sapiens
gggcaacacagtgagaccccatctctacagaaaaatttaaaaattagctggttgtggtggcgcatgaggctgaagtgggagaatggcttcagcccaggagttccaggctgcagtgagctatgattgcatcactgcacggcagccttggtgacagagcaagaccatgtctttaaaaaaagaaaggcggttgtggggggaatacagggatgtagacatccatagtaactttagaaattaaaaaggtattttaaaatgaatatatttctaaataatatatttctaaaactaaaatccccttttttataatttattgtttcattctcgggacaaaactctcaactttacagatgtgttattttagcatatttacttatttacacccagatgtgagaatttagcccctatacatcaaaagccatttgaatagctggattggtgttttcctctttctctttctcttaattctccaagacagtcacatttctgaatgcagattctgcaggcctcattctggtagcagcccttctggagctgagcttcttggacatttgaaagtcaatctccaagacagtttatattcagtttcatatgaatattgaggagtaycagaatatgccaacctaaaatatgcctatttggcatttggcttattttgcgctaaagcccgctgagaaccagaagaccaggaaattacatttagaaagtcaatttacatatagaaatggtgcttccctctgtaccaggaggaagaggatcc

SEQ ID NO: 63757 - DNA, 757 bp, Homo sapiens
gggcaacacagtgagaccccatctctacagaaaaatttaaaaattagctggttgtggtggcgcatgaggctgaagtgggagaatggcttcagcccaggagttccaggctgcagtgagctatgattgcatcactgcacggcagccttggtgacagagcaagaccatgtctttaaaaaaagaaaggcggttgtggggggaatacagggatgtagacatccatagtaactttagaaattaaaaaggtattttaaaatgaatatatttctaaataatatatttctaaaactaaaatccccttttttataatttattgtttcattctcgggacaaaactctcaactttacagatgtgttattttagcatatttacttatttacacccagatgtgagaatttagcccctatacatcaaaagccatttgaatagctggattggtgttttcctctttctctttctcttaattctccaagacagtcacatttctgaatgcagattctgcaggcctcattctggtagcagcccttctggagctgagcttcttggacatttgaaagtcaatctccaagacagtttatattcagtttcatatgaatattgaggagtatcagaatatgccracctaaaatatgcctatttggcatttggcttattttgcgctaaagcccgctgagaaccagaagaccaggaaattacatttagaaagtcaatttacatatagaaatggtgcttccctctgtaccaggaggaagaggatcc

SEQ ID NO: 63758 - DNA, 757 bp, Homo sapiens
gggcaacacagtgagaccccatctctacagaaaaatttaaaaattagctggttgtggtggcgcatgaggctgaagtgggagaatggcttcagcccaggagttccaggctgcagtgagctatgattgcatcactgcacggcagccttggtgacagagcaagaccatgtctttaaaaaaagaaaggcggttgtggggggaatacagggatgtagacatccatagtaactttagaaattaaaaaggtattttaaaatgaatatatttctaaataatatatttctaaaactaaaatccccttttttataatttattgtttcattctcgggacaaaactctcaactttacagatgtgttattttagcatatttacttatttacacccagatgtgagaatttagcccctatacatcaaaagccatttgaatagctggattggtgttttcctctttctctttctcttaattctccaagacagtcacatttctgaatgcagattctgcaggcctcattctggtagcagcccttctggagctgagcttcttggacatttgaaagtcaatctccaagacagtttatattcagtttcatatgaatattgaggagtatcagaatatgccaacctaaaatatgccyatttggcatttggcttattttgcgctaaagcccgctgagaaccagaagaccaggaaattacatttagaaagtcaatttacatatagaaatggtgcttccctctgtaccaggaggaagaggatcc

SEQ ID NO: 63759 - DNA, 811 bp, Homo sapiens
attttttgcagtgttgcttatgatagtaaagcaaagagacaaaaggaaactgagtgcatagcactgggggaatggataagtaaaatgtggtacataataggatattatatattagaaataaatgactaaatacgtatatagcaacatggaataaacaaaagacatacagcactatgccatttatatatataaagtatatatacacagagatatgtgaaaccttgaaaaacagaggataatctgaaggatgtatgttaaaaattcaaaagtgggccgggcatggtggctaacacctgtaatccaagcactttgggaggccgaagaaggcggatcatgaggtcaggagttcgagaccagcctggccaacrtggtgaaagcccgtctctactaaagatacaaaaaattagtcaggtgtggtggcacgtgcctgtaatcccagctacttgggaggctgaggcaggagaatcgcttaaactcgggaggtggaggttgcagtgagctgagatcacgtgattgcactacagcctgggcgacagggcaagactccgtctcaaaaaaaaaaccaaaaaccaaacaaataaacaaacaaaaactgcaaaagtggtcacttaatgcattagtgggaatgagaatggaattagagatgagaaatgagggacacatacacaaaccctaaagaatggtctttcaagaattaatgatggagatgggccattgatacagtttggacatcccctccaaatctcttgttgagatgtaatccccagtgttggaagtggggcctagtgggagatgtttgggtcatggaggc

SEQ ID NO: 63760 - DNA, 811 bp, Homo sapiens
attttttgcagtgttgcttatgatagtaaagcaaagagacaaaaggaaactgagtgcatagcactgggggaatggataagtaaaatgtggtacataataggatattatatattagaaataaatgactaaatacgtatatagcaacatggaataaacaaaagacatacagcactatgccatttatatatataaagtatatatacacagagatatgtgaaaccttgaaaaacagaggataatctgaaggatgtatgttaaaaattcaaaagtgggccgggcatggtggctaacacctgtaatccaagcactttgggaggccgaagaaggcggatcatgaggtcaggagttcgagaccagcctggccaacgtggtgaaagcccgtctctactaaagatacaaaaaattagtcaggtgtggtggcacgtgcctgtaatcccagctacttgggaggctgaggcaggagaatcgcttaaactcgggaggtggaggttgcagtgagctgagatcacgtgattgcactacagcctgggcgacagggcaagactccgtctcaaaaaaaaaaccaaaaaccaaacaartaaacaaacaaaaactgcaaaagtggtcacttaatgcattagtgggaatgagaatggaattagagatgagaaatgagggacacatacacaaaccctaaagaatggtctttcaagaattaatgatggagatgggccattgatacagtttggacatcccctccaaatctcttgttgagatgtaatccccagtgttggaagtggggcctagtgggagatgtttgggtcatggaggc

SEQ ID NO: 63761 - DNA, 1027 bp, Homo sapiens
ttataattgctggctctacccaaattcttccagttgcattccctgcttccagtctctaccttacctctttctccacctctcatccctctaggcaagctgtatcaacaagggtctcaacaagaaacagaattcacaagatagttcacatgaaaatactttaatgaaaggacaagttacagaggggtgagcgggtaktaagggaacaaacgagatgatgaggcactcagagactagctacagaggaggtgttcaagagataaaaggagaacataaaatcaccagacagcccggggaaaactagagccatggtgaaagagccatctggcaggtactgtagtcatgaaggaatgaagctattgctggacatctgacactcaaagaaggaaggagcaaggaagagatgccccaatttccctttctacccaccttctgatatccttgccttggccttctttatgtccaaccacaaagcagtccttaaagaaactgaggtcaaccctcagaggcatagagcttagcaaagaagggcaggaaatgaatctggggggcaaagaaaataaccagcacattagtctttctccggactactttgaaaggccagtcatctaaaatgcaaaccttctcataccttgcaccctcttaaaatctaccagtggattcacatcatctgtaggactaaatctaaactgggatgtgcgactttgcccctgcttatggcttcattccccagttcctgtcttagcctacggccattgtgaattatttccaaattcaccagcattctatgctctcacacctctgtcctttgtccatattcttttctcttcccaaggcacctttctgcatcttctctgcttggctaacttcttctactcaacctttgagaatcaaagacttagctctagaatcacctccttccaaaagtttcctgaaaagtttttccaggtgtttctatgacttccttatataattccatcattatacagatgctccttgagttatgtcctgataaacccattttaagtca

SEQ ID NO: 63762 - DNA, 782 bp, Homo sapiens
tcacctgtttgaccttattgcagctcacaatctctttcccagtttgaaatccaaagatgatggaggagtgcccgctcatgatgtgaagtacctgctcagctggaaaccgaatttgagataaattcaagggtctatgtggacaagactgctagtgtctctctctggattggtcatattgcaatgaaacaccagacgatgtctgttcctgggtgttgtattccactcttctttctagaagagtgcctttatttgcaggggaagataatggagaccctggctggtcacaactagcctacctgttcattgtggattcatgacccacagaaacataaagaacagggagcccacagagcccacagcccaagtacagccacacagacaggccacccaaaggttaagacgctaaaaaataaaaagccctgcagtgtgttagccacattcctttaaggagaaacaacttagaggcagaaacacacacacacacagccacacacacccacagatatccaacactcacaayactcccacagaaatacacagcctggtagcttctgaggctgtctcattctataggaagccccaactgaaagagagcaacaccaggaaaagcaggagggctgaacctagaaatcacagtggggcatgtttcaataagactcacccctacatcaactaggctagtatgaggaatcctgcagattcttttggacccttaggaatttcacaatttctggggctctgcttgatatctcttcaggctggctcacatctgccctctcctt

SEQ ID NO: 63763 - DNA, 467 bp, Homo sapiens
tttttttttttttttgcagaagcagctgatttggatgctagcagtttccagcctgtttcccaattcactgcagattcatgatccacataaaaataaagaacaaggagccctgcatcccaaggagacctacatagacaggccaccaaaacatggtgagacttaaaaacagaagtgctgaagtaagttagccacattcctttaagcagactacatttacatgcacacacacacaaatacaaaaacacacaatgcctcacacatatgcacacatccgacattcacaattctcccacagaaacacacagcccaccagctcctgaggctgtgtggttctgcaagaagccccatctgaaagagarcaaccccagttaacagtcaggctatacctagaaatcacagcagaccaagtttcaaaaatattcacccctgcaacatctaggcatgcctgaggaattctgcagattttt

SEQ ID NO: 63764 - DNA, 2767 bp, Homo sapiens
gcatgctaagcaagctacagtggagataaacctacctctacatatctcctagagaaatagtaaacaatcaggaagggaaaaatatttcaattagcactagaaaaatcaaattacctttaatcatattgaaatctgaaagcatgaaaggtaaaataaacaatattatttgttaagaataataatgccactctgaaattctcaaccaagaaaaatattcatcaacctatggctaaataacatatttagagacaaaaaacaaaacaccaccagcagaattccactaaagaaactaaaaagaaactctgaaaacatgcttcagaaagattgaagttctgaaatcaaagaatgaacacagagaaaaatatattgtaaacatacagatagatctaaataaaaaattaggtgttgaaacaaaaagatatttaaaattagataagcactgcaatatgtatgttaggaagcaaattattagggctgaagtattcaaagaccccttaattgtctgacaagagcagaaaggtatgactttgcaatttttttttttttttttgagaaggagtctcactcactctttctcccaggctggagtgcggtggcgccatctcggctcactgcaacctctgcctcccaggttcaagcaattctcctgcctcagcctcctgagtagcggggattacagccacgtgccaccatgcctggctaatttttgtatttttagtatagacggggtttcaccatgttggtcaggctagtctccaactcctgacctcgtgatccacacgcctcggcctcctgaagtgttgagattacaggtgtgagccactgcgcgcgaccgactttggaactttaataaattgactggacattatgcatttctctgttgtatctatgaaaacaataaaaataaaagtcataattttaaaacaagaatacagaaactgataggagaaaatgagacagtatatatatatatatatatacacacaacaaattaataatacaaaattaagtataaatgatcaaagattaacttaaacctaagtagacaatgtttttgttaaaatacaaagattggcaaaatttaaaacatctgtctctatcatagttacaagagaggcaactaatatataaatttacaggaactttgaagtttgaacaatacagatactgtgtatatatgatatacatacaaacatactacatgaatataattttttaaaaagttgctatgtagacaaaacagaatgtaagttagaaatatttattaaaataagttagtctaaccagtgtgataaaagttttaagttattaagaagatgtgatgacttaaatgtgcgttagcctgatacatacatatatatatacacacaaaccacacactctctcacaaccacagacatacacgtatttagagagagagtcaaattatataaagcaaaaatatcagaaagtagaaatggataagcccccaaatattatagacatttcaaacacacatctttcaataatagataaaagaaaaaattaaaagagtaagttttaaaagaagctagtggattttaaaaagggcaaatattatataaggaacatgaatattatagttcatgttattttcttgttcatacagaatacttacaaaaattaacattttctagaccataccacaaattcaaacaattttcacggaaataacgtgacacagaatatacttcctaaacaaacagcaatgaaggcagatatcaatacaaaaacgaaagctagaaacataagtctaataatattggttggaagctattttaatgaatattgaaatattttaaaggtgaatagtccatacaaataaaccaaacacttttttaaggccactaagatgcatgtgtaatgtgtaatgcctccttttataaggagtcaatctgtaacatcacctgggctatttgacaactgcaaagtgaatgtgagaaggagagaaacagtgagagagagagagagagaaaaccagtaaaataaagaatgaaggagatagccaggcgccatggttcactcctgtaatgccagcactttgggaggccaaggcaggtggatcacctgaggtcaggagttcgagaccagcctggtctaacatggtgaaacccactatctactaaatataccaaaattagcctggcatggtggcatgcctctgtaatcccagctactcgggaggctgaggtgggagaattgcttgaacgtggggggtggaaattgcagtgagtagagatcacgcgactgcacttcagcttgggcgacagagcaagactccgtgtcaaaaaacaaacaaacaaaaaaaaaaaaaacgaggaaatagtacacgaaaaaacagaattaaagcaactgggtatatatttaaaaatgcaaaagctcactttttcagaaaaatattaaaatattaaatctaacaaatatctaggyagactgatggagaaaaatacagaaaatgcacaaaaaaccaattacctggaatgcgaatgttacaaaacgtcagcagttgtagattttaaataagcaatgatttttgagttcaaccatgatggtgtatattgaaaagaatctctcagaaaaaaagaaaaagaaaactgttataaagctatgtacaaaatgttaagcagtattaaagtcttccaaatctaccagttatggagttattggtcttggactaactctcctgaaaagaaaaaaacaaaacaaaacaaaacaaaacaaaacctaaaaacctggaaaaaatggccta

SEQ ID NO: 63765 - DNA, 2767 bp, Homo sapiens
gcatgctaagcaagctacagtggagataaacctacctctacatatctcctagagaaatagtaaacaatcaggaagggaaaaatatttcaattagcactagaaaaatcaaattacctttaatcatattgaaatctgaaagcatgaaaggtaaaataaacaatattatttgttaagaataataatgccactctgaaattctcaaccaagaaaaatattcatcaacctatggctaaataacatatttagagacaaaaaacaaaacaccaccagcagaattccactaaagaaactaaaaagaaactctgaaaacatgcttcagaaagattgaagttctgaaatcaaagaatgaacacagagaaaaatatattgtaaacatacagatagatctaaataaaaaattaggtgttgaaacaaaaagatatttaaaattagataagcactgcaatatgtatgttaggaagcaaattattagggctgaagtattcaaagaccccttaattgtctgacaagagcagaaaggtatgactttgcaatttttttttttttttttgagaaggagtctcactcactctttctcccaggctggagtgcggtggcgccatctcggctcactgcaacctctgcctcccaggttcaagcaattctcctgcctcagcctcctgagtagcggggattacagccacgtgccaccatgcctggctaatttttgtatttttagtatagacggggtttcaccatgttggtcaggctagtctccaactcctgacctcgtgatccacacgcctcggcctcctgaagtgttgagattacaggtgtgagccactgcgcgcgaccgactttggaactttaataaattgactggacattatgcatttctctgttgtatctatgaaaacaataaaaataaaagtcataattttaaaacaagaatacagaaactgataggagaaaatgagacagtatatatatatatatatatacacacaacaaattaataatacaaaattaagtataaatgatcaaagattaacttaaacctaagtagacaatgtttttgttaaaatacaaagattggcaaaatttaaaacatctgtctctatcatagttacaagagaggcaactaatatataaatttacaggaactttgaagtttgaacaatacagatactgtgtatatatgatatacatacaaacatactacatgaatataattttttaaaaagttgctatgtagacaaaacagaatgtaagttagaaatatttattaaaataagttagtctaaccagtgtgataaaagttttaagttattaagaagatgtgatgacttaaatgtgcgttagcctgatacatacatatatatatacacacaaaccacacactctctcacaaccacagacatacacgtatttagagagagagtcaaattatataaagcaaaaatatcagaaagtagaaatggataagcccccaaatattatagacatttcaaacacacatctttcaataatagataaaagaaaaaattaaaagagtaagttttaaaagaagctagtggattttaaaaagggcaaatattatataaggaacatgaatattatagttcatgttattttcttgttcatacagaatacttacaaaaattaacattttctagaccataccacaaattcaaacaattttcacggaaataacgtgacacagaatatacttcctaaacaaacagcaatgaaggcagatatcaatacaaaaacgaaagctagaaacataagtctaataatattggttggaagctattttaatgaatattgaaatattttaaaggtgaatagtccatacaaataaaccaaacacttttttaaggccactaagatgcatgtgtaatgtgtaatgcctccttttataaggagtcaatctgtaacatcacctgggctatttgacaactgcaaagtgaatgtgagaaggagagaaacagtgagagagagagagagagaaaaccagtaaaataaagaatgaaggagatagccaggcgccatggttcactcctgtaatgccagcactttgggaggccaaggcaggtggatcacctgaggtcaggagttcgagaccagcctggtctaacatggtgaaacccactatctactaaatataccaaaattagcctggcatggtggcatgcctctgtaatcccagctactcgggaggctgaggtgggagaattgcttgaacgtggggggtggaaattgcagtgagtagagatcacgcgactgcacttcagcttgggcgacagagcaagactccgtgtcaaaaaacaaacaaacaaaaaaaaaaaaaacgaggaaatagtacacgaaaaaacagaattaaagcaactgggtatatatttaaaaatgcaaaagctcactttttcagaaaaatattaaaatattaaatctaacaaatatctaggtagactgatggagaaaaatacagaaaatgcacaaaaaaccaattacctggaatgcgaatgttacaaaacgtcagcagttgtagattttaaataagcaatgatttttgagttcaaccatgatggtgtatattgaaaagaatctctcagaaaaaaagaaaaagaaaactgttataaagctatgtacaaaatgttaagcagtattaaagtcttccaaatctaccagttatggagttattggtcttggactaactctcctgaaaagaaaaaaacaaaacaaaacaaaacaaaacaaaacctaaaaacctggawaaaatggccta

SEQ ID NO: 63766 - DNA, 885 bp, Homo sapiens
gtggggcttaaaacctagatgatgggttgataggtgtgccaaaccaccatggcacacatatacttatgtaacaaacctacacattctgtacttgtaacccagaacttaaggtaaaataaaaaattaattaattaattaaaaaattatcaataagggaaggtgcaaagagttcctaatgctattccctgtttctgggtggtagatgaaggcacacaaaagaactcgtatgctttgttgtggcaaggaaggatttgctaatgcaactaaattagctttaaataatgtccatttaggttaatttatttattctacaaatgatcgttaaactaagattcaaatgacaaaaaaaaaagtagccacactgtgagaaattccagggaagaacactccagcaaaacttcatacaaatacattcaggcaggatctgtttgatatctctaaggaacagaaattaccagtatggccagatgcttcaaattaatattttcctcttacgtggcaaaagtttctcataggctcttgtttttttttttttgagatggagtctcgctctgtcacccaggctggagtgcagyggcacgatctaggctcactgcaagctccgcctcccaggttcacgccattctcgtgcctcagcctcccgaggaactgggactacaggtgcccgccaccacacccagctaattttttgtatttctagtagaaacggggtttcaccatgttagccaggatagtctcaatctcctgacctcgtgatccgcctgcttaccttaacctttaatatgatacatatttagatctaggagtacattacccctacctgaagaagagtatgttagtctttatcctggccattttccacatggatgctgggagaatgaatgc

SEQ ID NO: 63767 - DNA, 1283 bp, Homo sapiens
aggcttctaatacgggtagaccaatccagggatgctgaagacctgaacttaggtagtagagtaaaataaaggggaagggccatcttccagagcgaactcaacaggacatgtcagaattaaactcagcaggacttggaaaccaattagctataggtagtaaaagagaatgtaataaaattgattgacctttctagcttgtgcatgtggtgctgctgagaatccagaagaatccagactgaggagttagcagaaggaacaagtttggggatggagagatactgataaaagaatgagtgtggttttcgrtttcagatatcaatactatatttggagtgcttgcatttgcctaacacagggctgaggtgtgatgtgcctagctatggtgtgtttagaaataaagagaaaatgtaatgctgatgtacacgaggaatgtactcaaggaaggaaattgcaaatgcagaagctatagaatgacaaattagatctgtgaattcccaatgtaaaagataactacttcagcaatggtgagacagaatgaacttgcaaatggagcatgtaatgaaaataaaaaaagaaaaaaaaactaaactaaagctgacacaagtctgagtaagatggaataggaagcatgaggtggtcttagaataataatttagtattagcctccgcctgccagtcccagcatactatgtccaagtgtggcctccaggactttatttatttatttagagacagagtcttcaggactttactatttatttatttatttatttattttgagacagagtctcgctccatcacccaggctggagtgcagtggcacgatcttgactcactgaaacctctgcctcccgggctcaagcgattctcttacctcagcctcccaagtagctgggattaccggtgcccaccaccacacccagctaattttttgtatttttggtagagacaggatttcaccatgttggtcaggctggtctcaaactcctgacctcaagtgatccccccgccttggcctcccaaagtgctgggattacagacataagccaccgtgcccagcctgcctccaggactttagacattagaatgctggagaacattcaaagagcaaccaagatcattaaagggttagaaaaatatagctgaggtataaaagtatatttgagttagcctggagaaaagaagaaccaatggtgactccattcacaataaataaatgaaggcattgtagaaatacttccccagagttcagagaaagagaggggattacattgtaaactgat

SEQ ID NO: 63768 - DNA, 757 bp, Homo sapiens
ataaacttaattgataaagcagcagcagggtttgagaggattgaatccagttttgaaagaaattctactgagactaaaatgctgtcaaacagcatcgcatgctacagagaagtctttcatgaaaggaagaatcaatctatgtgacaaacttcattattgtcttactatgattaggttgtcttacagccaccccaaccttcagcaaccactgctgaccatgttgatcggtcagcagccatcaacatcaaggcaagacactccaccagcaaaagatgatgacttgctgaaggctcagatgtttcttagcattttttagccataatgtattttaaaattaaggtttctacttttttttttwaaatacataatgctcttgtactccgaatagaactgaagtcccactgctaaatttgactggcttaaaaaaatacactacagtatagtgtaaacataaattttatatacagtgggaaaccaaaatattgtatgactccctttactataatattcattttattggggtagtctggaaccaaaccgacaagatctctgtataatttatttgtataggagagaaaaacacacatttggagttcacattgctcaatatatttctctaaacaaaattctgtccagttgaaaacttattagccttttaagagagtcttgttctgcagttgatccatactcacaaatttcattgaattctttgtaaaatctgcacaaaaaattactagaatcagaatcttagaaatta

SEQ ID NO: 63769 - DNA, 705 bp, Homo sapiens
gggaaaagagagcggacctcaggttagcaggaacataaacgtgttagtattttactgaatttcccccttgtgtcattggctcacaggatttcacaaaggtttgaaggtctgggatggaatggtgaaggtgacatcactgtgagcaagtgtgggtcaaatgagggggatgaactgtggctaagaaacttaagagaatatttttgtaagaagatgtaaaaggataaatacaatatgacttaccaaatgcctttaagtaatagattactattttgttagctcatactttattctggcagtctgtttamccatatgcacagtctcctgaatgtgatttaaatgttaagtcctaattacaaaactctaattcaaaacaattttaagtaaggctgttgaaaattaatgtgaatgcaaatcatgaagtcactctcattagggaaatacgcattaattttaattttgggcctctctgaactaatatcaaatagaattacataaaaaataaaaatggccagaacttttgagagattatattctgcaactaaagttatccaggaatgtgtaacagctacgtaatctctttataaaaaattttgaaataatttaacgatatatagattattagggaccttctaaacttttagaactgattttgttggcttcattagctcctgccttgttttaacaggctttctttgtatatattga

SEQ ID NO: 63770 - DNA, 709 bp, Homo sapiens
cagtgcaacttgccattttgctttatccacagtagcgtacagagctgtaaatagctgcagaattcaaagcaagaagaacaagaaaatctttgggtcagttttgtagaaacaaagtgaaacataatgtttcatagaatacaggctactctgaggaagaaatgccatgcccttttgaataagaggcttaacccatggggagctcaacacatcagtgtgggggtggctcatccatatgttactcaatactacggttttgttctaggtctcattgtctgctgcacagaaagccaatcactgagacaacaagtattgccatggaagaaggctttattatattcaatgtttatactaytatatttatcatatattatttatattacatattacaggcgatgtcagctggagagagggagacaaacctcaagtccatctctcccctccaactaaagttaggggtttatatagtggggaagaaaaacaagtgggataaggaagagaagctggtcaacaggcagcaggcatttttttttttttttttgagacagtgtttccatctgttgcccaggctggagtgcaatggcacgatctcggctcaccaccaccttcgcttcctgggttcaaaagaatctcctgcctcagcctcccaagtagctgggattacaggcacctgccaccatgtttggctaattttttgtattttttgtagaga

SEQ ID NO: 63771 - DNA, 709 bp, Homo sapiens
cagtgcaacttgccattttgctttatccacagtagcgtacagagctgtaaatagctgcagaattcaaagcaagaagaacaagaaaatctttgggtcagttttgtagaaacaaagtgaaacataatgtttcatagaatacaggctactctgaggaagaaatgccatgcccttttgaataagaggcttaacccatggggagctcaacacatcagtgtgggggtggctcatccatatgttactcaatactacggttttgttctaggtctcattgtctgctgcacagaaagccaatcactgagacaacaagtattgccatggaagaaggctttattatattcaatgtttatactattatatttatcatatattatttatattacatattacaggygatgtcagctggagagagggagacaaacctcaagtccatctctcccctccaactaaagttaggggtttatatagtggggaagaaaaacaagtgggataaggaagagaagctggtcaacaggcagcaggcatttttttttttttttttgagacagtgtttccatctgttgcccaggctggagtgcaatggcacgatctcggctcaccaccaccttcgcttcctgggttcaaaagaatctcctgcctcagcctcccaagtagctgggattacaggcacctgccaccatgtttggctaattttttgtattttttgtagaga

SEQ ID NO: 63772 - DNA, 709 bp, Homo sapiens
cagtgcaacttgccattttgctttatccacagtagcgtacagagctgtaaatagctgcagaattcaaagcaagaagaacaagaaaatctttgggtcagttttgtagaaacaaagtgaaacataatgtttcatagaatacaggctactctgaggaagaaatgccatgcccttttgaataagaggcttaacccatggggagctcaacacatcagtgtgggggtggctcatccatatgttactcaatactacggttttgttctaggtctcattgtctgctgcacagaaagccaatcactgagacaacaagtattgccatggaagaaggctttattatattcaatgtttatactattatatttatcatatattatttatattacatattacaggcgatgtcagctggagagagggagacaaacctcaagtccatctctcccctccaactaaagttaggggtttatatagtggggaagaaaaacaagtgggataaggaagagaagctggtcaacaggcagcaggcatttttttttttttttttgagacagtgtttccatctgttgcccaggctggagtgcaatggcacgatctcggctcaccaccaccttcgcttcctgggttcaaaagaatctcctgcctcagcctcccaagtagctgggattacaggcacctgccaccatgyttggctaattttttgtattttttgtagaga

SEQ ID NO: 63773 - DNA, 1566 bp, Homo sapiens
gacctcatgcgactggtcacagtcaaaacacagtctgagctttgtttcctgcataaaattatttaaaatactatataaaattaccttcaggctatgtgtacaaggtgtgtatgaaacatacatgaatttcctgtttaggcttgggtcccagccccaagatatctcattatatatttgtaaatattccaaaatctgaaaaaatctgaaatacttctggttctaagcatgtcagataaaggctgttcaacctgtatatgtttttgtttgtttgtttgtttgtttttgcagagtcrtggaagacagtcaaatgggtactcagcaagtaccttcccaagctcccttgcagggatggtggtcatgtgacacagatctgaccaatgagatgtgagcattgctctcctctcccagtgcattaccagaaatgggatcacatttgcagagctgcacagagggatgcttcaaggagaggggacgatactcgtccaggatctgggattcccaaacatccttctggtcagccagtatatggagccgttgttaagctttggaatcagacttcctaggttcgtatctggcttctgcacaacttactggttgtgtaatctcagcctgagcctcagtttcctcatgttgaaataggaacagtaatcatactatattctcaggttgttggggcaactagatcagtgtgtaagccccatgaggggaggatcctgttcatcttaccatgacatattcacattccagtgtgagtacctaacagtaggcacctaacagatttgtatagagaaaatagatgtacaggtcttagcagagtgaccagttcaagaaatcttacctaaaaaactaaattgactgggcatagtggttcatgcctgtaatcccagcgctttgggaggccgaggggggtggatcacctgaggtcaggagtttgagtgcagcctggccaacatggtgaaaacccgtgtctactaaaaatacaaaaaaattagccagacacagtggcacgcacctgtactcccagctacttgggaggctgaagctggagaatcgctcgaacctgggaggcagaggttgcagtgagctgagatcatgccattgcactctagcctgggcgacagagtgagaatccgtctcaaaaagacaaaacaaacaaacaaaaaaaccctaaatgaatgccaggcatggtggctcacatctgtaatcccagcactttgggaggctgaggtaggaggattgcttgaggtcaggagttcaagaccagcctgggcaacatagtgagaccccgtctctataaaaaattagctgggcatggtggcgtgtgcctgtagtcccatctactcaggaagctgaggcaggaggatcacttgaatccaggagttcagggaagcagtgagctatgatcccaccactgtactccagagcctgggcaacagagtgagaccctgtctctaaaacaaagaaacaaacaaaacacccaattcttactgaggccatagattcctgcagaagattccagggcagcagagggagggggaagacatggttagctggtgccccttccac

SEQ ID NO: 63774 - DNA, 1566 bp, Homo sapiens
gacctcatgcgactggtcacagtcaaaacacagtctgagctttgtttcctgcataaaattatttaaaatactatataaaattaccttcaggctatgtgtacaaggtgtgtatgaaacatacatgaatttcctgtttaggcttgggtcccagccccaagatatctcattatatatttgtaaatattccaaaatctgaaaaaatctgaaatacttctggttctaagcatgtcagataaaggctgttcaacctgtatatgtttttgtttgtttgtttgtttgtttttgcagagtcatggaagacagtcaaatgggtactcagcaagtaccttcccaagctcccttgcagggatggtggtcatgtgacacagatctgaccaatgagatgtgagcattgctctcctctcccagtgcattaccagaaatgggatcacatttgcagagctgcacagagggatgcttcaaggagaggggacgatactcgtccaggatctgggattcccaaacatccttctggtcagccagtatatggagccrttgttaagctttggaatcagacttcctaggttcgtatctggcttctgcacaacttactggttgtgtaatctcagcctgagcctcagtttcctcatgttgaaataggaacagtaatcatactatattctcaggttgttggggcaactagatcagtgtgtaagccccatgaggggaggatcctgttcatcttaccatgacatattcacattccagtgtgagtacctaacagtaggcacctaacagatttgtatagagaaaatagatgtacaggtcttagcagagtgaccagttcaagaaatcttacctaaaaaactaaattgactgggcatagtggttcatgcctgtaatcccagcgctttgggaggccgaggggggtggatcacctgaggtcaggagtttgagtgcagcctggccaacatggtgaaaacccgtgtctactaaaaatacaaaaaaattagccagacacagtggcacgcacctgtactcccagctacttgggaggctgaagctggagaatcgctcgaacctgggaggcagaggttgcagtgagctgagatcatgccattgcactctagcctgggcgacagagtgagaatccgtctcaaaaagacaaaacaaacaaacaaaaaaaccctaaatgaatgccaggcatggtggctcacatctgtaatcccagcactttgggaggctgaggtaggaggattgcttgaggtcaggagttcaagaccagcctgggcaacatagtgagaccccgtctctataaaaaattagctgggcatggtggcgtgtgcctgtagtcccatctactcaggaagctgaggcaggaggatcacttgaatccaggagttcagggaagcagtgagctatgatcccaccactgtactccagagcctgggcaacagagtgagaccctgtctctaaaacaaagaaacaaacaaaacacccaattcttactgaggccatagattcctgcagaagattccagggcagcagagggagggggaagacatggttagctggtgccccttccac

SEQ ID NO: 63775 - DNA, 1566 bp, Homo sapiens
gacctcatgcgactggtcacagtcaaaacacagtctgagctttgtttcctgcataaaattatttaaaatactatataaaattaccttcaggctatgtgtacaaggtgtgtatgaaacatacatgaatttcctgtttaggcttgggtcccagccccaagatatctcattatatatttgtaaatattccaaaatctgaaaaaatctgaaatacttctggttctaagcatgtcagataaaggctgttcaacctgtatatgtttttgtttgtttgtttgtttgtttttgcagagtcatggaagacagtcaaatgggtactcagcaagtaccttcccaagctcccttgcagggatggtggtcatgtgacacagatctgaccaatgagatgtgagcattgctctcctctcccagtgcattaccagaaatgggatcacatttgcagagctgcacagagggatgcttcaaggagaggggacgatactcgtccaggatctgggattcccaaacatccttctggtcagccagtatatggagccgttgttaagctttggaatcagacttcctaggttcgtatctggcttctgcacaacttactggttgtgtaatctcagcctgagcctcagtttcctcatgttgaaataggaacagtaatcatactatattctcaggttgttggggcaactagatcagtgtgtaagccccatgaggggaggatcctgttcatcttaccatgacatattcacattccagtgtgagtacctaacagtaggcacctaacagatttgtatagagaaaatagatgtacaggtcttagcagagtgaccagttcaagaaatcttacctaaaaaactaaattgactgggcatagtggttcatgcctgtaatcccagcgctttgggaggccgaggggggtggatcacctgaggtcaggagtttgagtscagcctggccaacatggtgaaaacccgtgtctactaaaaatacaaaaaaattagccagacacagtggcacgcacctgtactcccagctacttgggaggctgaagctggagaatcgctcgaacctgggaggcagaggttgcagtgagctgagatcatgccattgcactctagcctgggcgacagagtgagaatccgtctcaaaaagacaaaacaaacaaacaaaaaaaccctaaatgaatgccaggcatggtggctcacatctgtaatcccagcactttgggaggctgaggtaggaggattgcttgaggtcaggagttcaagaccagcctgggcaacatagtgagaccccgtctctataaaaaattagctgggcatggtggcgtgtgcctgtagtcccatctactcaggaagctgaggcaggaggatcacttgaatccaggagttcagggaagcagtgagctatgatcccaccactgtactccagagcctgggcaacagagtgagaccctgtctctaaaacaaagaaacaaacaaaacacccaattcttactgaggccatagattcctgcagaagattccagggcagcagagggagggggaagacatggttagctggtgccccttccac

SEQ ID NO: 63776 - DNA, 1566 bp, Homo sapiens
gacctcatgcgactggtcacagtcaaaacacagtctgagctttgtttcctgcataaaattatttaaaatactatataaaattaccttcaggctatgtgtacaaggtgtgtatgaaacatacatgaatttcctgtttaggcttgggtcccagccccaagatatctcattatatatttgtaaatattccaaaatctgaaaaaatctgaaatacttctggttctaagcatgtcagataaaggctgttcaacctgtatatgtttttgtttgtttgtttgtttgtttttgcagagtcatggaagacagtcaaatgggtactcagcaagtaccttcccaagctcccttgcagggatggtggtcatgtgacacagatctgaccaatgagatgtgagcattgctctcctctcccagtgcattaccagaaatgggatcacatttgcagagctgcacagagggatgcttcaaggagaggggacgatactcgtccaggatctgggattcccaaacatccttctggtcagccagtatatggagccgttgttaagctttggaatcagacttcctaggttcgtatctggcttctgcacaacttactggttgtgtaatctcagcctgagcctcagtttcctcatgttgaaataggaacagtaatcatactatattctcaggttgttggggcaactagatcagtgtgtaagccccatgaggggaggatcctgttcatcttaccatgacatattcacattccagtgtgagtacctaacagtaggcacctaacagatttgtatagagaaaatagatgtacaggtcttagcagagtgaccagttcaagaaatcttacctaaaaaactaaattgactgggcatagtggttcatgcctgtaatcccagcgctttgggaggccgaggggggtggatcacctgaggtcaggagtttgagtgcagcctggccaacatggtgaaaacccgtgtctactaaaaatacaaaaaaattagccagacacrgtggcacgcacctgtactcccagctacttgggaggctgaagctggagaatcgctcgaacctgggaggcagaggttgcagtgagctgagatcatgccattgcactctagcctgggcgacagagtgagaatccgtctcaaaaagacaaaacaaacaaacaaaaaaaccctaaatgaatgccaggcatggtggctcacatctgtaatcccagcactttgggaggctgaggtaggaggattgcttgaggtcaggagttcaagaccagcctgggcaacatagtgagaccccgtctctataaaaaattagctgggcatggtggcgtgtgcctgtagtcccatctactcaggaagctgaggcaggaggatcacttgaatccaggagttcagggaagcagtgagctatgatcccaccactgtactccagagcctgggcaacagagtgagaccctgtctctaaaacaaagaaacaaacaaaacacccaattcttactgaggccatagattcctgcagaagattccagggcagcagagggagggggaagacatggttagctggtgccccttccac

SEQ ID NO: 63777 - DNA, 1566 bp, Homo sapiens
gacctcatgcgactggtcacagtcaaaacacagtctgagctttgtttcctgcataaaattatttaaaatactatataaaattaccttcaggctatgtgtacaaggtgtgtatgaaacatacatgaatttcctgtttaggcttgggtcccagccccaagatatctcattatatatttgtaaatattccaaaatctgaaaaaatctgaaatacttctggttctaagcatgtcagataaaggctgttcaacctgtatatgtttttgtttgtttgtttgtttgtttttgcagagtcatggaagacagtcaaatgggtactcagcaagtaccttcccaagctcccttgcagggatggtggtcatgtgacacagatctgaccaatgagatgtgagcattgctctcctctcccagtgcattaccagaaatgggatcacatttgcagagctgcacagagggatgcttcaaggagaggggacgatactcgtccaggatctgggattcccaaacatccttctggtcagccagtatatggagccgttgttaagctttggaatcagacttcctaggttcgtatctggcttctgcacaacttactggttgtgtaatctcagcctgagcctcagtttcctcatgttgaaataggaacagtaatcatactatattctcaggttgttggggcaactagatcagtgtgtaagccccatgaggggaggatcctgttcatcttaccatgacatattcacattccagtgtgagtacctaacagtaggcacctaacagatttgtatagagaaaatagatgtacaggtcttagcagagtgaccagttcaagaaatcttacctaaaaaactaaattgactgggcatagtggttcatgcctgtaatcccagcgctttgggaggccgaggggggtggatcacctgaggtcaggagtttgagtgcagcctggccaacatggtgaaaacccgtgtctactaaaaatacaaaaaaattagccagacacagtggcacgcayctgtactcccagctacttgggaggctgaagctggagaatcgctcgaacctgggaggcagaggttgcagtgagctgagatcatgccattgcactctagcctgggcgacagagtgagaatccgtctcaaaaagacaaaacaaacaaacaaaaaaaccctaaatgaatgccaggcatggtggctcacatctgtaatcccagcactttgggaggctgaggtaggaggattgcttgaggtcaggagttcaagaccagcctgggcaacatagtgagaccccgtctctataaaaaattagctgggcatggtggcgtgtgcctgtagtcccatctactcaggaagctgaggcaggaggatcacttgaatccaggagttcagggaagcagtgagctatgatcccaccactgtactccagagcctgggcaacagagtgagaccctgtctctaaaacaaagaaacaaacaaaacacccaattcttactgaggccatagattcctgcagaagattccagggcagcagagggagggggaagacatggttagctggtgccccttccac

SEQ ID NO: 63778 - DNA, 1542 bp, Homo sapiens
tgtctgggaagcagaggcagagggaatggggatgtggatgggctttgttgcaaagggcccttcaaggtggcaggtctcaggtgggagtggctctgtgagggctgtgcaagctgaactttcagtcctgaagccttgggaatattgttcacggtgcctgaaacagggttgtgccagtggagaggacctttgaggggcgtatatcatccatctcaaagggtgatttttaagagaggtattgtgcatcaatcagggtgacaatatctgtagcaaatatgataatcactcactaagcgccaggccctagtctcactgtcttaaatacactaactcataggtcttgttatgctattacccccattttacaaatgaggaaactgggagcacagagaagttcagcgacttgcccaaggtcactcagccggtgaacggcagagccagcgtttgaatttaggcagtaagctataatgtctattcttggccctgtgccctttggcctcaacagagactgtgaggatggtgaccacacaaactgaagactgaatcctttttaatttgaaccaaatcctgagatgcttgtaagatccacagagagaggaggactctggaaattgaccattgttgaactcattgtctaggctaactgatacggtttggctgtgtccccacccaaatctcatcttgaattgtagcttccataattcccatgtgtcatgggamggactggtgggaggtaattgaattatgggggtggatcccccgctaccgctctcgtagtggtgaataagtctcatgagatctgatggttttgcttggctcttttgcttggctctcattctgtcttgtctgctgccgtggaagaagtgccttttgccttctgccatgattgtgaggcctccctaactatgtgaaactgtgagtccattaaatctctttttctttatacattactcagtcttgggtatgtctttatcaacagcatgagaacagacgaatacactaactaatggaggaatgacttgattcagaaatgtaaagaaatgggacggcttgcacctcaggagttctagagcagttcctgcctgtggctccaataagaatgtcaaggtcactggattgcattttatgtgttttctttcctaatttgatttttggaatagatgctgtgctatatttacatcgctcgaaaatcaaaataacataaaaagatatttccaaaaagcactaatctatgtcatctctctgtccattgtgttctccttctgctcgtagatggtcacatttagtactttgctgtatcttcttccagtgttttttttgttttgttttgttttattttttgacagagtttttgctcgttgttcagccctgaatgcaatggtgtgatcttggctcactgcaacctctgcctcctgggttcaggtgattcccctgccttagctttctgagtagctgggattacaggcgcccgcaccacagccggctaatttttgtaattttagtggagacgaggtttcaccatgttggccaggctggtctcgaact

SEQ ID NO: 63779 - DNA, 1148 bp, Homo sapiens
aggaatttcttctatgctgctttttgcccctttatttgactccatctgactccttcttagcacgtgttccccttgtttagggcacctcggttagctcgcacctcatgctaccaattggaaggctgccatgagcgttctcactcgtgtccttgttattgctctgcctaagtgtgtcttcctttaggttgtctggaaagcgacacctgagacaaagacttgggaacagtcaattcatttaggaggtgattccagaagcatagtgaaggaacagggaaaatgagagaaggaatacagacgtcaacgaaacgtgctttaatgagctgcttacctatgtggcctactgaggcttagcaccacccgggaacctctaaccactgcaggttgctttagtgggtccccaggggaaagagaggcattgctgggcagaggtcccaatcccagcacctttcccttgcttctgttctccctcctttctttctttctttttcttctttttttgagacagggtctcgctctgtcccccaggctggagtgcagtggtgtgatctcagctcactgcaacctccgcctcctgggttcaagtgactctcctgcctcagcctcccgagtagctgaaactactactgatggctgattccctgctgaaactcactggaggaattgcagtgcttcacctgatgagatgaggtgagactcagttttcctgggggcctgccaccacgcccggctaatttttttatttttagtagagacggggttttacgatgttggccaggctggtctcaaactccagacctcaagtgatccgcccgcctcggcctcccaaagtgctgggattacacgtgtgagccactgcacgcagcctgttctccctccctcttttctttcttccactatgctctgaggacatggcagtgaacacaacaggtgcctcctgctctcatggagattatattcttctgggggagtggggagatactgataatcaacaagtgaaatttaaggtaatttcagrctgttatgtgctgtgaagaaaataagatgccagcactttgggaggccaaagcaagaggatcagttgagcccaggagttagagactagcctgggcaacatagcaagaccctgtctctacaaaaacattaaaaaa

SEQ ID NO: 63780 - DNA, 956 bp, Homo sapiens
aatgaccaatttaccaggtaattgattcactaaatatttgtttctattctacttaggaagtttcagcaatttgtgttgcaaatcgttttggcaggctttgaggaattttttttttttttttgaagtttgggtctcattgtagccagagggaggggccatccctgtgccgcctccacgtgcctgccttctgccttcaaaacaactgggaatgtgcccccaaagcctcctctaacatggctgctatggccacagccctcaggcagrgcatcggaagggaggcctcctgaccagcttttgggtagctggacccatcacaaacacatgctcccagccaggcccaggccattgccatgccagactgggtcatttcaaaggccacataaaccagagaagttcaagtgagggaagtgaggtatttgcctcggatatgaagtttagggggcacacacaaaactcatgagaagtgttttaatgcaatatgttttaaatcaaaattaatgcaaaaaattcatgatatacaaaatgacaattttttttcgtttttttatttgtttgtttgtttgtttgtttgtttgtttgtttgagacagagtttcgctcttgttacccaggctggagtgcaatggcacaatctcggctcaccgcaacctccacctcccgggttcaaacgattctcctgcctcagcctcccgagtagctgggattacaggcacgtaccaccatgcctggctaattttgtatttttagtagagatgaggtttctccatgttagtcaggctggtctcgaactcccaacctcaggtgatccgcccacttcggcctcccaaagtgctgggattacaggtgtgagccactgcgcctggccgaaaatgttttaaatagagtcatgatcagtaacaatgctgtgacaagccatattggagcatgagggaaaaggaaaaatcaataatcctgttt

SEQ ID NO: 63781 - DNA, 956 bp, Homo sapiens
aatgaccaatttaccaggtaattgattcactaaatatttgtttctattctacttaggaagtttcagcaatttgtgttgcaaatcgttttggcaggctttgaggaattttttttttttttttgaagtttgggtctcattgtagccagagggaggggccatccctgtgccgcctccacgtgcctgccttctgccttcaaaacaactgggaatgtgcccccaaagcctcctctaacatggctgctatggccacagccctcaggcagagcatcggaagggaggcctcctgaccagcttttgggtagctggacccatcacaaacacatgctcccagccaggcccaggccattgccatgccagactgggtcatttcaaaggccacataaaccagagaagttcaagtgagggaagtgaggtatttgcctcggatatgaagtttagggggcacacacaaaactcatgagaagtgttttaatgcaatatgttttaaatcaaaattaatgcaaaaaattcatgatatacaaaatgacaattttttttcgtttttttatttgtttgtttgtttgtttgtttgtttgtttgtttgagacagagtttcgctcttgttacccaggctggagtgcaatggcacaatctcggctcaccgcaacctmcacctcccgggttcaaacgattctcctgcctcagcctcccgagtagctgggattacaggcacgtaccaccatgcctggctaattttgtatttttagtagagatgaggtttctccatgttagtcaggctggtctcgaactcccaacctcaggtgatccgcccacttcggcctcccaaagtgctgggattacaggtgtgagccactgcgcctggccgaaaatgttttaaatagagtcatgatcagtaacaatgctgtgacaagccatattggagcatgagggaaaaggaaaaatcaataatcctgttt

SEQ ID NO: 63782 - DNA, 956 bp, Homo sapiens
aatgaccaatttaccaggtaattgattcactaaatatttgtttctattctacttaggaagtttcagcaatttgtgttgcaaatcgttttggcaggctttgaggaattttttttttttttttgaagtttgggtctcattgtagccagagggaggggccatccctgtgccgcctccacgtgcctgccttctgccttcaaaacaactgggaatgtgcccccaaagcctcctctaacatggctgctatggccacagccctcaggcagagcatcggaagggaggcctcctgaccagcttttgggtagctggacccatcacaaacacatgctcccagccaggcccaggccattgccatgccagactgggtcatttcaaaggccacataaaccagagaagttcaagtgagggaagtgaggtatttgcctcggatatgaagtttagggggcacacacaaaactcatgagaagtgttttaatgcaatatgttttaaatcaaaattaatgcaaaaaattcatgatatacaaaatgacaattttttttcgtttttttatttgtttgtttgtttgtttgtttgtttgtttgtttgagacagagtttcgctcttgttacccaggctggagtgcaatggcacaatctcggctcaccgcaacctccacctcccgggttcaaacgattctcctgcctcagcctcccgagtagctgggattacaggcacgtaccaccatgcctggctaattttgtatttttagtagagatgaggtttctccatgttagtcaggctggtctcgaactcccaacctcaggtgatccgcccacytcggcctcccaaagtgctgggattacaggtgtgagccactgcgcctggccgaaaatgttttaaatagagtcatgatcagtaacaatgctgtgacaagccatattggagcatgagggaaaaggaaaaatcaataatcctgttt

SEQ ID NO: 63783 - DNA, 609 bp, Homo sapiens
ctaaccaaggtactcattttatttaccattaattccctttattcaktcagtttgtgtctgttaagcgtgttgtttgtattaagcactatggtagatgctaaaaatgaagatatatatagcactgaacctaccctcaaaatacctaagaaaaagagcaaaagaaaaatcaaggtgaatggcctattacaatacagtgttttaagagctctgacagaggtaaggcaacaactttttcagaggaagaaactcataagcaaaggactggagaaaaagtagaaaggaattattaaaacatcaacgaagttaaaagactataggttttggagtcagaaacccagacttgtaacacaaacttacttagtatgtgactatttttgacttgtcccttcaacagcctcatcaataagagcaataaagtggtcagaatgacagccccaggaatcactgtagccatttcttcttagccattgcaaccaaggactacacgtgttaccaacccacagttctagctgaagcacctagccaactaactagcaacatttagggaattaaaatgtgaataatagtgaaattcaatatatattccgtcagtctcttgtgtatgatccc

SEQ ID NO: 63784 - DNA, 609 bp, Homo sapiens
ctaaccaaggtactcattttatttaccattaattccctttattcagtcagtttgtgtctgttaagcgtgttgtttgtattaagcactatggtagatgctaaaaatgaagatatatatagcactgaacctaccctcaaaatacctaagaaaaagagcaaaagaaaaatcaaggtgaatggcctattacaatacagtgttttaagagctctgacagaggtaaggcaacaactttttcagaggaagaaactcataagcaaaggactggagaaaaagtagaaaggaattattaaaacatcaacgaagttaaaagactataggttttggagtcagaaacccagacttgtaacacaaacttacttagtatgtgactatttttgacttgtcccttcaacagcctcatcaataagagcaataaagtggtcagaatgacagccccaggaatcactgtagccatttcttcttagccattgcaaccaaggactacacgtgttaccaacccacagttctagctgaagcacctagccaactaactagcaacatttagggaattaawatgtgaataatagtgaaattcaatatatattccgtcagtctcttgtgtatgatccc

SEQ ID NO: 63785 - DNA, 764 bp, Homo sapiens
tctctcttcaaaaataaattaaccttagcttactgtaacatttttactgtataaaattttaaagtttttttcaaggtttttgaagtttttataagaacacttcagttaaaacacaatcacattgtacatcttacaaaaaggattttctttctttgtattcttattctatacgtatttttctatttttaaatttttaattttttaaaactttaaaactgttttgataaaaactaagacacaaacacacacattagtttatacctacacagggtcaggatcaccaatctccttgtctttcacctccacatcttgtcccattggaaaatctgcaggggatataacatgcgtgaagctatcatctccttttttgcttttcattttgttgctgtatttttttgctaatgttatttgtttattwtttttttaattatactttaagttctaggatacatgtgcagaacgtgcaggttgcaggtttgttacataggtatacacgtgccatggtggtttgctgtacccattaacccatcatctacattaggtatttctcctaatgctatcccttcagtagcccccaactccccagaaggtccaggtgtgtgatgttcccttcccgtgtccatgtgctctcattattcaactcccacttttgagtgagaacatgcggtgttcggttttctgttcctgtgttagtttgctgagaatgatggtttccagcttcatccatgtccctgcaaatgacgtgaactcatcctttttatgga

SEQ ID NO: 63786 - DNA, 658 bp, Homo sapiens
ttgtaaacgcaccaatcagcactctgtaaaaatgtaccactcagcactctacatctagctaaaggtttgtaaatgtaccaatctgcactctataaaaacagaccaatcagcactctgtaaaatggaccaatcagcgggatgtaggcggggccaaataaggaaataaaagcaggccacccaagccagcagcggcaacctgcttgggtttcttcccacrttatggaatctttgttcttttgctcttcacaataaatcttgctgctgctcactctctgggtctgtgccacctttaagagctgtaacactcactgcaaaggtctgcagtttcactcctgaaatcagccagaccacgaatccaccaggaggaacaaacaaccccagatgcaccacctttaagagctgtaatactcactgcgaatgtctgcagctttacttctgaagtcagtgagaccaagaacccaccagaaggaagaaatgccagacacgtctgaacacctgaaggaacaaactccggacacaccatctttaagagctgtaacactcactgcaagggtccatggattcattcttgaagtcagcgagaccaagaacccaacagaaggaaccaattctggacacacaatgatttacgtttacaaactcatataatctcacttgt

SEQ ID NO: 63787 - DNA, 763 bp, Homo sapiens
attcattccctctaaaaattatttactagccctctaacaattgcctacaacacgccctccactgctgctcccatttccctcttccttgaagaagatatttaagccccaaccatctggcctgtttggagtctcatatttgagtgacttccatgttcatattcatgctaatacatttgttatgttttttttcctgttaatttgtatattgtcattcattttaggggatcttcaaagaaggtagaagggaagccttctctccatctctacgctacaaaatatgttattgagaattctgtcgtacttcatgcttattaataaagtcttaggtcattattaactttttttctggataaatttccaagagacagattaccattttaagaaatatgaaagctagcagatgtcaacttggtgtgtaaggaaaggaagatgccaaggctctggtaattttgagctattagtacacctagtcattttccaggtcaaaagcaaagatccacttcgccctcattagaagagaataattgaaatctatgaaggtgtttagtgtctaattggtgagaaacctagagagtcagtatttctgagwagctagaggttataggtttctgtttgtcaatacaagaaaagattttataccctgcttttggtctggtagctaattggttaatacacatgtatatttataaagcatgagatataaatagatgtgtgccatatgtactttaagtcacttaattattttatattaatgtaaaatata

SEQ ID NO: 63788 - DNA, 1170 bp, Homo sapiens
attccttttttaaatgcttcactcggggaattttcagacaatctttgttttgtattcctgccctttgttatacatggctgcaacccagaactgtcagaggagattaagtttataaaagaagagtttctacatttttgaaatattttgactaagtgaaatcatttttttttctatctgcaatgcaattcagctcagttcgacagatatttactgggccttgtgcaaaccactgagctttaatagatgaatgagacattgctcctggcttcaggtgaacacaaataatgtctctttactgtggaaactgctatggtacacaagcaggcacaggctgctagaggaggacaaaagaagaatgctgagctctgcctcattagagaaaatgagctaagtcatgaagaccagtaaaagctgagcagaaaaagaagggcaggagcagcagaagcaaaggtcatgaagtttcatgaacacgcaaaggtaactactataggtgggaaagtagcaaactgtttgagcatcattagagtccacagcaggagacayagctgcaaaagggagagccttgtatggcctgccagggagtttggacttgaatctaagcagtggttaaagaaaggaccttggtcaggtttccttttagaaggcttgtcttggctttgatatggaggatgaatacgggaagggataaatctataggcggagagccatagaggccaaaaggaggcgtatattagaaaggtttgggcagcagacactgcagggcttgatgattgctggtctgtgagtgggaggagtccaggaggatccttggtcctgactcgtgtgactcagggaatgatggtgccatttatttatttatttatttatttatttattattttatgtctttgtgtatgtatatgagatggagtcttgctctgtcacccaggctggagtgcaatggtgcgatctcggctcactgcaatctctgcctcccaggttcaagtgattctcctgcctcagccacccgagcagctgggattacaggcgcgtgccaccatgcccagctaatttttgtatttttagtagaggcggggtttcaccatgttgaccaggctggtctcgaactcctgacctctggtgatctgcctgcctcagcctcccaatgtgctgggattacaggcatgagcc

SEQ ID NO: 63789 - DNA, 780 bp, Homo sapiens
ttcctcctcaaacttacatgctcaagatattccatttcatgtctctgtcttccacacagtacttctgcttgggaaactgcctctcttaaatcttcatattttctatccttcaagactccctaacatctctctcctcctctgtaaagctttctctaatccctctccaaacaaaaataattactcttccaccactgtatttgtaaataccctttaatgagagacactcacagaactcactctccactgatattcccaccttgtctacatagccattggagcamggctttaccataaagccttcatcgattttaaggacagaagaatttcaagactgtatgcagcccaggatggctttgaatgtggtccaacacaaattcataaactttttaaaaacattatgaggtttttttttgcattttttagctcattagctattgttagtgttagtgtattttatgtgtggctcagggaagccaaaagattggacacccccgtagtaaatgataggggtcttgttttccaccacaaacaactaaatgattagagagctagactaaatatatgaagcaactgttttcaaccactggataacaagacgcacaggaatgcagaccctgctagagaagcaaatgagatgaagcctataagctccttggctttctgccagggcaaaatagaactcatgctcacagtggtcaggggacagacacagaaatacaaggataaggcagctggagaagagggagctattcagaaaaagacttctagaaatctacctaa

SEQ ID NO: 63790 - DNA, 707 bp, Homo sapiens
ccccgatagattcttatcaagggccatatacttctatctgtttcaagtttaaatacagctgaaagaatattaagatattggtcagttataaaattcataacttcccttgaattaataatcttttgtcttcattctcatgatatagccctggcatagaaatttttcataaataaaacctaaacctagattatctatcatctatctatctatctatctacctatttatttttttgagacagtctcaccctgttgccaggctggagtgcaatggcgtgatctcggctcactgcaacctccgactccctggttcaagcgattctcctgcctcagtctcccgagtaactgggattacaggcacgcaccaccacgcccagctaattkttgtatttttagtacagacagggtttcaccatgttggccaggattgtcttcatctcctgacctcgtgatccacccaccttggcctcccaaagtgttgggattacaggcatgaaccaccccgcctggccaaacctagattattttaagagccttaaaaagtcgcctgtgggttctttctcgtcttcattttactctgcagaatgtcactagaataatttcccaaaacttgactttcagcatgtcatcccattgttctattagttttttagattacaaagaatcatggtgaagtggcttagaatcatgtgatcagttctgtcatttgg

SEQ ID NO: 63791 - DNA, 937 bp, Homo sapiens
agttaagatgcaatttcatttttacaatgaaattgtaaatttttaaagtcagtattactcagagtttgcacatttggtacaacagataaaattagagacgatgacggagacaagaacgcttactttctgatagtacttacattattatactgaggtagcattttttttttttctgagacatggtctcgtcctatcgcctaggctggagcgcaggggtgtgatcacagcttactgaagcctcaacttcccagactcaagtgattccccacttcagcctccagagtagctgggactactgtgtgtgccaccatgcccagctaagttttgtattttttgtagagatgaggtttcactgttttgcccaggctggtcttgaactcctgggctcaggcaatccacttgccttggcctcccaaagtgctgggattacaggtgtaagccacagtgtgcagcccatactgggktaatttaaagtaaatttttcaggatatacgagaggttcttaagagactgatatatccaaatctcccgtgtatgtaggctcaaaaatattatctattataatttaattttatatttagaaagcgatttttgaaacttctgctttctaaaataaatatgtaatagcaagtgcctaagattgtaaagtgatgagaaacacagagagagataatcttatagacttaaatatttgctgtgaatgttataaaattttttgttgttagagatgatagtacatttcaggtattttgttttctaaaaaccttcaaaaacaaagcattgagactcccctctgtcttattattacttaatagagtaacagattctaactgtattgttagtttctgactgaaagcatccaaaagatggtcatttgtcttttccaaagataaaaagttacctttagtttcaaaaattgtttaatttatcatatata

SEQ ID NO: 63792 - DNA, 547 bp, Homo sapiens
cctctctccctcctttccttcctttttagtaaagaaaaaggatgtaacactgctatgacttcccaatgtaaccgaagtcaaaaaagtcayccagaaaaaaaagaagttattcaaaaacaaagaaaaagcacttagctatttcaaaattccagccaataaaaaaggcttgactgttttgtgaaatattagaagcaacacatatattctgactttttttttaacattaggcaaataaacactgtttagaaactaagtattttgaataaagagaaaaggcaaactggtttgaaaaaagtgatcagttggatcacttgtccactggaaaaagacattactgatcaccacaaaaaaaaaggtttctaacggtatagccttcatgattgataccatttttagtgacagaagagaactaagagacttctaggttagggattagcaatgtttttaccacaaaggacccctccctttcacaattcccttctcttcctatgatcttcaaatactgattttatctataaatctaaataaatgtcaattttttaaccaa

SEQ ID NO: 63793 - DNA, 547 bp, Homo sapiens
cctctctccctcctttccttcctttttagtaaagaaaaaggatgtaacactgctatgacttcccaatgtaaccgaagtcaaaaaagtcacccagaaaaaaaagaagttattcaaaaacaaagaaaaagcacttagctatttcaaaattccagccaataaaaaaggcttgactgttttgtgaaatattagaagcaacacatatattctgactttttttttaacattaggcaaataaacactgtttagaaactaagtattttgaataaagagaaaaggcaaactggtttgaaaaaagtgatcagttggatcacttgtccactggaaaaagacattactgatcaccacaaaaaaaaaggtttctaacggtatagccttcatgattgataycatttttagtgacagaagagaactaagagacttctaggttagggattagcaatgtttttaccacaaaggacccctccctttcacaattcccttctcttcctatgatcttcaaatactgattttatctataaatctaaataaatgtcaattttttaaccaa

SEQ ID NO: 63794 - DNA, 531 bp, Homo sapiens
gaagtgggcgcagtcttgtggaactgagccctcaacctgtggggcccgatcctatctgcaggtagacagygtcagaactgagtggaatcacagggcagccagctggggtctgccagagaattgcttggcgggtgggaaacatctgcacacgctctggtggcttgaggtgaagtgctctgtgctgtgttgagtgtgtgaaagtaggaaaaacattttggttttttcctatctcagtttccaaaaatgctaattaacatattaagctttaaaagcctgagatttttctcacagctgagggcctgaccacttgaaccacaggccaagcccctgaaattctttagggctgcctgtctttaacttagagtctagaaactgcttgaggggagggagtttttaccccccaaggaatcccagcaggggcctgaagatcgggacccgccctccccttcccctcgcctgtgtgaagtgttttggtcctcgatcactcacagggatttcctgaagggtgtgtacaccagggactgggcttgt

SEQ ID NO: 63795 - DNA, 531 bp, Homo sapiens
gaagtgggcgcagtcttgtggaactgagccctcaacctgtggggcccgatcctatctgcaggtagacagtgtcagaactgagtggaatcacagggcagccagctggggtctgccrgagaattgcttggcgggtgggaaacatctgcacacgctctggtggcttgaggtgaagtgctctgtgctgtgttgagtgtgtgaaagtaggaaaaacattttggttttttcctatctcagtttccaaaaatgctaattaacatattaagctttaaaagcctgagatttttctcacagctgagggcctgaccacttgaaccacaggccaagcccctgaaattctttagggctgcctgtctttaacttagagtctagaaactgcttgaggggagggagtttttaccccccaaggaatcccagcaggggcctgaagatcgggacccgccctccccttcccctcgcctgtgtgaagtgttttggtcctcgatcactcacagggatttcctgaagggtgtgtacaccagggactgggcttgt

SEQ ID NO: 63796 - DNA, 531 bp, Homo sapiens
gaagtgggcgcagtcttgtggaactgagccctcaacctgtggggcccgatcctatctgcaggtagacagtgtcagaactgagtggaatcacagggcagccagctggggtctgccagagaattgcttggcgggtgggaaacatctgcacacgctctggtggcttgaggtgaagtgctctgtgctgtgttgagtgtgtgaaagtaggaaaaacattttggttttttcctatctcagtttccaaaaatgctaattaacatattaagctttaaaagcctgagatttttctcacagctgagggcctgaccacttgaaccacaggccaagcccctgaaattctttagggctgcctgtctttaacttagagtctagaaactgcttgaggggagggagtttttaccccscaaggaatcccagcaggggcctgaagatcgggacccgccctccccttcccctcgcctgtgtgaagtgttttggtcctcgatcactcacagggatttcctgaagggtgtgtacaccagggactgggcttgt

SEQ ID NO: 63797 - DNA, 642 bp, Homo sapiens
tcagcagttgctgctcagatcagttgcctccttggaccatgttcccatgagcaagacaggagccaccaggaaatgcaggtttccatttggacaagctcctttaggctggacagtcgagggatggtagaagtgtgcccccaccccattyctgccccactttgctctaatggtgtgagttggaaggaccatctccctcacttttcccttcatcctgagtgaaacctggtttccacagctcacatggcgccgtatttccaacgttcagagcacattggaaagttgggaggaaggatgaggcttgtgttttcactcacagtaagtcaaaggggcttcttgggatggtccatttccctagttgttcagcagaggaaggggctttgtgatcactgtttacattgtatttgttttcctcctagaactccctccagaagatgataatgaaagtgtctgacgcataaggaaataaataagatggttatgtgcccagctcaagggctaaggtgttggtcaagaccacacccgaggggctgccagtcacagggtggggtccaagctcctcaccagacccaacctcccctgctctgcaacctcatccttcccctgtctttcctgggttaaattttacacttagtaacactgaaa

SEQ ID NO: 63798 - DNA, 645 bp, Homo sapiens
aaagattggggggaggcaggttttctttaaacattaaacctttgctggaactttcagaaactttccttatagatcattaacttctgggggagggtgggagcagaagccgtggagtctgaattcagaggtgcctctataaaagaggaagcaaggcagaaaatcttggaaccagacagagctgggttcagattctagctatactagctgtgtggccttgggcaagctacttaacctctctgcagctcgatttctttatcactaaagtggagatacactatacctattttgcatggttgttgtaaagatgcaaaagatcctatgtggggtaccttagctcataggatgcccccaataatagtaacagtgttgctgctgtcaggcttaacactgggcatgcaggagaagaaggagtcttgaggggcttttaacttagacggcaggaataagaaagccaggaagggccaagccactgtgccagcacattttcagtatcacagcacttcatgatttttttcacaaatcttttgatttttttttaaactaaatctttccatgttgaacaggcagatgctggcgacagcactgtgcagtgtactggcatgagggcctggactctaggaggctggactrcagcttacccagctg

SEQ ID NO: 63799 - DNA, 1039 bp, Homo sapiens
taaattaactatgaaatgctagtctttayacacaatatttggtcaaatcaataaatgcttgacacccggacttgtgcaaggaagacacaggggtatataatctctacctacaggaattctaaaatatacttagaaaatgtttaagtgttaaacaatgttttaactgtcattcaaagaaacaatagaagagatattttaaggtaacacacaattagctcccaaatgaatgacttagtaaatgccatctaacgtgaagagaaaagcgagagagttggcaaagttgtggttagagaagcattcccaagaaagcagaaagtccatgagctctccaaattcacaaacattaactataaaacagttaagagcttactaatttactcttgattttagagaaatacagcctgagatggacagcagtaattgcaaagttattgctcctctcctaagtcaaagataccggaggatggtcaccaaggatggccacagcacacttcaaatggatggcgctcaaagaggtcttgcatatcttcgagatgcttggggaatctaatggacatgcgctggcgttggatgatgttggtcttttctgcttcttttgttgtccactggcttgtctttgcagtgctctggtatgttctggctgagatgaatggtgatctggaactagatcatgatgccccacctgaaaaccacactatctgtgtcaagtatatcaccagtttcacagctgcattctccttctccctggagacacaactcacaattggttatggtaccatgttccccagtggtgactgtccaagtgcaatcgccttacttgccatacaaatgctcctaggcctcatgctagaggcttttatcacaggtaattttgtctttgttcttaaaaaaaacaaaaacaaaaacaaaacaaaacaaaactacaggtgtttggaaagggtatagtcagttataagtaatgctgttacagaataatttatctatattgatagcaggtaatgtctaagatagaaaagaaacagtttagagccaaaaaaaa

SEQ ID NO: 63800 - DNA, 698 bp, Homo sapiens
atagaacgatggataagaagagaggtgaagttccccactctaacaagtctacattctaacacaagaaacaggtatattatggagacaggcagatttttttagaagaatgatttcaaacacagttgacccttaaacaaaatgggtttgaactgcacaagtccacttataagcagattttctttcacctctgccacccaagagacagacacccaagaccaacacctgctcttcctcctcttcctcagccttcccaatgtaaagacgatgaggttaaaggcttttatgatgatccacacccacttaaggaatagtaaatatattttctcttcctgatgattttcttaataacattttctcttcttcagattacttaatataaaaatacagtatataatacatatacaaaatgtgtgttaatcaactatttakgttattagtaaagcttccagtcaatagtaggctattagtagtcaagtttagagaatcaaaagtcactcagattttgtattgttcgagaggtcagtacccctaatccccacattgttccagggtcaactgtggtggtaagaattataaagagaaaaaacagctaatagcatagattaacattaatatctctgggtaccatgttatacggtgggtcagcaaggtttcattgaactgaaagataacttaagaggaagagcctgtgggacatg

SEQ ID NO: 63801 - DNA, 629 bp, Homo sapiens
aatctcaacagcttccagcaaccaacatttatttctcactaaaaggatcagctggagggttgagctcactctgatttaggctactggttgggttcagttatcttccacgtgtcattcatttctaacctaagctgaaggtgcagtagcttggggcaaaatcttctactgactaatggcagtagcattcatcatgggtggcatgaggccagctaacccatcaagcatatttaaagcctatgccatttgtcaggcctctgagcccaagctaagccatcatatcccctgtgacctgcacgtacacatccagatggccggttcctgccttaactgatgacattccaccacaaaagaagtgaaaatggcctgttcctgccttaactgatgacattgtcttgtgaaattccttctcctggctcatcctggctcaaaagctcccccactgagtaccttgtgacccccactctgcstgccagagaacaacccccctttgactgtaattttcctttacctacccaaatcctataaaacggatccacccctatctccctgcgctgactctcttttcagactcagcccgcctgcacccaggtgaaataaacagccatgttgctcaaacaaagcctgtttgg

SEQ ID NO: 63802 - DNA, 1635 bp, Homo sapiens
attgaaacagatatttgtatatcaatgttcttagcagcattaatcacaatagccaataggtggagacagccaaaatgcccattaatggatgaatggataagtatataatatgtggtgtaaacacacatatgcacgcatacacaaaacgaaatattgctccatcttaaaaaggaatgaaattctggtacatgttacaatatgaatgaaccttgaaaacattatgctaagttgaataaaacaatcacaaaatgacatatattgtgtgattctactcatgtgagataagcagaatagtcatagagacagaaagtagaatagacattaccaggggtcagggaaagtgaggaagggagagttggtatttaatgagtacagagttgcagcctgggaagatgaaaaagttccggcgttggatggtggtgtcactgcacaacaatgtgaatgtacccaataccaatgaactgtacacctaaaaatggttaagacggtagattttatgttacatatattttaccacaataaaggttagctacttgcagaagtttacctaattataaactagtctaagacagctagtcagccacacaagattctatgcatttccaaactagaaacgatagcacagattatagtcacttataaatttccagtaatctagatataaataagacatgcgatmtaacaaaatttaaaatgttgtctttgcagtacacagtcaaattatgcctcaaagtctcaccatagaattttctctctcaaaggctgtgagaagaaattttctgtaactttgcacacagactgttgatgagcctggacacttcactcctgtccctgtattaaagtgagaaacagcacagatctggtcataatgtctagatcaagaatatctggtaggccctggggataaagaaggtcataattaagtccagtccctgttctcaggagttttcagatgtcatggagaaaaacatatcatgaatacttttttgagaggtagctacgagcagttgccagtgcattgcagctgtcctatcatgcactttgccttctccccaagtatcatttctcactctctgcatagccattatcaaaacttagaatatttgtgtttatttattttaacttctgcctctttctagaggtttaaggtgttttccaacgagaacatgataagatgaaaatagataatcaagactagaaaagaaagaggctcagagcctcaaggacattgtataaccctctcaccctaaattttactccatttctttttaaatggcaacagtgcaaaagcttccttgcatgctagaaagattgatttcccagagtcaaaatttttcagaatcattgcttttgacacttgtctatggagacaacattgtagatgtaacttggagatattatatgaaaatgaatttcatttgtagtaaattatcaaataaaataatctggctttgagatatgctacataattaggccattgacagaattttatgtggacagagaaaggctattttggacttactgatatattttgccaaaatgcttcctattacatgataattggatatattatctggatgtattttactgatacaacatacacaaagagcaagcatacaaacacacacacacaca

SEQ ID NO: 63803 - DNA, 1635 bp, Homo sapiens
attgaaacagatatttgtatatcaatgttcttagcagcattaatcacaatagccaataggtggagacagccaaaatgcccattaatggatgaatggataagtatataatatgtggtgtaaacacacatatgcacgcatacacaaaacgaaatattgctccatcttaaaaaggaatgaaattctggtacatgttacaatatgaatgaaccttgaaaacattatgctaagttgaataaaacaatcacaaaatgacatatattgtgtgattctactcatgtgagataagcagaatagtcatagagacagaaagtagaatagacattaccaggggtcagggaaagtgaggaagggagagttggtatttaatgagtacagagttgcagcctgggaagatgaaaaagttccggcgttggatggtggtgtcactgcacaacaatgtgaatgtacccaataccaatgaactgtacacctaaaaatggttaagacggtagattttatgttacatatattttaccacaataaaggttagctacttgcagaagtttacctaattataaactagtctaagacagctagtcagccacacaagattctatgcatttccaaactagaaacgatagcacagattatagtcacttataaatttccagtaatctagatataaataagacatgcgatataacaaaatttaaaatgttgtctttgcagtacacagtcaaattatgcctcaaagtctcaccatagaattttctctctcaaaggctgtgagaagaaattttctgtaactttgcacacagactgttgatgagcctggacacttcactcctgtccctgtawtaaagtgagaaacagcacagatctggtcataatgtctagatcaagaatatctggtaggccctggggataaagaaggtcataattaagtccagtccctgttctcaggagttttcagatgtcatggagaaaaacatatcatgaatacttttttgagaggtagctacgagcagttgccagtgcattgcagctgtcctatcatgcactttgccttctccccaagtatcatttctcactctctgcatagccattatcaaaacttagaatatttgtgtttatttattttaacttctgcctctttctagaggtttaaggtgttttccaacgagaacatgataagatgaaaatagataatcaagactagaaaagaaagaggctcagagcctcaaggacattgtataaccctctcaccctaaattttactccatttctttttaaatggcaacagtgcaaaagcttccttgcatgctagaaagattgatttcccagagtcaaaatttttcagaatcattgcttttgacacttgtctatggagacaacattgtagatgtaacttggagatattatatgaaaatgaatttcatttgtagtaaattatcaaataaaataatctggctttgagatatgctacataattaggccattgacagaattttatgtggacagagaaaggctattttggacttactgatatattttgccaaaatgcttcctattacatgataattggatatattatctggatgtattttactgatacaacatacacaaagagcaagcatacaaacacacacacacaca

SEQ ID NO: 63804 - DNA, 1635 bp, Homo sapiens
attgaaacagatatttgtatatcaatgttcttagcagcattaatcacaatagccaataggtggagacagccaaaatgcccattaatggatgaatggataagtatataatatgtggtgtaaacacacatatgcacgcatacacaaaacgaaatattgctccatcttaaaaaggaatgaaattctggtacatgttacaatatgaatgaaccttgaaaacattatgctaagttgaataaaacaatcacaaaatgacatatattgtgtgattctactcatgtgagataagcagaatagtcatagagacagaaagtagaatagacattaccaggggtcagggaaagtgaggaagggagagttggtatttaatgagtacagagttgcagcctgggaagatgaaaaagttccggcgttggatggtggtgtcactgcacaacaatgtgaatgtacccaataccaatgaactgtacacctaaaaatggttaagacggtagattttatgttacatatattttaccacaataaaggttagctacttgcagaagtttacctaattataaactagtctaagacagctagtcagccacacaagattctatgcatttccaaactagaaacgatagcacagattatagtcacttataaatttccagtaatctagatataaataagacatgcgatataacaaaatttaaaatgttgtctttgcagtacacagtcaaattatgcctcaaagtctcaccatagaattttctctctcaaaggctgtgagaagaaattttctgtaactttgcacacagactgttgatgagcctggacacttcactcctgtccctgtattaaagtgagaaacagcacagatctggtcataatgtctagatcaagaatatctggtaggccctggggataaagaaggtcataattaagtccagtccctgttctcaggagttttcagatgtcatggagaaaaacatatcatgaatacttttttgagaggtagctacgagcagttgccagtgcattgcagctgtcctatcatgcactttgccttctccccaagtatcatttctcactctctgcatagccattatcaaaacttagaatatttgtgtttatttattttaacttctgcctctttctagaggtttaaggtgttttccaacgagaacatgataagatgaaaatagataatcaagactagaaaagaaagaggctcagagcctcaaggacattgtataaccctctcaccctaaattttactccatttctttttaaatggcaacagtgcaaaagcttccttgcatgctagaaagattgatttcccagagtcaaaatttttcagaatcattgcttttgacacttgtctatggagacaacattgtagatgtaacttggagatattatatgaaaatgaatttcatttgtagtaaattatcaaataaaataatctggctttgagatatgctacataattaggccattgacagaattttatgtggacagagaaaggctattttggacttactgatatattttgccaaaatgcttcctattacatgataattggatatattatctggatgtattttactgatacaasatacacaaagagcaagcatacaaacacacacacacaca

SEQ ID NO: 63805 - DNA, 719 bp, Homo sapiens
acagaactagcattcaatgtgccatgggactggcctctgaaacacttggtcatcaagattctccaaccaaaatcccccagtacatatgctcctcaacttaggatggggttttatgtctgataaacccatcataaattgaaaatgtaagtcggccaggcgcggtggctcacgcctgtaatcccagcactttgggaggccgaggcaggcagatcacgaggtcaggagttcaagaccagcgtggccaacatgatgragccccatctctactaaaaatacaaaattagccgggcgtggtggtgcatgcctgtaatcccagctactcaggaggctgaggcaggagaatcgcttgagcctgggaggcagaggttgcagtgagccgagatcgtgtcgctacactgtagcctgggcgacagacagagactccatctcaggaaaaaaaaaaaaaaaaaatgttgtaagtcaaaaatgcatttaggccaggcgtggtagttcacgcctgtaatcctagcactttggaaggccaaggcaggtggattgcttgagctcaggattttgagaccagcctgggcaatatggcaaaatcccatctcttcaaaaaatagaaaaaaaatagccagaagtggtggtgcacagcaatagtcccagctgttcgagaggctgaggtgggaggatcacctgagcctgggaaggtagaggcggcattgagccatgatcgcacc

SEQ ID NO: 63806 - DNA, 598 bp, Homo sapiens
ggatcctcaatgccattccaagtgttcttatcagataaaggcaaagcaagataatgagagcacacataggaggaaagcgaagggaagactgttggcaagtcagattgctgacaacccccacaagcaggaagaggcagagaataattttcctctgagcctccagaggagcatggtccttccgacaccttgatttaggacctgtagcctccagaactttgagagaatagtctcttccttttaaaccaccttaggaaactcatacgcatggcaacagtattytctttactctcatgagcctaaaaatgcacatttgatgttgaacctgcggaaagtgaaagttgggatagaaagacaggaagtggagcccatgggactatcatctcaattcatccacctcctgcgggagatttttctatgtcctttctagtgattcctgcacaccctcacacccaccccaccccacccctaaatactgcctttacaggagcagatatagttccttggttgtataactcttgatggaaacttaaattcaagtgtaaggaaaacagcaaatttggagccagaacgcagactgagccctgatctaccacctcct

SEQ ID NO: 63807 - DNA, 598 bp, Homo sapiens
ggatcctcaatgccattccaagtgttcttatcagataaaggcaaagcaagataatgagagcacacataggaggaaagcgaagggaagactgttggcaagtcagattgctgacaacccccacaagcaggaagaggcagagaataattttcctctgagcctccagaggagcatggtccttccgacaccttgatttaggacctgtagcctccagaactttgagagaatagtctcttccttttaaaccaccttaggaaactcatacgcatggcaacagtattttctttactctcatgagcctaaaaatgcacatttgatgttgaacctgcggaaagtgaaagttgggatagaaagacaggaagtggagcccatgggactatcatctcaattcatccacctcctgcgggagatttttctatgtcctttctagtgattcctgcacaccctcacacccaccccaccccacccctaaatactgyctttacaggagcagatatagttccttggttgtataactcttgatggaaacttaaattcaagtgtaaggaaaacagcaaatttggagccagaacgcagactgagccctgatctaccacctcct

SEQ ID NO: 63808 - DNA, 602 bp, Homo sapiens
aaaaatcacaaatttcgtcagcctctttcttttttctttctttttttttttgacagagtctcgctcttgtcgcccaggctggagtgcaatggcgcaatctcagcttattgcaacctccacctcccaggttcaagcaattctcctgcctaagcctcctgagtagctgggattatagccacaagccacgacgcccagctaatttttgtacttttagtagagacgaggtttcaccatgttggccaggctggtcttgaactcctgatctcaggtgatctgcccacctcggcctcccaaagtgctgggattacaggcgtgagccaccgcgtctggcccaggctctaactttcttaggtcaaaacaactctgtgaaacactagtcagaagactaccactracacagatctcaagcaagccactttactcctctgaatgaacctgtgttttctaccatagacgggttattataactcttaactctgcaaatctcacaggttcattgtaaaactcacatgaaacagtgaaaacactaacaaaagtaaggtagaatccacaggtacctctctattataaaggtatgtcatatgagcttgtaatatacattt

SEQ ID NO: 63809 - DNA, 602 bp, Homo sapiens
aaaaatcacaaatttcgtcagcctctttcttttttctttctttttttttttgacagagtctcgctcttgtcgcccaggctggagtgcaatggcgcaatctcagcttattgcaacctccacctcccaggttcaagcaattctcctgcctaagcctcctgagtagctgggattatagccacaagccacgacgcccagctaatttttgtacttttagtagagacgaggtttcaccatgttggccaggctggtcttgaactcctgatctcaggtgatctgcccacctcggcctcccaaagtgctgggattacaggcgtgagccaccgcgtctggcccaggctctaactttcttaggtcaaaacaactctgtgaaacactagtcagaagactaccactgmcacagatctcaagcaagccactttactcctctgaatgaacctgtgttttctaccatagacgggttattataactcttaactctgcaaatctcacaggttcattgtaaaactcacatgaaacagtgaaaacactaacaaaagtaaggtagaatccacaggtacctctctattataaaggtatgtcatatgagcttgtaatatacattt

SEQ ID NO: 63810 - DNA, 801 bp, Homo sapiens
taggctccagggccctgaccctggagctgaaatgagataccatgcttatttcaattctatccagcaggagtgagaggattctggaattctattttgattgaytcagtcttttatctggatagcttcctgagactcaccttgcttctacatatcccttgattttaagatgaggatgagcctcccccaaggctgagtcatgcaggactaaaggacttctgctggctcttgagtgaagccctcactggggatgcactcttccctgagctgctcatgggcccctggtgaaatgtggatgctgtcatgtgaaggcagtttggggatctggtcccactgcttaccaagcctctcctccagagtgtctgtaatgaaaaaagtagagaaataattatttgacataccaagaggaaggcagggcacacatgagttggaatcctttaccaaaggcacatgaagaacccttgggcaaggtgaagagggagccacttctattattattacttcctaataatcttctctttctcttgtgcagtttttaccattcacatccattttcatgtgactttcttaacaaccttccttgtgaagcagttaagacaggatttttttaaatcccctttcccagatgaagtaactgaggctcagtgatgggatctgagaaggaacagaagtcaggacagtcgagaccccacctgtctcactgggtggccagcacttgcttcacatcatccgaggggtgtctcttgccccacagccagtcctgaactgccactttggctgacaaacaatgagaaaccaggggcc

SEQ ID NO: 63811 - DNA, 955 bp, Homo sapiens
ccttcttttatttaactacatttaaaggattcttaccatttttttcactttttgaaattataactacttagtagaatgtctttattgcataaatctctgtaatctttcctgggactcctgaaatgcactgatgtcatctcctcaaataaagcagttaatgagatggcaaatcttgcttgctgattgctgtttttgtttattcttcaaataatttttaaatactttgttcaccacttcttaagggatagtgttgattatgttcttcaataagcaatgcttttattcttgctttctaaaagtgatacagatgagctttgttttaatctcattattatgcccctgtaaaacaattatttagagactaagaagaagtaatctgaaaggaattgtgatattttccaaaccttggaatttcttgtgtttattgtagtaattatagctatcatttattgtgtggttactatgtaccacatattgtgataaaaaacttgcatttcttgtgtttacagcaatcctaaggtaactattattaaatattgctacccctattttgtagatgaagaaatgaggtacagagaggttaactgactctcctatggaattacagccagctagaggtggaatcaagatgttatccaattctatgatagaattgtaacagtattgctcaaaagaagagtgtttctgtggcaaattagcttgaagaaagtgtggaaattctatgtctgggtggaggtttgarcggattatgatcttttaaaactagggaggaacttgtcagttcacactgaactctaccatcgtttttgtataatcagctgttgagttttactttctttagcttagagatgcacaaaacttcccaaagatggtaatcacttctagctatgagtcatttctctcaccttctgcaggaactaaagaaactcttgtcataatttcttgtcataatttc

SEQ ID NO: 63812 - DNA, 747 bp, Homo sapiens
tgaatatcttcataaaggttataagatgtgaaggcaaaagtctttctagtctattaagatgctgcatagaccaggtgcagtggctcatacctgtaattycagcactttgggaggccggggtaggaggatcacttgagcctagaagtccgagaccagcctggccaacatagtgagaacatgtttctgtgattaaataaataaataagtaataaataaataaatgctacacgatcatagatttagttttttatgttcaaaaaaatccttattttcagaaattctcctgctaaaagccacataaacttgggaagaaaaatagaacacagtgaaccattattgggcattaatggcttactcaaaattaattttatgtattagtcacccagcaatatcctagaaaaaaaagtaatggaacttagaaaaacatttcaggctagaaactttccttccttccttccttccttccttcctgcctgcctgcctgcctgcctgcctgcctgcattccttccttcctccttccctatgttcctccttcacttttccttttgtctaaaattttatataataaatacttaaaatatactaggtgtttgctatgatgtaggagcaatatgattattttttaaagggagaacataaaaaacaagctagtgatttagaacaattatcccttttttggaggcagaggagtaaaacaaaaattatagatatagaaaatatgtcaaggagacagtgacgttttggct

SEQ ID NO: 63813 - DNA, 747 bp, Homo sapiens
tgaatatcttcataaaggttataagatgtgaaggcaaaagtctttctagtctattaagatgctgcatagaccaggtgcagtggctcatacctgtaattccagcactttgggaggccggggtaggaggatcacttgagcctagaagtccgagaccagcctggccaacatagtgagaacatgtttctgtgattaaataaataaataagtaataaataaataaatgctacacgatcatagatttagttttttatgttcaaaaaaatccttattttcagaaattctcctgctaaaagccacataaacttgggaagaaaaatagaacacagtgaaccattattgggcattaatggcttactcaaaattaattttatgtattagtcacccagcaatatcctagaaaaaaaagtaatrgaacttagaaaaacatttcaggctagaaactttccttccttccttccttccttccttcctgcctgcctgcctgcctgcctgcctgcctgcattccttccttcctccttccctatgttcctccttcacttttccttttgtctaaaattttatataataaatacttaaaatatactaggtgtttgctatgatgtaggagcaatatgattattttttaaagggagaacataaaaaacaagctagtgatttagaacaattatcccttttttggaggcagaggagtaaaacaaaaattatagatatagaaaatatgtcaaggagacagtgacgttttggct

SEQ ID NO: 63814 - DNA, 747 bp, Homo sapiens
tgaatatcttcataaaggttataagatgtgaaggcaaaagtctttctagtctattaagatgctgcatagaccaggtgcagtggctcatacctgtaattccagcactttgggaggccggggtaggaggatcacttgagcctagaagtccgagaccagcctggccaacatagtgagaacatgtttctgtgattaaataaataaataagtaataaataaataaatgctacacgatcatagatttagttttttatgttcaaaaaaatccttattttcagaaattctcctgctaaaagccacataaacttgggaagaaaaatagaacacagtgaaccattattgggcattaatggcttactcaaaattaattttatgtattagtcacccagcaatatcctagaaaaaaaagtaatggaacttagaaaaacatttcaggctagaaactttccttccttccttccttmcttccttcctgcctgcctgcctgcctgcctgcctgcctgcattccttccttcctccttccctatgttcctccttcacttttccttttgtctaaaattttatataataaatacttaaaatatactaggtgtttgctatgatgtaggagcaatatgattattttttaaagggagaacataaaaaacaagctagtgatttagaacaattatcccttttttggaggcagaggagtaaaacaaaaattatagatatagaaaatatgtcaaggagacagtgacgttttggct

SEQ ID NO: 63815 - DNA, 867 bp, Homo sapiens
aacatggcttcaccatccaagcacataatcagtggactcaaatcattgcacctgttatagaccagtttgggcgttactgagtcatctgtggtacargctatgtgacatttatgcaaggtagaccatatatggcttcataagacgttgggaaaacaaagaacctagtccttcgctgcagataatgtgagaataaagactgtaggttgttctttatttgcatacatagtcattttgaggaagtgttgtgtatattagcaatacggagctgttactcattattgacttatttacagtatcgtccttgcttctttctaattttatcatctcattacagcacagaaaaaaatgttagctttatgacactagacagccatccacaatgacagtagcacaaaagggatacgggaagcacaaagtaaaggggtaggctaaagacaagcagaacaatacatagaagagagaaagggagacgtcaagcagcctgcgcctggaagttgttagtaaaattagtgaccaatgtgaaataagagggcttatattttcacttcatcataatccacagaagattaaccttcaatgggaaattttcttctagaagctgaaacacagcctgttgtgccttactattttttgttaatttctttctattattttccttatgttgttgtttcctgttgttgttcctatttggaagggattcttcattttggacattttctcttctcatttcagatgattccacactgcatggcccgatttttattcaagaaccaagtcctgtaatgttccctttggattctgaggagaaaaaagtgaagctcaattgtgaagttaaaggaaatccaaaacctcatatcaggtttgttg

SEQ ID NO: 63816 - DNA, 867 bp, Homo sapiens
aacatggcttcaccatccaagcacataatcagtggactcaaatcattgcacctgttatagaccagtttgggcgttactgagtcatctgtggtacaggctatgtgacatttatgcaaggtagaccatatatggcttcataagacgttgggaaaacaaagaacctagtccttcgctgcagataatgtgagaataaagactgtaggttgttctttatttgcatacatagtcattttgaggaagtgttgtgtatattagcaatacggagctgttactcattattgacttatttacagtatcgtccttgcttctttctaattttatcatctcattacagcacagaaaaaaatgttagctttatgacactagacagccatccacaatgacagtagcacaaaagggatacgggaagcacaaagtaaaggggtaggctaaagacaagcagaacaatacatagargagagaaagggagacgtcaagcagcctgcgcctggaagttgttagtaaaattagtgaccaatgtgaaataagagggcttatattttcacttcatcataatccacagaagattaaccttcaatgggaaattttcttctagaagctgaaacacagcctgttgtgccttactattttttgttaatttctttctattattttccttatgttgttgtttcctgttgttgttcctatttggaagggattcttcattttggacattttctcttctcatttcagatgattccacactgcatggcccgatttttattcaagaaccaagtcctgtaatgttccctttggattctgaggagaaaaaagtgaagctcaattgtgaagttaaaggaaatccaaaacctcatatcaggtttgttg

SEQ ID NO: 63817 - DNA, 897 bp, Homo sapiens
ataataagttggatggaatcagtatgataagaacagattcctttaataactaggagaaaggagttcatcactataatagttccatttcctgtctgaaacagcacttactgaatgtagtcatggttagagtaaattaaaatttttataatgaatatgagtgagagcaataggaattttaaagagttctatatgctgtaaacagagaaaaacagtagtgaaatttgagtggctttgggtcttagagcttaggtgattttctggtgagaacttgyttttaaaaaatcatgagtggctcatgttttgagaacataatttaattttttggcctacaggaatactattctgtaatttacctcaagatctttaaaacaattgtatcatggttttctcttatacatacatggataacacaaaatatttctgggacagttatttctttattttatttatttatttatttatttatttatttatttatttatttgagacggagtctcgctctgtcgcccaggctggagtgcagtggcgcgatctcggctcaccacaagctccgcttcctgggttcccgccattctcctgcctcagcctcctgagtagctgggactacaggcgcccgccaccacgcccggctaattttttgtatttttagtagagacggggtttcaccgtgttagccaggatggcctcgatctcctgacctcatgatccgcccacctcggcctcccaaagtgctggcattacaggcatgagccaccgcacccagcagttatttcttaaaatttaggaaggtactgtctactgagaaacaaaactattggattataatacaaagacatagtaataggttaagtcaataaaagagaaatatatcttttaaaaactttcacagagaaaagg

SEQ ID NO: 63818 - DNA, 897 bp, Homo sapiens
ataataagttggatggaatcagtatgataagaacagattcctttaataactaggagaaaggagttcatcactataatagttccatttcctgtctgaaacagcacttactgaatgtagtcatggttagagtaaattaaaatttttataatgaatatgagtgagagcaataggaattttaaagagttctatatgctgtaaacagagaaaaacagtagtgaaatttgagtggctttgggtcttagagcttaggtgattttctggtgagaacttgcttttaaaaaatcatgagtggctcatgttttgagaacataatttaattttttggcctacaggaatactattctgtaatttacctcaagatctttaaaacaattgtatcatggttttctcttatacatacatggataacacaaaatatttctgggacagttatttctttattttatttatttatttatttatttatttatttatttatttatttgagacggagtctcgctctgtcgcccaggctggagtgcagtggcgcgatctcggctcaccacaagctccgcytcctgggttcccgccattctcctgcctcagcctcctgagtagctgggactacaggcgcccgccaccacgcccggctaattttttgtatttttagtagagacggggtttcaccgtgttagccaggatggcctcgatctcctgacctcatgatccgcccacctcggcctcccaaagtgctggcattacaggcatgagccaccgcacccagcagttatttcttaaaatttaggaaggtactgtctactgagaaacaaaactattggattataatacaaagacatagtaataggttaagtcaataaaagagaaatatatcttttaaaaactttcacagagaaaagg

SEQ ID NO: 63819 - DNA, 897 bp, Homo sapiens
ataataagttggatggaatcagtatgataagaacagattcctttaataactaggagaaaggagttcatcactataatagttccatttcctgtctgaaacagcacttactgaatgtagtcatggttagagtaaattaaaatttttataatgaatatgagtgagagcaataggaattttaaagagttctatatgctgtaaacagagaaaaacagtagtgaaatttgagtggctttgggtcttagagcttaggtgattttctggtgagaacttgcttttaaaaaatcatgagtggctcatgttttgagaacataatttaattttttggcctacaggaatactattctgtaatttacctcaagatctttaaaacaattgtatcatggttttctcttatacatacatggataacacaaaatatttctgggacagttatttctttattttatttatttatttatttatttatttatttatttatttatttgagacggagtctcgctctgtcgcccaggctggagtgcagtggcgcgatctcggctcaccacaagctccgcttccygggttcccgccattctcctgcctcagcctcctgagtagctgggactacaggcgcccgccaccacgcccggctaattttttgtatttttagtagagacggggtttcaccgtgttagccaggatggcctcgatctcctgacctcatgatccgcccacctcggcctcccaaagtgctggcattacaggcatgagccaccgcacccagcagttatttcttaaaatttaggaaggtactgtctactgagaaacaaaactattggattataatacaaagacatagtaataggttaagtcaataaaagagaaatatatcttttaaaaactttcacagagaaaagg

SEQ ID NO: 63820 - DNA, 897 bp, Homo sapiens
ataataagttggatggaatcagtatgataagaacagattcctttaataactaggagaaaggagttcatcactataatagttccatttcctgtctgaaacagcacttactgaatgtagtcatggttagagtaaattaaaatttttataatgaatatgagtgagagcaataggaattttaaagagttctatatgctgtaaacagagaaaaacagtagtgaaatttgagtggctttgggtcttagagcttaggtgattttctggtgagaacttgcttttaaaaaatcatgagtggctcatgttttgagaacataatttaattttttggcctacaggaatactattctgtaatttacctcaagatctttaaaacaattgtatcatggttttctcttatacatacatggataacacaaaatatttctgggacagttatttctttattttatttatttatttatttatttatttatttatttatttatttgagacggagtctcgctctgtcgcccaggctggagtgcagtggcgcgatctcggctcaccacaagctccgcttcctgggttcccgccattctcctgcctcagcctccygagtagctgggactacaggcgcccgccaccacgcccggctaattttttgtatttttagtagagacggggtttcaccgtgttagccaggatggcctcgatctcctgacctcatgatccgcccacctcggcctcccaaagtgctggcattacaggcatgagccaccgcacccagcagttatttcttaaaatttaggaaggtactgtctactgagaaacaaaactattggattataatacaaagacatagtaataggttaagtcaataaaagagaaatatatcttttaaaaactttcacagagaaaagg

SEQ ID NO: 63821 - DNA, 897 bp, Homo sapiens
ataataagttggatggaatcagtatgataagaacagattcctttaataactaggagaaaggagttcatcactataatagttccatttcctgtctgaaacagcacttactgaatgtagtcatggttagagtaaattaaaatttttataatgaatatgagtgagagcaataggaattttaaagagttctatatgctgtaaacagagaaaaacagtagtgaaatttgagtggctttgggtcttagagcttaggtgattttctggtgagaacttgcttttaaaaaatcatgagtggctcatgttttgagaacataatttaattttttggcctacaggaatactattctgtaatttacctcaagatctttaaaacaattgtatcatggttttctcttatacatacatggataacacaaaatatttctgggacagttatttctttattttatttatttatttatttatttatttatttatttatttatttgagacggagtctcgctctgtcgcccaggctggagtgcagtggcgcgatctcggctcaccacaagctccgcttcctgggttcccgccattctcctgcctcagcctcctragtagctgggactacaggcgcccgccaccacgcccggctaattttttgtatttttagtagagacggggtttcaccgtgttagccaggatggcctcgatctcctgacctcatgatccgcccacctcggcctcccaaagtgctggcattacaggcatgagccaccgcacccagcagttatttcttaaaatttaggaaggtactgtctactgagaaacaaaactattggattataatacaaagacatagtaataggttaagtcaataaaagagaaatatatcttttaaaaactttcacagagaaaagg

SEQ ID NO: 63822 - DNA, 749 bp, Homo sapiens
ccaggaacaatggattaatgactcttttaaaaataagtaattgggtgatactgacgccaagccctagttatgacaagaaagaagcatttccaacaaatgcaaatactttgtaactcatttggaggcaaaaactgacctgaactgatgggaactgatgggagactatttatagactcaatgtgaatattcatatgctttgctgcagaattagaaatgcgtttgattatgcagtgctgacccagactcagctggggatgctattatgtaacactgggcatgttttgtgggctatatttctcttctaaaattacaaacattttaaattctcaaacatttctgacccaaatggcttctgatccgagtttctgggactagattggattccaattccaatattacatggaggcgacataaccgtgtgcaaagcagacattgtcctgccctcatggaatgtttactctagagaggactaataatagttatagctaacttcrtctttttaattaatagaactttattttttcagagcagtttgaggtttacagaaaaatggagcagagcacagagagtttgcctacactccttctccacacagtttcccgtattgttaacatcttgcattcctgtgctgtatttgttacaatcgataagccaatatgaatgcatgcatattaactaaagcccacagttcacatcagggtccatcacgtattgcacatgctgtggtcctggcaaatgtattaggacat

SEQ ID NO: 63823 - DNA, 749 bp, Homo sapiens
ccaggaacaatggattaatgactcttttaaaaataagtaattgggtgatactgacgccaagccctagttatgacaagaaagaagcatttccaacaaatgcaaatactttgtaactcatttggaggcaaaaactgacctgaactgatgggaactgatgggagactatttatagactcaatgtgaatattcatatgctttgctgcagaattagaaatgcgtttgattatgcagtgctgacccagactcagctggggatgctattatgtaacactgggcatgttttgtgggctatatttctcttctaaaattacaaacattttaaattctcaaacatttctgacccaaatggcttctgatccgagtttctgggactagattggattccaattccaatattacatggaggcgacataaccgtgtgcaaagcagacattgtcctgccctcatggaatgtttactctagagaggactaataatagttatagctaacttcatctttttaattaatagaactttattttttcagagcagtttgaggtttacagaaaaatggagcagarcacagagagtttgcctacactccttctccacacagtttcccgtattgttaacatcttgcattcctgtgctgtatttgttacaatcgataagccaatatgaatgcatgcatattaactaaagcccacagttcacatcagggtccatcacgtattgcacatgctgtggtcctggcaaatgtattaggacat

SEQ ID NO: 63824 - DNA, 749 bp, Homo sapiens
ccaggaacaatggattaatgactcttttaaaaataagtaattgggtgatactgacgccaagccctagttatgacaagaaagaagcatttccaacaaatgcaaatactttgtaactcatttggaggcaaaaactgacctgaactgatgggaactgatgggagactatttatagactcaatgtgaatattcatatgctttgctgcagaattagaaatgcgtttgattatgcagtgctgacccagactcagctggggatgctattatgtaacactgggcatgttttgtgggctatatttctcttctaaaattacaaacattttaaattctcaaacatttctgacccaaatggcttctgatccgagtttctgggactagattggattccaattccaatattacatggaggcgacataaccgtgtgcaaagcagacattgtcctgccctcatggaatgtttactctagagaggactaataatagttatagctaacttcatctttttaattaatagaactttattttttcagagcagtttgaggtttacagaaaaatggagcagagcacagagagtttgcctacactccttctccacacagtttcccgtattgttaacatcttgcattcctgtgctgtatttgttacaatcgatragccaatatgaatgcatgcatattaactaaagcccacagttcacatcagggtccatcacgtattgcacatgctgtggtcctggcaaatgtattaggacat

SEQ ID NO: 63825 - DNA, 746 bp, Homo sapiens
attttaatttatctcttagctttccacttaaggatggggatgcgggaaagtaggtggctccatgcccttgattggacaccttttcttgaagttattctccaaagcttccctggctattgagcatacaaaggtcctttgtagccaagatgctggaaagcagtgtgtcatgaggacaaatacaagaaagttcaccctagtccaacaggtctcaccmaccaccacagcctgtgaaacaggaagaacagcagtgctcaacaagtactaattaagtatctactatgtatcagacactgttttgggcattggctatagcctcataaaaactggcaagattcctgccccacagtgagcttttatttggggaggcaatggagacagtaaaaaagaaagtacacaaatgagaaccgtagttgcagatggcggcggtggtgatttctgggaaggatgtagtaaagaggggatgtgacagagagtaactggagtcaggtcacggttgactttacttaagccctcaggtaatgctgctctgaagaagggtcatttgagttggttcctaaaggctaaacatgataagccaaagaatggggaaagagcactccaaacaaggggaacagcaaggacatgggtcctgagactgggttagctgcaaggtgtttgaagaacagaaagcaaaatgtggccattacggtataactaagtaaggagggaagtggcagggagcaaagctggggacgtaggcaggggct

SEQ ID NO: 63826 - DNA, 852 bp, Homo sapiens
tgcatgatttggtttgtaagcaaatgtgaaatccagagattttcatcatttccaacaatgcaaaaatgttgaatcttagactagaggctctttgacctcttcctggatttattctgtttctctttttacattcctgcaaggaaggactcttgatatatttttgccttgtagaaatattcatttctaagttggtttgaaattagcctgtcatctgattcactgagatagagttaaaataaattcccctggcaaaaaaaaaaaagaaaggattttatcatctatatggatcaattccaagagttcgcttcagtttactgatccgttttccctacagtataggatattcaattaaaccttccctcaaattggccatgaattttgatgaaaatgaaagaagtttcgtttagcaaacagtttctatcagggactataataatagaatgcaataagaattattttcacctatgcacctgaacgaacrtgttttgtctggtttttggtttgatttctatctgtatctttatttttctctttttgtttttcacccagattttgtgtagcttgtccaaagtggttgagatgtgggatcaggtgaaattgctcatagatacaataatgcttcataccagtgttttcaccactgatttagtagtgtctttgataaactcttataatattccatacttacatctttctgttttaaatagaactgctgggatatgagttatgtctggtactcccttatttttattaaagcatatatagaaatttttcataccctttgcttcaggccttccttgccccacttagcatctgtagagtggacataggcaggaagagcccactctacaa

SEQ ID NO: 63827 - DNA, 613 bp, Homo sapiens
actcttcttcattcaccatgaaatatttagacataatacataggaaataaacaatagcagcttgaaattctttactgcatggagatgactgagccggaaagagatcaattagcgtgtatgtcattctaatcaaacgagaaagggagccagtacacctaaccgaggctcctaggttataccctttcaatttgataaattgacatccttgctggcaagaaactgtgtttgggagtagctccttgtcctgccaaatattcaagccttgtttttcaaaactggcttatctgaagaaatagaatatagcattagttttctaaayagcaaggcaggcctagtttctgattaccaatgtggactcatggaattagtatccatgctgtgtggttccttccagtcctcccacagggaagccagctctgcatcaggccctcccctagctttgcaaaaagggagggaggagaggacatggagaaagcagctggtgagaggccaaaggcagaaggagacttctcatctgtaggtgacatttagaatttagactttaaaaagttataacctgcctgaggccacactactgcagaaccaggacaaaacctcagcactttggctttaa

SEQ ID NO: 63828 - DNA, 737 bp, Homo sapiens
aacacttaccagctgtgtaacctcagatgagttatttaatctttcagtgcctcaatcttgtgttttgtaaaatgaggggttaatagtaaaacttcccatagggttgttgtaaggattaaatgagttaacatatgaattgcttagaatagtgcttggcaaaaggtaagttgttaataagtgttggctctgattrtaatagtttcttcttttaaacacaacttgttttcatggctatttgctcagtgtgtgataagtcaccccatagaccagtgttctccaaagtggggtacagctggggttgcataagacccattgaagggtaaaaggaaaaagtagaacttctgtttttatactgtatttatttcatcctctctgttttcgtgtatgtgctgaaatgcatatcttgatcaagtagaagaggatatgatatataaatacatatataaggtggggtgcaccaccatttttattgatagggtaaagcctgggcacacaggccatgttattgcgacaggacacactcttgcatctgtatgaccttctttgggctcaaagacacagccacttaggcaaactaattgtgcattaagccctaatgcctgtgccatttacatctgcatgaaaataatattttagtccagaaagctgaaaatgttgaggttgattcaatatatacttactacccagtgttccttcagtgtggattgtttcaatttgttccattacttgacaaaatc

SEQ ID NO: 63829 - DNA, 903 bp, Homo sapiens
tatgcattgaaattaaacagcaattttaaaagaattgattatgctagtatattagctatatagccttgggatatatattcttgatcagtggctctaatttttttcagagcttgtaaatggctcgaagttggtaataagcaccataaattgtatcaattacttaaaaggatgcctccttttgtttgtttgcttttttttgcctccaccatggygagtggaaaatcagctagttatattcaagttttaccaactgcaattaaaatccataggtctctcaatacagtcaagcattgcctgacattttcattttttgataaatttttataaattctcattatcactttgtgactactggtgtcaagaagttgtaaaaaatatctcttcctaaatttaaaaaagactaatttaactattgaagataggaagggtccagctcccttaaatactttattgttataattatgacatatataatatttatatctatatttatagatataaaccagcaatatgtttcaagttatatataaataataagagccaacattttgcattatgaaaatggagaagtgaaataaatgcaaagttccaccttactctttcctgctcttccactgatcagtcattcaaaaatattattaaggtatacacaggtaagaaaataggcatttttattaatgtcaatatacactgatcaaaaagtatttatgtacttcttgatcaaagataaatgattgaaaaacaggcagttatttgttcctctatatcagttttttttctttcagacagcatctcactctgccagccaggctgtagtccagtggaataatcatggctcactgcatctccctgggctctggtgatcctcccacctcagcctcctgagtagcgatgattacagat

SEQ ID NO: 63830 - DNA, 903 bp, Homo sapiens
tatgcattgaaattaaacagcaattttaaaagaattgattatgctagtatattagctatatagccttgggatatatattcttgatcagtggctctaatttttttcagagcttgtaaatggctcgaagttggtaataagcaccataaattgtatcaattacttaaaaggatgcctccttttgtttgtttgcttttttttgcctccaccatggcgagtggaaaatcagctagttatattcaagttttaccaactgcaattaaaatccataggtctctcaatacagtcaagcattgcctgacattttcattttttgataaatttttataaattctcattatcactttgtgactactggtgtcaagaagttgtaaaaaatatctcttcctaaatttaaaaaagactaatttaactattgaagataggaagggtccagctcccttaaatactttattgttataattatgacatatataatatttatatctatatttatagatataaaccagcaatatgtttcaagttatatataaataatawgagccaacattttgcattatgaaaatggagaagtgaaataaatgcaaagttccaccttactctttcctgctcttccactgatcagtcattcaaaaatattattaaggtatacacaggtaagaaaataggcatttttattaatgtcaatatacactgatcaaaaagtatttatgtacttcttgatcaaagataaatgattgaaaaacaggcagttatttgttcctctatatcagttttttttctttcagacagcatctcactctgccagccaggctgtagtccagtggaataatcatggctcactgcatctccctgggctctggtgatcctcccacctcagcctcctgagtagcgatgattacagat

SEQ ID NO: 63831 - DNA, 671 bp, Homo sapiens
tgtgttgcttttgggtatctaaccaagagttcctcatgtagtcatagtggaatttctgtgagtagaagctgatgatcttcaaggttctatagactcttgccagaagattatgagaagacagtaaaggagcttgataattattgccagggatgagtgcattgcatgctagttgattggctttttctcaccaaaagtgaaagttacccatgttcagcttgtaggcccagactagtcaaagagtagttgtttcttaaatatccgtgtagggccttcaatcttatgtaaaattcatctgtaatttttccttatgtgttttttctacattgaattataacatattttatggttttgattatgtttccatttgttgagcatattctactctctttctgtgttactttcatccagtcagcrttttacagattatactatgttagcatttaaagatttagctgtctatttttgaatagtattatttctcagtgctgtgttgctaatgggcaataaaaggatgtttagcttttgaaagaaaatagccaacctctaaatggctgactcaatgttgttctctgtgcatgtgatctcttgattttgtagatgataagtttatagtaaagctcatttaaacactagatcttcaatcagattttagatcatccagtattcagaag

SEQ ID NO: 63832 - DNA, 614 bp, Homo sapiens
caaaatgtmttagttatctaaacataaaaaacattaaaaatcaatttaatgccatcttgctaactaataaagaaaaatcaatctgtaagggagtaaatcgctaagaaaatgccctctttgacatgatttgtgattgaggaagtgtatagaggatatgtggtatttctcgtttataatgatttcaattaattcaaataacttttgaaaggaaattattagtgtaattttgggattatacatcaaattccatacttggaagtgttggaagtattatttttattacaaagttagtttttatattttttaaaaaacacctcctttcattatcaaatgtatctgaagaaaaaaataggatgctgaaatcttaaaattagaaaaagcattttatttgagtcagtttacttatttttcttgccgttttctctatgtatgtataatataaccatactcataggtgtgtatagatgaggctaatgctaagacaggagctaaaataacaagactcaaaccgcagttattggcccataggtagctcatttctgtgctgagattacttaaaatgtctaatttctatttaaaagttcagaaaattagcaatctattttatttttaaa

SEQ ID NO: 63833 - DNA, 614 bp, Homo sapiens
caaaatgtattagttmtctaaacataaaaaacattaaaaatcaatttaatgccatcttgctaactaataaagaaaaatcaatctgtaagggagtaaatcgctaagaaaatgccctctttgacatgatttgtgattgaggaagtgtatagaggatatgtggtatttctcgtttataatgatttcaattaattcaaataacttttgaaaggaaattattagtgtaattttgggattatacatcaaattccatacttggaagtgttggaagtattatttttattacaaagttagtttttatattttttaaaaaacacctcctttcattatcaaatgtatctgaagaaaaaaataggatgctgaaatcttaaaattagaaaaagcattttatttgagtcagtttacttatttttcttgccgttttctctatgtatgtataatataaccatactcataggtgtgtatagatgaggctaatgctaagacaggagctaaaataacaagactcaaaccgcagttattggcccataggtagctcatttctgtgctgagattacttaaaatgtctaatttctatttaaaagttcagaaaattagcaatctattttatttttaaa

SEQ ID NO: 63834 - DNA, 614 bp, Homo sapiens
caaaatgtattagttatctaaacataaaaaacattaaaaatcaatttaatgccatcttgctaactaataaagaaaaatcaatctgtaagggagtaaatcgctaagaaaatgccctctttgacatgatttgtgattgaggaagtgtmtagaggatatgtggtatttctcgtttataatgatttcaattaattcaaataacttttgaaaggaaattattagtgtaattttgggattatacatcaaattccatacttggaagtgttggaagtattatttttattacaaagttagtttttatattttttaaaaaacacctcctttcattatcaaatgtatctgaagaaaaaaataggatgctgaaatcttaaaattagaaaaagcattttatttgagtcagtttacttatttttcttgccgttttctctatgtatgtataatataaccatactcataggtgtgtatagatgaggctaatgctaagacaggagctaaaataacaagactcaaaccgcagttattggcccataggtagctcatttctgtgctgagattacttaaaatgtctaatttctatttaaaagttcagaaaattagcaatctattttatttttaaa

SEQ ID NO: 63835 - DNA, 614 bp, Homo sapiens
caaaatgtattagttatctaaacataaaaaacattaaaaatcaatttaatgccatcttgctaactaataaagaaaaatcaatctgtaagggagtaaatcgctaagaaaatgccctctttgacatgatttgtgattgaggaagtgtatagaggatatgtggtmtttctcgtttataatgatttcaattaattcaaataacttttgaaaggaaattattagtgtaattttgggattatacatcaaattccatacttggaagtgttggaagtattatttttattacaaagttagtttttatattttttaaaaaacacctcctttcattatcaaatgtatctgaagaaaaaaataggatgctgaaatcttaaaattagaaaaagcattttatttgagtcagtttacttatttttcttgccgttttctctatgtatgtataatataaccatactcataggtgtgtatagatgaggctaatgctaagacaggagctaaaataacaagactcaaaccgcagttattggcccataggtagctcatttctgtgctgagattacttaaaatgtctaatttctatttaaaagttcagaaaattagcaatctattttatttttaaa

SEQ ID NO: 63836 - DNA, 1115 bp, Homo sapiens
aaattttaacagctgtgattttgattttgattttaagcgtttatctcttttccatcaatttgcaataacaaattttacttatagagttggaaaacatcaatattcggtttttaaaatgtttggacaggagacatcatagtacttctatatactgttgggtttgttttcctaccactatagccagggtaaggtacttagtatgcttaaggtcgtgttaagttctaacttatcctgtgtgtgacttttcttacatcacttccctttgctgggaaataaaaaaaaaaattcttagatrccggacaaaattcctcctattatccaaatttcagatgcaagcaatattctctgcaaaattttcctgaagaagtataattaccctttttaacacattttagagagtcactttatcttagcaccaaacattgttcacatacaataaagagggtatgaaaagatttttcctggtgcctatgagattgttagcacaaggaattgtttcttaggctgacccaaagatccaaagataaagtgttctctggtctacacccctctggagcttacccaatgccaagcacctagagggtgctcaataaatatttaattgaatggactgtttgaaagctcttcaagataagactttaaagttacattatgtagtgaacattcatagacatagcctgacatctttatatcttcattttggtggtattgaatttatagtaagatgagtattataaaatcttcacaagtgtctcaaaagtaattatgacacattgactggaaactctttacctgcataagaactatagttggatttccaactgtttagttgggggtttgttctcaagagtacagccctaccttttctgtattttgtaataataggtagctatggacctgtacttttactctttagaaaatgcacttgctgtataaagtgtcaatcatggagatacaaatgagaaataataaattttacattgttagactgttagtctcaaagtacatagttgagttggctggttcacttaagaatcatactaaccttgtcacaattctgctgaatgaatttaatgaaatttgaaatccaataatactaaaattgtttatttttt

SEQ ID NO: 63837 - DNA, 1038 bp, Homo sapiens
taacaaataaaaattatatttaaatgggattttagatttayatacagtaatacctaatactggactacttcccccctttgctctatgataatagttttttcactatattttgttaattactgtcacattcactctaatcccaagataccagtgtcctcttaaaatggaacaaaaaagtctaactgggtatgtcttagtaccctgtgcacgtatcactatgaggcatactttcttgacagaaattaccttaatttctcccaatatctctaatcatcatgctttaaataaattccagtatttacaaaaccagtattgctgattctaaccctggtctcttctgctactgaaggaaaatctctttctgatttgtcttccattgaaaaactaaaaataatggtcttaatcacaaaacccaaaagtatttaaaaagttacctcagcagttaaacatcacattatatctacttaattacctttagaacactggaaatatttttatctcagaaactgataatccactactttatatcttactccaaattgtactatattttagtttttgcagttttacaatggttaaaaacattaaatatttgtattttattgataattagaagaacattctagaataacaataatgttgaataagaataaaaactaagctgggtatggtagtaagcatctgtagtcccagctactcaggaagctgaggtgggagggttgcttgagcccaggagttcaagtttggcctggacaacagagcaagactccatctctacaaaaccataaaaaataaataaataaaaactaatgtaaagtagtgagtcaacagtatttcatatttgtcagtcatgctatattgctcccaaactgtctgcacaaggagaaattgtacttttcttctacacctagacaaagaacaattacgcaaatagcatgtttgcctgaacaccaaaaatgaaattctgtccctcccaattccttcctgtcagctaaggagagtttaattttttttttttttttttttttttaaagaaga

SEQ ID NO: 63838 - DNA, 1038 bp, Homo sapiens
taacaaataaaaattatatttaaatgggattttagatttacatacagtaatacctaatactggactacttcccccctttgctctatgatawtagttttttcactatattttgttaattactgtcacattcactctaatcccaagataccagtgtcctcttaaaatggaacaaaaaagtctaactgggtatgtcttagtaccctgtgcacgtatcactatgaggcatactttcttgacagaaattaccttaatttctcccaatatctctaatcatcatgctttaaataaattccagtatttacaaaaccagtattgctgattctaaccctggtctcttctgctactgaaggaaaatctctttctgatttgtcttccattgaaaaactaaaaataatggtcttaatcacaaaacccaaaagtatttaaaaagttacctcagcagttaaacatcacattatatctacttaattacctttagaacactggaaatatttttatctcagaaactgataatccactactttatatcttactccaaattgtactatattttagtttttgcagttttacaatggttaaaaacattaaatatttgtattttattgataattagaagaacattctagaataacaataatgttgaataagaataaaaactaagctgggtatggtagtaagcatctgtagtcccagctactcaggaagctgaggtgggagggttgcttgagcccaggagttcaagtttggcctggacaacagagcaagactccatctctacaaaaccataaaaaataaataaataaaaactaatgtaaagtagtgagtcaacagtatttcatatttgtcagtcatgctatattgctcccaaactgtctgcacaaggagaaattgtacttttcttctacacctagacaaagaacaattacgcaaatagcatgtttgcctgaacaccaaaaatgaaattctgtccctcccaattccttcctgtcagctaaggagagtttaattttttttttttttttttttttttaaagaaga

SEQ ID NO: 63839 - DNA, 1038 bp, Homo sapiens
taacaaataaaaattatatttaaatgggattttagatttacatacagtaatacctaatactggactacttcccccctttgctctatgataatagttttttcactatattttgttaattactgtcacrttcactctaatcccaagataccagtgtcctcttaaaatggaacaaaaaagtctaactgggtatgtcttagtaccctgtgcacgtatcactatgaggcatactttcttgacagaaattaccttaatttctcccaatatctctaatcatcatgctttaaataaattccagtatttacaaaaccagtattgctgattctaaccctggtctcttctgctactgaaggaaaatctctttctgatttgtcttccattgaaaaactaaaaataatggtcttaatcacaaaacccaaaagtatttaaaaagttacctcagcagttaaacatcacattatatctacttaattacctttagaacactggaaatatttttatctcagaaactgataatccactactttatatcttactccaaattgtactatattttagtttttgcagttttacaatggttaaaaacattaaatatttgtattttattgataattagaagaacattctagaataacaataatgttgaataagaataaaaactaagctgggtatggtagtaagcatctgtagtcccagctactcaggaagctgaggtgggagggttgcttgagcccaggagttcaagtttggcctggacaacagagcaagactccatctctacaaaaccataaaaaataaataaataaaaactaatgtaaagtagtgagtcaacagtatttcatatttgtcagtcatgctatattgctcccaaactgtctgcacaaggagaaattgtacttttcttctacacctagacaaagaacaattacgcaaatagcatgtttgcctgaacaccaaaaatgaaattctgtccctcccaattccttcctgtcagctaaggagagtttaattttttttttttttttttttttttaaagaaga

SEQ ID NO: 63840 - DNA, 674 bp, Homo sapiens
cagcttctttatgaagtccaggctgtctgcccatcacgggcttgtcagtggtcggtgtcccagtgaaacaacaaaataaggcccttctggagtgtcactgaccagggccaatctgggggctcatcccttgtgctggcccgggaagcaccccaatccccatgcctccccacagcttctctgcccctctcatccaacccacaggggctgaccactgggtctgtgtgtgtggtggaggtgggggtgcgacagggtgctctgagaagctaaggaggatgcttgaaactcagctgccagagattctgggagagatgcctcccacccctgcctccaggggcctgaggacagttctggggtgagaggctgggtaaggcagcctccagggctccttgaaatactgggtctgtctcccagagggccggccamgcaggtggggagggatgtgtgaagggtggagtcagaggcgtgctgctgtcttacagcacgttgatatgtgttacattaatggagcatcagacacacagagcccgcaagggcaaggacgggtgaggagtatttggattgcgctgctgccaggtgtgctcgctcacctactgcttcatgcctagacccgcacagtgcccaggtcaagacgctcccatccagtccctggcaaggccgtctagcctagcggtggg

SEQ ID NO: 63841 - DNA, 657 bp, Homo sapiens
ctgggaactcagctgctggtggaggcaggtcccacgcggccttgggggtctgggcctggcaggcgtagctggcaggcttgggttacaggcagctaacctgggctctgatcccataagccctgtaaccccaggcgtggcaaggaggcagcatttgccaggaagatgatcaaggcgggccagtgggggccagcagggctagcctttctcctggaatccagggggattaacggcggagaaaagggaacagctggatgctctcccacccctcctgctgcccaccgcccaccctggggtgtcaggtttccctgtaagttggtcatcagggaattctggtattttcaattactagccgggcacgctgacagggggatggggtcagtggtgccctgtgacccctgcaaggagatggagccccagggagtaagcacaaaagaggcttgtggccgagaggggcagggggaggccggccaggcggggcctgcttgtctggagcaggtggtcaggggccctgctgccctcagtgaaccccagaggggagttcagccccttccttggctgagacttggggaaggagccttccctctgtgtgcctccgtttccttctcagggcatgmaggggttgtacggggtggtctctcagggtcttctgggactagg

SEQ ID NO: 63842 - DNA, 970 bp, Homo sapiens
attttaaaaatctttggatttattgtttcacttctcaatttaagagtagaaaggatttcttttgtgtttacttttagtgtctaaagatctttggagccaggcatggtagcacacacctctaatcccagcactttgggaggccaaggcaggtggatcgcttgagctcaggagttccagaccagcctgggcaacatggtgaaaccccatctctacaaaaaatacaaacattagctggacatgctggcatgtgcctgtagtcctagctacttgagtggctgaaatgggagaattgttggaatctgggaggttgaggctgcagtgaaccaaatgccattgcactctaccctgggcaatagagtgagaccttgtctcaaaaaaataaaatggctggggtctgtggctcatgtctgtaatcccagcactttgggaggctgaggtgggcagatcaggaggttgagaccagctcagcaatttaagaccagcctgggcaacatggcaaaaccttgtctctacaacaaatacaaaaattaaccagacatggtggtgcacgcctgttccagctactcgggaggttgggacaggaggatcattcgagcccgggaggctgaggttgcagtgagccaagattgtgccattgtattctagcctgggtgacagagggagaccctgtctcaaataaataaataaataaataaataaataaatctttggagacatgttatataattatattattgtgtgyacctcgattaaacttgtttccaccttagaccaaattagactgaaaaggaactattttattttaattgctgtagaatagttattgtcttctagccactgatgtattatctaaattcaggattcgttttccatgaaccttcagtaatggaaaacaagatctaagcatttttttagttgacacatttgcctgtttcttttggatagtgtctagtgctgagtacatatctaa

SEQ ID NO: 63843 - DNA, 396 bp, Homo sapiens
accagaagcaaaagctgcatatatcacttccaactgctttcctttggccagaattcagtcatccggccacactaactgcaaagaagtctaggaaacatagtccagcccaggaggaagggaaaataatgtggcatctgtcakaacactctcctgtggccacacaaaccccagactgcctccctcttgccttctggtggcagaagcttggaaggaagatatatatcttccctaagatactgtttgttgggggtccttgctattctcagccaagtataaacccaggataacagacatcgtggtacagttcaaatatttacatgtataaaattaatccttttaacattcctacaacgaatgcaagactgttaatcacaagataattatagcatgtactga

SEQ ID NO: 63844 - DNA, 396 bp, Homo sapiens
accagaagcaaaagctgcatatatcacttccaactgctttcctttggccagaattcagtcatccggccacactaactgcaaagaagtctaggaaacatagtccagcccaggaggaagggaaaataatgtggcatctgtcagaacactctcctgtggccacacaaaccccagactgcctccctcttgccttctggtggcagaagsttggaaggaagatatatatcttccctaagatactgtttgttgggggtccttgctattctcagccaagtataaacccaggataacagacatcgtggtacagttcaaatatttacatgtataaaattaatccttttaacattcctacaacgaatgcaagactgttaatcacaagataattatagcatgtactga

SEQ ID NO: 63845 - DNA, 668 bp, Homo sapiens
aacagttctgcttacctggtctgagcttttctttttcttttttttttttttgagatggagtcttgctcttgttgcctagactggagtgcaatggacgatctcggctcactgcaatctccgcctcccaggttcaagcgattctcctgccgtagcctcccgagtagctgggattacaggcactcgccaccatgcctggccaattttttgtatttttagtagaaacggggtttcactatgttggtcaggctggtctcaaactcctgacctcaggtgatgcacccgctttggcctcccaaagtgctgggattayaggcatgagccaccgtgcccagactggtctgagcttaataactgggctgtatggcacttattctgcagtccccgctcttgatgggctgtctgtccccaaattccagcctctttaagggcagagctgtgttattttccctgtattgtccccagtcccaagcatagggcctttgtcttgtaggaattcaataaaatgggactcataataaccagaaattcaaatacttcctgaccaggcctctttctgttgcaagtgccagaaatctaaatcaaacggacttaaaccaaaaagggatttgttagtttatcgaactgggatggcaaagcatgaactggaggccagagtctcagttaatgtc

SEQ ID NO: 63846 - DNA, 668 bp, Homo sapiens
aacagttctgcttacctggtctgagcttttctttttcttttttttttttttgagatggagtcttgctcttgttgcctagactggagtgcaatggacgatctcggctcactgcaatctccgcctcccaggttcaagcgattctcctgccgtagcctcccgagtagctgggattacaggcactcgccaccatgcctggccaattttttgtatttttagtagaaacggggtttcactatgttggtcaggctggtctcaaactcctgacctcaggtgatgcacccgctttggcctcccaaagtgctgggattataggcatgagccaccgtgcccagactggtctgagcttaataactgggctgtatggcacttattcygcagtccccgctcttgatgggctgtctgtccccaaattccagcctctttaagggcagagctgtgttattttccctgtattgtccccagtcccaagcatagggcctttgtcttgtaggaattcaataaaatgggactcataataaccagaaattcaaatacttcctgaccaggcctctttctgttgcaagtgccagaaatctaaatcaaacggacttaaaccaaaaagggatttgttagtttatcgaactgggatggcaaagcatgaactggaggccagagtctcagttaatgtc

SEQ ID NO: 63847 - DNA, 705 bp, Homo sapiens
attttgttcttaagcagaccgcagcaatgacatcacttggaaactatttagaaaccaaaataaataaacagactggatcttaggctccacttcacacctacagaaaagaatttaacaagatcccaagtgtatttgtatgaatgttagattaagaaaaaacccaagaggagagacctaagagcacaattatagacatgaagggacccaacttccaatcccaaacccctcccgcttcaggcttgcacaaccaaccagctgctaacagacctgaaggagttgggtgcaaggttggagcacatctggatgctgcttatctaccttggagatcttcctgaagggctttgtgggggccctatcacttcaacctactcttccacctgccgacccttgtggggacccagctggtcagcaggggtgtttcctcctaggggctcaaagactggagccttcatcaggccaggggaaagaggcagcccaaggggctgggggctccctgggggatatgcagcaggaggygactgtgcccccttggaggtggagctccacaggggacctgggctagagcctggagaccagagctcagacctgagtcctgccagggaaggggcttttttcctggctgtctccccaggccctggacctgcttagggtgacctaagcattcttcttcaggacagaacatgggtggctgtgtgttgggatccc

SEQ ID NO: 63848 - DNA, 751 bp, Homo sapiens
attttactacaaaaatcactagtgcaccattttggacctttctgtaagcagacacgaagacacatgcacaatatttactgggaaaattgtatttgaaaaataaaggagaaaggacaaagaagtaggcagtgagaaaccttcagacagtaatgtataaaggaagaagaaagggctaagagaaacttctctcacagtgcagctctgtgaaatttcattccatgtctaatgaggagaactggagtaaagatttcccatcaaaaatttcctgtgatcagcaggaatagctcagttctattagccctagaaatcttagtcactggctgggaacacccatgagagagtatggccttaacatgaattcagaaatgcaacagatatttgaagcccatttgtcacctatacatatcacagtaactaggttctcttgatgggagaaatgagtggagcccctcaatgactatcacaaatagttctggaaaactgtttatactcaagaggataggcaaaatattatattatttgcacattcagaacctactaaatatcaggatggaattgaaatgtgtattgtcaaatatgtaatttatttagtgaaaaataaaaatatcttcattacttaagrcagattatattttaaaatcacatgattgctaaactaaaattagagggagataatgagaaaatagaagaaaatatgaccaagtgttgacaaaaataagaaagaatagaacttaaaatacatcttttgaag

SEQ ID NO: 63849 - DNA, 783 bp, Homo sapiens
cacgcctgtaatcccagcactttggagggccgaggcaggcagatcacgaggtcagaagatcgagaccatcctggttaacatggtgaaaccccgtctctactaaaaatacaaaaaaattagccaggcgtggcggcatgcgcctgtagtcccagctgttgagtaggctgaggcaggagaatggcatgaacccaggaggcggagcttgcagtgagccgagrtcatgccactgcagtccagcctgggtgacagagcaagactccgtctcaaaaaaaaaaaaaaaattaatacttaatctcaacacttaggtttgccattgtccttatcatgaaaattactacaattcccaaactcatggcacaaacatgtgttgacaaaatctatatacaaaatgtgaggtatagtcgacaaaatctttagaacaaaatgtgaggtgatgctagaatgtggtgacaattttgccctaacttaattggaaagccattgtaacttgaatagaatggtccacctgcagcatggtcttccctgctctgtcacatagcatcagaaaggaccagatacttgttaagaacatctttaaactgtgttgtttatgcttttgtttttgagtcagcaatcgctgacagattttagaaactggcgggaataaagaatcagacatttaatttggcagggcagtcttgtacttcagataaatggatctggatttgtgatgccttcttcaaaatattaatttctcttttgaaaccaaatcatatttggcttcaatatcttatttaaaatgca

SEQ ID NO: 63850 - DNA, 667 bp, Homo sapiens
cattcttcacaaagaaaatgaaaaactgaatttattatagcttaaatcaggtattagatagttccataaatgtagctacttcaaaaaggaaagcaaattttagttagaaattttatagagctggtggagccaagatggccgaataggaacagctccggtctacagctcccagcgtgagtgacgcagaagacgggtgatttctgcatttccaactgaagtaccgggttcatctcactagggagtgccagacagtgggtrcaggacagtgggtgcagggcaccatgcgcgagccgaagcagggcgaggcattgcctcacttgggaagcacaaggggtcagggagtttcctttcctagtcaaagaaaggggtgacagatggcacctggaaaatcgggtcactcccaccctaatactgcgcttttccgacgggcttaaaaaacggcgcaccaggagattatatcccgcatctggctcggagggtcctacgcccacagagtctcactgattgctagcacagcagtctgagattaaactgtaaggcggcagcgaggctagggggaggggcgcccgccattgcccaggcttgcttaggtaaacaaagcagctgggaaactggaactgggtagagcccaccacagctcaaggaggcctgcttgcctctgtaggat

SEQ ID NO: 63851 - DNA, 667 bp, Homo sapiens
cattcttcacaaagaaaatgaaaaactgaatttattatagcttaaatcaggtattagatagttccataaatgtagctacttcaaaaaggaaagcaaattttagttagaaattttatagagctggtggagccaagatggccgaataggaacagctccggtctacagctcccagcgtgagtgacgcagaagacgggtgatttctgcatttccaactgaagtaccgggttcatctcactagggagtgccagacagtgggtacaggacagtgggtgcagggcaccatgcgcgagccgaagcagggcgaggcattgcctcacttgggaagcacaaggggtcagggagtttcctttcctagtcaaagaaaggggtgacagatggcacctggaaaatcgggtcactcccaccctaatactgcgcttttccgacgggcttaaaaaacggcgcaccaggagattatatcccgcatctggctcggagggtcctacgcccacagagtctcactgattgctagcacagcagtctgagattaaactgtaaggcggcagcgaggctrgggggaggggcgcccgccattgcccaggcttgcttaggtaaacaaagcagctgggaaactggaactgggtagagcccaccacagctcaaggaggcctgcttgcctctgtaggat

SEQ ID NO: 63852 - DNA, 667 bp, Homo sapiens
cattcttcacaaagaaaatgaaaaactgaatttattatagcttaaatcaggtattagatagttccataaatgtagctacttcaaaaaggaaagcaaattttagttagaaattttatagagctggtggagccaagatggccgaataggaacagctccggtctacagctcccagcgtgagtgacgcagaagacgggtgatttctgcatttccaactgaagtaccgggttcatctcactagggagtgccagacagtgggtacaggacagtgggtgcagggcaccatgcgcgagccgaagcagggcgaggcattgcctcacttgggaagcacaaggggtcagggagtttcctttcctagtcaaagaaaggggtgacagatggcacctggaaaatcgggtcactcccaccctaatactgcgcttttccgacgggcttaaaaaacggcgcaccaggagattatatcccgcatctggctcggagggtcctacgcccacagagtctcactgattgctagcacagcagtctgagattaaactgtaaggcggcagcgaggctagggggaggggcgcccgccattgcccaggcttgcttaggtaaacaaagcagcygggaaactggaactgggtagagcccaccacagctcaaggaggcctgcttgcctctgtaggat

SEQ ID NO: 63853 - DNA, 1329 bp, Homo sapiens
  misc_feature (1)...(1329): n = A,T,C or G
ttggggttaagaaatttccagagacagaaaattccaaattttggctggacgtggtggctcacgccctgtaatcccacgcactttgggaggctgaggcgaggtggatcacctgaggtcaggagttcaagaccagcctggccaacatggtaaaaccctgtctccattaaaaatacaaaaattaaccgggcgtggtggtgcatgcctgtaatcccagctacttgggagactgaggcaggagaatcgcttgaacctggraggcggaggttgcagtgagccaagatcatgccattgccctccagcctgagtgacagagcgagtctcagtctcaaaaaaaaaaaaaaaaaaaaagaaaagaaaattccaaattttgtccagcaaagaaattgctcttccaataaagttgtacttatgtttaagaatcacttacattgttttgattaattgcatcctaataatgagtataatcaattcagaagaaaatatttttgcaatttcaaggtatatatatgtttttgttgccaataagttcccatggtttaagcaaaaactttcaaatgtgtaccattaagatgaaattcttggggctggtagaagagtcatggtggaaaacttgctgctggggaagagtcgttacagtgggtgttggtgtcaagatattcaaggtacctcaaattacattttttgaagatgtttaaattacgaaaaatttaaggatgcaaacttcaaaatgtgtcagagtccacgtatatttttcaaaattctctaggagtaatacaagcagaagatataaagaccccgaggcagagtatcacagggatccttttatagatgtgtgtgtaatgnnnnnnnnnnnnnnnnnnnnnnnnnnnnnnnnnnnnnnnnnnnnnnnnnnnnnnnnnnnnnnnnnnnnnnnnnnnnnnnnnnnnnnnnnnnnnnnnnnnnagtgagagaccttacaaaagatggctagggccccagaaagttctaaacaggacaaaggctaccagctctccatttttatagtcattgcagtcctggtaaattaggtgaatattgaaaccatacaagtatgttaaatggaattagggtctagtctcaggaggtcatttgggatatggaacagttgcccttggcccctaaaaacccatggagcccccctagtcattgtgaccaccaaaaacaactccacaaatttccaaaatgccttgagggggcagtaccccaatgcagagaaccactggtgcagagtctaccatagaaatcaagacaggtggccgggcatggtggctcatgcccataatcctagcactttgggaggccaaggtgggt

SEQ ID NO: 63854 - DNA, 624 bp, Homo sapiens
atgatcatggtattaattcattttaagtagcaatcctgcttaaaagtcacagctgcgagagaagcagcctttccttttgtcttttgccccaaggcatttgtgcgaggtgcctctggattaactgcatttctccattggctgagttgcaggaatcaaatgcctctttgagagaarggcttttgttcacaatgctgaatgcttggtatagctatactaagcataaaggttcagtaggaattttatctttctctatttggcagaaaatagtgattaccagcagacacttaggctgtctaaaaacaagccagtttgtttaaagagctgcaggtcatcctttctccttctacttctggcttgggtgaaagctgcttttctgaagggggcctcttgagccgaggcgttctgaagggcagcaatgatgaaaaccttatgaatgactgtggctggagagccttgtgcactaaatgccattagcactcagctaggctgtgcattctcattgccctttgttcagaacggtcccctctgcagggagaacagaactgccacagttaaggctgtgacctttccagtcacttacctccttagggatgccagatcatcccagtgagatcatttattatg

SEQ ID NO: 63855 - DNA, 624 bp, Homo sapiens
atgatcatggtattaattcattttaagtagcaatcctgcttaaaagtcacagctgcgagagaagcagcctttccttttgtcttttgccccaaggcatttgtgcgaggtgcctctggattaactgcatttctccattggctgagttgcaggaatcaaatgcctctttgagagaagggcttttgttcacaatgctgaatgcttggtatagctatactaagcataaaggttcagtaggaattttatctttctctatttggcagaaaatagtgattaccagcagacacttaggctgtctaaaaacaagccagtttgtttaaagagctgcaggtcatcctttctccttctacttctggcwtgggtgaaagctgcttttctgaagggggcctcttgagccgaggcgttctgaagggcagcaatgatgaaaaccttatgaatgactgtggctggagagccttgtgcactaaatgccattagcactcagctaggctgtgcattctcattgccctttgttcagaacggtcccctctgcagggagaacagaactgccacagttaaggctgtgacctttccagtcacttacctccttagggatgccagatcatcccagtgagatcatttattatg

SEQ ID NO: 63856 - DNA, 712 bp, Homo sapiens
tctatgcctcctgtggtccagctcctgtttcctaaagcccaggtcctctttcttggcttctactcttttktttttctactttcctaaactttattaaagaaaaaagtaatggtggtaaacctctagaacttactcaattttctgggattcctcccccgagaatgtgatatattgatttccaaacatgccggaagtatacatggttcccaattgtactaaatagactaaataggtgaaaagctgaagtcctaaagtgttcatcttccaacttttcccagcctgtggtctgtccttgcatcagcaataattgcctgaacagctgctatggcttcattaatttttgtctgtagctgtctgagctcttctgtatacagcagtcacagaatttgagtagcttcattaagaactgcatctcctgtgtcaaaaccaagaatatgtttgtctaaagcaacaggcaagccctcttttgtttgatttgctttagcaactgcatcctgtgtcaggtgctcctgaaccaaaatttgaattgccttaagcattaccaggcaatcatcatgacattgaacctgaagcaggttagccaaagccattacaccaggcttaaaatcaggattatttacgtccaaatttatcaatggttctgcatttttagttgcattgtcagcagtttttgcattatcaggtactaagtccttgtatttttcagcattat

SEQ ID NO: 63857 - DNA, 820 bp, Homo sapiens
tcctcattggcctgtgataaatagagcagctaagacacagctcaacaatggcatcagtcagaactcggggggtcagagctactcaggttaacattacttccttactgttcccaggatccaggagttaacagtcccctgtcattgcatttcctgatgtgtaaatctgagtggcwtccctttgacttgaaatgctctgtcttcccctttcccctcgttcttttgtaggagcaatataattttggaatgcacctgatgaatgaatggtgggcatgggggaggtcccagggatcaaggaaaggccagatcctttcatgctttggggcagtggctggatgtcacaatgcttagaggttaccaggagaagatgaaaagagaatacacaggacaaatatctccaaataaggagctggctgaccctctcctggtagccccctggatatcatggtgacaggaagggctgaagaaagatgggagaattctgtgcctagaatgatgtcctgcccatcgtgggcaatgactagtggttgagcggtgaccctggctttcagcagttcctgaagatcctgcacaacagatggatctaatctttggagttcaaagggaaaccaaggctactgaagagggggtgcttctacatatttcacaaatccactttagaagaggcatcattttcttgaggcaagacccaggggctcaacagagtgaaccatgagatcggacagactgaggacacttgtgcctttgaagaccggctctgcctcaaggtctgggacccgggagtggcagcaggcttgcagctggactcagggagacagggacc

SEQ ID NO: 63858 - DNA, 610 bp, Homo sapiens
gcacagtggcgaccacagcacacgcagcccacggaaatccggccgggttaaaaagcagcagttttgtggcaaacgctgagttgtatttcggtggccgaaggagcacgttagcacatcaaagagaaagagaacttgggagggagaaggagaggcggatgaggaatcagattaatttactttgtgcagcaaaatatcttaccagctttgagctgtaaaattctgacacgctttcctgaaggggacaaagagaccacaagcaaccctctcgctctcaaacccacagcgctcgacaccgaaagccatcccggactttaaaaagtggaatgacggcgaaatcacacagaaaataaaagcagaggctcaaaggaagcggctgtacgtaatcgcttttagcaaataaacattctcaaatcccggtttgatgggaaccgagggagaaaagtacaggttttaggaaagaacggaggggtgggggctgggaagtaaaagaggcatctaattttatctggctcctgtccaacaataaaatctaatccatcattttctctgggtraaggctcttaatgaaaatttagagagtgtgactgaaatttagaattccccagggatc

SEQ ID NO: 63859 - DNA, 696 bp, Homo sapiens
ggcctagactcaatacagtttggtgcctagccttaaggctgcacagctacctagtgagacagccagacagtgaacccagggcctctgactccacacccatgacctcccctttccaggctgcctgtgaggtatggccagggtaatcacggctatgagaaggagggtgttcctgtgaatctgcccacaggaggcaaagtccaaagcccccagtacgtcactgactcagtcccttggggtcctctcaagttcaggtattgtgttgggactttattcctacaggcacaaggtcatgaatcagggttctagtcccagaaatcatttcatatcacaaaagtgccacattgctaaatatatgtataagaaaaaaaccttaatatgtgcttttataagttgatatttagcatacaaaattaagctacatctaaaatatgtggggccatttttctggataaactaagmaagcatcagccttgttaaaacattagcccactggccttcctctgttcctggcaatggccagagggaattgcaaaagtgcatcgctccaagaatgctcagcctgcattaaacgtgggagtcacctccaaggccaacactcagcagggacagcctgggacagccacactaagtgttaacagctctgctgtagctggttggtgccatacctggttgttaaacattgtgactatcatccat

SEQ ID NO: 63860 - DNA, 613 bp, Homo sapiens
ccactgctcagagcggggctgcgccgggccccaccttggtttcccatctgatcaccaggcactgtcccagctgagccccatgtggcttctggctgcaaaactccatggcctgccctggggatggtaagtgctctttcatcctggccacatgatttggttcctttccttttcaaagkattcaatgggcagatgtctgtctactcttcctccgctgcagctcggcccaggcttcacacagtccctgctggaagcacagctcccagagctgtggaaaacgcactcaggaggtgaggatgtgggaatccagggctgcaccctgcacagggcctgaggccctgcatgcgccactggggctttctgctagggtaaggagcagcttacatggacaccttctgtccctgtcacaagactcccgtggacctgcctggtttaaacctgtccaaccaccggtttgatgcatgagagagctggactcagcgtcactccaacctggggccagcaggatgctcagcgcagagctttgtgtggggcacaggtgctcatgggaagggacgccgggggacgtgactggccaccctgccagaaggggtggtgaggtttggatttagttctt

SEQ ID NO: 63861 - DNA, 663 bp, Homo sapiens
atcctggagactccaggtagaagagatgaagcccatctttccawctttataagaatgaagaagccatcaaaaaccagagccgctttatccttttcttgggggccatgaggccccctcctccctgtttctctctgcggactgctctgttgtcctgcttctctgcttttcagcttgcacttgacataaatggcagtcattgccacagtgaccattcatctcagctggccacacagccactggggactcttttttgtgtctcttagagaaaaggaatttctaaggaaataatctggttgggagcccaaggcgggcagatcacgaggtcaggagatcgagaccatcctggctatcatggtgaaaccccgtctttactaaaaaaaaatacaaaaaattagctgggcgtggtggcgggcacctgtagtcccagctactcgggaggctgaggcaggagaatggcatgaactcaggaggtggagcttgcagtgagcagagatcgcgccactgcactccagcctgggcgacagagctagactccatctcaaaaaataaaaaataaaaaataaaataatctggttgaccatccttgggtcaggtgtttatctctggctcaaacagctaaaagagcaggcagcaggattaatggggccattcccacctcatcag

SEQ ID NO: 63862 - DNA, 1715 bp, Homo sapiens
  misc_feature (1)...(1715): n = A,T,C or G
ctcatgtggtcagttctaagattccctaacctgacttgtttatttccctttagtatattttttccttgatctctccactccctcggttgtagaggaaaaataaaaaagacttttattcctctcattataattatacccacttctcacaaagaggctgactaccggcagatcaataatcagcagatcccgaagactgacamaggcatttgaagagagaatagtgtatttaaatcccacgcgccacgatgaaatgataggccataatcactcttcatacaaattcttctgcatttctaatttttttttcttttgaaaatgataacaggcactgatagacaactcagatcccgagggaaggctgccatgaagagaaggctcatagtttcccccaggattcaaatgacatcaaataagaaagctaagaaatagtacacatattttcacatagatcagttaacgtttcaacctagataatcattctagtaacttaaatagcaacaacaggaaaaacaacagaacgaaaattgccaaatgcgtagaaaagagcaacccgcaccacaattatcagcaactttctacatgcaagttttaatgtgagatatacagcccaagggcaagtgaatatgagttttcctgtaagtgatgtcactacaaacatggcacatatgaccatgcatgtatgcagatctgtgcacatcaccatcaaaagacttcacatttttactgagattcagcactggtatgacaaaatcttgtcaactaaataatgtaaccgtagtcatttcctcttataaagaatcatataatctggagccaaaaaatcatatactactttgttttttaggcaaaggaaaggcattgggatgttttgaatttttaagaagtattgcttcatgtgtgtatgtgntgtgtgttgcaaaacatttgagaatgccagggccataagtatgagtgactaagtggagggagatacacaagtaaacaagtatttagatcacagtgtagtcagtggcaaaacagctctgctcattgaatacaatttcacccgctgtgtgggcagaggggatgtctgagctgaattctaaagagaaggtgtacactgaagtgtaaacgctgtgtgggtgtgaacacaaaagagggatattcagagaactatggatcgtttgagtaaagaacctgaggaaggcaagttcagggatgttcctgggaaaaatcagcaagggctaggacagtagggaaaaagaggtacacttgatatgcttcatttctttctgtgatacacttttaaaatttcttagtttctgaaaaagacagatcagtcctacaccctgattcccttagcactaattagaccaactctccactccatatcgtagttcactaacacagttacttagtcattgtttttccaggttttaacatctgacatctaatggcaggtgctaaaagctgcctgtgaagcatgagtgacataaaaaggaggaaaatagcatttgttgcctgagcaaaagaggctttttggagtctcaaagcactttgttctttgagtttttgcagatggggatgaggattttcaagctttaggtgagaatgagaatcattctgaaaaaatatagtatttatttttagaggatgatgactcatcaggattcacgaaagcagtttttcttttagggtgatgacagcttaaaattaaaactattatttttctacta

SEQ ID NO: 63863 - DNA, 1641 bp, Homo sapiens
ggggcctgtcaggtggcaggagaagtgagagaatcaggataaatagctaatacctaggtcatgggttgataaggtgcagcaaaccaccatggcacatgtttacctatgtaacacatgggcacgtcccgcacacgtatcccagaacttaaaataaaataaaatttaaaaaataatttaaaaattagaaaaaagtcataaaaaataagtgggagctaaagaatgaatacatataaacataaagttggaaataatagatattggggaagtgaaaaggggggaggctaggaaagtggtgagggttacaaaaaattacctattaggtacaatgttcaccatttgggtgacgagtacacaagaagcctaaacctcaccaatacacaatatattcatgtaacaaacttgcagatgtacctcctgaacctaaaattgtaaataaatacaaattaagaaaaaaataataaaaatgcctgcatatgtagattgactatcaggtgagttttctgtggcatgtatactctgtacaatcactaaaactggatttctttgagttatagaattataaaacttaagacaaaccttaagagacaaagaaaacagagggcgaggtgacaaatcagtaacctgtctgagccaacactcagtaatctgtcctcctcacttctgagatctctcacttggagttctcaaaccccaaacagagaagcgagctttgcggcttaagagactctaatgaaatggtgttagtctgcagccctcagctatgagactaacttacaaaagttagacagtcaccaaaactattttcacatgagttaagccatattttcagaaatctcgtgactgtgaagaccacagagcttaagtttcagaacactccagttttacgtgccctttccaagtcccatgcatagttttgttttttaaaaatgtgaataatttttcttgaagacaccaccaaaattgtatcagcttttggcaggacaaaacttgggtccatccaggtgtcctcttcttcaaagccaagatagttgctcaacaacaatccttgccacccatcctcaataagttccctccaccacttctgccaattcacctacgcaagtgtcatgaacgataggctgacattctgaacacttaaggtacacagtgtgccaaatatgctaggataaatatttcacagattatataggggctcttaaaataaaacatgccatcaaattccagtgataggcakagtaatagctatttcactgaagttgtgagtgttaaatgagctaatacataagttgtatttaagatagcaacctgttacatattaagcaatcagtacctgttagctttttttggtgattgtttctgctattcttgctattttcagtctctcggtatttttttacaggcagacaaattaggtttgatcaagtagtctgaagaagggggaacaaaaaaagaaaataaatgcattatactgcagtaagctgatgctgtagaaacccaggacaggtggcttctaattcaggaaaatagaagcaaacacatcaacttttagaggaagccagggattgaatgcttcatttggctggagaagtatgaagcataaaaggaagtaaaagaaaggtaaaaaattaattataatcataa

SEQ ID NO: 63864 - DNA, 737 bp, Homo sapiens
ttatgttcaatattaatcttataaacacttattaccttttattgcttttgtcaagaggaagctcacattaaaatttatagcataattctagtataactgtataaaaatacttttataaccagtgtatctgggrtatctggggatacatctcactctacctttttttctatttaatcgggagtttcttctactttattttaaatatgtatttaaaattttgattgtattttatgtatttctaaaaattgttaggtagagaagagaaaaacagagagaaggaagaaaagagggaaaaaagaaagtaaggaaaaaatgaaaaaaaaaatgacagaaaaaaagcaggaaggaagatagggaggaaaggaaagaaacgaaaatgttagttaaggtcccagtacttggagatgtacctgaagttggtcccaaccctattctattggtgtttgaaaagcaaagcttcccagcaaccttcaaaatcttttttgttttatgttttgaaaactagttttttaatgtttttctctggctccttgctccagctccttttgtttgctgccccacagaacactggatacttagttcagatccttcatcagtttccactagaaatcaatttgctttcatctttttaaaaaaactttattgaacattttggagggaatctaaggtagtaatcaaatcatggaatttgggtagaccacagtctcattggtccaggttcacttccccaacttcct

SEQ ID NO: 63865 - DNA, 563 bp, Homo sapiens
gttttttggcctctcctatctaatcttgtttagcagccctatattccaccagcccatagcaggttctgagagtgggtctttcattaagcaattttactcataacttggtgcttgaggtagcactaattacaaagctcaaagagggatgggggaagctttccaagagccaatgccaaaatggaagtttctccatctacatcactatttggaaagagttcagtagatttttataaacttttcaaaagtactctcaaccaccaccaacaaaaaataggttgggtgcagtggctcacgcctgtaatctcagcatttggggaggccgaggygggaggatcacttgaggtcgggagttggagaccaagctgaccaacatggagaaaccccgtctctactaaaaatacaaaaattagctgggcgtggtggcgggcgcctgtaatctcactactcaggaggctgaggcaggagaattgctttccgggaggtggaggttgcagtgagccgagattgcgccattgcaccccagcctggcaacatgagtgaaactccgtctcaaataaataaat

SEQ ID NO: 63866 - DNA, 563 bp, Homo sapiens
gttttttggcctctcctatctaatcttgtttagcagccctatattccaccagcccatagcaggttctgagagtgggtctttcattaagcaattttactcataacttggtgcttgaggtagcactaattacaaagctcaaagagggatgggggaagctttccaagagccaatgccaaaatggaagtttctccatctacatcactatttggaaagagttcagtagatttttataaacttttcaaaagtactctcaaccaccaccaacaaaaaataggttgggtgcagtggctcacgcctgtaatctcagcatttggggaggccgaggtgggaggatcacttgaggtcgggagttggagaccaagctgaccaacatggagaaaccccgtctctactaaaaatacaaaaattagctgggcrtggtggcgggcgcctgtaatctcactactcaggaggctgaggcaggagaattgctttccgggaggtggaggttgcagtgagccgagattgcgccattgcaccccagcctggcaacatgagtgaaactccgtctcaaataaataaat

SEQ ID NO: 63867 - DNA, 646 bp, Homo sapiens
caaataccagtgaaacactgatcctaataaacattctatgttttagttatattgattagctagcagtgctaaaaagtgcctcttcaccagcacgcccacaaaccacacagctactaacacacaggattttaactaaatctcaacctaactgactcttggtatctccattgttcaaaagcatcaatccctggggagtctggacaagaacacattcatagcagaactgtgaccagaattgaaggaacagaaaattgtagaaggatatctcttctttcaaagttttaaacatgccaattttcaaaccaatgtctaggtgttgagaaaacacacttgagagcaaattgatcccttcaagacctaacattttcaaagasctaagatgagaaaaaaacagctgaggcactgcagattacttgtgggctctctttatccttgagggagacaatatattctgttttcctgagctacttatattccggcaaagggctatttgtttttaagatttcatagtagaactaacctaaacttattaggctgtaccagaaaggaaagatgatatttaatgtgatcctattccttggtgtacagtaatattaatgctgacaactgctgactttggaattcctccatttcttgcagtggacat

SEQ ID NO: 63868 - DNA, 665 bp, Homo sapiens
gttttctggggcaggcaaaatttgtttcttacaactcatcacacaatccataaacaatatattttcagaaatggtaatttcaaaagaagttaaaattattacacattcaccacatccccttctcttgtcctgctaattgaatagtatatattctaacactgggcttccattgaagtgcagctgtcattaagacaaagtggctttttatatacagaacataaattattgcaatagattagtaggcatttcaaattatgggaaacccaactgaggggctaagattgccagagtgaacaaaaatgaaaaaaagtatgaaatacatggtraatatacacacatcattcaatcactgcagtcagatttctaagtagatataatcgactttattttgtggatgagaaaaaatagtgaagattttgtcacctactcacacacttactctgaatcagggaaggagaaaggtaccactaatgagtcccttcacagagcacagtcacttccctgaacttatataaatgatgtggtgacagcacacttcagaaaaccattttcagagccaacgttttttattgttttattctgtcatctttgcaacggacctttcagagctgaagctgaccgtgatgaaactgtcactcttgctttattgatagtgtttttgtgga

SEQ ID NO: 63869 - DNA, 665 bp, Homo sapiens
gttttctggggcaggcaaaatttgtttcttacaactcatcacacaatccataaacaatatattttcagaaatggtaatttcaaaagaagttaaaattattacacattcaccacatccccttctcttgtcctgctaattgaatagtatatattctaacactgggcttccattgaagtgcagctgtcattaagacaaagtggctttttatatacagaacataaattattgcaatagattagtaggcatttcaaattatgggaaacccaactgaggggctaagattgccagagtgaacaaaaatgaaaaaaagtatgaaatacatggtaaatatacacacatcattcaatcactgcagtcagatttctaagtagatataatcgactttattttgtggatgagaaaaaatagtgargattttgtcacctactcacacacttactctgaatcagggaaggagaaaggtaccactaatgagtcccttcacagagcacagtcacttccctgaacttatataaatgatgtggtgacagcacacttcagaaaaccattttcagagccaacgttttttattgttttattctgtcatctttgcaacggacctttcagagctgaagctgaccgtgatgaaactgtcactcttgctttattgatagtgtttttgtgga

SEQ ID NO: 63870 - DNA, 978 bp, Homo sapiens
tgcatgactgtatatatgacataaaataagctttaagatatatctaactactacaatgctgggcgtgttggctcatgcctataatcccmgtgctttgggaggccgaggtgggtggatcacaaggtcagatgttcaagaccagcctgacccacatggtgaaaccccgtctctactaaaaatacaaaaattagccaggtgtggtggcaggcacctgtaatcccagctactcaggcggctgaggcaggagaatcacttgaacctgggaggcagaggttgtagtgagctgggattgtgccactgcactccagcctaggcgacagagtgagactccatctcaaaaaaaaataaataaataaaaaaggatgtatctaactactccagaatattctccctaattttttgagggtaagtcatgcaccatgttctctgtaccatgtttcagttaaccttcttttatttctattctatagaaataaccatcaattgcttaggttatttggaattattttttgttggagcatctctgctacaattctataaactcatctagggtactactaattttagaagtctatcagaatcacatggcccaggccttgtgtagtaaatggttattgaactgaaatgaaattatagttataagtagtaaatttaggtatctgagttcatcaacaaatcaattcatacatataccttgattgacttctatttggcctaatttactgatacatttctggatctaatatggacaaaaatattagaaattttaacttttattacaagtctggagagcatgttttcttagttgatgctaacttttagattaaaaatacccagactatagcaacacttagttattgctactctttattaccaaagattgaaattatcatcatttgtatcttgaataggccaatggcttctctctccctcttttcaatcttgcagactgtgaccatttcacttataagtaatgca

SEQ ID NO: 63871 - DNA, 388 bp, Homo sapiens
gttctagttcttaagttgaatggcgagtttctaagtcttcatttcatgttgcatttgttcttttgatgtatcaaatactatagtttttaagagagctgtagtttccctctttcgccactacatggcaggctagcaccttagtgaaataaatcctgaatgggaaaggctggtgtaaatggacatgtacctaatagctttctagcagcattctaatttccccatgcggatacatataaaatagggcttgatgtgctcagagtgtttaaatgcacaaccacarcatctcaggcgtacatcactgtggcatggatcttgcagccacgtgaccgggttttttgtttttatttttcctttctttctgcctggttatgtaactatttttgcaaac

SEQ ID NO: 63872 - DNA, 1281 bp, Homo sapiens
atccacacccaactattggcaaatgtttttaaatggggcaattacaacttttgtaaggtgaagggggaaggagaatttccatacccaccagtatgaatgtacaatggtacctaattttggagagtaattgggggctatctaacaaattttaagacacttgtaccctatgacttagcaatgtgatttctcaatggaaacttttgcttctgtgtgtaagagttagaatgagacatgtactgaaaaagaacatccaagtccatcgtattggttatagggggaaatggaaaacaggctaactagccatcaataggagaatggatagacagcatcagagtcctacaataaaaaaaaaacarcaacatagagaggataaaatagatttactagagttatatatgcaagctcaaaaacataatgttcagtggaaaaattttaaaaaaaaacaagggtagttgggtgcagccgtttgcacctatagtcccagctactcaggctaaagtaggaggatcacttgagtccaggagttcagggcagcagtgagctaggattgcacttgtgaatagccactgcactccagcctgggcaatatagcaaaaccccatctcaaaaaaaaaaaaaatcaataacaacaacaacgaaaaggcatacagacagtatgataccatagctttatttttttttaagtctacacaccactgtcagataacttattgaaacataagtatcttgtaaaagtataaaaatatgcataggaatgatgaccactgagtgattctaagggggatagagagggctaggatcacagagcggcacgcaggggtccatttcatctctaatgtcagggtttgataataacggtgagcaaatgggtagttgttaggctctcttacttttggaatgcttgaaatagtacctgattttaagaaggacattttcataaagaggactaaagcgcctctggtgggaatatctcccaccagagatatctgccattgctaacgcccagtgccatgaattcacacgggcgcctcatcaccaaagagacacaacctgccactgagaagatgacctgtatttcttaatatgacgtcaacttactttatgccacagccacgactgacaagaaggcaagaaggaagaaaattttctctaaaaatgaaggaaatgttgctgtttacgaagcagtccaaatgtaatgaatatttataggtcacgaaatctaacctgccaaggcactctgattaataacagagtgggataacacaacctggtaacctttta

SEQ ID NO: 63873 - DNA, 1180 bp, Homo sapiens
ggcacaatcacagccccaactaattctttttttaaattttttatagaaatggggtctccctatattgcccaagctggtctgaaactcctgggctcaagtgatcctccagcctcagcctccaaagtgttgggattacaggtgtgagtcaccacacctggcctacttttttttatataagcaacacagcattttctggtctggttacagttctcartggaatcataaatagtttcatttttacctaaatatttcaggtgatttaattaaattttcaaagttttttttaaaaaactagctttgattaaagttacttccataattaaaatttgtgttttgctttttaacagctaattttgaatgttttagaggcaatactttttgaaaatatgaaaaattatttaaatttattttctaaatttacatttaatttcctttttaaaaaaaaaatttttagagacacgatctcaatctgtcacccaggctgaagtacagtggtgtgatgaccatagctcactgcagccttgaactcctgagctcatgtgatcttcccgcctcagcctctgcctcttgagtagataggcccacaggcatgcaccaccatgcctggatagttttgtaaacacattttttagagatgaggtctcacactgttgcccaggctggactcgtacacctggcctcaagcaaacctcttgccttggcgtctcaaagtgctgggattacgggtgagagccactgcaccaggcttaatgtacatttttgacaaaaatgcattcaaaatttggcactttatcacattaatgttaaaagatgaattatgtgaaaatcttgctcatacaacataattattgattatactgaatgaggcaagaaaaataaattttactgaaaaagtacatactcatttatgaattatggatgtctttatttttgacttattcaagcattgctggcccgtgagtaaaacccccagacatgtacaacaagcattacattcagccattgagattttgccaactttcagccaataaaaatcatagctttccacgtattttttggtttcatcattaggaaagcaggaggatagccaatattttatttgaaagtttgctggctcgatttcttcttttgaaatatttagacctctggtctgtggacttgcagttgtgttctccgtcca

SEQ ID NO: 63874 - DNA, 1180 bp, Homo sapiens
ggcacaatcacagccccaactaattctttttttaaattttttatagaaatggggtctccctatattgcccaagctggtctgaaactcctgggctcaagtgatcctccagcctcagcctccaaagtgttgggattacaggtgtgagtcaccacacctggcctacttttttttatataagcaacacagcattttctggtctggttacagttctcagtggaatcataaatagtttcatttttacctaaatatttcaggtgatttaattaaattttcaaagttttttttaaaaaactagctttgattaaagttacttccataattaaaatttgtgttttgctttttaacagctaattttgaatgttttagaggcaatactttttgaaaatatgaaaaattatttaaatttattttctaaatttacatttaatttcctttttaaaaaaaaaatttttagagacacgatctcaatctgtcacccaggctgaagtacagtggtgtgatgaccatagctcactgcagccttgaactcctgagctcatgtgatcttcccgcctcagcctctgcctcttgagtagataggcccacaggcatgcaccaccatgcctggatagttttgtaaacacattttttagagatgaggtctcayactgttgcccaggctggactcgtacacctggcctcaagcaaacctcttgccttggcgtctcaaagtgctgggattacgggtgagagccactgcaccaggcttaatgtacatttttgacaaaaatgcattcaaaatttggcactttatcacattaatgttaaaagatgaattatgtgaaaatcttgctcatacaacataattattgattatactgaatgaggcaagaaaaataaattttactgaaaaagtacatactcatttatgaattatggatgtctttatttttgacttattcaagcattgctggcccgtgagtaaaacccccagacatgtacaacaagcattacattcagccattgagattttgccaactttcagccaataaaaatcatagctttccacgtattttttggtttcatcattaggaaagcaggaggatagccaatattttatttgaaagtttgctggctcgatttcttcttttgaaatatttagacctctggtctgtggacttgcagttgtgttctccgtcca

SEQ ID NO: 63875 - DNA, 633 bp, Homo sapiens
aaaactccaccgactccccttaaggggtcaatgaaaagtgaagagcatctattagtttattgcatctgttaggaaagagaatatgttcttaaatttgtggaattgaggctttgttggtttatagcacttttaacttcactttccttctccagacaagtgaatttggcaggttatcaacgaccctctgcttaaactttgaaacttaggttacttgtcctcagcagaaaatctccttagctgatcagtgctattgccatacatgcactgccctgattgccttaggactcccaaattcaagccctaattctgccgataaccccgtatgagcttcattccagctttaaaaatcactcacatcctctggaaaatgaaggggttgacctaatgatcttcgagttgatttctggttctaaagctctaggtatccctgaaaagatctggccttttttcttcaaatgtatctcctggaatctgatggaaattggaaattgaggtcatagatattccttcagtgtgcactgctggaaaaaaaaaaaaaggaaaacagcaatcctcattcattttactasctatctcctcataatttttttcccagttttatttttttttgtttttattgatgagaaagattat

SEQ ID NO: 63876 - DNA, 1212 bp, Homo sapiens
  misc_feature (1)...(1212): n = A,T,C or G
cacccagctaatttttgtatttttagtagagatggggtttcaccacgttggccagactggtctcgaactgctgactccaagtgatctgcctgcctcggcctcccaaagtgctgggattacagacatgagccactgcacccggcctgcttagcattttagagtagtttatattttaaagcaaattacagatatcacattttaacctcaaatatttcagaatgcatatctaaaaagtaaggctattatgttacataacaataatacaattattatacccataaaaattaacagtaatttcctagtggcatggaaggcccaatccaaattcaaatgtccttaataggcccagaagtttccttcatagttgatatattcagaccacacactgcattggggagtctttcgtggttttctgtaaggcctctggagggcatcaggattatgagggatgccttggtcctcagccggaaagaggcaggtggagaatggctgtactttcctgggtgatggcttcccatggcagaagctaaggcacctggcactcttgcttaatgannnnnnnnnnnnnnnnnnnnnnnnnnnnnnnnnnnnnnnnnnnnnnnnnnnnnnnnnnnnnnnnnnnnnnnnnnnnnnnnnnnnnnnnnnnnnnnnnnnncaactggaggcaatagatcagataggcaaagagaagactgctgtcattgggcctttttctttttctttttttttttttttgagacagcgtctcactctgtcacccaggctrgagtgcagtggcgtgatctcagcttactgcaaactctgcctcccgggttcaagcgattctcctgcctcagcctcctgagtagctgggactacaggtgtgtgccaccacacccggttaatttttgtatttttagtagaaacggagtttcactatattggccaggctggtcttgaactcctgacctcgtgatctgccttcctcggcctcgcaaagggctgggattacaggtgcgagccaccatgcccggcccattgggcctttttcttatgattttcatgactttttgctttgtaaatagtaacagcttaagtaacaaatggatttgattaattcctttgtctcaatattcccatcttctcctttacgaaagtcttcctccaagacttagttgggaagtaaccaaaatacttcatttctcagttttctttaaagtgttgatttgactt

SEQ ID NO: 63877 - DNA, 628 bp, Homo sapiens
attgatattctgtcctgcatccatcctttscctcattctaccctatgaaaatcatatcacaatttcgttctgatggtcccacctcaccctctcagctcttgtactttaaatgaagttgtctatcctttccctccaggtgcaacagtgacaaatgccaggttttctctaatcagcacaaatcagcacattctatacctcaggctttgctgattggcttaaagctgggaatatttgagccagcttcatggatggcttacagagtagataaattgcactgcagatggactataggaaagagctaatgacctaagtcaggccaatcagaaccaaaacaatctaatcatggtgtatcttttcttagctaaagaaataaatagattatattcactgctggagcgggtgctacattttgtgagtttgaaccaatgaaagtcaccatcacgaccctaaaaattgagcctatctaaaagatgcagcttgaaaaaaaaagttctgggggtatcctttgagcccttgactgagccatgtctgaggcccctgaattctacactggacttgagtgcaagttaataaatcccctttctggttccagcctggcggagctgagttttctttcacttgcaagtat

SEQ ID NO: 63878 - DNA, 688 bp, Homo sapiens
atatatatatatawatatttatatttatatatttagataaaaaatatttatattttatatatatatatatatatatatatatatatatatatatatatatatagctacaaatgcctcccatccctgtatatatgcccccggcaatgtggggttgctactgttcccatcacttgccttggccaatggaaagaagcagaatgatgttaagcaatttctgagccaaggtctaagtcaagcaacctctgcattctttctcaaaattcacctaccaagtgaagaagcccaggctagctaaaccagtggaatggccatgtggataaaaaccaaagtgccccagctgacacttcagccaactgctaggcctgtaaattacatcatccaggatcaggcaacaccaatcaacatgccaagtgaccacaaatatgtgagtgaacccaacaaacaccacagagaatggaaatgaacaatctcagctgaaccctgcccaaatcaccaggccacaccagtcagataagtccctctggtataaggctagacaagcaatgtagctttaatattgttttctacagaatatgaggcatggggtaatatccccactcaagagttacgaattctactgctgtcgtgtatgccaatgccttccataggcactagaaaggcactttaaccattgaccattattcaagga

SEQ ID NO: 63879 - DNA, 688 bp, Homo sapiens
atatatatatataaatatwtatatttatatatttagataaaaaatatttatattttatatatatatatatatatatatatatatatatatatatatatatatagctacaaatgcctcccatccctgtatatatgcccccggcaatgtggggttgctactgttcccatcacttgccttggccaatggaaagaagcagaatgatgttaagcaatttctgagccaaggtctaagtcaagcaacctctgcattctttctcaaaattcacctaccaagtgaagaagcccaggctagctaaaccagtggaatggccatgtggataaaaaccaaagtgccccagctgacacttcagccaactgctaggcctgtaaattacatcatccaggatcaggcaacaccaatcaacatgccaagtgaccacaaatatgtgagtgaacccaacaaacaccacagagaatggaaatgaacaatctcagctgaaccctgcccaaatcaccaggccacaccagtcagataagtccctctggtataaggctagacaagcaatgtagctttaatattgttttctacagaatatgaggcatggggtaatatccccactcaagagttacgaattctactgctgtcgtgtatgccaatgccttccataggcactagaaaggcactttaaccattgaccattattcaagga

SEQ ID NO: 63880 - DNA, 633 bp, Homo sapiens
tttattagagctgaacaagcatattaaaagttagggcatggaagggaggaagcaggaccagctcacgggctggagatgaaccaagaagggttgtccatgaggtgaagctgggtcagagggagcaggcatggtcgaggctgtggttaccatctagaaggagaaggagtagtggggagggaaatcactgctcctgggtgccccaggaaatgtagtctggctgggtggccgcatggtactcatcaatgagctcctgaacaacctccctagacctgtccatctcatcaaagttgtccttgaacatgtcctccttacggaactgctcgaggaaggcatcccgcttccgcagcttgtcaaactgctggcaggaactttcaaagagctgaaagagatgaaaatctccaaaatgcgagccagggggttaggagtgaacttggggaagatgatgaaggtggccagtggaacagactcttctaagaagaatagaaacctagactcaccgaggagatgctggtgtggttggccatcatgagcccgctgacccggtgggcygagggcaggtagggagacttcctcgacagggccacctggatgctggcggggccccacgggatgaagttggccaacttccgttcc

SEQ ID NO: 63881 - DNA, 1046 bp, Homo sapiens
  misc_feature (1)...(1046): n = A,T,C or G
catatttgatttccttccacctgggcaacaggacattggaaaagcagagcttagagtgaggggggaaatgagaggctggcaaaacttacacagattatttttcttttttttttaattttattattataatactttaagttttagggtacatgygcacaacgtgcaggtttgttacatatgtatacatgtgccatgttggtgtgctgcacccattaactcgtcatttagcagtaggtatatctcctaatgctatccctcccccctcccccaaccccacaacagtcgagaacacatggacacaggaaggggaacatcacactccggggacagatttttttctaacctagccgcacaactgcactaagtttttatacagaccttctgcctcatcagcttccatctcatctcatttcatgctggatctagaattgactctgctgcaggaacacacacactgcctgacagtgctatcttaagggcatttaaaaggaaacagatggccaggcacagtggctcatacctgtaatcccagtactttgggaggccaagatgggtggatcacctgatgtcaggagttcaagaccagcctggccaacatggtgaaacctcatctctactaaaaatacaaaaattagccgggtgtggtcacctggctacagtagcacatctgtagtcccagctactcaggaggttaagacaggagatcacttgaactcaggaggcggaggctgcaatgagccgagattgtgctactgcactccagcctggacaacagagcaagactccatctcaaaaaaaaaaaaaaaatggaaacagataatgaaggctggccaatgaaatgctttaaaggattagtacaaaaacagaggcttgtgttttaccgagaataacaagtaaagaaattggatatttgaatcagatgtcaagcttgattcttttattttactgcttccataataaatggaaatctaaattaaaataaagtcagagatgatttttatattaaactatcttatatgttcaaaaagtagctntttgtgaaagcc

SEQ ID NO: 63882 - DNA, 1046 bp, Homo sapiens
  misc_feature (1)...(1046): n = A,T,C or G
catatttgatttccttccacctgggcaacaggacattggaaaagcagagcttagagtgaggggggaaatgagaggctggcaaaacttacacagattatttttcttttttttttaattttattattataatactttaagttttagggtacatgtgcacaacgtgcaggtttgttacatatgtatacatgtgccatgttggtgtgctgcacccattaactcgtcatttagcagtaggtatatctcctaatgctatccctcccccctcccccmaccccacaacagtcgagaacacatggacacaggaaggggaacatcacactccggggacagatttttttctaacctagccgcacaactgcactaagtttttatacagaccttctgcctcatcagcttccatctcatctcatttcatgctggatctagaattgactctgctgcaggaacacacacactgcctgacagtgctatcttaagggcatttaaaaggaaacagatggccaggcacagtggctcatacctgtaatcccagtactttgggaggccaagatgggtggatcacctgatgtcaggagttcaagaccagcctggccaacatggtgaaacctcatctctactaaaaatacaaaaattagccgggtgtggtcacctggctacagtagcacatctgtagtcccagctactcaggaggttaagacaggagatcacttgaactcaggaggcggaggctgcaatgagccgagattgtgctactgcactccagcctggacaacagagcaagactccatctcaaaaaaaaaaaaaaaatggaaacagataatgaaggctggccaatgaaatgctttaaaggattagtacaaaaacagaggcttgtgttttaccgagaataacaagtaaagaaattggatatttgaatcagatgtcaagcttgattcttttattttactgcttccataataaatggaaatctaaattaaaataaagtcagagatgatttttatattaaactatcttatatgttcaaaaagtagctntttgtgaaagcc

SEQ ID NO: 63883 - DNA, 1046 bp, Homo sapiens
  misc_feature (1)...(1046): n = A,T,C or G
catatttgatttccttccacctgggcaacaggacattggaaaagcagagcttagagtgaggggggaaatgagaggctggcaaaacttacacagattatttttcttttttttttaattttattattataatactttaagttttagggtacatgtgcacaacgtgcaggtttgttacatatgtatacatgtgccatgttggtgtgctgcacccattaactcgtcatttagcagtaggtatatctcctaatgctatccctcccccctcccccaaccccacaacagtcgagaacacatgracacaggaaggggaacatcacactccggggacagatttttttctaacctagccgcacaactgcactaagtttttatacagaccttctgcctcatcagcttccatctcatctcatttcatgctggatctagaattgactctgctgcaggaacacacacactgcctgacagtgctatcttaagggcatttaaaaggaaacagatggccaggcacagtggctcatacctgtaatcccagtactttgggaggccaagatgggtggatcacctgatgtcaggagttcaagaccagcctggccaacatggtgaaacctcatctctactaaaaatacaaaaattagccgggtgtggtcacctggctacagtagcacatctgtagtcccagctactcaggaggttaagacaggagatcacttgaactcaggaggcggaggctgcaatgagccgagattgtgctactgcactccagcctggacaacagagcaagactccatctcaaaaaaaaaaaaaaaatggaaacagataatgaaggctggccaatgaaatgctttaaaggattagtacaaaaacagaggcttgtgttttaccgagaataacaagtaaagaaattggatatttgaatcagatgtcaagcttgattcttttattttactgcttccataataaatggaaatctaaattaaaataaagtcagagatgatttttatattaaactatcttatatgttcaaaaagtagctntttgtgaaagcc

SEQ ID NO: 63884 - DNA, 1046 bp, Homo sapiens
  misc_feature (1)...(1046): n = A,T,C or G
catatttgatttccttccacctgggcaacaggacattggaaaagcagagcttagagtgaggggggaaatgagaggctggcaaaacttacacagattatttttcttttttttttaattttattattataatactttaagttttagggtacatgtgcacaacgtgcaggtttgttacatatgtatacatgtgccatgttggtgtgctgcacccattaactcgtcatttagcagtaggtatatctcctaatgctatccctcccccctcccccaaccccacaacagtcgagaacacatggacacrggaaggggaacatcacactccggggacagatttttttctaacctagccgcacaactgcactaagtttttatacagaccttctgcctcatcagcttccatctcatctcatttcatgctggatctagaattgactctgctgcaggaacacacacactgcctgacagtgctatcttaagggcatttaaaaggaaacagatggccaggcacagtggctcatacctgtaatcccagtactttgggaggccaagatgggtggatcacctgatgtcaggagttcaagaccagcctggccaacatggtgaaacctcatctctactaaaaatacaaaaattagccgggtgtggtcacctggctacagtagcacatctgtagtcccagctactcaggaggttaagacaggagatcacttgaactcaggaggcggaggctgcaatgagccgagattgtgctactgcactccagcctggacaacagagcaagactccatctcaaaaaaaaaaaaaaaatggaaacagataatgaaggctggccaatgaaatgctttaaaggattagtacaaaaacagaggcttgtgttttaccgagaataacaagtaaagaaattggatatttgaatcagatgtcaagcttgattcttttattttactgcttccataataaatggaaatctaaattaaaataaagtcagagatgatttttatattaaactatcttatatgttcaaaaagtagctntttgtgaaagcc

SEQ ID NO: 63885 - DNA, 1046 bp, Homo sapiens
  misc_feature (1)...(1046): n = A,T,C or G
catatttgatttccttccacctgggcaacaggacattggaaaagcagagcttagagtgaggggggaaatgagaggctggcaaaacttacacagattatttttcttttttttttaattttattattataatactttaagttttagggtacatgtgcacaacgtgcaggtttgttacatatgtatacatgtgccatgttggtgtgctgcacccattaactcgtcatttagcagtaggtatatctcctaatgctatccctcccccctcccccaaccccacaacagtcgagaacacatggacacaggaaggggaacatcacactccggggacagatttttttctaacctagccgcacaactgcactaagtttttatacagaccttctgcctcatcagcttccatctcatctcatttcatgctggawctagaattgactctgctgcaggaacacacacactgcctgacagtgctatcttaagggcatttaaaaggaaacagatggccaggcacagtggctcatacctgtaatcccagtactttgggaggccaagatgggtggatcacctgatgtcaggagttcaagaccagcctggccaacatggtgaaacctcatctctactaaaaatacaaaaattagccgggtgtggtcacctggctacagtagcacatctgtagtcccagctactcaggaggttaagacaggagatcacttgaactcaggaggcggaggctgcaatgagccgagattgtgctactgcactccagcctggacaacagagcaagactccatctcaaaaaaaaaaaaaaaatggaaacagataatgaaggctggccaatgaaatgctttaaaggattagtacaaaaacagaggcttgtgttttaccgagaataacaagtaaagaaattggatatttgaatcagatgtcaagcttgattcttttattttactgcttccataataaatggaaatctaaattaaaataaagtcagagatgatttttatattaaactatcttatatgttcaaaaagtagctntttgtgaaagcc

SEQ ID NO: 63886 - DNA, 2117 bp, Homo sapiens
ccatatagtggtttaaaaaagaccacgtgccatatagtaaaatttaatgaagcttcccattagtcatattgtttctgtctctaggttttagacctgactacccattaccgggtatcctctcctcctcccatttcttcccagagagccttgaaaccctacctttaatcacctaagagttttaactttattattctacaaacatttattccctctcttcaagacaaacaaacagggctgggtgcagtggctcatgcctgtattcccagcccttttggaggccaaggagggaagttcgcttaaggtcaggagtttgagaccagcctgggcaatgtagtgagactcccccatctctacaaaatttccttttttaaaattagcagggcgtggcattgtacgcctgtattcctagccactcgggaggttgaggcaggaggatcgcttgagccccggaattcaaagttgcagtgagccatgatcataccgctgcattccagcctgggtgacagagcaagacccwgactctaaaaaacacttaaacaaacaaaaactcctatgacttgccaaaacttgaccagcttctgctcttcagacctgtccctgcaactccagctcatcatgcccatgaagctcagagtcaaagggaagctcaggtgccacggagtaataaacacatgaacctgagagaaaggaaaatggaaatctggctccagacccttggggtgcaggcactaaagccaacgtcaagtgtgacttacctcatgtgcactggagggcatccttgaagttagttaataagtgatgagaaagtattcacttactctctgcctgccccggcagctctgagaaggaagtaactctttctgcttcctttaccatggcaccctgaatctctagctccatgctccccaaataccacctgacacagagcaggactcaacaaacatgtgttgattggttgactggacccgtttttatgctaaccccaacccaccctataaatgcatatatctcgaaaaataagattgcagagggcatatttaaattcagttagacgtactttgagttcgaaggcaagtgtaaaaagacattaaacattatacttgcatgtgtgtaaattaaagttattaatgtcgctaataagattgcagatggggcaaattcctagaaacatcatcataattctgtaggcaggagatgttttagtggctccattttacagatgaggagaccaaggactgaataagagaatgaatttaccccaaatcacagagctaacgatggcagagccagaatttgaatccagtggactggtgtatgcaaccttctctttgtgttaggtttaggggttctctggagagggtgatggagctgacatcttgtcctcctcttacctctgccattgactttggggtgacttgaggctagctgtgagcctctgtttcctcatccataaaaaagagccatcagcaggtgctgcacccaggtcttcccacacaggacctcatcaaactcatcaggcatgaggcccattgggcctaacatcactttcaggaagcacgagcccaggctgagcccaggctgctggcaaggcagaagatgggtgagcttccagcagtcatggaccgcgaggctctaccccaggtctgaggaaagataactggcgagacacccaccacaccccagtgaggacattttactctataaacctgggaatgactttctgcttcttataaccaggcaggcagtgtggtgaaatgtacaaccagggcctttggatttcagagggaaagaagcaaggattgtgttcatttctacgaaatttctgggagctactttggttttcacaaatacggtaggcttcctcaaacagggctatggtctaaaatagtttagagagaaatttaatagcaacgattagaacacacacaaaaaaacctttccaatgacagctgtgtaagttacaagagcccattcccacatcatcctgcctgatcagagatttaggcaggctggtgcctccaggctggcttctccatgcaagagcagcggacctgttcctggaacctgatggaagtgcagaatctccctatggattctgaatattggtctttcctcag

SEQ ID NO: 63887 - DNA, 2117 bp, Homo sapiens
ccatatagtggtttaaaaaagaccacgtgccatatagtaaaatttaatgaagcttcccattagtcatattgtttctgtctctaggttttagacctgactacccattaccgggtatcctctcctcctcccatttcttcccagagagccttgaaaccctacctttaatcacctaagagttttaactttattattctacaaacatttattccctctcttcaagacaaacaaacagggctgggtgcagtggctcatgcctgtattcccagcccttttggaggccaaggagggaagttcgcttaaggtcaggagtttgagaccagcctgggcaatgtagtgagactcccccatctctacaaaatttccttttttaaaattagcagggcgtggcattgtacgcctgtattcctagccactcgggaggttgaggcaggaggatcgcttgagccccggaattcaaagttgcagtgagccatgatcataccgctgcattccagcctgggtgacagagcaagacccagactctaaaaaacacttaaacaaacaaaaactcctatgacttgccaaaacttgaccagcttctgctcttcagacctgtccctgcaactccagctcatcatgcccatgaagctcagagtcaaagggaagctcaggtgccacggagtaataaacacatgaacctgagagaaaggaaaatggaaatctggctccagacccttggggtgcaggcactaaagccaacgtcaagtgtgacttacctcatgtgcactggagggcatccttgaagttagttaataagtgatgagaaagtattcacttactctctgcctgccccggcagctctgagaaggawgtaactctttctgcttcctttaccatggcaccctgaatctctagctccatgctccccaaataccacctgacacagagcaggactcaacaaacatgtgttgattggttgactggacccgtttttatgctaaccccaacccaccctataaatgcatatatctcgaaaaataagattgcagagggcatatttaaattcagttagacgtactttgagttcgaaggcaagtgtaaaaagacattaaacattatacttgcatgtgtgtaaattaaagttattaatgtcgctaataagattgcagatggggcaaattcctagaaacatcatcataattctgtaggcaggagatgttttagtggctccattttacagatgaggagaccaaggactgaataagagaatgaatttaccccaaatcacagagctaacgatggcagagccagaatttgaatccagtggactggtgtatgcaaccttctctttgtgttaggtttaggggttctctggagagggtgatggagctgacatcttgtcctcctcttacctctgccattgactttggggtgacttgaggctagctgtgagcctctgtttcctcatccataaaaaagagccatcagcaggtgctgcacccaggtcttcccacacaggacctcatcaaactcatcaggcatgaggcccattgggcctaacatcactttcaggaagcacgagcccaggctgagcccaggctgctggcaaggcagaagatgggtgagcttccagcagtcatggaccgcgaggctctaccccaggtctgaggaaagataactggcgagacacccaccacaccccagtgaggacattttactctataaacctgggaatgactttctgcttcttataaccaggcaggcagtgtggtgaaatgtacaaccagggcctttggatttcagagggaaagaagcaaggattgtgttcatttctacgaaatttctgggagctactttggttttcacaaatacggtaggcttcctcaaacagggctatggtctaaaatagtttagagagaaatttaatagcaacgattagaacacacacaaaaaaacctttccaatgacagctgtgtaagttacaagagcccattcccacatcatcctgcctgatcagagatttaggcaggctggtgcctccaggctggcttctccatgcaagagcagcggacctgttcctggaacctgatggaagtgcagaatctccctatggattctgaatattggtctttcctcag

SEQ ID NO: 63888 - DNA, 2117 bp, Homo sapiens
ccatatagtggtttaaaaaagaccacgtgccatatagtaaaatttaatgaagcttcccattagtcatattgtttctgtctctaggttttagacctgactacccattaccgggtatcctctcctcctcccatttcttcccagagagccttgaaaccctacctttaatcacctaagagttttaactttattattctacaaacatttattccctctcttcaagacaaacaaacagggctgggtgcagtggctcatgcctgtattcccagcccttttggaggccaaggagggaagttcgcttaaggtcaggagtttgagaccagcctgggcaatgtagtgagactcccccatctctacaaaatttccttttttaaaattagcagggcgtggcattgtacgcctgtattcctagccactcgggaggttgaggcaggaggatcgcttgagccccggaattcaaagttgcagtgagccatgatcataccgctgcattccagcctgggtgacagagcaagacccagactctaaaaaacacttaaacaaacaaaaactcctatgacttgccaaaacttgaccagcttctgctcttcagacctgtccctgcaactccagctcatcatgcccatgaagctcagagtcaaagggaagctcaggtgccacggagtaataaacacatgaacctgagagaaaggaaaatggaaatctggctccagacccttggggtgcaggcactaaagccaacgtcaagtgtgacttacctcatgtgcactggagggcatccttgaagttagttaataagtgatgagaaagtattcacttactctctgcctgccccggcagctctgagaaggaagtaactctttctgcttcctttaccatggcaccctgaatctctagctccatgctccccaaataccacctgacacagagcaggactcaacaaacatgtgttgattggttgactggacccgtttttatgctaaccccaacccaccctataaatgcatatatctcgaaaaataagattgcagagggcatatttaaattcagttagacgtactttgagttcgaaggcaagtgtaaaaagacattaaacattatacttgcatgtgtgtaaattaaagttattaatgtcgctaataagattgcagatggggcaaattcctagaaacatcatcataattctgtaggcaggagatgttttagtggctccattttacagatgaggagaccaaggactgaataagagaatgaatttaccccaaatcacagagctaacgatggcagagccagaatttgaatccagtggactggtgtatgcaaccttctctttgtgttaggtttaggggttctctggagagggtgatggagctgacatcttgtcctcctcttacctctgccattgactttggggtgacttgaggctagctgtgagcctctgtttcctcatccataaaaaagagccatcagcaggtgctgcacccaggtcttcccacacaggacctcatcaaactcatcaggcatgaggccsattgggcctaacatcactttcaggaagcacgagcccaggctgagcccaggctgctggcaaggcagaagatgggtgagcttccagcagtcatggaccgcgaggctctaccccaggtctgaggaaagataactggcgagacacccaccacaccccagtgaggacattttactctataaacctgggaatgactttctgcttcttataaccaggcaggcagtgtggtgaaatgtacaaccagggcctttggatttcagagggaaagaagcaaggattgtgttcatttctacgaaatttctgggagctactttggttttcacaaatacggtaggcttcctcaaacagggctatggtctaaaatagtttagagagaaatttaatagcaacgattagaacacacacaaaaaaacctttccaatgacagctgtgtaagttacaagagcccattcccacatcatcctgcctgatcagagatttaggcaggctggtgcctccaggctggcttctccatgcaagagcagcggacctgttcctggaacctgatggaagtgcagaatctccctatggattctgaatattggtctttcctcag

SEQ ID NO: 63889 - DNA, 570 bp, Homo sapiens
taactcctgacttcaagcaatctgcccgcctcagcctcccaaagtgttgggattacaggcatgagccacccgcgcccggcacagtgatctgcattttaacccaccctcagttaaaacgtgacctgaggtgatcctgacrcaggctaaagtctgagacactgatctcaaacctttaagaccatttagcagcaagaaaaagctagagaagccacatctgaactagaaaacacaaaggggcccaatgaaagtgcaaactagattttctcaaaaatgaccagaactgccatgaaatgaactggtcaggataaacttgaccagaaccaggagtgcccagttctaaacagatgctgccagaggaatctcaagtgcagagggcctaggccggccgggagccctgcacgagcattaatggcacagtgtattttttataacatccaaagcacttaaaagaataatattttcactcatgtatctcaacaacttcctggagaggaaggcaaagggcagattctctggctggcgcaaaggttacatggtcaggagggacccaggagccactgagcagaggca

SEQ ID NO: 63890 - DNA, 595 bp, Homo sapiens
gatccagtacctacacatatatattcttggtttttattttctcatgagaggttgtggggggtttgttcttttgtttgtttttcttttcttttctttttttttttaaccatctagaggtccaggcaaagacagacgttcttgttgtctccctccagtggtatttctctagtttcttctcacattagggaacagcctttccagagccccagctttacacacatactgtggttccagctccccacctggggttgtctgtgtccttgtcctttatttyggcagatgttaccccccagcccctggcccctggctctgcatctagtctgataggctcacagctgcttcagcttctgccatgaactcacttctctggccttgagttgttgctccagttctggtactcagggatttaaatttcttttgttctttcatgatccgccatgctttttttttttttttttttttagacagggtctcactctgtctcccaggctggagtgcaatggtgcaatcacagctcactgcagcctcgacctcctgggctcaagaaatcctcccacctcagcctcccaagtagctgggaccacaggcacatgct

SEQ ID NO: 63891 - DNA, 732 bp, Homo sapiens
atgggctagtctcatgccatttcctagtttctcatagtgatggggagttttccctatcatgttaaacagcagatgtgatgctgaaaatccacatgttaggcctgtgacaatgtgagtatagatcatcattttatcacccccactgtccctacctccctgcctcctctcctgcccacctaactctaaatgcccctctcttacccacacctcctgacacatgtgtttttgccctcacctggtttctaatgcacttccacaaccaaaacagcctctattcagtgtgccctatataaagatggggaatggcccctccacattcaatacagtgaggactctgtattgcaagggagagaaaacccagttcaaactggcataagccaatgaaggaaacatatttgctcacataaactgaaaagctcagaggtcttgaagcaggctgtttcaggggtagctggagggcccagtctcctgccccagccctcagctctgtttgtctctcctgggcgtctgtttccttcttggtctttcctagaggtgagaaagtagctgtcagctccagcagaagcgggagatcccatgcacacagtaaagttccctctggagctgcctgggtaacacttccatctctgaaacagtcattgtgggyggggagggtggtgacatgctcctagtcactgttcttagccagagacaggcccacattgggtgccaagaactgagatgagagcacag

SEQ ID NO: 63892 - DNA, 866 bp, Homo sapiens
tctttaattttgagtttaatttagcttcatttataaatgttggtcttcatatcgttatgcaaaatttaaaactggggtcaaactctctgtaaaaatgggattcaggagacatttttgttttcactcttttaaccaagaatctgaagtagtacaaccctctagaatagaaagtttcctaaatcagacatgttgtatgaggccaaaaaaaatcaaccaaggtcactacctagcgactaatcacaaaaggtttattggtttwttgatgtaacagaaaaactgtgtaggtttttttttctttgtattggcatatacaggaagctcccaatttaccatagattccaaaatgtgtgggttagttgtttagaattcagaatacatttccccacagaaaaggggaaatggttggttttccagaatagccggtagaacctgatttaacccacaatgtaactgaactgatactactactgcagtcctgaggtcaggggagctggtgtgttggaagcagggcatggagaaaatgaaatgattctacccttcttaactacaggataaagttcacagcaattcttaaaaatctgcaaagtttgtttttggcacgtttcccttctctttctgcatattttctcctcctagggctttctcttacactgctaggcacctagaatcctcattgcctattttcttcaacgttctctaccttctttcagatcctattgaattccctttcttttgtgcagctcccttagtgagatgctaaagaaactcgttctgatttaataattcataatagtggatgactgacatcagtttaaccaacttggaaccatgtgctcttttgaaggaagatatgtattaacatgaat

SEQ ID NO: 63893 - DNA, 866 bp, Homo sapiens
tctttaattttgagtttaatttagcttcatttataaatgttggtcttcatatcgttatgcaaaatttaaaactggggtcaaactctctgtaaaaatgggattcaggagacatttttgttttcactcttttaaccaagaatctgaagtagtacaaccctctagaatagaaagtttcctaaatcagacatgttgtatgaggccaaaaaaaatcaaccaaggtcactacctagcgactaatcacaaaaggtttattggttttttgatgtaacagaaaaactgtgtaggtttttttttctttgtattggcatatacaggaagctcccaatttaccatagattccaaaatgtgtgggttagttgtttagaattcagaatacatttccccacagaaaaggggaaatggttggttttccagaatagccggtagaacctgatttaacccacaatgtaactgaactgatactactactgcagtcctgaggtcaggggagctggtgtgttggaagcagggcatggagaaaatgaaatkattctacccttcttaactacaggataaagttcacagcaattcttaaaaatctgcaaagtttgtttttggcacgtttcccttctctttctgcatattttctcctcctagggctttctcttacactgctaggcacctagaatcctcattgcctattttcttcaacgttctctaccttctttcagatcctattgaattccctttcttttgtgcagctcccttagtgagatgctaaagaaactcgttctgatttaataattcataatagtggatgactgacatcagtttaaccaacttggaaccatgtgctcttttgaaggaagatatgtattaacatgaat

SEQ ID NO: 63894 - DNA, 1209 bp, Homo sapiens
ctctccacttggtcaccctcgcctgcacaggggaaggagtttccccttcttgatgctgaggccacaccccggcccattcagggttgcctctggaggtgggacccaggcatcagtgcttcccagagctccccgggtgattacgacgcacagccaagcacccgcttccttctgatccacattttatcacctgccacccaagtgcctccatgacagcaaatctgattgtgtgatctggattcttcttaaaacccctgtgtggctctccatggtctccacaataaaatccaagctccccaggatgcacatgcatctcggtgacctgtgtccactgccacccgtcttgcctccttcctctccctgacccacgctgcacatgccacgctgagctccatgtgcctgcccatccacacctccacgccttgggacagactggtccctcttcctgaagtgcctgttcccatctttcatcctcctctaggaagtcttccctgactgctctccctcagcgggctgtaactgtgttcactggcctctagtccaggagcgcctcaaggccagggctgggatatcactcttctctggatcctcagcctgtagctgcctgactcatggtaggtgatgggttctttcttttttttggcatatgtatgttgggtggtgtgatgaatgaagaggtgagtgaatgaacctggcctatgtaggagccgtgaccaggtgcaatcctaccagctgcccaactgtgctctcctgagtcctagcaataaccctgggggcactcagcagggcctgctcaacccccgacctggaccagcgagacccaygcacgtctccctcccgtggggacatctacctgcatttcccagtctcaggctcagtgtgtttcatttctccagccatggggcccagcaggtgtcagcagcaaagcagaactgggtgggacagtccttcctgaagataaggcaaagtgccccagcccagagatcaatcctgtaaatccactttcaaagggctgaataaggtgggacatccctggttccttcttcagccataaatctctaggctcagatggtaactgccctcctcttgacaaagctgtaaagagcacggcatagcagcagtcgggaaagagcatggacaagaaaggtccttcgggtggggcaaggcccacctgtcttgccccctaagctttgcctccctccctgcatgggc

SEQ ID NO: 63895 - DNA, 675 bp, Homo sapiens
ccaaatgtaagaattcaaaggagataagttagttcaggaaagctccaaagaaggtaagatttaggcaaagtccagaaggatagacagaattgaatggaaatgaacccttcataatctaacttcatcttgcctttccaacacattgtacaatacaaaattattagaatagataaaagcagtctatggccataccaacctgaacatgccgatctcatctgatctcagaataaaaacaaattagaaaagaagctgagtgcagtggctcacgcctgtaatcccaacactttgggaggttgcggtgggtggatctcttgagctcaggagttcaagaccagccggggcaacatagcaaaaccccgtctctacaaaaaaacacaaaaattagcagggcatagtggtgcacacctgtagtcctagctgctagggaagctgaaataggaggatggcttgaccctggggagttgaggctgcagtgagcagtaaatgtgccaytgcactccagcctgggtggcataaaaaagtcgttccagataagagaaatcacagaaatatggaataagaagagcatactaattagcccacttaatgcttattgtagagaagtggttaaatattttacataggaatacacatgtcaaattatataaatcatatgggagaaaaaacgctccaaaa

SEQ ID NO: 63896 - DNA, 1511 bp, Homo sapiens
ctgtaaggcaacccaggcagagctgaggaactgcacggggcctggagcggccccagcctgggtgccgacccccagaaaggactggctctgtccctttccagctcagggctcagcccaggagaaggcacagggaagggaggacaagggccttcctgtggggctgactcccaggaggggcaggacctgggagaagaaggagtgtagggacagcctggccggggttactggggcccctggcgtggggggcggtcaggctgcccaatggggctgcccgtcctggactcgaggtggtgctttctgctggagctgagaaaggttagcctgagatgggatgggggccgcccagggtgggcgaccgggccctgacaggagtccctcagggagtgaccacatccccccgccagggtcaagggagcctgccatgagacctgcccggtgtactctggctgcaccaggggcccaccccacttgacagccccaaggcccttgcaggttatgacctcccagcatccacctgcctctccctgcacccgrgccacacaccctgcgtttcagaagtggcacggctcgtcagctccctcccgccctacctccccagggatcctctgtctctccatcctgtgatccctgagggatgggctcctggctgggctcctcttacccggccccagatcccttcccagcaccagacccaggtctttagccgcgagccctgctgcctccctggcctcaccgtgagatgcccagaacggggccctgcccatcttctcccccgttctcctagggctacagcccccattgtcaccatgccttttcccctcacgggacagtgagggctgtagctctaggggaatgggggagaacaggggcaggtgggccctcagagacctgctggacaacagccctgaggctgggccaggcgtcccctcaccctgtggccataacccttgcatctcaccggggttgtctccaagtagacagggccagaccctcaggctgccccgctcctcttgtgctcacttgccgacagaactgctgagcgcccaggggcctgacctagcccagtctccattcccaccggctccctagatgggccccacacctctggcctaacaacctcgggctggacctgcaggggagtcagggaggagttctgtccctggaaaggaggttgacccgacctggtgagacatgtcctgcgtcagaaaggcctttctaaaagcaaacccatccctgagctgagacaggtgctttaggggtgaggggagtgcagaggactcactgtacaatccccaaatgatcgacgttgttgttgtagcttcgaaaaggcttaggccccttgtcctctggcagcccagctcggtgtccctgtagcccagagggagccttggtgaggggtccaaggtaaagggtgcaagggcctgggggcattggccacccgtccctgccctgtgctcctagggagcccaggaccctttgaccagggcacactggaagaggcctccctccaa

SEQ ID NO: 63897 - DNA, 1511 bp, Homo sapiens
ctgtaaggcaacccaggcagagctgaggaactgcacggggcctggagcggccccagcctgggtgccgacccccagaaaggactggctctgtccctttccagctcagggctcagcccaggagaaggcacagggaagggaggacaagggccttcctgtggggctgactcccaggaggggcaggacctgggagaagaaggagtgtagggacagcctggccggggttactggggcccctggcgtggggggcggtcaggctgcccaatggggctgcccgtcctggactcgaggtggtgctttctgctggagctgagaaaggttagcctgagatgggatgggggccgcccagggtgggcgaccgggccctgacaggagtccctcagggagtgaccacatccccccgccagggtcaagggagcctgccatgagacctgcccggtgtactctggctgcaccaggggcccaccccacttgacagccccaaggcccttgcaggttatgacctcccagcatccacctgcctctccctgcacccgggccacacaccctgcgtttcagaagtggcacggctcgtcagctccctcccgccctacctccccagggatcctctgtctctccatcctgtgatccctgagggatgggctcctggctgggctcctcttaccyggccccagatcccttcccagcaccagacccaggtctttagccgcgagccctgctgcctccctggcctcaccgtgagatgcccagaacggggccctgcccatcttctcccccgttctcctagggctacagcccccattgtcaccatgccttttcccctcacgggacagtgagggctgtagctctaggggaatgggggagaacaggggcaggtgggccctcagagacctgctggacaacagccctgaggctgggccaggcgtcccctcaccctgtggccataacccttgcatctcaccggggttgtctccaagtagacagggccagaccctcaggctgccccgctcctcttgtgctcacttgccgacagaactgctgagcgcccaggggcctgacctagcccagtctccattcccaccggctccctagatgggccccacacctctggcctaacaacctcgggctggacctgcaggggagtcagggaggagttctgtccctggaaaggaggttgacccgacctggtgagacatgtcctgcgtcagaaaggcctttctaaaagcaaacccatccctgagctgagacaggtgctttaggggtgaggggagtgcagaggactcactgtacaatccccaaatgatcgacgttgttgttgtagcttcgaaaaggcttaggccccttgtcctctggcagcccagctcggtgtccctgtagcccagagggagccttggtgaggggtccaaggtaaagggtgcaagggcctgggggcattggccacccgtccctgccctgtgctcctagggagcccaggaccctttgaccagggcacactggaagaggcctccctccaa

SEQ ID NO: 63898 - DNA, 1511 bp, Homo sapiens
ctgtaaggcaacccaggcagagctgaggaactgcacggggcctggagcggccccagcctgggtgccgacccccagaaaggactggctctgtccctttccagctcagggctcagcccaggagaaggcacagggaagggaggacaagggccttcctgtggggctgactcccaggaggggcaggacctgggagaagaaggagtgtagggacagcctggccggggttactggggcccctggcgtggggggcggtcaggctgcccaatggggctgcccgtcctggactcgaggtggtgctttctgctggagctgagaaaggttagcctgagatgggatgggggccgcccagggtgggcgaccgggccctgacaggagtccctcagggagtgaccacatccccccgccagggtcaagggagcctgccatgagacctgcccggtgtactctggctgcaccaggggcccaccccacttgacagccccaaggcccttgcaggttatgacctcccagcatccacctgcctctccctgcacccgggccacacaccctgcgtttcagaagtggcacggctcgtcagctccctcccgccctacctccccagggatcctctgtctctccatcctgtgatccctgagggatgggctcctggctgggctcctcttacccggccccagatcccttcccagcaccagacccaggtctttagcygcgagccctgctgcctccctggcctcaccgtgagatgcccagaacggggccctgcccatcttctcccccgttctcctagggctacagcccccattgtcaccatgccttttcccctcacgggacagtgagggctgtagctctaggggaatgggggagaacaggggcaggtgggccctcagagacctgctggacaacagccctgaggctgggccaggcgtcccctcaccctgtggccataacccttgcatctcaccggggttgtctccaagtagacagggccagaccctcaggctgccccgctcctcttgtgctcacttgccgacagaactgctgagcgcccaggggcctgacctagcccagtctccattcccaccggctccctagatgggccccacacctctggcctaacaacctcgggctggacctgcaggggagtcagggaggagttctgtccctggaaaggaggttgacccgacctggtgagacatgtcctgcgtcagaaaggcctttctaaaagcaaacccatccctgagctgagacaggtgctttaggggtgaggggagtgcagaggactcactgtacaatccccaaatgatcgacgttgttgttgtagcttcgaaaaggcttaggccccttgtcctctggcagcccagctcggtgtccctgtagcccagagggagccttggtgaggggtccaaggtaaagggtgcaagggcctgggggcattggccacccgtccctgccctgtgctcctagggagcccaggaccctttgaccagggcacactggaagaggcctccctccaa

SEQ ID NO: 63899 - DNA, 1511 bp, Homo sapiens
ctgtaaggcaacccaggcagagctgaggaactgcacggggcctggagcggccccagcctgggtgccgacccccagaaaggactggctctgtccctttccagctcagggctcagcccaggagaaggcacagggaagggaggacaagggccttcctgtggggctgactcccaggaggggcaggacctgggagaagaaggagtgtagggacagcctggccggggttactggggcccctggcgtggggggcggtcaggctgcccaatggggctgcccgtcctggactcgaggtggtgctttctgctggagctgagaaaggttagcctgagatgggatgggggccgcccagggtgggcgaccgggccctgacaggagtccctcagggagtgaccacatccccccgccagggtcaagggagcctgccatgagacctgcccggtgtactctggctgcaccaggggcccaccccacttgacagccccaaggcccttgcaggttatgacctcccagcatccacctgcctctccctgcacccgggccacacaccctgcgtttcagaagtggcacggctcgtcagctccctcccgccctacctccccagggatcctctgtctctccatcctgtgatccctgagggatgggctcctggctgggctcctcttacccggccccagatcccttcccagcaccagacccaggtctttagccgcgagccctgctgcctccctggcctcaccgtgagatgcccagaacggggccctgcccatcttctcccccgttctcctagggctacagcccccattgtcaccatgccttttcccctcacgggacagtgagggctgtagctctaggggaatgggggagaacaggggcaggtgggccctcagagacctgctggacaacagccctgaggctgggccaggcgtyccctcaccctgtggccataacccttgcatctcaccggggttgtctccaagtagacagggccagaccctcaggctgccccgctcctcttgtgctcacttgccgacagaactgctgagcgcccaggggcctgacctagcccagtctccattcccaccggctccctagatgggccccacacctctggcctaacaacctcgggctggacctgcaggggagtcagggaggagttctgtccctggaaaggaggttgacccgacctggtgagacatgtcctgcgtcagaaaggcctttctaaaagcaaacccatccctgagctgagacaggtgctttaggggtgaggggagtgcagaggactcactgtacaatccccaaatgatcgacgttgttgttgtagcttcgaaaaggcttaggccccttgtcctctggcagcccagctcggtgtccctgtagcccagagggagccttggtgaggggtccaaggtaaagggtgcaagggcctgggggcattggccacccgtccctgccctgtgctcctagggagcccaggaccctttgaccagggcacactggaagaggcctccctccaa

SEQ ID NO: 63900 - DNA, 1733 bp, Homo sapiens
cagtgggtccttggtcctggagaacagctggatggaccgtccctcctgggaatactcgaggcaaaaggagggcgaggcctcaagaggaccacgcagagcaagaaatacctggggagaaccctagtgcccggacccctttgaacacaagggaagatagtctcccctcagccagccctccagggctccttcattttccacagctgcccaagggcagcaggctcccccggacaagggaccatgtgtgttcagtggggcccacagcgaccatcaggacccagcttagggcacagaggtgttctgaggaccgtcagtggatctgtaccagtggctctataccagtggctctgccaggaccaggctctgccccatcgggatgggaaacctgggcagatttgggatctagggcagggaggtcacagggttcaggcctgaattccagcacagcacacggcagggctgagagcaaaactcagggtcatgtccggattcccaggccggttactgcctctctgaccccagacgtctcatctgtcgaatggggacatttgggaacagcacccactctacgaagccaccatggagacgaaagagccaatcgtctacacgggcagtgtagaacgggcgcctggtgagtgctcagggatgaccctcctcggtagctgccccacagaggccaacaccgcccgcaccgtagccactgtccccaagtccgcctggagggaagagagcaggtcacgctcacctgattctgatgaatcagctggcctgggtcatgcctctcagggagaaaacctttgagtccacagagctgctcacagataccactgcctgtgtgtaactgctgtagaccactgaggcaggccagagagcagataggtgctaagcaccagtgacattctgaggtcatggcacgaatcacagtggggccttgcccgggtcagcagcgcccagagtcagggtcctcygctgcctgaggcgtcaacatgcctgcctgcaacgtgtttgtgcacgtgcgtgcacacgtgtatgtgggtaaacatgtctgtgcacgtgtgtgttgcttctctggccaggcccggctgccccactcatgtgtgcacccagttcctcatcactgtcacccccgaggcccagggccagcatcagagcatccatggctgctccctaacctcagccctccccgcccagggtggtcctgggatacacataggggtggagggaagtgactgctgctgttggatctcagaatacaaaagctaatactattacctaatggtctttttagtgtatctaatggtatcgctttttcatttctgatattttaactgggtatttctctccatgacccttggatattctagctagaggatcctgtggggaaagtgccgagcacacagtaggggctcactcttctagacatgttatctaaaacctggttcatctgtccttccacgcagggcctaggggatgccaaattccagggtccagaaagagcttgggataaaatgaaacttcaaggggacggctttgacctgggctgagtctgtctgtgccatccaactggagtctcaagtcctgaggcaggacgtccagatgccccagtgcagggccctcctgatcaacacctgctcccctgtactcattagcaacctcacccaccctactctcaaagcacacttggctctcgtatccaggagctctgcatctatagattcggcaacagcagatggaaa

SEQ ID NO: 63901 - DNA, 1733 bp, Homo sapiens
cagtgggtccttggtcctggagaacagctggatggaccgtccctcctgggaatactcgaggcaaaaggagggcgaggcctcaagaggaccacgcagagcaagaaatacctggggagaaccctagtgcccggacccctttgaacacaagggaagatagtctcccctcagccagccctccagggctccttcattttccacagctgcccaagggcagcaggctcccccggacaagggaccatgtgtgttcagtggggcccacagcgaccatcaggacccagcttagggcacagaggtgttctgaggaccgtcagtggatctgtaccagtggctctataccagtggctctgccaggaccaggctctgccccatcgggatgggaaacctgggcagatttgggatctagggcagggaggtcacagggttcaggcctgaattccagcacagcacacggcagggctgagagcaaaactcagggtcatgtccggattcccaggccggttactgcctctctgaccccagacgtctcatctgtcgaatggggacatttgggaacagcacccactctacgaagccaccatggagacgaaagagccaatcgtctacacgggcagtgtagaacgggcgcctggtgagtgctcagggatgaccctcctcggtagctgccccacagaggccaacaccgcccgcaccgtagccactgtccccaagtccgcctggagggaagagagcaggtcacgctcacctgattctgatgaatcagctggcctgggtcatgcctctcagggagaaaacctttgagtccacagagctgctcacagataccactgcctgtgtgtaactgctgtagaccactgaggcaggccagagagcagataggtgctaagcaccagtgacattctgaggtcatggcacgaatcacagtggggccttgcccgggtcagcagcgcccagagtcagggtcctccgctgcctgaggygtcaacatgcctgcctgcaacgtgtttgtgcacgtgcgtgcacacgtgtatgtgggtaaacatgtctgtgcacgtgtgtgttgcttctctggccaggcccggctgccccactcatgtgtgcacccagttcctcatcactgtcacccccgaggcccagggccagcatcagagcatccatggctgctccctaacctcagccctccccgcccagggtggtcctgggatacacataggggtggagggaagtgactgctgctgttggatctcagaatacaaaagctaatactattacctaatggtctttttagtgtatctaatggtatcgctttttcatttctgatattttaactgggtatttctctccatgacccttggatattctagctagaggatcctgtggggaaagtgccgagcacacagtaggggctcactcttctagacatgttatctaaaacctggttcatctgtccttccacgcagggcctaggggatgccaaattccagggtccagaaagagcttgggataaaatgaaacttcaaggggacggctttgacctgggctgagtctgtctgtgccatccaactggagtctcaagtcctgaggcaggacgtccagatgccccagtgcagggccctcctgatcaacacctgctcccctgtactcattagcaacctcacccaccctactctcaaagcacacttggctctcgtatccaggagctctgcatctatagattcggcaacagcagatggaaa

SEQ ID NO: 63902 - DNA, 1733 bp, Homo sapiens
cagtgggtccttggtcctggagaacagctggatggaccgtccctcctgggaatactcgaggcaaaaggagggcgaggcctcaagaggaccacgcagagcaagaaatacctggggagaaccctagtgcccggacccctttgaacacaagggaagatagtctcccctcagccagccctccagggctccttcattttccacagctgcccaagggcagcaggctcccccggacaagggaccatgtgtgttcagtggggcccacagcgaccatcaggacccagcttagggcacagaggtgttctgaggaccgtcagtggatctgtaccagtggctctataccagtggctctgccaggaccaggctctgccccatcgggatgggaaacctgggcagatttgggatctagggcagggaggtcacagggttcaggcctgaattccagcacagcacacggcagggctgagagcaaaactcagggtcatgtccggattcccaggccggttactgcctctctgaccccagacgtctcatctgtcgaatggggacatttgggaacagcacccactctacgaagccaccatggagacgaaagagccaatcgtctacacgggcagtgtagaacgggcgcctggtgagtgctcagggatgaccctcctcggtagctgccccacagaggccaacaccgcccgcaccgtagccactgtccccaagtccgcctggagggaagagagcaggtcacgctcacctgattctgatgaatcagctggcctgggtcatgcctctcagggagaaaacctttgagtccacagagctgctcacagataccactgcctgtgtgtaactgctgtagaccactgaggcaggccagagagcagataggtgctaagcaccagtgacattctgaggtcatggcacgaatcacagtggggccttgcccgggtcagcagcgcccagagtcagggtcctccgctgcctgaggcgtcaacatgcctgcctgcaacgtgtttgtgcacgtgcgtgcacacgtgtatgtgggtaaacatgtctgtgcacrtgtgtgttgcttctctggccaggcccggctgccccactcatgtgtgcacccagttcctcatcactgtcacccccgaggcccagggccagcatcagagcatccatggctgctccctaacctcagccctccccgcccagggtggtcctgggatacacataggggtggagggaagtgactgctgctgttggatctcagaatacaaaagctaatactattacctaatggtctttttagtgtatctaatggtatcgctttttcatttctgatattttaactgggtatttctctccatgacccttggatattctagctagaggatcctgtggggaaagtgccgagcacacagtaggggctcactcttctagacatgttatctaaaacctggttcatctgtccttccacgcagggcctaggggatgccaaattccagggtccagaaagagcttgggataaaatgaaacttcaaggggacggctttgacctgggctgagtctgtctgtgccatccaactggagtctcaagtcctgaggcaggacgtccagatgccccagtgcagggccctcctgatcaacacctgctcccctgtactcattagcaacctcacccaccctactctcaaagcacacttggctctcgtatccaggagctctgcatctatagattcggcaacagcagatggaaa

SEQ ID NO: 63903 - DNA, 1156 bp, Homo sapiens
caagacttgtaagagcaagaaatttagttggtctcacactaaagataaaccatttcctgaatttctgcaaagacatattagtcattactacaggttacagcgggtgttcctgaatcctgtttaaactggaagagggcaaatgtgcttctctcagagaaggattattcagtggcttgagcctcttattctttcctattggcatcttgcacctttcttcattttcctactaataagctttcagagcctggtcattcctatttacgctaaggttctttgtaatatttgaaagccccttctgaactctctcatgtgcatgctctttcttcactgtgctgtttacttgtaggcatttgaagtcattttcctacatggttttttaatatatttcaaggcctctttcctgccatttttactatttccctgactatgaatatctttaaaacattagaactgcttattgtctaaaattcataagtcatttggagtttgtctataaataataaaaataaacatgtgaaaatattttgaaattttgaaatgctatctttttaaaaaaatcttgctttgaaaaaaatatagaatactgctaagaatatgagcttctcttcaggactgaaggagaaaaaacttctagaaacagcttgtttgtaggttgcattctagattgtttaataggatattttatgtctttgtgaggctctctccagggaagactgtggtgacataaatctaattttcctgttgactcaacttcgagatttagtaagaattttgtttgartcattttggttcaattttttgaagattattaagagaaaatgattatttgaagattattaagagataaacaattgtttgaagattattaagagacaagacaattttgcctgggtctgcatttcctcaattcatttttttctttattttaaagtaatggttctgattctttagtgttcattagttgattccctgaacaaatatttattaattgaccactgtgtgttagactatgtactacattctgggaaatactggagagaaaccccacacaggatctctgccctaaatcgtgcatttggagcccaggaatctgtattacaacaactaccacaggttgattctgatgctaatgatttatggaccacactttaagaaa

SEQ ID NO: 63904 - DNA, 493 bp, Homo sapiens
agggtgggagtggtcacgtgggttttctgtgatgaagataacacaaatggtgctaaggtggaaacagtgttaatataaacataagtcaccagcattttcggcctggcccggaacgttggcctccctatttgtgtgcacgctggtgccttcgtgttccgcgcagccctctgcacccagcacttttctgctcatctcttgcccttgggactcgtgataggagagtaatgctgtgttcccagtttcgtgctgcatgcatgtctgcaactctagggaccatcaccrctgctttttgtgactgttggggacgtcctttttctcaggattactcttttaccacaaatggccacacttgcgattgctgggagagggtgtaggggagcagttgaagggctcacaagctgcccggttgctgggcagagggttgcactaatttcctgagtggcccgctgttgcaggagcaaggccagctcagcgcgtcagccctcagcacacc

SEQ ID NO: 63905 - DNA, 425 bp, Homo sapiens
gtgccactgcactccagcctaggagacagagtgagactccgtctcaaaacaaaacaaaagcaaaggcaggactcaagtcaatattcatttatycaaaacagtgtcctaagaaaaacacattaaaccaattctttaatgaaaacactgggaaatccaaacccactaaattctgagccaatcttttcctttgattccctaatgaagtttgctctatttcagagaggtcccctaaaagtcctgcacgtttgcataattatggcaaaggaatgcaagctactctcctcatgtcttcagcaacctgttgcagtgacaatgcagcccacactctactaaggcgtccttccgggcctggggtccaacaaccagaccaggagccacacgagtcaaggttctagaacctggaggcaccaccaggtctgaatcca

SEQ ID NO: 63906 - DNA, 425 bp, Homo sapiens
gtgccactgcactccagcctaggagacagagtgagactccgtctcaaaacaaaacaaaagcaaaggcaggactcaagtcaatattcatttattcaaaacagtgtcctaagaaaaacacattaaaccaattctttaatgaaaacactgggaaatccaaacccactaaattctgagccaatcttttcctttgattccctaatgaagtttgctctayttcagagaggtcccctaaaagtcctgcacgtttgcataattatggcaaaggaatgcaagctactctcctcatgtcttcagcaacctgttgcagtgacaatgcagcccacactctactaaggcgtccttccgggcctggggtccaacaaccagaccaggagccacacgagtcaaggttctagaacctggaggcaccaccaggtctgaatcca

SEQ ID NO: 63907 - DNA, 3157 bp, Homo sapiens
aaaagaaaacgtctcttcccatcaccaagatatcctacattcaaaattcttaacagaattatatttttactttataaagcaagaattaattacttattagttagataaactataaacaatacagggcacaatggcagatataagaaaaaactgtaacttctgcatgataaccattaacatcgatagattatttttaaaaagtctgaaatttcatatgaactcttcagcaatgtaagaattatgtataatctgtgtgagggcatttcagctgattgtacagctggagcttcctgatatcaccaaaaggaagaaaacaatactaaagtatagacagagttgtactccatctttcacatctatgcaagcttaaagaaactgtaagatcagagagtttatgagaatattgcagctcattagaaaacttgtctgactcaacagcatggaaaataattcaaatactaaatcattaatttttttaaaaatttatatacagtaccaagaaaggatatgtgcacatggaaagacaaaactgatttgtcttaaataaacaatataattaccttataatctgaaaacaattcatgatagcctacaacaagaaatttagttctgttgtggacacacacaattaaaaactcaaacaagctagtgtgtgtgacagagagagagaaactaaaatcaaatatactgcttaaataccaatgaaaggggtagtttaccagtgatcattttcatacttatttacccatacttcctgagcacccactggaagacacaaggaacagtaagacatagtttgtgcttcaagcatcttatataatccaattacaactgttagagtactcaaaacaaatttagagtacaaagtatcatcacaggttaaacagctgtatgaatgtgcaggagattttactactgtactacacagactgggaggtgggggctctagggaaatacggtgtatgctgtataaactagacttttacatggaagacttctaaaggcagagatgggagaaagaaaaaaattccaagaaatggaaatgcataagaaatcaaaaaagtaaagtaaaactgaagtttacattctttttggaacagctgctgggacagaaagaatgtaacttaatattttaaactaaaacaagaaataagttttgaaaggggcactgaagtcaaataatgcagttttgaaaggcaacactgaggaactcgggctttcttccagagtggatcaggagccactcagcagaggcacagtggtcaagaacacagacttggaagaagacatggttgggattcaaatcccagagctcttctacctactaacaactccttcaagatcatgaagttccaatttcttcacctgtagaatggggataatataaattataatgaccacatgagaacaaaggattcagcacactgactgacataaacacccaagtgggtttgttttgtttgcttgtcatcaggcagggaacatgatcaggactacatttaggacaattaataagcagtattcacaatgaatgacaaacctagagattaatgtctcttgctgtgtatatggctgctggaagaactgaagaaagatagaagaaatcaggaaccacaatgcagtaagatgacaaaaaaaaaaaaattctaagaaaaggagagagagaagaaccaaggatgaccttttgattttgagtctagatgactaagaaaatgcaaaggtcattaatataaacaagcaagaagaatcaggcttgcaaaaaaagtttaattctgaatctactgattcaagattacaaaatgacagctactaagttgatcagggagaacaacattggcaaatctgaagcttgggaatgaaaataaggctgatgatacagaagtggaagcctgagcaaagagggtgaggggaatgagcagttgaaaccacggatctgtgtgggattgccaaagaagagaacaaactctaaaaaggaaaagaactaaacctaaggtaacacctacaggcaacatctatctatacttcaggaagtgagagagaaaaacaaacaaaggccccaagaagggagagttggagatgccagtttgtgaaagtcaccaagacagaccttcacagcatttcacattctacagctctttcaatgctcattataactttagattataaactgaactgacttcatcaattgataacatgattatcattaaaggtttttaagagcctgcaagttactgaagagtgctcagtagaaaacacagaagagtgttttatgcaaattagtttttaaactccaagaatattttaagctctagaaatcatacctgatgcatgtcttgtatcaagacataaagttgagttatttctggctacccgtgcataatgttccaaaaaggattttcaggttaaactggaaaatatgctatgtcttcccatcagcaatacctctcattaatttttgagaatacacatacacatagtgtttgattcacaatccttccccacttcaacagctgaaaaaatcttaccatattctaaaaacgtctttagggggctgaaatatttctgtgtcacctaattataaaacccactcacatccaacatccaatgttaagttgaccgagagataatcaatggcagatacgccatttaggtatgaatccaattatcatccttaacaattgccagtaaaatgtcaaagcttttcctgtatttttggtttcttctcaaatacagattacaactgaccatactttattaatgttagtatttgtcccatttttttttttttttttttttttgagacagagtctcactcttttgaccaggctggagtgaagtggagcgatcttggctcactgcaacctctgactcgcaggttcaagcgactctcctgcctcagcctcccgagtagctgggattacagatgcccaccaccaagctcggctaatttttgtatttttagtagagacggggttttgccatgttggccaggctggactcgaactcctgacctcaggcgatccacctgcctcagcctcccaaagtgctaggattacaggcgtgagccactgcccccggccgccacatttcttccaactatgtagttgccacatctagtggaaaatgaaaaaarattaataaaccatattatgacacc

SEQ ID NO: 63908 - DNA, 1798 bp, Homo sapiens
ttgcttttttccccttttggtgatttgacatttttattttgttaatggttaaactacactgtccatatttcaatttttttattatggaccaatctttgattgcctagaataattttaagaagtatatgtgataaattagaaaattttttgcagctaacgctacaaaatatgattccctctccaatatagggttgccagcaattaggtagcaaaacactcacagcccaattaataaacaggcataggatatgaacagaaagaaatacaaatgatctttaaacttatgacaacatatttacctttctttttttgctttttgagacaggggcttgctatgttgcccaggctggagtgcaatggctattcacaggtgtgatcatagcacactatcacctccaactcctggctttaagtgatcctctcaccttatcctcctgagtagctaggactacaggcaggggctagtgctctggcatctaaccttttttttttttttcatcattttgaatttgtctttttaagttctgggaaaatttcttgaacatgtttcctaattccctgaatcaaagttttatcatatttcatttgcttttatttcttcttattgtttataatttaggagctgtgatttgcatttccaagagctctttcctactctcaattattttccttttcatggttatgtgtcatagttttatcaatgtattgtctttatcagtcttgttgaaagcatacattagaagtttccaaacttcttatttcttcaggaacaacttactgtgatgattcagattggctgcagctgttcaaaatgttatatatgtttctatatctgatgattttctcccatcatcctaaagagattctagttataccgctaatcacaatagctagtgtttattgtgcatttattataagacaagatttgtgctaaaggatccacacatgccatttaagtaatcttcacaacagctagaagtaatcttcacaacagctggatgctaaatattactatcctcatgtcctaagggtactacaagttctccaccctttcacaagaataagattacttcacagagtattctgggcaccgcccaatctacccacctgcaagaaatgaactactgaactgaaaggagagtgcttcatttcttgcaggtgggtagattgggatgtgcatttcccccacctgtgcagaagatctatttttcccagctactacctccaagccaaaagtgttctggtatccacagctatagttcagttagctttagctttgctttggtagttctactttggtcttccagataatsccagccacagtaagtaacctttacatgtccttcagagacttacgtttaaaaggcaatactacatgtttaccaagcttaagctgtaaatgaactccctgaatttgtgttaattaatttaccattctatctactacgtatttcctattaagcatggaacattttgattggctcttacacatgtttaccaaacttatatgagctccataaataattcgtatcagtcaggtgttggaaccaattctgcctcgtctatgtggatttctgttgcaaagtcttagatctagaacacgtcatgttatagtcattgtgtttttcacatggcttagaggtccaaattccctggaaatatagtgaaacagagggagctatggcaggatatttgtatactatgtccctgcagcagcatgaagatagctgggccactatcccatttctttgcctcacacagttgccttcattagcagtaagccatagtggggtcccta

SEQ ID NO: 63909 - DNA, 1484 bp, Homo sapiens
ggaaaaaagaaacacttgaatcacttcaactaagagctgttttggtataatctaaacacaactatcctagaggaaaacgtatgacttcacatgattacatggagaattttatttaaataggaaaaaaaaactttcccaaaaagtacactgtaaaggaattataacatctattagaatgacccggttctatggtcttagcaggtaccacagccatcctatcatgtcagtcccttataakttataaaaatagaactcctgccatcctaacaacctttgaaagccacttgttctgcaattctgctcctgtgtttcacctgcatccctgatcgtctccagcagccctgattcctacacaggaagaggctccacagaacttcaaggtgagtgttatatataaatacatgaacagcaagagagagagatcactgatatacaaaagaaaagaaagctctagagcttttgaagggcagtgtgggacttccccactccaccctacaatgtctacggatgccagaactgtggcagggagctctgggtcctttaatccagccagaaaggccacctctcagtcctaagacctcaggagagccaggcctctgcctgcctacctccacaacacaggcaggtggacgcactcaaagtgcttactcttgatctgtgaggattaatgagctaatttctacagagccctttaagctgattggcccaaacgcaactaaataaaccccatcattaaccacgggcaagatcaaatcctcaggatccagtgaggcaaatttttagacgtcaggcaatgttcctcctccacaaggtgaggaaggagtatttatccccaaaactcagaacttcatccagaaaacatttattaaatatctattatgacatgcagggtagggagatgagagaccctgtcctcaaggaagacttaacagtctagagccaggctggcaaggaaaatacaatttgcagatagtgtgacaactgccagggagcgaaagacccaacagagcctgaagggcaaggggggaggggggctctagaggcagagattgtttgtgtgacaagaaatcacttgttcagggtatgagaagagaggcccagtcagggtgctggttacatggtgtgttcaattcatgaacatgcaccaagatatacattttttatatgtacacttttccacatgcatattatacttcaataagggcaatatttaaaagaaaagacagagctctttgctacatagatgaaaaatggaagggaagggtcttggaatggtgttccaagcagagggaaatcttgcctagaagaggcatttcagcaactgcaaaaggttcccactggctggagagtctgtcctgagactggaaattacaagatgtggctgaaaagggaggcaagagacaattcccaaaagaccttaaacactgtgcttcaaattaagtcttgagggtgacgggagagctactaaaggcatttcagcctgg

SEQ ID NO: 63910 - DNA, 1484 bp, Homo sapiens
ggaaaaaagaaacacttgaatcacttcaactaagagctgttttggtataatctaaacacaactatcctagaggaaaacgtatgacttcacatgattacatggagaattttatttaaataggaaaaaaaaactttcccaaaaagtacactgtaaaggaattataacatctattagaatgacccggttctatggtcttagcaggtaccacagccatcctatcatgtcagtcccttataagttataaaaatagaactcctgccatcctaacaacctttgaaagccacttgttctgcaattctgctcctgtgtttcacctgcatccctgatcgtctccagcagccctgattcctacacaggaagaggctccacagaacttcaaggtgagtgttatatataaatacatgaacagcaagagagagagatcactgatatacaaaagaaaagaaagctctagagcttttgaagggcagtgtgggacttccccactccaccctacaatgtctacggatgccagaactgtggcagggagctctgggtcctttaatccagccagaaaggccacctctcagtcctaagacctcaggagagccaggcctctgcctgcctacctccacaacacaggcaggtggacgcactcaaagtgcttactcttgatctgtgaggattaatgagctaatttctacagagccctttaagctgattggcccaaacgcaactaaataarccccatcattaaccacgggcaagatcaaatcctcaggatccagtgaggcaaatttttagacgtcaggcaatgttcctcctccacaaggtgaggaaggagtatttatccccaaaactcagaacttcatccagaaaacatttattaaatatctattatgacatgcagggtagggagatgagagaccctgtcctcaaggaagacttaacagtctagagccaggctggcaaggaaaatacaatttgcagatagtgtgacaactgccagggagcgaaagacccaacagagcctgaagggcaaggggggaggggggctctagaggcagagattgtttgtgtgacaagaaatcacttgttcagggtatgagaagagaggcccagtcagggtgctggttacatggtgtgttcaattcatgaacatgcaccaagatatacattttttatatgtacacttttccacatgcatattatacttcaataagggcaatatttaaaagaaaagacagagctctttgctacatagatgaaaaatggaagggaagggtcttggaatggtgttccaagcagagggaaatcttgcctagaagaggcatttcagcaactgcaaaaggttcccactggctggagagtctgtcctgagactggaaattacaagatgtggctgaaaagggaggcaagagacaattcccaaaagaccttaaacactgtgcttcaaattaagtcttgagggtgacgggagagctactaaaggcatttcagcctgg

SEQ ID NO: 63911 - DNA, 671 bp, Homo sapiens
ttgaaagctatatcatcacttatttaaccaaccctctatttttagacattaggttgtttctaatttccactattctaaacaagcgtttataaacacgctgggctaaatcttccctcatagccttgactacctacgatgggtaaagtcctcatagtggagttgctgggtgacagtatatgcaccccatccgcgggccagcattcagggttctctctgaaatacacccccctactttcactttctggttccaaactgtcacttcactgcacttcgcttggattctgtgaagcattgtagcagaggcattaagagcataattttcagagtcagacagaccagggttgaatcttagctttgctgcttattaaatgtgtgaccttaggctgttttaattaacctctttgaacacytttccataagatgaggaaataattctacctttctgatgaggttgttatgagaattaaacaggataaaaaaatgcatgtaaagcacttgacacaggcccaggcagtttgaaagtgttcacaaatcatggagttagattcattcccatccctaagcccattcaaatccctctttcaaggccacattcaagatacaaccccctccacgggtctttcctgaccagggcagcccatcacactgagttgttatggcacttgtgggct

SEQ ID NO: 63912 - DNA, 671 bp, Homo sapiens
ttgaaagctatatcatcacttatttaaccaaccctctatttttagacattaggttgtttctaatttccactattctaaacaagcgtttataaacacgctgggctaaatcttccctcatagccttgactacctacgatgggtaaagtcctcatagtggagttgctgggtgacagtatatgcaccccatccgcgggccagcattcagggttctctctgaaatacacccccctactttcactttctggttccaaactgtcacttcactgcacttcgcttggattctgtgaagcattgtagcagaggcattaagagcataattttcagagtcagacagaccagggttgaatcttagctttgctgcttattaaatgtgtgaccttaggctgttttaattaacctctttgaacacctttccataagatgaggaaataattctacctttctgatgaggttgttatgagaattaaacaggataaaaaaatgcatgtaaagcacttgacacaggcccaggcagtttgaaagtgttcacaaatcatggagttagattcattcccatccctaagcccattcaaatccctctttcaaggccacattcaagwtacaaccccctccacgggtctttcctgaccagggcagcccatcacactgagttgttatggcacttgtgggct

SEQ ID NO: 63913 - DNA, 1938 bp, Homo sapiens
ctaattaaaatgcaactataattgtttctttccaggcatataagactttctgcaggcacttccaaataaatttcacaacttgcccctatctagacaaaattcctgaggggacagggggaagtaggcaaaccaagtagaactgacaagcccagaaaaaacacaaatctacatggttcaaaaagtggtaagtctctggctgtgctggcattacacaggctatggaagattgagaggcatcttgccccaagaaaagtgtccagcacagtgcctggtatataatatacggagcactacagatgctaagagacatgttagcctctcccacctctactctgggatcccacggccttcaacactccactcttccctgccggccctcagcaagtggcacagaatgaaagtgtcccgtgccatctgtgtgttgcctcttcctccttgacccacagcccgactctattccccagctcttttgcagctaagagggaccaggggacttgagttctggccagcggaacacagatggacatacacgcacaccacttccaggcctggcctctgaaacctcccaaaagaccctgcatgtttgccctctttattcttctctcagccaaatacagaggatccagtggagaattccgaagcccaagtggctggcagaaccattaggtagagcgagccgcagtccccagaccacaccacccaactcacggcagcctctatgttggactgagcagtgaaccacaaacattttgtactgagatttgggcttgtttctcttagcaaagggtgttgcttaccctaatacaacacaccttaccgaattaagacccccaacattttctagctacgtgcctcctctaccagtagcctatcctgtcagctttgactaaacaaagaatgagaaaaaacaaaacaaaacttttttttcagcagaaagtaaacatacacatgacacatgcagagactcactgaagcttatagaccagcacccacatacactgagatttttaagacatcttcactgaaatatatgaattcctgtattcataaaagagaatgcatgaaaaggtacttgcactcataaaaatcatgaccaaatacagtggagcattgctcagatgaatcactcttcccgcctgcttctcattcatggtctacaaagcttggagagtcatcccaggcctgagacacatccaataagcctaccaactgaattgtcctgatctacaaaacacatgttcataaccagtttaaaccaccaattcaaacaagtctctactgccaaaatacttaaggaaaatgttctcaggtaacagtgttatcctgggaatagtgcatcagataggggtcaaggctaagttggcttaagatctcagtagaatctccaagagttatgagtacaaatggctggtaaaatgagctgggagcaccagcttctgggtccagcctgccctttctggaggagaatgcagatttaactcaagaggcagagccagttggtgaaaatataaacatttacatggtttatatgtggccaccagcactttctccagggttcccatatggaagggatcttaaattacaaacagaggtaactctccctctgagtcttgtcttccctcattgggctaggcccgctgggttttgtttttatgctttagaacttcctgattccactttccaaaatgaaaatttgtcttctttagataggaaaatacctcatgactttaaacaaattcagaaatgtctagttatttgcatagcttaactcaatttacctttcatcaaggaaaacaatgtttaaggagccaattcattgcctgaaaatgtttaaatctacattgaatcagcgtaggagatataatcacttctgttaggttgatcggaaaagaaaaagaaggaaaacwacccttagatattttattttaacttatttaa

SEQ ID NO: 63914 - DNA, 2905 bp, Homo sapiens
atgtattatgtaatagcctagtctaagaggataatgaaaaaaacaagattctgaaatcagtcagatatgagttcaaattcctgctctgcccactcacaagctatgtgacccttggctaagtgagttaccctctccgagcctccatttccatgtacataaaatagaaatgtccaccccacaagacagtagacaaaattcagtgagctgtttctgcatttttctgatgtataggtaaactggttcaacatttatggagtgccattaggtgatatctatcaaaagtgcaaactggccaggctcagaagctcacatctataatcccagcactttgggaggccaaggcaggaggatggcttgagcccaggagttcgagaccagcctgggcaacatggggagatcctgtctctctaaaaaataaaaaaaattagtcgggtggggtggtgcatgcctgtgttccagctactggagaggctaaggtgggaggatcgcctaagcccaggaggtggaggctgcagtgagctacgattgtgtcactgcagtccagcctcagtgaaaagtcacttagtgcaaattcatgaaattataaactgacctggcaattctatttctaggagtttaccccatatatatacttgcatatttgtgaaataactaaaataatttataacaatgtatataacagcaaaatggttgaaattaattgataaataataaactacctcacagcaattaaaaaaaatggtagtaagactgttaggggtagatctaaaaaaataaggatgagagggctctctaggtgctaatataaaataataatcaagctgtatgtttaaaaagaaagcaaggtgccaagtaatatatacagtattttttcactgatggagacaagaccatatacacatgttggcttctacatgcataaaataggtctgaagagacacagacacacacaaacgctgataacaatggttgcctataaagggaggcggggggctgagaatcaggaatgggactgaagcttcacactgcatattcctttgtacttctgaattttcagtcatataaataggttatccctgcattttttttccaaattaaagagaaacgcatgactagaattatctaccagatatattaagttttaaaagcaaggagcagaagagcatgtcaaataattccttttttttttttcctttgggacagggtcttactctgttgcccaggccagagtgcagtggtgcaatctcggctcaccgcaacctccacctacctcccaggctcaagcaatcctcccacttcagcctcccaagtagctgggactacaggcacgtgctaccacgcccggctaatttttgcatttttttgtagagatggggtttcgccatgttgcccagctggtctcaaactcctgggctctcaaataattccttttgaaaaaaaaatatgtgtgtgtgtgtgcatgtgtgtctaaaacattttgtggatgtttatttcccagagcctaaaacagagcctgacactcaataaacatctaccaaacgaatgaatgaatggtggcatacaaaacttggtgatcattaattacctctggagagtgaagtagggttattttacttttcctttttcatcctttaagtgatatttgcgtttttcccaacgatatatatacattgttttagaatttagaataaacttagtttgaaattattttagcaaatattgaacacgaaagcaacatatataattgagcccattcgatgattcggatttaatttaacactatgtcttctcatttcgggtatacccaggagcccttgtcacctttggtctgcatcacacaaagtgttcctcatgtcacagttgtcccttgcccctgagctctttgcagatatttaattactgttaagtagttactgttaagctggggactcctgttggcttaagtattataaacttgaattttcccatggaagtaacaagcagttatcttggaaataaattgttaagtccctgaaatagaaatagccatcacaaaatccaggcactttgaattctacaggaaaaatggagccccccactggaactcatccagagatttaaatgaatcattaggattttaagaaaggagagatgcattatcagctgactacagagaaacaacaacaacggaatgtcaaccctgagagtaagggcttcttctagaatactatgtgatctagctgtagaacagtaggaagaatcatgtgtactatttaagctatttcactttttccttttcagcacatggagttgaatcttcatrattaaatagataatgtgattcaaatgtatgtatacacaatagaatatgtaggatagagatcccaggagctaaagcccactttctcggctgaccagatgacatggacatcagttccgtccctcagaacacatggctgtgctctgtccctccccatgaggtgaccactctgtcggatgctctcggccctctgcgaatacagctcatttatccacttatggggtgaattagttttctggtgctgttgtaacaaagtaccacaacggactggcaatgtattgtctcacagttctgaaggctagcaatccaagatccaggtgtcaacagggccatggtccttctgaagcctctaaagaaggatctgttagagatctctcctagcttctggtggttccttgagttgtagcagtgtgatcatcccttggcattctccctgtgtgtgtgtgtttacaaatttcctttttttttttttttttttttgagacggagtctcgctctgtcgcccaggctggagtgcagtggcgcgatcttgactcactgcaagctccgcctcccgggttcacaccattctcctgcctcagcccccggagtagctgggactacggg

SEQ ID NO: 63915 - DNA, 2905 bp, Homo sapiens
atgtattatgtaatagcctagtctaagaggataatgaaaaaaacaagattctgaaatcagtcagatatgagttcaaattcctgctctgcccactcacaagctatgtgacccttggctaagtgagttaccctctccgagcctccatttccatgtacataaaatagaaatgtccaccccacaagacagtagacaaaattcagtgagctgtttctgcatttttctgatgtataggtaaactggttcaacatttatggagtgccattaggtgatatctatcaaaagtgcaaactggccaggctcagaagctcacatctataatcccagcactttgggaggccaaggcaggaggatggcttgagcccaggagttcgagaccagcctgggcaacatggggagatcctgtctctctaaaaaataaaaaaaattagtcgggtggggtggtgcatgcctgtgttccagctactggagaggctaaggtgggaggatcgcctaagcccaggaggtggaggctgcagtgagctacgattgtgtcactgcagtccagcctcagtgaaaagtcacttagtgcaaattcatgaaattataaactgacctggcaattctatttctaggagtttaccccatatatatacttgcatatttgtgaaataactaaaataatttataacaatgtatataacagcaaaatggttgaaattaattgataaataataaactacctcacagcaattaaaaaaaatggtagtaagactgttaggggtagatctaaaaaaataaggatgagagggctctctaggtgctaatataaaataataatcaagctgtatgtttaaaaagaaagcaaggtgccaagtaatatatacagtattttttcactgatggagacaagaccatatacacatgttggcttctacatgcataaaataggtctgaagagacacagacacacacaaacgctgataacaatggttgcctataaagggaggcggggggctgagaatcaggaatgggactgaagcttcacactgcatattcctttgtacttctgaattttcagtcatataaataggttatccctgcattttttttccaaattaaagagaaacgcatgactagaattatctaccagatatattaagttttaaaagcaaggagcagaagagcatgtcaaataattccttttttttttttcctttgggacagggtcttactctgttgcccaggccagagtgcagtggtgcaatctcggctcaccgcaacctccacctacctcccaggctcaagcaatcctcccacttcagcctcccaagtagctgggactacaggcacgtgctaccacgcccggctaatttttgcatttttttgtagagatggggtttcgccatgttgcccagctggtctcaaactcctgggctctcaaataattccttttgaaaaaaaaatatgtgtgtgtgtgtgcatgtgtgtctaaaacattttgtggatgtttatttcccagagcctaaaacagagcctgacactcaataaacatctaccaaacgaatgaatgaatggtggcatacaaaacttggtgatcattaattacctctggagagtgaagtagggttattttacttttcctttttcatcctttaagtgatatttgcgtttttcccaacgatatatatacattgttttagaatttagaataaacttagtttgaaattattttagcaaatattgaacacgaaagcaacatatataattgagcccattcgatgattcggatttaatttaacactatgtcttctcatttcgggtatacccaggagcccttgtcacctttggtctgcatcacacaaagtgttcctcatgtcacagttgtcccttgcccctgagctctttgcagatatttaattactgttaagtagttactgttaagctggggactcctgttggcttaagtattataaacttgaattttcccatggaagtaacaagcagttatcttggaaataaattgttaagtccctgaaatagaaatagccatcacaaaatccaggcactttgaattctacaggaaaaatggagccccccactggaactcatccagagatttaaatgaatcattaggattttaagaaaggagagatgcattatcagctgactacagagaaacaacaacaacggaatgtcaaccctgagagtaagggcttcttctagaatactatgtgatctagctgtagaacagtaggaagaatcatgtgtactatttaagctatttcactttttccttttcagcacatggagttgaatcttcataattaaatagataatgtgattcaaatgtatgtatacacaatagaatatgtagsatagagatcccaggagctaaagcccactttctcggctgaccagatgacatggacatcagttccgtccctcagaacacatggctgtgctctgtccctccccatgaggtgaccactctgtcggatgctctcggccctctgcgaatacagctcatttatccacttatggggtgaattagttttctggtgctgttgtaacaaagtaccacaacggactggcaatgtattgtctcacagttctgaaggctagcaatccaagatccaggtgtcaacagggccatggtccttctgaagcctctaaagaaggatctgttagagatctctcctagcttctggtggttccttgagttgtagcagtgtgatcatcccttggcattctccctgtgtgtgtgtgtttacaaatttcctttttttttttttttttttttgagacggagtctcgctctgtcgcccaggctggagtgcagtggcgcgatcttgactcactgcaagctccgcctcccgggttcacaccattctcctgcctcagcccccggagtagctgggactacggg

SEQ ID NO: 63916 - DNA, 655 bp, Homo sapiens
cattccagagcctgcatgccatatgcctccaagctactcctcagaccatgtcctcacaaccttccagacatgcagggaaccagcctcactgctccccaggccatgtcctatgagcctgtctcaacttgcatcattcaggcctcagttccctccacctggaatgttctctgtgtcttgaactcttccacacactcatagcttagtttgaatgctacttcctccaggaagccttctctgattgcccccaccatgaccaatccctcctctacacagctgtgaacactattcatacctcatagtaagcacggactagcctgccctgtgctacagctgattgtggaggtggaggtctcctcagctgaatgtcagctttttgagagcaagggracccagtcaacaccatctgccaaacagcgtcaggcttggtgcccagtagatgcttgctacacatctgcagaagtgaaataagcacttggaatcagacagtcaggtttcaatctgattctgtctttctcaagaaatatgaccttgggtgcattgcttaatatctctgagcagcacaaagttacttgaaaaactaaataagaatatagcaggagtagcaggctgaatggtgttccccaaaatgacagatccaagtcctaaccccaagacc

SEQ ID NO: 63917 - DNA, 662 bp, Homo sapiens
tccttagtgtgcagcagtascaatgctagtggctgaagcggttgaaaaacagcataaagccatattcgctcccatgtgtacacacaggcatctgctataacgtgaagccactgcaacttcttttctcactgcctattggtcttcccgctctgtgagttacaactcaacctcggagtcttcaccttgctacttagctgagtggtggaaacctgtcagaagtaatcactcggtgtctaagtgtcctcaccaatttgcacttcactcttattcaccacttcttatcttgaattgagaatactgtactctccggcaggcaaaaaaaagacttagggaagaaatgcaccttcaggatggtgtctagcatacagcaggtgtttaatacatgtttgtgatatggatagacagatgaaaggatggatgcacaagctacaaatgaatgatagacaggaacattaagtcagtacctttttctttttaccccagaatctaacataaaacaggtactggaaaataagcattttttgtttttaatagttagattgatcttgagtgtgtatatttctagacaagaaatgttagttcagaaaacttccaaaaagtacagtaggacatggcaaggttagatggtttggctctgtgtccccatccaaatctcatattga

SEQ ID NO: 63918 - DNA, 662 bp, Homo sapiens
tccttagtgtgcagcagtaccaatgctagtggctgaagcggttgaaaaacagcataaagccatattcgctcccatgtgtacacacaggcatctgctataacgtgaagccactgcaacttcttttctcactgcctattggtcttcccgctctgtgagttacaactcamcctcggagtcttcaccttgctacttagctgagtggtggaaacctgtcagaagtaatcactcggtgtctaagtgtcctcaccaatttgcacttcactcttattcaccacttcttatcttgaattgagaatactgtactctccggcaggcaaaaaaaagacttagggaagaaatgcaccttcaggatggtgtctagcatacagcaggtgtttaatacatgtttgtgatatggatagacagatgaaaggatggatgcacaagctacaaatgaatgatagacaggaacattaagtcagtacctttttctttttaccccagaatctaacataaaacaggtactggaaaataagcattttttgtttttaatagttagattgatcttgagtgtgtatatttctagacaagaaatgttagttcagaaaacttccaaaaagtacagtaggacatggcaaggttagatggtttggctctgtgtccccatccaaatctcatattga

SEQ ID NO: 63919 - DNA, 1027 bp, Homo sapiens
aaaggatttgttgctttcagagatacctaatttgaagatgggttaaaaaaaagaaaacaaagtaagtaaaattaacattgaattctaaggaaaaattcccyggtaaggagacctagagatggaaggaatgctaatgaacattgtaagggtacactgaagtcaaatttaagtcagtaaaattattaaagctgggtaataggtatcaggggtctgtttggtgcaggtttgaaagttcccatcataaaaaggtaaaaagaaaagggaagaaaaaagttaatggctggaatgctggaaaatggaggtggcaccagagccccttgtattagtccattttcatactgctatgaagaaatacctaagactgcgcgatttataaagaaaaagaggtttagtggactcacaattccacatggctagggaggcaaaggtatgtcttacatggcagcaggcaagaaagcgtgttcagaactggcctgcataaaaccatcagatctcatgagactcattcactatcatgagaacagcacaggaaaaacccatccccatgattcaattatctcccttcggatccctcttatgacaagagggaattatgggatctacaattcaagatgagatttgggtggggacacagccaaaccatatcaccccttaacaagctgcagggagggtgtgctggaagcagggtgcaaacccaagggctgggtgaatccagagtaaagaccagagtcagcaagcaagcagagtgctgtcattgatatgctcagccattttcatcacatgaagtcttatggaaggaaaatgtcaaatactcaaaggcttaatgaataaaggatggcttttattggccaggcagcaacagggtctctggggtagaccaacttgggttcaaatctgattctgacacatctaactccatatgtcatcttgaacttcttatacttaaccttctacgagcctccatttcctcaactgtaaagtagaactaataatggtagcactgctgggtgggtgtcatgagtcttac

SEQ ID NO: 63920 - DNA, 1027 bp, Homo sapiens
aaaggatttgttgctttcagagatacctaatttgaagatgggttaaaaaaaagaaaacaaagtaagtaaaattaacattgaattctaaggaaaaattccccggtaaggagacctagagatggaaggaatgctaatgaacattgtaagggtacactgaagtcaaatttaagtcagtaaaattattaaagctgggtaataggtatcaggggtctgtttggtgcaggtttgaaagttcccatcataaaaaggtaaaaagaaaagggaagaaaaaagttaatggctggaatgctggaaaatggaggtggcaccagagccccttgtattagtccattttcatactgctatgaagaaatacctaagactgygcgatttataaagaaaaagaggtttagtggactcacaattccacatggctagggaggcaaaggtatgtcttacatggcagcaggcaagaaagcgtgttcagaactggcctgcataaaaccatcagatctcatgagactcattcactatcatgagaacagcacaggaaaaacccatccccatgattcaattatctcccttcggatccctcttatgacaagagggaattatgggatctacaattcaagatgagatttgggtggggacacagccaaaccatatcaccccttaacaagctgcagggagggtgtgctggaagcagggtgcaaacccaagggctgggtgaatccagagtaaagaccagagtcagcaagcaagcagagtgctgtcattgatatgctcagccattttcatcacatgaagtcttatggaaggaaaatgtcaaatactcaaaggcttaatgaataaaggatggcttttattggccaggcagcaacagggtctctggggtagaccaacttgggttcaaatctgattctgacacatctaactccatatgtcatcttgaacttcttatacttaaccttctacgagcctccatttcctcaactgtaaagtagaactaataatggtagcactgctgggtgggtgtcatgagtcttac

SEQ ID NO: 63921 - DNA, 1223 bp, Homo sapiens
gccattttgatttttttgatagttcaaaacattctgatacatctcagtcccaaaccctgtcccatttccatatcttccatacatcttattcccttagagatgatataactttgtgtgtgtgttttatagtttgtgttaggctagaaactggctataagattttctaaacagatgtttgagactttctggaagagaggtattttgaacaaaagtggatagttttgactttgaaaactaaatatttacaatctttacaaacctctaaggctgtccaagaagaaaattgtgagtgaatgttgtatcacatacagagtgggataaacaacacacatgagaaccctcaggggactgtcaaactacatgaaattttacacatctttaagcaaacttacagagcccagtacaaagagagcagtaagagctgtgagtgagatcgagaccctccctgagaagttctcctttctctgggaaaatctatcagcaattgatgatgtttatcataagtattctgtyataagacattttaaataattcagatagaggaaataggttctcagttgaaatttaaagtattttcgactttaaccccatgtgtgaagggatcacaactcaagtaatcataacagcgaaggactggcttttatttattctgaattttttgcatggttgcagcatgtgggatgttaaaggcatgttgcaagatttcctcagctgtggtctcttattaccagctgtggcatgtcttccatgttgggaccatgcatggtacatttcacaaggtggaaatcagagtgctttcttttggaaaagaaaccttggtgacaaggaacatttcttatcattggttcatttggtgttagggcgggacatctcagactccatatacataaatggcttggagctgtctctatgactgtctcagataacctggtaaattatcaatgttaatttttattctagatctatggaaccaaacacaatgtgtctagaggatcttcctatggttcttggaagtgctctaacttcttcagataatatatctgaccatttagtaaatgtctcccccagtctgttctgcctcagttagtgactaagcatggcatatttatttgtctgtatatgagtgtgtctccctcagtagatggtgagctcctcaaggaactcacagaatacaaaggctcttgtacttatgaatcccccaaaatgtggcacagtgcccggca

SEQ ID NO: 63922 - DNA, 643 bp, Homo sapiens
gttttcgattcaccttgctatcctcataatctagcactgagtctagcacacaacacacaagcaacaagactgttgaactggaataatccttgctggtggtggtaataaggtacacgtcacagaccacatacttctttacgttaaacttagtatactgcatttacttgtatgccacattataagcttayagaggactggagccatcataggtgatcaataaatatgtgttcaaatatttgaagtgttcaaatatgtgaaatatgtacatcaaatatataaagtcagagaaatgaatttctcaggaccaggatatttttttaaaactcatttgagcttattatttcaaaattatctaccaacttttttttaaatcaccattgctaaaaagttacagaatgttatatattgactttaatcgcctcttctaatcaattgtaatgggcacaaaggggaaaggagagataccctcggaaagtcaaaggttaaagagttgaagaattattgcctgctaattaggtattttctgtagtggcagggctacctagtaagcccactgcagtgggaaaggatctcatggtgttggcagtgtccacttgtcagcatatagtctctggggcttcttgcccagcagtctggagctagg

SEQ ID NO: 63923 - DNA, 740 bp, Homo sapiens
catgaacaaaaggaggggttcctccgcctgcttcatcatggctgtgacccgtttatcagggatatggcttacacaactaaagctctatagagaaaaatctagaccaaatcagtgggtttattcaacaaggtcaaccaacctggagcggggcagcatcagccagtgcagcgacaaaactggattcttccagctaaactttttcctgcataaacaggaaataagcaatttctctcctcttattaygtgaattgtctaggttgcagctcagatgctaagttaaaacaactgaaatatactgagattctactgtgtgctatatccgacactgggcattttacatatattttctgacttaatttttaataacaaactgcaagttatatattatgctcccactttaccaagaacactgaggctccagaagaccaagtaatttacccaagtgaagtaacagagctgggacttttactatgcaaagtttagcaggctccaaagtctgtgatctctgtgctttgttttcattttctcgcaaagaaactcgctgtaaggtgaaggcctgatcacaacattcctctttctctctctagatggctcacctaaaatttctgacaacctgcttcagctgggattaatttctttgaagtgaaatcagtttaactgaggaatcaatttgcttccttccatatatgccaaggaaaaactgtacatagacattgacccacaatacctggttgaccaca

SEQ ID NO: 63924 - DNA, 740 bp, Homo sapiens
catgaacaaaaggaggggttcctccgcctgcttcatcatggctgtgacccgtttatcagggatatggcttacacaactaaagctctatagagaaaaatctagaccaaatcagtgggtttattcaacaaggtcaaccaacctggagcggggcagcatcagccagtgcagcgacaaaactggattcttccagctaaactttttcctgcataaacaggaaataagcaatttctctcctcttattatgtgaattgtctaggttgcagctcagatgctaagttaaaacaactgaaatatactgagattctactgtgtgctatatccgacactgggcattttacatatattttctgayttaatttttaataacaaactgcaagttatatattatgctcccactttaccaagaacactgaggctccagaagaccaagtaatttacccaagtgaagtaacagagctgggacttttactatgcaaagtttagcaggctccaaagtctgtgatctctgtgctttgttttcattttctcgcaaagaaactcgctgtaaggtgaaggcctgatcacaacattcctctttctctctctagatggctcacctaaaatttctgacaacctgcttcagctgggattaatttctttgaagtgaaatcagtttaactgaggaatcaatttgcttccttccatatatgccaaggaaaaactgtacatagacattgacccacaatacctggttgaccaca

SEQ ID NO: 63925 - DNA, 740 bp, Homo sapiens
catgaacaaaaggaggggttcctccgcctgcttcatcatggctgtgacccgtttatcagggatatggcttacacaactaaagctctatagagaaaaatctagaccaaatcagtgggtttattcaacaaggtcaaccaacctggagcggggcagcatcagccagtgcagcgacaaaactggattcttccagctaaactttttcctgcataaacaggaaataagcaatttctctcctcttattatgtgaattgtctaggttgcagctcagatgctaagttaaaacaactgaaatatactgagattctactgtgtgctatatccgacactgggcattttacatatattttctgacttaatttttaataacaaactgcaagttatatattatgctcccactttaccaagaacactgaggctccagaagaccaagtaatttacccaagtgaagtaacagagctgggacttttactatgcaaagtttagcaggctccaaagtctgtgayctctgtgctttgttttcattttctcgcaaagaaactcgctgtaaggtgaaggcctgatcacaacattcctctttctctctctagatggctcacctaaaatttctgacaacctgcttcagctgggattaatttctttgaagtgaaatcagtttaactgaggaatcaatttgcttccttccatatatgccaaggaaaaactgtacatagacattgacccacaatacctggttgaccaca

SEQ ID NO: 63926 - DNA, 740 bp, Homo sapiens
catgaacaaaaggaggggttcctccgcctgcttcatcatggctgtgacccgtttatcagggatatggcttacacaactaaagctctatagagaaaaatctagaccaaatcagtgggtttattcaacaaggtcaaccaacctggagcggggcagcatcagccagtgcagcgacaaaactggattcttccagctaaactttttcctgcataaacaggaaataagcaatttctctcctcttattatgtgaattgtctaggttgcagctcagatgctaagttaaaacaactgaaatatactgagattctactgtgtgctatatccgacactgggcattttacatatattttctgacttaatttttaataacaaactgcaagttatatattatgctcccactttaccaagaacactgaggctccagaagaccaagtaatttacccaagtgaagtaacagagctgggacttttactatgcaaagtttagcaggctccaaagtctgtgatctctgtgctttgttttcattttctygcaaagaaactcgctgtaaggtgaaggcctgatcacaacattcctctttctctctctagatggctcacctaaaatttctgacaacctgcttcagctgggattaatttctttgaagtgaaatcagtttaactgaggaatcaatttgcttccttccatatatgccaaggaaaaactgtacatagacattgacccacaatacctggttgaccaca

SEQ ID NO: 63927 - DNA, 740 bp, Homo sapiens
catgaacaaaaggaggggttcctccgcctgcttcatcatggctgtgacccgtttatcagggatatggcttacacaactaaagctctatagagaaaaatctagaccaaatcagtgggtttattcaacaaggtcaaccaacctggagcggggcagcatcagccagtgcagcgacaaaactggattcttccagctaaactttttcctgcataaacaggaaataagcaatttctctcctcttattatgtgaattgtctaggttgcagctcagatgctaagttaaaacaactgaaatatactgagattctactgtgtgctatatccgacactgggcattttacatatattttctgacttaatttttaataacaaactgcaagttatatattatgctcccactttaccaagaacactgaggctccagaagaccaagtaatttacccaagtgaagtaacagagctgggacttttactatgcaaagtttagcaggctccaaagtctgtgatctctgtgctttgttttcattttctcgcaaagaaactcgctgtaagktgaaggcctgatcacaacattcctctttctctctctagatggctcacctaaaatttctgacaacctgcttcagctgggattaatttctttgaagtgaaatcagtttaactgaggaatcaatttgcttccttccatatatgccaaggaaaaactgtacatagacattgacccacaatacctggttgaccaca

SEQ ID NO: 63928 - DNA, 740 bp, Homo sapiens
catgaacaaaaggaggggttcctccgcctgcttcatcatggctgtgacccgtttatcagggatatggcttacacaactaaagctctatagagaaaaatctagaccaaatcagtgggtttattcaacaaggtcaaccaacctggagcggggcagcatcagccagtgcagcgacaaaactggattcttccagctaaactttttcctgcataaacaggaaataagcaatttctctcctcttattatgtgaattgtctaggttgcagctcagatgctaagttaaaacaactgaaatatactgagattctactgtgtgctatatccgacactgggcattttacatatattttctgacttaatttttaataacaaactgcaagttatatattatgctcccactttaccaagaacactgaggctccagaagaccaagtaatttacccaagtgaagtaacagagctgggacttttactatgcaaagtttagcaggctccaaagtctgtgatctctgtgctttgttttcattttctcgcaaagaaactcgctgtaaggtgaaggcctgatcacaacattcctctttctctctctagatggctcacctraaatttctgacaacctgcttcagctgggattaatttctttgaagtgaaatcagtttaactgaggaatcaatttgcttccttccatatatgccaaggaaaaactgtacatagacattgacccacaatacctggttgaccaca

SEQ ID NO: 63929 - DNA, 756 bp, Homo sapiens
tctataggaacttaaaaactattttaaaatatcctggacttttgaccatggtataatcatatatctctcttactacttataattgcttttaagcgtgtgagtgaaatttaattctagatcatcactttccaaagtagtcccatgattactgttgcaggtttgctactaactgctctgtggtacctttcccaaacttgcataatggtggtgataaaactgctgctaatgattaatattcactggctgctcataatatgtctacaaaaccatatgtgcagctcaatccttccagcatcatggactcagagacaatatgtttcacatagcaggacaatcaaccacaaatgctgcagtcactttcaaaggttactgtaaagcattggtggaaaaccgggctttctgtgaactagatgcagctcacagatgtgggctctgcaatttttttytttttacttcattgccaacatttacaaaatgagatatgaaacattttttaaaatctggatttcttgatttgaatcagaagatatggcaacaataacaccacgattttacatgctaacaactgaccagaaatggctagccccttagatgggcttccccagctcctcactttaaaactttgactatgattagatgcctcctataagtggaatcatcatgcactatttgtccttctgttggcttatttcactcagcataatgtcctcacagctcattcatgatgtccactattaaagaattttcttctttaag

SEQ ID NO: 63930 - DNA, 508 bp, Homo sapiens
tgacccaaccacagcacaggacggattgcccagcattgggaaagggacaagagaacaaccttgtgaaaaagcagcagcaggaagaaaaatattttggcagaggtgcagccctcatgaggaagaacagcaaagctctgcracccacctccaggcttctgagctgaggaaatagtcccagggcataataaatctctaagtgcaaaagttagatgaatacaaagctaaggtagtgtgaaaagatgcccagctccaagagacttgactattatggataaggcaacaaggcagggcacagggctgggctcttcctctgcgtaggggattcaggggatagagagattggtggttggaggaagcacactcattctgcatgtgcagggagtgggggcttgaggaaatgttaaagaggggctaaggaagaaaatagctgaaaggctaggactacgattttagcagaaaggcaccaaacagtaggttccctctctgtacctccacaccctacccccaa

SEQ ID NO: 63931 - DNA, 508 bp, Homo sapiens
tgacccaaccacagcacaggacggattgcccagcattgggaaagggacaagagaacaaccttgtgaaaaagcagcagcaggaagaaaaatattttggcagaggtgcagccctcatgaggaagaacagcaaagctctgcgacccacctccaggcttctgagctgaggaaatagtcccagggcataataaatctctaagtgcaaaagttagatgaatacaaagctaaggtagtgtgaaaagatgcccagctccaagagacttgactattatggataaggcaacaaggcagggcacagggctgggctcttcctctgcgtaggggattcaggggatagagagattggtggttggaggaagcacactcattctgcatgtgcagggagtgggggcttgaggraatgttaaagaggggctaaggaagaaaatagctgaaaggctaggactacgattttagcagaaaggcaccaaacagtaggttccctctctgtacctccacaccctacccccaa

SEQ ID NO: 63932 - DNA, 1646 bp, Homo sapiens
ttatgccagaagtcacatagccagagtcatcattattttgatatatttttgttgaaaataattaaagtttgatttgttttattgtatactttggattttattcctggatagagcaacttttggcacaaaactaaaaatgagacatgcaaaaatccttgcaaagactggttttatatggtatgtgatggtgatcaatttaaaatccaataaaataagttgtatgaaaaattttagtgtgtgttcatgtgcatttttccagtgagaggtttgtggttttcatcagattctcagagcagggcccagcacacaagaaagattaaaaatggctcctttagaggtataagttacatcaaagacatttgccaatcacctcaacaccaaagcttctgccatctgtcacataccctcccctgatttccatcctgtgtctgtaacctttccttagggacattaaaaatagaatttattgttacccaagtgtttaggaataggccaagaagcaacacaagagttcattattagaggagaagagacacttggaagtcagttatattaccccagcaatcatttttttaagaaggatgttcatacattcacatatggttgatgggatcctgcaaaacaataggctctatgtgtcaagatatgttaaaatgttcataatatctaagccaatatattacactttggggaatgtcttcatcagttctggctgcaataacgaagtaccttagacttcatggttcataaacaatagaaattaatttctcatagttctggcagctggaattctgagatctgcatgccagcatggttggatgctggtgaggaccctcctccaggttgcagactttggacttctctgtgcatcctcacttggtggaaagagagctagttagctctcttgcctctcctgggcactaatcctattcatgaggartctaccctcataacctgattacttcctaaaggtcccacctcctgtcatcactttgggtagagatgtagccatacgcctaacaatggggatacattctgagaaatgtgtccttagtgacttttgtcattgtgcgaacatcatagaatgtacttactcaaaaccaagatggtacagcctgctacacatctaggctgtatgatatagtctcttgctcctaggctacaaacctttacaccatgttactgtactgaacattgtaggcaattgtaacaaataagtatttctatgtttagatacttactcgtctagatacttttctatgtttagatactttcttgtatctaaacaaagaaaagtacagtagacatagggcataaaagattaaaaaacctatatagggcacttatgaatggagtttacaggagtagaagttgttctgggtgagttagtaagtgagtggtgaagtgaatctgagggcctaggatattactggacacttttatatgactggcagtgcagagatttgtttatatcagcattacctcagacacatgagtagtgcattgccttttgacgttactgtggctacagtgtcactaggctataggaagttttcagcttcattataatcttgtgggaccaattataatcagtcgttgatgtaacatcattatgcacccacgattttatataaatatgttggata

SEQ ID NO: 63933 - DNA, 1639 bp, Homo sapiens
attggaaaagaagaagtaaaactctttatttgcagactatataataatgtgtatagacaaccctaagataaattcttcagaatctagaaaaaaatgattagaacaagtaagtgaattcagcaaggtcacaggattataaaatcagtgtaaaatgaattttatttctatataacagcaaagaacaattagaatataaagtgaaaattaatatacatgccataattggaaggttgaggcatgagaatctcttgaacccaggaggcagagggttgcagtgagctgagattgcactactgcactccagcctgggccacagagcgagactccatctcaaaaaaaaaaaagtgagggcttcagaaatagactgatgaagggtggagtctctgaatcttggttctgttgtacttcaggtcaagttatttaaagtctccaaaaataccatgggtagccttagattctacatatataaaatgagggaaaaaaaattcctttagagttgtgaggatcaaataagatgtaaaggatgcacataacatagtgcttgtgctaggcagaataggagccctccaaagatgtccacaccctaatccctagaacctgtgcatgttatgttccatggcagaaggaatgaargcaccagatggaattgaagttgctaatcagctgaccttgtaataggggggttagcctggattactggctgggcctaatgtcatcacaggggtcctgaaaagtggaagcagaagagtcagaaccagcaagaccagacgcaggttgctcacacctggaatcccagcactttgggaggccgaggcggaaggatcctttgagcccaggagtttgagaccagcctgggcaacacagtgagccctcatcttacaaaaataaattcaaaaaatcaggcaggcatccctgagtgaaggaagtggggcaccctctaaacttctaaagccaagaaaacggattcttagctgctgacatcttgaatttagctgtgagacctgttttggacttccgacctccaaaactgtaagataataaatgtgtgctgtttaaagccactacatttgtagtacatttttacagcagcaatgggaaactggtatagtgcctacaacatacatattggtagctaaataaacattttatttcttaacacaacctgctaaccttaacccttgtctgctacaacacatctagttttcctttttgtgagaaaaaggtgtccattttcttttcacttgagcctcagaagcctgtttctttcttttttttattattattatactttaagttctatagtacatgtgcacaatacgcgggtttgttacatatgtatacatgtgccatgttggtgtgccgcacccattaactcgtcatttacattaggtatatctcctaatgctattctccccccttcccccaacgccatgacaggccctggtgtgtgatgttccccaccgtgtgtcccggtgttctcattcttcaattcccacctgtgtgtgagaacatgcggtgtttagttttctgtccttgtgatagtttgctgagaatgatggtttccagcttcatccatgtccctacaaaggacatgaactcatccttttttatggctgcatagtattccatggtgtatatg

SEQ ID NO: 63934 - DNA, 503 bp, Homo sapiens
cctccctctctcattgactaatcttctctccccartctcccagcccattgtaggatcagggaagggttttgctctttttccaggaattggcctgtcctcagtatcaatattgctttgtgaaaaactaccctaaaacagtcgtttttaaaagacacaatcatttattttgctcacaaatgtgagagttgcctaggctccaccaggcatttctcacgtgggttgtcttgcaaagctacagtcagactatggcttgggctggggtcttcattcacatgtctagcacctggcctgggaagagtcaaacagctgggacttttctaagtgtctcttgatgtggtctctctacatggtgtgtggcctcagagtaggtagaatcacagcagtcataggtacgtgcatagcagtagctgtgtggcgttttctgacctgccttagaagctggcaccacttctgccacattctgtttgtggaggcagtcacagactgctcagggtcagaggaca

SEQ ID NO: 63935 - DNA, 2006 bp, Homo sapiens
atgagtcccttttcagatattttttattttcttgatgatgtcttttgaagaattgggctttaatgaagttcgtttaatctattttttcttttgttgtttgtgcttttggtgttatatctaagaagtcattaatccaagatcatgaaagatgtatgccttttttttctggtatatagaaattgactttatatgtatgcctccttttttcttttcagagttttatagttttagcttttacatctaggtcttttccgatttttaagcctaagttttttaggttttttttttttgccttgaacagagagagatattactaaatgtcagttttgttttagttttgattgctaatgttttggtgtatttccttctaatgttttcatatacatgtgtacatgctcttatgcatagacatatgtgtgcacatgtgtacacacacacacacacacactttttaaaaccagatggaagttttgttgactctgacttcctgattggaaatgcaagcaactctcacttactacaggaaagagggagtcacagtggaatgtcttattttagaagtagtatataacctttgggaatagtagtataaacagattgtgcattttcagatttttatttttatttttattttttcgagayagagtctcgcactgtcgcccaggctggagtgcagtagcgtgatcttggctcactgcaagctccgcttcccgggttcacgccattctcctgcctcagcctcccgagtagttgggactacaggcacccgccaccaggcctggctaattttttgtatttttagtagagacggggtttcaccgtgttagccaggatggtctcgatcttctgacctcgtgatccacccacttcagcctcccaaagtgctgggattacaggtgtgagccacagtgcctggcccattttcagatttttaaatctcattgtgaacattaaccaaacttgtgttttgtatctatatcaaaatcttctcaaacaaacttactcattcagaatttatgataacttggatgtgctatcccaacatgttttttgtttatttgtttgtagtatctataaattgaactctaggttaaattgcctgaccttggctaggtgtggtggctcatgactgtaacctccacactttggaaggctgaggtgggaagatggcttgagcctaggagttcaaggccagcttgtgcaacatagtgggaccccccatctctacaaataataataattttttaaaattgcttgacccttttttaggtggagatggggtaagattgtatgtgtgtgtatacagttgctcagtaaatatctcttatgaatgttgagtgttgtatgagtattaaatatgtaacagtaggttttaaataatttttcctgttattctcataggtaaaccattcttatcagaccatatgtttatttttctattagaaaatttctgtctttctgtacacacacacacacacacacacacacacacacacacacacacagatccagatattcctcgacttccaatgaggttacattgtaataaacctatcatgagttggaaatttttaggtcaacagtgcacttaatacacctaaccttctgaatgtcatagcttagcctatcctacctaaaacatgctcagaacacttatgttagcctataattgggcaaaatcataaaacacaaagcctgttttataatacagtattggatatctcatgtaatttattgaatactgtactgaaagtgaaaaacaggctgtatgagtacttgaagtattgtttctactgaatgcatattgcttttgcaccattgtaaagtcaaaaaaccataagttgtatcattgttaagttggggaccacctgtatatatgtgtttatatataatatttatatgtacaaatgtatgtttattcgaagacacaaatataattgaatgtttgattatgatatctattgtgggcaaaaatagtaccttaatgtcaacctagaattttcaaa

SEQ ID NO: 63936 - DNA, 2006 bp, Homo sapiens
atgagtcccttttcagatattttttattttcttgatgatgtcttttgaagaattgggctttaatgaagttcgtttaatctattttttcttttgttgtttgtgcttttggtgttatatctaagaagtcattaatccaagatcatgaaagatgtatgccttttttttctggtatatagaaattgactttatatgtatgcctccttttttcttttcagagttttatagttttagcttttacatctaggtcttttccgatttttaagcctaagttttttaggttttttttttttgccttgaacagagagagatattactaaatgtcagttttgttttagttttgattgctaatgttttggtgtatttccttctaatgttttcatatacatgtgtacatgctcttatgcatagacatatgtgtgcacatgtgtacacacacacacacacacactttttaaaaccagatggaagttttgttgactctgacttcctgattggaaatgcaagcaactctcacttactacaggaaagagggagtcacagtggaatgtcttattttagaagtagtatataacctttgggaatagtagtataaacagattgtgcattttcagatttttatttttatttttattttttcgagacagagtctcgcactgtcgcccaggctggagtgcagtagcgtgatcttggctcactgcaagctccgcttcccgggttcacgccattctcctgcctcagcctcccgagtagttgggactacaggcacccgccaccaggcctggctaattttttgtatttttagtagagacggggtttcaccgtgttagccaggatggtctcgatcttctgacctcgtgatccacccrcttcagcctcccaaagtgctgggattacaggtgtgagccacagtgcctggcccattttcagatttttaaatctcattgtgaacattaaccaaacttgtgttttgtatctatatcaaaatcttctcaaacaaacttactcattcagaatttatgataacttggatgtgctatcccaacatgttttttgtttatttgtttgtagtatctataaattgaactctaggttaaattgcctgaccttggctaggtgtggtggctcatgactgtaacctccacactttggaaggctgaggtgggaagatggcttgagcctaggagttcaaggccagcttgtgcaacatagtgggaccccccatctctacaaataataataattttttaaaattgcttgacccttttttaggtggagatggggtaagattgtatgtgtgtgtatacagttgctcagtaaatatctcttatgaatgttgagtgttgtatgagtattaaatatgtaacagtaggttttaaataatttttcctgttattctcataggtaaaccattcttatcagaccatatgtttatttttctattagaaaatttctgtctttctgtacacacacacacacacacacacacacacacacacacacacacagatccagatattcctcgacttccaatgaggttacattgtaataaacctatcatgagttggaaatttttaggtcaacagtgcacttaatacacctaaccttctgaatgtcatagcttagcctatcctacctaaaacatgctcagaacacttatgttagcctataattgggcaaaatcataaaacacaaagcctgttttataatacagtattggatatctcatgtaatttattgaatactgtactgaaagtgaaaaacaggctgtatgagtacttgaagtattgtttctactgaatgcatattgcttttgcaccattgtaaagtcaaaaaaccataagttgtatcattgttaagttggggaccacctgtatatatgtgtttatatataatatttatatgtacaaatgtatgtttattcgaagacacaaatataattgaatgtttgattatgatatctattgtgggcaaaaatagtaccttaatgtcaacctagaattttcaaa

SEQ ID NO: 63937 - DNA, 1674 bp, Homo sapiens
aaatcatgccacttttgcttttgtctttgagtgcaaaggcttgtcttgcatgttccaattgcagctcctgtgaggaaattagaaatagggcattaagctggttaaacacattccaagtacatggtttggaaaggaaggaaggacagatatccttcccacacatgtacttactacaaaacaaacaatgcacagatctgaatttgcaacaaaacttttaatttctttcaaaaagcatgagctttcttaaaaatgtactacatattactcctcaggaaaaagaatgaatgagagcacatcaataaaggaaaggtaggaaaaaataacccttagattttacttgacaagttttcattactgaaaacagagaataatgtttttggtgcttcatttcagcctttaaaatatacagtaatttatctctcctgcttgaaggcttacctgtcatcaaagagtacttcatgaattaagagtttagattcattttcagtttttcaattttaaatgttgcaatcaaagtctctctctctgtcattctataaatgaattagagaccattttttcaaacaaatttttcaaataaactcagtgagaaactctaccaactggtaagtgcaatattcagtcattctaaaatgaaagtcaggaataacaaactgcaaaagtagtgttcagctatcactggctctgggcaccgttactcataaactgtaagacagtccagaatatctctgaacttttgaactattgggcaaccaaactttgtaataagtgatatccacaaaaacaacaaaatgttccagcaatcccctgtgtactatacaaaagtcaaaatcagagcatttctgttgtggggatccatgactaaatgcaaaaaacctgttagcaaacataacaatggtgctgctattggatgccaccrtcacactctttgcaactctgtaaataatagtcatatctaagtatatacatattatttaaagattacataattttcattcacatttacttatcaaagactacaaattaatgttgctttaacttttcatgacattaaaagtagtttttatagaagtctcatcatttttatttaattatattttcctatggacttgtgataactcactccattttcccatgacctcagctccaaccacttcacccttcaaatgaagtgggaattttcaatccatctacatcattacatggatttgaaattggtccccatggcaaagatattcctaaatagcatcaaaagtagacacaggttcactccctgtcttatatctttttctttccttctacctcttttctatctctttcttatgtctttgtcttccctatatgtcttaatcacccagaaatatcaaatggtagccatgggtacaatttagccttattaataacactcagtactaaagaagatgtggacctttaccttcaagatgaagcagaatgctcactgaaggagtagtgttagtagaatagattgtctgttttctataaggtcaacagttaaaggactcttatttgtcttttaaagatacgtatttgaaggatcacagatgaaaaaatcatagagtatgtgcatctggcttccaaatgatcctgcaggaggcagggtggagggtatagataaaaaagattggccaagaagtggtaattattgaagctggt

SEQ ID NO: 63938 - DNA, 1986 bp, Homo sapiens
taaaatgcagatgccagagtcccaccctagagattattattcaggaaggtgtaagtggctcccagaaatctgcatcatagcaggtgccccctagtgtaaccaggagaaggcagaacagtctagctcataagattaaagaagctttattagcttcatttgaaaggatacctattatactgccgcatctaggcagtgctgtatgtgaggcccagattaaagcaataaacatttccaaagattatactgagtagacccaacttcagactagggctccaaggaggtccatctcaaacaaccaaatattttttggtaaaaaataaagattttttaatgccctgggaatcaattcacttgtttccccctcacaaacagaatctggtttatagcccttactttaaaaaaacaaacaaacaacaacaaaaaaaaaaaaaaacaaaaaaaaccaggccaggcacagttgctcatgcctgtaatcccaacattttgggaggctaaggcaggtggatcacgaggttaggagatcgagaccatcctggcctacatggtgaaaccctgtctctactaaaaatacaaaaattagccaggtgtggtgatgggtgcctgtggtcccagctactcagaggctgaggcaggagaatcacttgaacccaggaggcagaggttgcagtgacccgagattgtgccaccacactccagcctggtgacagagcgagactccatctcaaaacaaaacaaaaaaaaaatagtttataatatggaagaggacccagtgagtcaagacaagtaaaggaaccagataacctctaatttaagaatagaaataaaagaaaagtggttttaggtatttatgaaagatttaggctagttcttaggtagcaattctagaaaactaacaggaggattactgaagacggctttcaatgcaaggtctctaaaatttgcccattgctattatggactaggcaaagcatgactttaactaaaggacaatcagtaattgagaacacaactgaaggaacctctctgtcctattatcctaatttcttaataaatctactacaataatactaaaatttggctataataatacttgatttataactcaggggataaggtgttcagtgtaagcttattttttataatacatgaatcttagtcccttcagaacttcttttctcttggttttatttaaacttttggctggaacactttctaaaagttattacctatggtcttgcctgtgcagtatattatagcaagtatatcatttgcaacatgrtatactggctacaatcttttcttgatgagtcaagttcatcattaaaaccataatttgtggcacatatgtggatgtcatatagtcatggaaaaaacaatgaactaaaaatcagaatttctaagtttttgtcagcagaaccagtacttaccgggcatgttaccttaagccagtttgagactccacgtcctcctctataaaatgggaatactactacttgccttgcatttgccaaaatgtattgtggagatcaaataaaaacaattatagtaagtgctcaatacatttttagctattctatctttggcatgtcaggcactgcacatatccaaaaaacagacaaggaatcaaggctcacagaaactaaaacttttacaaatttatcccaggcagctcatgccatctccaatgctccccatgactttgccgtatcactgtcagagcatcatattccacggccaaatcctggaaaccatttgtaaaaacacagagcttgtgaactacgtacagagactcctgctgagacatgacatctgagttacaaaaatggaaaaatgaatggaaaagagcttttaatttagttccattcaactgtcacttattgtttatatcaaacactgaaaagatggtaaacagatgattcccaccttctggtttcttaaaatgctgggaagtaggaaaggaagaagggcagtggagaggaggaagtg

SEQ ID NO: 63939 - DNA, 1986 bp, Homo sapiens
taaaatgcagatgccagagtcccaccctagagattattattcaggaaggtgtaagtggctcccagaaatctgcatcatagcaggtgccccctagtgtaaccaggagaaggcagaacagtctagctcataagattaaagaagctttattagcttcatttgaaaggatacctattatactgccgcatctaggcagtgctgtatgtgaggcccagattaaagcaataaacatttccaaagattatactgagtagacccaacttcagactagggctccaaggaggtccatctcaaacaaccaaatattttttggtaaaaaataaagattttttaatgccctgggaatcaattcacttgtttccccctcacaaacagaatctggtttatagcccttactttaaaaaaacaaacaaacaacaacaaaaaaaaaaaaaaacaaaaaaaaccaggccaggcacagttgctcatgcctgtaatcccaacattttgggaggctaaggcaggtggatcacgaggttaggagatcgagaccatcctggcctacatggtgaaaccctgtctctactaaaaatacaaaaattagccaggtgtggtgatgggtgcctgtggtcccagctactcagaggctgaggcaggagaatcacttgaacccaggaggcagaggttgcagtgacccgagattgtgccaccacactccagcctggtgacagagcgagactccatctcaaaacaaaacaaaaaaaaaatagtttataatatggaagaggacccagtgagtcaagacaagtaaaggaaccagataacctctaatttaagaatagaaataaaagaaaagtggttttaggtatttatgaaagatttaggctagttcttaggtagcaattctagaaaactaacaggaggattactgaagacggctttcaatgcaaggtctctaaaatttgcccattgctattatggactaggcaaagcatgactttaactaaaggacaatcagtaattgagaacacaactgaaggaacctctctgtcctattatcctaatttcttaataaatctactacaataatactaaaatttggctataataatacttgatttataactcaggggataaggtgttcagtgtaagcttattttttataatacatgaatcttagtcccttcagaacttcttttctcttggttttatttaaacttttggctggaacactttctaaaagttattacctatggtcttgcctgtgcagtatattatagcaagtatatcatttgcaacatggtatactggctacaatcttttcttgatgagtcaagttcatcattaaaaccataatttgtggcacatatgtggatgtcatatagtcatggaaaaaacaatgaactaaaaatcagaatttctaagtttttgtcagcagaaccagtacttaccgggcatgttaccttaagcmagtttgagactccacgtcctcctctataaaatgggaatactactacttgccttgcatttgccaaaatgtattgtggagatcaaataaaaacaattatagtaagtgctcaatacatttttagctattctatctttggcatgtcaggcactgcacatatccaaaaaacagacaaggaatcaaggctcacagaaactaaaacttttacaaatttatcccaggcagctcatgccatctccaatgctccccatgactttgccgtatcactgtcagagcatcatattccacggccaaatcctggaaaccatttgtaaaaacacagagcttgtgaactacgtacagagactcctgctgagacatgacatctgagttacaaaaatggaaaaatgaatggaaaagagcttttaatttagttccattcaactgtcacttattgtttatatcaaacactgaaaagatggtaaacagatgattcccaccttctggtttcttaaaatgctgggaagtaggaaaggaagaagggcagtggagaggaggaagtg

SEQ ID NO: 63940 - DNA, 758 bp, Homo sapiens
  misc_feature (1)...(758): n = A,T,C or G
gcactctagcttgggcaatagagtgagaaaagaaagaaaggaagaaagaaagaaaggaagaaagaaagaaagaaaggaaggaaggaaggaaggaaggaagagagagagagagagaaagagagagagagagaaagaaagaaaaagaaagaaaaggaaggaaggaaggaaggaggaaggaaggaaggaaaagggaaggaaggaaggaaaagggaaggaaggaaagaaaggaaagaaagaaagagaaaggaaggaaggaaggagaaaagaaaagaaagaaagaaaatgtggtatatagagagactggaacactattcagccataaaacagaataaaatgatgtcttttgcagcaacttggatggaactggaggccattattctaaatgaattctaactcaggagtggaaaatcaaatattgtatgtcctcacttataagggggagctaagctatgaggatgcaaaggcataagaatgatataatggactttgggggcatggcagggggaagggtgggagttataaaagattacatattggatacagcatacactgctcagatgatgggtgcaacaaaatctcagaaatcatcactaaagaacttgtccatgtaaccaaaaaccacctgtacttccaaaactattaaaataaaaataatttataaaataaaataagatttaaaaattagtcttcaactaccttcttgaytttcctggcagtcaaaacaagaaggaatagcatantaatcatgtgatttacat

SEQ ID NO: 63941 - DNA, 2783 bp, Homo sapiens
gtacctctggcacacagctgcatccctcagaaacttgcccagctcagtctgggaagcatgacatggcaccaagcatcctgtctggaacaatgaaatgaaattgaacggcagggtttgcctggttgttaatatgccccattgcaaatggatgtgacagatttttggcaccacctgtcacatttttgacattcccagatacttcactggttctacagttaatttgtccactgggtttcctttaaggactttgggaacagcctagcaaggagaggacagcattgattctgggcttttgagatctgctgcttaaatattcctttaaaattgacccattttctttcagacttttattacttactgacatcaaagctggcttatgagtgctttagatgtgaaagatttctatctcaacataccgttaggatacgatattgtctgtgccatcagggagctcagtttcctgttaacattaatattcgagattaccttgtgaccccaaggtagagctggaatttgaggtggaaaaattttatatttttgggcttcgaggcaataggtaaatgagtctctgattagaatctcgagcctctgattagatggtgatgagagaaacatggactccttaagtctttcagaaatggggttcttgttatatcctgagaccatggaataagtattagcattaggggattcagctccaaatctgtggtttatagtagactcatctggtgcccaaattgcatccttttatctcccttttgagttcagccattgccagatggatagtgcaatgctggctttggttctttttgtgctgatggtgtctggcctcaagcatgcttcccttgatttggctttctgctttagggctctttcaatagtggagtagtagaagcatgcacagccaatgtgtgcagaagtacaggcagttaaaacctcccaggacaatcctgcgggacagcacctcatggacaaatgctcctgtttctcctcctttggcagataaccctgggggtcattctgtgcactgctgaggggggcttttggaatatgagctttggtttgcccatagcagtgaccttggtgatggcccctactgctggcttttcattcctgcctcactctccctagctgctgcttcctgggatcaccgcatgcatcaccacctgcacccaggcctttgtctcaagctccattctctagggagaacaggctaagacactgtcctctctggcttggtttctttgggcaagtttcttcacttctctggtcttgctcagttgtctcacctatccgagggctattgattgctgaagtcccttccagttctggaactctatggctctatttgactgtttcatctttcctggggatatccttctttcctttattcattcataagccaaccctttgacattccagttggctggtttttaaatttcggatgagtcactttaacgcctaggtgctggagaatgttgagaagcattatccctcccttggtgaccttttcttttctgtgtaggacactcattgcattgcatttttgaaacaaaaggcaggcatcctttttaatctgactttagtgccaagacactgatgcccrctgtggggctcataaccaaatatttcatactgacaatttttctctcttctttttttctaaaaaaatcctacctcttttccatttggttttgattaatgaaaggctgcccatggtcagctttgcatttctgcctccgttcccccagctcccatcacgtagagaagatcacacaatcatttgaagatcctttgctgtagctttgtgacctgtgtaaatgatgatgttgagaaggagtggtggtagggagagactcacttcattttcatcttttactgaacattttctgaatcataggaatccaccctaattcctgatgctacaaattattgtattgggccccaaatgatgtgtccagcttgcaggaaatggtgccgtttatcaagtacatgtgctagaccatagactaggcattttacctaaatcctcacagtaaccctgcaagaagcgtatgttgtcctcattttgactagcagggaaactgaagcacatttcatcgactctagtactctagtgcttacttgtactcaggtgttgcttaataaatatttactgaagaaatgaatgaatgaggcttagaagattttgctaggtggcctagctggctgagatttaaacccatgtctggctgtgtgctaaccctgtcttcccatgagggcacctgttttgcttcacagagtgtctacactgtccagtcattctcaccactgcccttgtgagccaagaacctttctgcattggtacactacattggttcacatgtctctatcagcccccaatgtctcctttctgtttatccaattgcttgccttccttcaaagtcagatgttggttacaaacaaacacacacacgcacacacacacacacacacatacacacggggagagagagagagaaagagagagagagaacagtggagattatactgcatctataatctggtaatattttcgcttggcacaaagtaatgtaaattctgtaaataccaccctttagggtgctgtgtgtgggatggcagggtggatcaggattttgggttgactcacaagtcattctactggaatgctagtaaacagctaaagggctcaggttcagagagctggctctagtccaatttctgactctgtcattagaaagtcaacctccccaaaccttaatattttcacttgcaaactgagg

SEQ ID NO: 63942 - DNA, 786 bp, Homo sapiens
tatgggaacttcagttaacacaaactttgacataccctcttgttgttctttcttttctaattattaccaagtttgttcactgtctgtcactcctggtgttagaaatactatcagttagcattctagtcattattcaccattaattcctccagcactcaatcaccacatctgttattaaccatctggtccatctttccacttctgcatgttatttacatatggcagttacccaagttaacgtggccatttagacggccaggtttgmactcatttccaaaacacagctacagggataatattttgccaatattaaatcaaggcattttaaccccacctcctctttttccacatgcaacctcctatttcctggaatgtggcgtattgctccagggcagaagacagctagaccatgacctctttaagaagacagtaggctagaaggtcagacattgcaaaaaccagaaaggatttgctaagtgtctttagaatctatgtgatgcatcaaggaccagggctgggagaccagagtctaagtccttttctacaagggagagatgcaactgaaaaaggaagggaaagcccacccctcccagccagggaattacggaaagaggaagcagagacgtgctgataagggccgcaatgtaagggattgtgtcagatgaagggcacggacccccaaggccggagggccactcctactcaccatgagggactcttggaagctgccacctcaaatgcccatccaagagtccctctccttccttcaccccgggatacagatgc

SEQ ID NO: 63943 - DNA, 617 bp, Homo sapiens
ggtcttgggttgggaaaatgtagctcaaaggagaagaaggtggaagattggtgttaaggaaaaaattattcaacaacattttttgtttgtttgtttgtttttgagacagagtctcgctctgtcccccaggctggagtgcagtggcatagtcttggctcacttcaacctccgtctcctgggctcaagcaattctcctgcctcagcctcctgagtagctgggattacaggcccgcactaccacgcctggctaatttttgtattttttaaagtagagacagggtttcaccatgttggccaggctggtcttgaactcctgacctcaggtaatctgcccgcctcagcctcccaaaatactgggattacaggcgtaagccactgtgcctggctgacaacacttgttaaagcacagtaaagaagackttattcaagatatcacaataggaaaagggaccaccacaatgggattttgccacagggaagagagactgggctcaactccaaatacagcactcacacgtgaggtttatagccaaggagcaagttgggaggaagtggatggaaaattgctaagaggaaacctcaagggtaagggagattctggctaaacggacctaaca

SEQ ID NO: 63944 - DNA, 927 bp, Homo sapiens
tgtacttggtttatggatagttcagctttagtgggagagcacaaactgaaaatggtcagtgactatatatcctcattcagtggcgacccttaaaaatggccaagagtgataattttccaaatgggctgagctatgaacagttaacccagtcatctatttttgtagaatgagcaatggtgtcatgtcatggttataggaggaaaagaactagaagtttggagacatcttccagacagaagcatgtgtatggtcatatggaggtgggaacaaaatgatattttcattacacattaaccccatcatgaaagtatagatcatggaaaagacactgaaccattaaatagacattgtgacttggcctttgtcatcagccaccccacaataggcatgatgaatacatgaatggggtgatcatgttgacaaagtcacaggctataaatgggcccaaaaagatgaactcccactaaccaaggcagatctactgacacctctgaatttctccttttyagtaacagagaccaatgctaacacccattatggcactattcctcaaggaaattgactacttggtgagaattacattgggtagcttctaccccaaaaacagtgctactcatcctcaaagctatgataaatacttgttttgggtatgggcttacttctacccacaaagccatagccagcatcactatcggaaggcttagagagtgcagtggatcaacactctgtaagcctcctatacacatgtcagcagatcaggggactgacatgagatgaaggtggtgaaggaaatgctggagtggtccatgactgggtgccacgcttcagaatactgtgtacttattaaaacaaagatctctctatatggtgccctgtcccctataggaaggatacatgtgttcagaaaccaaaagatggaagcatgca

SEQ ID NO: 63945 - DNA, 927 bp, Homo sapiens
tgtacttggtttatggatagttcagctttagtgggagagcacaaactgaaaatggtcagtgactatatatcctcattcagtggcgacccttaaaaatggccaagagtgataattttccaaatgggctgagctatgaacagttaacccagtcatctatttttgtagaatgagcaatggtgtcatgtcatggttataggaggaaaagaactagaagtttggagacatcttccagacagaagcatgtgtatggtcatatggaggtgggaacaaaatgatattttcattacacattaaccccatcatgaaagtatagatcatggaaaagacactgaaccattaaatagacattgtgacttggcctttgtcatcagccaccccacaataggcatgatgaatacatgaatggggtgatcatgttgacaaagtcacaggctataaatgggcccaaaaagatgaactcccactaaccaaggcagatctactgacacctctgaatttctcctttttagtaacagagaccaatgctaacacccattatggcactattcctcaaggaaattgactacttggtgagaattacattgggtagcttctaccccaaaaacagtgctactcatcctcaaagctatgataaatacttgttttgggtatgggctwacttctacccacaaagccatagccagcatcactatcggaaggcttagagagtgcagtggatcaacactctgtaagcctcctatacacatgtcagcagatcaggggactgacatgagatgaaggtggtgaaggaaatgctggagtggtccatgactgggtgccacgcttcagaatactgtgtacttattaaaacaaagatctctctatatggtgccctgtcccctataggaaggatacatgtgttcagaaaccaaaagatggaagcatgca

SEQ ID NO: 63946 - DNA, 927 bp, Homo sapiens
tgtacttggtttatggatagttcagctttagtgggagagcacaaactgaaaatggtcagtgactatatatcctcattcagtggcgacccttaaaaatggccaagagtgataattttccaaatgggctgagctatgaacagttaacccagtcatctatttttgtagaatgagcaatggtgtcatgtcatggttataggaggaaaagaactagaagtttggagacatcttccagacagaagcatgtgtatggtcatatggaggtgggaacaaaatgatattttcattacacattaaccccatcatgaaagtatagatcatggaaaagacactgaaccattaaatagacattgtgacttggcctttgtcatcagccaccccacaataggcatgatgaatacatgaatggggtgatcatgttgacaaagtcacaggctataaatgggcccaaaaagatgaactcccactaaccaaggcagatctactgacacctctgaatttctcctttttagtaacagagaccaatgctaacacccattatggcactattcctcaaggaaattgactacttggtgagaattacattgggtagcttctaccccaaaaacagtgctactcatcctcaaagctatgataaatacttgttttgggtatgggcttacttctacccacaaagccatagccagcatcactatcggaaggcttagagagtgcagtggatcaacactctgtaagcctcctatacacatgtcagcagatcaggggactgacatgagatgaaggtggtgaaggaaatgctggagtggtccatgactgggtgccaygcttcagaatactgtgtacttattaaaacaaagatctctctatatggtgccctgtcccctataggaaggatacatgtgttcagaaaccaaaagatggaagcatgca

SEQ ID NO: 63947 - DNA, 927 bp, Homo sapiens
tgtacttggtttatggatagttcagctttagtgggagagcacaaactgaaaatggtcagtgactatatatcctcattcagtggcgacccttaaaaatggccaagagtgataattttccaaatgggctgagctatgaacagttaacccagtcatctatttttgtagaatgagcaatggtgtcatgtcatggttataggaggaaaagaactagaagtttggagacatcttccagacagaagcatgtgtatggtcatatggaggtgggaacaaaatgatattttcattacacattaaccccatcatgaaagtatagatcatggaaaagacactgaaccattaaatagacattgtgacttggcctttgtcatcagccaccccacaataggcatgatgaatacatgaatggggtgatcatgttgacaaagtcacaggctataaatgggcccaaaaagatgaactcccactaaccaaggcagatctactgacacctctgaatttctcctttttagtaacagagaccaatgctaacacccattatggcactattcctcaaggaaattgactacttggtgagaattacattgggtagcttctaccccaaaaacagtgctactcatcctcaaagctatgataaatacttgttttgggtatgggcttacttctacccacaaagccatagccagcatcactatcggaaggcttagagagtgcagtggatcaacactctgtaagcctcctatacacatgtcagcagatcaggggactgacatgagatgaaggtggtgaaggaaatgctggagtggtccatgactgggtgccacgcttcagaatastgtgtacttattaaaacaaagatctctctatatggtgccctgtcccctataggaaggatacatgtgttcagaaaccaaaagatggaagcatgca

SEQ ID NO: 63948 - DNA, 653 bp, Homo sapiens
atgggaattttctaaaaatcattacctggattcttaacgccaaaataattctagtttcttgccttttggttagtgatatttagaaagcatcttaaatagtgatagctccccaaatatcaaaatatatattcgattacatcatgcatgracatgtacagagttgctgttatgcactgctcaatgacaactctctgatatgttttattttgactacagccaaaattacatttaagcctcagcagacacattttggttaattatctagcttcaaactaattaaaaaaattctaatttattagacattaagtatctgtgccataacacatggtattttcaaaacgactagtttaaaatcctcaactgtagtcagagatgtctcagtaattgatagaacgagtacagtgaaaattagatagtagaaggcctgaacaacagtaccaactaatttgacctaattggcatttataggtcagagagcaaaaacccaacgacagaaaaatacacattttctagtgcccatatactattcaccaagatagatgatattatatgacacaaaaattatcaaaaaaattataagaatgaaattgcataatatatggattcagatcacaatggaatgaaaatagaaattaacagaaaatagttttaaa

SEQ ID NO: 63949 - DNA, 653 bp, Homo sapiens
atgggaattttctaaaaatcattacctggattcttaacgccaaaataattctagtttcttgccttttggttagtgatatttagaaagcatcttaaatagtgatagctccccaaatatcaaaatatatattcgattacatcatgcatggacatgtacagagttgctgttatgcactgctcaatgacaactctctgatatgttttattttgactacagccaaaattacatttaagcctcagcagacacattttggttaattatctagcttcaaactaatwaaaaaaattctaatttattagacattaagtatctgtgccataacacatggtattttcaaaacgactagtttaaaatcctcaactgtagtcagagatgtctcagtaattgatagaacgagtacagtgaaaattagatagtagaaggcctgaacaacagtaccaactaatttgacctaattggcatttataggtcagagagcaaaaacccaacgacagaaaaatacacattttctagtgcccatatactattcaccaagatagatgatattatatgacacaaaaattatcaaaaaaattataagaatgaaattgcataatatatggattcagatcacaatggaatgaaaatagaaattaacagaaaatagttttaaa

SEQ ID NO: 63950 - DNA, 653 bp, Homo sapiens
atgggaattttctaaaaatcattacctggattcttaacgccaaaataattctagtttcttgccttttggttagtgatatttagaaagcatcttaaatagtgatagctccccaaatatcaaaatatatattcgattacatcatgcatggacatgtacagagttgctgttatgcactgctcaatgacaactctctgatatgttttattttgactacagccaaaattacatttaagcctcagcagacacattttggttaattatctagcttcaaactaattaaaaaaattctaatttattagacattaagtatctgtgccataacacayggtattttcaaaacgactagtttaaaatcctcaactgtagtcagagatgtctcagtaattgatagaacgagtacagtgaaaattagatagtagaaggcctgaacaacagtaccaactaatttgacctaattggcatttataggtcagagagcaaaaacccaacgacagaaaaatacacattttctagtgcccatatactattcaccaagatagatgatattatatgacacaaaaattatcaaaaaaattataagaatgaaattgcataatatatggattcagatcacaatggaatgaaaatagaaattaacagaaaatagttttaaa

SEQ ID NO: 63951 - DNA, 1763 bp, Homo sapiens
gtttgaagacacaatggagcttaatgtgtaaattccttccattggccaaaagccttttcttgaagaacataacttagtgtgtttacaagttttaaaagcagagcagttccctacccactgttcctgtgcccatcctgttatttccatctgtatagcagaatcctcactagcataacactcctggccattcacttgcccctctgttacctcctcccaggaggggaaggagagcttaccttattagtgagttttgaaagacaataacaagcatgtaagatccacctcctttctctttcctttctcctggaagttggcagatactctactctatgtcataaggttgattgggatagacccctctccctccactgataaggctggcagtttcagtagtgtgtcctcatgtccttacatatgggtagtaaaccttgagaagaattgtgaagcataatgttgcaagtggacaaatactgaagaatccagggcacatggtgtcttatcttcatggctttctttaatatttgtttagagtaatttctgtgtacttacgaaacttttaattttcagccaggtatgtaggtcactaagagtttttttacaaatctctgagattttacttaccatccttcaccagggcgaggtaagatcaattaggaaattacatgttttgattttttatttttatattaacataccccttaggttgtattccttatcagttgattatgcttgtgaatattgaagatccaaatagcagccctagtcacagtaattcaatacattttgtaattgaataaaataaaaatggagcctcctatgaggtttggatatataaccttcacttggataaaggtagaagagagctgatcataaacattttaaccacctctttaaatgttattcttcaagaaagtttacacctgggtgagttaatcttgggactattagcctggcacagggacagtcttagggcataggaaagtagcagagaaattgaagaaggyttccgatgaatatgagatggtgttttaagaaacgtctatctttgaaaatgaggacaatttaggaaaataagttaaaagaatatatatatttatatattttctctaatatataaatgtatatatgcatataagtgtatatacatataaatgtatataatacacatatataatacatatattccctataatgtatattctctttatatataaatatatatatttacataaatatatgcatatataaatgtataatacatatataaacatatacttatagaaattatataaacatatatatttcaaagacaaggttttaaaggccataattcaaatgaaaaggatataaaaatatactgaggacactatataccaaaacttaactacttttaaggttttttctgaacaaggggaaaatttttttcttgataacagggtcagcaaaagtgattggggcttaagaaaacctcacagaataatacaataaagatgacagtgatcaagctgaaatgatttccacagatagatctaagaatcagaaaattactttaaaatgccatttcaaagcaacagataaagtacacgttaagtgctagtggaaaactgccttcttgaatattgtgataattataacaacagattctatactattttaacaaatgcaataggaaaagaccaggagtaacagtgtaaaatcctcaaattattgttgagtgagtttcaaagtaaattgatcattgtgaatagagacacaggtatgaa

SEQ ID NO: 63952 - DNA, 1763 bp, Homo sapiens
gtttgaagacacaatggagcttaatgtgtaaattccttccattggccaaaagccttttcttgaagaacataacttagtgtgtttacaagttttaaaagcagagcagttccctacccactgttcctgtgcccatcctgttatttccatctgtatagcagaatcctcactagcataacactcctggccattcacttgcccctctgttacctcctcccaggaggggaaggagagcttaccttattagtgagttttgaaagacaataacaagcatgtaagatccacctcctttctctttcctttctcctggaagttggcagatactctactctatgtcataaggttgattgggatagacccctctccctccactgataaggctggcagtttcagtagtgtgtcctcatgtccttacatatgggtagtaaaccttgagaagaattgtgaagcataatgttgcaagtggacaaatactgaagaatccagggcacatggtgtcttatcttcatggctttctttaatatttgtttagagtaatttctgtgtacttacgaaacttttaattttcagccaggtatgtaggtcactaagagtttttttacaaatctctgagattttacttaccatccttcaccagggcgaggtaagatcaattaggaaattacatgttttgattttttatttttatattaacataccccttaggttgtattccttatcagttgattatgcttgtgaatattgaagatccaaatagcagccctagtcacagtaattcaatacattttgtaattgaataaaataaaaatggagcctcctatgaggtttggatatataaccttcacttggataaaggtagaagagagctgatcataaacattttaaccacctctttaaatgttattcttcaagaaagtttacacctgggtgagttaatcttgggactattagcctggcacagggacagtcttagggcataggaaagtagcagagaaattgaagaaggtttycgatgaatatgagatggtgttttaagaaacgtctatctttgaaaatgaggacaatttaggaaaataagttaaaagaatatatatatttatatattttctctaatatataaatgtatatatgcatataagtgtatatacatataaatgtatataatacacatatataatacatatattccctataatgtatattctctttatatataaatatatatatttacataaatatatgcatatataaatgtataatacatatataaacatatacttatagaaattatataaacatatatatttcaaagacaaggttttaaaggccataattcaaatgaaaaggatataaaaatatactgaggacactatataccaaaacttaactacttttaaggttttttctgaacaaggggaaaatttttttcttgataacagggtcagcaaaagtgattggggcttaagaaaacctcacagaataatacaataaagatgacagtgatcaagctgaaatgatttccacagatagatctaagaatcagaaaattactttaaaatgccatttcaaagcaacagataaagtacacgttaagtgctagtggaaaactgccttcttgaatattgtgataattataacaacagattctatactattttaacaaatgcaataggaaaagaccaggagtaacagtgtaaaatcctcaaattattgttgagtgagtttcaaagtaaattgatcattgtgaatagagacacaggtatgaa

SEQ ID NO: 63953 - DNA, 678 bp, Homo sapiens
agccaataaaaacttagtgtaataataaagattgacataattgttttttcatcaatggccccacatatttctaagtttgtgttggtggttttattttccaacattggagtagcaaaattctgttcctagcatttgttgatgttgacttaataatatcattctgagcattggcagctctgtaaatggtatccttgagaataacctctttaaggaagtcttagattcctggcttctgttcactgaagcaaacatacagtttggaaagaagtgctcagacttgcttttcagtctctaaagctctttggctccaaggctacactcctgatgtcatsttgcaaggaaaagaaaaactgaaaacattatgcaagaagttcaagaggagggtttgtaaagccatggtccagaagtaatagaactttacatttttcttctacatcagcttgctggtaataagcccatattgctggtacaaagtggccattgaatcatcataaagtagttctctaattactcatactttcttgtttgcacaggtaatttgcatatacctttcaaatttcttggatgtaggctttcctcaggtactgtcaattttatcttgttttaaaaacacagtgctggccaggcacagtggctcatgcctgtaatcccagcactttgggaggccaaggtgggtgg

SEQ ID NO: 63954 - DNA, 1359 bp, Homo sapiens
ttattgatttcaacaggcacttccttttcttcctttccctctcttcattgttacctataagggcagctttaactcttctcaaagagtgaaattaaccccaaatttcaaaataacaaaaatgtacacagtagacatgatagtgctgggtaggggctctgagacataaccaatggtcaaaaaggtttttgccactatgtgaggttttttcccacactgacaaaagagcttctgtttttcagagccttttaaattttataattgtggagaaaggattatgaatctgtacctgtctcctgctaaaatgtcacacattttgaaatgtacttgtccttgtttgactaagcattaagacaaagtgttctctgcaacgagagctcttcttgccacccacttgtgttacacatagtacattaatgaggtgactgtgatctcatcctcctggcttgccttccttggctcagattccagagaagcagccgtcaggtcctccagatcctttgggctgagctgactgatgagcttaccatgggactcacagctccttgctgctccaacattttaagttctggataagctagtacccaaaaggagtcctttttactaccaataccaaatcctccaagagcttccctcactctcttagggcctctactgcccaaatgctggtccccagtgaatatgccttctcagtccccaactctatgccatctggtaggaatatagggagctggagrgatttatggctaagggatcctgcacacctgaattccatctgtcctgcagtaaacgatatacacagaaaaggatggtgggcaaagaggcacgttctatttagctgggctctggctcaagccccagtgtagagtcttgtgaactggagtagaccacatgcaacttggtgaacgtattttgcctagacgaggctgagctcttaggcttttgtctcaggctctggccctgcaaaagaaaaggcatcctgaagcctacagcatggccacacccttccccgttgggagtgaaatgagaggaagtggagggagcacgaggagctgctaaaatctagtcaactgcatctctgttttttatctttgacccattgttcaataggcttaacatccaggcccatcttctctgatctcttaggataaaaagtgcccaaagagtcagtgtcagcagaacatttttgcacgaactgactggtttaatgttttccactaagactgtaaaccccaagaagggttcagtgacccttcttgcccttgatggtgttcttgagggaagagcaaaggtagcaggaatgtggaactctgagctgcttatggccaacctaggggatgctttatgaagtgatggttgaat

SEQ ID NO: 63955 - DNA, 761 bp, Homo sapiens
catccattcccatcttaatccctacagtgacacttctagtcacccccaatcaaaaaatgtataattatttccagtcttcattcttcttgatgacattctatcataatttgcctgatgactgtccttttctggtttgatcccccacmctttcccctgctggtccctttccttgcaccctcttcattctgtgatctcgtatcccttttgccctgtaagggctcacttgttggctcaaattcatcccagactgaactgaactagacaatttacaaattttctgaatttataaattttctaacttagtaataagctgatgttgctggtggtcctgttctggccttgttaccctgggagtgggactaggtttctacctgtccatactttccagaggttgagtcctaaacacgctggaggaggctttgttcctcttaagatgacaggcagctcagattagttctctcctctgtcacattagaccaagcgcttaccacctgacctcctgattaagacaacagacttgttgctgaattatttggctctggggtcttcccttctctaaccccttagacactgttgccagcaaaattttcccaaagcacacgtctacaggaatgacattcaaaaaaaccaacaactggtatggcaacaactggtatgtgagccactgtgtctggcccataattttcttaataatactttattttctctagtttactttattgtaataatacagtatatgatctatataacatataaaatgt

SEQ ID NO: 63956 - DNA, 1041 bp, Homo sapiens
gatcccttatctccctaccatatggagtcaggcacatctctagrcagcagcacactgctggttccaccattgaggcagttgcttctagagcttcaagacaccattcacagttcacttttccttcctcaagcctgagtgagggactagccgtttttctctcttggttgcagggagcacttaaagctctgcctgtagttgccatgaagtccctgtcttcaaggtataccgccactctccagcaggtgcacctcctctgtcttaggtcagtctccctagaagcagagcttgaagtgaggattcttgtttaagtgacttactgaggaagtgttctcattagaagtggaatgaagaaaaggataaagtggggggaaaggtggtggggatcgggggtccagcacttgcagaccaagcaagaccccagctagagactagcttaagtctcatcccacagggaaaattctgcagcccaaagcacatcacaaacaccgtcctactttggggcaaggaattcagtttatttcctcctgctagtaggattaaggtttgcgggccaaggttgtctgacaatgtgcaattcgccagagaagggggtggctgagaattgtaggagacaaactctcaggagctggtgggtgggagagggtagggccacgggtcaaagtgctctgaagaggtatcagcaatatccactacacccaccccaccccagcctttctgtctatcttgatcttttggtgcagttcaaggacggtggaacagattcttgaagacatttcctcttaaatgttctaattgggagagggagtgcctgtctcactcactttggtatctgacatctatcatagcgtcccctccatttaaacagaggcaggaggagttccattctaacatcctctcattctgaagtgtgctcaggtttttcttttacactagtgaccataaagctcaatgccttaatcccacaggccagaacccagaaaagtgagtaatctcaattctcaaaacaatgtttagtggtttccctggtcgctatgatagatt

SEQ ID NO: 63957 - DNA, 1041 bp, Homo sapiens
gatcccttatctccctaccatatggagtcaggcacatctctagacagcagcacactgctggttccaccattgaggcagttgcttctagagcttcaagacaccattcacagttcacttttccttcctcaagcctgagtgagggactagccgtttttctctcttggttgcagggagcacttaaagctctgcctgtagttgccatgaagtccctgtcttcaaggtataccgccactctccagcaggtgcacctcctctgtcttaggtcagtctccctagaagcagagcttgaagtgaggattcttgtttaagtgacttactgaggaagtgttctcattagaagtggaatgaagaaaaggataaagtggggggaaaggtggtggggatcgggggtccagcacttgcagaccaagcaagaccccagctagagactagcttaagtctcatcccacagggaaaattctgcagcccaaagcacatcacaaacaccgtcctactttggggcaaggaattcagtttatttcctcctgctagtaggattaagktttgcgggccaaggttgtctgacaatgtgcaattcgccagagaagggggtggctgagaattgtaggagacaaactctcaggagctggtgggtgggagagggtagggccacgggtcaaagtgctctgaagaggtatcagcaatatccactacacccaccccaccccagcctttctgtctatcttgatcttttggtgcagttcaaggacggtggaacagattcttgaagacatttcctcttaaatgttctaattgggagagggagtgcctgtctcactcactttggtatctgacatctatcatagcgtcccctccatttaaacagaggcaggaggagttccattctaacatcctctcattctgaagtgtgctcaggtttttcttttacactagtgaccataaagctcaatgccttaatcccacaggccagaacccagaaaagtgagtaatctcaattctcaaaacaatgtttagtggtttccctggtcgctatgatagatt

SEQ ID NO: 63958 - DNA, 781 bp, Homo sapiens
tatgttagaaaaacaaaaaggaggctgggcatggtggctcatgcctctaatctcagcactttgggaggccaaggtgggcggatcacttgaggtctggagtttgagaccagcctgagcaacatggtgagaccccatctctacaaaaaaaatataaaaattagccaggtgtggtggtgcacacctgtggtcccagctacttgggaggctgaggtgggaraatcacttgaacctgggagggtgaggttgtggtgagctgagatcacaccactgcactccagcctgggtgacaggaaaagaaaaaggaaggaagagaaaaaagaaggaaagagcaaaagagacgaaagaatgaaatgaacttcaaacaattggactcaatattcacatttggtcccccaactctccccacacttgctagcaaaaatatgaagccacatctgtattgtcagaattaggcaatgcagtgtcttacccaaataactaaaaaatatcaggtttgccttaaattaccaaaatatgtacccaaatctcctttggtctatacagattttcctccttagtccacctgcctttcttttactggtaaatgcaacttttattggttgcatttatttgtaaattcagtttttctgagggctatgtaggagaagctgtaaccaatcttcaacccatttctcacagaaataagtaaacaataaatgataaggtatcaaaggctatcacactggtgccataagaaataatttaagtattgaaaagtatcttgaagaaaaattggtatgca

SEQ ID NO: 63959 - DNA, 781 bp, Homo sapiens
tatgttagaaaaacaaaaaggaggctgggcatggtggctcatgcctctaatctcagcactttgggaggccaaggtgggcggatcacttgaggtctggagtttgagaccagcctgagcaacatggtgagaccccatctctacaaaaaaaatataaaaattagccaggtgtggtggtgcacacctgtggtcccagctacttgggaggctgaggtgggagaatcacttgaacctgggagggtgaggttgyggtgagctgagatcacaccactgcactccagcctgggtgacaggaaaagaaaaaggaaggaagagaaaaaagaaggaaagagcaaaagagacgaaagaatgaaatgaacttcaaacaattggactcaatattcacatttggtcccccaactctccccacacttgctagcaaaaatatgaagccacatctgtattgtcagaattaggcaatgcagtgtcttacccaaataactaaaaaatatcaggtttgccttaaattaccaaaatatgtacccaaatctcctttggtctatacagattttcctccttagtccacctgcctttcttttactggtaaatgcaacttttattggttgcatttatttgtaaattcagtttttctgagggctatgtaggagaagctgtaaccaatcttcaacccatttctcacagaaataagtaaacaataaatgataaggtatcaaaggctatcacactggtgccataagaaataatttaagtattgaaaagtatcttgaagaaaaattggtatgca

SEQ ID NO: 63960 - DNA, 781 bp, Homo sapiens
tatgttagaaaaacaaaaaggaggctgggcatggtggctcatgcctctaatctcagcactttgggaggccaaggtgggcggatcacttgaggtctggagtttgagaccagcctgagcaacatggtgagaccccatctctacaaaaaaaatataaaaattagccaggtgtggtggtgcacacctgtggtcccagctacttgggaggctgaggtgggagaatcacttgaacctgggagggtgaggttgtrgtgagctgagatcacaccactgcactccagcctgggtgacaggaaaagaaaaaggaaggaagagaaaaaagaaggaaagagcaaaagagacgaaagaatgaaatgaacttcaaacaattggactcaatattcacatttggtcccccaactctccccacacttgctagcaaaaatatgaagccacatctgtattgtcagaattaggcaatgcagtgtcttacccaaataactaaaaaatatcaggtttgccttaaattaccaaaatatgtacccaaatctcctttggtctatacagattttcctccttagtccacctgcctttcttttactggtaaatgcaacttttattggttgcatttatttgtaaattcagtttttctgagggctatgtaggagaagctgtaaccaatcttcaacccatttctcacagaaataagtaaacaataaatgataaggtatcaaaggctatcacactggtgccataagaaataatttaagtattgaaaagtatcttgaagaaaaattggtatgca

SEQ ID NO: 63961 - DNA, 781 bp, Homo sapiens
tatgttagaaaaacaaaaaggaggctgggcatggtggctcatgcctctaatctcagcactttgggaggccaaggtgggcggatcacttgaggtctggagtttgagaccagcctgagcaacatggtgagaccccatctctacaaaaaaaatataaaaattagccaggtgtggtggtgcacacctgtggtcccagctacttgggaggctgaggtgggagaatcacttgaacctgggagggtgaggttgtggtgagctgagatcayaccactgcactccagcctgggtgacaggaaaagaaaaaggaaggaagagaaaaaagaaggaaagagcaaaagagacgaaagaatgaaatgaacttcaaacaattggactcaatattcacatttggtcccccaactctccccacacttgctagcaaaaatatgaagccacatctgtattgtcagaattaggcaatgcagtgtcttacccaaataactaaaaaatatcaggtttgccttaaattaccaaaatatgtacccaaatctcctttggtctatacagattttcctccttagtccacctgcctttcttttactggtaaatgcaacttttattggttgcatttatttgtaaattcagtttttctgagggctatgtaggagaagctgtaaccaatcttcaacccatttctcacagaaataagtaaacaataaatgataaggtatcaaaggctatcacactggtgccataagaaataatttaagtattgaaaagtatcttgaagaaaaattggtatgca

SEQ ID NO: 63962 - DNA, 781 bp, Homo sapiens
tatgttagaaaaacaaaaaggaggctgggcatggtggctcatgcctctaatctcagcactttgggaggccaaggtgggcggatcacttgaggtctggagtttgagaccagcctgagcaacatggtgagaccccatctctacaaaaaaaatataaaaattagccaggtgtggtggtgcacacctgtggtcccagctacttgggaggctgaggtgggagaatcacttgaacctgggagggtgaggttgtggtgagctgagatcacrccactgcactccagcctgggtgacaggaaaagaaaaaggaaggaagagaaaaaagaaggaaagagcaaaagagacgaaagaatgaaatgaacttcaaacaattggactcaatattcacatttggtcccccaactctccccacacttgctagcaaaaatatgaagccacatctgtattgtcagaattaggcaatgcagtgtcttacccaaataactaaaaaatatcaggtttgccttaaattaccaaaatatgtacccaaatctcctttggtctatacagattttcctccttagtccacctgcctttcttttactggtaaatgcaacttttattggttgcatttatttgtaaattcagtttttctgagggctatgtaggagaagctgtaaccaatcttcaacccatttctcacagaaataagtaaacaataaatgataaggtatcaaaggctatcacactggtgccataagaaataatttaagtattgaaaagtatcttgaagaaaaattggtatgca

SEQ ID NO: 63963 - DNA, 524 bp, Homo sapiens
atacaatagctaatccatgaagcttttcttgagagtgctgttgagaaaataactttttcctttgctttcatggcagtgggaaaatatttgtctttaaaatatttgccagtcctaatgcttaaatatttcttgtatccatccgctgctctccattcctatcacagcttctatagttaagattttcagcatttccctccaggcattaatttagtagcctcctggtatgtctcccggattctaatcttccccctctagcttatcatctatatctatgccagaaatactttcccaaaacacaaatcttgttatagtactgcatttctctagttcttccctgtctcttaaatttagtctcctcctaacccaacatttgcaccctataatctaaccgaccatactgagatctttgcagtttctctaacacaacatgctgtttcgaatcatatttctcttataccttgttacattgtgtgtcccctcctttcatttttcctgttttatctatgctgwtttagaggaaactc

SEQ ID NO: 63964 - DNA, 1100 bp, Homo sapiens
tgcatttttggagaaaagacacttttgtatctccatgtatccaccaaggtacctggtttgtggaaagtatttaatttatatttgttgaattgtagtcctatggcttatacttataaaacattttcatcagccagtctgtgatttctgtgaaggcaaaagcccgtattcttttttttttttttttttgagacagagtctcactctatcgcccaggcctggagtgcagtggcgtgatctcagctcactgtaacctccactcccgggtcaagtgattctcgtgcctcagtctcccaagtagctgggattacagtgcacaccaccacgccagctaattgtctctactaaaagtagagacagggtttcaccatgttggcaaaagtcctgttctattcatcctggtttcttcagggccaggaacagtgtttatgacttaaccaaagttaattgaaacattattttgaggaacatttcaagagaacttaagaatagggtagtattaaagatcaatagatagatactaagacatatataatatacatctagtatagaattttaatttgtcaaagacttatttgtacaaaactatgctagatattaagaaaagaaaggaagtcaaaatgggtaactggaagatgttaatttggcatttggaaggtatatgaagttctctatagattattttgaaagaaatatgaagcatctttgccataactctgagcagaatagtgcttagcatctacacccragggtgttatcttagaacacggtactatattttttgtgaacttcatgataggctaaattaaaagaggttagagggaaaaaaggaaccccatcacctcaacataatagaacgtatatctgagttcccttccctgccctccccttcgctcatcttccttgctccctcccccttaactttcttttttcccccactctccatactatatttaaggtcacttattttttatttttatttttagagatgggagtcactctgtcacccacgctggagtgcagcagtgccatcatagctcactgcagtcttgaactcctgggctcaagtgatcctcccacctcggcctcccaagtagctggga

SEQ ID NO: 63965 - DNA, 785 bp, Homo sapiens
ctacctagctggctggttgatgtgtaagcaatgatatatgatggttatgttaagctattgaattttgggaatgattggttatgtatcatttgtaaactgatacagtgatattactgaatcatgttatgtagaaacctgtttatgaagaaaaatgtttttttgttcttagaagataccagctgatgaataggtgtgaaatattacgaaatatgcactttcttttaaatggtatagcaaaaataaagtgtgtgtggtcttgtgtgtgtgcatatatatatatatggagagaaagagagagagagagattgagaatacagatatgatgaactgttatattgtgtttgttgaaaaggacatatttattgtactatttaaacttttttgtagctttgaatcttttcaaaataaaatgtttggagcatttcttaatattggcttacttggacatcatctccccaacctcaccttttttttcctttaaaagctgaatttgagatagagaaaaaaaagggtcataaagattatagtttgttgcactctatgtaatcaagtttgtttatttggagatggagtctcgctctgtcgcccaggctggagtgcagtggcatgatctcagctcactacaacctccgcctcctgggttcaggygattctgccacctcagcctcctgagtagctgggattacaggtgcccactgccacacctggctaatcttttttgtatttttaatggagacggggtttcaccatgttggccagtctggtctcgaactcctgacgtcaag

SEQ ID NO: 63966 - DNA, 541 bp, Homo sapiens
acctgaagtctgaaagtttccttctcccttcacccttcatcttcacctttaacatctacaagtgaatgtcataaatatgtgttgtgtgcccaccagtgtcagggcccaggtcaggacccagggaagcaggaggacatggctgccttcctggagcagacacgtaattagagacctgcaaggatgtgatgatggaggagagaataggctactgggaggacagaggagggctgggcagagggtggatgtcaaggaaagcttcctgaaagaggctgatgctaagctggagttagaaaggcacttaggaattagccaggaggagggtaagaatgagcgatggagtatttcaggcaaagtagccaacgtatgtggatgaaaggattctcagaagggttcgtgttcacatgtctctgccactgcactgtgtcctccactaggctgtaagagtcttcagaataacaatgcttccttgtccgttyatggagagatagcatagcttaggccagggatggacaaaccatggtctatggaacagatccagcct

SEQ ID NO: 63967 - DNA, 618 bp, Homo sapiens
gggatcctcttctcactgagcttgttttatcatctccctgaaacagcagatctgtgttgagtgcttgctttgaaccaggaattctactggggctgggagatatgatggttttggtggaaatgaagcagaggtgctgtcacaccagaaatagcctccaaaactctgctcacagtgaggtcctcctgcccattgcaccatgcaaacaaagcttacataactctcatttgagcaatcaagaatcttgcttcaaattgcaggtttcacaactgcatagttgatttctagccgcctgcattgcatttggtctgactgtcagaggctggagaagaaaccaggtcaactccaagaatttgagaaaacaataatcatttcttgagaactcattaaatgggccacgtcctgagatttgaagccaagtctgttgatggaatagagggagggtaaaaattaggaatgtcttcacagaggaactttgagatgaggttttaaaggatgaatagggaagygcaggaaagcagggggaggaataattcctctaagcagagggaaaacatgtttaaaggtggagcggcatgaaactgtacgatgaattcatgaaactatggtagtttggcctga

SEQ ID NO: 63968 - DNA, 618 bp, Homo sapiens
gggatcctcttctcactgagcttgttttatcatctccctgaaacagcagatctgtgttgagtgcttgctttgaaccaggaattctactggggctgggagatatgatggttttggtggaaatgaagcagaggtgctgtcacaccagaaatagcctccaaaactctgctcacagtgaggtcctcctgcccattgcaccatgcaaacaaagcttacataactctcatttgagcaatcaagaatcttgcttcaaattgcaggtttcacaactgcatagttgatttctagccgcctgcattgcatttggtctgactgtcagaggctggagaagaaaccaggtcaactccaagaatttgagaaaacaataatcatttcttgagaactcattaaatgggccacgtcctgagatttgaagccaagtctgttgatggaatagagggagggtaaaaattaggaatgtcttcacagaggaactttgagatgaggttttaaaggatgaatagggaagcgcaggaaagcagggggaggaataattcctctaagcagagggaaaacatgttyaaaggtggagcggcatgaaactgtacgatgaattcatgaaactatggtagtttggcctga

SEQ ID NO: 63969 - DNA, 1073 bp, Homo sapiens
gcatctattaacagaatgcagtacaagaaatgctatgtaacttctgacgctaagtctcaaaggatttgcagtgttttccttcattgcttgaaatactttcttttggaacccagttgccatatacttagaagtctaagccaagttgagaagccatgcgtagaaggaacaaaatacaagccaatgctaactgccagtcatgtgcatgaattatattggatgatggagcccagtcagatctgccctcagctgagataaagagtaaatagagtaaaacaatccagatgagcctgtcaaaccttatgaaatatggtacattttttgggccactaagatttgttatacaataatatataactgacacacacacaaaactgacacacacaccctcccacattaaatcagtgataaaatacaatttgttttcatatggcattagattgaaaatatttgttgtctttctaaaataatgattcttaaacttgttaaatcattaggaaatgccaattgctccttatgaatcaagactatgccttctcacctttaaatccatactgcatggactagtagtagactgagtcacatgtaaatatttatttaataaaagattcttttcaagaaatacacatttataatgtcaaaagtaagtgaggtataaagaatgaaaactttttgataagcagtgtaaaaatctcaataaaagatttattcttttggaaattattttgagcgttttaaggtgaatgacatttacggatagaatgttttccttcaataaaaaaaaggaaggaataaaaaagaaagccacttttggtaatctctcattttgttagtcatattaaattgacatttgatttctggctatttttcaaaacatatttcctgtactgtttgtagagttctkcaagtttaaagttcagagccaaatttgtattgcatatatttttactacattgtaaagaacaagacttttgactacagacattttttagatccccctcatgtgattactttgtgaatttaatagtctatacaatttaaatctcccctttctaattctaaaaggtgatatggag

SEQ ID NO: 63970 - DNA, 520 bp, Homo sapiens
atatgtcctaattctgaaagatggagatcaggtggcccatttataagcaggtttgcctcaagaggtatttcttaattgaaacgtaggtctgagtcaaggaaagttctttctgaagagatctcagaggcagttaaggtatccatgtttataaaatctaaattaatggggcataaatctattccaatacagttttccttttacattaactggattctttagtgtactgagtaattcaatgtatataggcatatttacacaaagttctttcygtgagtcttttccataaacagaaaatttccgtcttcattgaacagcagaggtctagtggaattgtaagtcattgatgtctcttactagtggtcccatcactcatactatcatttctgtacattatccctggattcctctttgttccagctgactgttccatcgttaagaccataggaagattcacagggcaaagaaagaaaatatccaagctttctgtcatttccatgtgttgtaatagattcacctaaag

SEQ ID NO: 63971 - DNA, 520 bp, Homo sapiens
atatgtcctaattctgaaagatggagatcaggtggcccatttataagcaggtttgcctcaagaggtatttcttaattgaaacgtaggtctgagtcaaggaaagttctttctgaagagatctcagaggcagttaaggtatccatgtttataaaatctaaattaatggggcataaatctattccaatacagttttccttttacattaactggattctttagtgtactgagtaattcaatgtatataggcatatttacacaaagttctttccgtgagtcttttccataaacagaaaawttccgtcttcattgaacagcagaggtctagtggaattgtaagtcattgatgtctcttactagtggtcccatcactcatactatcatttctgtacattatccctggattcctctttgttccagctgactgttccatcgttaagaccataggaagattcacagggcaaagaaagaaaatatccaagctttctgtcatttccatgtgttgtaatagattcacctaaag

SEQ ID NO: 63972 - DNA, 933 bp, Homo sapiens
agttttagacaccacagtaaaaaagtgggtatattatatgctgtttttactttttactcccatcattgttgtattatttaaatttttcaatacaaatttttatgatttaaaaattaaattgatttaaaatatgggctttcctgaaaagtaaatactttcatccgtaggcaacaaataaaattcaattccttctgaacagcctgtcataaaatattattggccttcaagaccctacagtatgcctcactagtctattgaatctagtttatgtctggatgcttagaagaataccaaaaaattagtaagttaaaaaaaaagttaaatatattaatacagtctactgagaaggacaaagttaaggaaaaactagttaaatatggagttgatggttatagcatgttcctcacataacaattaacaatatctacatagcactctcaaattccagaaacatccccagccactgcatttatccaacacccttctcaataaccagttacaaataatcaaataaccatcggtcttgatttaggtatttggaggcggagctagaatttacaactttttcttcccaccttatgaaatatctttgcaatacctgttttttaaagatcaaatgaacacagttctggagcctagacgagtagctgtctaaccttactctgcgtaatagggctaaaatttcaactctatttctctgctgatrctctatgggatttggagcccccaaagcctgattttattcctaattaacagtaatgaacagatgacatacttttcctttgaacacctctgtcgggaaaatgtccaatcagcaagagctacaagcaatagacaaattccctttctctgacttcatttacatgcttaagtacacagagactccccctgcctttagtttggggtgcggggggaaagaagtaggtcaagaca

SEQ ID NO: 63973 - DNA, 704 bp, Homo sapiens
  misc_feature (1)...(704): n = A,T,C or G
annnnnnnnnnnnnnnnnnnnnnnnnnnnnnnnnnnnnnnnnnnnnnnnnnnnnnnnnnnnnnnnnnnnnnnnnnnnnnnnnnnnnnnnnnnnnnnnnnnnagactgtagttattcaccatccttgattaatagatactgatgagataattctagacatattagaatatgtactatagttttggagctctattcaaagtcgacttcatcagaaaaaaattcctgacctaaatcttcccatagaartatcactctcttcttgatttattttttgtagcatttacccatatataatgttgttatatactttaacttatttcttgatatatattattagtgtctacagccatctatgttccattctctctttctaaggaagtgactcccaagaaagccccaagaactccatcagaattctgtggcatgccctaacaagttgcttatgtagtgctcaagcactgcctgcctctatcaaaacttaaaattatatgatcaggaaatggagggtggtttaattttaccattgtttgtttttgtttatttttagctggtgataaatgaagtagctgaaattgcaacatatgtatttggcttacctatgacacaaatctgatagaagcattttctagtgactagatgagaggatgtgacaaaaaatcagatggactgtctgagatcccctacttccaaaacatacctcaggtt

SEQ ID NO: 63974 - DNA, 813 bp, Homo sapiens
cttgggtttagctttctgggctgctgtcagtgcccatgggctgtggatgctgaattgatggccgggggacttgtcaatcagtctaccatggcaggcaaggaagccctgtagcagagtctgaccaaagatgcagcagacgctcaggggtctgcagataggcagagtcaaggagaggccacttcatcccatgagtgtttcttggcctagagcaacccagaagagaccaagtcatggcttaaatcggctagactttggggccagcaggacccatagcaataggaacatcactctggtgacaggggacaacagcttgcacaccttcaaggactgtgtaaggccagggagtctctttgccctgtgatgtgagaaggagtaagatcccctctcctccaaaaatgggagtctaccctagggagagatgcagaagraggcaggaagtgggctatctaagggatttggcattttttccctaaagtatctgcagactagctaaagggatgcatagatacacacaatgaattgaatgagtttaaaccgatgggaaagttagttaaaggtgttcttgctcaccagcaggcagaggcttgggagaaatgctggattggaaacttagttaaaggtgttcttgccaaccagtgggtagaggcttgggagaaatgctgggtcagagttctgctgaagggtttgtcaaaaaaggcagaaaacatgccagaaaagatgcagaaaagatatgactatcttcaaaacatgttgagacattcttgccctttgcccacttccagtagccctgagaatgacttcctttttattttt

SEQ ID NO: 63975 - DNA, 1098 bp, Homo sapiens
ctgtgaagtacctggcaaatattaggtacttaataaagatgagttgaattggaatctaataaaaataagttaaaaaaaaaaaacaaaactaacccatgctgtataacagttgtggcttccttacctgtggtgattagttttatttgtgaactcggctaggctataatatccacttatttagtcaaacacttatcttggtgttgctatgatggtatttagtaaatgtggttaatatctgtaatcagttgactttaggtaaaggagattactctcaataacatgaatggcctcatccaatcatttaaaaggcattaagtgcaaaagctaaggtttccaggataagaaattctgccttaagtttgcagcatcagctcctgcctgagtttctagggtgtgggaggtggggacgggggcagttaaagctttattttgggaggtctacttgattccttactttggtggactttccatttctccttttctccctcccttctttcttctttgatttgtttttaaattcaggatttttagatgttttctgtgggaggttcaattagattatctatatgtcacatatccttaagctgatgcttttgcacatgctgttggcttgtcgtttgtcatttgtaactgcattctctgagtcagtggatatctctttaaatcttgactgattactttttagagaattaggtgctttttttgtttccctttgaggactttytattgactaaagcataaagaccaaattttaacatggcatgaaaagcacttcttttttttttttttttttttttttttagatggaatctcactctgttgccaggctggagtgcagtggtgagatcttggctcagtgcaacctccacctcctgggttcaagtgattcttgtgcctcagcctccctagtagctgggattacaggcgcaggccactacaccgggctaattttcgtatttttagtagagatggggtttcactatgttggccagactggtctcgatctccttacctcgtgatccatccacctcagcctcccaaagtgctgggattacataaaggcgtgagccaccgcgcccggccaacatttcatttttt

SEQ ID NO: 63976 - DNA, 1098 bp, Homo sapiens
ctgtgaagtacctggcaaatattaggtacttaataaagatgagttgaattggaatctaataaaaataagttaaaaaaaaaaaacaaaactaacccatgctgtataacagttgtggcttccttacctgtggtgattagttttatttgtgaactcggctaggctataatatccacttatttagtcaaacacttatcttggtgttgctatgatggtatttagtaaatgtggttaatatctgtaatcagttgactttaggtaaaggagattactctcaataacatgaatggcctcatccaatcatttaaaaggcattaagtgcaaaagctaaggtttccaggataagaaattctgccttaagtttgcagcatcagctcctgcctgagtttctagggtgtgggaggtggggacgggggcagttaaagctttattttgggaggtctacttgattccttactttggtggactttccatttctccttttctccctcccttctttcttctttgatttgtttttaaattcaggatttttagatgttttctgtgggaggttcaattagattatctatatgtcacatatccttaagctgatgcttttgcacatgctgttggcttgtcgtttgtcatttgtaactgcattctctgagtcagtggatatctctttaaatcttgactgattactttttagagaattaggtgctttttttgtttccctttgaggactttttattgactaaagcataaagaccaaattttaacatggcatgaaaagcacttcttttttttttttttttttttttttttagatggaatctcactctgttgccaggctggagtgcagtggtgagatcttggctcagtgcaacctccacctcctgggttcaagtgattcttgtgcctcagcctccctagtagctgggattacaggcgcaggccactacaccgggctaattttcgtatttttagtagagatggggtttcactatgttggccagactggtctcgatctccttacctcgtgatccatccacctcagcctcccaaagtgctgggattacrtaaaggcgtgagccaccgcgcccggccaacatttcatttttt

SEQ ID NO: 63977 - DNA, 590 bp, Homo sapiens
  misc_feature (1)...(590): n = A,T,C or G
cacacacacacacagagggaaagaagcacacagagggtgagagacagagagagaagggagaatgggagacacagccccacacacagtcctaccgcggtggccgagcaatgcacgcccccaggcaacccctgcggctgccgggttctgctctggaggggaacaaccctcggctgagagaacagccctcggcnacgcaggcggacctgtcctcgagatcacgggggcacgacttctcgggagactcacccgaacaccgtcctggcatgcctgaggctgggatgccacgctgcttcccccggactccgcctgtggtttcctcatcctgctcggcccyttgcgactcctggcagccggagacgttcctgtggaccccgtggagaggtcaggccggagcctcggaggcccgacacccaagcgctgccacggagggctcccgcgttgccaagcctcggggactggttcctaagacaaccgtgggaagcactgtgaagcaaaaagcggcgcgcgccnntcgcatgcgctttggctgggccgactcgcgcttggctcctggcagtcaggcaggctgcgtcccctttaaatacgggcgg

SEQ ID NO: 63978 - DNA, 590 bp, Homo sapiens
  misc_feature (1)...(590): n = A,T,C or G
cacacacacacacagagggaaagaagcacacagagggtgagagacagagagagaagggagaatgggagacacagccccacacacagtcctaccgcggtggccgagcaatgcacgcccccaggcaacccctgcggctgccgggttctgctctggaggggaacaaccctcggctgagagaacagccctcggcnacgcaggcggacctgtcctcgagatcacgggggcacgacttctcgggagactcacccgaacaccgtcctggcatgcctgaggctgggatgccacgctgcttcccccggactccgcctgtggtttcctcatcctgctcggccccttgygactcctggcagccggagacgttcctgtggaccccgtggagaggtcaggccggagcctcggaggcccgacacccaagcgctgccacggagggctcccgcgttgccaagcctcggggactggttcctaagacaaccgtgggaagcactgtgaagcaaaaagcggcgcgcgccnntcgcatgcgctttggctgggccgactcgcgcttggctcctggcagtcaggcaggctgcgtcccctttaaatacgggcgg

SEQ ID NO: 63979 - DNA, 589 bp, Homo sapiens
ccagagactttccagatatctgaagaagtcctgatgtcactgccccggtccttccccaggtagagcaacactcctcgccgcaacccaactggctccccttaccttctacacacacacacacacacacacacacacacacacacacacacacaaatccaagacaacactactaaggcttctttgggarggggaagtagggataggtaagaggaaagtaagggacctcctatccagcctccatggaatcctgacttcttttccttgttatttcaacttcttccaccccatcttttaaactttagactccagccacagaagcttacaactaaaagaaactctaaggccaatttaatccaaggtttcattctatgtgctggagatggtgtacagtagggtgaggaaaccaaattctcagttggcactggtgtacccttgtacaggtgatgtaatatctctgtgcctcagtttgctcactataaaatagagacggtaggggtcatggtgagcactacctgactagcatataagaagctttcagcaagtgcagactactcttacccacttcccccaagcacagttggggtggggg

SEQ ID NO: 63980 - DNA, 984 bp, Homo sapiens
tccgccaatctctcactcacctttggctcctgcccttagggttacctgggttgccaagccttgtctgagatgatccagttttacctggaggaggtgatgccccaagctgagaaccaagacccagacatcaaggcgcatgtgaactccctgggggagaacctgaagaccctcaggctgaggctacggcgctgtgtaagtagcagatcagttytttcccttgcagctgcccccaaaataccatctcctacagaccagcagggacactcacatccacagacacagcaaagacacagactggcagagctagctgtaaatgaggaaagactcctggagtcagatctcttgctcatttctctttgagcaggcgttgggggtggctgctaggcatttacatgtgaaatttgcaaacagctttcctgttatttgtgagtcatttgtgggttattaactactcccctctctcttcataaaaggagcccagagcttcagtcaggcctccactgcctctttgtaactagaccctgggcggggagctaaggttcccaagcagaggaaacatcattcacctcttttaatctcaatgttttgaaagcaaagctctaagaagggcccaattgactgacaggatttcccctggcattttagaagggacaagggggctattcatccccaggctagtgtctatgagtaattcctccaggtaatttatttctccaactgaaatgatgccctcactactaatggtttcccctgttctgtcaccaatattggaaaatcagttggtgtctatttgtaggacaaggctatgtgaagggtttggtcccagtagcttccctcctcagatgcttagaagtgttcctcggtggctgtgactgacggggaggaacaggagagagaggcagaaaaggacaggctgaagaatgcctcgctcagcactgcaggagatactgtagagttctgggggaggaaggaatccaagacctg

SEQ ID NO: 63981 - DNA, 597 bp, Homo sapiens
cgactgtcacaatacagcagtgctcatgttcaagtcacccttatttcacttagtaacagccccacagcacaagagtagtgacgctggcatattgttataattgttctatttcactatttgttattcttgttaatctctttgtgtttaaacttcatcacagatatgtatgtataggaaaagaaaagacatcggatacatggggtttggtactatttgcagttttaggcatctactgggcatgatccactgatcaatggtcttggaacgtgtctgccatggataaggggagtctactgtattgattctgattaatgcctgagaatgggatgttatttcattcacacggaagsctttttcctttcttccattctttcttcctttttaaaaaaatctccttcagaaaaaaaagcaaccctggatatatgagacagggggcagggtgacacaggggaaataaaccacagtcctttacctggatctactcagaagactctgtagctactatttccccaacatgtaccatgccatgtatttatttgaatactcatgtccttgtgactcaaagttgatgttctacaggtcgtgggaggtccagga

SEQ ID NO: 63982 - DNA, 1071 bp, Homo sapiens
ttgtggcatgtatatctgggagaagcacttaaaaatgggtccactgaacatacgaaaagttacaaactgtatttgtaatattggaaatataaattaactcataataagttcttattctgtgttgtaattaaatacacccataataccatgtatgagtaaatatttgatgtgaagataaatatcatattccatttgtcagagtttaaatgggtataatgattttggaaaatagttttacattatccactaaagttgagagtacacatgccttctgatcctgggtgagggagtgattggaaggggcataaatgaagtactagaaatattctgtttattgataatagttggtggttacaaaggcattccttctgtctcaatgcaccaacatacatttatgtttgtttaatktctgaatgtgttatacttaaaaaaatttaaatataacaatatcatgccttgtaagatcattttccagagttatgtcacttacttgagttcccagattatattttaatctgggaacttctaatttttggacagatgagttggacagatggatcagaagttctgcagctgaggttttctatacatcagggttctctttgtaacaattaatgaaggatttcaaaatactagcaatgctttaaaaaaacttattagtaattatatttaaacatttttatactacatagtctaacataaaaatatttcatttattcttgcctgatgtaatattagctcagtttatatatactgcacttaattatttgtttcagaattttttgacaaaaatctgaaaaaattattaatgcactgtttggtaggcagtattctcttagaagtgactttcatagatgaaaataatgaaaggtgttcttaatggcaaaagactgcaaattttggaactgggtgatctctatagtttctatagtgctaaaaattctcagttacttcttaggatagggatggtgggaagtgaagcaaagaaatgtattgtgatgttatagagaaataatagaaaaactgctttcaagacacctattacaaaatgaagccaaagaaaaatcatca

SEQ ID NO: 63983 - DNA, 687 bp, Homo sapiens
taactgtytttatgatatttattttaatattaattaggttgaaagctattatttaaaactaacaaaaactcaaaaatattataagtaacatttatcaataagctcaataagccattttacatcaccttctatgtgaaacatactgtactaggtacaaccctttaacataaatccttaagaaatattaatagttccatccttgaataagtttgcagtgtggtgtgttatatgcgccaaaacaacaacagcaataacataaaaatgacagtatcattatgacaagtataatgaatgggaaatctccagcttttttctcatgtgttcttaatattaccctgaaattttcaaaatattacagactgttaaggatctgcatgttgttttttgcctacattgtttgttgatgcttgttgacacaaaaataatgatgaataatattaaaactcaatctcttattaagataaatttgcaaagtaagacaagttgtttataaggtgagaaaaataacattttacccagaaacctccagtgagctataattgaaaaaggaattaaagctcaggccaggcacagtggctcatgcctgtaatcccagcacttgggaggccgaggttggtggatcacctgaggtcaggagttcgagaccagcctggtcaacatgtgaaccccatctctactaaaaataga

SEQ ID NO: 63984 - DNA, 1071 bp, Homo sapiens
gctgaatcaaaatagcaaaatagtttgttatccaactaaacaattggttactacttcaaaataaagcatttttcatacaggtggaattatctacttggcccccctacctcatcagatctccccatcattcatgccatgtcatcatgaatttcttgctgttctcaacttgatttcaacatggattttctctttttcatgaattttggctctgtctgaccttaaacctaagctttctctgtatttcttactccctccaaccatgcccttttttgcatccccaattgccttcactgataaaatgcaaatgttaacctctgataaattgccaaatttccaaatgataaaataccagtatctttcctactttcttcatggatggatatttttgtgaggattctttttactgtgatgtaaaatatagttgtgaacttctagaagcagttgactactaacagatatcaatacctattttaaaagtcccacagtttaatttactagattttcttttttgcttctttagattcagagaaattcaatacacagtttctgaaaacccatttccactcagaactaatcactcttctaccatcctctcatgcaatctccacattttgctgcagtggaattattatcagctcctttatagagaggaagaaactgagacacttaaatatttaataacaaggcagtyctcattcagctagtaagagatgaagccaggattcacaccaagagagtctaaatatggagctcatgtttttatccattaagatatagggagaataaaaaatgttttagattaaaaaaagagaagttgatctaataaagcaatttaatcaattcacatttcattaacaaaaagtcaagaactatggaattttacttaccagaaaatgaatagaaatatttcctttaaaacaggtaaacctttcccagctcataaataatcaagcctatcccttttctatgaagctgtgatttggtctcataatccatctcaacatgatgttccacatagttatgatcactagattgtcatcagtattcaagatgacatcaaattgttacctc

SEQ ID NO: 63985 - DNA, 809 bp, Homo sapiens
tcccacctccgcctcccaaagtgctggtattacaagtgtgagccatcacgcccaaccagcttcatttgagaaacctttcccaagcactccatatattactaattattcctttcttcatttttatataggattttcttcatatctctattacctcacttgtcacatgataatcagttactcacccatctgtctcccttgattgctcgtgggctccttgagcaatgtgcgaccttgaacagtgtgtgacacatacatgcttcctacacagagaaggaaatgatttcgctacagtgtcaatcattaccagaattcaatacctgtatttctaaatcgttctagatactctgccaacaacttgagaatgttacgctctttccctaaaacttccatccattccagccatagttaactcaattgtgacatgctctctggccaagcccatttgtagttttttctttaggtgatttttaattttaatttttgattttgattgtttgctttttggtattttttaatctaggagtgtttggtaaacttcaccatgtctatatstctgtgtctttgcacctggtggtctctgcttggaatgatgtctcaaggttttattcacctggaaagaattcctactcacccttaaagactcagcttaaataaccccttctctggtaaacctttacattctcccattctttcagtaagagttgagaattcctctactcttgaaatgtttgtgcctctattactatgtatcaggcagtgaactaagcgtctaggatagaaagatgaaacggtagaacctgccctcatgg

SEQ ID NO: 63986 - DNA, 1470 bp, Homo sapiens
tcaatccacattcttagattttcacagcctccatctcaaaaactggccattattagcaaaataatttgtgagttctcctcttctcctagctgatatttggtccaaagttccatgtcttcctagcttactcctgagttaaatttctgcaatttttcattagagagaacctgagggaactctccaagaaagaaacattctatcttctcttgcttgttctccatttccccttagtttgttaacaaaaagaaaaaaaaagaagggttaaaagttgcttaagtggcatttatgtgtaattttgttatgagatccttgcatgttgctttgccagccagaaacctctgtggccagtggacctctgcctgagttttgctctggctcactgggctcctttcgcccaccaggcctggccggctgcatttggctcatgctactgtcctggatcccgtgcctgccaagggccagccatgcatgtggcagcaaggggtgtgtgagagagcatggggtgcagccactgtgcacaaccaggcatgccagctgtggtggggtgggcagctccatgctggcacaggcactagctccctgtgatactgtggctggaccaggcataccataagcagcttccacagctgacaccagggaatgtggggaatgcagttttgcccagaatctcggagacaccaggaactgcagccccctaaagagggtgtcacaaccctggctcagggacctcctaggttggggtccctgaagggctgcagctcttctctccttcattcttctctccttcttgttgactgtaatatggagggcaaggggtgtgttccagccccaattatgttaaagctcttttagccccacctttcagtggttcccaagttcttgtcctgtgaccaggaagaatgaggtacacagacaagttgacggtgagcaagatgaagaggagctttatggagcaatagaacagcttggaggagacccgtagagggtagctcctctccatagccagggtgtcctgatgagtgttaacctcttagcaaagagtgtagctcctttctcagtaagatcacttttgtagatataagagtaaataatgtaaaataaatatcagcttatttttaaaacaaagaataattaagtaaactattttatctccaacttttttactatttaattcctcaaaagcagagttcatcctatcagctacacagtgcaattgatccacataaacacaaatttatttccctgacaagctagaaacatctgtttaaaagaacattatatttaggtaaattaagacttggaattttggartagacaaaagaataaaactaaaacactgggttattcataccttcttccaccagtatatcctttatttcaacctccactattgtagttaaagcatgtagaatgactttctgaatcacatttgctaatccaaacaataaaaaaattaatttaattgttttt

SEQ ID NO: 63987 - DNA, 1470 bp, Homo sapiens
tcaatccacattcttagattttcacagcctccatctcaaaaactggccattattagcaaaataatttgtgagttctcctcttctcctagctgatatttggtccaaagttccatgtcttcctagcttactcctgagttaaatttctgcaatttttcattagagagaacctgagggaactctccaagaaagaaacattctatcttctcttgcttgttctccatttccccttagtttgttaacaaaaagaaaaaaaaagaagggttaaaagttgcttaagtggcatttatgtgtaattttgttatgagatccttgcatgttgctttgccagccagaaacctctgtggccagtggacctctgcctgagttttgctctggctcactgggctcctttcgcccaccaggcctggccggctgcatttggctcatgctactgtcctggatcccgtgcctgccaagggccagccatgcatgtggcagcaaggggtgtgtgagagagcatggggtgcagccactgtgcacaaccaggcatgccagctgtggtggggtgggcagctccatgctggcacaggcactagctccctgtgatactgtggctggaccaggcataccataagcagcttccacagctgacaccagggaatgtggggaatgcagttttgcccagaatctcggagacaccaggaactgcagccccctaaagagggtgtcacaaccctggctcagggacctcctaggttggggtccctgaagggctgcagctcttctctccttcattcttctctccttcttgttgactgtaatatggagggcaaggggtgtgttccagccccaattatgttaaagctcttttagccccacctttcagtggttcccaagttcttgtcctgtgaccaggaagaatgaggtacacagacaagttgacggtgagcaagatgaagaggagctttatggagcaatagaacagcttggaggagacccgtagagggtagctcctctccatagccagggtgtcctgatgagtgttaacctcttagcaaagagtgtagctcctttctcagtaagatcacttttgtagatataagagtaaataatgtaaaataaatatcagcttatttttaaaacaaagaataattaagtaaactattttatctccaacttttttactatttaattcctcaaaagcagagttcatcctatcagctacacagtgcaattgatccacataaacacaaatttatttccctgacaagctagaaacatctgtttaaaagaacattatatttaggtaaattaagacttggaattttggagtagacaaaagaataaaactaaaacactgggttattcataccttcttycaccagtatatcctttatttcaacctccactattgtagttaaagcatgtagaatgactttctgaatcacatttgctaatccaaacaataaaaaaattaatttaattgttttt

SEQ ID NO: 63988 - DNA, 1470 bp, Homo sapiens
tcaatccacattcttagattttcacagcctccatctcaaaaactggccattattagcaaaataatttgtgagttctcctcttctcctagctgatatttggtccaaagttccatgtcttcctagcttactcctgagttaaatttctgcaatttttcattagagagaacctgagggaactctccaagaaagaaacattctatcttctcttgcttgttctccatttccccttagtttgttaacaaaaagaaaaaaaaagaagggttaaaagttgcttaagtggcatttatgtgtaattttgttatgagatccttgcatgttgctttgccagccagaaacctctgtggccagtggacctctgcctgagttttgctctggctcactgggctcctttcgcccaccaggcctggccggctgcatttggctcatgctactgtcctggatcccgtgcctgccaagggccagccatgcatgtggcagcaaggggtgtgtgagagagcatggggtgcagccactgtgcacaaccaggcatgccagctgtggtggggtgggcagctccatgctggcacaggcactagctccctgtgatactgtggctggaccaggcataccataagcagcttccacagctgacaccagggaatgtggggaatgcagttttgcccagaatctcggagacaccaggaactgcagccccctaaagagggtgtcacaaccctggctcagggacctcctaggttggggtccctgaagggctgcagctcttctctccttcattcttctctccttcttgttgactgtaatatggagggcaaggggtgtgttccagccccaattatgttaaagctcttttagccccacctttcagtggttcccaagttcttgtcctgtgaccaggaagaatgaggtacacagacaagttgacggtgagcaagatgaagaggagctttatggagcaatagaacagcttggaggagacccgtagagggtagctcctctccatagccagggtgtcctgatgagtgttaacctcttagcaaagagtgtagctcctttctcagtaagatcacttttgtagatataagagtaaataatgtaaaataaatatcagcttatttttaaaacaaagaataattaagtaaactattttatctccaacttttttactatttaattcctcaaaagcagagttcatcctatcagctacacagtgcaattgatccacataaacacaaatttatttccctgacaagctagaaacatctgtttaaaagaacattatatttaggtaaattaagacttggaattttggagtagacaaaagaataaaactaaaacactgggttattcataccttcttccaccrgtatatcctttatttcaacctccactattgtagttaaagcatgtagaatgactttctgaatcacatttgctaatccaaacaataaaaaaattaatttaattgttttt

SEQ ID NO: 63989 - DNA, 1470 bp, Homo sapiens
tcaatccacattcttagattttcacagcctccatctcaaaaactggccattattagcaaaataatttgtgagttctcctcttctcctagctgatatttggtccaaagttccatgtcttcctagcttactcctgagttaaatttctgcaatttttcattagagagaacctgagggaactctccaagaaagaaacattctatcttctcttgcttgttctccatttccccttagtttgttaacaaaaagaaaaaaaaagaagggttaaaagttgcttaagtggcatttatgtgtaattttgttatgagatccttgcatgttgctttgccagccagaaacctctgtggccagtggacctctgcctgagttttgctctggctcactgggctcctttcgcccaccaggcctggccggctgcatttggctcatgctactgtcctggatcccgtgcctgccaagggccagccatgcatgtggcagcaaggggtgtgtgagagagcatggggtgcagccactgtgcacaaccaggcatgccagctgtggtggggtgggcagctccatgctggcacaggcactagctccctgtgatactgtggctggaccaggcataccataagcagcttccacagctgacaccagggaatgtggggaatgcagttttgcccagaatctcggagacaccaggaactgcagccccctaaagagggtgtcacaaccctggctcagggacctcctaggttggggtccctgaagggctgcagctcttctctccttcattcttctctccttcttgttgactgtaatatggagggcaaggggtgtgttccagccccaattatgttaaagctcttttagccccacctttcagtggttcccaagttcttgtcctgtgaccaggaagaatgaggtacacagacaagttgacggtgagcaagatgaagaggagctttatggagcaatagaacagcttggaggagacccgtagagggtagctcctctccatagccagggtgtcctgatgagtgttaacctcttagcaaagagtgtagctcctttctcagtaagatcacttttgtagatataagagtaaataatgtaaaataaatatcagcttatttttaaaacaaagaataattaagtaaactattttatctccaacttttttactatttaattcctcaaaagcagagttcatcctatcagctacacagtgcaattgatccacataaacacaaatttatttccctgacaagctagaaacatctgtttaaaagaacattatatttaggtaaattaagacttggaattttggagtagacaaaagaataaaactaaaacactgggttattcataccttcttccaccagtatatcctttatttcaacctccactattgtagttaaascatgtagaatgactttctgaatcacatttgctaatccaaacaataaaaaaattaatttaattgttttt

SEQ ID NO: 63990 - DNA, 1742 bp, Homo sapiens
aagcctgaccccaaaaagttacatactrtgtgattccatttatacaaagtttgaaaaggacaaaatttatttgtactgatagaggtcaaaatagtggttacctttgggtggagggtaactaataaggctttagggaggctggcaatgttcacacttctagtggctcatgagttttcaatttttaaaaaagttatcagaatttatttttaagatttatgatttataacttcacaaatcataaacgtatgtatctttaagacataagcaccttttgttataaatcataaactctatctttaagacttatgcagtcttgctctgttgcccaggctggagtgcagtggcacacaaacttcttatgaaaatagtcctattttcatggataaattcttcttcttatgaaaatatgtcctattttcataagaagtttgtgaaataagataaaattagttgctctttttgccataggggtttgccataggagaactgtggataccaagtagttgcctaatactaaccctttttaatttttaactcctacaaggtttcgaattaagtttgtatgtaaaactccaacatttatatctccagtactgacttcttatgtcagtagatgttgtacgatgaaaagaccatgagacattttatattttctaagacttaacttataggaaatcaaacctatgataattaataccaaaataataccctttcccaaatttcctcttgtcagttggcatcatcatcattctgttggcacattaaattttgaacctggaagatttatgtttttcccacttttcatctcccttatttagtatgttacagaatcatccattttacctctctgaaaattttcctggatctgctctcttcccttctgtttccacagctaccaattgagtcctggccgttgttgcctcattcctgactcttccagtaacctgccaattactcttccctgtctcctcttactccatagccaatagatgcatttttttctaattttcccatgattaagaatctgagttcctagtatcatgcctattataattaatgcttacaagttacatcagttcacgaagtccaacctagttttccaagtgctacctttcagttcccaatgtgggaagatatcctgttcatacaaggtaatctgttcatcattttctgtacagtaacttatttcttccctgattctgttgtcatataccactgaattctgcttctgcattgtctgttacagccggcaaaacatagttctacatcagcattctttttcttgactaagtttttactccattttaagaactccactattttgcatcctctcagctcttttattccgtttaaaaaattaatttggcaaatgttgttgtttttaagatactttatatatgcctataggctttcccttgatgttataggttcaaaatttatgtactttgtgtgtaaaattgtgtgtagaacattagtgttcagaaaatgctttaaaaatcaaaaataaaatgaataagtgacgtcacatagtttgcttcttcagtcagaaacttggcatcagtatatacaaaagtatttgtttgacaaatagagatcttaatgcaaaggccactttttcatttcatgtaatacttatctgcatgtgagaaagcatgccagcttctaacagcagttatgtcttggcaggtgttcactgtttgaataaatcgtatcagaatcttcttttttcttttcttttcttt

SEQ ID NO: 63991 - DNA, 651 bp, Homo sapiens
tgcatagaatgcctggcttytggggttcccagccttacagtgagcaactaaaaattgtcacttcctggcaggcccaggaaacttcagactgcagaaaaaaatctaaagtctgtcttggtttggcttcctagcctcaagaggtttgataatctgagattcctgttttgttttgttttttttcagacaaggtctgtaatcccaaagtgctgggattacaggcgtgagccactgcgcccagccttctgtggaattcttaaaaatgggacccgcctttgggaggccaaggtgggtggatcacctgcggtcaggagatcgagaccagcctggctaacacagtgaaaccccgtctctactaaaaatacaaaaaattagccgggcgtggtggcgggcgcttgtaatcccagctactcgggaggctgagaaaggagaattgcttgaacccaggaggcagaggttgcagtgagccgagatcgtgccactgccctccagcctgggcaacaaagagtgaaacacggtctcaaaaaaaaataaaaggggacccgctttgttcctaaagagagggaaccccacagggcagggctaggagacagtgacatggacagggactgcaggatcaaggctcatggagtgtttggggccactgggacacct

SEQ ID NO: 63992 - DNA, 176 bp, Homo sapiens
caggtactgcactgagcacaagagaagggcccasttccttcccttgaagcccacagcccatcgaggaagacaggtatgtaagacagcatttgcaagggggtgacaaaggccaggggggaggtgaacaaaggatgcagggagtggctctcagtgttgtgagcaccccgcatgggaag

SEQ ID NO: 63993 - DNA, 1473 bp, Homo sapiens
ccaggaggcaggaagtgggaggccaggcaggaggggctgtgattgcccaggtgccaggaggaagggctgagaggggacagtgcagatgtccagagaggcctgacagggacaggctgcgaaagtcacgggtggggatgggcttccgccagagttgtgtgtggcctgaggacagtgcagcaaggaggccccatggtgagcacatgcagccgaagtgacaggttgggctcctttgtgggacaagagcctctccaggccactgcagggtgttcagagaacaaggcctacaaggatctgctgtgcctgcagctgggcagtagaacactgagcatgcagggccggggtgggaagcaggaaagccacatggacgagagagccggggcctgcccagcagtgccttttgggagcgcaggcaggatgggatgtgcagctgtgacctgcccggcatagaactccgtctggctggggagaggaggtctcttctagccagaatgaccaggaggtcccgggaggacctgggaggaagtggattgagttgggccttagaaggagagccaggaacaggccaggtcaggggagctggagcctggctaggtatggagagagcagggtacacttgctgcaactgtgagaagagccaggggtgccctggtggcctgggcgcgtttagctgtgcctggggccaggcctgactggctgcaagtcattactataggcggagagtgcagagtagcgcgctcctgctgtcactccctcctccaagtccacaaagaggcaagaaagggaggattttaaggcctatccataccgcatggcrggtgagagcagaggagcaaacagcacttttggatcctggaaagcagaaggtgagtgtcccaggcgtagctgacctgagaaaggcgactccaaagccagcagcagcaacagctggaactgccccagcctgcaccacgggacccccagctctgagactgagagcagctctggggacctctgggctggggtgaagagggatggctggaatcattgttgcaaacaattcagtaggcaggcagctccctagatcccaccgtggtctgcagaggccagcacctgtcccgacctcttactggtcggccctggagagccatctcctacagaggcaaaatgaacggtctctgggccaggaccaggcctgttcagggggatgtgtggctaagtgcataagggatgctgagactacagccctcgtgcccaggcagcgctcagggcatggatagccaggccctccccatccaggccagagatgggaagactccatccaatctcattccatgaccagggactggcaaagctctcagttctctctccatcccagcaggagacaaagaacccaacctcagagattcctcaactcggagacccagccaggccaccctccagagcatctcagtctgcaagccccttggtgtgctcagagcttccagtcacactgct

SEQ ID NO: 63994 - DNA, 1889 bp, Homo sapiens
cttttgacaaactgtttttgtgatttatggcaggtgcttgtttataaacccatttctcctcagacacagtgaaaagcatttatcattctgcttggcttttcttattagataaatgtcacctaaacataacctaaatctggaatcttgctagtgtggcatgtgagctggtggtgtctctttgactaccttcatttttctattgacccccagcagccaacagtatttgaccatgagtgtcctttagcccctgtgctgtatgtgccaaacagaaggaaaaaaaaaaaagccattcagagtagcggaggtcagcaaggtgatatttatcaacaggctactcaatattgattttgttttaaatcttctaccctgaagctgttttcagttagtaattcataataaccaatgtaagggcttttacatattaaggagatatgtatgtcgacaaaatcaaattaatcaatgaaagtgtcagtcacctggaatccaagagctaaatgaactgtccagtaaggatagtagaaaattagagtaatttttaaattcttgacacatgtgattttctatggattttcccactcctcccaacattatgacttttaaattgccattctcctttgtattagtctgttctcatattgctaataaagacatacccaagactgggtaatttataaagaaaaagatgcttaagggactcagagatccatgtggctggggagggctcagaatcacggtggaaggcaaaggaggagcaaagtcatgtcttacatggcagcaggcaaaagagagcctgtgtaggggaaccccctctttataaaaccatcagatctcatgacatctattcactatcatgagaacagcaggggaaagacccaaccccatgattcagttacatcctattgggtccctcccacgacaagtggaatttatggaagctacaattcaagatgagatttgagtggggacacaaacaacccatatcacttctttacaatatttggtctgtaattgttaatgtattgaaattttacagtattttccatatctatttttaatgatttataattattatgtgaaagcatggtctatatttaactgtaaatggctaaggatgtgtgtaaaattagtaatgaaaataaatcaagtaaatctttacaatatatgatgaatagtaaagataggtaatgtaatagaaaattgagaactgcattaattttgcaaatggcttggatgcattatcctgttaattatcctgttttaaaaataagtattggctgagcattatggctcaaatcagtaatcccaacactctgggaggccaaggtaaaaagattgcttgaggccaggggtttgagactagcttgagtaacatagcaagaccccatctttaaaaataaattaaaaagttaaaaaagtattaataattcagaaaatggatgctttaaataattgttaaataacttaatgytatttaacaatgtaatacattaaataaggtgcataaatatttttaaatattttctggtatgatacttaaaatttaaaataaaatgtgtaatggtaatttttatttccttatcccattttaaaattggaagaatctcctagtgttgtagagttggagattacttatttacttatttattaacttttattttaaattttgagttacatgtgaggtttcttatataggcaaaattgtgtcatgggggtgttgtacagatcatttcatcagcacaggtatttagtaatacctgttagttatttttcgtgatcctttctctcctcccaccctccaccctccaataggtttctgtgtgtgttgtttctctcgtatgtgtacacgtgttctcattatttagctcccacttacaagtgagaatatgtgg

SEQ ID NO: 63995 - DNA, 1889 bp, Homo sapiens
cttttgacaaactgtttttgtgatttatggcaggtgcttgtttataaacccatttctcctcagacacagtgaaaagcatttatcattctgcttggcttttcttattagataaatgtcacctaaacataacctaaatctggaatcttgctagtgtggcatgtgagctggtggtgtctctttgactaccttcatttttctattgacccccagcagccaacagtatttgaccatgagtgtcctttagcccctgtgctgtatgtgccaaacagaaggaaaaaaaaaaaagccattcagagtagcggaggtcagcaaggtgatatttatcaacaggctactcaatattgattttgttttaaatcttctaccctgaagctgttttcagttagtaattcataataaccaatgtaagggcttttacatattaaggagatatgtatgtcgacaaaatcaaattaatcaatgaaagtgtcagtcacctggaatccaagagctaaatgaactgtccagtaaggatagtagaaaattagagtaatttttaaattcttgacacatgtgattttctatggattttcccactcctcccaacattatgacttttaaattgccattctcctttgtattagtctgttctcatattgctaataaagacatacccaagactgggtaatttataaagaaaaagatgcttaagggactcagagatccatgtggctggggagggctcagaatcacggtggaaggcaaaggaggagcaaagtcatgtcttacatggcagcaggcaaaagagagcctgtgtaggggaaccccctctttataaaaccatcagatctcatgacatctattcactatcatgagaacagcaggggaaagacccaaccccatgattcagttacatcctattgggtccctcccacgacaagtggaatttatggaagctacaattcaagatgagatttgagtggggacacaaacaacccatatcacttctttacaatatttggtctgtaattgttaatgtattgaaattttacagtattttccatatctatttttaatgatttataattattatgtgaaagcatggtctatatttaactgtaaatggctaaggatgtgtgtaaaattagtaatgaaaataaatcaagtaaatctttacaatatatgatgaatagtaaagataggtaatgtaatagaaaattgagaactgcattaattttgcaaatggcttggatgcattatcctgttaattatcctgttttaaaaataagtattggctgagcattatggctcaaatcagtaatcccaacactctgggaggccaaggtaaaaagattgcttgaggccaggggtttgagactagcttgagtaacatagcaagaccccatctttaaaaataaattaaaaagttaaaaaagtattaataattcagaaaatggatgctttaaataattgttaaataacttaatgttatttaacaatgtaatacattaaataaggtgcataaatatttttaaatattttctggtatgatacttaaaatttaaaataaaatgtgtaatggtaatttttatttccttatcccattttaaaattggaagaatctcctagtgttgtagagttggagattacttatttacttatttattaacttttattttaaattttgrgttacatgtgaggtttcttatataggcaaaattgtgtcatgggggtgttgtacagatcatttcatcagcacaggtatttagtaatacctgttagttatttttcgtgatcctttctctcctcccaccctccaccctccaataggtttctgtgtgtgttgtttctctcgtatgtgtacacgtgttctcattatttagctcccacttacaagtgagaatatgtgg

SEQ ID NO: 63996 - DNA, 731 bp, Homo sapiens
ccgaatgtgtgttcttggtgcctttgttaaaaatgagttcactgtaaatgtgtgaatttctgttttctgttttatttgtctatgtctgtctgtctgtcattcgtctctttctctgtctctcctgccccgcttttttttgacagtaccatgttgctttggttactatagatttgtagtatattttgaaatcagggagtgtcatgcctccagcttttttcttttttttcaagattattttgtctacctgaggtattttggatttccatgtgaatgttagttttttatttctatgaagaatgtcttttgtaatttaacatggattgcactgtttctgtagatcacattgggtgatatagatattttaacaatattctagtgcatggacataggatatgtttccatgtacttgtgtctgctttaatatctcatcaatgtgttatagttttcattgtgggatctttcttaaagaagagatgtagttggtttccttgcctagatattcaaaagttgataggattttattcatggtataacatagttaaaartattaaacataattgtatttagttttgttgaatacctatttgtgtggtatattacatttatttttgttaatattaaattttaaatattttaagtgtacttgtgcatcttatatatttatattatataccattattttactttggattctctcatttaaagtcatagccaaagttatcctattattc

SEQ ID NO: 63997 - DNA, 731 bp, Homo sapiens
ccgaatgtgtgttcttggtgcctttgttaaaaatgagttcactgtaaatgtgtgaatttctgttttctgttttatttgtctatgtctgtctgtctgtcattcgtctctttctctgtctctcctgccccgcttttttttgacagtaccatgttgctttggttactatagatttgtagtatattttgaaatcagggagtgtcatgcctccagcttttttcttttttttcaagattattttgtctacctgaggtattttggatttccatgtgaatgttagttttttatttctatgaagaatgtcttttgtaatttaacatggattgcactgtttctgtagatcacattgggtgatatagatattttaacaatattctagtgcatggacataggatatgtttccatgtacttgtgtctgctttaatatctcatcaatgtgttatagttttcattgtgggatctttcttaaagaagagatgtagttggtttccttgcctagatattcaaaagttgataggattttattcatggtataacatagttaaaagtattaaacataattgtatttagttttgttgaatacctatttgtgtggtatattacatttatttttgttaatattaaattttaaatattttaagtgtacttgtgcatyttatatatttatattatataccattattttactttggattctctcatttaaagtcatagccaaagttatcctattattc

SEQ ID NO: 63998 - DNA, 724 bp, Homo sapiens
aaagtgacatacagtatttgttacatgtaacttaagtgacccaaactgactagaatcaactaaaaaaaaagataactcgtgaaaataaaacaaaagcagatggaaagtggggcacactgcttgtttgtgtggttgcttgcttgtggttattttttatctatcaacgtgattagttatacgacatattttgagaatcatacgttttgccaaaaattaaaataattaaaaattgaaataaaacaaacgaaatttaaaaaacatagaaacttaagcctagtataattttaagaactacaaagaaagcaagcatttatttagtaaatatgcaagaaaataatcagattctgctcccctttcattcattcattcatttttctcaacaaataaatactaattgtctgttttggccagaactatttcagggatgaaaaggtatccctttcttccttactttagagaaatgtagattttrtggtagaagctcagcatatctaaagacacccaaatagaatatattctacaccactttgaagtagtttgaatgtcacctgaaacagaatattacttctaatccatttcaggccatctgttttttttttgtttttcacttttctcttatagactaaatattatcatagtattagcacatatagtatatatcaatctatataacatatggtattgggaaacatttttactaatagggatatttacaagagaatta

SEQ ID NO: 63999 - DNA, 724 bp, Homo sapiens
aaagtgacatacagtatttgttacatgtaacttaagtgacccaaactgactagaatcaactaaaaaaaaagataactcgtgaaaataaaacaaaagcagatggaaagtggggcacactgcttgtttgtgtggttgcttgcttgtggttattttttatctatcaacgtgattagttatacgacatattttgagaatcatacgttttgccaaaaattaaaataattaaaaattgaaataaaacaaacgaaatttaaaaaacatagaaacttaagcctagtataattttaagaactacaaagaaagcaagcatttatttagtaaatatgcaagaaaataatcagattctgctcccctttcattcattcattcatttttctcaacaaataaatactaattgtctgttttggccagaactatttcagggatgaaaaggtatccctttcttccttactttagagaaatgtagattttgtggyagaagctcagcatatctaaagacacccaaatagaatatattctacaccactttgaagtagtttgaatgtcacctgaaacagaatattacttctaatccatttcaggccatctgttttttttttgtttttcacttttctcttatagactaaatattatcatagtattagcacatatagtatatatcaatctatataacatatggtattgggaaacatttttactaatagggatatttacaagagaatta

SEQ ID NO: 64000 - DNA, 724 bp, Homo sapiens
aaagtgacatacagtatttgttacatgtaacttaagtgacccaaactgactagaatcaactaaaaaaaaagataactcgtgaaaataaaacaaaagcagatggaaagtggggcacactgcttgtttgtgtggttgcttgcttgtggttattttttatctatcaacgtgattagttatacgacatattttgagaatcatacgttttgccaaaaattaaaataattaaaaattgaaataaaacaaacgaaatttaaaaaacatagaaacttaagcctagtataattttaagaactacaaagaaagcaagcatttatttagtaaatatgcaagaaaataatcagattctgctcccctttcattcattcattcatttttctcaacaaataaatactaattgtctgttttggccagaactatttcagggatgaaaaggtatccctttcttccttactttagagaaatgtagattttgtggtagaagctcagcatatctaaagacacccaaatagaatatattctacaccactttgaagtagtttgaatgtcacctgaaacagaatattacttctaatccatttcaggccatctgttttttttttgtttttcacttttctcttatagactaaatattatcatagtattagcacatatagtatatatcratctatataacatatggtattgggaaacatttttactaatagggatatttacaagagaatta

SEQ ID NO: 64001 - DNA, 1500 bp, Homo sapiens
ttattgacttgtatagtactaatattatattatttcatgctaagacactaagacaatgttcaaattttaattttttctttctaagtgttcattgagaacttagtatgcaaaagacacagctaaatgctgttacaaaattcatatatgctagtaattttaggtaagtgccatacatataaccaatttacaggtattaatgtcttaatatgttaagtcctaagtaattttcaaccatttatatttggatgatctaatgattaatcctgatatcatagatgtcttacattgctaatacattttaattaatgcaaattatttacaaatatttacaacattgagactctctttggcgttggtgtgaattacggaataatagaatcgacattgactgggcggccagccaactccattctcsaccagattcttcaactaaactgggtgcataaactttcacaaattacttagcttctgtggttttctagtacagaaaatgggtcagtggacaagattgtctttttcattccttccatctctgaaagctgtaatttttatatgtttcaaaatggtagcaatgtgtcatgtgtctttctggcctcacatacccatcatatatgcaagccactgcagcttgtgcaataattcctcctgcaaatataacatcatattctgacctctagatatcttggagctgtcaccctatctccaaggtaggtccaccattcacttttaatggatcctaggttcagacttacagaagaatgggaaacagcacaaatccactagtaactaactaacctaacttcacacatcacggttatcattcctaaactagcgaaagagcatggaaaaaagggtgtggacacaaatgccttctctataccagagaaaattagctttcaatttgtgtatcttcaacttctttagaataaacaaaaaccagttagcctaataagatcgaatgtatccaggattcaaatctaactttgaaatttaatacttaagtttcatcaagaagatgaaacatcagggccaaggaaatagttcaaagcaccatggatctcaaaggaaaaagctgctggtaattatacagccaatagtaattacagctaacgttgcgtaacttactatgtgtcaggccctgtcctaggtgctttccatatactaagctaatttaattcatttagtcctcatgacaaacctttgagaaatgtattgtaattatccatattgtacagatgataaaacctaagtagcagagaggttaaataactccttcatgatcatataactaataagaggaaaaaatggtattcaaattaaaagtctggctctataattcagactctgttttattaatttttttgtttccataggttattggggcacaggtggtgtttggttacgataagttctttcgtgatgatttgtgagactttggtgcactcatcgccagagcagtgtacactacatccacttcagcagtcttgttatcgcccaccc

SEQ ID NO: 64002 - DNA, 567 bp, Homo sapiens
agaattacattattagtttcttttgagccatgtgcacttcaaagattttttagaatttagtaatgctatgtcacacagaagccaactactacccaggtggaaatactgggcccctttctggtcctctgctgtcatctacctgcctcctggtgatttccaatttttggctcctgcagtgtggtkgggaaaagagcgaatttctatctggtttgttctacctggcatctacaagttactaaaggggatgatgaaacactattggtgaaaatgtttttgaccaatctgcttctttccattgcactctaccagtgattcttagcatacacagtactgtggattcctgttaaaatgcagcttcccaggccctgcctcctgagattcagcagggctggaactgaaatttacagttgatactgggaatccctggggccgggaccacactttgagaaacacagcactacattttcctgtgtccaaagcctaatctttagaaatcaagtcaaaccaatacattttttatctatactgactgaaaagtttctagaagaaacatttaattgcagctca

SEQ ID NO: 64003 - DNA, 2696 bp, Homo sapiens
tttttctgtaaattacaaactattctaaaataaaaagtttattttcaagaaacattacatttcaataattgcctttaagttgaaatgtagacattttctttctcttcctacagacaaaaagcaagrtcaactagggctttgaggaaagttgcagttagaagggaagagatggttttaattctctaaaaaaagtagatataaagtgagatattctgatatgttaaagtgatggagggcattatgtctttaaagatggtgtaaaatatttgaactagtgaattcaacagatattttatagtgaatgtcacgagtaagtacattgtataaagtgttttaaatcatcaatgtgaagaatgaagcaaaatgtatgtaatgtatgtgaaacaaaatctatttaaatgattatttaaagtagaaataatatttgtattgcttagatactgagagaatccataagtccaattcatctgcatcaatgggaatcaactgatattacagagccagtgcctctaaagatatcactacttagaccaaagaagaggcatctgtcagggaaggctgttcagcataaaatgttccttgactatctaatatctattttttgtccctcttattaaaaatttcccaatttccttaagggaggcgaccaacccatctaaaataattcagtatctcagacatcctgaacctagtggtggccacaccacacagctgtggctaataaggattacagagaatttgctggctttaaggaaggttttgtcttcttgcttagaccaactgttcttcattgctttttcccttcctccctataagataggttctatacctagagtgtagcaataactttgtgatcacgaggctataatcctgaggatgaggtccaacaccgctaaagagaacaggatggaaagatggacagccaggtttttggtaatatttttgagctgggcagctgcactatcctggatagtatcttcttgttttccagataattagtgtcactcttagcggagctttattccatgtagttagaggtattccttactgaaggagtgtcctcaactgattgtatatcttcagggaagacttcccatcaagagtaaaggatgaagacagtatagatttagtgaatgagattagctcataatcagtcaatcaatagagacatatcatccccaatttctggtaatctagcttttatacagccagtttccccttctgacttagaaaaagccaatctgcaaggggatggtagattgtgtcatctctgcccgcatttccttgttatcattaggcctgtctttgtacccagataatcttgaaaagaattcatggcaaatggccaatgcattttcttagaacattatctattatatattgatttaggaaaatacattttggaatgtacaagtgaaggaaattccccatacctgatgacttctattcctctgccaaacagttaatgtaatgaaaaacaaataaataaaaacaatgcaaaacaaaatcggagtgcatgagcataaagatgaaggtttcttccccagaagtgtcatagaggagtgtagtgagttggttcatgaaatttttgagagtatatctctaggtacgcattatcagtatctcctgttaaatgagaaatatttgtcttgttggtttcattcatgagtgcctccttttttcaaatgcataacaagtgttcaggtaaaagtacttgagatgtttgtaagagattgaaaaaaaaagcttaggagggaaaaacttctttggtaggaagtagaagacaatataaaagagaatctaaaaaattctttctgataatttaccttaagagagatttttatatattttcctatttccttacattttatctgaaaacattcaactcattccttaatattttgttgctttttactgtcaagaaagtatatatgtcttagagtaatatcattgaacagtttcaatgatattcaatacaaatgaaattgttccctttgttataaaagctgtacctctagtgtagtctactctttagatttaaaatattattattttatgcacattgtggtagaatgtataattgttaatccacagagagaaatatgtcctctctgaacaaaaaggctaaagcgatctctgaagtgctggcacaaaccactctttgcagctgttttggaagttgccagaagctgggaaaatgtgaagagaccatatgcttctatgtgacttttcttccactcatggaccaaagtaagtctagcattttcccagatgtcagtggacaaactgacccagttgttaggcactgttttcagaaacatcacagccagagtagacataaaattgaaagcataggattatatcctaggatggcattttagtacccaaaaggaaaaaacctctacattaatacagattgttaatgaagcacatatgactactgatgaaatgaccagtggaatataaaagtaagacataactttaatcaattctgataacccatggttttctcacatgagattcgttgaggaatttttatttgcttggatgaacaggattgaaataaagaaatggttgattggacacatgatcctctataggtgaagtactggcaacttgtacaaaaggcctggcaaaatctcagtaggctatcagccctttccccttcttccctgtccaaagccagtgtgacaata

SEQ ID NO: 64004 - DNA, 2696 bp, Homo sapiens
tttttctgtaaattacaaactattctaaaataaaaagtttattttcaagaaacattacatttcaataattgcctttaagttgaaatgtagacattttctttctcttcctacagacaaaaagcaaggtcaactagggctttgaggaaagttgcagttagaagggaagagatggttttaattctctwaaaaaagtagatataaagtgagatattctgatatgttaaagtgatggagggcattatgtctttaaagatggtgtaaaatatttgaactagtgaattcaacagatattttatagtgaatgtcacgagtaagtacattgtataaagtgttttaaatcatcaatgtgaagaatgaagcaaaatgtatgtaatgtatgtgaaacaaaatctatttaaatgattatttaaagtagaaataatatttgtattgcttagatactgagagaatccataagtccaattcatctgcatcaatgggaatcaactgatattacagagccagtgcctctaaagatatcactacttagaccaaagaagaggcatctgtcagggaaggctgttcagcataaaatgttccttgactatctaatatctattttttgtccctcttattaaaaatttcccaatttccttaagggaggcgaccaacccatctaaaataattcagtatctcagacatcctgaacctagtggtggccacaccacacagctgtggctaataaggattacagagaatttgctggctttaaggaaggttttgtcttcttgcttagaccaactgttcttcattgctttttcccttcctccctataagataggttctatacctagagtgtagcaataactttgtgatcacgaggctataatcctgaggatgaggtccaacaccgctaaagagaacaggatggaaagatggacagccaggtttttggtaatatttttgagctgggcagctgcactatcctggatagtatcttcttgttttccagataattagtgtcactcttagcggagctttattccatgtagttagaggtattccttactgaaggagtgtcctcaactgattgtatatcttcagggaagacttcccatcaagagtaaaggatgaagacagtatagatttagtgaatgagattagctcataatcagtcaatcaatagagacatatcatccccaatttctggtaatctagcttttatacagccagtttccccttctgacttagaaaaagccaatctgcaaggggatggtagattgtgtcatctctgcccgcatttccttgttatcattaggcctgtctttgtacccagataatcttgaaaagaattcatggcaaatggccaatgcattttcttagaacattatctattatatattgatttaggaaaatacattttggaatgtacaagtgaaggaaattccccatacctgatgacttctattcctctgccaaacagttaatgtaatgaaaaacaaataaataaaaacaatgcaaaacaaaatcggagtgcatgagcataaagatgaaggtttcttccccagaagtgtcatagaggagtgtagtgagttggttcatgaaatttttgagagtatatctctaggtacgcattatcagtatctcctgttaaatgagaaatatttgtcttgttggtttcattcatgagtgcctccttttttcaaatgcataacaagtgttcaggtaaaagtacttgagatgtttgtaagagattgaaaaaaaaagcttaggagggaaaaacttctttggtaggaagtagaagacaatataaaagagaatctaaaaaattctttctgataatttaccttaagagagatttttatatattttcctatttccttacattttatctgaaaacattcaactcattccttaatattttgttgctttttactgtcaagaaagtatatatgtcttagagtaatatcattgaacagtttcaatgatattcaatacaaatgaaattgttccctttgttataaaagctgtacctctagtgtagtctactctttagatttaaaatattattattttatgcacattgtggtagaatgtataattgttaatccacagagagaaatatgtcctctctgaacaaaaaggctaaagcgatctctgaagtgctggcacaaaccactctttgcagctgttttggaagttgccagaagctgggaaaatgtgaagagaccatatgcttctatgtgacttttcttccactcatggaccaaagtaagtctagcattttcccagatgtcagtggacaaactgacccagttgttaggcactgttttcagaaacatcacagccagagtagacataaaattgaaagcataggattatatcctaggatggcattttagtacccaaaaggaaaaaacctctacattaatacagattgttaatgaagcacatatgactactgatgaaatgaccagtggaatataaaagtaagacataactttaatcaattctgataacccatggttttctcacatgagattcgttgaggaatttttatttgcttggatgaacaggattgaaataaagaaatggttgattggacacatgatcctctataggtgaagtactggcaacttgtacaaaaggcctggcaaaatctcagtaggctatcagccctttccccttcttccctgtccaaagccagtgtgacaata

SEQ ID NO: 64005 - DNA, 2696 bp, Homo sapiens
tttttctgtaaattacaaactattctaaaataaaaagtttattttcaagaaacattacatttcaataattgcctttaagttgaaatgtagacattttctttctcttcctacagacaaaaagcaaggtcaactagggctttgaggaaagttgcagttagaagggaagagatggttttaattctctaaaaaaagtagatataaagtgagatattctgatatgttaaagtgatggagggcattatgtctttaaagatggtgtaaaakatttgaactagtgaattcaacagatattttatagtgaatgtcacgagtaagtacattgtataaagtgttttaaatcatcaatgtgaagaatgaagcaaaatgtatgtaatgtatgtgaaacaaaatctatttaaatgattatttaaagtagaaataatatttgtattgcttagatactgagagaatccataagtccaattcatctgcatcaatgggaatcaactgatattacagagccagtgcctctaaagatatcactacttagaccaaagaagaggcatctgtcagggaaggctgttcagcataaaatgttccttgactatctaatatctattttttgtccctcttattaaaaatttcccaatttccttaagggaggcgaccaacccatctaaaataattcagtatctcagacatcctgaacctagtggtggccacaccacacagctgtggctaataaggattacagagaatttgctggctttaaggaaggttttgtcttcttgcttagaccaactgttcttcattgctttttcccttcctccctataagataggttctatacctagagtgtagcaataactttgtgatcacgaggctataatcctgaggatgaggtccaacaccgctaaagagaacaggatggaaagatggacagccaggtttttggtaatatttttgagctgggcagctgcactatcctggatagtatcttcttgttttccagataattagtgtcactcttagcggagctttattccatgtagttagaggtattccttactgaaggagtgtcctcaactgattgtatatcttcagggaagacttcccatcaagagtaaaggatgaagacagtatagatttagtgaatgagattagctcataatcagtcaatcaatagagacatatcatccccaatttctggtaatctagcttttatacagccagtttccccttctgacttagaaaaagccaatctgcaaggggatggtagattgtgtcatctctgcccgcatttccttgttatcattaggcctgtctttgtacccagataatcttgaaaagaattcatggcaaatggccaatgcattttcttagaacattatctattatatattgatttaggaaaatacattttggaatgtacaagtgaaggaaattccccatacctgatgacttctattcctctgccaaacagttaatgtaatgaaaaacaaataaataaaaacaatgcaaaacaaaatcggagtgcatgagcataaagatgaaggtttcttccccagaagtgtcatagaggagtgtagtgagttggttcatgaaatttttgagagtatatctctaggtacgcattatcagtatctcctgttaaatgagaaatatttgtcttgttggtttcattcatgagtgcctccttttttcaaatgcataacaagtgttcaggtaaaagtacttgagatgtttgtaagagattgaaaaaaaaagcttaggagggaaaaacttctttggtaggaagtagaagacaatataaaagagaatctaaaaaattctttctgataatttaccttaagagagatttttatatattttcctatttccttacattttatctgaaaacattcaactcattccttaatattttgttgctttttactgtcaagaaagtatatatgtcttagagtaatatcattgaacagtttcaatgatattcaatacaaatgaaattgttccctttgttataaaagctgtacctctagtgtagtctactctttagatttaaaatattattattttatgcacattgtggtagaatgtataattgttaatccacagagagaaatatgtcctctctgaacaaaaaggctaaagcgatctctgaagtgctggcacaaaccactctttgcagctgttttggaagttgccagaagctgggaaaatgtgaagagaccatatgcttctatgtgacttttcttccactcatggaccaaagtaagtctagcattttcccagatgtcagtggacaaactgacccagttgttaggcactgttttcagaaacatcacagccagagtagacataaaattgaaagcataggattatatcctaggatggcattttagtacccaaaaggaaaaaacctctacattaatacagattgttaatgaagcacatatgactactgatgaaatgaccagtggaatataaaagtaagacataactttaatcaattctgataacccatggttttctcacatgagattcgttgaggaatttttatttgcttggatgaacaggattgaaataaagaaatggttgattggacacatgatcctctataggtgaagtactggcaacttgtacaaaaggcctggcaaaatctcagtaggctatcagccctttccccttcttccctgtccaaagccagtgtgacaata

SEQ ID NO: 64006 - DNA, 2696 bp, Homo sapiens
tttttctgtaaattacaaactattctaaaataaaaagtttattttcaagaaacattacatttcaataattgcctttaagttgaaatgtagacattttctttctcttcctacagacaaaaagcaaggtcaactagggctttgaggaaagttgcagttagaagggaagagatggttttaattctctaaaaaaagtagatataaagtgagatattctgatatgttaaagtgatggagggcattatgtctttaaagatggtgtaaaatatttgaactagtgaattcaacagatattttatagtgaatgtcacgagtaagtacattgtataaagtgttttaaatcatcaatgtgaagaatgaagcaaaatgtatgtaatgtatgtgaaacaaaatctatttaaatgattatttaaagtagaaataatatttgtattgcttwgatactgagagaatccataagtccaattcatctgcatcaatgggaatcaactgatattacagagccagtgcctctaaagatatcactacttagaccaaagaagaggcatctgtcagggaaggctgttcagcataaaatgttccttgactatctaatatctattttttgtccctcttattaaaaatttcccaatttccttaagggaggcgaccaacccatctaaaataattcagtatctcagacatcctgaacctagtggtggccacaccacacagctgtggctaataaggattacagagaatttgctggctttaaggaaggttttgtcttcttgcttagaccaactgttcttcattgctttttcccttcctccctataagataggttctatacctagagtgtagcaataactttgtgatcacgaggctataatcctgaggatgaggtccaacaccgctaaagagaacaggatggaaagatggacagccaggtttttggtaatatttttgagctgggcagctgcactatcctggatagtatcttcttgttttccagataattagtgtcactcttagcggagctttattccatgtagttagaggtattccttactgaaggagtgtcctcaactgattgtatatcttcagggaagacttcccatcaagagtaaaggatgaagacagtatagatttagtgaatgagattagctcataatcagtcaatcaatagagacatatcatccccaatttctggtaatctagcttttatacagccagtttccccttctgacttagaaaaagccaatctgcaaggggatggtagattgtgtcatctctgcccgcatttccttgttatcattaggcctgtctttgtacccagataatcttgaaaagaattcatggcaaatggccaatgcattttcttagaacattatctattatatattgatttaggaaaatacattttggaatgtacaagtgaaggaaattccccatacctgatgacttctattcctctgccaaacagttaatgtaatgaaaaacaaataaataaaaacaatgcaaaacaaaatcggagtgcatgagcataaagatgaaggtttcttccccagaagtgtcatagaggagtgtagtgagttggttcatgaaatttttgagagtatatctctaggtacgcattatcagtatctcctgttaaatgagaaatatttgtcttgttggtttcattcatgagtgcctccttttttcaaatgcataacaagtgttcaggtaaaagtacttgagatgtttgtaagagattgaaaaaaaaagcttaggagggaaaaacttctttggtaggaagtagaagacaatataaaagagaatctaaaaaattctttctgataatttaccttaagagagatttttatatattttcctatttccttacattttatctgaaaacattcaactcattccttaatattttgttgctttttactgtcaagaaagtatatatgtcttagagtaatatcattgaacagtttcaatgatattcaatacaaatgaaattgttccctttgttataaaagctgtacctctagtgtagtctactctttagatttaaaatattattattttatgcacattgtggtagaatgtataattgttaatccacagagagaaatatgtcctctctgaacaaaaaggctaaagcgatctctgaagtgctggcacaaaccactctttgcagctgttttggaagttgccagaagctgggaaaatgtgaagagaccatatgcttctatgtgacttttcttccactcatggaccaaagtaagtctagcattttcccagatgtcagtggacaaactgacccagttgttaggcactgttttcagaaacatcacagccagagtagacataaaattgaaagcataggattatatcctaggatggcattttagtacccaaaaggaaaaaacctctacattaatacagattgttaatgaagcacatatgactactgatgaaatgaccagtggaatataaaagtaagacataactttaatcaattctgataacccatggttttctcacatgagattcgttgaggaatttttatttgcttggatgaacaggattgaaataaagaaatggttgattggacacatgatcctctataggtgaagtactggcaacttgtacaaaaggcctggcaaaatctcagtaggctatcagccctttccccttcttccctgtccaaagccagtgtgacaata

SEQ ID NO: 64007 - DNA, 863 bp, Homo sapiens
ggagatcctgaataaaaaatacccttcttgactgcctagcttctgaacaagttgagaaatagaaaaactaaagatgtaggtaaaaagaaaatatcttttacagaaaaggctgaagtggagaatgaggcttccactttgacaggcaagtgcactggctactaatactccaccctgtgcctgtcaggcctccccaatccagagcagcgctgcccctggctgagtggaagagaacatgtaccccttatcagactcatttccaggaagcagaatgaggaggaggtgctgaggtttgcaaatttcttatgcttcccagacttcccaaccacataattcactcttctccaccagggaagggtgagtgaagggatagagagcagcctggagtgctcagagaaaaacctttccttccagagagcaggagcaggttaaaggctctctaccactaacttgagaaaaaataatcccatctacttgagatktctgaactgtaagaaagagcagggattagggaccctaacttctgggtctttttagtttttgacctgtatagttataattctatgaatatccaaagagatggcagagtgggggctaatttcctgcttcctgctcttaagaatgcagggctctgtgtatgtcttacaggaggtctgttttaatgattagatccatttcttgtttttggtagcttaaaaggtaagacctggatactaagaaatgtttggtttgtagggcagcagcaactgtgagaaatatacacaagctttccaagcaaaattctggctttagaggtagatgacttgtacagtttgccgtcattaatggcttggtgataaaatgactatttagccaaaagaagatgc

SEQ ID NO: 64008 - DNA, 1214 bp, Homo sapiens
agggttatatcacaaacaaccacatagggaggggaagctttaactaggccaaaggtggcagggtagaaatgggtttcagataacgtatgtcagcctagaaatgggtgcagaggcagcaactacattaaacacatttatgacagcagctaagctgacatacctgatgcaggatacttaaggattctcccctgggaaactgatgggcctaagagaaaatatctgtggttagtgacattaagggaggggaggggatccccacatgaaatggctgggtcctagcccaatcagcctgcaagcaaagccccaaaccaagaggcctccttctgggaaacaaagcttccaagcaaccccgccttcattacaaactgacatgcagtgattactagacctgtggggaactcctaacacatgaaagaaaaagaccaaaacaaaaacaagcaagcaaaacagaaacaagaaacttgttataaatgaaggcaatgcagacaagaggagaaaatttgaaaagaaaatttaaactctggttaatcatttcaaaaggataaaagaagatgtgccttcatgaaacaggatcagggaactcttcaaaaatgaggatgttgaaatcagtcctcagatcttgaccatatagcaaaccagytcaggctgttggttcctcccttcaatatcaacctgagaaatgaaaaacccagtggttctcattacttcacatgcatgggaattacttggaaggcttgttaagctaagttggctgggtctcaccctccatcagcaggagaatatcaggaaagtgcgaaagtgttgttggggtgaagagtgaggaaaataggggttgaccaagcaactattttgggtatttactctccgcccaggaattccttgttctgagaatttaaagcaaaaccctggtcagagaaagtacctaataagagtgggggcaattttgagtgaccagcaataattctgtagggtttaactgtctttaccacctggggttcatcatctaccatctctttaaacccagtgagtaaaacacagtctacatgacatcagttcttccccaaagggaaatatccccaaaggaacttgagcctacatgccagaataaccactcaaggagtacaaccactcaaggagtacaaccactcaaaagaaaggcaactaaataaaaaatgtcgaccatctaaagccaaatgattagcttaagcagatca

SEQ ID NO: 64009 - DNA, 968 bp, Homo sapiens
cagaggcctctcaaaggagaaactgcaggtcttgaataacaaaattgagtcatgcctttcatgctgaactcctatgttctttaaagtgcacagcccatcattaacattcaatattaaataaccatgagtaccagttcacatctaacagtactcctttctccatcraccttcatccatccacatgttaaactctagcaggatcatcaatttaactggagaaaaaccgacctttcatgtttcttttattctacttgggtaaaatctgaaaaatattcatctcttttgcaagctttcttcagggcttcctttccataaattaccataaaagccaaacctggatgaatcaataggctttacccaacatatcagatgtgctgaaacagagacaggtaaaaaattatcacaagtcatcaataataaattagtttgtctgcagtagtgatatcaggccaatgtgaggaaggacttactcctgagctattaatcctatcataagaaaattccagtgatgaaagatacaatttaagaacaaaaatgtgttcgtcaaattattttcctcttactttcatcaagtcaattaactgaaaaaaatactttaaattctttcttccactcaactgttttaggtacttctgccaaaaaataggaccacagtgtgctatacagtctcctataggaaattaatcagagattctgtgaacccacagaagtgacactgaaattagagtagatttgagatttcaaaaggaatcaatgtagtaggaaaacagcgggtggcaaattgatttcaaaatagcaaaacaagctgtaggaatctgtgagtcagaaatggatatttaaaatatattattttgaagtaattataatagcctgtagactattagtaaaaccattttacattctaatcactaacaatgtcataatttcttaattaaatataatacatataaagtctatatcatgagaaa

SEQ ID NO: 64010 - DNA, 968 bp, Homo sapiens
cagaggcctctcaaaggagaaactgcaggtcttgaataacaaaattgagtcatgcctttcatgctgaactcctatgttctttaaagtgcacagcccatcattaacattcaatattaaataaccatgagtaccagttcacatctaacagtactcctttctccatcgaccttcatccatccacatgttaaactctagcaggatcatcaatttaactggagaaaaaccgacctttcatgtttcttttattctacttgggtaaaatctgaaaaatattcatctcttttgcaagctttcttcagggcttcctttccataaattaccataaaagccaaacctggatgaatcaataggctttacccaacatatcagatgtgctgaaacagagacaggtaaaaaattatcacaagtcatyaataataaattagtttgtctgcagtagtgatatcaggccaatgtgaggaaggacttactcctgagctattaatcctatcataagaaaattccagtgatgaaagatacaatttaagaacaaaaatgtgttcgtcaaattattttcctcttactttcatcaagtcaattaactgaaaaaaatactttaaattctttcttccactcaactgttttaggtacttctgccaaaaaataggaccacagtgtgctatacagtctcctataggaaattaatcagagattctgtgaacccacagaagtgacactgaaattagagtagatttgagatttcaaaaggaatcaatgtagtaggaaaacagcgggtggcaaattgatttcaaaatagcaaaacaagctgtaggaatctgtgagtcagaaatggatatttaaaatatattattttgaagtaattataatagcctgtagactattagtaaaaccattttacattctaatcactaacaatgtcataatttcttaattaaatataatacatataaagtctatatcatgagaaa

SEQ ID NO: 64011 - DNA, 1144 bp, Homo sapiens
agctcttgttttgagtgtcttaacataattagtactagagacttaacataaataaagagggcaaacagcatggtggggttgtgttggtgcctgatgtggaaatggttaattggtcccacagtgagaaactgtacaaccgtgtgttgctttaatgagaccaggtgagtataagctctctccagggatgtgaagttagtactcgatttgggaggtgatatgtgtgagaatgtgtgggggccaatgatatgatggtatagaggattggttctttctttctagggccctctcttttagttagaagtcatttggcatgaacccagtaaagaagaataaattaactaaaagtgatctgatagtagaataagaaaaaagtacattcagtgatttttttttttctttttttttttttttgagatgaagtcttcctctgtygcccaggctggagtacagtggtgcgatctcagctcacggcagcctctgcctcccaggttcaagagattttcctgcctcaagtagattcccaagaagctgggattacaggcacctgccaccacacctagataatttttgtatttttagtagagacagggtttcaccatgttgcccaggctggtctcaagctcctgacgttaggtgatctgcccaccttggcctcccaaagtgctgggattaaggcgtgagccattgcacctggcctagaaaaaggtacattcagaaaggtttgtctaatatgcatttccctggaagcagcccaaatctctgttcaggtcaaatgctgagaaattgagttcttattcattggcttgggaccacggtagtgtgagattaactggaagtataattgtttagaaatcatatttctgggtacaggctaggtcattgtttttatgactatatttgacatttccatgcctgaagaaaaaaaaaattccattggaccaaagacccagctggtccctgtaaatttttaacagcagataacacaggttacggaacttccaggacaaagttaagaaaacccaggccacgctttggcagagatttcctgtgttctgtgtgtgtactttgtgaatcgaacatcagtttcaggggttttctttctcatccctgagagtgcagatttaaaacagagtaaggagaattt

SEQ ID NO: 64012 - DNA, 1144 bp, Homo sapiens
agctcttgttttgagtgtcttaacataattagtactagagacttaacataaataaagagggcaaacagcatggtggggttgtgttggtgcctgatgtggaaatggttaattggtcccacagtgagaaactgtacaaccgtgtgttgctttaatgagaccaggtgagtataagctctctccagggatgtgaagttagtactcgatttgggaggtgatatgtgtgagaatgtgtgggggccaatgatatgatggtatagaggattggttctttctttctagggccctctcttttagttagaagtcatttggcatgaacccagtaaagaagaataaattaactaaaagtgatctgatagtagaataagaaaaaagtacattcagtgatttttttttttctttttttttttttttgagatgaagtcttcctctgttgcccaggctggagtacagtggtgcgatctcagctcacggcagcctctgcctcccaggttcaagagattttcctgcctcaagtagattcccaagaagctgggattacaggcacctgccaccacrcctagataatttttgtatttttagtagagacagggtttcaccatgttgcccaggctggtctcaagctcctgacgttaggtgatctgcccaccttggcctcccaaagtgctgggattaaggcgtgagccattgcacctggcctagaaaaaggtacattcagaaaggtttgtctaatatgcatttccctggaagcagcccaaatctctgttcaggtcaaatgctgagaaattgagttcttattcattggcttgggaccacggtagtgtgagattaactggaagtataattgtttagaaatcatatttctgggtacaggctaggtcattgtttttatgactatatttgacatttccatgcctgaagaaaaaaaaaattccattggaccaaagacccagctggtccctgtaaatttttaacagcagataacacaggttacggaacttccaggacaaagttaagaaaacccaggccacgctttggcagagatttcctgtgttctgtgtgtgtactttgtgaatcgaacatcagtttcaggggttttctttctcatccctgagagtgcagatttaaaacagagtaaggagaattt

SEQ ID NO: 64013 - DNA, 558 bp, Homo sapiens
atcaattgagcattatgtgctcagggatgtggagggaagcatgaaacatggtttatcttacttatcgtgtttgatccacacaggaagtcaatacaggaggggctacttttactgccaacatacaaatggggaaactgaggcttatattatacataactaacttattgagggccacatggccctaggagtctgtgagtctttcctcctttggtttgagcagtggccggggcgtccgtgtcttttcacctgtgagggctgaagagaaagagctctttcatgctgtagcgccagcctctcctgctctgcctggcagggctgctgcaggtccrgcaggttccagaaaggaaatgattccctggtgtttccacttcgaaaggcatttttgatccatagaaaatttcttttaaagcagtaagcttttaggcctgtcagacccaacccccatttttattgcaaatatattcaagcacctggtttacaattctgaggtgaaattcctggataatatgactcactcacacccataatttttaagaaaaattaatataatgtcataac

SEQ ID NO: 64014 - DNA, 1997 bp, Homo sapiens
gaacatagccccctttccgtacaagaacaggaatggattgtcttcggctgggagttgctgtgagcacaaattgcaaacaaagtttatgtgctctgcggggaaatggcaggcattttccccatatagtcaaggagagtgcctaactcactttttagatatttctaccagtgtcctacagggaattgtgctaataaatatgacaataacattgtaatgggaccagaaaggctgacccagcgttttgttaatttgtgttcagcatttgctgggagctttgtaacccctgagcaatgaaacaggagcatattggttggactgtaggcattttaattagaggtcctgggaataactctgtgctgtggcagctggataagacctggcccctcaaagtttacccatggcgagcttccctcctggccctcagcggccattaaaaggtcttgctagaggaagggacctgggggagggagtgcaaaatttctaaggagaggaggaagatgcctggtgggctggcgtccaacagcaattagctactcagctgtcagtgcccagagcccttgctttaacaaagtggtggcaaagattgacagaaatggcttgaccccatgatggatcccaaagcattttgtaaaagggtctttttactcttgctaccttttcatcatctggcttaaatacaatgcaacaataaaggcatcataaatcaaaagctgttagcacacatggcccctgcaatttatgggtattaagccaaaaaaaaaaaaaaaaagcttaggaacatttcatcaaattatttttccagtcccttaagactcatttaaatttccctcctctccctaccctggtgctgccagctatttcatgcacaggagcacctgagcccagggtggagggagccaactctgccagcgggcaggcggttcattctcatggggtggggcctgaagctctgcccagctgcaggcaccatgtgggcaaacagccaagaatctagagaaacagatggcagctgcccttgggtcagtgatgcagctttgggaatggccatgtccatccacactaaacctccatcctcacctctttcaccatgagtcctggggctggggtgggagctccagtgggagatggcgggattatttggaggtaaggggcccaatgcmaggttgggttggggactaaatactcaaagccagccacttctgtgatggtccagtgccggctttggaggcccaatgctaagtcctggaaggcccggtgcagagtagtgggcccaccagaggccagcattaaggagcagaatccccactatgctctgggtagtggctgatagatctcaacatgtcagtggagaagtagaaaccggttggtggcgttacttatatttgttaattagtgagcccgacacataattattaagcatcgaggataggcagggcacatggaacaattcaccccgatgtgcagagacacaaagtcagatgaatgtccaaagggccagaagtgggcttcctgcccttcaaggatcacctcctccaggaagcctgtacaggttgctatgaggagcagatgagcatgtgctgaacattctgaatacaatatggattgtcaggctgagcccttgctcattgtttattggggggggggaaatctctgttttgattgtccttgagttgagaagggactcttaagttggaagctttctggacctttgttgtgtgggaaaagtagaaggcagttggcacaggtgcctctgtggcatcacctggccccgtggtaaatcctatcttattcaatgaggaaacaagggaagagaagtggtgtctccttagccacttctctgagcttgatgggaatatatggcttaagaactcataaccgtggcctccatgacaatcccttggctcccaggctctgtgactccccagtccatcctggctctcttcagaggtaatgtctgtcaaatttcaatgtcattgttcttattataattaggaata

SEQ ID NO: 64015 - DNA, 292 bp, Homo sapiens
ctctttctgactcttgctctctcttgctccttcattgyatgtcttgcccactcttccctcctcttctaatatctggcccagcccagccggccccagcctgcctctccttggagctgcgtgccaccttggaatgcctgtgagcacagggaggagctgagcccccgccgttgcataggggcctggtaggacctctgatatgatttggatgtttgtcccctccaaatttcatgttgaaatgtgacccccagtgttggaggcggggcctggtcagaagcgtttgggtcataagggt

SEQ ID NO: 64016 - DNA, 715 bp, Homo sapiens
gacaccagcctcgccaccagtccgcacttggaggatggccacggggcccctaggggtgaacccaccaaaggcggattctgcaatcagggctcctgcaggcctggagaatgtggaatagctggaggaaggattccatggggccgttcaaatgggcagaacttaggaaagtcagagagaggaggggagccccacagaagtgtctccttcgggttgtttcctggaatgtttcctctgaaaacatgtcaagggactagccaccagtttcttcccagctttctctctctttctctcasactttcagcctccattcacctggagtgagagggaaaggaggacagctggcctgaaggtaaaaatcaagaggggaggcatgaatgtgtggcttcttgctcccctagcctgcccagctgtgccctcctccaggcttctctgctgggaggaggggtgcagagaggagagctggtgaactcccgtgcacatactgccctttgactccctaaagccctgtggggtgtcggtaggggactacttgagagtagtccctatcaaatgcttaggccagtgttctttctgccactctgagaggcctggtgacaagagggaacatgggaaacaagcagccccagaaggtcacggtgcctactgggacagccctccaaggagtggtattgatcgtctccacgctgcaccagccaggtggctggatatgtggcaa

SEQ ID NO: 64017 - DNA, 715 bp, Homo sapiens
gacaccagcctcgccaccagtccgcacttggaggatggccacggggcccctaggggtgaacccaccaaaggcggattctgcaatcagggctcctgcaggcctggagaatgtggaatagctggaggaaggattccatggggccgttcaaatgggcagaacttaggaaagtcagagagaggaggggagccccacagaagtgtctccttcgggttgtttcctggaatgtttcctctgaaaacatgtcaagggactagccaccagtttcttcccagctttctctctctttctctcagactttcagcctccattcacctggagtgagagggaaaggaggacagctggcctgaaggtaaaaatcaagaggggaggcatgaatgtgtggcttcttgctcccctagcctgcccagctgtgccctcctccaggcttctctgctgggaggaggggtgcagagaggagagctggtgaactcccgtgcacatactgccctttgactccctaaagccctgtggggtgtcggtaggggactacttgagagtagtccctatcaaatgcttaggccagtgttctttctgccactctgagaggcctggtgacaagagggaacatgggaaacaagcagccccagaaggtcacggtgcctactgggacagccctccaaggagtggtattgatcgtctccrcgctgcaccagccaggtggctggatatgtggcaa

SEQ ID NO: 64018 - DNA, 1438 bp, Homo sapiens
aacatcctacaatgcaagggatagacccacaagaaagaattatccagcccaaaatggcaatactactgaggttgagaaatcttgttttaaaagattaactagaatgaatgagaaagaacttccccacagcccatttaatcctcaaattctctgctatgactactgacaagaagataaattaactctgacagaaacaaggaaagcaggctatgttggactggcctaattctattatctccaygtttcaaaatcaacctcagatataaagggtctcggcacttccctggctcacattctaaatgcagcccttgaaaccaaagcatgcagctatctccttacgtgaaaaggccatgttccctcagtcaatgttttctccctgaaattttagtaaagtggtagcttgcaattacaaatttctagaagctctgaaatgtgtcacatttctgtgtatcccaatgccataagcaaaactccattttcttcaaagtctctttcaataaaacataacattatttgccaaaggcagattccaggaactaaacagggagctatttcttggaccttaactctatcccctggatgagcttaatttatatactagaatatcttcatctactttcatggaaattttttaaaagcaaaagcagcagcagaaacaagccaaagcaaaatcagacggaagtctgagaactgcagccatagaataaatacaaagttaacaagaaaaacatcagattttttttcacaaatagcaaaagagcctgagaaacagaaaaaggcatattgacctcactcgtcagtcataaggactcagccccacagcaaatgcataccagggtgtacacagaaggaatacagctagaaaagcttgggaaagagggatattaggagaagaaatagttcattttcctgaaatgctagactctggttcagtttactctagttctagttttttctcatcctctagcacatgaaggatgacaagcacaaagactcaatgtttcaacccagagaggttttttgaactaggaaccagcatgaatctctgcaaggtaatttgttgttattttatagcactcaacacatagtatatagtctataaaaccataccaatgacaatatgttgacatacgtgaggatttggttccatagtgattcttgaataagtgtaaggaagttctccataccatgctgtaagtcttggttgctgataagttatatctaagaaagaaaatacaggcctttgaaatggtttaatgctatttaaggtgttactactgagtgccaactttgtgccttgcaatgtgctatgagaaatacaaaagaaaagtaagaatgggctgtgacccaaagttccaccttcacagaagatatgggactttgcaagtagaatggacaagagaaaccactatgttggcagacaccacatgggcaaagg

SEQ ID NO: 64019 - DNA, 1438 bp, Homo sapiens
aacatcctacaatgcaagggatagacccacaagaaagaattatccagcccaaaatggcaatactactgaggttgagaaatcttgttttaaaagattaactagaatgaatgagaaagaacttccccacagcccatttaatcctcaaattctctgctatgactactgacaagaagataaattaactctgacagaaacaaggaaagcaggctatgttggactggcctaattctattatctccacgtttcaaaatcaacctcagatataaagggtctcrgcacttccctggctcacattctaaatgcagcccttgaaaccaaagcatgcagctatctccttacgtgaaaaggccatgttccctcagtcaatgttttctccctgaaattttagtaaagtggtagcttgcaattacaaatttctagaagctctgaaatgtgtcacatttctgtgtatcccaatgccataagcaaaactccattttcttcaaagtctctttcaataaaacataacattatttgccaaaggcagattccaggaactaaacagggagctatttcttggaccttaactctatcccctggatgagcttaatttatatactagaatatcttcatctactttcatggaaattttttaaaagcaaaagcagcagcagaaacaagccaaagcaaaatcagacggaagtctgagaactgcagccatagaataaatacaaagttaacaagaaaaacatcagattttttttcacaaatagcaaaagagcctgagaaacagaaaaaggcatattgacctcactcgtcagtcataaggactcagccccacagcaaatgcataccagggtgtacacagaaggaatacagctagaaaagcttgggaaagagggatattaggagaagaaatagttcattttcctgaaatgctagactctggttcagtttactctagttctagttttttctcatcctctagcacatgaaggatgacaagcacaaagactcaatgtttcaacccagagaggttttttgaactaggaaccagcatgaatctctgcaaggtaatttgttgttattttatagcactcaacacatagtatatagtctataaaaccataccaatgacaatatgttgacatacgtgaggatttggttccatagtgattcttgaataagtgtaaggaagttctccataccatgctgtaagtcttggttgctgataagttatatctaagaaagaaaatacaggcctttgaaatggtttaatgctatttaaggtgttactactgagtgccaactttgtgccttgcaatgtgctatgagaaatacaaaagaaaagtaagaatgggctgtgacccaaagttccaccttcacagaagatatgggactttgcaagtagaatggacaagagaaaccactatgttggcagacaccacatgggcaaagg

SEQ ID NO: 64020 - DNA, 1425 bp, Homo sapiens
  misc_feature (1)...(1425): n = A,T,C or G
agttgtttttctcaaggtcttttctccatcactcttccaagcccttgtgatacagccaacaccaagttacaaggttacccagaggctttaactgatacctggcacaaactccactgtcattaacaaaatcacaattcttcccagaggtgcctctttcaccttcttctgtcttagggagtagctgatagtaggtttccaaatgtcagatggcttataacttctggttctgtctctgattttcttctatgagcactatgtgtttccccaggggctgaacaaccatgggatttagatgaaaacttcaatttggaagagtagagttggaaaagcatagacttgctggatgaaaagacctagtttcaaatcccagttaaatctttaaaagatgtttgatggtaggcaagtcactgaaaaatccctcaacatcagttttcacattatgaagtagaaggaaatttattttgtagaagtgttggggaaagtgggagacatgaacaattggtggaaaaggcttggcatagtaactacacacaagcaaggaactccatactttgcatagtaaccgcatgctttggataaactgatattttggctacaatttttggctctccacccccgcccacccccaattccatactctttgtcatgtgattttgcagtactttccacctgagacagaatagaaatctttgttccttgatttgggctgtcatgtgacttgttttggctaaataaaagctggatccaggtgtgccaattccaaacctaggcattagragagaaaaatgtgtttctatcatctctctggcacgtcttntantgcaatgaatacagcttcctcagatactcagcttggcgctctagaataaaatatagacagcagacctgagtccaatctatagtaaggaactaagcctggtcagactgacaaggaaagaaaggctgcccagccaaacccagctggggtagttaatgcttagaaaaccacaaattagccagaattattattattattattattattattattaaagtcatcaaatttggagatgtcttgttacacagaaatagctgaatgttataatactcacaaaaatgagttttctggtttgaagtgacttttggctggcagccccaatacatgccttttccgtctatcttctcactgaaatatcagtgaaaatacagcaaagggtgaagaaacttcacactatcacataaatttaggctaaaaggcaatccatgaatccacaaagaataggtatgatcccgagaaaactacatgtaaaaattaataacagaactaaaaattgaagagcaacctctctctactttctatctctactcccaactattctataatgaagatagaatattaaatccctccccaatgaatgcagaatgttagccccctcccctacttat

SEQ ID NO: 64021 - DNA, 1425 bp, Homo sapiens
  misc_feature (1)...(1425): n = A,T,C or G
agttgtttttctcaaggtcttttctccatcactcttccaagcccttgtgatacagccaacaccaagttacaaggttacccagaggctttaactgatacctggcacaaactccactgtcattaacaaaatcacaattcttcccagaggtgcctctttcaccttcttctgtcttagggagtagctgatagtaggtttccaaatgtcagatggcttataacttctggttctgtctctgattttcttctatgagcactatgtgtttccccaggggctgaacaaccatgggatttagatgaaaacttcaatttggaagagtagagttggaaaagcatagacttgctggatgaaaagacctagtttcaaatcccagttaaatctttaaaagatgtttgatggtaggcaagtcactgaaaaatccctcaacatcagttttcacattatgaagtagaaggaaatttattttgtagaagtgttggggaaagtgggagacatgaacaattggtggaaaaggcttggcatagtaactacacacaagcaaggaactccatactttgcatagtaaccgcatgctttggataaactgatattttggctacaatttttggctctccacccccgcccacccccaattccatactctttgtcatgtgattttgcagtactttccacctgagacagaatagaaatctttgttccttgatttgggctgtcatgtgacttgttttggctaaataaaagctggatccaggtgtgccaattccaaacctaggcattagargagaaaaatgtgtttctatcatctctctggcacgtcttntantgcaatgaatacagcttcctcagatactcagcttggcgctctagaataaaatatagacagcagacctgagtccaatctatagtaaggaactaagcctggtcagactgacaaggaaagaaaggctgcccagccaaacccagctggggtagttaatgcttagaaaaccacaaattagccagaattattattattattattattattattattaaagtcatcaaatttggagatgtcttgttacacagaaatagctgaatgttataatactcacaaaaatgagttttctggtttgaagtgacttttggctggcagccccaatacatgccttttccgtctatcttctcactgaaatatcagtgaaaatacagcaaagggtgaagaaacttcacactatcacataaatttaggctaaaaggcaatccatgaatccacaaagaataggtatgatcccgagaaaactacatgtaaaaattaataacagaactaaaaattgaagagcaacctctctctactttctatctctactcccaactattctataatgaagatagaatattaaatccctccccaatgaatgcagaatgttagccccctcccctacttat

SEQ ID NO: 64022 - DNA, 744 bp, Homo sapiens
cctgatagaaaatataacagaaaaaatagatcttatttcatgacaaatctaacaaatctaacaaaattacacaagcagtttccctttgattcaccaatcccatatctcagaatctaccctgacgatactcctccaaaatactagacaatatgtattcaagcttgttcagaggactattaaataaataaggctatctccattcagatagtttcactctgttgtcacacagaaagaatgaaaagtctatgtactgatgtaaagtgatctccaagatatattgttaagtgacagatgcaggattcacaacaatatctagagtatgatagcttttgtgttaaaaaaaaaaagcaggacatatcaccacacacacacacacacacacacacacacacacacacacacacacacacaattattttcccaaaagacatattggaaggataagccacaackaggaaaaatagttacctataaaagtcagagataatgagacgagtaatggaatgaaagggaggagggtggtaacaagaattttccgagtattagtttgtatatactttgtactcatgaaccacattaatgttttacacattcaaaaataagttaatcatggaaggaaaaaagcaaacattaaaattaaaaatagagacaataaacacttcaactgacatttgaaaacagtatttggattgcataacctatagaataatacaacaccaaaaggcaatgtataagcctttttta

SEQ ID NO: 64023 - DNA, 744 bp, Homo sapiens
cctgatagaaaatataacagaaaaaatagatcttatttcatgacaaatctaacaaatctaacaaaattacacaagcagtttccctttgattcaccaatcccatatctcagaatctaccctgacgatactcctccaaaatactagacaatatgtattcaagcttgttcagaggactattaaataaataaggctatctccattcagatagtttcactctgttgtcacacagaaagaatgaaaagtctatgtactgatgtaaagtgatctccaagatatattgttaagtgacagatgcaggattcacaacaatatctagagtatgatagcttttgtgttaaaaaaaaaaagcaggacatatcaccacacacacacacacacacacacacacacacacacacacacacacacacaattattttcccaaaagacatattggaaggataagccacaactaggaaaaatagttacctataaaagtcagagataatgagacgagtaatggaatgaaagggaggagggtggtaacaagaattttccgagtattagtttgtatatactttgtactcatgaaccacattaatgttttacacattcaaaaataagttaatcatggaaggaaaaaagcaaacattaaaattaaaaatagagamaataaacacttcaactgacatttgaaaacagtatttggattgcataacctatagaataatacaacaccaaaaggcaatgtataagcctttttta

SEQ ID NO: 64024 - DNA, 843 bp, Homo sapiens
accactcttaagtctaagaagatgaaggttctaggacttcaaagtactctaatgcttctcctatggtagagctagcaggagttcatttattattcgtccagatgctgattatgcagttccaggaatttgagtcaatgccagagcagttgaggtagagcaaggaggaataacaaaaatgctaggatatcgtggtgttctgagacaggtgagcttttcggagcctcccaacttgtcccctagtgcttaaaatttggcacagatgctaccatcagccatgacatggatagaggagactctcccctttatgctgatgtatacaccaaaacgagtcacagaaaaagcaggcttccaagatttttcagctcccgttgttccaatcatcttctatgattctrtctcctagacctgtagccttaaagcaagcttatttaaaataaatctgccagtctgtttcaaagagatttgttctcctaaatttgtcccagactgaaaactgcacacgtccaaagtttaagaggttatgttaggagaaattgaacattatgttttcctactgctacttaaatttccagaggcatttacaaaaattaaacatcaatgggaagccaagtcctttatgaagctagcaatagacattgatcctgtgataatgttattatttttcttattgctcttgtcagtatgcatttcatcatcgctgggttggatgagtatagggcagcatgggaaaacaatgtttattgacttgcagtttctaggtgctttaaaaaaagttatgcacaggtacatatgagcatattaaagctcttaatttgtgtttctaataatttcttcttgaatctc

SEQ ID NO: 64025 - DNA, 843 bp, Homo sapiens
accactcttaagtctaagaagatgaaggttctaggacttcaaagtactctaatgcttctcctatggtagagctagcaggagttcatttattattcgtccagatgctgattatgcagttccaggaatttgagtcaatgccagagcagttgaggtagagcaaggaggaataacaaaaatgctaggatatcgtggtgttctgagacaggtgagcttttcggagcctcccaacttgtcccctagtgcttaaaatttggcacagatgctaccatcagccatgacatggatagaggagactctcccctttatgctgatgtatacaccaaaacgagtcacagaaaaagcaggcttccaagatttttcagctcccgttgttccaatcatcttctatgattctgtctcctagacctgtagccttaaagcaagcttatttaaaataaatctgccagtctgtttcaaagagatttgttctcctaaatttgtcccagactgaaaactgcacacgtccaaagtttaagaggttatgttaggagaaattgaacattatgttttcctactgctacttaaatttccagaggcatttacaaaaattaaacatcaatgggaagccaagtcctttatgaagctagcaatagacattgatcctgtgataatgytattatttttcttattgctcttgtcagtatgcatttcatcatcgctgggttggatgagtatagggcagcatgggaaaacaatgtttattgacttgcagtttctaggtgctttaaaaaaagttatgcacaggtacatatgagcatattaaagctcttaatttgtgtttctaataatttcttcttgaatctc

SEQ ID NO: 64026 - DNA, 843 bp, Homo sapiens
accactcttaagtctaagaagatgaaggttctaggacttcaaagtactctaatgcttctcctatggtagagctagcaggagttcatttattattcgtccagatgctgattatgcagttccaggaatttgagtcaatgccagagcagttgaggtagagcaaggaggaataacaaaaatgctaggatatcgtggtgttctgagacaggtgagcttttcggagcctcccaacttgtcccctagtgcttaaaatttggcacagatgctaccatcagccatgacatggatagaggagactctcccctttatgctgatgtatacaccaaaacgagtcacagaaaaagcaggcttccaagatttttcagctcccgttgttccaatcatcttctatgattctgtctcctagacctgtagccttaaagcaagcttatttaaaataaatctgccagtctgtttcaaagagatttgttctcctaaatttgtcccagactgaaaactgcacacgtccaaagtttaagaggttatgttaggagaaattgaacattatgttttcctactgctacttaaatttccagaggcatttacaaaaattaaacatcaatgggaagccaagtcctttatgaagctagcaatagacattgatcctgtgataatgttattatttttcttattgctcttgtcagtatgcatytcatcatcgctgggttggatgagtatagggcagcatgggaaaacaatgtttattgacttgcagtttctaggtgctttaaaaaaagttatgcacaggtacatatgagcatattaaagctcttaatttgtgtttctaataatttcttcttgaatctc

SEQ ID NO: 64027 - DNA, 818 bp, Homo sapiens
ggaggactgtccttctgcacagtcattcatgggatgagctcaggctgcctgggcagtccatccagtattggattggtgattcatgactctgtagatgaggcctgtcagtcagattcctctcctggaaaaactaaaacacctggtggaaccacagtgggaagtgaagctgaaaagattatttccacaattgccaggatgcagaaaggctgaggccataaacatgcagaaaactttagaacagaccccaggatttaacagagaaagcctgtgggcagagagagaacagagcggagagggggagggggggcagcggtgggggtcgggagggagacagaaacacagagatgggctctctctccttgcagcttgttttcagcttcagtctgcacatctctacattaaaactcttttttctaaagaaacttgagtgagttcctcacagtcccaagagccctaaggaaaacactgtctaaaacacaaaacaccatgtgctgtgcccagcacctctgaactcatctctgacaagtggtgcagcccttttcttttctgcacaatcacccaaatgggaycagaacccattaggatctttccactctgctgtgccaagaaacgggggtagggaaaggatgaaatcaatttccttaaccatcattactgagagctttgctggtgctccaaaaggtaggaggtggcagcatgcagtaaatcaatgtcagcgctccctggagacccactgtgaagacactcccagtaatgactatgatccttgttctctggcaggatgtgatgggacatacactcagggtgacaaagaggaa

SEQ ID NO: 64028 - DNA, 567 bp, Homo sapiens
atacacctttcgaccctccaatggctccctatcattgttaaagccaaagtccttgacaatcacccacaagaacataagtgctctgctccccagccccctcacctctctgccctcagctttactgctctcccttgcatgccctctggaccttacaatgttatatttaatgccagggaccatgcccattttcttcacctgtgcatgtttagaacctagcatcatacctgacgtctgtaggcactcagtaaatacgggctgacggaagcactctgtctctgtctctctctgtccctctccctccctccacccaccagattaagcactcctctagaccacaagcctggcctcattccccttttcagccctgttcactccccagagcctgacacatggtggatcatacaagcaacaggctgttccagtggtactcttccygcctcaatttaaacaccatgcctggacaaggccaacagaatcccaaaggggatatggggaaaagcccacaccaacacaggcagctgcaaaatttacaaaaagaatgaaggaaagcctgttctactgctcttt

SEQ ID NO: 64029 - DNA, 826 bp, Homo sapiens
ctattgaggctgggacagggagcagtacaaaggtcaggatacagccacagtgggattgtttgacgggcaagtggatctgcctccaatggggcacagagtgcaagtcagggaggaatggggagctgggagggatggacacacggatgaaaagacaggaagttcagacagaggaactcgctcctgataggagagaaagcccattctcatggctctcatttcttggggactaatgtgcggtgagttggtggggagcggggtgagctctcayacctgtgtgtaggctgctcgagagcccatgcctgcactagagcccatgactcacctcaagtccatttgaaaaattagggtgttggtaattcacggggaaaaatagcacagacaaggatcatgagatcctgggtgtctgcaacacctgcacgtcattctctctggtccccagggtaccacagacttaaggaattttacacaactctgaggtttggaattctatgggtctccacggaattcagagtgccattggactgcgggggcgctgggggactagaaggcccacattccatggaaatccagggattccaggaattccagcatccagcggaaattcagagaaccatggcccctgagtaattcctctgaaggaaacgtagtcaagaaagactaattaatttatacctactccttcagctccagcccggcacttaattagtaccttagtggtttcaacgaatgaatatgggaaagagtgagagaaggagtgaagcagaagttagccctccaaagctatgcttctcgtccccaaactatcaccccctccacgctggggagg

SEQ ID NO: 64030 - DNA, 913 bp, Homo sapiens
attaaattgtatgtttatgaagtcactttctcccaaatgatggctgtttctcagtctctttgggtggccccacaatgtttccacagagcacaaagcatttcagggcttccttttgggaactgtcttccaagttgctttatgaacaggcaaggacatcaagattattcgtgtgtcagaggacatgcttctttgattttctcccttttctctgttcttctccctagctcttttctttgcttcctgctcaaactgaaggaattcagaggatccttaaagaagtgctgaactggggactgtcttgaagcagaaagtaaacgagaatagaaattgtatctagtacaagtcaccaagatcaaatattgctastaaattcctccaaaagagaaaataaagagtttggaccttacagaaaaaaagtaattgcctaattttactgagataaattagatcagctaaatctaatatctgactattataaaactgacaagccattggactattgaaaaagctcatttaaatgttgtgcttatttaacatgcctcatagaatatactctgtgtgtataatttttagccttgtctccaaagtcaacattaagaaaatctaacaaaaatgtgtatttcatataaatacattgttttatttttctagttttataattaacccacatgacataattagttgaaggaaatatatgaaagcaaaacaaacagaagcaatattgttatgggggtactacagatatgagaatataatagatgtttttctaacagagattataggacaaaggcaaaatagaacgatacaaaattgcaattacctgtatgtacttctgtggaaaatctcattgtaccaaaagtggaatatcaaataaattctttacaagagctgatgaagatagaggaaggacaag

SEQ ID NO: 64031 - DNA, 913 bp, Homo sapiens
attaaattgtatgtttatgaagtcactttctcccaaatgatggctgtttctcagtctctttgggtggccccacaatgtttccacagagcacaaagcatttcagggcttccttttgggaactgtcttccaagttgctttatgaacaggcaaggacatcaagattattcgtgtgtcagaggacatgcttctttgattttctcccttttctctgttcttctccctagctcttttctttgcttcctgctcaaactgaaggaattcagaggatccttaaagaagtgctgaactggggactgtcttgaagcagaaagtaaacgagaatagaaattgtatctagtacaagtcaccaagatcaaatattgctagtaaattcctcyaaaagagaaaataaagagtttggaccttacagaaaaaaagtaattgcctaattttactgagataaattagatcagctaaatctaatatctgactattataaaactgacaagccattggactattgaaaaagctcatttaaatgttgtgcttatttaacatgcctcatagaatatactctgtgtgtataatttttagccttgtctccaaagtcaacattaagaaaatctaacaaaaatgtgtatttcatataaatacattgttttatttttctagttttataattaacccacatgacataattagttgaaggaaatatatgaaagcaaaacaaacagaagcaatattgttatgggggtactacagatatgagaatataatagatgtttttctaacagagattataggacaaaggcaaaatagaacgatacaaaattgcaattacctgtatgtacttctgtggaaaatctcattgtaccaaaagtggaatatcaaataaattctttacaagagctgatgaagatagaggaaggacaag

SEQ ID NO: 64032 - DNA, 1464 bp, Homo sapiens
ctcagccacatttgcctcctgctactttcagcctactaacctcacccatgaattgacaatatgtaaaaaccccttctgtcctttcacgttgtataaagtactttagtgctatagtgttaagcaacatttaagtaattaatgcatttctgctgtcacaatgcagcaattttgccagaatgtatgtgggagaatgtagatggattaaacacatttatatctccaagaaaattgagcagctatgtcaaaataaaatatcactgtgcatggtttaccattttatttttttctctaattattagacaaatttcaaacttggctgtctgtctgagtatgagacagattagggctatttatttatacctaattccaattagaatatataggattgtcatttctaaaataagtatgrttcagtgtgaacattatcatactttagaaattatacaaaataatttctttcagacacttttaaacaatgcagtaagtgaaaacaagtttaagggtccaaagagaatatttggatattggtatttccttgcatccctttctctcataaggaggaaggtcagatctacccccagcaagactggaagagctgctccacttggccagctctctcctctttcatttcagaaaatgcagagagtgagggcagatcccatacactaagacttaatgctttctagagcctctttctgctctgtgattctgcggcttctggcggctcctagaggatcccagactgagcattgataggcctctgagggcaggtgaaagatctctgttgatagcaagaaaagcaggcacacaggaaagcctaggatcagaggtgggggttgaggagtgtgagaaataaaaatggtggcattattacctagtttttctgtttgtttgtttgttttcattgttgtgttaaccttcagctgctctacagattcttgctgtattagggttagtgaagtgctgaatttttgccgattttgcaaagcatagtcacgacagttactctcagatcaccttgtgaacccgactcccagaaaagcagccagagttctcattcttctgtattctcggcagagtttggaatatcaactctaaccctgccaattacttcttaaggtgagagaaatgcaggcaggacatgaatataagatcgtggtcagtttccaatctgcaaagaaaaagctcactgaagtggactgcaggtgcagaagagggccgagaggaaggtttgccgtgttttcttttacagtgatccccactctaataactactttttgatttctacagattagcgccagcaaattagcataatgacattacccagacgcctttgctgttgttttctttcaaaggtcgttgtgactgaggttggagaatgtaatggattaagaaaaagaaagggaaaattaccatatttaatattgtttctagagaaattgacatagtttatggagccgagaa

SEQ ID NO: 64033 - DNA, 873 bp, Homo sapiens
tttaaagttggggaatatccttcatgtatttgaatttggctactttacaaccaacatgtactaatttagaaattcacagcaccagtatgtgaacattttgtagtcttcaatttatgcctctgaaaacagtagtctccccaaagaaaaaaaatagcctcttctagaaaacgaagtaaaggcaaaaccaagttgatatatttcaaaagctgtatgcagcatccagttcagatataattttcaaagaatgaattttaatgcacacagccctattagcacaggatcagattcctaacaaatcgattggacgtgcagaaagagtctgtgtcctagattcaaagtcattacacagtcttaaacacagctgtgcggcaagcctttcattctagatggacatgagcaaattgaatggttccgaaggtgattggctggtggatttcctacaatgcaatttkcaataatgacaagtttaatgaaatcactattgtattatttagcaagggaatgtgtatcctattttgtatagccatcaatggctgattaagtgtgcacaggagtatgaatgcacaaatatttaaacagattcagaggcacccattattctttggtttaggggaggtacatacacccaaccctgccactatccttgcccaaccagggatgaagataatcctatactttttattgtaattttacttcctttctgtcattcctgaattctggcttcctgctgtctctaatcttttattagaattggcaatttccattgagtatatgataaactttcttcttaattgtaaatgttttccattctatatccaaaaatatgtgcttacacaagcattacacatgcaaaaacattatatatgtaaacta

SEQ ID NO: 64034 - DNA, 873 bp, Homo sapiens
tttaaagttggggaatatccttcatgtatttgaatttggctactttacaaccaacatgtactaatttagaaattcacagcaccagtatgtgaacattttgtagtcttcaatttatgcctctgaaaacagtagtctccccaaagaaaaaaaatagcctcttctagaaaacgaagtaaaggcaaaaccaagttgatatatttcaaaagctgtatgcagcatccagttcagatataattttcaaagaatgaattttaatgcacacagccctattagcacaggatcagattcctaacaaatcgattggacgtgcagaaagagtctgtgtcctagattcaaagtcattacacagtcttaaacacagctgtgcggcaagcctttcattctagatggacatgagcaaattgaatggttccgaaggtgattggctggtggatttcctacaatgcaattttcaataatgacaagtttaatgaaatcactattgtattatttagcaagggaatgtgtatcctattttgtatagccatcaatggctgattaagtgtgcacaggagtatgaatgcacaaatatttaaacagattcagaggcacccattattctttggtttaggggaggtacatacacccaaccctgccaytatccttgcccaaccagggatgaagataatcctatactttttattgtaattttacttcctttctgtcattcctgaattctggcttcctgctgtctctaatcttttattagaattggcaatttccattgagtatatgataaactttcttcttaattgtaaatgttttccattctatatccaaaaatatgtgcttacacaagcattacacatgcaaaaacattatatatgtaaacta

SEQ ID NO: 64035 - DNA, 987 bp, Homo sapiens
tatgaaaatgagttgtttctttgtataatatcttccctaatggagttgtaagccaattaaattcagcagggactaaacgcctccacaaagaaagcccagaactcccgtgagatatttggcyggaagttgagctgtgagttcctcaggggaagtcatcctgggcttactagtccactgctgctcctctgacaattctctttacctacaaagcactcaatctcttaattcacaaattacaaagcatgcagatcgccacaagggaggtcagtcaaccaacaaactacatttttagtaattcagtattaatgaaccttttactttgagtggtgttttaagagtagaaatctctacttctctgtacagcctctttctataaatttcttgcaaccccaggcaatttttggacaccggatttaatcaatcctcagacttctctttttaagcaagggcatagaaaagttcactcacagtttgactctcccagtttgtaagttctcttacctaattctgagcttcttttgccccagtcttcctgactataaaagtggaaacttatttctaactctctttttattaggtggcttttaccctagttcatgggtcagcatgacatatgtttaggccaagaggaaattcttagcacaacatgagggtctcatgcacttgaaatggtgtactcatttctcagtgaacatcaggaagatctgtgttctcaatgtgtgctagaatactttcattggggttcttagccactgacccttagtatgagtgtaattcatctatgaaaaattgaaacaaggaaaaatacactttcattcctactacataacaagaaaaggattttaaagcaaattttctatggcagtatcataatccaatgaatttatttgcacaacttttcttctccctttttctttcacttccacctgcctgaattgtacctgtgcttatctgatacatcagtgaagtagtttatgaagcccaacc

SEQ ID NO: 64036 - DNA, 987 bp, Homo sapiens
tatgaaaatgagttgtttctttgtataatatcttccctaatggagttgtaagccaattaaattcagcagggactaaacgcctccacaaagaaagcccagaactcccgtgagatatttggccggaagttgagctgtgagttcctcaggggaagtcatcctgggcttactagtccactgctgctcctctgacaattctctttacctacaaagcactcaatctcttaattcacaaattacaaagcatgcagatcgccacaagggaggtcagtcaaccaacaaactacatttttagtaattcagtattaatgaaccttttactttgagtggtgttttaagagtagaaatctctacttctctgtacagsctctttctataaatttcttgcaaccccaggcaatttttggacaccggatttaatcaatcctcagacttctctttttaagcaagggcatagaaaagttcactcacagtttgactctcccagtttgtaagttctcttacctaattctgagcttcttttgccccagtcttcctgactataaaagtggaaacttatttctaactctctttttattaggtggcttttaccctagttcatgggtcagcatgacatatgtttaggccaagaggaaattcttagcacaacatgagggtctcatgcacttgaaatggtgtactcatttctcagtgaacatcaggaagatctgtgttctcaatgtgtgctagaatactttcattggggttcttagccactgacccttagtatgagtgtaattcatctatgaaaaattgaaacaaggaaaaatacactttcattcctactacataacaagaaaaggattttaaagcaaattttctatggcagtatcataatccaatgaatttatttgcacaacttttcttctccctttttctttcacttccacctgcctgaattgtacctgtgcttatctgatacatcagtgaagtagtttatgaagcccaacc

SEQ ID NO: 64037 - DNA, 987 bp, Homo sapiens
tatgaaaatgagttgtttctttgtataatatcttccctaatggagttgtaagccaattaaattcagcagggactaaacgcctccacaaagaaagcccagaactcccgtgagatatttggccggaagttgagctgtgagttcctcaggggaagtcatcctgggcttactagtccactgctgctcctctgacaattctctttacctacaaagcactcaatctcttaattcacaaattacaaagcatgcagatcgccacaagggaggtcagtcaaccaacaaactacatttttagtaattcagtattaatgaaccttttactttgagtggtgttttaagagtagaaatctctacttctctgtacagcctctttctataaattycttgcaaccccaggcaatttttggacaccggatttaatcaatcctcagacttctctttttaagcaagggcatagaaaagttcactcacagtttgactctcccagtttgtaagttctcttacctaattctgagcttcttttgccccagtcttcctgactataaaagtggaaacttatttctaactctctttttattaggtggcttttaccctagttcatgggtcagcatgacatatgtttaggccaagaggaaattcttagcacaacatgagggtctcatgcacttgaaatggtgtactcatttctcagtgaacatcaggaagatctgtgttctcaatgtgtgctagaatactttcattggggttcttagccactgacccttagtatgagtgtaattcatctatgaaaaattgaaacaaggaaaaatacactttcattcctactacataacaagaaaaggattttaaagcaaattttctatggcagtatcataatccaatgaatttatttgcacaacttttcttctccctttttctttcacttccacctgcctgaattgtacctgtgcttatctgatacatcagtgaagtagtttatgaagcccaacc

SEQ ID NO: 64038 - DNA, 987 bp, Homo sapiens
tatgaaaatgagttgtttctttgtataatatcttccctaatggagttgtaagccaattaaattcagcagggactaaacgcctccacaaagaaagcccagaactcccgtgagatatttggccggaagttgagctgtgagttcctcaggggaagtcatcctgggcttactagtccactgctgctcctctgacaattctctttacctacaaagcactcaatctcttaattcacaaattacaaagcatgcagatcgccacaagggaggtcagtcaaccaacaaactacatttttagtaattcagtattaatgaaccttttactttgagtggtgttttaagagtagaaatctctacttctctgtacagcctctttctataaatttcttgcaaccccaggcaatttttggacaccggatttaatcaatcctcagacttctctttttaagcaagggcatagaaaagttcactcacagtttgactctcccagtttgtaagttctcttacctaattctgagcttcttttgccccagtcttcctgactataaaagtggaaacttatttctaactctctttttattaggtggcttttaccctagttcatgggtcagcatgacatatgtttaggccaagaggaaattcttagcacaacatgagggyctcatgcacttgaaatggtgtactcatttctcagtgaacatcaggaagatctgtgttctcaatgtgtgctagaatactttcattggggttcttagccactgacccttagtatgagtgtaattcatctatgaaaaattgaaacaaggaaaaatacactttcattcctactacataacaagaaaaggattttaaagcaaattttctatggcagtatcataatccaatgaatttatttgcacaacttttcttctccctttttctttcacttccacctgcctgaattgtacctgtgcttatctgatacatcagtgaagtagtttatgaagcccaacc

SEQ ID NO: 64039 - DNA, 772 bp, Homo sapiens
gttttcaagtacagtgcatgcctctgtaagatggacagttccttgccctcatccagaatatgtaaatacaaagattcctgggcagaacaaggagacaagatgaatgttatacagtggttaggctttaatgttaacttcagagcaggctttgacacaatgctgaaattttaagctgttgtaaattttgtgtgacaggtaggctttgaaaaagttaaaaaaaagtcacggaattgaactttctttatgtggttttcaaactttattttttatttttttaagcagctgaactcttttttaaaagaaaaaaaatrgaacctagtatataaaacacttatgaggatgagctgctttgaatgatgtggggataagggacccagagcctcacttgctcaactccaattcccaagtcaccccctattgaaattctagtgctccagaaagcccagtgtaaaaattactgtattaatgattctaccttttgcagagttcttcaaactatagtaaacagagaatgttgtgtaagatttactgttacatgacctttatcatttgactcatataaatgtctattttatcactggaaatacttgatatttccaaggtcattcatttcatgaaaatacacatattttatttcctggacatcctaggaatcaaaatgaaatgactgcttttagatagctttagtctagtgcacatggagatttttctggatgtggattctgtttcgtatgtgatatgtcagacactaagcatggaacacacaggacag

SEQ ID NO: 64040 - DNA, 605 bp, Homo sapiens
tatagaacacgagggcttctttaaatttaggggcctgctctgagtgcagattcagtgttcactcatctgagcaggagggctgaagtccagcttctcagcaacctgttatttttgatggaagcagaggtgactagaacaaagaaatttgctcaggctggtcagactaactgaaacttgatgtcaccgggggcaatcaaggcatcagatgccttggactcgctcaggagcatattttagaggatcctaactcagacataagcctaagctcctgagagttcctgcaattacatcccagggagtggtccagggaggaggtggggcccctgggaagatggtctgaggtacccagtgcaccacaacaagtacggttagctgtaaaatgatggacggtgttgtcaataatggaaggatggaaagatgctgagaacaacctggatttgcaccccagcttcactactttctagctatgtgaccttgaggaagacctcagtttcctcatctgtgcaatggkgctgataacagtaccaactttacaggactgtaaagatggtcaaatgtagcaaccacaaagaataattcctcctgtaaacggacacccaaaccag

SEQ ID NO: 64041 - DNA, 871 bp, Homo sapiens
gatgtaaaatgactatctcagagttgctgccacaaacactggtaaaactgtccctactttctagcatgcttaatrtctaggtcttgctacatcttttttgatgtaactgttttgtggaaaatggttgtgtgtttggggaggcttttgagaaaagataaggttgtcttgtcattataactgggtatttctcctctctcccttccagtttcacttgtctggaaatagcaagactataggagtagtaatttctagatatttatagtcagtaaccttagaggaatgtttagtttttaagatcaattgaatttattgtgtaagtttgccatttaaaacaggtgcccatttgtgtttactgtctcttgtaaccaaactctgttcaattagaatccattagtaatgttttgtggagagtcttgtttggatgatgcagtgcatgaggctcctgtactacaaaatagaaaagaagttcctctaaggcagctcaaagctgttgatatcctgaagcctttttaggcctccctctctgacaggcggtgatctgacaggaggtagataaaggtgccggagtttttagtgaaggttggcagtccaacttggtagtcagacaaacacatgatggtcaaaagtgcctttgacactggggcctggagaagaattctcagtggccagagctgatctgaagctgcaggcagttgagtttgagtttcaacatgttggtacttcaaggggcttctgaaaagttttaaaggagcacaagccctgaaggagtagctgaacttagtgaactggagaaggcaggggcagttttaccagggtttgtggcagcgactctaagattgtcattttacatcaaatgctgaatgtcaatgca

SEQ ID NO: 64042 - DNA, 1538 bp, Homo sapiens
cctgagtgtggacatcccggggtatgatattagacaccactgagtacctttctactgcaaggaacatcttctctcctgaattaatccttcctggctagtcaagtctcacatagccacaaacaaaggagctaggattttggcccaggaagcctagctcagcctctgctctcaccccaccaggcttcctytccttcctgcttcactgccctgagtctgcaatcattttaaccttgccaatccgatgaggcacaaagaaaaatctctgctgttctccactctgatgtgtccgggttatgtaaaatgatctgctttatttttccaattgtgtactggtttctaggatttacatttttttatttttaatgaatcttcctctgttgcccaggctgaagtgcagtggcatgatctccactcagtgcaacctctgccttcccaccacacctggctaatttatttatttatttattttttatttatgtatttatttatttatttttttgagacggagtcttgctctgtcacacaggctggagtgcagtggcgcgatctcggctcactgcaacctccacttcccaggtccaagtgattctcctgcctcagcctcccgagcagttgggattacaggcacccaccaccatgccctgctaattgttgtattttgagtggagacggggtttcaccatgtttgccatgctggtcttgacctcctgacctgaggtgatccacccgcctcagcctctgaaagtgctgggattgcaggcttgagtcatggtccccagacaacttttgtattttttatacagacggcgatttgttatgttgacctggttagtctcgaactcctgagctcaagcgatctgtccttcttggcctttcaaaacggtggaattacaggcatgagcgcccaagcccagctgatgtacattctcagcagctctgtatgaaccttcctgacacactgcacctttagtttttggcctccagctgtcaaacccagaatgcccttatgcctccaagggttttgagataattgaatcaacagtatttaagtgctggcattattttgattcattcttccttctaatatgtagctgttcactcattccaatttaaatattgggatttaaccataacatgttctctgtggggtgctctgaattttcctctacactgacagtccgctgaaagctctagtaagcctctcaggctctcagcttccatttcagaatcagtacctgcttctaagagtaagtgccagtccttctcaaggtctcatttgtacaaatgctttactagacggtagttcacacattattttaaagacaagtcgtgtgtctttaaatgtgtgtttcccatcctacttcacactgaaatcctgacttccaatttcattctgagcgttatgtgaaaaatcacagttttcttacttgacacccatcagagttagtcaaatctcaccaaacttctagccgtatatgtgcacaattgatatatacagcaaatgaaaagctcagatggaccaagtaaacattgggcta

SEQ ID NO: 64043 - DNA, 1181 bp, Homo sapiens
gtcccatccacaaagggtggcacagtccagagggctgctgccattcatcaaacgggctcagcttttagactcagcttttagagccaccccatggggaagggcaattgttcctcatggtcccaagggaggacatcagtttggctgtgacagtcccccaatcacatgcataattgttccaggggaagtattacaggaccaacaaaaagaaatctgtgctgtattattttgtaggttccaactggttggatatgaaacaaaacaaaaaagaaattacatacttgatgcaaaattggaacatttaacatttctatttcttttagacattttaatctgttcctccatgaggatagctaatggttgtctaaaagctwttgccacttttcgactgcattttaagatggctattttctctagctggtccttccaacaaaaccatgttcgttttgttcttaggatttatttccaaggatacagttcttagagtaatttaggaattatccaaagaattattaaaggatttaagaatcttaatatagcagtattaatttactaaaggatccttcaggaaatgtttctgaatgtctgatggtgaggaaaatcttagaaaaaattactgaagccatggagaaatatgatgctactgtgataagtatgtctttttatataaaaatgtatatatatatgtatattacatttatatcaggcaaattcctttgatagtattatgctaatacttttcccaaaacatattattttcatcatcatgaagagatacatgatgtgtaggctgatctgcaaggaaggataatatgcttgttgatgaatgccttttctatttacagttctattcttaaagctaattaaattcaactttgatctcagcttaataagaagaactatttggatttcaaaagtaatatttaatatcagaaagccagtcctctaagtatttccttgtgttagcaagtggtgaatgagccagatggtattaattaaacaaccaaccttgagcgcagaagagtacacaaaatctcaatcagtgactttaaagattcttctccctccttgggcacattaagttttcatctacaacatctgaggaacatcatctgctttgctcatatatcaccccaataatgagttgaaaatagaattcctcctccgtaaagcatttctataat

SEQ ID NO: 64044 - DNA, 700 bp, Homo sapiens
cattagctgtgccaccatacagtcaggatgggagaggttttactgtgggaacaatgaccccctaactcttaaaacaaaagaagttcgttccttgctcatctgataggcctcttgtaagctggctgtggctctgctgcaaactgtctctactccaagatgatctggagctttgctagtccctgcagcagaagtaatgagcaaggcggaatgtgctctggctcctgaagatcccgcctggcagtgacatgtcacttctgcttgcatctcattggccaaagcaagacgcatggctacatatgagtccacggcatgaggaagtataattgtctctctggaagggccactaytgtgggtgtgtagtcaaccagtttaccatggagatattgattctttagccacggggtcgatgaacagaggctgggtcgtcagaactctctagaggtcattttttggtcacaaatgacctcttttatatttactcccaatattgtctttttctgcaccatgaaagaaaatcaactgggaattgtgactctgattgcctcacctgcttctcataagaattagagaaccatgataccattggtttgaggccaaatctagtcagaaatacaaagacagaagcagaatttgggattttagtcctcatacccaaggttctgtggctttaataagagatatatggagtagttggtggaat

SEQ ID NO: 64045 - DNA, 700 bp, Homo sapiens
cattagctgtgccaccatacagtcaggatgggagaggttttactgtgggaacaatgaccccctaactcttaaaacaaaagaagttcgttccttgctcatctgataggcctcttgtaagctggctgtggctctgctgcaaactgtctctactccaagatgatctggagctttgctagtccctgcagcagaagtaatgagcaaggcggaatgtgctctggctcctgaagatcccgcctggcagtgacatgtcacttctgcttgcatctcattggccaaagcaagacgcatggctacatatgagtccacggcatgaggaagtataattgtctctctggaagggccactattgtgggtgtgtagtcaaccagtttaccatggagatattgattctttagccacggggtcgatgaacagaggctgggtcgtcagaactctctagaggtcattttttggtcacaaatracctcttttatatttactcccaatattgtctttttctgcaccatgaaagaaaatcaactgggaattgtgactctgattgcctcacctgcttctcataagaattagagaaccatgataccattggtttgaggccaaatctagtcagaaatacaaagacagaagcagaatttgggattttagtcctcatacccaaggttctgtggctttaataagagatatatggagtagttggtggaat

SEQ ID NO: 64046 - DNA, 933 bp, Homo sapiens
tgcatttatggggaaaatgattttaaactgctggtttaggttatttaatgggtataggtatccattaaactttctttttttttttctttttttttttttttttttttgagacggggtcttgctctgtcacccaagctggagtgcagtgatgcgatttcagctcactacaacctctgtttctcaggttcaagcaattctyctgcctcagcctcccgagtagctgggactacaggagcgcaccatcatgcccggctaatttttgtatttttaggagagacatggtttcgctatgttggccaagttggtctggaactcctgacctcaaatgatcagcctgcatcggcctcccaaagtgctgggattacaggcatgagccaccgcacccggccagatctgttaaacttcctattttaagtctatttttaagtgttgtagtttctaataatcattcatactttccttccagttaagtaacagaactccaatatacaaaatacacacaataccaccttgaacaaaggacattttctcattcttccttgtagccaaatgactagattttggccaattaattgcaaatcagagtgcagtatgggactttcaggatgactcctttaagaaagctagtttaggagacagaagacctttctttggcttcttctgctttttctccatctgctggcctgaaactcagaccagatgacttgaactccattttcaacgatgagctgaccctgaagacggcagccatatactaggatgttagaataaaggatatagccctgcatctctgataatgcctctgagctgcctctctagttctgacctgattatttctgcacttactgtaaaagaaaaaaactatatttaaataaacattagctttttgttttacattgtatgtcatttaactaaaatgttaatatttttaaa

SEQ ID NO: 64047 - DNA, 660 bp, Homo sapiens
cagcgcaggaggtggagtgtttctgggtctcaggcaacacatttgtgttacgttacattctcacaacaaccatgagagggactgctattgtcccatttcacagataagaagaccaaaccttagtgctctgaagtcactaatgcaaggccccactgcccagtcacttgtggagccagtgaattcacaccacctgactccaaacctgtacrctttaagagcccactgacatcctctcctttctctgccttcctccacgaccctccttttccgcctgccttcttggtctctgctgcggggggccaacctggaccttggggtccagtgtcctgccattagtcatctgatacccgggcactaagcccaaccggagggacaaagcccacaccggccacggggtggaggagagtcgatgtcggatttagggcggggctgaaccaagcccagggccgcgggggccgtggcttcagcaccgcggagagcgccatctccgggggcggggctggcggggtgggggcggggcctgggcggggcgcgcgagaccccggccgggtcccgggggcgcgcgcggggcgctctcgccagtcccgcgggccgtgcgcggtgctgtgccgcgccctgccagacacaggtgcgcccgcctagcccgaactccgcggcggc

SEQ ID NO: 64048 - DNA, 562 bp, Homo sapiens
tgagacggagactcgctctctcaccaggctgagtgcagtggcacratttctgctcactgcaacctccgcctcccgggttcaagcaattctcttgcctcagcctcccgagtagctgggattacaggtgcctgccaccaggcctggctgatttttgtatttttagtagagatggggtttcaccatgttggccaggctggtctcgaactcctgacctcaggcaatccacccgcatcggcctcccaaagtgctgggattacaggcacgagccaccgcacctggtctactttttgtattcttagtagagacgggctttcgccatgttgaccaggctagtctcgaactcctgacctcagacgatccacctgcctcggtttcccaaagtgctgggattacatgtgtgagccactgcgcctggccaattaatttccttttaaatagcaacttgtggctagtggctgccaaatcagacagtgcaaatatacagtaaaggtggagtagtatcaaaatcagaatcaatgagtttgaccagataaattttcatgttcctgaaatgttgatctat

SEQ ID NO: 64049 - DNA, 1065 bp, Homo sapiens
  misc_feature (1)...(1065): n = A,T,C or G
ccttttattccttccatgaatcaacatgcaatytaaaaatacaaccttcactctttataccagaggctgatagagacttgtaacttttcacaaatgcagaaaggtatcaaatcttactcaaaatctttctgggtcttcagacacaccaattgctcaaaatgaaaccaaggatactaaattttacgcgtatggaaaaactaacctggagaaatgtttatttgttgatgagatcagaacttactcaaagaggaaaaaaaagactttctaccgtctaactaaaactcagccactgcattgataagtcacaccaatattcatcaacgctgaggatgcaggaaggagacagggcagtcttcagaatgtgccacaaaattatcctctaaagaagaggggatgtgttactgtcataacattagagacaaaattacaatctagagtaaaatgtatgtattgtttaatggaaacagaaactaagtgaagatttcaccattttatgaacaaaaacacagaatgccattttatggacaaacacacagaagagaaactcaagataaactccctccttaatgcaagtaaaattcaataagagaatctgcactggagttattggaggggatagtccaggcaagacacaggatagaattctaacagaggaagacagggaggaatactggtggcagaagctataaaaatatacttagctaaaataattgcactttcttcannnnnnnnnnnnnnnnnnnnnnnnnnnnnnnnnnnnnnnnnnnnnnnnnnnnnnnnnnnnnnnnnnnnnnnnnnnnnnnnnnnnnnnnnnnnnnnnnnnngaattcctagatctaatcatccatcttcaaaatgtaaatgtaaacaaacatttctccgccaaacactttcagaaatactaagcgtcttattaattttcaaaaccaagattttgtgatagttttatatctctagaaaagtgttttaaatatggcatttggtgaataaattggtgtaccacttgagttcctatactttaattttgtgattatcacattcactgtaccatagactaacatttac

SEQ ID NO: 64050 - DNA, 930 bp, Homo sapiens
ggctaagttggggacctagggcccctgggagggtggctggatgccaaggagagttgaatagggttgggggagctggctgtggccctttgtcttccaggcccatcgggagcggtgcaggcaaggagctcctgggaggtggggcggctggggctgcggggaaaggcttggtccctttcccaggatcctgtgaatggcttttggcagcccggctcaggaacgtgagggcttgggagagagctcccaggggagggagcctccgtggagtggagggagccctgtgtgggcattgtggggaggggtcccagggctgagaatgtagaatgggcagcccaggagatccaggaaggagggctgctgacaactgcatctgtcactcctcagtctcatgccactgtggtggggggtgcaggaaaactctgttatggatttgtcactgggatgattcatcctggtcccccaggccagctgctagggagacccttccttgtgctttttccaggctctaccagaaggtcctcaccccttctaggccataacttcccaagctccagagcagagagtcacctgtctctgacttgggctggatttgagcattttccaagtaaccctcagtacctgggactgggggtctgactgtgtctccagagagctcctgcttctcttctcccctgcctsctccccctcttgccaccacacacattggccatcaccacctttgttaaggctgataagagcatctccctgagggttggccagcttccctgagcaaggcggagggccatccagagccggcaagcctggctgtgacttgccacccttcctgcctgctccagaggagagttacgagtgaggcctttgacagtggaggcggggtggacacagcaaatggccctagggatggcctgagggggcagggccggggcctccctg

SEQ ID NO: 64051 - DNA, 930 bp, Homo sapiens
ggctaagttggggacctagggcccctgggagggtggctggatgccaaggagagttgaatagggttgggggagctggctgtggccctttgtcttccaggcccatcgggagcggtgcaggcaaggagctcctgggaggtggggcggctggggctgcggggaaaggcttggtccctttcccaggatcctgtgaatggcttttggcagcccggctcaggaacgtgagggcttgggagagagctcccaggggagggagcctccgtggagtggagggagccctgtgtgggcattgtggggaggggtcccagggctgagaatgtagaatgggcagcccaggagatccaggaaggagggctgctgacaactgcatctgtcactcctcagtctcatgccactgtggtggggggtgcaggaaaactctgttatggatttgtcactgggatgattcatcctggtcccccaggccagctgctagggagacccttccttgtgctttttccaggctctaccagaaggtcctcaccccttctaggccataacttcccaagctccagagcagagagtcacctgtctctgacttgggctggatttgagcattttccaagtaaccctcagtacctgggactgggggtctgactgtgtctccagagagctcctgcttctcttctcccctgcctcctscccctcttgccaccacacacattggccatcaccacctttgttaaggctgataagagcatctccctgagggttggccagcttccctgagcaaggcggagggccatccagagccggcaagcctggctgtgacttgccacccttcctgcctgctccagaggagagttacgagtgaggcctttgacagtggaggcggggtggacacagcaaatggccctagggatggcctgagggggcagggccggggcctccctg

SEQ ID NO: 64052 - DNA, 763 bp, Homo sapiens
atccactgtataggtgaaggctgaattgtggaagggaccaccagtcctctctgtcatgtctgcttggaatagagcttctgcaacacggagctatgagggatgagagatgccagctccctgctccttctggcttgaaactatagccctagacagggatctggaggtagttcaagaygcctgcccctccagcctcgaaactatagccccagactgggtgctggaggcagttggagacccctgcccctcctggtttgaaactgtagcccaagactaggcactggagccagtgggtgacccattttattgttgctcttgctcagtaaacatcttaattttactgaccttgggggtggggatgggagcaaggtgtgattcaaatgtaacagtccctgttttctatttgctgtatgtacttcaggcaatttccagatactttaaatggttggatctttttttttcataattttcaccggttaaatgattgttttgccaccaagctcttcacacttccattttggaagtcacaatatgcctctattcttaaataacaaaaataaatagcaaactggtacaatcacaaatagaggtttcatgcaggaagtttttaagcattacatgttttcattcttgcaataatgtcaaatttatcttttagaaatgggcaaataaatatatctgtgttttttgcttgaatgaaagttataagtgacaaattgttattcctattctttcctgaaatagacaaaaatattcattattatgt

SEQ ID NO: 64053 - DNA, 555 bp, Homo sapiens
ttagaaagcctgtagaacttaacttaatgactacaaattagtcatcaagcctgggctcaagcaatgatttgattcccagggttaagcaccgtgttctcctttataatgaaaacctgtcttattctggcaaatacagtatttatgaatttttagtcacccagcctcagagaaagacccaaatgccttgactaaaaacaattttttttttttgagagtcttgctctatctcccaggttggagtgcagtggtacaatctcagctcactgcaatctctgcctcccagatgcaagtgacycttgtgcctcagcttcccgagtagctggaattacaggcacctgccaccacgcccagctaatttttgtatttttagtagagacggggtttcaccatgtgatctgcccccagcctcagcctcccaaagtgctgggattataggagtgagccactgtgcctgggcctaaaaacaactttgtaacacaagacacttaggcttttttttttttcaaagagcagagtctcgcttgctatgttgcctacgctggtctcaaactcctg

SEQ ID NO: 64054 - DNA, 555 bp, Homo sapiens
ttagaaagcctgtagaacttaacttaatgactacaaattagtcatcaagcctgggctcaagcaatgatttgattcccagggttaagcaccgtgttctcctttataatgaaaacctgtcttattctggcaaatacagtatttatgaatttttagtcacccagcctcagagaaagacccaaatgccttgactaaaaacaattttttttttttgagagtcttgctctatctcccaggttggagtgcagtggtacaatctcagctcactgcaatctctgcctcccagatgcaagtgactcttgtgcctcagcttcccgagtagctggaattacaggcacctgccaccacgcccagctaatttttgtatttttagtagagacggggtttcaccatgtgatytgcccccagcctcagcctcccaaagtgctgggattataggagtgagccactgtgcctgggcctaaaaacaactttgtaacacaagacacttaggcttttttttttttcaaagagcagagtctcgcttgctatgttgcctacgctggtctcaaactcctg

SEQ ID NO: 64055 - DNA, 982 bp, Homo sapiens
cccttaaaggggccgggcatggtggctcactcctgtaatcccagcactttgggaagccgaggagggtagatcacctgaggtcaagagttttgagactggcctggcygacgtagtgaaaccccttctctactaaaaatacaaaaattagccaggcgtggcagcgtgcacctgtaatcccagctactcgggaggctgaggcactagaattgcttgaacccaggaggtggaggttgcagtgagccaagatcatgccattgcactccagcctgggcaatagagcgagactccgtctcaaaaataaataaataaataaataaataaataaataaatctcttaaaggattgcctctgaaaccttttgcataatatgtaagtttcttcataatctcatctttgctcttctttctagttttgatatcttgctgctctcccacataaatgctgaagctcgtggaaattaaaatatggctattagaactccagagcatgtgctctgagtgacataggcttgtaaacatgataggtaccgggacagaattttaaaatagatataatctgttgttttctttaagtgactacctggatgtaagtagtacattatgtgctatattgagcattgtaatttgtagatccaaagactggatttataatatttgcctgaaccgggcgcggtggttcacgcctataatccagccttttgggaggcccaggtgggcagatcacttgaggccaggagtttgaaactagcctggccaacatggcgaaaccccatctctactaaaaatacaaaaaattagctgagcatggttgggggcgcctgtaatcccagctactcgggaggctgaggcaggagaattgcttgaacctaggaggcagaggttgcagtgagccgagatcatgccactgcgctccagcctgggtgatagagcatgactctgtctcagaaaaacagacaaacataatatttgcctgaagttgatgc

SEQ ID NO: 64056 - DNA, 982 bp, Homo sapiens
cccttaaaggggccgggcatggtggctcactcctgtaatcccagcactttgggaagccgaggagggtagatcacctgaggtcaagagttttgagactggcctggctgacgtagtgaaaccccttctctactaaaaatacaaaaattagccaggcgtggcagcrtgcacctgtaatcccagctactcgggaggctgaggcactagaattgcttgaacccaggaggtggaggttgcagtgagccaagatcatgccattgcactccagcctgggcaatagagcgagactccgtctcaaaaataaataaataaataaataaataaataaataaatctcttaaaggattgcctctgaaaccttttgcataatatgtaagtttcttcataatctcatctttgctcttctttctagttttgatatcttgctgctctcccacataaatgctgaagctcgtggaaattaaaatatggctattagaactccagagcatgtgctctgagtgacataggcttgtaaacatgataggtaccgggacagaattttaaaatagatataatctgttgttttctttaagtgactacctggatgtaagtagtacattatgtgctatattgagcattgtaatttgtagatccaaagactggatttataatatttgcctgaaccgggcgcggtggttcacgcctataatccagccttttgggaggcccaggtgggcagatcacttgaggccaggagtttgaaactagcctggccaacatggcgaaaccccatctctactaaaaatacaaaaaattagctgagcatggttgggggcgcctgtaatcccagctactcgggaggctgaggcaggagaattgcttgaacctaggaggcagaggttgcagtgagccgagatcatgccactgcgctccagcctgggtgatagagcatgactctgtctcagaaaaacagacaaacataatatttgcctgaagttgatgc

SEQ ID NO: 64057 - DNA, 551 bp, Homo sapiens
gtattatttatttgttactttactgctttatgctgttatctttataagtttcttatggagaaggattttgtcttatataattatatgttctcttgagcattgttaccttgcacataatgactcctcaatatttatttcatttattatactcaaaataytgattttgatcataattggagtaatactttattttctgtttttcagttaacctttgttctaatcctgaggataaacttcaaatttatagggacaattttgagaaggcatacttggattcaacagagagattttatagaacacaagcaccctcgtatttacaacaaaatggtgtacagaattatatgaaatatgtaagttagaacttagtatatgtgataatttgagcaattcccttgatattcttaaaatgattgctattttgcttctggacaggcagatgctaaattaaaagaagaagaaaaacgagcactacgttatttagaaacaagacgagaatgtaactccgttgaagcagtaagtaattttgtaattgtacattttatgggattatt

SEQ ID NO: 64058 - DNA, 698 bp, Homo sapiens
ctgcagacgacacactcacacacattgctgggggtgattttgcaccactcccctttgaacatttcgcagtgtctcgagacattctgggttgtcacagctggagggagaggcaagggagcggggagatgctactgaaatctgataagtaggaagcaggggacagccccatccccccgtggccaacaaagaattatctgacccaaaataccaatggtgctgaggttgagaaaccctgcctcaaagatctcttccttggctgtctagtctctgatatcttcttcttgtccctctgtcatccccatggccttatagtcccacctgtcctcacttgtttatttccactgtcccttcttggttccgacttcataacctcccatatgcattacttactacaatagcttctttttatttacttactttttagtgcttatgtttcattattttttccttctttttttttttttttttgagacagggtctgtgtctgtcacccatgctggagtgcagaggcaccgtcatagctcactgtaaacttgcactcccaggctcaagtgatcctcccacctcagcctcccaaatggctggtactacaggtgcatgccaccacatctggctaatttwttttttttattatttttttctgtagagatggggtcttactgtgttgtccaggtttgttttgaactctttgtatcaag

SEQ ID NO: 64059 - DNA, 416 bp, Homo sapiens
aaaaactcaggagtttatagtatgaaataaacccaattcaattacaagcctgttttttcaaataaattccttgtagctgtttctccctgaagaataaaaccaaaagaagcaataaaaagccattttggaaatatatctcggccggacacagtggctcayacctgtaatcccagcactttgggaggctaaggcaggcagatcacctgaggtcaggagtttaaaaccagcctggccaacatggcaaaaccctatctctactaaaaatacaaaaattagcttggtgtgatggtacgtgcctgtaatcccagttactcagggaggctgaggcatgagaaatcacttggacccaggaggcagaggttacagtgagccgaaattgcaccattgcactccagcctgggtgacagagcaatatt

SEQ ID NO: 64060 - DNA, 416 bp, Homo sapiens
aaaaactcaggagtttatagtatgaaataaacccaattcaattacaagcctgttttttcaaataaattccttgtagctgtttctccctgaagaataaaaccaaaagaagcaataaaaagccattttggaaatatatctcggccggacacagtggctcacrcctgtaatcccagcactttgggaggctaaggcaggcagatcacctgaggtcaggagtttaaaaccagcctggccaacatggcaaaaccctatctctactaaaaatacaaaaattagcttggtgtgatggtacgtgcctgtaatcccagttactcagggaggctgaggcatgagaaatcacttggacccaggaggcagaggttacagtgagccgaaattgcaccattgcactccagcctgggtgacagagcaatatt

SEQ ID NO: 64061 - DNA, 416 bp, Homo sapiens
aaaaactcaggagtttatagtatgaaataaacccaattcaattacaagcctgttttttcaaataaattccttgtagctgtttctccctgaagaataaaaccaaaagaagcaataaaaagccattttggaaatatatctcggccggacacagtggctcacacmtgtaatcccagcactttgggaggctaaggcaggcagatcacctgaggtcaggagtttaaaaccagcctggccaacatggcaaaaccctatctctactaaaaatacaaaaattagcttggtgtgatggtacgtgcctgtaatcccagttactcagggaggctgaggcatgagaaatcacttggacccaggaggcagaggttacagtgagccgaaattgcaccattgcactccagcctgggtgacagagcaatatt

SEQ ID NO: 64062 - DNA, 416 bp, Homo sapiens
aaaaactcaggagtttatagtatgaaataaacccaattcaattacaagcctgttttttcaaataaattccttgtagctgtttctccctgaagaataaaaccaaaagaagcaataaaaagccattttggaaatatatctcggccggacacagtggctcacacctgkaatcccagcactttgggaggctaaggcaggcagatcacctgaggtcaggagtttaaaaccagcctggccaacatggcaaaaccctatctctactaaaaatacaaaaattagcttggtgtgatggtacgtgcctgtaatcccagttactcagggaggctgaggcatgagaaatcacttggacccaggaggcagaggttacagtgagccgaaattgcaccattgcactccagcctgggtgacagagcaatatt

SEQ ID NO: 64063 - DNA, 730 bp, Homo sapiens
gggattcagtattagtggataaggtaaaatggacaaagcatgaagaaattgcactgtttttttgtgggaaagattcgtatatcaaatccatcactttaggagttaccaaagcccaatgtctcaatggtagaataataaaagtggagyactttcttggtcattcagttattttaattaaaaatgaaaaaatctacataatgaaaatctgaaattccatttgcaagttcatctggacaaaagatcatttctttttcttctttacctttaaaaacatatgactaaaagcatcaagtttcaagagaatatatattcattgctactgtattggtcatctaatagttatatttttataaataaatgcaaaatgtagtgttttgtcaactgctagaaaaaaatggctgtttcaatttggttatggacacactcctgccacctggtgtcatattatctaaattacagaatcacatctggaaatgcaaaaacattttaaaaattcaattatttaaagaaaaatatttctatgtatcctgtgtatattaaaattaattttgaagcaaaatgtagacattattacaaaaccaagctgtgatgaataaaattatttagaaatgcagaaaactattcaatattataatcattaaaaataaaatttgaatgcactttttggtttgtatctttataatgaaagactaaatcaaacgtaaaaaaaaaccttcatcttatgctatga

SEQ ID NO: 64064 - DNA, 1012 bp, Homo sapiens
gtgatatttaaaggtaacatttactccatatctatgagaagtacacctaatggatagaaaatgagttgtttttatttcatttcataagtgagaaaatccatataaactattaaattaaaaacaaaagcaattcacagagaagaatttcttactgaaacattttattttccttactgatatgatatcattaccagaacataagttcctaattaggctatacagtaataatcaaaagtctctaagcaccaactataaatatacgaattcttagatctctacattttaaaaacaagctcatttcctttacttaaattgtaaaaagttggctatgattttcctcaagacattcatgttcttatttcatagcactttcaaaaaggttgattaaattgttacttttaactatagattcacaaagttttaggcatttttattattagttcattttctgaaattgaagtatttttcaagctaattttttatataaatgtgtaagccctagctcaaatatttgtatttatcattcactttcgggactttttttctctgctgtattgttttaatcctcatctttatatcgtctatatgttgagaggcaaaaattatcaattattgttagtttcacagtgaaaaacttgtcttagtctatccgtgtagtgattttgagaattatwaataaacataattatctcttttataaaaaaagaagtataagaatgtttagagacacaaagaagacagatcttaactatattaagaaacggaaaaaataaagaattgaaaaagaattatggaggcatacaagtttcaagggatagttcccaatgtaattggtagatgcgattttccatttactcaaaggcacgtggacccaaactctatataaaatctacataggttattggcaggaaaattaatatatttgggtgaattaaggtagaactaggctagattgggtcaaatattgtagataatgaacaggattgattaaaaactgatcttgcaaaaccca

SEQ ID NO: 64065 - DNA, 736 bp, Homo sapiens
atagttgaccagtctactgagattggggagtaggggaaggaaacattttcaaaaggaaaatgagagcacctgatgagaaagcctattaggtttagaaaagagttatgccagaacagtgccagataggtgctcctgtccccgccctttcttctactcctttcttcwacctcaaggatcagaagtcatgactaaatgaatagagaggttgggactggcaaagcaaagtgagaagagcctgactttgctgctccatctcgctgcagcttcacttatctcaaagagtggagacccaaatggaatttaaatttgtattactattgcactgaaccgggcttataaagtcaccaaaaaagtctgtgttctatgagtcttagtgaccatagaacttttagcacctaatattcgcaagaaaagacaatgtacactgtactttttttttatccagttagaggaagaactggcactgcaacatttaaagtgatcatggaaaaataataataaagtgctttatattcacatctcatgaatcatgtttattcaattcgctgattgtactagcaaaacttttgcagatctcccctttaacatttcatttcattctatttttaatcctagatgagagaaatgtggatctgaagggagacattgaatttctaaaaaaaaaatttacatttctgaaaaaagttgctgtgtaatataactgtcaagatttaaatcatccacatgaaactgactg

SEQ ID NO: 64066 - DNA, 866 bp, Homo sapiens
ccttcagcgctaacctcacttttaagtgccctaaaactactaaggtaaatgtaatttctgggtttctataacattgcagaagtattgtgtcaataacctgtattcaattttatcacacatattttcctgatccatgcaattcctaaagcagagcacaaaggcttttattctattatttcagacaaaagtttaaaatgcaaaagctagtatgagaggtaacaattgtgaaatcaatgacagatgttttcttgttttgaaaaatacagaaataggtacttaagtggggagaagaggtcattagtaagaggctagggatgtgtacaaaaatgtcagccctaccttgcatttggccttataccaaagtctctttatttgttctgaggtaacttgtgaaatagctacatacatttgaccagatacctaatgcaggtaccactctttaagggtgaatgtttttatcttttttgccctcactacacaattaaattttaccattataattatcaattgggtcactctaaaggaattatattaacttcgtattttaatgatgatagtgaaagactcatttgacaaatcttaagcatatattaaagagtaagattattgtaattatactcttatgctacatacctacaaagaaacaaacatactaaatttggctgttaatttgtaayttttttgaaggaattagtgaagtattgaaccatacatggttaaggacaatatgagtatttttttgtctcctattgtgtcatccactcttccatctggacacaaaggtgaggtgatgtttctggggaactataatatcccttaatgctctaagtatttcttggcatttagtctaatgtactgattgcagg

SEQ ID NO: 64067 - DNA, 3790 bp, Homo sapiens
cagcccacctggacagcgcagagatcttgctccatgctcgccacctccgtcttgaaaattgtctaccccactgccttcagcccaagcctgtcccatcctcccactccttttaaataccacatgccctatggagcttttcagtacttgttgctctgacgctgctcccacccagagccgtgtatttcttcttcgtaattcacgtgagaggaagcaatagaggtgcaggttgtccacctcaatggcctagaacgacctgcacctcccctgggcatctgcaaatttccaacctgctctctgtctcagtgatatcccaagggctgcaatggacagggctaatagcatgagatatgtaagtgacagaaggtgggcatttgaatccagatgattcttttcttgcttctgttacctgtttttgagtatggtgattcatctggctgtgactcagttttttgtttcatgtgtaaaatggagctaatgatacctattacatactattgtgctgaaaattaagtgagactatgtttaaagtgcttgttcatagctgatccttaaaactcttttcctttactcatttctgccttttccccaaaggatttaaagctagactgtatgaggacaatctgtgcactggtctcatgaactttctgcttcatagtggtggagatatccccttgaagattataaactctgtaacaatctctccttgcacatgacaggtgcttaataaataaaaatggccttggatgggatattttcttatacttttagctgaatagcagacctcttttttttttttwaaaaaaaaaagaagcattggaacaatcagtcacatggtttcaaatctgttccacacactccatgggagatgtgatgatgtgtcaattaaatcgttgattatgcagcgaatatataattttcatattcataaagtaatcatctattattaagatttcttctctatttaaatgaaaagaatcctttatgtaggaagttagtaaattgcttttacattagaagagatggtatgcattttcttttagacatcaaaatcctaattggagccttcactgcttccaaaaatgcatttatatgaaagctattgtttgtgggatggtttgggtttctgcaaaatgaagttggtgagcatgaaacctgcttggagaatgaaaagtgcaggtcacacacttgaggagtagaagctttgaatgggtttcccatccataagtctttttgttcctcaaaagaacccttaaaggtacgcaaggctgaggctactgtccccattgccagatgttttaactgaggacagaggttgagctattctttggcagtcaggatgccaatgagtagtattcagtatcagtggggtcctggggagggaggtggggatgggggttctcatcagcacttgccctcccaggccttgcggtgcatggtctctctgagtttcatttccctcctctgtataaatgagaggcttgcacatggctagtgaagctcagggtcttgaaccttgtaaagggcatggcactgtcagttatcattggcacagccagctcctacttctgacactcccatctagtgatctttccactggcattcatggtttcctaaaagtcagcccagggtctgccgcagaaatcatttaggactttcccatcgtgcctgtgccaagattcccacatcctgctgctcctggtctgctcttggcagctgctgtccaaccttcgtggatggagcagaaggcccctgtttattttgtgtagggccctcaggtctcaatgctaagcagagccagctgtagaggaagggtccctccacaggcccagcacctcccctgcatatctgcagatctccaacctgctctctgcttcagtgatatcccaaaggctgcaagggacagagccaacttcgtgagatacatcagttttcttaggatggatgaatggatggatgattattaaaataaatgaaagtctagaatacaaaaatttgagtcatttgaatcaaggtgatgtataaaaacacatttatttttgcctggtgatttcttataggatatttagaaactgtagaaaaaacatcatggagagaattaaaatcacctatactcactgtgcccagagtttatcttggctttgtgtacttccacggtgttatggtttctttgattaggtttgtacaaaaatgagatcccaccataaagtatttcataaatctattttttctacttaatagaacatttccctttattcttaaatacatttaaagcatcactttaattgttgactcatagtttattatctattattcaaacaatctcctctaatattatacattaaaatgttcttccctgtttgtgttactgcaaagaacatagaaatggacatccttgtactgcacaaaagggttatccatgaattcactgccctgcgtttcactctgattgagaatttgcaggtagaatcaggaacatgagacctaaccaagactctttcagagcctctgggttatcagaaccagggggcttcttgaaaaaatgacttaaaggttgtttagtgaatttagtctttcctgacttaaccttgaggtcagacaatttgtctagaagacacagctaatggtgcctaatttgggtctgtgcggatgcatatacatgtgggatgataggaaatgtcagttctgacaagtaagcatgtatttgccaaacagcaagggggcaggcatctagggtgcagggagcaggtgtagagtgtggccaggtatggatggcttgaaaaatggtgccttgccctatgtatgtggagaacagactgcatggcacagtgacgtaacctgagtcagacgtttagctgctttggttgtcatgctaaggagtgtgaactgtatcatgccccagagcaatcaccttcttaataataactagcatttataatgcaattgcaacatacagagtgcttctgtaactctcatgattctcccaactgtgctgtgtggaaggacttgtcaagggttacacaaacaataaatgacccaaatccccgccttctgaaatctctttggtgggcaggggctgagtgagacaccctctggtgagcttccctgcagcacacgtgtctgtgtcctggtgccattcctgttggctgtgacgttcctgtgggttcacggtcagtgcccccacccagacaatgggctcttctgtgttctcagagcctcccactgtgcaggggacatggcacatcctctgtctaacacaggaataaacaagtacatggacatggtatttcctcctgcattctttaagttgaaacacacccacacacacacagtcactgaaatcggcctgtcaaatcgctctccatctatcattcccagcctccctccctgcagcagcagagacatgagttgccttctgaggtgcaggctctgctgtagtgtgagggcagaagggactggcagggggtgtgtgtgcactagatacaggggccacacattgcatcatagatggtcagaactgagacacactttaacacattttttgccatcctcttgttcgctggcatgccaagtgttacaaagtccctggtcctaaaagaaaaccacaataatggacaggaactccacctcctcatgctgaccccattctctgagaattgaaagggaggcatgttactctgtcttggccatttacctatagataagaagggcaggcactccatgaaaaggaaatatggttggccttaggataaagggagtgggaaaaggccctggagaatagcagaggagatca

SEQ ID NO: 64068 - DNA, 3790 bp, Homo sapiens
cagcccacctggacagcgcagagatcttgctccatgctcgccacctccgtcttgaaaattgtctaccccactgccttcagcccaagcctgtcccatcctcccactccttttaaataccacatgccctatggagcttttcagtacttgttgctctgacgctgctcccacccagagccgtgtatttcttcttcgtaattcacgtgagaggaagcaatagaggtgcaggttgtccacctcaatggcctagaacgacctgcacctcccctgggcatctgcaaatttccaacctgctctctgtctcagtgatatcccaagggctgcaatggacagggctaatagcatgagatatgtaagtgacagaaggtgggcatttgaatccagatgattcttttcttgcttctgttacctgtttttgagtatggtgattcatctggctgtgactcagttttttgtttcatgtgtaaaatggagctaatgatacctattacatactattgtgctgaaaattaagtgagactatgtttaaagtgcttgttcatagctgatccttaaaactcttttcctttactcatttctgccttttccccaaaggatttaaagctagactgtatgaggacaatctgtgcactggtctcatgaactttctgcttcatagtggtggagatatccccttgaagattataaactctgtaacaatctctccttgcacatgacaggtgcttaataaataaaaatggccttggatgggatattttcttatacttttagctgaatagcagacctcttttttttttttaaaaaaaaaaagaagcattggaacaatcagtcacatggtttcaaatctgttccacacactccatgggagatgtgatgatgtgtcaattaaatcgttgattatgcagygaatatataattttcatattcataaagtaatcatctattattaagatttcttctctatttaaatgaaaagaatcctttatgtaggaagttagtaaattgcttttacattagaagagatggtatgcattttcttttagacatcaaaatcctaattggagccttcactgcttccaaaaatgcatttatatgaaagctattgtttgtgggatggtttgggtttctgcaaaatgaagttggtgagcatgaaacctgcttggagaatgaaaagtgcaggtcacacacttgaggagtagaagctttgaatgggtttcccatccataagtctttttgttcctcaaaagaacccttaaaggtacgcaaggctgaggctactgtccccattgccagatgttttaactgaggacagaggttgagctattctttggcagtcaggatgccaatgagtagtattcagtatcagtggggtcctggggagggaggtggggatgggggttctcatcagcacttgccctcccaggccttgcggtgcatggtctctctgagtttcatttccctcctctgtataaatgagaggcttgcacatggctagtgaagctcagggtcttgaaccttgtaaagggcatggcactgtcagttatcattggcacagccagctcctacttctgacactcccatctagtgatctttccactggcattcatggtttcctaaaagtcagcccagggtctgccgcagaaatcatttaggactttcccatcgtgcctgtgccaagattcccacatcctgctgctcctggtctgctcttggcagctgctgtccaaccttcgtggatggagcagaaggcccctgtttattttgtgtagggccctcaggtctcaatgctaagcagagccagctgtagaggaagggtccctccacaggcccagcacctcccctgcatatctgcagatctccaacctgctctctgcttcagtgatatcccaaaggctgcaagggacagagccaacttcgtgagatacatcagttttcttaggatggatgaatggatggatgattattaaaataaatgaaagtctagaatacaaaaatttgagtcatttgaatcaaggtgatgtataaaaacacatttatttttgcctggtgatttcttataggatatttagaaactgtagaaaaaacatcatggagagaattaaaatcacctatactcactgtgcccagagtttatcttggctttgtgtacttccacggtgttatggtttctttgattaggtttgtacaaaaatgagatcccaccataaagtatttcataaatctattttttctacttaatagaacatttccctttattcttaaatacatttaaagcatcactttaattgttgactcatagtttattatctattattcaaacaatctcctctaatattatacattaaaatgttcttccctgtttgtgttactgcaaagaacatagaaatggacatccttgtactgcacaaaagggttatccatgaattcactgccctgcgtttcactctgattgagaatttgcaggtagaatcaggaacatgagacctaaccaagactctttcagagcctctgggttatcagaaccagggggcttcttgaaaaaatgacttaaaggttgtttagtgaatttagtctttcctgacttaaccttgaggtcagacaatttgtctagaagacacagctaatggtgcctaatttgggtctgtgcggatgcatatacatgtgggatgataggaaatgtcagttctgacaagtaagcatgtatttgccaaacagcaagggggcaggcatctagggtgcagggagcaggtgtagagtgtggccaggtatggatggcttgaaaaatggtgccttgccctatgtatgtggagaacagactgcatggcacagtgacgtaacctgagtcagacgtttagctgctttggttgtcatgctaaggagtgtgaactgtatcatgccccagagcaatcaccttcttaataataactagcatttataatgcaattgcaacatacagagtgcttctgtaactctcatgattctcccaactgtgctgtgtggaaggacttgtcaagggttacacaaacaataaatgacccaaatccccgccttctgaaatctctttggtgggcaggggctgagtgagacaccctctggtgagcttccctgcagcacacgtgtctgtgtcctggtgccattcctgttggctgtgacgttcctgtgggttcacggtcagtgcccccacccagacaatgggctcttctgtgttctcagagcctcccactgtgcaggggacatggcacatcctctgtctaacacaggaataaacaagtacatggacatggtatttcctcctgcattctttaagttgaaacacacccacacacacacagtcactgaaatcggcctgtcaaatcgctctccatctatcattcccagcctccctccctgcagcagcagagacatgagttgccttctgaggtgcaggctctgctgtagtgtgagggcagaagggactggcagggggtgtgtgtgcactagatacaggggccacacattgcatcatagatggtcagaactgagacacactttaacacattttttgccatcctcttgttcgctggcatgccaagtgttacaaagtccctggtcctaaaagaaaaccacaataatggacaggaactccacctcctcatgctgaccccattctctgagaattgaaagggaggcatgttactctgtcttggccatttacctatagataagaagggcaggcactccatgaaaaggaaatatggttggccttaggataaagggagtgggaaaaggccctggagaatagcagaggagatca

SEQ ID NO: 64069 - DNA, 3790 bp, Homo sapiens
cagcccacctggacagcgcagagatcttgctccatgctcgccacctccgtcttgaaaattgtctaccccactgccttcagcccaagcctgtcccatcctcccactccttttaaataccacatgccctatggagcttttcagtacttgttgctctgacgctgctcccacccagagccgtgtatttcttcttcgtaattcacgtgagaggaagcaatagaggtgcaggttgtccacctcaatggcctagaacgacctgcacctcccctgggcatctgcaaatttccaacctgctctctgtctcagtgatatcccaagggctgcaatggacagggctaatagcatgagatatgtaagtgacagaaggtgggcatttgaatccagatgattcttttcttgcttctgttacctgtttttgagtatggtgattcatctggctgtgactcagttttttgtttcatgtgtaaaatggagctaatgatacctattacatactattgtgctgaaaattaagtgagactatgtttaaagtgcttgttcatagctgatccttaaaactcttttcctttactcatttctgccttttccccaaaggatttaaagctagactgtatgaggacaatctgtgcactggtctcatgaactttctgcttcatagtggtggagatatccccttgaagattataaactctgtaacaatctctccttgcacatgacaggtgcttaataaataaaaatggccttggatgggatattttcttatacttttagctgaatagcagacctcttttttttttttaaaaaaaaaaagaagcattggaacaatcagtcacatggtttcaaatctgttccacacactccatgggagatgtgatgatgtgtcaattaaatcgttgattatgcagcgaatatataattttcatattcataaagtaatcrtctattattaagatttcttctctatttaaatgaaaagaatcctttatgtaggaagttagtaaattgcttttacattagaagagatggtatgcattttcttttagacatcaaaatcctaattggagccttcactgcttccaaaaatgcatttatatgaaagctattgtttgtgggatggtttgggtttctgcaaaatgaagttggtgagcatgaaacctgcttggagaatgaaaagtgcaggtcacacacttgaggagtagaagctttgaatgggtttcccatccataagtctttttgttcctcaaaagaacccttaaaggtacgcaaggctgaggctactgtccccattgccagatgttttaactgaggacagaggttgagctattctttggcagtcaggatgccaatgagtagtattcagtatcagtggggtcctggggagggaggtggggatgggggttctcatcagcacttgccctcccaggccttgcggtgcatggtctctctgagtttcatttccctcctctgtataaatgagaggcttgcacatggctagtgaagctcagggtcttgaaccttgtaaagggcatggcactgtcagttatcattggcacagccagctcctacttctgacactcccatctagtgatctttccactggcattcatggtttcctaaaagtcagcccagggtctgccgcagaaatcatttaggactttcccatcgtgcctgtgccaagattcccacatcctgctgctcctggtctgctcttggcagctgctgtccaaccttcgtggatggagcagaaggcccctgtttattttgtgtagggccctcaggtctcaatgctaagcagagccagctgtagaggaagggtccctccacaggcccagcacctcccctgcatatctgcagatctccaacctgctctctgcttcagtgatatcccaaaggctgcaagggacagagccaacttcgtgagatacatcagttttcttaggatggatgaatggatggatgattattaaaataaatgaaagtctagaatacaaaaatttgagtcatttgaatcaaggtgatgtataaaaacacatttatttttgcctggtgatttcttataggatatttagaaactgtagaaaaaacatcatggagagaattaaaatcacctatactcactgtgcccagagtttatcttggctttgtgtacttccacggtgttatggtttctttgattaggtttgtacaaaaatgagatcccaccataaagtatttcataaatctattttttctacttaatagaacatttccctttattcttaaatacatttaaagcatcactttaattgttgactcatagtttattatctattattcaaacaatctcctctaatattatacattaaaatgttcttccctgtttgtgttactgcaaagaacatagaaatggacatccttgtactgcacaaaagggttatccatgaattcactgccctgcgtttcactctgattgagaatttgcaggtagaatcaggaacatgagacctaaccaagactctttcagagcctctgggttatcagaaccagggggcttcttgaaaaaatgacttaaaggttgtttagtgaatttagtctttcctgacttaaccttgaggtcagacaatttgtctagaagacacagctaatggtgcctaatttgggtctgtgcggatgcatatacatgtgggatgataggaaatgtcagttctgacaagtaagcatgtatttgccaaacagcaagggggcaggcatctagggtgcagggagcaggtgtagagtgtggccaggtatggatggcttgaaaaatggtgccttgccctatgtatgtggagaacagactgcatggcacagtgacgtaacctgagtcagacgtttagctgctttggttgtcatgctaaggagtgtgaactgtatcatgccccagagcaatcaccttcttaataataactagcatttataatgcaattgcaacatacagagtgcttctgtaactctcatgattctcccaactgtgctgtgtggaaggacttgtcaagggttacacaaacaataaatgacccaaatccccgccttctgaaatctctttggtgggcaggggctgagtgagacaccctctggtgagcttccctgcagcacacgtgtctgtgtcctggtgccattcctgttggctgtgacgttcctgtgggttcacggtcagtgcccccacccagacaatgggctcttctgtgttctcagagcctcccactgtgcaggggacatggcacatcctctgtctaacacaggaataaacaagtacatggacatggtatttcctcctgcattctttaagttgaaacacacccacacacacacagtcactgaaatcggcctgtcaaatcgctctccatctatcattcccagcctccctccctgcagcagcagagacatgagttgccttctgaggtgcaggctctgctgtagtgtgagggcagaagggactggcagggggtgtgtgtgcactagatacaggggccacacattgcatcatagatggtcagaactgagacacactttaacacattttttgccatcctcttgttcgctggcatgccaagtgttacaaagtccctggtcctaaaagaaaaccacaataatggacaggaactccacctcctcatgctgaccccattctctgagaattgaaagggaggcatgttactctgtcttggccatttacctatagataagaagggcaggcactccatgaaaaggaaatatggttggccttaggataaagggagtgggaaaaggccctggagaatagcagaggagatca

SEQ ID NO: 64070 - DNA, 504 bp, Homo sapiens
ctcatccccggatcaagcccagcagcgcggcgtcgcctagtgcaggcggagcccgcgcccacccggaactgcgcaggcccgcgcacggcaggcgcagcgcactccagccggcacctctccctccacacctcccsgctagcagagggagccaactccgcctcgccagcccagagaggggatccccacagcgcagcggcgggctgaagggctcctcaagcacgccagggcggacgcctaggccgaggaggcccaagagcgatcgagggctgctagcacgttgtcaccgctcacaactactggaaaacattcaggtaggaccttacttctgaatgtaagtggactctctgccttactccatggcctgactctaagctggtgaaaagtataaaacctttgaacactcagtgtgcatcgccccagaatgcatctaaaggcctcatcctccaggtatgcaagctgtacctcctaggatgcagtgccctgaaccccacccctacctgctgt

SEQ ID NO: 64071 - DNA, 729 bp, Homo sapiens
cttgatggagtagctgtctgtagcaatccagcattcaggaaaggtacaggcataactggaagttattmctccagtgacaacctactgtgcagtgtaagccttccccaacacctttctcctttaggctgttttgtcttctttctcttcctctaatcgcccctatcccactctcatttcttgcatagattgcctaatagaccactaactagtctcctgcgttctttattgtcctaggtatatcaccctcacagtgaccagagtaatgttttaagaaagctcatagaatcttatactaggcttgttctttccacagcacttgccccatcttgcccgtccctgactcttatcacactggctttctgacattatcagcataatccagctccactctgccttggagcccttttagttttgttccctatgactatgatgttcttcctagggcttatgagatgaccaatatcctctttctcatttctgaattcaaaagttaccttccctgagtggccttttttgaccacctaatcttaagtagctcagctttccctgttattttctagtatagctctctgcttatgtgcttatgttttttttcttagctgccaaaaattgtagctcttttgtttatctgtctccccatcacaggtggtcagtttcatgagggttggggccatggtttgtcacaatgactattgtatcttcaatgcccagcacagtacctggcacata

SEQ ID NO: 64072 - DNA, 1609 bp, Homo sapiens
ttttcttcctgtgaggccctgttttgtacaatccaatgaaaagcaaggccaacataatgtgaatggtgtatccttgacttagccagtatgttgatcctactcagcttcctcccaagatctagctccttcctaagttcctatggtccttttgaaattgtgtgtgtgtgcgtgtgtgtattctataacagtgctgaaaagcaagaaaggattctgtaagtataccagatattttgcataatttttaagttatagacagcaggtaggaccagattgataaaggaaattataatttgaaatggacacagacaaaggcagaagccagttgcaacggtgagaactgtttttaccacaggaactccaaacaaactcagtatagggtcaggtataaatcaagaaggtccttggggcaattaccagggtaattgagcaataattctttgtagaggagctccatctttacttaaagctaccagtggatggggtttgttccaagtcaaaaccctgagtaattttcttttaatgatgatcaagacaggaggcacataatgtattaaggccagagaataaaacagagtgaagtttaataataagtcttgttctccacggtggtgttttcctgttttataaaatatgaaatcagaattatccttgaaattcagttttcaacttcataactttaggaataaagtcagccccttagttttatttcttgacattgaatgtaggcaattgtgtaagattatcattttatatatttttcaaaggcatagttgcactggaaataagttactttaaaacatttgggcaactttttttggacacactggaacagtaatgttaatgcatgcagtcaaataataatattaygaaaacaatcttaattttaatcctattaatctgtgtgactttgggtggtttctattctcacatggatttaaatgaggcaaagagacatattttacatcaataaaatatactaactaccaataagatgtagcagacttaaatttttattcatcaagcaatatacaattaaaatataaaacactcttacatatacaataaaaaggagacccagacaagtaaaatatacataaggttttagagcatctgatcaataattactaaacttgtttaaataagtatatatgtagatgatatacattctttcaaacacctatggaacatgtatagaagttgaacatatgttaagcctcaaagaaaatctcaatatatttcaaaaactggaaattatttaggtcaaattgattgatcacaatatagtaaaacttaaaagggcaaccaaagaagattagaaagttaaatagatataagaatacagcaacaacaatgttttcaaatagctcctggttaaaagaagaaaccacattgaaattataaactgtttggcaataagtcataataaagaacagactataggaaatgctgccaaagatggtactaaaaggaaaatgtacattagaataatatgttaaaatgataaagaatgaaactaacaaaaatgaccaatatgataagccacaaatactagaaaggaaaaaactaataaaggtaacaaagtcttcatgcacaaaaacaaacaaacaaa

SEQ ID NO: 64073 - DNA, 702 bp, Homo sapiens
agaagagtgaaaattcaaacagcagagctaataagaaagtgagccaaaattgaatccaggtctgtctgaaaagaggggtatatatgaagagtatgggcatccaagatgggaggaaagattgtaaagaggctgaggaaacgttgttccctttacatgactattggagaaagatggagcttctatatacacagccacaggatttgccaaaccagagagatacagttatttatagttacatagcttgacaaagggtttttgaaaagtttgtgaatttacttatacctttacaagttctaaaaatgaatttccatttagggacgcatttaacacaatgccaatgtagaaaatataaaattacatgaaattctaactctactggaaaatctgggatcggcctagagcaaacacattgatatgctagcttcctctcaattaagcctgggaaatgtgattgactgtgactctatgcttacaaaaagattctttcccccttattcaattcagtaaagacatagacatgggtagcacatgggcgcagtgattaacaagagtggttgcctccagaaattaaactcagaagtagtaaagaaagagaatatcttaaaattttttaactaaatcyaccttgaaaacatcacacctctctactcttttgtctataatgatttgcaaagaacatatgcttaattctaatcgcaatat

SEQ ID NO: 64074 - DNA, 1608 bp, Homo sapiens
atatgtagcaaatggttctttcattaattcatttgttaattcaccgtgcattaattgagtgcccagtgagtgtcaggcactgggctacttggatttcttttccctgtattgatccatatatcttcaggtgctccttgatatggctctccattgactctctcatataaggctttcattacctattcacatactccctcccaaagaggactggtccaaaagtaaaatcttgagcaagttctctgagttatttcagaacttcttgcccccaaactgtatttttaattattgactggtagcattttggaataacttacctctcttttttaaagattgaagttctttatcctctctgattttcaggtgtcagtttgtgtacaaattgagacaataaaaatgtttgttagacattttcttaaagcattttgctatgtgagaatctttcatgaagaactctttttaacaatgactctatagcagaagccacagtagagggagaactactgaatcaaagatggtgtttgagtctatgattttatgatggattttttttttttttacatacaaggatatgcatgggtcttttagtattcaggaatctgttcttcacttgacagtatttataaattgtgtgtttccccctaaaaaaacttaaattgtgagaatgcttccatttactagaagttggttaatgattatgccaaataaggaaaataagacagaaaaatcagtttagtgaatactattttgcctttaaatttagtaatttagtaacagtatctctttggggtttactagaaaccactttttaatccaataggtctctttcattgtgaagtcaggaggtgattttgcttaaatgtgtagtataggaatctatatgtggtgttcaaggatcatgtaaatatgctgatataatcggagcacagtttggcatcattaactcagaaatatttaaactcttgctatacaacatggaagcaaacttgtgcatagtttgtgtgtgtgtgtgtgtgtgaatctcaaaaaaagaaaaaaatcacaggatcaggaagtcggaataggtcccacttttcttctagtaccaaacctacagccatgttcctagccttctcttttactcccaagcaagacagacaggcaaatgaccatcctgctgcccatttctgtgtatattcacttgcattgagagttgtattcacctgcttgttgagagtattcacaaatggtacctgataaagtagatacttctttaaacatgtgaatttttttgcattgtataatgtttagaaataatcatgtataaatggttgaatattaatacaggattgccttatcaagtattttattaatcattaaaatgtggtgtcattaatacaatttattttaagtgcttttcctaaaataccagattatttttctgattttcacatccctgacaatgactttcttaaacttggtagccaggaacagaaaacctaacactgcatgttctcactcataagtgggagctgaacagagagaacacatggactcagggaggggaaccacacacactggggcctggagcagggggcaggggaagggagagagtgcrtcaggacaaacaga

SEQ ID NO: 64075 - DNA, 1051 bp, Homo sapiens
tcagcatcatccttgcccacaatagggaaataattttgtaaaatgtttgattttagacctccaaaattatctctatatgctacctgaattaagcaaataaaaaataatatttagaattccatgcaaggcactggtacaattttgtttatcttggcttcattgtttttgaatgtaagatgtacttttaaggcaaataagtacatgttttaagctggtcgcatacagtattggcaatgctataatcacaaatcagaaagtttggaaatgcttacaagtgttaagaggtgtgattcatcatggttatctgaattggcatctgatcttcttttctttctaaatatccctgacatttctgactcctctgtcttttcctcagtaaaactgcaccacacactggaaagcgaagatacacacatttatttatataatgtcaagggagagtaggaataagaagattggccatagacccacccaatcagagtctgggaaatgagaacactttttccttcagcagaaatgctgacgtgccaatgtgaatttagcagaaaaaagatttgccataacttctaagtgagcagccttcagaatgctagcttagattcctggcattaacttgccaggtattttttcaggaaggaaataaattacaattgagcttaaaaacctgagggtagaactcattttcaagcaaatgtgaagcatcagtttgaagttaacaaagttaaagtttggagtagggttcctccagtcctttataatgtagtacaagtattttttttaaatgtataacactagccttttaaattgtattgtgctactaaaagaaattgtgcctgcattcatcttacaacctgggaaccaacgcagagggtctstggggtagcggtatccagcttcatgccctctgtcctttattgctttctggttagcctgcgtatttcacatacattaaatattccacaataaactctgccatctgtgctgtagggtagtttgtattggtcatgtgctctgtcaagttgacagaggtgcaaagctaaatgtgtgacac

SEQ ID NO: 64076 - DNA, 1984 bp, Homo sapiens
ggagtggaatgtgaaggaatgaacgggcagagcacagaggattttttagcagggagaataccctgtatgagactgtaattgttgatacatatcattaaacatttgttgaaactcatagactgtacaacaccagaaatgaaccctaatataaattgtgtgcattgtgttatgatgcatcaatgtaggttcatcagttgcaacaaatgttccttctaatttaaatttgtcttccttgtaatttacattttgctaaaaacctaaagcaactctaaaaatatattaaatgaaataactaaataaattatcaattacaaagcaatatgtacactatcttgaaaaatgcgtgttacaagcagcaaccaacagagatggaaggatagaactttaaaaccaaatactgattattacctttcttctgtttttcctactgtttgatttgtttctgcaataagtttatagtatttttgtaattaaattcaggttatttaccaataagaaaacaaaaaacattctgatgattaagataaaggtctcagggaaaagagctaacatattagaatataaagtaattattaattcaacattactcaataccatgaattactgttatgctttatgttaacggcttaaagaaaaaaattatggtcatactgacactagtggctgaaaagtcacttgattaatttgggacaagcagctaattatttgagaaaaaacaaaagcaatccctctactttagataattcatccaaataaatcaattttaaaaaattaaaatcatactacaaagtaagagcaaataattatataatcttgagactacacaaagtatttytgagcatcaaactgaatgtcaatgtgctagagaaaactattgatatattggactattaatttaaaagcatttttaccactaaaacctctaaaattaaatatctaaggaaaacatttgctataacaatgggagtgttaactgtactcttacaaaacactattaagatcacttaatcacagaagagatataaattagaattaaacatatgaaattgtttaacttttataatcaaaaattccaattgaatctataatgatcaacatggaaattgttaaactgtcaaaactaaaaaagataatcatttctggtgagaatttagagaaagttaccatctcagtatctgatggggcaatgcaaattgggaaaaatttttctggaaagtgatttaggacagcctatgtcaaaatccttaaaaatatgcatatcctttgatccagtcagtcatttcactgctaagaactgatttttcctggaggtgtgtttgcaaagataaaaattcatgaagctttgcttatcatagcattaaaaaaaatgaaaacaaactgtttacccaaaagagaactgagtaccttctgatatatccctagtaaccaataatataaaactattaaaagttattttattgtaaaaactttattatctaaaaatatatagcaaacaaaaagcttagcatagcttttagcttaggatttagcaggctctggagcccaaatgcctaagttttttttcccaatcctaccttttattactatgcattcttgggcaagttacttagcgtttctgattctcagtttggttatctgaaacagaaataatggtagcagtctcattaaattgttttgagggataaactagttcatagatatagaggaacagtgtcccatatgcactaagtccttacaatatttgatgttatcaataaatattgtagatctaattgaaaacattacttttatcataatcttcttccatatcaaggacatagagtggcttctaaatgtatagatgttgaacctaaatgcttccactaagcagaaaacccaccctattgtaaagagtaaacagaaaattccttgtgtatggacacattcagatgcttctggctctcctgtggcacctctcccaggcactcctgctagacatggatcc

SEQ ID NO: 64077 - DNA, 558 bp, Homo sapiens
tatccccaggaactgaatcggctccaaaatagccccatcttgggctaaatatgggatgtgacaaagccaccatgaagctaggcccccctgtcctgacagctttccaccccttccctgcccctctcaccctgctttccaggggcaatgcacctccccacttctcctgggaggggtgggcatcctctcagtcccataatctgtgccaggcccacatatgaggacttgacaggattcagcagagatgcaggcctctgctctgctctgctcatctctttgcatatagtaatttaatgaggacaaaaactgcatagagctagtaatggcacgaccaagcagcagcttaagctttgagccgctaaactatgctgcctcctattgtaatacgattatattataacmcaagttcaagagaccacccactgctttctttattggatcttccaataaagtggccatgctagtagcacaattccccacggaaatagataatgactattctaaaataaatccgaggacacacccagccacaaagtgggaggtgtattatacaaatgcaac

SEQ ID NO: 64078 - DNA, 1168 bp, Homo sapiens
tgcctgtgaagaggccaaccccagtgtrcagcagctgtgagggtgcccctcctctcctagaatggaacatacgttcttgtgaacatagagagtggcattttcttatgtcgatgtaatgtgaacaactcctggtcaccagcccccttgaccactgatgcctcttcatgggtcggtgagtgagggagacacagccatttattcctggcatcttgaattaaacttgaaattactgcccactagaaataaggcctggggcatagagtcttattattaaaatcttttgtggaaagtcacagggctccaatcaccccaaaaacattgtgtctatgggaaaatgcaccttgagttccatcttacaaatggatttgtaacagtttaggtttcatgtaagctgttcacagtatcctagtgatacatgtttatggtaaaaaatcttggagggtaaagaacaaacactgcccataattttttactgtatacacttttttttcttataaaaatgttactctattgcacatagtgttttgaatcatgccaatttttatttggcaattatataaaggcagaactttaaatatcatccccaacattctgtgcctacgcctcagagcctatgcttaaaaagagcaatcatattcatgactacgtatttaatgcaacattagaaaactaatgcagtcataacccacaagcgttttccatgccaatgacctttttgccatctggtttagtgactgcagagtatcccattacatggttgtctcacaccttggcaagcatcccttaaggatggacactaaatcatcatggggtttaatactctcatccacagaagggactcccaagccagtcctcacatatcttgctctcattactagggcagagtgttctaagaattttcctcttatgggccaccaccagagcagaccagactcactgtttccatgcctgctggctcttgctgccaccatgccctgatttcaaataaccactccatccatgagctaactgaccttagaaagatatacttttaaaatgcatatcctcccaattttcaattaaggccaaaaggagtagtagagaccaaatatatcctctttcatgaaacaaacaaaaaatggcaaaaatatgtgaatctacgaaaagatactagaactcttaagtgaat

SEQ ID NO: 64079 - DNA, 827 bp, Homo sapiens
tgggtatgtgaagttctgttcagttctggggggaaatttattctgagttgtgctgatgacaagaccctacacgtatgggattacaagaacaggcaatgcatgaagaccctcaatgcgtatgaacactttgttacctcattggatttccacaagacagcaccctatgtggtcactggcagcgtggctcaaacagtaaaagtgtgggagtgccgttgattgtgtcttcttcggcccttcctccctcttttcctctggatgcactctgatgataccatggctaccccactgagctctgtttaaataaatattgtcctttcatgtaaattattctggatgtagattgagcttattaaatgttacaaagaaaaaaaaaagaacagcatcaaaaactaagacgtaaacagtaggtgtgctcattgctactgggatgacacttattcaggccctgtcaggagacagaacaaggaaatatataccaacccatatctgtaagtgtattgtacatatccgtctgcatctattttgagctgaactcgattccacgttgatgtycccaacactaaccactgccatatgaatcactgcaacctttcctgcttgcttgttggtagcctcccctccaacaaagagaaacctggctcccaccatcctccatccagtgacttcacatttcagagcgtgtgactagtggcttcagaatttatatccttttgggaaagagctttatctactagaatacagggttgtggacagttccttatgccttaatcttacagtctccactcacttccaatgccacttggtcagtacgctttcctcccacccct

SEQ ID NO: 64080 - DNA, 753 bp, Homo sapiens
atttgagccctctaaagggccaataggggtccctctattcaactttccctccgagtcccaccaacctccccactttggttccatacagcttggattattgccctactagttcaaaactgaaagtttcaaataaaaaccaaaagacaaatgttaaatcacattgaattgataactgagacaatccgtcaagcatattttgctttcctgatttttcaaagaaaccctaatgttgcaccttccttgttgtcagtttagtacgttaacatttttttaattaaacttcagtatcattgaacaggtcatagagtgtgagcaatattgtctttgttccaaaactccaaatgtaatgaagctgccattcacaattgttttccgctgggctgcttattttaaaaaaatgattttgatgaataaaaataggtgcattttcacagcgtggggtccagcaagaatgaaaaccttacggatcacagcccggcccctgggggtgcgggaggaggtgttgtcagatgtcaattttggctgattgtttttgaggccatgagactgccattcctgtgtcccgtggtgcattttagagactgatgtcacttttttgagataaattattagagaaatgtttatagatgaatatacatttcacagtgtgccagagttgaggagtctaatgaagtttagaagggacactgggatgagggtgctgagctgcggtgcctgtgsgctgtgacagacacctcctgcaccaggaggcaa

SEQ ID NO: 64081 - DNA, 753 bp, Homo sapiens
atttgagccctctaaagggccaataggggtccctctattcaactttccctccgagtcccaccaacctccccactttggttccatacagcttggattattgccctactagttcaaaactgaaagtttcaaataaaaaccaaaagacaaatgttaaatcacattgaattgataactgagacaatccgtcaagcatattttgctttcctgatttttcaaagaaaccctaatgttgcaccttccttgttgtcagtttagtacgttaacatttttttaattaaacttcagtatcattgaacaggtcatagagtgtgagcaatattgtctttgttccaaaactccaaatgtaatgaagctgccattcacaattgttttccgctgggctgcttattttaaaaaaatgattttgatgaataaaaataggtgcattttcacagcgtggggtccagcaagaatgaaaaccttacggatcacagcccggcccctgggggtgcgggaggaggtgttgtcagatgtcaattttggctgattgtttttgaggccatgagactgccattcctgtgtcccgtggtgcattttagagactgatgtcacttttttgagataaattattagagaaatgtttatagatgaatatacatttcacagtgtgccagagttgaggagtctaatgaagtttagaagggacactgggatgagggtgctgagctgcggtgcctgtgcsctgtgacagacacctcctgcaccaggaggcaa

SEQ ID NO: 64082 - DNA, 2264 bp, Homo sapiens
aggtcatttcaagtctctgcaatggtagcgatggtagctccagcaagggagggaaaaggggcttccactggctcttggacactccagctgtcatttttgggaatgtgcttatctgccccagagggaaatagatgattgagaaaggaggcaaccaggggacttaggctttaccagcagtgacctactagctccggtgtgtttgcctcagacagcaggccaaggctagtgtcacggcagtttagggggtcctgcacattcactgtgccaacgagcggtattttgcaaacttattataaacagattatatttcttatcctaatgtggctgttggctacctgcccatgaattttagcctccaggagaaaaacaattgcttgagctgagtgttctgtgcttttactttccatacattactcagggctccttccagttcccccaacccttaatctctctctttctctctctctctcgctttcattctctctctctctccatctttttccttcttttcagaaagtcctctttcatcttgggcataactagaaaatctgtaagctgtgctttctgccatgcattagccaacagggtcctttcctcccaagccagggaagaaagcacaaaaagcaatgtccaggctgggcctctcagggtccacagcatcacaggcaaaggaagcaactgtctccatgcctaccaacggatccacacacatctcgctgggcagcatctctgccccaggaagcagcgcgcttactacactgggcacccagatgtctggtcttgcgtggcaggcagccactttctccyggccttttcttgtcccaaaagtcagaggggcaggccagttccagaatgggattccaggcagaccaggagactaggagtgcatgtgaacaactgcaaggggatgcgtctgtctgcctggtgtccgtgtgttcatgtgcacacctgtgcacgcgctcccccagacttacacacactcgtgaacacatgctcacacaagttcatgcacgggagtagctccaagcctctcactcagcactttgctattaatagctcacttttctaaaaaagtctgcttagccgtttgtaagaataaccaccactgcctgtgtgacagcccaggcccccgcagggaggacaggaccggccctctgctaggactgcctgactgcctgcctcacgttagaatccagagggagggccaagaggggagatgaaaacccttcctgagtggccagggcagcctccagtgcctgtgcccagggacaaggcaactcactggtaatgtctgcgggcagttggcaggcccctgagagccaagatgccaccttcttcatggtgacagcagggagcatgctccatgaaaccagaatgagcctgttctccactctggggtcctgctgtaaaagccaagaagcagagagccaagctgagcccaccaagagcttggcacgaggctgtcacccacaacttctcgctgatccaaaagacaggctctgaggctggaaattcaagtgtggtggtgctgtgacacagcacacagccaccgtgcacttgtgtccctggcagccgcaagtccgcctgagagggcccagtgtctgtgggtgtttgtatttaattgcagtggggtgagaaaggccaatggttgggttttatttcaaacctgctttgaggagaagtaacattaggtggcccagagctgtgaaatgtgtcctggtcataaatgcttcaccatcaattaacacctccagaatacctaagagttgccagcaacttcccattcaaataacctcttaaaccttcctccacaccacactgcccattccctcgcaggcagacctgcatggtttgatgacgactggtcacactgctggccctatctgtataaaagtccagacagttgggctgtgaggggaaatgcctacctcagagtagcttaagaaagaaagatattggtttacttctgaaaagctcaagaccagctgagtttaatggcatcattaaactcattagacatggggctgggaagtggctgccagcagtttggtgcacagcctgtcctctcagcagcccaggtggcaggtgtcttgggagtggcaatgatgagaccagctgctcatcctgggctggtcattgtgactcagatgtggagtgggctggttagtggttctgggccacttgtccatctctggatctggcagctccatctacacagtgtcgggctaggcatgggagcattctgggccaggagaaaggggatt

SEQ ID NO: 64083 - DNA, 349 bp, Homo sapiens
  misc_feature (1)...(349): n = A,T,C or G
tccagaattttcaactcatttttggggtgacctggggagaaatgttggcatgcttcatcccttaatcttcttttccagatgttgctcatctgcacagcgtgggactgagcactgtgggatattcaatctgcaccagtgttctctccctaaacatcaaatgtctcttctagccatgctccacccctgctcctatcccccttgccttccatccttcagctcattttgcctgcacagaacacgacarccatnnnnnnnnnnnnnnnnnnnnnnnnnnnnnnnnnnnnnnnnnnnnnnnnnnnnnnnnnnnnnnnnnnnnnnnnnnnnnnnnnnnnnnnnnnnnnnnnnnnnc

SEQ ID NO: 64084 - DNA, 573 bp, Homo sapiens
agatgcaaatatcttttacccagcaagtccatttctagaaatatatattctagaaatatattctaagaaaataatttgccaagtgcatttggatacatgttcatcaaagcatggtgtgtgtgtgtatatacatatgtatacatatatacacacacatatacatacacatgtatttatatagagagatattagaaataatttgtcattcattagagaaaaagaataatttttagatgtgagccaaaattatacttgattaatcrtgttatgattaataaattctgataggttgatcctacagaataccagatagtcattagacatagtaatgtaactctacatttattatcataaaaagtaggttcagaatatattgctgagctttgacaacagcaacaaaaaagcactatctataaatccacataaagattgtagtttgaaaggatattcaccaaaatgttagtagtgctttatctgtgggtggctggatttagactaacgtttactttctttgtacatttaaaaaaaaattatatggcaagaatgtgttgttttaaaattagaaaaacacga

SEQ ID NO: 64085 - DNA, 1373 bp, Homo sapiens
tcctgccttagccttctgagtagttggaatacagtcaggtgtcaccatgcctggctattattttattttttgtagagataatgtcttgctatttgcccaggctggtcttgaactcccgggctcgaggcatcctactaccttggccctcgaaagtgttggaattataggcatgagccatcgtgcccaccccaccctccaccagagaatttaatacgcagcccagttttcagaactacagccctttcacatgcagtatctcattttgacctcacaatgacttgttgtggtaatctttaagattaggacaggctgggctcagtggctcacacctgcagtacgagcactttggaggccgaggcaggaggatcacttgaattcaggagtttgacaccagcctgggcaacatagtaagaccccgtctctaaaaaatacaaaaaatacaaaaaattgtctgggtgtgctagtgtgcgccggtaggcccagctacttgggaggctgcgacattttaccccgggggtcaaggctgtagtgagccatgatcaggccactccactccagcctgggtgacagagaaagaccctatctcttaaaaaaaaaaaatgacaagaacagttcatagaggctccaactcctgaatttaaagataagaattaaagatttgctttaagatactctagaggaatatcgtgtgtgtgtgtttagaagggtaggatggataaacaaaaaaagcatcaggatgttgagaactgctgcagctgagataggggtgcacaacactccctccagcttcatggatgtgtgagagttgccgtaaggaaaagcttctcaaagtctcccgtggagatgatgaggaaatatgctgggtatgcatttgtggtgttttctaaatttccctgagggaaggaaaactgtaattaactataatctagtaaagttcattgtgacccatccaatataatgttgtcataactaaagagagaggcgtctgcaatctagaaaaagaacagtcaagggatgaaaataagtcagagttgtatcagttctgtccaggaaagagagtgcttctaagcagcctgtgttagatctccatataactttattcaaataaagcctattttctgagcgtatttataaagacttccagcctaacgttctaatcctcttagcagtttaatttttctgtataaattaagaaattagtgtgtatttgggtttatcacttagttattagtttagccagagtgacttagccctcccagtctgtttatttgcaggggaattgataaaaaccagtatcctgaggaccagatctcagatctatggtggctctccttgcagtggcagagctcccacaattcagcaatgcctstggg

SEQ ID NO: 64086 - DNA, 645 bp, Homo sapiens
aaatatatcatttagtttctaatcattgattaactgaactgaccttactttactaatgtttaccctaagttgaatcaatggaacttatgtacactttttcaaatccttctgctatacggaaaccaaacttggagttaagaaatcttcaaaatataacatcaaagagttctaaatgtgagcttttaaaaataattttctcgagagatgtttcaacactgttaacttctcgaaggtgcctgagactcaatattttaggacatttagcagcatttctaacctctcagcaatagatgctagtaacaaccttaccaattctactttgagtcacaaaccagggttagggtgaagtctaaagtaaaatctgaagacctataaaaaccctagaaaatcacayggactgtctgttacctctatgagctcatcctctataattttcccccttctacagcctgctgcagccacaggtagctggctttttaaaaacaatttatacagccttccaccaggaatcattgtacttattgaacttgctgcatgcttacattattttcttattattttctttagataattatttgaaagtcactttgtaagccacttattgtatgtttgttttacaaaaaccaaaatgtactttataacaga

SEQ ID NO: 64087 - DNA, 811 bp, Homo sapiens
aatgagatcagtgctttaagaagtacgtcttaggggccgggcgcggtggctcgagcctgtaatcccagcactttgggaggctgaggcgggcggatcatgaggtcaggagtttgaaaccagcctggccaacatggtgaaaccctgtctctattaaaaatacaaaaaaaaatagcagggtgtggtggtgtatgcctgtaatcccagctacttgggaggatgaggcaggagaacacttgaacccagaagatgggggrttgcagtgagccgagatcatgccattgcactccagcctggggtgggactctgtctcaaaaaaaaaaaaaaagagtcttaaggcaattacagaacatactatagcatctaagaaaaaagaaatagagaaatctattaaagagtctctgccaatactttaggaaaaagatggtgaaagcctgaactgtagttaaggaagaaatatttatgaagggaagatagtagtgaagtgctaaatgtgaaaaatagttcagtaaaaaagaatccacaagactttgtgagataagaataatgaactttgaggtgaaacttaagtctcttactgagattttgagtaatgtcatacatagctttgtcaccgaggcaaagatgagagtcttcctttttcctgctataatactggaccgtctccttccaaaccaagccctgcgctaggctttccattccattccattctgttttaattcattaccgtcatctcctgtcccattattctccacatgcccaaatctcctaggagtcaaaaaaaaaaaaaaaaaaaaaaaaggcaagttccaac

SEQ ID NO: 64088 - DNA, 1267 bp, Homo sapiens
gcatcactatagcctccagcccattacctccaactttaacagagctagccctctttcatctgttcgacatattgggcttccatatgagattttatttgaagaaagtgcctcactgctgaagtacagtggaaagctgctctcctacacataatactgttgcaacaccaaagtcacctacatttctttttatacgttactttttctttgattcaagaatttacccctatttctgtattggcttttcccatgctaatttaatggaatcagaatgtcatggaggcatttcctggaacttaggttttagtgctgaaaatttcatttcaggggttttctcatgcttctgatattttgctgatagtagtcattttgtagatagactttcttcccattttctccttcatttacttactcaaaacacttgagaatgatttctgtatctgtaagacttctaaacactcaactttttagtcatgagtaagcaagtgaaattttttaataagcaagtgactatgtaccagtgaggtgcattagtgtagacactaagcaagtatagtatgactgtccttccaataatctcactgtttatctggaatacagttatagctgatagtatgaatattaacacttaacaaaaaaagcaaacttttattcaagagaagacaaaatgtctcttccttcaggtcaaagtttgcagtatatttgttatggtcatatacttggtgaattcttcactttctctgataaattttttttttttttttgagacggagtctcgctctgtcacccaggctggagtgcagtggcgtgatcttggctcactgcaagctctgcctcccaggttcacgccattctcctgcctcagcctcccgagtagctgggactacaggcgcctgccaccacgcccgactaattttttgtatttttagtagagacggggtttcaccgtgttagccaggatggtctcgatctyctgaccttgtgatctgcccgtctcgacctcccaaagtgctgggattacaggcctgagccatcgtgcccagcctctgataatttttttaaaatctctttcatattctagtcaatgaaaatataaatttttaaatctatcacatttgtcattagctctcaaagaattcagatctctatttgtattcaatttcctcccatcccatttcaccatcatgggataattggtttataaaaattttttaatccctctaagtactttcagagaagtacttagagaattcagactgtcccctaaaat

SEQ ID NO: 64089 - DNA, 1737 bp, Homo sapiens
gcatttggtattgtacatattgttaaaatgaaaattaaaactgtcatacttgggtgactcaggcacatttataatttatcacctttctttatagttaaaaagaacaaccagggaaatgcagcttagctctcactcacaaactctcagcactacataaagcatgcttgagcctcataagacagatatactgcacacatttagcatatttctttctccccttatggaactttttcttacccctcgtatgcttagctttaaatatattcagaagctataaatattacatggaattttgagatctgaaaaatgacttcttcattgctgatatactgatatgctgaagaacaaatttagtatccatatttacatgataaaagttttcagttaatacactggactgtttttagccatccatggcaatgctgtgattacatttcaatcgttgagtgaaggagagaaaaggatccaatttagaatgaacccaggtttctgggtaagtggagatttgctgaatttgtaggggcaggaagagacacaggtctccagtggtaaagttaagtatattttaatgaggcactgtagccagaggtgtcctcttgatatttaaagtatgtataatgcactcatttggaaaatgccattttatttccctctgaataaaaataatagttactacttattgagtacttgatttgttacaggcattgtttctcactctatcttatttaatccttataacaaccttgtgggtatatttcttcaatttacagatgaggaaactgaagcagaaagaaataaaataacttgctaaaaaaaaattacataactagtaaatgcaaagaactgccaggctccaagatcttgcctttgcctctgccctgtactgcttccaacttgaaaaataacaaactagccatttttgacagaacagtcacrtttctcccttgtggctcaatctcagagcagccctctctgcattcctcgtgctcctctgcccagcgtgctcttctgtgtaccgttggagcagatctgaacatgacactaatgccctgtgttggattcacagccaaggtgagggtagaaaagagtcagcaaggtccagtgctttctaagcctttatttattatacaaatgatcttagaacactataacaagcaaggaaggggtggaccttagagaacttctgattcatctcaaacatgtaatgcatctcaaatttcagccagtcacacaacatcttcgtgattttggccagatctaccaaccacttttacaattatttaatacaccgtttaaataaactttttaacactttttaaatgcatttatgttaaaaaaaatttatatcactattataaatggcaagccagtatcacttttcataaattaaagataaccataaaaatgtacaaaaataacattatgaaattctagtctaatattgccaaactctttgaaattgatagccagtatagattagacattatttaagaggtgtgaaagatactgtagcatcaaactgagacttttccccttgaataaatagaaggattgaaaaagaagtagaagaaaatcactctttcctcaggtagttcagtgttatttaatgccatgtctgtgcattactgatagtcatctctagtgtagccagtggtttgtatccatcactcaggaaagtctagggaatagctatttccctcattgaaaagaacaaagactaagggccagaaaggtgaa

SEQ ID NO: 64090 - DNA, 959 bp, Homo sapiens
gcttagatgtgtcattttaaatgtactaagcagtggctgggtgcagtggctcatgcctgtaatcccagcactttgggaagccgaggcgggcggatcaccaggtcaggagagcgagaccatcctggctaacatggtgaaaccccatctctactaaaaaaaaaaaatacagaaaattagctgggcatsctggtgggcacctgtagtcccagctactccggaggctgaggcaggagaatggcatgaacccgggaggcagagcttgctgtgagccgagattgcgccactgcacccagcctgggtgacagagcgagactccatctcaaaaaaaaaaatgtactaagcagtggtctggaatgattgctggaagaagccaccatgttttggcctttcccaacaaagaaagcgaaagtatctttgcatgtttcctgaattacctgtgtttcttcctatgatgatttttttatttttctcacactggggaacaagcaaagaggtcagagcatagcagccacagagaactcttatgttttctggtagagacttgcaggaggctatgccatggacatttgctggcaatgctgtctgagataagtggcctcttttacagtgacatggcagaaggcaaaaccactctcaaactctcactcagttaaaacatcctagacttttatctcttcgtttttccaaatgacagtgattcaacaggccaaaaagaggtcagtggagaagaaattatatgccactgtcatttctgtgattctcagttgcatctttgtaaaagtaaagagctgggctagataatctcttagggtccttccatttttaagatgacagtgcccttactttagtgacataacccatgcctacctctaggaagctgagcttgtcttctttgttgtctcatccccagtacatcacacatggtgttgaatacatagctgctgaatgggtgaatgaag

SEQ ID NO: 64091 - DNA, 959 bp, Homo sapiens
gcttagatgtgtcattttaaatgtactaagcagtggctgggtgcagtggctcatgcctgtaatcccagcactttgggaagccgaggcgggcggatcaccaggtcaggagagcgagaccatcctggctaacatggtgaaaccccatctctactaaaaaaaaaaaatacagaaaattagctgggcatcstggtgggcacctgtagtcccagctactccggaggctgaggcaggagaatggcatgaacccgggaggcagagcttgctgtgagccgagattgcgccactgcacccagcctgggtgacagagcgagactccatctcaaaaaaaaaaatgtactaagcagtggtctggaatgattgctggaagaagccaccatgttttggcctttcccaacaaagaaagcgaaagtatctttgcatgtttcctgaattacctgtgtttcttcctatgatgatttttttatttttctcacactggggaacaagcaaagaggtcagagcatagcagccacagagaactcttatgttttctggtagagacttgcaggaggctatgccatggacatttgctggcaatgctgtctgagataagtggcctcttttacagtgacatggcagaaggcaaaaccactctcaaactctcactcagttaaaacatcctagacttttatctcttcgtttttccaaatgacagtgattcaacaggccaaaaagaggtcagtggagaagaaattatatgccactgtcatttctgtgattctcagttgcatctttgtaaaagtaaagagctgggctagataatctcttagggtccttccatttttaagatgacagtgcccttactttagtgacataacccatgcctacctctaggaagctgagcttgtcttctttgttgtctcatccccagtacatcacacatggtgttgaatacatagctgctgaatgggtgaatgaag

SEQ ID NO: 64092 - DNA, 635 bp, Homo sapiens
tcagagcctgctttgaggattctggtttttgtcctakgttcaatagggaactattgaagattttaggcaggagtcttaccagatcacatttaaattattaggtttgcttcaactttagggtaaaaagtttctgaggaatggtgggatgaatcaagtggatagaatgacactattaaggaggcgaacatggtagtttaggtgagactagagcatgtagagtagatgtagaaaggagtgaattaaagagatagagggagaattcaaagatgattcctgtaatctagacttgctcaattacatgaatgataggcctatttggtgagatatggaacactaaacgataacaagattttatttcagattgaggagtttaaaactttctctcagaactattgcatttgtggtattattttaagacatccaagagcaaaagtgtgagtaagctgcttgctttaagtttctggtcccagaggtacaaatttggaaatcatcaacgtaggccttaaggagtttccatatatacagtccagttacagaatggcaaatctgcaaagaagtatgaatcttagtggctagagagatgggagccacacctggagaatgagataccatggaagtcaagtgaagagatcact

SEQ ID NO: 64093 - DNA, 2160 bp, Homo sapiens
atggacgcagcagagaaagttaccaaaaacctaccacccagaaatagtcaytgttaatatattgctacacaccctttcagatgatcaatccacatatatgtaaataggtcagtctcaacctgctactgtgtgttgcaccctattctgtcaaatgctgttcttacttgagaaaatgttgagcatactaggactagaactggcctgcacaggagacactttgcaaaatttaaagctcctacatggaccttctggaattgtgagtagcttgaaatacggattcttagggtatattgtacggtgatgccggggttagttgcacataggagtaatagttcatttctctgacacaattgcttccatttccaaatgcttaaattctaaagcatttagaaagagggacctgatcttttcctgtgaaaaagatgatcagatcatcattcagggcaatttccagagaggaaaatatagtctttaagtgttttcaatcatagaaaggaatcataatatattgattaatactgttagaaattttatgtatgtaaaagttacagcaaagtaaattttacaaacttaatatgtatgtataacaatatctgagtgtatatataaaagcacatacttaaatttacatgtacgtacacattattataagaatagctttgtgttaaactatttattttctataagctgtggaactatgtatgtttgtctcaatgtctgtgcacctctgcatgcatgcgtactgttcaccctggtaccttcacctacattcatatacagatatgttccatgcatcgctaattgatggttaatgctaagtgggagatgtctactgtggagcttttggagatggaaaattagctgcttttgatgtgaacaaagatacccaagagagttgaaaggcaaagcagcctcaagagaataaaggattgctcctttcaaagatatagtaaagttattttaaatatgaagatatatccttgtgcttgctagggaggcggataaacttcagacagaaggatttatatgtttaggggccttcagaagacactttagggatttaaggattagatttcttttggaaacaagaaggccagaggtctctatggtttggtggatcagagcatctcttctggagtcaaaaagtctttctggcctatttatagagaatgaggactgatctgtaagagaatccaaggactggatgttggcatctctgaccacagaagaaaaccaaatgttgctcctggtttgtgtagggaatttgactgagaaaaatcaagttgttttactcagctgagctgtgttggtgtttggctaggggtgtgttaagtaaatgacaaacagggctttctcttcaatcagcaatgatggttttctaaaatatatattgaaattatttctagatataattggcatggagccaaagagagaaattccttgaatcgatcagatcccatgaatttgctgttccagcttgtcaatcttgctgctttcttgttaattttctatttttgagtcacagaggcaagaattcggatcaatcctcgccaggtacttccatgtctccttttctgctgctgttattattattattagattatgatgagtcaatccaggattttagaatatggccctgtgactccctttgtatgtactcaatggacattccattattctgtggtgcaagacattctgtaaaagggtcagcaataaccgtgaaaaatcattattttagggtgaaggtggggaggcttcccattaccttagctcttctctttctgtggggttcagcttggaccttatttctatgtcaacagttctcccattctggtcactgtctcccctttaccgtctcttacccaggtgaacaaggccacttaaggaggacaagaggatataactggactggttatcatcgttcattctcttctcttccctctcccacttgtcctttaaaataatcatgaagccatgaactcagatatccataacattaagttaaaaattgtaccaaggaagcgctacagatataggctctgtgttctcatctacatcggctgatttaggggcctttcatgtgtttgcatcaggctctggcggctgtgaaaacagcaacagctgtaacctgccacactagaaaaaatacattcattgggt

SEQ ID NO: 64094 - DNA, 1448 bp, Homo sapiens
tccaggatgctggtgattggcagcattctctcagctagttttctgcctgcttcagtcaaaatgagctgggtttttacctgagcactcaggtgagagcagccctctaagtaacagcgccccctatcatacttccygcacatcttactgccgggtaccacagcttcttccctcccctgcagggaaaaggagggagcagaaacggctgatgatgagtcaggccagatatgtacatgtatgtggcttggggttggggaagttgtttctcaaccactctctgtataatgcgaaatatttgaattgaataaaacagcattaagagtgtggttcttctatttttgtcagcagagctatatggacctgaacttttcactaagtctaaaagacaatcaaatccacaggctaacattaaggctccagtctatgatctccaaatgacaaatcttcagagagaaaattacagaaatgagattcactgtaattttgaaaattgaattcttatgttacgattgtttgtgttatatccattacattattttattttaatgtcagtataaggcagccaaatttcctttcttggaactgtcttttcttatgacatcatatacttttttaaatattaaaatgtcatatcttagtaaaatgttagtgaaatgaatagatcacagttaatatatgtacatccttccttggcaaaaataaaaagttggagaccctgcataatttcctaaataattttttctacaattttccaagactgtgaaacccaaaattctaggagcaggtgacctaaacatttgacaaatacaactgtgacgtgttcgtgcaagttgctgatgagaaatgtcagcccagaaattatatatacaaaccacatagcatggccctagggttcatccttcaggtcaacatcaattcatgaatcaacattcttaggatatgtttgttcagtaaactataaatctgcctaactatattatcaacacgctcacatttaactgtcttatttctgagacactgttaaaggccctactgaaatcaaagtcaacttgtctgtgagatagcaatagataacttagtccagaacctggaggtacttgaatttatttttcctgcttgtcatgtactccctcttttttggtagctacacagtgattttcctctggagatccaccactcacccactttcagcccatatgatgcaggtgttcactccaccctgcaactctatgggtaggcatggggttcaggtctggtccatcaacaccgtccatcctcttgaccacatatttggcttaaggatgtgtatatgccccatgacaaaccaatgagacacagttccagaagttttgttctgcttattgatgaaaacaaaacaaaacaaaacaaagcaaacaacttgagtagcatcttccaactggaattcctgagaaaatatgatataagcctgg

SEQ ID NO: 64095 - DNA, 1448 bp, Homo sapiens
tccaggatgctggtgattggcagcattctctcagctagttttctgcctgcttcagtcaaaatgagctgggtttttacctgagcactcaggtgagagcagccctctaagtaacagcgccccctatcatacttcccgcacatcttactgccgggtaccacagcttcttccctcccctgcagggaaaaggagggagcagaaacggctgatgatgagtcaggccagatatgtacatgtatgtggcttggggttggggaagttgtttctcaaccactctctgtataatgcgaaatatttgaattgaataaaacagcattaagagtgtggttcttctatttttgtcagcagagctatatggacctgaacttttcactaagtctaaaagacaatcaaatccacaggctaacattaaggctccagtctatgatctccaaatgacaaaycttcagagagaaaattacagaaatgagattcactgtaattttgaaaattgaattcttatgttacgattgtttgtgttatatccattacattattttattttaatgtcagtataaggcagccaaatttcctttcttggaactgtcttttcttatgacatcatatacttttttaaatattaaaatgtcatatcttagtaaaatgttagtgaaatgaatagatcacagttaatatatgtacatccttccttggcaaaaataaaaagttggagaccctgcataatttcctaaataattttttctacaattttccaagactgtgaaacccaaaattctaggagcaggtgacctaaacatttgacaaatacaactgtgacgtgttcgtgcaagttgctgatgagaaatgtcagcccagaaattatatatacaaaccacatagcatggccctagggttcatccttcaggtcaacatcaattcatgaatcaacattcttaggatatgtttgttcagtaaactataaatctgcctaactatattatcaacacgctcacatttaactgtcttatttctgagacactgttaaaggccctactgaaatcaaagtcaacttgtctgtgagatagcaatagataacttagtccagaacctggaggtacttgaatttatttttcctgcttgtcatgtactccctcttttttggtagctacacagtgattttcctctggagatccaccactcacccactttcagcccatatgatgcaggtgttcactccaccctgcaactctatgggtaggcatggggttcaggtctggtccatcaacaccgtccatcctcttgaccacatatttggcttaaggatgtgtatatgccccatgacaaaccaatgagacacagttccagaagttttgttctgcttattgatgaaaacaaaacaaaacaaaacaaagcaaacaacttgagtagcatcttccaactggaattcctgagaaaatatgatataagcctgg

SEQ ID NO: 64096 - DNA, 1448 bp, Homo sapiens
tccaggatgctggtgattggcagcattctctcagctagttttctgcctgcttcagtcaaaatgagctgggtttttacctgagcactcaggtgagagcagccctctaagtaacagcgccccctatcatacttcccgcacatcttactgccgggtaccacagcttcttccctcccctgcagggaaaaggagggagcagaaacggctgatgatgagtcaggccagatatgtacatgtatgtggcttggggttggggaagttgtttctcaaccactctctgtataatgcgaaatatttgaattgaataaaacagcattaagagtgtggttcttctatttttgtcagcagagctatatggacctgaacttttcactaagtctaaaagacaatcaaatccacaggctaacattaaggctccagtctatgatctccaaatgacaaatcttcagagagaaaattacagaaatgagattcactgtaattttgaaaattgaattcttatgttacgattgtttgtgttatatccattacattattttattttaatgtcagtataaggcagccaaatttcctttcttggaactgtcttttcttatgacatcatatacttttttaaatattaaaatgtcatatcttagtaaaatgttagtgaaatgaatagatcacagttaatatatgtacatccttccttggcaaaaataaaaagttggagaccctgcataatttcctaaataattttttctacaattttccaagactgtgaaacccaaaattctaggagcaggtgacctaaacatttgacaaatacaactgtgacgtgttcgtgcaagttgctgatgagaaatgtcagcccagaaattatatatacaaaccacatagcatggccctagggttcatccttcaggtcaacatcaattcatgaatcaacattcttaggatatgtttgttcagtaaactataaatctgcctaactatattatcaacacgctcacatttaactgtcttatttctgagacactgttaaaggccctactgaaatcaaagtcaacttgtctgtgagatagcaatagataacytagtccagaacctggaggtacttgaatttatttttcctgcttgtcatgtactccctcttttttggtagctacacagtgattttcctctggagatccaccactcacccactttcagcccatatgatgcaggtgttcactccaccctgcaactctatgggtaggcatggggttcaggtctggtccatcaacaccgtccatcctcttgaccacatatttggcttaaggatgtgtatatgccccatgacaaaccaatgagacacagttccagaagttttgttctgcttattgatgaaaacaaaacaaaacaaaacaaagcaaacaacttgagtagcatcttccaactggaattcctgagaaaatatgatataagcctgg

SEQ ID NO: 64097 - DNA, 1448 bp, Homo sapiens
tccaggatgctggtgattggcagcattctctcagctagttttctgcctgcttcagtcaaaatgagctgggtttttacctgagcactcaggtgagagcagccctctaagtaacagcgccccctatcatacttcccgcacatcttactgccgggtaccacagcttcttccctcccctgcagggaaaaggagggagcagaaacggctgatgatgagtcaggccagatatgtacatgtatgtggcttggggttggggaagttgtttctcaaccactctctgtataatgcgaaatatttgaattgaataaaacagcattaagagtgtggttcttctatttttgtcagcagagctatatggacctgaacttttcactaagtctaaaagacaatcaaatccacaggctaacattaaggctccagtctatgatctccaaatgacaaatcttcagagagaaaattacagaaatgagattcactgtaattttgaaaattgaattcttatgttacgattgtttgtgttatatccattacattattttattttaatgtcagtataaggcagccaaatttcctttcttggaactgtcttttcttatgacatcatatacttttttaaatattaaaatgtcatatcttagtaaaatgttagtgaaatgaatagatcacagttaatatatgtacatccttccttggcaaaaataaaaagttggagaccctgcataatttcctaaataattttttctacaattttccaagactgtgaaacccaaaattctaggagcaggtgacctaaacatttgacaaatacaactgtgacgtgttcgtgcaagttgctgatgagaaatgtcagcccagaaattatatatacaaaccacatagcatggccctagggttcatccttcaggtcaacatcaattcatgaatcaacattcttaggatatgtttgttcagtaaactataaatctgcctaactatattatcaacacgctcacatttaactgtcttatttctgagacactgttaaaggccctactgaaatcaaagtcaacttgtctgtgagatagcaatagataacttagtccagaacctggaggtacttgaatttatttttcctgcttgtcatgtactccctcttttttggtagctacacagtgattttcctctggagatccaccactcacccactttcagcccatatgatgcaggtgttcactccaccctgcaactctatgggtaggcatggggttcaggtctggkccatcaacaccgtccatcctcttgaccacatatttggcttaaggatgtgtatatgccccatgacaaaccaatgagacacagttccagaagttttgttctgcttattgatgaaaacaaaacaaaacaaaacaaagcaaacaacttgagtagcatcttccaactggaattcctgagaaaatatgatataagcctgg

SEQ ID NO: 64098 - DNA, 550 bp, Homo sapiens
ccaatataatgacttgagattattgttgatgtttcttgaaatggaaaaaatattaattaagtcaggtggcagacacacaaatgtgctattatgtttccataaaacatatttccatggaccatattataaatacctaacaggcaagctgtaactttaatcttatatataaagctaattatgaaattgtaaattaaaaaataatgattagcaatccrttatgcattaactatgcaaagctatgtccgttaaatctgatatattttactcctaggaaagttctcatcagattccattaactcttattttagaaatttctaacaagtttaggtaactagtttactgcccaagagcaaaatgtaagtaataagcttgatataagcaggatctgattttgagacaagcacattaatggcagcaaattgcaatgaaataaagaggaatgtgagagaagaaaaaaaagctttggaaagcagaaatcagaactccaaaagtaaactagtttttcgccattagggagaaaggtaaacaactttttacatttcattagcct

SEQ ID NO: 64099 - DNA, 550 bp, Homo sapiens
ccaatataatgacttgagattattgttgatgtttcttgaaatggaaaaaatattaattaagtcaggtggcagacacacaaatgtgctattatgtttccataaaacatatttccatggaccatattataaatacctaacaggcaagctgtaactttaatcttatatataaagctaattatgaaattgtaaattaaaaaataatgattagcaatccgttatgcattaactatgcaaagctatgtccgttaaatctgatatattttactcctaggaaagttctcatcagattccattaactcttattttagaaatttctaacaagtttaggtaactagtttactgcccaagagcaaaatgtaagtaataagcttgatataagcaggatctgattttgagacaagcacattaatggcagcaaattgcaatgaaataaagaggaatgtgagagaagraaaaaaagctttggaaagcagaaatcagaactccaaaagtaaactagtttttcgccattagggagaaaggtaaacaactttttacatttcattagcct

SEQ ID NO: 64100 - DNA, 550 bp, Homo sapiens
ccaatataatgacttgagattattgttgatgtttcttgaaatggaaaaaatattaattaagtcaggtggcagacacacaaatgtgctattatgtttccataaaacatatttccatggaccatattataaatacctaacaggcaagctgtaactttaatcttatatataaagctaattatgaaattgtaaattaaaaaataatgattagcaatccgttatgcattaactatgcaaagctatgtccgttaaatctgatatattttactcctaggaaagttctcatcagattccattaactcttattttagaaatttctaacaagtttaggtaactagtttactgcccaagagcaaaatgtaagtaataagcttgatataagcaggatctgattttgagacaagcacattaatggcagcaaattgcaatgaaataaagaggaatgtgagagaagaaaaaaaagctttggaaagcagaaatcagaactccaaaagtaaactagtttttcgccattaggragaaaggtaaacaactttttacatttcattagcct

SEQ ID NO: 64101 - DNA, 611 bp, Homo sapiens
ctgaggatatgcaaatatactgtttagtttacattaggttaattgggaaaagacttctggaggaaatgaattgccagttgcattttgaaatagtttatagatacaggcaaagaagaaaaatcatacagagggatggagttgaagatatgcaatttgtggcaaattgggtgggtagacttctaagaagtctccagccattcttttattcaatagacatacactgcacatagtttacacaagaacagtgttaggtcctgaggatacaaagccaggtaatatagcattcttgcctgcaagctcatagattcgtgcaggagatgggcataaataaagataggataagtaaaaaaaaaaaaaaattatgacacagtaagataaataaatttcattcattttcctggaggcataggatacaagtagagaacagagaagtgaaattttaaaagtggtatttggagtgcccagtaaggatcagctaatagtaacagatattatctttttccttccttattcagtaagcttttccaaaaacaggtctgcatttgaggccaggcacrgtggctcatgcctgtaattctagcactttgggaggccgaggtgggcagattgcc

SEQ ID NO: 64102 - DNA, 1148 bp, Homo sapiens
agcattcaaatatgcrtaaaaacttttttatattggtttttactgatgatcaaagagatggagaatggaagaggcaatttgcctttttttaggtaggtgactgtagtgaaatattattggtaattatagcatgtattatacccagatgttagttttttccattctcctgttatacccctgtaaacccaccaaaagttaactttctgtagtgcaatcaaagagaaaggtggctagctacgtccacaccctcagatgcctatactctgctgccttcttgaggttcacctcatcttttctctgggccttgatcatctagcccttattttctggaagtattgttattcaaggatgtgtgtgttaacagagttaactgaaaatctggctgtaaagaatttcatgctcctcaccttttccgcaggtctttttctgacctccaggttgatagtccctgtttgtttctgtcaggactctcctcccgtttcaggctgctcctaaacactccctccactcctttcatttttgtaatgtagagcaattcagataggtgtttgtttctctctccttgtttaaactaagctctggggggcttcagcattgaaactcaagtggcctgtcaaggtgtcttactaaacaaaaggccatccactccagagagaaatgatgcttattttttggaagcataagtgatttcagtcaattctgtttttccccttcctgttacaaatatatgaacacaaaatatctcagaggacatttccttctcacgataaccgatctcactggtgagacaccctgccattgcttaactaggcagagtcttttcttccatttacaaatttgcttacataaacctttcttaatctgtgactgacaacagttagaagataatgtcttccaccaactattagtgccaaaaagcagagtaaaaaagagtgtttgtaaatgtattgtggaatagaaaataatcagcgaaatgccaaatctaaaaatcactgaatcagatttttattttatatgtaaataaactatagaattatttaattagtatttatatttagcttctatatggcattcagatttggcgcacacctattgtaaatcagtgattctcattggctgagtaagatgaatttcagactctcaaggcc

SEQ ID NO: 64103 - DNA, 681 bp, Homo sapiens
cttccttacaccttatacaaaaattaattcaagattgattaaagacttaaatgttagacctraaaccataaaaaccctagaagaaaacctaggcaataccattcaggacataggcatgggcaaggacttcatgtctaaaacacgaaaaccaatggcaacaaaagccaaaattgacaaatgggatctaattaaactaaagagcttctgcacagcaaaagaaactagatcagagtgaacagacaacctacagaatgggagaaaatttttgcaatctactcatctgacaaagggctaatatccagaatctacaaagaactcaaacaaatttacaagaaaaaaacaaacaaccccatcaaaaagtgggcgaaggatacgtagacacatttttagcaatgaaaggcgaaaaaaatataatctgtctagaaaatcaattgttttgtattcaaaattattcaaaaataataatcaaatatatttagaaaattaaaacagtacagaaaggaaaaattaaaagttgaaaaacatcctctttctcaccacaaacctcaaacttatacttcttcaagaagacatgtttattgaattaaactaagtattttcaattttttgtaaaccagatatactttcttcaaatgaattttataatttattgggaagtaattactataatatatacaaatt

SEQ ID NO: 64104 - DNA, 852 bp, Homo sapiens
  misc_feature (1)...(852): n = A,T,C or G
cattgaagttcatgaagttgatatactgtagcaatcaaaattctcaagattaatatttcatgacagaatacctggatttagggccaggcgaggtggctcacgcctgtaatcccagcactttgggaagccaaggccggccaatcacctaaggttaggagtttgagaccagcctggccaacatatagtagtaaaaccctgtctctactgaataatgcaaatattagctgggtgtggtagcgcacgcctgtagtcccagctacttgggaagctgaggcagggagatncacttgaccccaggaggtggaggtgctagtgagccgagatcatgccactgcactccagcctggcaacacggcaagactccatctctcaaaaaaaaaaaaaaaagtaaaaagaagagaaagaatacctggaattcctcattcaaataagaaaaagtatattgaataacagggactgaaacgtatatatatatatactatacaagtatctttactaaggattcttatggggtatatttatccaaaaatatcttccattgttaagttatcaatgtcaaccacatgtattaaggaaaacattagattcgaatttccatggaatttttttaagtgttttaaaattaaaatgataaagcatgtaaagacgaaaaaaattgatsaagagataaatatataaattaaagggttcaatggatatgtttttatcgtcgttttatcaagaataatatggaaatttgtataatgcctaaaaatggaggaaaaggaaatgattcacttgcgtccgctggttcttcagagctaaaattgtaagtaaaagaaagaagattgattttgattacaatcagagcac

SEQ ID NO: 64105 - DNA, 890 bp, Homo sapiens
gctccttgatcctgtgtcctctcaccatctcgaaggaccaacttccatttcttcttaacttggaacttgaaagtgccctctgacacttaagtatttcattctcttgcttccccttcatcttgtatgtacctgtacctctgttacagcatttatctgtcttgcacataggttttttaacatttgcttccccatctgatagtaggcaacttaagagtaagggccacgtcttttcatttmtgcatatcctgggagacagatgatgctcaatagatatttaaatggtctaggcatcatggcaggtgcctgtaatcccgctccttgggaggctgaggcaggaaaatctcttgaacccaggagatggaggctgcagtgagccaagattcgtgccactgcactccagtctgggtggcagagtgagactctgtctcaaaaaataaaataaataaataaaaactaaaataaaaataagaattaaaaaatatatttattaaatgaatgaacaaatgaaagtactaaatactgatttttaacagctttatgaagacataattcacataccatacaattcgcctatttaaagcatataagttaattttatactttttaaaaactttgtttatagtataatcacagatgtatgcaaccattacgacagtcaatttcagagcattttcatcacttcaaaaagaaaccccttaccccatagctatcactcccctatgccttcatctaccccctcatccctaagcaaacattaatctactttctgtctctatacatttctctatttttttaattttaatttttatttatttttttttgagacggagtttcactcttgttgcccaggctggagtgcaatggcgtgatctcagttcactgcaacctcc

SEQ ID NO: 64106 - DNA, 1106 bp, Homo sapiens
ttcgtgtcttccgcagagagaatttgtattcttgttggagtggtcacgtgttcacctgggttgttttggagaagatcaaataaataattttcattcttggcatcagctgctcacttaggtcaggactagatctagcagggtcatccaagtgaaaaatcccaaatcctcacttttggtagtttaatcaaacactcgtcagagcaaaccattcagccttcaagctctgaaggaatttgagccctacttacaaatcaggaacaaaagatatccttgctcttttctggaaagtttattttttcttatgggaataattaaatcctgtgagagtgttcaagttttcatgctaccctgtgccaagtctcagagggatttcaagcctcctggcttcttttcttgtttcctgccgtgatgaattgatggatgtggacttaacggggccttttttctctgtttatctgtttctttgcatatttacatagaaacagaaccatctgagtcagaataaagaactagtggccatgatgtcctttttttcctctttcaaaatttcttatttttcatagcaaggaaaaaaatgtcaaaatcctgctttttggtctttccctctgatggcaacataactgtctatttcatggaattttccccctgaaccaagagaggccaggttcctaattaatttggctaagataatttgggaactaaagaagcaaattgtgaagtaactatccacacaaatgagaaaatgccttctgtgatttttttttccctaagacatagatcctgaagtgatgttttaaaaatatgtagttataaccgggcgtggtggctcatgcctgtaatcccagcactttgggaggccgaggcaggcggatcacctgagatcaggagttcgagaccagcctggccaacatggcgaaaccccatctctactaacaaatacaaaaattagcacggcctggtaacacatgcccacaatcccagckactagggaggctgaggcaggagaattgcttgaacccgggaggtggaggttgccgtgaaccaagatcacgccactgcgctccagcttgtgcaacagagcaagactgactcaaaagaaaaaaaaa

SEQ ID NO: 64107 - DNA, 1369 bp, Homo sapiens
ccagtcctgacacccagcccagcacgggagctcagtgaatgaatgaatgaatgaaatgaatgaatgaaatgaatgaatgaatgaatgaatgaaatgaatgaatgaatgaatgaatgaaatgaatgaatgaatgaaatgaaataactatgcaccctggacctcttctccctgaccccacagtagctctttgggaaagcaatgtgggcataccctaccctgtgcttcagcaattccactcctagaacagctctttaaggaaagaatccaaaaacaaagaaaaactgcttcagagacacagatgctcattgcagtgcccctcatattgttaaaaaaaaaaagtgggcaaatcctaaatgtccaatagaaagggactgtgttgagtaaattagtrtacatccatgtgatgggattgttcacaccgaagacctgaagctggctggaaaggggaggaggagacttaggtatttaattaattctggaacgtttgaatattatacacaaggatttacatttgaagtgccccttttttatgtcctgcatttctatatatgcacaggtgatatgtccctggactcttaattctattctatcaatctgtttttttactcttgtgccaatttccatggttttaaaacactaaagctttaggataatttttatatctggtggaaaaatttcctcctctttattcttccttttcataactctcttggttatccttgtatatttattcattcatataaattttagagccaatctgtcaaatatgaaaaatcttgttagcatgttgcttggccttgaattttatagagtattttgggggtgaatggaaaacttgatgatattgactcattccattgcattattttcaaacattaaaaaaatgaatatcagatatcagactggaaatggcttgggctataaaaccaagacaaaataacacggtttataattgtatgctgtgtgatcaccccttaacagatgtggaggaggaaattgaaaggaaatgcaaagctgcaaacagtggatttctttgttccatttttctatacaatattttaatttttaaaatatatgcatgtctttaaaaagagggatattggttaacatgaacattccccgaagggagactagcatgaggatgggactcaaatgtgtcccatcaggaaaggctggaggccccagaggcaggaaccttggggagggggaggcatgggccattcatagtttctctctcatttctgtattggaaccctgggtccaggccagaggcccccgaaaggcagagttgagcaggagaaggcagttgaggaggggcttcctcacagactgagaccccggccttcagtggcttgggctgcctggggga

SEQ ID NO: 64108 - DNA, 560 bp, Homo sapiens
gctaagggactttcttgtattctttccttttatcttcatatcagtagcagggaaaacaaatctatcactcctatttggtagaggaaatggagctcagagagggttagtgattttctcagagtcacacagctggtaagaggtggaactcttaactggccacactgcctctttgggacctagatagcatcatgcagtctggtcttccaggtctggcccccacaagtctggccagcccctgcctccctttcatctaactgcagacactggcagcccctctggggagctctttgagtcttgtacacaggaatcagggttcactctggagccctcggaggctcccagatctctttgaggtcccaaaaagtttgaggtcctgagctctggtccccaggctgagctctgagctctccagatggctgtactcccaggragcagctgtgcgaagtcaggccaccgagacactggaatctgaccttcacacaaaggcagccttgtactgggccctggagacacattactttttactttctaggcctttctagatagagcttgaagcccag

SEQ ID NO: 64109 - DNA, 887 bp, Homo sapiens
ctctctgctatattttgtttttgtagaaaaacttttcagttcctaccccatattaccacttacttcctagattcagtaaggtctcaaccgaagtaagaaacttaacatgtaaatgagcaacactatcttatatatattgacatgttaccacaattatacgaattgtgtatattctgatttgtataattattacaaatcataatttcttatattaacaaacagaagcataaaaaagcactcttaaaaaacctgttgattagaaatcactataaaaaagagaaagggggtggaacacagaaaagctatggcattaacacgtcaaaatccctcagaggagggcctgtgacatctgtaggaaggatatgatatgcctttaaaagagggcggggctgcctatcccagaaatgaagggaaaaggacttgagacaaatcaataaacctggcctattttactatttttcctaggtacagcgatccatttaaaaagtacacagcacattaaaattaagttccaaaytgatgtcctttataaggctctatatcaaaacattaggagttgtttctatttctactcctgggatcttaatattatcctaaatgttttacatgaccgtgtattaattttttaacttgaaaacaacaaagctaatttcagtcatgaaaaaactgatacagtatagttataaattcttagaacagtcacacatttaaattgagttttttaattaaatatatggtattagcaaacaatcaaaaaagaaaaataaataagtcacaacaacaaaaaataaataaaaggctttctgttagttccaagtttgtctttaaatgtatgtacaaatgcaaaacatttactgacattttcagaacaacttcagctgtttcat

SEQ ID NO: 64110 - DNA, 622 bp, Homo sapiens
ttgsgggggatagagacctgggtggaagagcagctgtgaggcgggcacagctggccctgcccctgcatcaccccagacagcgccggggccctgagctggggctggcacccactccctgcacgaagccatgtgaggacccgggagacacatttccgagccctgtgcctccaccttcgtaacttctgccacctctgagccacctgcgctgctctcttccttaaatagattcattttcactcaagttaatttctctcaaaagaaagcactctctccctgccgtcgctgaaatcccatttcacctgcaggaagtggaaggtaggtctaaaaataatcacagccacgactacacaagcctgctggattctggccacagccacggcccccagggccctgcgcctgcggctccctgttggattctggccatagccacagccaccaaagccctgcgcccacagctccctgttggaggctgggagctcctcccatgtggccagagatgcgtgagggctggggacagccccttcccctccctgtgttcccatccccggccgctcacctccgtcctgtacaccagctgcaagccctggtcgtcgttgaccctgtagagctccaggaaggggtc

SEQ ID NO: 64111 - DNA, 1035 bp, Homo sapiens
aaagtttcttgagatatggggattttttttttttttttttgatggagtctcactctgttgcccaggctggagtgcagcaatgcgatcttggctcactgcaacctccacctcccaggttcaagcgattctgctgcctcagcctcccaagtagccgggactacaggcacccgccaccgcgcctggctaatttttgtatttttagtagaggtgaggtttcatcatgttggccaggctggtctcgaacttctgaccgcaaacaatctacctacctcgacctcccaaagtgctaggattamaggtgtgagccactgtgaccggctagggatttttttttttttagacggagtctcgctctgtcacccaagactggagtgcagtggcgccatctcgactcactgcaaactgcgtctcccgtgttcatgccattctcctgcctcagcctcccaagtagctgggactacaggcgcccaccaccacgcccagctaatttttgtattttttttagtagagacggggtttcaccgtcaggtgcactccagcctgggcgacagtgggaggctctgtttcagaaaaaaaaaaaaaaaaaaagaatgaaaacggggaggaggctcaattcaactgtcacatagaaagaaaagagttatggaggatgagactagaaaggtaagctggtaaggtgggacaggctgagcctagtgcctgactccacctgagcttttggttacataagccaattaattcccttttcccccttacttatttgggctggttttctatctttgaatcaagacgcctgactaatggtgaggaggcagcaaatcatactgcccaagagaggatggtccctgacctcatcattgaatgcaaagccatttggaaacaacgtgttctgtacaaatgctgagcattatgatcatcctaatatgcgagctccacactcaccctgagtaggatagaacctgcccctgacatcaaaaagagaaagctctgtgggtggatgttcctactggcttcagaaagccctttccatatgca

SEQ ID NO: 64112 - DNA, 595 bp, Homo sapiens
ttttacattgctaaaggataaaattcacaagaagaatatgatgtcagtctttacattctgaacattctttcactgaaataaagcccataatggctagaaatagagaagaaatgaccaacacttcataaacatatctctctccaagaagataggggtagggaggatatacaagcataggccccatgtccatattaattttattttgtattgatcacagaatctgaccaataaaatgaataaggctaatataatagatatcaaactttgcaccccatagaaaatagcttcattttcaatggctaaagagcatttatgaaaagtcaccatctatcatgccacaaggaaaatttcaaaccccatgaaaaaaggaacatttcagctgggtgcagtggctcatgcctgtaatcccagcrctttaggaggccaaggcaggtggatcacctgaggtaaggagtttgagaccagcctggccaacatggtgaaatcccgtctctactaaaaatacaaacaattagccacgcgtggtggcgggcgcctgtagtcccagctactcggtaagctgaggcaggagaattgcttgaacctaggaggtgga

SEQ ID NO: 64113 - DNA, 763 bp, Homo sapiens
ggggtttttttgttgttgttgttgttttaaatgagacagagtctcgctctatcagccaggctggagtgccgtggcgcaatcttggctcactacaacctccactcccgggttcaagcgattctcttgcctcagcctcccgagcagctgggattacaggtgcccgccaccatgcctggctaattttttgtatttttagtagagacacggtttcaccatgctggccaggctggtcttgaactcgaccttaggtgatccacccgcctcggctcccaaagtgctgggattacaggcacaagccactatgccaagccttaagctatgtttatcagaaatttgcaatgtcagaagggaggcacaaaggtgacatccatcaatgtctagtcaagaggaataatgaaaagaacatgagaaaagaaaacaagagagacactttaaaagaatggcttactttcagttaagttrtaataacaaatacagttccttgaaaaatacaggttgtacaatatgtgtggttatgatttcacttttattaaaaggataattacatagtatgcatttgtgtacacagaacagggctggcaaggatacagatcaaactgctttgaagtggtggggggacataagaaaagatcgtgtgaccttctcaatttactaaacacaagtctgacaagctagaattatttttcaacatgtgtatgcttcttttgcaaatcctttaaaaaactattaattaaaaacggctccatgagggcaaagtgcaaat

SEQ ID NO: 64114 - DNA, 705 bp, Homo sapiens
tgtctatttttgcctttgttgtttgtgctttcagattcatattcaaaaaatcattgcccagaccaatgtcaaggagattttctcctatattttcttctagtagttttacagtttaggccttatgtttaagcctttaatcattttgagttgcgttttgtatgtggcatgagataagggtttaagttcattcttctggatgtggatatccagttgttttaacaccatttgttgaagagattgtttttttcccattgtgyactcctggcaactttgtcaaaaattagttgaacataaatgtgtgaatgtatttctggtttctcagttcttttccattggtctatgtgtcttaggccagtaccatactcttttggttactccagctttatatcatattttgtggttagaaattttgattcctccagctttgttctttttgctcacgattgctttgtctatttgaggtctcttttggttgccttcttccttcctcacaaatccatgtgcatccctccccagactgtgcagtcagttgaagaagacaatcttctctgatagaagagaattgttcttcagtcaaaggtacatgtgtagctgtgctcacttgctagaacctctaaacaagcccttagagcccctttcactctgttatctttcatgtgctgaccagaggcagaagactctggaatggtaggaccaaaaattgat

SEQ ID NO: 64115 - DNA, 1071 bp, Homo sapiens
agtgctgtctcaaagcaggaactgggtacattccagaaagcgagtgccatctcattgctggatagagactggaaaatgtctgcccacaggggtacaagaaaggaaccaccaggacttgaacaggcggggagggggaggatcacttgtgacaaactagaacccttagcgtgacctccgcatgaaggtggggccggaatctgccttccacaatagtgcagaaacactgagctgaggaattactgtcaaaaccagtctggagctggtgaagttcaaaggccacagccaagacaaagtgaggagcgatctcactgatgcatcgacaacgcagagcacgaaggcgcgtgctgggaagggaccacagctggaacagtgcagtgatgagatgaaaaagcccacctgcccacagacaaaacaagtcggcgaatccatactcagggaactaaaaataatagtgaagtcaaaagaaacttgagaaccggcatggtggctcacacctgtaatcccagaactttgggaggccaaggcgggcggatcgccagagatcaggagttcaagaccaacctgggcaacatggtgaaaccctgtctctaccaaaaaaaagaaaaaaaaaaattaaccaagcgtggtggtgcatgcctgtagtccccagctactcgggtggcagaggcaggagaattgcttgaacccaggaggtggaggttgtagtgagccaagcgagccaagccaagatcatgccactgactgcactccagcctgagcaacaaacagagtgaaactccatctcgaaaaaaagaaaaaagaaaaagaaacttgaaataagtctgtttacagggtgtccaaactattggtttcyctgggccatgtgggataattgtcttgggccacacataaaatacactaacgttaacaatagctgatgagacaaaaaaatcgcaaacaaaaatctcataatgttttaagaaagtttatgaatttgtgtaaaattcaaagctatcctgggctagctagtgcccgtgggccacaggttggataagcttggtttaagatgtgtagaaaaataagaaaataaaa

SEQ ID NO: 64116 - DNA, 1404 bp, Homo sapiens
  misc_feature (1)...(1404): n = A,T,C or G
ggcctcaaaccagggcctttgcatgggccgtgttctttgcctggctcagcaatctgcatggttgggcatggttgggtcccctattcccttcatttgtgtgaagacttgatcacagagacctccccctacctcataaccatctcacaccacttcatttttcttcaaagcacttatttcaacctgtggtgtgttacatatttatcatgtctttgtttgtctctctgcgtagaacgtaagtgctggaagccttattcactgctggagcataagagctgcccagcacatgagcaagtgaatgaatgacgggcactattgaatgctttgggcctgggaataaatgctactggattataccgctgtcatcatcattacaggttctctcaatgctcccactgccagggcctcatgaaaatccttgtttgaggactagaagagtccccagtgtgtgttgtgaccttgttatcacccctggttttccttgtccctggagtggtggcatcatcctgaacctcgtgctgtctctcctcgcactcctcgggatgccatgtttcctgggatgccatgtctcctgggatgccatgactcctgggatgccatgtgacactgcagcccagaggcatgcagggtccccagggaggkcatgagggatggttggcctcactgagcgggatcccatgctgcagaggcagggggcttagaatgacttgtagccaagattcgtcttaggggcctgctcccttcttgtaggtattttttccagtgctcaggaacagattggaagggtgtttggaaccaagagtcctgggtatgagtcctagccttgccctcactgctgagtgagttgcataagaatctgccccaaactgaaagggaaatcgaggggaatcattgaatgctccagctggcctcaagcagcaggactgagggcaaagggcaaaaagatgcctcaaggctgggcagttgacgttcattcattcattcattcattcattcattcaagtgagtcctttggagccacagaagattgtagagagggagagaagtgatgtgatcatttcacagattattggaggtgaggttgaccctacctttgattattggaccccacctccaataatcagaaaggacctcagagagggccaacttcttaattttacagtggggaaactgaggcccagagtaggcagagaatcatcccaggtcacacagtggccatgtgactgcatctctcactggaagccatggaaaggggagttttccagggttaagggcaagattggagctctctggagctaagggcaagnnnnnnnnnnnnnnnnnnnnnnnnnnnnnnnnnnnnnnnnnnnnnnnnnnnnnnnnnnnnnnnnnnnnnnnnnnnnnnnnnnnnnnnnnnnnnnnnnnnng

SEQ ID NO: 64117 - DNA, 505 bp, Homo sapiens
tctgcctagttttgatgagatattataaaatacatttctgtgattattagagcaaactatcttttatatttggcattagtcttccactttacaattactttttactgtattatgtgatgctaaactctctctcataagtcattagctattgtactaagataattcattgctgaaaaatttattctcaaagagtatagtactagcctgcccaaaggtgtgtgataggctgttcttgcattgctataaagaaatacctgagactggataatttayaaagaaaagaggtttaactgggtcacagttgtgaaggctgtacatgcatggtgccagcatcttctggagggcctcagggagctcttactcatgacagaagacaaagtggaagcttgcatatcacatggtggaagcaggagcaagagagagtggagtgggaggtgagacacactcaagcaaccaggtttcagggtactcacttggtattgcaaggacagcaccaagccatgag

SEQ ID NO: 64118 - DNA, 780 bp, Homo sapiens
  misc_feature (1)...(780): n = A,T,C or G
tatgtaatctggacatatttccactgcaaatattgaacttctaagaggaagaatagcaaatgcctggcactttgctgccaccttgcccatgatcaattccactactctaattctcttggtctaggcttaggtgtggactcagaatctttctccacacagtgcctaggaggccactaccaatcacttgaagttgaccttaaaggtggaagcttcttgctgatcctggatggtgagaattcaaggttccacactgttcatcacattgaggtttccattttcttatcagcttctaaggacaatttggttttcatggcaacagttatcttcacagactcaccaggataaactctcatattcaattttcaacatatgtcaaggaatraatatctgaatgtgaaaacaaatgaaatgaaatgcagcaaacagtaacaataaggacagaggctatatcaatattaatgaatgatgtttgtgctatgctatattaagtaggagagagagaggatttataaaaaatcttaaatttggtctggaagagcatcctcacatctcagtatagggaaaaaagtcccgcttggctaataacatgttagcagttcatagtctcttttcttcagggacaagaaccactatgttcaaggccttacatcctatgtacgtttatgctaatccttgaatcttatttanatgcagtattatatagtcagtacttattcatggtatccattntcactggtgattctcagactttatgggtaacagattttcctagggagttta

SEQ ID NO: 64119 - DNA, 580 bp, Homo sapiens
aaatatggcaaaccccagaggctggaggaaaagtcagaagacataaacctttgagaccaaaggctgtagtaaacaaaataaaattctctattactggccacccaaagacatcttcccaggaagattaataattgtgattgcaatacaaatttttaacamtggactattttaaagtacctaaataccagtatttttgtttataaatatcatttctttctttttttttttttttctgagacggagtttcgctcttgttgcccaggctggagtgcaatggcgcgatcttggctcatcgcaacctccacctcccgggttcaagcgattctcctgcctcagcctcctgagtagctgggattacaggcatgcgccaccactcccagctaattttttgtatttttagtagagatggggtttctccatgttagtgcttgcctcttaaataggaccagatatccaaagcctcccagatatttaagtatagcctctaaaataaaagacagaggccaggtgtggtggctcatgcttgtaatcctagcactttgggaggccgggtcaggaggatcccttgagcccaggagtt

SEQ ID NO: 64120 - DNA, 580 bp, Homo sapiens
aaatatggcaaaccccagaggctggaggaaaagtcagaagacataaacctttgagaccaaaggctgtagtaaacaaaataaaattctctattactggccacccaaagacatcttcccaggaagattaataattgtgattgcaatacaaatttttaacaatggactattttaaagtacctaaataccagtatttttgtttataaatatcatttctttctttttttttttttttctgagacggagtttcgctcttgttgcccaggctggagtgcaatggcgcgatcttggctcatcgcaacctccacctcccgggttcaagcgattctcctgcctcagcctcctgagtagctgggattacaggcatgcrccaccactcccagctaattttttgtatttttagtagagatggggtttctccatgttagtgcttgcctcttaaataggaccagatatccaaagcctcccagatatttaagtatagcctctaaaataaaagacagaggccaggtgtggtggctcatgcttgtaatcctagcactttgggaggccgggtcaggaggatcccttgagcccaggagtt

SEQ ID NO: 64121 - DNA, 1254 bp, Homo sapiens
aaaaaactcatgtttcaggttattcattacaacattgtttgtaatagcaaaatgtggattagaaatagtccagatgtctgtccgtaggggactgtttaataaactattgtcagtcycttagtggaaagtaattattttctcagtgaataaaggaaaaaaatgacataattttataaccagcttccaggccctccaaaacacagagagctgtgttgaaagcctcacagactggtcgggcgcggtggctcacgcctgtaatcccagcactttgggaggccgaggcgggtggatctcgaggtcaggagatggagaccatcctggctaacacagtgaaaccccgtctctactaaaaatacaaaaaattagccgggcgtggtggcaggtgcctgtagtcccagctactcagggggctgaggcaggagaatggcctgaaccctggaggcggagtttgcagtgagcagagattgtgccactgcactccagcctgggcgacagagcgagactccgtctcaaaaaaaaaaaaaaaaaaaaaaaaagaaggcctctcagacagagagactctttgacctccctaaacctgagcatacgaagaacccctttcaaaacctcagacacaaagcgagagagtgtgtcagatttaacgtcagtcctaggtctaaatcccagcttggctactttttatttgctgtgacactctggactttggctcaccgtcggtaggctggggataggactccctgccttgtcaggttgttgtgagggtggagtggtactagagcatgtgatacagaagctacaggcgcctggccaacagtaagcgctccacaaacaggagttgataggaatagtagccccggaagaaagaatcctgtctccaggacaggattcattgcaaaaggaaagccacgctgaaaatcccaagagaagaagcaaaagtcacttctctgaagagaagaattgaaggaatttcctctcatgaccaggcagttttgggagaggctctgtatacacagtcagatgccttcaccctcatgttctccagcttctcattgccgttgcctcctctgacgaccggcagagactttccctaagtatcctggatcagcagggctggaaggacccaagcccaaattcccatttaggatgagaaacccaagaaccagagaagaccagtgatcaactcgagggcacacagccagcgggcctggtccacagccaggccaacccgctaacaaaactgcttccaggtatgca

SEQ ID NO: 64122 - DNA, 1254 bp, Homo sapiens
aaaaaactcatgtttcaggttattcattacaacattgtttgtaatagcaaaatgtggattagaaatagtccagatgtctgtccgtaggggactgtttaataaactattgtcagtcccttagtggaaagtaattattttctcagtgaataaaggaaaaaaatgacataattttataaccagcttccaggccctccaaaacacagagagctgtgttgaaagcctcacagactggtcgggcgcggtggctcacgcctgtaatcccagcactttgggaggccgaggcgggtggatctcgaggtcaggagatggagaccatcctggctaacacagtgaaaccccgtctctactaaaaatacaaaaaattagccgggcgtggtggcaggtgcctgtagtcccagctactcaggrggctgaggcaggagaatggcctgaaccctggaggcggagtttgcagtgagcagagattgtgccactgcactccagcctgggcgacagagcgagactccgtctcaaaaaaaaaaaaaaaaaaaaaaaaagaaggcctctcagacagagagactctttgacctccctaaacctgagcatacgaagaacccctttcaaaacctcagacacaaagcgagagagtgtgtcagatttaacgtcagtcctaggtctaaatcccagcttggctactttttatttgctgtgacactctggactttggctcaccgtcggtaggctggggataggactccctgccttgtcaggttgttgtgagggtggagtggtactagagcatgtgatacagaagctacaggcgcctggccaacagtaagcgctccacaaacaggagttgataggaatagtagccccggaagaaagaatcctgtctccaggacaggattcattgcaaaaggaaagccacgctgaaaatcccaagagaagaagcaaaagtcacttctctgaagagaagaattgaaggaatttcctctcatgaccaggcagttttgggagaggctctgtatacacagtcagatgccttcaccctcatgttctccagcttctcattgccgttgcctcctctgacgaccggcagagactttccctaagtatcctggatcagcagggctggaaggacccaagcccaaattcccatttaggatgagaaacccaagaaccagagaagaccagtgatcaactcgagggcacacagccagcgggcctggtccacagccaggccaacccgctaacaaaactgcttccaggtatgca

SEQ ID NO: 64123 - DNA, 592 bp, Homo sapiens
cgggagttcgagaccagcctggccaacatggggaaaccccctctctactaaaaatacaaaaaaaattagccgggcgtggtggcacatgcctgtaatcccagctactcgggaggctgaggcaggagaattgcttgaacccagaaggcagaggttgcggtgaaccaagaytgtgccattgtactccagcctgggcaacaagagtgaaactccatctcaaataaataaataaataaataatttttacaaaccacaaagttatttcaacaacctataaacttctgtcccttatgatgccgtgaagcctgaatatgaccccagttttctctgtctgagacttcatagcaagtaacccagagtcaacagaaatcagtgggttaaatagatatttggaagcccacagcaatcttctcttattttcttaagaattgacacttataaggaaactgagtacaatcgcttcagaaagaaacttgctaatttctgcctagaaagtaaaagatatttaggattttttgaggcaagggattaccggaatagggaaatcaacaacaaataaagctcactctgtctctgcaccatgtctgtcctctcc

SEQ ID NO: 64124 - DNA, 592 bp, Homo sapiens
cgggagttcgagaccagcctggccaacatggggaaaccccctctctactaaaaatacaaaaaaaattagccgggcgtggtggcacatgcctgtaatcccagctactcgggaggctgaggcaggagaattgcttgaacccagaaggcagaggttgcggtgaaccaagattgtgccattgtactccagcctgggcaacaagagtgaaactccatctcaartaaataaataaataaataatttttacaaaccacaaagttatttcaacaacctataaacttctgtcccttatgatgccgtgaagcctgaatatgaccccagttttctctgtctgagacttcatagcaagtaacccagagtcaacagaaatcagtgggttaaatagatatttggaagcccacagcaatcttctcttattttcttaagaattgacacttataaggaaactgagtacaatcgcttcagaaagaaacttgctaatttctgcctagaaagtaaaagatatttaggattttttgaggcaagggattaccggaatagggaaatcaacaacaaataaagctcactctgtctctgcaccatgtctgtcctctcc

SEQ ID NO: 64125 - DNA, 592 bp, Homo sapiens
cgggagttcgagaccagcctggccaacatggggaaaccccctctctactaaaaatacaaaaaaaattagccgggcgtggtggcacatgcctgtaatcccagctactcgggaggctgaggcaggagaattgcttgaacccagaaggcagaggttgcggtgaaccaagattgtgccattgtactccagcctgggcaacaagagtgaaactccatctcaaataaataaataaataaataatttttacaaaccacaaagttatttcaacaacctataaacttctgtcccttatgatgccgtgaagcctgaatatgaccccagttttctctgtctgagacttcatagcaagtaacccagagtcaacagaaatcagtgggttaaatagatatttggaagcccacagcaatcttctcttattttcttaagaaytgacacttataaggaaactgagtacaatcgcttcagaaagaaacttgctaatttctgcctagaaagtaaaagatatttaggattttttgaggcaagggattaccggaatagggaaatcaacaacaaataaagctcactctgtctctgcaccatgtctgtcctctcc

SEQ ID NO: 64126 - DNA, 793 bp, Homo sapiens
gcactccaatctcggactttcaggatccagaactgtgagaaaatacatgtatgttggttaatccatccagtcgatggtgttttgttatggcaacccaagctgaataaggcacattttggtactgagaagtggggcgctgctgtcacaaatactgaaaaaatgtgaaaacagctttggaactgagtcatgagtggaggttagaggagttttgaggtaaaagctagaaaaagtctagattgccacaaataggatgttggcagaaatatgggcattaaagatcattctggtgaagtctccaatggaaatgaggaacacgtattggaaactggagggaaagtgatccttgttataaagtggcaaagaaaggactaaactgtgttctgctgttttgcaagaggtggaacttgcaaacaatgaaattggatatttagctgcggatacgtctgagcaaagcatggaagaagcagctttgttcctcctactgcatgtagtaaaatgcaaggggagaggggtgaattagaaaaagaatgtttaggcaaaagggaaccaaaaattaaagagttggaaaattctcagcctacccattctgagaaaaatgagggagcatgttctgaagagaacgccaaaaatgtggctggactatcatttaataaaatgcttatggaattataggaacagaaagaaacactsccagtttgaactgaaggggaagagacaagacaattgaaggaaggctgtcagacttcttggatttgacggtaaaaaacaatgaggtactcagctgtgaacatgc

SEQ ID NO: 64127 - DNA, 1380 bp, Homo sapiens
agatgaaatggtgagcctcacctccagactgtgcatacaactaaatgtaatgctatggttcaaacaacaagcatcctctttggaagaagaaatactttgagggctgggagcggtgtctcatacctgtaatctgaacactttgggaggccaaggtgggtggatcacctgagatcaggagttggagaccagcctggccaacatggtgaaaccccatctctactaaaaatataaaaaattagccgggcatggtgatgtgcacctgcagtcccagctactcaggaggctgaggcaggagaatcgcttgagtccgggaggcagaggttgcagtgagccaagatcgtgccactgcactccggcctgggtaacagagcaaaactccgtctcaaaaaaaaaaggaaataatttgagctagtgcgttttctcagatttaagtgccttaaactgtcacctacctcaaacacaactcttttctagtaatttttttaaaattcacccatagaatcatgctcagaaatgctggcagacagtggggaaatctagactgtaatcctgcttctaccccttcctagccctatatccttgagcaggttattccacatctctgagccccagttccctcaggagttaaataagataatgtaagccagtgcgtggcccatgctaggctctcaaaacatgttagctatttttataatttatgtataccaaagtttatggatccttttgtcactctccaatgccctaaatatagttaagaaatcttcccaacagttgctttatgattatagggctcttgttccaaacaatctagaaatctgcaaagaaactcatgagtagaatatggtcatgtttacatattaagcagcctttttggcaattcagcaataaaaaaaaaagtgctctaaaaaggggaagggaaatatgaaaagaaaaaaatccttttgaaataacgatttcatcttttgttccggcctgtcttggggtaaagaaatgccaatttagaaagtccctggagctaagcaaattctctaccatcagctcctgggctgcatcagcaaagcgaggtctgctttcaggaaatgtgagcccaagagtcttcctgaagcattctccacactgatgccactgccttgctgtacttctgaaggccacagagggcagtgggacaactgccaggccctcccctacttggcataaaactcaggcaggctcttggcctgatgaggcagcyctctctacttcccttgttccctgcctccctcactccctcctggatattaaactcactgtggtttcatccactttatcatctcatttgctttctgatctgatcccaggctgccatgtggctgatcaaaggcagatgtgagctctcagctt

SEQ ID NO: 64128 - DNA, 728 bp, Homo sapiens
gcgttataagtgagtttattgaggatatgatgggaaaaggccaatatcaaaatcaattgtatttctatatagcatagaaataaattacaaattacaaattccaatatgttccaaataaacattcagaaaatagtattttaataaaaattttaaaaaatasctcagggtaaaatttgagaaaagatttccatgatttctacactgaaaatagtaaaatattgctgagaaattgaagaggatctaataaagtatgagacatgccatgtacattaattggaaatctcaatattgttgacacgtcaatcctccccaaagttatagattcaatgcaatcctaataaaaattcagttagtctttctttttaaaaattgataagataatctaatattttaatgggaaagatatggaatactagatttttttttaaagaagaacagttgaagtcagtgtagtattggcagtaggatagacatgtagatcaatggaacaaaataatccagaaatagtcacattaaggttaaataaatgtttactcaagtgctactgtaattcaatgggaaagaatggtcttttcaacaaatggtgggggaagaactgaattatctatagaaaaaaaatgagcctcaatttctgcctcctatcataaaaacaaatataatgtacctgttgagtgaccgctgttgctaaattgcccccagaactgtctcccgcaatgcagattcgggtg

SEQ ID NO: 64129 - DNA, 728 bp, Homo sapiens
gcgttataagtgagtttattgaggatatgatgggaaaaggccaatatcaaaatcaattgtatttctatatagcatagaaataaattacaaattacaaattccaatatgttccaaataaacattcagaaaatagtattttaataaaaattttaaaaaatacctcagggtaaaatttgagaaaagatttccatgatttctacactgaaaatagtaaaatattgctgagaaattgaagaggatctaataaagtatgagacatgccatgtacattaattggaaatctcaatattgttgacacgtcaatcctccccaaagttatagattcaatgcaatcctaataaaaattcagttagtctttctttttaaaaattgataagataatctaatattttaatgggaaagatatggaatactagatttttttttaaagaagaacagttgaagtcagtgtagtattggcagtaggatagacatgtagatcaatggaacaaaataatccagaaatagtcacattaaggttaaataaatgtttactcaagtgctactgtaattcaatgggaaagaatggtcttttcaacaaatggtgggggaagaactgaattatctatagaaaaaaaatgagcctcaatttctgcctcctatcataaaaacaaatataatgtacctgttgagtgaccgctgttgctaaattgcccccagaactgtctcccgmaatgcagattcgggtg

SEQ ID NO: 64130 - DNA, 2196 bp, Homo sapiens
agattaatggttgcctatgattgggtttggaggatggggagaaatgagaagtgactactaatgggtataggatttccttttggcatgaggaaaatcttccaaaattgattgtggcaatggttgcacaactctgaatatattgaaaatcactgaattgcatacttataatgtgttaattttatgggttatgaatatctcggtaaaatggttatattaaaaattaagggcatacttttaatgtgttaattttataggttatgaatatctcagtaaaatggttatattaaaaattcaggctgggtgcagtggctcatgcctgtaatcccagcactttgggaggccgaggcaggtggatcatgagatcaggagtttgagaccagcctggccaacgtggtgaaactccatctctactaaaaatacaaaaattagccgggtgtggtggtgggcacctgtaatcccagctacgcgggaggctgaggcaggagaattgcttgaacctgggagtgggaggttgcggtgagccgagattgtgccactggactccagcctgggcaacagaactagactctgtctccccgcaaaaaaaaaaaattaagaaattatgttcatcaaaagacattaatagaagtcttaaagtttgtgtgtgtatatatatgtgggtatagacatatgtatactataaaagtttttaaatacatatatacattttcaaatccaaaatataaaaacacctaccaattaatagaagtataggcgaaagactcagaaagacaatttacagaaaaggatattgaaatcatcaaacaatatatgaaaatgtactgtatacatcaggaaaatacaaattaagactattataagatacctgyatatactcgagattatagataaaatgagaaagacataagataccaagtgttggtaaggttttgaatcaacagcacttccataagctctagtttgagaataacttggtaaactacttagcaaaactctttgacattattaagtaaagctaagcatatatgcatacctctgttattatcaatagcacaggtatgtatcaacaggaacacagccatagggccccaaaaaacatgtactagaatattcatagcagcactgtttgtgcccaagactgcaagcagcctaaatccccataacatttttttacttggaaaaatatttatttagtatttattgtttgtttaattatttataagaacatttaatatgtgatctaccctcttagtgaatttttaaatttgcattatttttgactgtaggtacaatgttgtacagcagatctgtggagcttattcaacttgtttgactgaaactttatgccagctgatcagtaactccccatttcctcctccccacagcccttgcaaccatcttttcactctgattctatgaatttgactattttagacaccttatataagtggaaacatacagtatttgttcttccatgagtggcttatttcacttagcccatcaacatgttaatgggtaaatgatttgtggtatattcaaacaatagagtactatacaggaagacagaagcaatgtgaatgaggctcaaaaacataatgttgaacaattgaaaccagatacataggagtatatgctatatgattttatttatttaaaggccaaaactaggcaaaattaatttatgctgttatgtcaaattagtggatacgtcaggaattaaagagagtaaacaaaaggtttctgggatgcgggcaatgttatatttcatgatctgagtgctggttatatggctgtgtttagtttgaaaattaaagaaattatatacttatgtgcacctccagcatgtattaggttggtgcaaaagttattgcggttttgtcattacttttgcaccaataatatattacagtctaatcaaaacaaacaaaaaaatgtgtaaactatgttttctctctacagctacagattagcacctaagtatcatttcccaattcaatttgaagatgtatataatgccttaaggtggttcttacgtaaaaaagttcttgcaaaatatggtgtgaaccctgagagaatcggtatttctggagatagtgcaggagggaatttagctgcagcagtgactcaacaggtatgttcataatttctatgctttttaaaaatagcgtttctacgctgttttaaaaacatatttat

SEQ ID NO: 64131 - DNA, 1065 bp, Homo sapiens
gattgacccctaattcttgtaatagtttttaactggcaggatcatccaggtaaacaccttggttttttcatatgcagtatgaagcagttgtatttcctttaacctatttataagttgtgaaatctttgctagtttctgttgatggcagtcccatctacctctagcaactgtaactaattttcattgagtacccagactacttaccagactttgtaggtgccttactcgaatttcccatttaatcctttcaaccacagtgaagtagataactccactatttgagaatactgaggctaagtgaatccaggtctgtaaagttagatgctgattcaagattcagactctaaagtttgacaccacagaaccaatttctttaaccattatggtgcaatattttttgaagtacaaatgttttgccacattattactaattttgaattgttactaatatgaggagaattatgaggaataaattgggaggttcccagagaaatgatttgagctatgcctttgctttagacaaatctgctttctaatatagtagccaccagccatggagctgaaatgtactagtctgaattgagacatgctttaaatgtaaaatacaaattgggtttcaaagccttagaattaaaaaaaaatgtgaaacacctaaattttattttttttttatttttggktttttttttttttgagccagagtcttgctctgttgcccaggctggagtgcagtggcactatctcgggtcattgcaacttccgcctcctgggttcacgtgattctcatgcctgagccacccgagtagctgggattatagctgtgtgcctccacgcccaggcaatttttgtatttttagtagagacagggtttcaccatgttggccggctggtttcgaactcctaacctcaaatgttccacctggctcagcctcccaaagtgctgggattacaggcgtgagccactgcgccgggccaataattttttacattgattacatgttggataatattttaggtatattaggttaaataatattgaaattaatattacctatttcttttcat

SEQ ID NO: 64132 - DNA, 682 bp, Homo sapiens
gcattatagtccctgttgtgggctgttttcttagctctttattattattattattattttatttatttatttwttttgagacagagtctcgctcttgtcgcccaggctggagtgcagtggcacgatgtcggctcactacaacctctacctcctgggttcaagcgattctcctgcctcagcctcctgagtagaaaggatgacaggcggctgccaccatgcccagctaatttttgtatttttagtagagacggggtttcaccatgttggccaggctggtctcaaactcctgacctcaggtgatccacccacatcggcctcccaaagtgctgggattgcaggcgtgagccaccttgcccagccagctctttattattgagtcagcctgggcatgatgagtaataaccaggggtaatatccacatccatagcaggcgtttgtctagacagggttagcctcatcaaatttaaatgctccaccttggccacctgaccaccaggatttcttaaagatgctatgttttatgccttaactccaggaaacactgttgtttggagaaaaaaatgggtacagtcatgagttcttttccaccaaatataaaatgctacattcttctatgatatgacagggctccctgatttagtactcagagaacagggataggaaagccaaccctaacatctag

SEQ ID NO: 64133 - DNA, 682 bp, Homo sapiens
gcattatagtccctgttgtgggctgttttcttagctctttattattattattattattttatttatttatttattttgagacagagtctcrctcttgtcgcccaggctggagtgcagtggcacgatgtcggctcactacaacctctacctcctgggttcaagcgattctcctgcctcagcctcctgagtagaaaggatgacaggcggctgccaccatgcccagctaatttttgtatttttagtagagacggggtttcaccatgttggccaggctggtctcaaactcctgacctcaggtgatccacccacatcggcctcccaaagtgctgggattgcaggcgtgagccaccttgcccagccagctctttattattgagtcagcctgggcatgatgagtaataaccaggggtaatatccacatccatagcaggcgtttgtctagacagggttagcctcatcaaatttaaatgctccaccttggccacctgaccaccaggatttcttaaagatgctatgttttatgccttaactccaggaaacactgttgtttggagaaaaaaatgggtacagtcatgagttcttttccaccaaatataaaatgctacattcttctatgatatgacagggctccctgatttagtactcagagaacagggataggaaagccaaccctaacatctag

SEQ ID NO: 64134 - DNA, 682 bp, Homo sapiens
gcattatagtccctgttgtgggctgttttcttagctctttattattattattattattttatttatttatttattttgagacagagtctcgctcttgtcgcccaggctggagtgcagtggcacgatgtcggctcactacaacctctacctcctgggttcaagcgattctcctgcctcagcctcctgagtagaaaggatgacaggcggctgccaccatgcccagctaakttttgtatttttagtagagacggggtttcaccatgttggccaggctggtctcaaactcctgacctcaggtgatccacccacatcggcctcccaaagtgctgggattgcaggcgtgagccaccttgcccagccagctctttattattgagtcagcctgggcatgatgagtaataaccaggggtaatatccacatccatagcaggcgtttgtctagacagggttagcctcatcaaatttaaatgctccaccttggccacctgaccaccaggatttcttaaagatgctatgttttatgccttaactccaggaaacactgttgtttggagaaaaaaatgggtacagtcatgagttcttttccaccaaatataaaatgctacattcttctatgatatgacagggctccctgatttagtactcagagaacagggataggaaagccaaccctaacatctag

SEQ ID NO: 64135 - DNA, 682 bp, Homo sapiens
gcattatagtccctgttgtgggctgttttcttagctctttattattattattattattttatttatttatttattttgagacagagtctcgctcttgtcgcccaggctggagtgcagtggcacgatgtcggctcactacaacctctacctcctgggttcaagcgattctcctgcctcagcctcctgagtagaaaggatgacaggcggctgccaccatgcccagctaatttttgtawttttagtagagacggggtttcaccatgttggccaggctggtctcaaactcctgacctcaggtgatccacccacatcggcctcccaaagtgctgggattgcaggcgtgagccaccttgcccagccagctctttattattgagtcagcctgggcatgatgagtaataaccaggggtaatatccacatccatagcaggcgtttgtctagacagggttagcctcatcaaatttaaatgctccaccttggccacctgaccaccaggatttcttaaagatgctatgttttatgccttaactccaggaaacactgttgtttggagaaaaaaatgggtacagtcatgagttcttttccaccaaatataaaatgctacattcttctatgatatgacagggctccctgatttagtactcagagaacagggataggaaagccaaccctaacatctag

SEQ ID NO: 64136 - DNA, 752 bp, Homo sapiens
taaaaagtatatatttatttaaaatgagaaaaaacaaattatagatttttagaagctgtgaaataccacaaacatcacaaatccagcccccctaaaaaagaaccctcaaaaatcgaatttttataaatgagtatattggcataactctagactggtacttcaatgtgctgagaagtcttataagctgcctcagaatcaaggttccttcaatctttttatccaccctccacatttccccttgccaaatgtggggaggagctctctttggaatttccttatctgacgaagaaaaacttctttccaacagaaatgcaattgtcttgaaggtcctctctagcgatctcactgaataactaggaaaaaaagtcaaccactggagaaaagaagagcctgggagtcatcagtayacccagacaaactttttctctattctccttctgcagctccaagagactacctggggcactttatctgcataagacaacctttgctcctgtgcagttctgttcctcacctttccataatgtctgcttttgcctttgtgcatctatcccctatgaagagactacttaaccatcaaccatccggttcctctttgagttcatttttgtgtgtctcctgtgcacacgtgcatattaatacattttgtatactttctctcctattaatctgccttttgtcagttgattttcagctaatgtttaaaagacaaaggggaggtttttcccttggaccctacagcattttatatg

SEQ ID NO: 64137 - DNA, 413 bp, Homo sapiens
ctgccctacctcttgtcagtatcaagggctattgagggtctagtatacttrgaaaaggaagccaacatttaatgctgttggatactatgtattcaaactttcttgtgttacccaatcttgttatccaaagtgtggtcttcagaccagcagcatcagcatcacctggaaccttactaaaaatgcagaatccaggccaggtgcagtggcttatgccagtaatcccagtattttgagaggccgaggtgagaggatcatttgagctcagaagttcaagaccagcctaggcaacataatgagacccccgtctctccaaaaattttaaaaattagccaggcacagtgactcatgcctgtagtcccagctacttgagaagctgaggtggcaagatcacttgagcctgggagatggaggct

SEQ ID NO: 64138 - DNA, 413 bp, Homo sapiens
ctgccctacctcttgtcagtatcaagggctattgagggtctagtatacttagaaaaggaagccaacatttaatgcygttggatactatgtattcaaactttcttgtgttacccaatcttgttatccaaagtgtggtcttcagaccagcagcatcagcatcacctggaaccttactaaaaatgcagaatccaggccaggtgcagtggcttatgccagtaatcccagtattttgagaggccgaggtgagaggatcatttgagctcagaagttcaagaccagcctaggcaacataatgagacccccgtctctccaaaaattttaaaaattagccaggcacagtgactcatgcctgtagtcccagctacttgagaagctgaggtggcaagatcacttgagcctgggagatggaggct

SEQ ID NO: 64139 - DNA, 752 bp, Homo sapiens
gtttcaataaaactttattgacaaaaacaagtagtgggccagatttggcacacaggccagagtctgccaatcgctgacctagaaaaatgtagccctatcttctcattgtgcagatggataaagcaagactcaggtgagagatgacttgcccaaggtcacacacctcggtaaagacagagctctaggggaaagcctaaaatgttaactctatcttctaaagctctctctaccataccacatggcccccctgtttcttctttcctgccttcttccccttcattacttgcttaacaccgggggtaccatatgcaagcaaacagtgcctgtatgcacacagctttcagcctactgctacaccaagaaaccattttttaaawaagcttcaagaatcagcattaagtttgtgttggtttataaatgttaatattctaaaaccactgcaattacattattagaatggtgctgtcctgaggcatgcactacccttaatatgttttctttttgtaaatatgtaattatttgtggattattcaaataattgtgttcgttgaaaggaaattttttttaatgtaaataaggcatggagaaagaaattgctcactatcccattattcaaagatacccacattagcaatctggtgtgatttcttccactttttcacatagctttacataggcatgtatagatatgagtgtatatgtgtgtgtgaacataaacgagtgtggtgtgtattgggggcgcaacaaaaatg

SEQ ID NO: 64140 - DNA, 752 bp, Homo sapiens
gtttcaataaaactttattgacaaaaacaagtagtgggccagatttggcacacaggccagagtctgccaatcgctgacctagaaaaatgtagccctatcttctcattgtgcagatggataaagcaagactcaggtgagagatgacttgcccaaggtcacacacctcggtaaagacagagctctaggggaaagcctaaaatgttaactctatcttctaaagctctctctaccataccacatggcccccctgtttcttctttcctgccttcttccccttcattacttgcttaacaccgggggtaccatatgcaagcaaacagtgcctgtatgcacacagctttcagcctactgctacaccaagaaaccattttttaaataagcttcaagaatcagcattaagtttgtgttggtttataaaygttaatattctaaaaccactgcaattacattattagaatggtgctgtcctgaggcatgcactacccttaatatgttttctttttgtaaatatgtaattatttgtggattattcaaataattgtgttcgttgaaaggaaattttttttaatgtaaataaggcatggagaaagaaattgctcactatcccattattcaaagatacccacattagcaatctggtgtgatttcttccactttttcacatagctttacataggcatgtatagatatgagtgtatatgtgtgtgtgaacataaacgagtgtggtgtgtattgggggcgcaacaaaaatg

SEQ ID NO: 64141 - DNA, 704 bp, Homo sapiens
aagctgtttcaatttggttcctttcactcaaaagacttcttaatataaatgggcttgggttttaagttggagaaataaacmaatgggattgtttgtatcccaacacagtcacttgaggaaaatgcactaaaagggggtaggatggcttcaaattcttcttaatgaagatgactgatggtactcgaaatcaccttatagacacctctataaagctgctcccttattctttaaatgggaacttgagctggaagattcatgattttctagatttggggtccctctcagcaaaactgagaatgcaaaaagcgtgttacctgggtcctctttcctcctctttgagtactttccttttcctttccttccattgaacctgctgtgctccatctgtgcagagaattgaatgtctttgtgctctctaacttgtagcacccttcagccctcctttcctgtggatcaacttatgtctttgaaacttaccattctataccctgttcccagagtgttagatagagtggacagactaatttgtactaaagtgtaaattgctaacagtacaatgttttaagtggaatatctaaatagggaagcactttaatccaaacaattggagttgcaggagcttttagaagaaattgggggagatttttaaaggcaattgttttttgggggagtagagagattcccattatgattgtccatccatt

SEQ ID NO: 64142 - DNA, 579 bp, Homo sapiens
aattctggacaatgagacctgrgcagaattctaggtgtgttctgggaaagtttggttttgttttgtttttaactcctggtaaggattgaaactgcattgcccttttgctttccagcttctttcccccactgaattgtggagataatagcaagtggacacatgggttattaaaaatattttaaaaacatttttaatgattcaatatttttgggagaaaggctaatagaatcgcatagatttttgtctttgacaatattgattcattgctactatataagaaaaatggcatcctatttatgtaaactactattggttctgcattctatttcttatagccagacaagttattaactaatacaattgtatctgatattatcctcagggtggattagattgtgtggaaccgttatgcctgttctcagcaccctctgactgctatgtatttacatctgctttttaaacaataattttttaaaattatattttgttgggtacagtattctataaatgccaattaggtcaagttgttttatagtgttgttcaagtcttccctatttgcactgcttttatccattaat

SEQ ID NO: 64143 - DNA, 579 bp, Homo sapiens
aattctggacaatgagacctggrcagaattctaggtgtgttctgggaaagtttggttttgttttgtttttaactcctggtaaggattgaaactgcattgcccttttgctttccagcttctttcccccactgaattgtggagataatagcaagtggacacatgggttattaaaaatattttaaaaacatttttaatgattcaatatttttgggagaaaggctaatagaatcgcatagatttttgtctttgacaatattgattcattgctactatataagaaaaatggcatcctatttatgtaaactactattggttctgcattctatttcttatagccagacaagttattaactaatacaattgtatctgatattatcctcagggtggattagattgtgtggaaccgttatgcctgttctcagcaccctctgactgctatgtatttacatctgctttttaaacaataattttttaaaattatattttgttgggtacagtattctataaatgccaattaggtcaagttgttttatagtgttgttcaagtcttccctatttgcactgcttttatccattaat

SEQ ID NO: 64144 - DNA, 902 bp, Homo sapiens
aacagtaggctgagtatccaacactgatcataacaaacaggtcactggcagggcaggtcacaaccgttggctgggcaagaggccttccagtgggctacagcaccacaaggggtgctgggctggccgaaagatttggccactacccttcatgaagagttatgtgaagctgccttctgatgctgcccaaagctgatatccctgtattgtaataatgtgcccccctcccctgaaaaaaaaaaaagagcactagcaggttcttgagcagctggaactcttagaaacttgctgttttaccccaagtttccagtatgagtatagtgattagattctccttcttctcatcttttctctttcactggccctcaaggcacttaaaataaagccattaatatttcatggtaaacctttgtttttatcatgctcacttcagcagcacatatactaaaattggaatagtacagagaagattagtatggatgacatgcaaattcgtgaagtgttatatttttaaaagaatgaaatgctgtcacttacagcaacatggagaaacctggagggcaatatgttaagtgaaataagccaggcacagaaagacaaacaccacatactctcattcatttttgaaatctaaaaagttgttctcgttgaagtggrgaggagaatagtagttaccagaggatggggagggtaggaaggagagagagatgatgagagtgatggtcaacgtgtacacatttacagttagataggaggaataagttctcatgttcttttgcatactagactggagatgacaataaaatagctaaaagagaggtttttgaacattcttatcacaaagaagtgataaatgttaaaagtgatggccatgttaattaccctgatttggtcattacacaatg

SEQ ID NO: 64145 - DNA, 349 bp, Homo sapiens
cacatatatatacatatatatacacatatatatatataactaaacttattgtagtagttgtagtttttgctttttaaatccaatttagagattctgggaggatcgtgatgatagtgacagtatactttccaatctttttgaatcctcactttaaaatagatagagcaattaaatagcaaaaccaaaagtctaggagcaatgtttacaacaaaactaggcaacaaggyatgtgccctgatacaaacaaatggaaacaaaccaccaagagccccaggacccacatggtattggcatctgtgaaggagaaagtagaggaaatcaaatggtgccatgtctaaaggtgaatgga

SEQ ID NO: 64146 - DNA, 1274 bp, Homo sapiens
ttgtcttccccaaccagttgtcaagtaaattgcaaaatgtggctggacatctcggggtatctgtgaagacacatatctctggggttcctttgactatttatttttatcttttcaataaagaaaaatgtcaaacacacaagagtagaaagagtagtataatgaactcccaggtaccaaaactctaccataaaaatgatcaacttacagtcaatattgtttcatctgtattcccttccattcctacccccaccccccatattatttggaagcaaatcgcagagagcttatctcatccaaatatttcagcttgtacctctctaaaatatagactccttaaaaacataattccaataccattattttagagggtaataataatcactcaacatcttaaaatatctagtcagtgctcaagttctcaactattctctgagctatttgaagaccctcaatcacccctaggggctagaaggttttatgtatataacagtattgggaaaatcagggccctgagaagaaaatgcacgtaagaagcatattgagtctataacatttcttagaagactagaaagaggccagagatgaaatggtggtgaacacagaaacccacaattaagaaactattttcaagatcatatttctttttgaagaaaacagcatctacttctyacacacatgcaacagagttcgattcctttattcctggattccacacttacctctctcctatccctacctgccccagtcaaatccagattgttacggtcaaatcagaccatgagcaattctaggggtccagaggtgaaataatggctcagggtggagccccccacaatcatccctcttttacgtcagcagaggaagggctcaaacaagcaaagatgacgctcctatcccagagactgacctggacagcataagagatggcgagacccgcataggctgggggaatctgcccgtgcataagaacgatcatcagccccgtggtggtgatgagggcgatgctgatgaggtccagccgcacagccagccaccgcatcgcacacgtaaacaaaaaaaaaggagcttggttgtcatccagcagctcctggtatctgtgagaaagacaacacttaatgggcaaagaaagtactacacaaccccgcgcatggacaaagcttcagcgaatcagatgatggagggcacgtatttaaatacttcctgtttctaactgagagaatgccctggaaactccaggagggtattctaggaattctggaggtattctaggccgc

SEQ ID NO: 64147 - DNA, 2060 bp, Homo sapiens
tgtgaccaagggcctgtcaccctggacagctccgtgctggatcatgtggatgagtgcccagcacagggtggtggctgtggtgtcggtgcctcccagaaacaggtcgatcaccacctagaccaggttctcctggttgaatgtggagacagggtcatccatggcctggcgagtcgggggtgggcgagtggggggcgcagctccaggtctaaaattctctcctgacagagccctggggtttccttgaagcctgatctgagacctgtgcggccagaacttgaggttccaaccccttgagagggcctgattctcaggactgcattgatgttggtgggtggctgccctggtgttctggccctgacatcagccaggtcttctgcttcccaccctacccatgtctgtagaagccagccctgccctgggaaaaagtagggaggaaaaccctgttttaactcacattttcagcgtgctttggaagctcgtagatagagtcaaagatgagaaactgagaccatggcttagaaaggaggtgctcagaaacgaggtgcagcccaaaaagatggcccctcctttcctgagcagctgttccaggctcaccttggagatctgggccaggtagcagctgatgaagtccctgggggcctccggtgccctgagtttgtgcctggtgatctcctggtggattaagctcagcacgacctcttggtacctaaatatctcctggtggggtcctgggaggtggcagagggcccagggaaacacgtcatacagctgtggrgagagacgcccacccagggcctactcaggagccagcctctgagtcggggggctccaaagtgggctggagcctttgacttgagtaacccagggctgcctctcatctggagactccccaaataatttagacagaaatgagagctgtggtcagagcagctgtgcttagggcttcgctgggatgttgcaggtccagaaagctgtatgtcctaggatataaccagcctctgattccttgcccatgcattcatgctgaaccacaacaaaggtttgatgctctgaatgtgtcagctcaccaggcagaagccacggtctccctcctgcccaccttgcaccctccctgccaggccctggctgaggcccctgcctgcctcgggcccctaaggtaatggcctgcacacctgcctccccaaatgccaattacccggcgccacacagtgctgacaaatgccaggccaaagtcgatggcttgagtcagttcctggaagatgggatcctctaagaggaagtggtggccaaacacaagggccccgatgactctgactgtggacctgacaatggatacctgagggtcgaagggtctacctgagggtagaggggcagggctcaggacgaggaggcacgagaagcactaccctgagcacccatctgatctcgtatctagtcgctcatttactaactcagtcctccattcccattcctcactcatgcactccgcaaatgcttaccagccgggcgcagtggctcatgcctgtaatcccagcactttgggaggctgaggcaggtggatcacctgaggtcaggagtttgagaccagcctgaccaacatggtgaaaccctgtctctactgaaaatacaaaaattagctgggtctggtggcgcacacttgtaatcccagctgcttgggaggctgaggcaggagaatcacttgaacccgggggatagaggtagcagtgagccgagattgtgccactacactcagcctgggcaacaagagcgaaactccgtctcaaaaacaaaacaaaacaaaacaaacaaaaacaaaaaaacccaagtgcttaccagcccttctacgagccaggtcagagagaggcatgggagacagacaacaatttgaatgacaacagaatgacaacagaatgtggggcaggtatggcacagcagggaatgggagaaggtttggggcctgcagtcaggaggagtgctcagggcaggtgaccgcagctggtctccacgaaggaaccagtggtgtctgcagtggggagggaaggcaccatgggctggggcgt

SEQ ID NO: 64148 - DNA, 1100 bp, Homo sapiens
caacatgtatccctgaaaaattaggaccctcctctttttattaaactccagtaccattactatatctttaaaaaagtgcaatttagtagacaatattctcagaattttaaaacataagaccttggtatgaataatcacttccttggtacctgtctgtatctgtgagtgtgctaggggctttacattattgttattccttgtgataacactgctgggtacctattattgtcccatttcatgtgtcaagaaactgaagtttagaaataattgtctgaggttccagagctatccagtggttggttctgtgtggagaatgtgggctgcctgactataaaacaygtgccttttccactctaccacgtatttattatgtctgtgaccaccagtgatttttgcagaagaggaattcctcttatgtgcgaggcattttcttctggtttttcatttttgtagcctgaaatttctcacatgtggtgatgcaattttctgtctgttttagattaacaagtggtggaataacctaagtgatggccagcggactgtgacaggtttgtgttagcttacacgttttaaccattcaagggaagagaaatcaaaccaaaaggtacagtatgtcacaagcaatggctcttgtaccatgctcaccagtggtttagaagacagtctctgtactgataggctaatgtaatagtatataaagtggtgaggtataaaggtttacatgatgctctgggtccgttactttctaattttgatttagtatgatactgattgatcagttttgttgtagaattccagcttgtggaatagcttattaattattacttcccttattaaagaaactaatggaaacattaagtaccttctatattcaggatgctgtaatacacattctgtccctacttggagttgcttacagagtagttgtctccctttttacagataaggaaaccggctttcagagaaggaacttttgaaagtcaaactgctagtaagcaatagagcagagtttcaaaacccaagtctgtccattcgaaaaccagttttcgctcttctcccccatgctatttataaaaccccatttaaatgtaagcatgaca

SEQ ID NO: 64149 - DNA, 316 bp, Homo sapiens
agatctgcccactgcaactccagcctgggtgacaagagcgaaactccgtgtcggtggggagtgcgggggggcgagggaggagagaatttatgtagcactgtcgatagacgagagatgggatttagtgaattctaatcctggaaaagtgtrccttataatggaggagaaattctccacacctagtcatagcccagcagaaggattaggtgcacacacacacacacacacacacacagcagactgcactcaagaggtacaaatacaaacaggaaatggcttaatttttctcctaatgccctttaacatgccttgctgg

SEQ ID NO: 64150 - DNA, 463 bp, Homo sapiens
aatctgcacatgtgcccccygaatctataaaaaaaaatagaaagataagcactagaagacactattccaactgaatttatatgatactttctgaattttgacaataaaaaaaatgcttacatttgccttttattgttgaatttctctacttgaccttgtgaggcccaataaggaaagaaacatgttctaataacatattgttaatatgtgcttgcaaaggtgtttttctatcaaagccctccattcactgaaagaaaacagcttgttatgaatttttttttttttttgaggtggagtctcgctctgtcgcccaggctggagtgcaatggctcaatctcggctcactgcaagctctacctcccgggttcaagccgttctcctgcctcagcctcccaagtagccaggactacaggcgcccaccaccatgcccagctaattttttgtatttttagtacagacgggg

SEQ ID NO: 64151 - DNA, 463 bp, Homo sapiens
aatctgcacatgtgccccccgaatctataaaaaaaaatagaaagataagcactagaagacactattccaactgaatttatatgatactttctgaattttgacaataaaaaaaatgcttacatttgccttttattgttgaatttctctacttgaccttgtgaggcccaataaggaaagaaacatgttctaataacatattgttaatatgtgcttgcaaaggtgtttttctatcaaagccctccattcactgaaagaaaacagcttgttatgaatttttttttttttttgaggtggagtctygctctgtcgcccaggctggagtgcaatggctcaatctcggctcactgcaagctctacctcccgggttcaagccgttctcctgcctcagcctcccaagtagccaggactacaggcgcccaccaccatgcccagctaattttttgtatttttagtacagacgggg

SEQ ID NO: 64152 - DNA, 675 bp, Homo sapiens
acgtttgtctccctgcaaagcctrcactcttccccaggtatcaggctgcctggttccaatctatgcagtggggatgcaaagaagagtgagacagccttgctttactcactgactaatgggaaagaaggacgtgagagcacattattatgcctgacatggtaagtggcattgagccaggacagcataggagtgattgactccaggcagaaatgggccaggagggccacactggtcctgtctcatttgataagctgcttcttcaaagctgagaagggtgtgtccaaatagcaaaaatggggaagactggctactaggtaaaagacagcctggaaaaacaatgggccaacttacatggggcctttcccattctagccatcctggcaaacaaatcattgctgaggcaagacatatcttgacacaaatattctgacaaagcagtgaccaagggatgagagaattggaatgtcagcattttgcaactcccttataaaggatctaatcatcagacatcaggggtggctgacatcacaagagaaattaccaacattatgtgcctccagagggaagtccccatgccacctaggaagtagtcttagcaataaataaaataaatttaaaaattgaatctgaatcagactaagactcatccaagatgcaattttcagaaaattaaca

SEQ ID NO: 64153 - DNA, 543 bp, Homo sapiens
taaacaaacctgcacatgtaccccctgaatctaaaataaaagttgaaactaaaaaaaaaaaaaaagcctgaattttatccctaaacatcaatgagcccgyaaaggtgagaataatgaaaattttcctggattatatattttgatgatttgcctttccaccccatccccacccttgacactcagttgctgacactgctgtttcctctgtatggatttatttgatatttgttgtttctcattataatacacaggctaaacaccaagaggctgaaggactgggcagggaaaatggaagagacaaaggtgggaaatggttcaggctggcttttgataagtacttgacttttcctggtggagaaggaatataccattttctggcataaaaagctctgtatgcacagtggaaggatcttagcgttctagagtcaaacctatctttcttaagtaggttgattcctatacttgctggattttctcatctgtaaaatgttcctgaattcatttgagctctaaaactcttttaagcagactcactccctgatt

SEQ ID NO: 64154 - DNA, 387 bp, Homo sapiens
tccaattctawagatgagaagattaaaaatccagtgagtctgagaaggacaacacaggcatagaacaatatcctctaacactattgcccagtagctgattccccaacttttaagtcagttgttttcataattcccaagtgtcaatctggctaagagtatccaaagcaggtagattgaaggggggatagactgaccactgatacaggatttaaaatgtcaagaaaagagcaagatgcactagaggttctcaccaaaccaattaggcaagaaaatgaaattaaagtcatccgtatttgaaaaaataaactatatctatttgcagatgacatgaatttacatataaaaaatcctaaggaaactactaaaaattattagaaccaataaaaa

SEQ ID NO: 64155 - DNA, 744 bp, Homo sapiens
ggatccacagaaggaaggaagcccattttgcttatataaacatactaatgacagctcctgacaaacaatttgtttttttgctrgcaggagagtgattatctatcacagaaatgcttttagcagaatgtacttggtcgtttagaattgcttatggttaacaaagtagaaggttgtggatttatggggctccctggaaaatgtcacatataccacatatgtaactatctgcataaaaattaagatatttgataattgagccaggtatctccatgtaaataaattgtcggcatacctctctagaagtctcatctatctgcctgggcaagggagtatctaatgacagaaccaaggatctaaagaatcagattaagagatctaaataattctctgatttgcccatgcctaatgattacctgagttcgtgaaattactagtaaagctttatattttgtaagatcttagattctgataagtctaatgtcacaatccaatcagtttttcctatctcaaggaatcatgtccatataatggaattaatcctgaaactctgaaaagttttaatattctggggtcagggtagatgagaaggagtctccatatgacttataaacatgtaaggagaaatagtaaaattgttgtaaaattaaaagaagaacagaaattcataaaataagctataacaatcaggttaaacaacaaaaacaaaaagcaaagcgtctatcagtaacatgattgaatagaaga

SEQ ID NO: 64156 - DNA, 744 bp, Homo sapiens
ggatccacagaaggaaggaagcccattttgcttatataaacatactaatgacagctcctgacaaacaatttgtttttttgctggcaggagagtgattatctatcacagaaatgcttttagcagaatgtacttggtcgtttagaattgcttatggttaacaaagtagaaggttgtggatttatggggctccctggaaaatgtcacatataccacatatgtaactatctgcataaaaattaagatatttgataattgagccaggtatctccatgtaaataaattgtcggcatacctctctagaagtctcatctatctgcctgggcaagggagtayctaatgacagaaccaaggatctaaagaatcagattaagagatctaaataattctctgatttgcccatgcctaatgattacctgagttcgtgaaattactagtaaagctttatattttgtaagatcttagattctgataagtctaatgtcacaatccaatcagtttttcctatctcaaggaatcatgtccatataatggaattaatcctgaaactctgaaaagttttaatattctggggtcagggtagatgagaaggagtctccatatgacttataaacatgtaaggagaaatagtaaaattgttgtaaaattaaaagaagaacagaaattcataaaataagctataacaatcaggttaaacaacaaaaacaaaaagcaaagcgtctatcagtaacatgattgaatagaaga

SEQ ID NO: 64157 - DNA, 744 bp, Homo sapiens
ggatccacagaaggaaggaagcccattttgcttatataaacatactaatgacagctcctgacaaacaatttgtttttttgctggcaggagagtgattatctatcacagaaatgcttttagcagaatgtacttggtcgtttagaattgcttatggttaacaaagtagaaggttgtggatttatggggctccctggaaaatgtcacatataccacatatgtaactatctgcataaaaattaagatatttgataattgagccaggtatctccatgtaaataaattgtcggcatacctctctagaagtctcatctatctgcctgggcaagggagtatctaatgacagaaccaaggatctaaagaatcagattaagagatctaaataattctctgatttgcccatgcctaatgattacctgagttcrtgaaattactagtaaagctttatattttgtaagatcttagattctgataagtctaatgtcacaatccaatcagtttttcctatctcaaggaatcatgtccatataatggaattaatcctgaaactctgaaaagttttaatattctggggtcagggtagatgagaaggagtctccatatgacttataaacatgtaaggagaaatagtaaaattgttgtaaaattaaaagaagaacagaaattcataaaataagctataacaatcaggttaaacaacaaaaacaaaaagcaaagcgtctatcagtaacatgattgaatagaaga

SEQ ID NO: 64158 - DNA, 1025 bp, Homo sapiens
gttgcatttcaaaataaaatggctgccttaagtgatgcaaaattacatatttatacattctctgaattaagcaggattaattgaaaagtggatatgaaggcatgactgcaagctacaaattgatcctatttttagtaacttgctctagctgagatgttatatgttcagatttgttgacacgaagctttattgagaagcattacttattcccaataactcaaggaggagcctgttttgggaggaaaaaccacatcaagtatgttttgttgaatcaagaggattttatttttagaaaactactaatgattttttctgaaaatgtgactattttgaaatctaagaaaaatcaaatatttgatacttaacgtaatttgcaacttgacataaaactactcagtttagttggtcataatatactcattcctaacttattccactttacaaaaaaagtaaaagaaaagcataaataaataaataaggaaagagaaacaaacaaacaaaraacattggaaactgacgaggtaacaatttatagaatcaaggattaatttccaccaattatggcatgaataaaactaatcaactaaaatatattttaaaaatcaagaagatagtaggaaaacagctccctgaggacccctggaacagtaattaggcaggcactctttgcctgttggacattaccattttctttaatgtttgtatgaaacgatgccaatttatctttaagcaatttatctttaagttgctaaagtgatgcaaacggctgtcatgtaacaatcaccaagagaggacccattctagttcacaaactgccctgatgctttttataaaaaacaatccacttcaggataatgtgttgttcctggtttctatgtctctttaacttctttaaatcagaagcattccatagtccttcttcaaccttcatagcatcctaaacattttttgaaggtaatattccaatggattctatttttagaatgtctcccaatttcgatttgtctggtgttttctcataatga

SEQ ID NO: 64159 - DNA, 1025 bp, Homo sapiens
gttgcatttcaaaataaaatggctgccttaagtgatgcaaaattacatatttatacattctctgaattaagcaggattaattgaaaagtggatatgaaggcatgactgcaagctacaaattgatcctatttttagtaacttgctctagctgagatgttatatgttcagatttgttgacacgaagctttattgagaagcattacttattcccaataactcaaggaggagcctgttttgggaggaaaaaccacatcaagtatgttttgttgaatcaagaggattttatttttagaaaactactaatgattttttctgaaaatgtgactattttgaaatctaagaaaaatcaaatatttgatacttaacgtaatttgcaacttgacataaaactactcagtttagttggtcataatatactcattcctaacttattccactttacaaaaaaagtaaaagaaaagcataaataaataaataaggaaagagaaacaaacaaacaaaaaacattggaaactgacgaggtaacaatttatagaatcaargattaatttccaccaattatggcatgaataaaactaatcaactaaaatatattttaaaaatcaagaagatagtaggaaaacagctccctgaggacccctggaacagtaattaggcaggcactctttgcctgttggacattaccattttctttaatgtttgtatgaaacgatgccaatttatctttaagcaatttatctttaagttgctaaagtgatgcaaacggctgtcatgtaacaatcaccaagagaggacccattctagttcacaaactgccctgatgctttttataaaaaacaatccacttcaggataatgtgttgttcctggtttctatgtctctttaacttctttaaatcagaagcattccatagtccttcttcaaccttcatagcatcctaaacattttttgaaggtaatattccaatggattctatttttagaatgtctcccaatttcgatttgtctggtgttttctcataatga

SEQ ID NO: 64160 - DNA, 720 bp, Homo sapiens
tccaacactatggaaattagtaaatgctgcagagcaggttctgcacttctctagagccatttaagcagcgcaccactggccaagtcctagaatatgtccaaatgtctccttagcctgaatccaaagtcatagatttctcctctcacacttttaacattgagccaaatttgtatactcactgtcaactcagtgaataggaaacttgtcgctgttttaaaatgcattaggtcatgtaaatactgcccaataaaatgtgactcaataaagaattatcgtctagtaagaacactagcctgggaatcagtgggtgtgagcttgactcccagctgggtggccttgggcaaatcacttcatcctctgagtctcctaataataatacttcccctgcctccttcacaagattgctgtaaggatgcacataaatctgtattcyaaactgtgagacactgagaaaaggtcaagaaatccaccaaatgagcagtgtattctatttttccttatttcctattccttcctcataattgactttctatcatcacagatgattctatctcctatgttctgggcctgttttgactccctgactgccttgttggctcttatgggcagaaattacaaccatgcatttcttttgaatgtaccacaatgtttagcacagccttagacactgcagtgcccaaaaaactgaattctttgagggcttcctactataaggattga

SEQ ID NO: 64161 - DNA, 1560 bp, Homo sapiens
tgtgcttcagttttctcatccacatgggaacaataaattgaaacactgtatgtgaaagtacctagcacaatgccaagcacaaacgctccttctatacttacatctcctgcctccagagatgtttacaatcctcttgtaatcactcagaagatctttagagaggcttaaacacatttgccttcaagccttcggttggcaagtaagaactaagcttttaactggctgaattaattgaggtaaatcattgtctattgctgcttgggaataatttaggaatgctgcctctgactgatcaaggttgaatttgatcctcccggttgccactggtttgggtaggggaggggttagggttttgttccttctttttcttgttactcattagatccacgaatatttattgcatgcctatgggaggcaaacataggttttgtggggcttgaagtttatactatttgggagaccctcttataaaacttataaaactgcaaatacaaaattaggcataaaagtgactatttcttagaatgcaaatagaagggaccctgcagcttaaggactattcactttataataaatatgcatctggagcctactgcatgtcaggcaccttgtgaggccctgtggataaggtcatgaatgcaatagtcacactcacgtggatcctgcagtctagtcattttcagaaaatggtgagcctttttgtgcctccccagagggctacatggtacacagcccttctcgtggctgaaggtccttcaacaccagccctctttcctgtttcttccctactctggactagaaagaacccagacctgacctacacagtggcaatctgctctctcaaatttcctccagcatgaaagagaagatcacctaccctgtgggtatcggtggagagattcgtggaattttcttctcagaatttgaaacctcatttacagatgaagacatggagtccaaaaaraatggagcaatgttcttaaggtggacagttatctccccagccaagctcaaagccagtgtcctctttggacttgaatggcatttctctgttaatgctgcactgtctccccaagcagtccaaatgagcagtaagaaaaggcaaagagattctagccctcctggtagagaaattttaacaagccagtcctcaatgagcatcatggatagctagttgtctttattacctccctgaccccataaccaatcagccttaaacgtctgcagttgtcattttttggttgtgatggttgtttttgtcagctttatctaaaaaaatacactgcagtctaggaaacagttgcatctttataagtatgaaatataaataataattagaacatacctcctgctttctttttcttttaacctttattctctttctctctgaagaacatggtggtacgcaatctacacagcagacttcaatcttaccaaattatcacctttttcaggtttgagtataggcgtttgggtgtgtaacaagtaaatcttttatcttaaagtgacaaaagattagtcatgaggtgctccttgaaatattcatcaacgtctaatgca

SEQ ID NO: 64162 - DNA, 1560 bp, Homo sapiens
tgtgcttcagttttctcatccacatgggaacaataaattgaaacactgtatgtgaaagtacctagcacaatgccaagcacaaacgctccttctatacttacatctcctgcctccagagatgtttacaatcctcttgtaatcactcagaagatctttagagaggcttaaacacatttgccttcaagccttcggttggcaagtaagaactaagcttttaactggctgaattaattgaggtaaatcattgtctattgctgcttgggaataatttaggaatgctgcctctgactgatcaaggttgaatttgatcctcccggttgccactggtttgggtaggggaggggttagggttttgttccttctttttcttgttactcattagatccacgaatatttattgcatgcctatgggaggcaaacataggttttgtggggcttgaagtttatactatttgggagaccctcttataaaacttataaaactgcaaatacaaaattaggcataaaagtgactatttcttagaatgcaaatagaagggaccctgcagcttaaggactattcactttataataaatatgcatctggagcctactgcatgtcaggcaccttgtgaggccctgtggataaggtcatgaatgcaatagtcacactcacgtggatcctgcagtctagtcattttcagaaaatggtgagcctttttgtgcctccccagagggctacatggtacacagcccttctcgtggctgaaggtccttcaacaccagccctctttcctgtttcttccctactctggactagaaagaacccagacctgacctacacagtggcaatctgctctctcaaatttcctccagcatgaaagagaagatcacctaccctgtgggtatcggtggagagattcgtggaattttcttctcagaatttgaaacctcatttacagatgaagacatggagtccaaaaagaatggagcaatgttcttaaggtggacagttatctccccagccaagctcaaagccagtgtcctctttggacttgaatggcatttctctgttaatgctgcactgtctccccaagcagtccaaatgagcagtaagaaaaggcaaagagattctagccctcctggtagagaaatkttaacaagccagtcctcaatgagcatcatggatagctagttgtctttattacctccctgaccccataaccaatcagccttaaacgtctgcagttgtcattttttggttgtgatggttgtttttgtcagctttatctaaaaaaatacactgcagtctaggaaacagttgcatctttataagtatgaaatataaataataattagaacatacctcctgctttctttttcttttaacctttattctctttctctctgaagaacatggtggtacgcaatctacacagcagacttcaatcttaccaaattatcacctttttcaggtttgagtataggcgtttgggtgtgtaacaagtaaatcttttatcttaaagtgacaaaagattagtcatgaggtgctccttgaaatattcatcaacgtctaatgca

SEQ ID NO: 64163 - DNA, 606 bp, Homo sapiens
cttgtgtgaaacaggaagaaagtcacctctatgggagtctagatgcatttctaacaagactacaatgacaaggggctaagtacacacctcacttatatttaacatagggaaagaagagattgtcaataaggygcttatacttagagatggaaaattttgagtgggtttatttgctgtgtggtgtttggtgttaagcgtttctgtttacatgtatgtttgagggttttactccttacaatagagtaaatctcagaaaggcacagaatattgcactgatctgaacaaattattttttaaagccatcaattaaaataataaaattataaacaattgggggaatgcagaatatgtatatatctttttatatctcagtacctgtgaagagcacagaacacctctgattaagcatttgtttaaattaagaaattaatttatagtaaaaatgccaagaggaattaatcaaaaattatcatgtataattcatttccagatcatggaatatatttgcggctaaggaaattatttggctatctactgtaattcttggacattctgaggggttatagtataccttgaatcctattgttttccattatgcatcaggaa

SEQ ID NO: 64164 - DNA, 606 bp, Homo sapiens
cttgtgtgaaacaggaagaaagtcacctctatgggagtctagatgcatttctaacaagactacaatgacaaggggctaagtacacacctcacttatatttaacatagggaaagaagagattgtcaataaggtgcttatacttagagatggaaaattttgagtgggtttatttgctgtgtggtgtttggtgttaagcgtttctgtttacatgtatgtttgagggttttactccttacaatagagtaaatctcagaaaggcacagaatattgcactgatctgaacaaattattttttaaagccatcaattaaaataataaaattataaacaattgggggaatgcagaatatgtatatatctttttatatctcagtacctgtgaagagcacagaacacctctgattaagcatttgtttaaattaagaaattaatttatagtaaaaatgccaagaggaattaatcaaaaattatcatgtataattcatttccagatcatggaatatatttgcrgctaaggaaattatttggctatctactgtaattcttggacattctgaggggttatagtataccttgaatcctattgttttccattatgcatcaggaa

SEQ ID NO: 64165 - DNA, 1112 bp, Homo sapiens
gtgataacatgaatgattttctgtaaaaataccagaacacagatttttttggggaaagtatggtgcttgtatattgacctatatattcagattttcctttctattcaaacttgtaactctcttaggaattcatatttctaaaaatagaaatagtggtttaacagggaactytctcataaatatgcctctttcaaacacattttaatcacacaaggactcatgtaataatttgcatttgatatgtattagaattctgttttattctattgatggggtcttccctatggcaggcactttccaagtgctgtagagcaatagaaaataaagacccccaccctgaaaggaacttatactctaggagatgctgataagcttaaatatcattataaagcaaggcaaagtgaaatatgtgctaatttaaggagcataagcaaagcgcaatagggtttcacagaagagagaaattacctctatttggggaaccccacacaatatttatagatgggatagcatttgatgtagactttataaaatttgccaggttacagaaagaaaagggagaaaaagcattaagatgaaaatgaaagttatgagcataattatggaggtaagaatatatgagctatcatccataggaagtaaggcatatttccatttttataaaattaatagaaagtaatattttaaaaaaataatgtaggaaaagtagttttgagctagattgttataaataaatattgtgaagcttgtaccacattcatcaggcattgtgggagttggaagagacaaggaatggggagcagagaagagatttagaaggtaatgagtgatttagagatgaaattagaacagccctttaacacaacttttctcatacaaagtatataagaagtaaggggacagtgggataacttaaaaatgccgtactatggggtatagggtgttggggagattttggtcaaaagatacaacattttatttaagtaggaggaatgagttcaagagatctattatacaacatggtgactgtaattagtgtatcatactctgaaaagttgctaagagaacatattttacatgttctcaccataaaaatgataagtatgtgaagt

SEQ ID NO: 64166 - DNA, 1112 bp, Homo sapiens
gtgataacatgaatgattttctgtaaaaataccagaacacagatttttttggggaaagtatggtgcttgtatattgacctatatattcagattttcctttctattcaaacttgtaactctcttaggaattcatatttctaaaaatagaaatagtggtttaacagggaactctctcataaatatgcctctttcaaacacattttaatcacacaaggactcatgtaataatttgcatttgatatgtattagaattctgttttattctattgatggggtcttccctatggcaggcactttccaagtgctgtagagcaatagaaaataaagacccccaccctgaaaggaacttatactctaggagatgctgataagcttaaatatcattataaagcaaggcaaagtgaaatatgtgctaatttaaggagcataagcaaagcgcaatagggtttcacagaagagagaaattacctctatttggggaaccccacacaatatttatagatgggatagcatttgatgtagactttataaaatttgccaggttacagaaagaaaagggagaaaaagcattaagatgaaaatgaaagttatgagcataattatggaggtaagaatatatgagctatcatccataggaagtaaggcatatttccatttttataaaattaatagaaagtaatattttaaaaaaataatgtaggaaaagtagttttgagctagattgttataaataaatattgtgaagcttgtaccacattcatcaggcattgtgggagttggaagagacaaggaatggggrgcagagaagagatttagaaggtaatgagtgatttagagatgaaattagaacagccctttaacacaacttttctcatacaaagtatataagaagtaaggggacagtgggataacttaaaaatgccgtactatggggtatagggtgttggggagattttggtcaaaagatacaacattttatttaagtaggaggaatgagttcaagagatctattatacaacatggtgactgtaattagtgtatcatactctgaaaagttgctaagagaacatattttacatgttctcaccataaaaatgataagtatgtgaagt

SEQ ID NO: 64167 - DNA, 1025 bp, Homo sapiens
  misc_feature (1)...(1025): n = A,T,C or G
aaaacccagacagctggagcccacctctggcatttctgactcagtaatttaggataggaccaaataatgtgcatgtccaacaagttcccaggtgatgcttataatggtgctgattccagaactacattccgagaaacaatgagttaagcatgtcataagcaacagcttattagtattaaagagctattgtgtgatagtggtttacttagctgaataaattagaatgaaattgaagttgcccacaaaatgtactttgcacactcattcaagtgtacattgtacattagtaaagacgggagttattacggcagtgtgcttgcaactcttataggcacacagctttaagctatattcttttttttttttttttttgagacaatctygctctgtcgcccaggctggatatattctatatgactgtgcactttgtcttacctgcaggccatcctgacttgctaaccattggcatttgtaggctattacgtgtgagatcccaggattccttgtctctaagcataaattcaagggactaaggttttcctatgaagtagactcaagctgtaggccatagggcatacttcaagaattatcgtaaagggtatccagcttgctctttcttctttagaaaacgataacaaaggcaaaaaacaaaatctatgctgttcagcaagtcacccggcagctgtaggatgtaggggaagcagaatcataagaattaaaaaatctcacatggcagtaagttgtagaggattttcacacagcccaaactttaccttaagcaagttacaatgtctgagttacaacgattgcctaaagtcaggtttatggtttgtgtttatatgttgntgggtatgcaatacaatataataattcttcaaggttataatgtcatcaagaagctgtagattgagagtagtattcatacgtacaaacgaataagtatttcataggtaagtccaaagtaattgaacattatgtctaaagtaaaatttgaagagacacatttgaagataattcagtctgat

SEQ ID NO: 64168 - DNA, 903 bp, Homo sapiens
tgttgaaattatttttaaaatatcaaccctcccttctcgcttagtaagtacaataatttcatttcattttctgctgaatacccaaagatgtcgtttgtacgcatcagctgttttcatagccaaagattaaaagttattgtagtgtatgctaaatatgtgcagatctcaaaatgtaacctagaagttattttcaaataatttcttttatatttatatycatatatatttatatgtgaaagtttattaaagagtttgaaagatgagtttgtcttctaaattcaaatgatgtccaaagtttttactcttcactgggggaaacatctactatccaagatatgtgaatagcatagctactaactatactgtaactgttagctaccatgacccatttgtagagcatagaacagttctactggatagaaacaatggtattcatttcaacagagttctatctgaataacagtcacatactttcacaaaactgtcacctcgtggcttttgttttgcagtttcagcatttaatatgaggcagtcttttgctgctgcagtggtaaaaactgccacattaaagttgggaggtgagagttttgtgacacctggaggcacctggatcacagaaatggagtttctaaagaggtagccaaaatgttgtctggaaatatggaaaatttgcaaaataatttttaggaaaaaatgaacaacatgaaaaagaaatacaataaaaaactttaaaagtttttttaaattattttcaaaaatttgaggaagaaataactaatctttggagttatagtagcactaatagctttataaaaggacatgctagtagaaaaaaaataagctctagcatgcaccatgaagaggaagaaaagaaaaaaatttggcatctgaattcaactcttc

SEQ ID NO: 64169 - DNA, 1165 bp, Homo sapiens
aagctcaccattatatcatattatagagctatttaaagaaaagggtagggtacagtatagatgaagtgccttcctatctaggtaatccaagcagtagaacttgtagaagagctcagattcctatgaaaagctcctacactagagctgataaatcagaaaattgggtcagtctaggaatattcaatatatatgtaaagtcttattttttgaaaagtattgatttttttaaagtttcattaatctgttgaatagatttcattaccttggagataactttactaatcttatgtctgtcagtcttaaaagcatttagtgaaatattctggtattcaaaagtaacccacaaaatatttttctcgtagggagtatttaaaaaagaggatgatattgatctgcttggtgaagagttcagaaaagtatatcaacaaaggagtgaaatttgtgaagagaaatgatatcatcaaaattgggtaaagcatagattttttgtatgttaccactagatgtcagcataacttttgttttacagttcagtggcattaggtatccattgtctgtttggattttgtaaatcatcactgaatttcataacttgtaaacaattatcagatacaaattaattttaatcaagctgttatttttgtactgataatttcaaaatccgatttctacaacactacagagcactgtttgcatccccatcctcaagacagtatatttaccttgactaatacagaactctaccccaaagtgaactgccttctgtctgtgtttacgaactttacttacttgatttagccagggaaataaatatttggaattttcttttaaagcatcttttttggtctactgtaagggaggagaattataaatgaaaagagtcaagaattttattatctgatgtgcttaattgtcacgctaagaacttaaaaaacaactcaaaaagagctaatagctaatctcctaaatctaaaaagggaattctttgaaattattttgctttcataatcaaatatattacttatgaagaataaaaatmattcaaaccactacaataagtaaaatgggtatccatcacatactgtcatagagactaactgaagtagatcacttatgaatttccccattcaagtgctttcataaattcctcctcagtgaaagatag

SEQ ID NO: 64170 - DNA, 465 bp, Homo sapiens
ttctcccccttttgcttggcagttctccttgctgttgccatgtgaagaaggacatgtttgcttctccttccatcatgattgtaagtttcctgaggccttcccagccatgctgaactgtgagccagttaacctctttcctttataaattactcagtctctggtatgtctttattagcagtgtaagaatgaactaatacactcatggtgacagccaacgaggcttgacccacagagtggtggagatagttagtagaacatggctccctatggggaaaatgggtgggaacccagtgaaaataatgagtgaaaataaaataccaaacgaatgaatgactagaaagctaaaacttatcaccaaaataaaaattaaaatccttgcccagtttcagacttaagccagtttcaaacaacctataacctgataactaaatggcagccaggycacaaggacaaggaccctgaaac

SEQ ID NO: 64171 - DNA, 860 bp, Homo sapiens
aatgttctagcttgcttacactgttttatgtaaaagctgtcaagatttgggaagacaggactctaatttagagatttctatggcttggatgtttggctcttccaaacctcatgttgaagtttgatccctaattttgaaggtggggcctaatggcaggtgtttaggccatgggggcaaatttctcatgaatagacaataccctcccttgggagtgaatgagctctcactctactagttcccacaagagcttcttgttaaaaagagcctaaaacctcccctgtctctattgtttcttctttcaccatgtgacctctgcataccttggcttgtctttgcctttgaccatgagtggaagcagcctgtggccctccccagatgcccaatcttccagccagcagaatcatgagccaaataaactctttttattaatttcccatccccaggtattcctttactgcaataacaacaacaaactgactaagacagagatgaaattaagttagtagctttttacatcctcattccagaatgcttcaatgaactgcagatcctttcggttacaagtaacagaatatcagactaagagtggtttaaacagatagtggtttgtttctctcacataagaaggaaaccagaggcagtcgctgacattgtttaagcagcttgaatcacatgacctttcwctgctatttttttataacctcagcattttttgtatgttttgtcaaagcccaatccctgaggcttatatattacctcaaaaatttgccacatttttctatttgtggatatttccctgtatcagtaagaaactaattaataattctaaattgtctccctaagggaggaacaaggtaaat

SEQ ID NO: 64172 - DNA, 1117 bp, Homo sapiens
actcaaatacatgtccttgaaaaaaatgttatttacaatgtccaatacacttaaataactatgtcactttaatattatttaatatcaacattctgaaatatttttcttcaaaactaatgacggtgctgttgaagctgatgtttttgctccaaaattttggattataaatgtcaagtatctacaactggagttacaacaatgtccaacaaaattaaaaatatgtactcttctggaaatttggagacataaaataaaattttgtgggacagtatcttacattttcttattactgagatcttattaataattataattatgacaattatatgagccaacatatacaaatattaatttgaaggctcacaccattcatttttgtacttaatttttataaatgctaaatgagttacatattgctttaaatatataatttatacacataaggcacagaacctcagtgatcatttgctaaatgaaactccaaastgaactagaatctacttctaacatatcacaagtttggggatggctagctgactattttcggtatgtgtgatttacttcatatatatgtaggaaatgaaacacatattaaagattttttcttacattcacgaatttcttcacaggtagaaagcattcaatagatgaaattacatatctatatatctattagaatcagtgtatatgtattgtaaaagttgatcataagaattgggccgtttttgtcataaataactgaaatggactcaagagatcgagatgggaaaaccactcgggacacataacattactctaaaatgcaattctctgcaagcctggctgctaaaaatgccttttgtaacctgagatcagctttatccaatagttactgaaacttttacccactgccttcactcatcaatcagagcttgccagatcccgaagactttacttataccgataaactttgttttaaaacaacatgtaacaataggagaatggcgcataggttatatgcaaatgctatgccattttatataagggacttgagcattagcatattgtggtatcggcggggtgaggggaggctgagctaatcccctacagatagcaagaaacgagtgtgtatgtatgt

SEQ ID NO: 64173 - DNA, 1117 bp, Homo sapiens
actcaaatacatgtccttgaaaaaaatgttatttacaatgtccaatacacttaaataactatgtcactttaatattatttaatatcaacattctgaaatatttttcttcaaaactaatgacggtgctgttgaagctgatgtttttgctccaaaattttggattataaatgtcaagtatctacaactggagttacaacaatgtccaacaaaattaaaaatatgtactcttctggaaatttggagacataaaataaaattttgtgggacagtatcttacattttcttattactgagatcttattaataattataattatgacaattatatgagccaacatatacaaatattaatttgaaggctcacaccattcatttttgtacttaatttttataaatgctaaatgagttacatattgctttaaatatataatttatacacataaggcacagaacctcagtgatcatttgctaaatgaaactccaaagtgaactagaatctacttctaacatatcacaagtttggggatggctagctgactattttcggtatgtgtgatttacttcatatatatgtaggaaatgaaacacatattaaagattttttcttacattcacgaatttcttcacaggtagaaagcattcaatagatgaaattacatatctatatatctattagaatcagtgtatatgtattgtaaaagttgatcataagaattgggccgtttttgtcataaataactgaaatggactcamgagatcgagatgggaaaaccactcgggacacataacattactctaaaatgcaattctctgcaagcctggctgctaaaaatgccttttgtaacctgagatcagctttatccaatagttactgaaacttttacccactgccttcactcatcaatcagagcttgccagatcccgaagactttacttataccgataaactttgttttaaaacaacatgtaacaataggagaatggcgcataggttatatgcaaatgctatgccattttatataagggacttgagcattagcatattgtggtatcggcggggtgaggggaggctgagctaatcccctacagatagcaagaaacgagtgtgtatgtatgt

SEQ ID NO: 64174 - DNA, 1117 bp, Homo sapiens
actcaaatacatgtccttgaaaaaaatgttatttacaatgtccaatacacttaaataactatgtcactttaatattatttaatatcaacattctgaaatatttttcttcaaaactaatgacggtgctgttgaagctgatgtttttgctccaaaattttggattataaatgtcaagtatctacaactggagttacaacaatgtccaacaaaattaaaaatatgtactcttctggaaatttggagacataaaataaaattttgtgggacagtatcttacattttcttattactgagatcttattaataattataattatgacaattatatgagccaacatatacaaatattaatttgaaggctcacaccattcatttttgtacttaatttttataaatgctaaatgagttacatattgctttaaatatataatttatacacataaggcacagaacctcagtgatcatttgctaaatgaaactccaaagtgaactagaatctacttctaacatatcacaagtttggggatggctagctgactattttcggtatgtgtgatttacttcatatatatgtaggaaatgaaacacatattaaagattttttcttacattcacgaatttcttcacaggtagaaagcattcaatagatgaaattacatatctatatatctattagaatcagtgtatatgtattgtaaaagttgatcataagaattgggccgtttttgtcataaataactgaaatggactcaagagatcgagatgggaaaaccactcgggacacataacattactctaaaatgcaattctctgcaagcctggctgctaaaaatgccttttgtaacctgagatcagctttatccwatagttactgaaacttttacccactgccttcactcatcaatcagagcttgccagatcccgaagactttacttataccgataaactttgttttaaaacaacatgtaacaataggagaatggcgcataggttatatgcaaatgctatgccattttatataagggacttgagcattagcatattgtggtatcggcggggtgaggggaggctgagctaatcccctacagatagcaagaaacgagtgtgtatgtatgt

SEQ ID NO: 64175 - DNA, 1062 bp, Homo sapiens
ctctacttctagacctctcagttactagcatctccattctccagatggagaatgtgtagcataacatcgaggattcatcttgttagacctacctgttgtacagtaccctctgtgagaaatttacaattgtgtagcataacattgaggattcatcttgttagacctacctgttatacagtaccctctgtgagaaacagggcaacaatgaatgggagagattagttaaattatgtccagttactaaattcacctgagagagttgccactcctttatacttcttttgttcattcctatacccttttctttgcttgcctaagtgcctatggtcaaataactgattttagacttccaccaagatggtgacggggtagaaagatagagtgcatttcaaattattacacatttaaaaagtgaaacttcttaggagtctccattagaaggttagattgggaaagagagttatttgcataatgaaacattataaatttatttttgggttcaaagagatcctgctatttttgaccccaattaacataactaatcaaggactaatctacatatcacacttattgacagtcttagtaagtggccagtcaacatcagtcactgccaatcatatttatttatttattcatttttatttttggagatgaggtctcactctgtctcccaggctgtagtacagtggtgcaatcatagctcactgcagcctcaaactcctgggctcaagcagtcctctcacctcagccttccaagtaactggaagtaccaatgcacaccaccacacccagctaatgccaattatgtttctttggctctcaacaggcctataacttgttattctgtgtgataaaccccataagttgaaactgtgctaccaaatatggataaatctgcagttgcaatgagattagaaagttaaaatatgttgctawaatataaaagtctaatatatttggaggcagcattacattttacaaaacatggaatttttaataagtaacatctacatatttattcacacgtatacatatattatttcatgagaaaacataggtatt

SEQ ID NO: 64176 - DNA, 555 bp, Homo sapiens
atattcttcacagagacctgcttttggtagaaaagagctgatgttggttaccaacaaaaaaaaaaataagtaaaaatataaagtatccagagttcagaaaatcattgagaaaatttaactttcctttggacaccttgatccatgagtttgcctatgcatttttaaactcagagtatttctaaaagcctgtttctgcttagaaatatgaaagaaaacattttccatacctttttataatttaagttagaaacattaaaaacagacactttaaaatcttaaccacctatagtaacaatgatgaaaaattccttggaattttcatcacaacaaaagtcagagaagtccatcrgcctttgctcacctcctcatcacctatagcctctgaaatgccctttggcaaggcttcatcacccttcgaagtctagttgtctagttgtttctgcattcagtttgaacactggactctttgctgaggccaagaactagggggtcaaaggttgagcatctctgagcacatcaggcatcatctttattcttctacttaatactatgtac

SEQ ID NO: 64177 - DNA, 527 bp, Homo sapiens
cataagattaccacacaggataaaattgtataatataggggatagcatttgtaaactctaaattagtacatactctttagaaattatgattatttagaatgcttaaaacttccagtgtttacttgagaaaagttaatatttattgattcttcagcatgtgccaaaggcttttgaatactttgcatgctttatctcatttaaacccctaacaacctattgggatagatgttattagttatcttttacagaagaggaaactgtggctcaaatgttgtttaacttgctcaaggtcatgtatctagtaagcagttaagtcactgttaaaattcaggcactatgactgcagagtctgtcttcctaacaaatgtgccatgctacctaaagaatcatggcatttcctgtcattaactgctatgataatgggcacttttgttattccaataagcttaggcaataaatatactgagcgtcacataggcaaggcartatttaataagatcaatgaaattgttatgtaataaatcaga

SEQ ID NO: 64178 - DNA, 938 bp, Homo sapiens
ctacttggaagaagaaagttcagctcaacaatattttatttttatagaccactttatttttaacctgcagcattcaattgtgaaagaaaattaaatttggggaccccaaactcatttaaccaaagggaaatgtcaagctgggaactgggtcactcaaacctgcttcccccttttggttcctaaatgagatggctacaagacgaaaagctacaagcctcccccatattttccccacaaggaaattcctagtgagctgttaaaacttcaccatggcaatgcaaattgatagcttatctttacaggtgcagtcaccccagcccaccagacacaaatgcacatctgattgttcccctactccattttgtctgtgttatcttatgtaaaatgcagatttccacattttccctctgacccttttgtttgtgtcatcttatgtaaaaaatgcgattctctgagscagacaaaggcatgaatgactacttttccctaagccccctcttacatgaaaactgtgtacttctcaatatcctgccctttcccctttaaatttggagccctcaaaatcatcttcagagaaaggcatagacctgtcttcctgagcgagcccataactttggcaaataaatttcctacaatgattgagacttgtcattttactcaattgacacaatatatctactcaaacagtatcacatatatgtctgtagcaggtcagagagcacagttctgaatcctgacttttctacttgctggctgtgaaacccaacgcaaactaacttgagccttttgagcataaggttcctaatccataaaatataaggtaacaatcacaactttccttgcagaaactgaattaaccctcaaactcaactcttattctacaatcagggccagttaggataatgaatgtaaactcaattttttttttttgtcttttg

SEQ ID NO: 64179 - DNA, 938 bp, Homo sapiens
ctacttggaagaagaaagttcagctcaacaatattttatttttatagaccactttatttttaacctgcagcattcaattgtgaaagaaaattaaatttggggaccccaaactcatttaaccaaagggaaatgtcaagctgggaactgggtcactcaaacctgcttcccccttttggttcctaaatgagatggctacaagacgaaaagctacaagcctcccccatattttccccacaaggaaattcctagtgagctgttaaaacttcaccatggcaatgcaaattgatagcttatctttacaggtgcagtcaccccagcccaccagacacaaatgcacatctgattgttcccctactccattttgtctgtgttatcttatgtaaaatgcagatttccacattttccctctgacccttttgtttgtgtcatcttatgtaaaaaatgcgattctctgagccagacaaaggcatgaatgactacttttccctaagccccctcttacatgaaaactgtgtacttctcaatatcctgccctttcccctttaaatttggagccctcaaaatcatcttcagagaaaggcatagacctgtcttcctgagcgagyccataactttggcaaataaatttcctacaatgattgagacttgtcattttactcaattgacacaatatatctactcaaacagtatcacatatatgtctgtagcaggtcagagagcacagttctgaatcctgacttttctacttgctggctgtgaaacccaacgcaaactaacttgagccttttgagcataaggttcctaatccataaaatataaggtaacaatcacaactttccttgcagaaactgaattaaccctcaaactcaactcttattctacaatcagggccagttaggataatgaatgtaaactcaattttttttttttgtcttttg

SEQ ID NO: 64180 - DNA, 556 bp, Homo sapiens
tttaccagttactgaatgcaagctacttatagggaaaaggcataacccttaagtcatactgcttcctttggccatggcaattactggtgaaaaactatataagtttttctataagtcgttaatcagttggggtaatgagaaccttagtacaaaagagagaatctgagcaacccacatttaccatacatcttgactagaagcctctgcagtacactgttatctggctttgctgatgcatttgaagatgcctctcagctccaatccacagtacaggctaaaaccatggaaacacacatcctttccccaccactaatatacatgcaaatctgttcccatgaccaccttctctccttgctttgatattagyggcaaatccaaacatctttcactctcagggtgctccaggcaaaagtcaaacactgacctatgtgacccccaaactccagacattgaggtcatacttttcatggtgacctcaatcccaagtgaccctcatttagcttgaggtcaggagattcccctaaaataaaaatttccccatgcaccattttcattg

SEQ ID NO: 64181 - DNA, 1502 bp, Homo sapiens
aaaattctactttattctaagatgacaatgttaatatgttttattacaatctagttgattcccttgggcccagaacatgttgaatattttataacactttagctttctaacctgtaaacaaataaaatatgttcaattccctagggagacattttatttctgaagtttatgaacctctctctgtcttttcctcagggctgacagcatttaagtggctggtcttatataatttataatgtggaagaatttactggataaggggattcaaagtgattatttgtttgttcaagaaatatatatattttaagttgcaacactctgctgggtgttgaaagtaaatacatggaccttgctttctgggagcttacaatttataagggatgagatatgtctaaataagatcaaaactggtgatttaaatcacatgtgactgatgtaaaaaatttcatagtcatacagaagcaggaagattatttctagttttattgatcactgaagatttcatggaagtggtggctgctcattgggaattgagtaaaatgtacataactgtagagaaaaagaaaactcctgcccagggattgaactgtgacaacagatgcatggcattataaaggagatactttaatgaggtttaactggcaacaaattgaagactgtggcaggatgcagtagctcacgcctgtaatcccagcattttgggaggccgagggggtggatcacctgaggtcaggagttcaagaccagcctgaccaacatggagaatcccgtctctactaagaatacaaaattagctgggcgtggtggcgcatgcctgtaatcccagctactcgggaggtgaggcaggagaatcgcttgaacccaggaggcacaagttgtagtgagccgagatccgccattgcactccagcctgggcaataagaataaaactccatctcaaaaaaaaaaaaagactgtatcagtaaaggtggtttgtaaatacaactattatgttaaataaggaggaagcagcaggaatagaagtgatggactgagcctctacactagaattagaattcaccattgaatggacatagttgttgacagagaaggtrgagttaaagcagcaaattcaatcccaagtatctgggagtgtgattatatgataaacagaaataaataatcaagaaagacctatatgggtctttatgggaaagaagatgagcccaaatacaccaaacttctacaggaagaacatcttgaaaacaggagtaaggaagtaaagattctgagagttctgagatgaagaagaagaaatgggatagcgtttatagcagatgaattcagtcttgttggtaaggctgtggcaagagcatttgagagtgggtggagacaaaaaggttaaccctggatcggtattactgattgttcctttggcctcaggttccagtataactgaacatgccacttttaatgattctgtctttatttaaattttgatattctgtctgccatggattttt

SEQ ID NO: 64182 - DNA, 1868 bp, Homo sapiens
ccttgaagctccttagttctctctctgataggatttctgatggtatatataatatttgatgtatatttattcctatatagaaatatgatttttattctctgttggtaggatatattcaaatggcattggctttgtttaaatatagataaaatggggccgggcacggtggctcacaacatgggaggccgaggcgggcagataacctgaggtcaggagttcaagaccagcctggcctatatggtgaaaccccacctctactaaaaatacaaaaaattagctgggtatggtggcgggtgcctgtaataccagctactcgggaggctgaggcaggagaatcgcttgaacccaggaggcggaggttgcagtgagccaagatttccctattgcactccagcctgggcaataagagcaaaactccacctcaaaaaaaaaaatagataaaatgttttaacagtctgtacattttcagtataatttgtaatgttatataacatataactaaattaataattccagcactatagtcccaacttatacactactctagaacaaattaattacgctttgacaccccaacagaagtaaacctggccctgggaacatttgggaagctttcttattgctcaaggcccaaaagggagtgaggatggtaactgggttggattaagcatgagcagcaggactttgcatgggcaagggtgggttggggctctgttgttttctgtagcagctggtacctctcttcctgtgatcctgcctgcctcaaagaggagggatacgtgctcagtctttgtcattgctggggctcagataatgtaccccaaaatgtgctgctttactatgctaattacctcaaagcragggcactttaggaacagcaaatataggaggaggctttctctgaacttccctatcttccttgagactgaatttttcagaaagaattcagtggtcctggatcccttccacaaaaatgtcatcatccaggggagactgactcatatcacaggaaagatgactggaggctaacagcacacccaggtggactttttcacaggctatcacctgttctttgggcccatgtattttctccccaaaattatttactctcccgtaagttgcttacattcctgctcccctcttccctataaaaagggtacacaagcttctaaatttcattgggttattgaggagtcacttttctttcctgtaatgagtccatgcatgtaataaatttgtatgacttttctcctgttaatcagtctagctgtcagttttcatagactcaatttccaaaccttcagagggtcgagagaaagtctttctgtctcctacactgagaaccagcatgaccgctgccagtacatctccagagtcacccatcaatgtgcaatgtggcagttctgggaaccagacacccaatcagacagagatggacattggatactctcttaaaagtcttgggccataaaattgagagacaggaccctgctgggctttaggcaactttcttctctccaatttggggcaattctggagaatttagccagggtctgagtggctgtgaaaaagtagccagaaaacacaagtttcattggctcttcagacaaagaacttcaggggacctaggaaaggaattgctactgggatgttttgtttataccagggacactgaggctcagactggtggggcctttggcaatcttgaattctaagagttgtttattgggatttagaagtgagaatgaaggtaatgaaagtagttttgccacattgatggtatgctgtgtgttgtgttgggattttaataacttactaacacagcagaagcacgtcacatcccctaggcacaggccaagaaatagagc

SEQ ID NO: 64183 - DNA, 670 bp, Homo sapiens
aggatgtagttggatatcaaagctcagaagaatgatctgaactagaaatacagattttagaattattaacaaataaaaacataatcaaagacagagattggagcagcaatacttccagagagagggtaaatatcagaaaagtaggaagcttagcgtgtgaaataaatcattttaagatgagatgaagagagggggtgccattttcaaactgagaaagtagccaggaaggaaagaagaaaatgagaagagaggccaaagggacaagagcatcaaaggatggtgctcaggggtcaagaaggatatggaatgaaaatgtctctcagacttgacgtcaagcaagtgtcaagacaattgacttgaygactgttgcttatattaggtagaatagcttcattactgttccagagagagattcttacttgatccttagtttgcattcaaacaaataaattttcatttcagtaaatatttcttgaatgcctagtctgtcctaggcactggggctccaaagtatagaactctggccttaaggaatttactgcttctcaataagcttttccagggcaggaatgtactcttctgtcttctgaactgtcctcaggactggccaagaacaggtgcacagatgcaggcacttgggatgcaaatacatgtttattgtatgaactga

SEQ ID NO: 64184 - DNA, 1273 bp, Homo sapiens
tgcatgactgtacttataaagtcacttagccacacttataaaagcagaaatcaccataaatcttttaggcttttttgcttatgtttcttagtgactaaaagtcaattaggagtacattagcctatttgttkcctagtcttagtctttattttacacttttatcctccctttgcactttgctcattagtaactcccaccagagaacaaatgaaaatataacactttatgattctgtgtaagctatggcagatcacctttggaggtaagttctcttgttcaagataggttgaagctgtttttgacgcttgtcttacacaatgaggtaaagcaagtaatttggttcctgggctgtaaaacaaaacaaaacaaaatacattaatagggaagaattgttccattcagaaagttgaaatctgaagacaaaacacctttttagactcatatgtctttaatgcagtttatataaagtatatctgagaaaattgcctctgactttttaaagctgaaccctattcttgccagcaaatgatggtatttgcattttttttttgagatgtagtcttgctttgttgcccaggctggagtacagtggtgcaatcttggctcactgcagcctctgcctcctgggttcaaacaattctcctacctcagcctcccgactagctggcattacaggcatgtgccaccacacctgactaatttttgtatttttagtacagacaggatttcaccatgttggccaggctggtcttgaactcctgacctcaggtgatctgccggccttggcctcccaaagtgctgggattataggcatgagccaccctgcctggcctagtatttgcattttgcaaacggaaatctaactgtcccttatcactcttgacaaacaacttgacactcttatggagaccagcacacttacaagacaaaatgacaataataataataataatacctagaaactcacacactgagaatggggcagtaaataataatagggaggatagaaaagtcagcatggcattccagatgagaaaactgaagcaagttaaactttctacatggtaaccgtgattatgtagttgatatacaaagtaatgactgtgggccttcaagaagaggttaaaatacattcattatattaacgagtgcatcttagaaagatttctttcaaaaagtagttgaagtttttttgctttaaggagtaaatctcaatcatctggaaatttaacttctgtggaatacctctttacatcttaaaggaaatgttaat

SEQ ID NO: 64185 - DNA, 666 bp, Homo sapiens
ccacttgaaacatctgagcagcagcgttctgatttcaatttgtgttgtcacctcaaggttttcacagtttttttatattttgaaatttttcaaacctataggaaagtttaaaaagtaccttcagtgaacacccctatatccttctattagatttgcctgttgttcacattttttcctatattggtttatttctcaagagatactgtttcatatttattccagaatgttttgagagtaaattgcagacagcaatgacatttcacccctaaatacttcagtatgtatctcctgaagtactcttattcctactcttaytatcacatccaagaaatttgacattgaatataatagtattatctaatattcagatttccccagttgtctgtatctaaaatgtcatataaattcagggttctgtcaaggtcccacattgcatttaattgtcatctctttagtctcttgaaatctagaacagttcctatcctttgtagtcttttttaatcaacattttaaaaagaaaccaggacagttgtcttgtaaaatatccaacaacctggattcacgtgattgttagttctcatttttgcaagaatatcatataattaagtgttttgtacatctcattttatcatattagggaggcacatgatgttggtttgcctcatt

SEQ ID NO: 64186 - DNA, 698 bp, Homo sapiens
ggtcaggagttgagaccagcctggccaacatggcgaaaccttgtctctactaagaatacaaaaattagccgggcatcatgcacctataatcccagctacttggaaggcttaagcaggagaatcgcttgaagccgggaagtggaggttgcagtgagccgacatcgcgccactgcactccagcctgagcaacagagcaagactctgtctcaaaaaaaaaaaaaaaaaaaaaaaaaaaaaaaaagcttctttgaaaagaaagtcttaattacacggtaatttaggaacttctcaacttgaagtcacaagtttctaatttctagactaggcagcaattagattgaacttcagctgttcatgaagtagctggctgaggtcacatgtttctgatttctagacaaggcagaaataagtgttccagaaacatactctgttctaatacaaacacattgtgtgatttaactatggagagtcaactttcttataaaaatctgattttattgtattctttgaggttctgtgccctttactagagagagttctgttctctctaatgttattggaaagagcagtaaaactgccaaatggcttatattttacaattgaatgtrtcaattctagtaatatttgataaattggataatggaaattagattcatcagatgtgtcttcatgatgtataaacaccttgaagtagaata

SEQ ID NO: 64187 - DNA, 667 bp, Homo sapiens
actctgccttttggtctgtgtaatgaagttttatgaagtcaaacaaccctaccctttagtataccacatatcacataaattatggagcatttcagatatctgctacataaagcattttctctmgttaaataaatacataggaagttatctgactggccagttaccccaaagattttgtggttagctagctagcatttgcaactagtttgatttgtaagtttggggcataaataattttaaagaccgagaaacacagtttaaaaaaatgtaccaataatgagagtcagcaaaaagagacctccagagtgccgctgttcatatctgttcctttctttaaagtactcctacttcctcttattcctacctgtccttctctttttcctagtctggtgcttttttattcatctttgaggcctggattatatattttatgtatttgtgaaaccttcctttgtcccctagggcaagactaattatgcccttcttggtacaatcataatactttgttcttaatcctattgtgttacttactgtagttataactatgtctttatatgtccttgtagcccattaaattgtaaactcttcagggtcactgacaatgtataatactatgtatctttacatgtccgtattttcatactctagcatggtgcttagtagatgc

SEQ ID NO: 64188 - DNA, 667 bp, Homo sapiens
actctgccttttggtctgtgtaatgaagttttatgaagtcaaacaaccctaccctttagtataccacatatcacataaattatggagcatttcagatatctgctacataaagcattttctctagttaaataaatacataggaagttatctgactggccagttaccccaaagattttgtggttagctagctagcatttgcaactagtttgatttgtaagtttggggcataaataattttaaagaccgagaaacacagtttaaaaaaatgtaccaataatgagagtcagcaaaaagagacctccagagtgccgctgttcatatctgttcctttctttaaagtactcctacttcctcttattcctacctgtccttctctttttcctagtctggtgcttttttattcatctttgaggcctggattatatattttatgtatttgtgaaaccttcctttgtcccctagggcaagactaattatgcccttcttggtacaatcataatactttgttcttaatcctattgtgttacttactgtagttataactatgtctttatatgtccttrtagcccattaaattgtaaactcttcagggtcactgacaatgtataatactatgtatctttacatgtccgtattttcatactctagcatggtgcttagtagatgc

SEQ ID NO: 64189 - DNA, 678 bp, Homo sapiens
cttactttgaagaaatatatgtaccataaacattattcttcttctgagttttacattttgtttatcaaggacatacactaatacatttaacatagtatttctgagaaaaaatatgaatacagcttactttcttcaaaatgcagaaacagtgacaaggaaattcattcaccattggtcaaaggtagacacaaagtcagaaatgggactagcttgtatttatatttaagctgcttttccttgtacctttcttatatgctttattcatctgcctctccagttaaacaaagaaataactgattattatttcttttctgacaacctcacagagcacattagcctcagaaaaacagaatcacagtagcctatacaagggattgctctggcagttcttttctgaggcatgatcataaggtgtgcayaaattaaataattaattccctaggtagctatgctatctgtacacagagatgaagttgagttttagttttatccattttctataataaagaagaataactaatgttttctatacttgtttatccaagtaattttgacataggtgaatggagttatgctccctttatgctttcttaaataccaaacgtatctttttgtgtcactaaactagaaaccatccttcttcacagcggagtcattaatgccagggaagagtctgtt

SEQ ID NO: 64190 - DNA, 678 bp, Homo sapiens
cttactttgaagaaatatatgtaccataaacattattcttcttctgagttttacattttgtttatcaaggacatacactaatacatttaacatagtatttctgagaaaaaatatgaatacagcttactttcttcaaaatgcagaaacagtgacaaggaaattcattcaccattggtcaaaggtagacacaaagtcagaaatgggactagcttgtatttatatttaagctgcttttccttgtacctttcttatatgctttattcatctgcctctccagttaaacaaagaaataactgattattatttcttttctgacaacctcacagagcacattagcctcagaaaaacagaatcacagtagcctatacaagggattgctctggcagttcttttctgaggcatgatcataaggtgtgcacaaattaaataattaattccctaggtagctatgctatctgtacacagagatgaagttgagttttagttttatccattttctataataaagaagaataactaatgttttctatacttrtttatccaagtaattttgacataggtgaatggagttatgctccctttatgctttcttaaataccaaacgtatctttttgtgtcactaaactagaaaccatccttcttcacagcggagtcattaatgccagggaagagtctgtt

SEQ ID NO: 64191 - DNA, 1185 bp, Homo sapiens
ttatgatgatggaatcagttctgtattttaactgtggtggtggccacatatatctacacatatgataaaactacctataactatacaaacacacaaatgagtacatataaaaccagtgaagtcggaataatctctagaccaaagtcaatttcctaatttagatattgtactatagctagacaggatattatcattgtaagaaattgccggtcatggtggctcacacctgtgttccsaaaactttgggaggctgaggcaggtggatcatttgaggtcaggagttagagatcagcctggccaacatagtgaaaccccgtctctactaaaaaaaaaaaaaaacaaaaaacaattagctgagcatgatggcatgtgcctgtaatcccagctacctaggaggctgaggtaggagaaaagcttgaacctgggaggcggaggttatagtgagctgagatcacgccagtgcactccagcctgggccacagagtgagactccgtctcaaagaaagaaactgagtgaaggacacacaagaatttctggtacattttcacaactttctgtgattctgtatttcaaaataaaaggtttgtaaataaaagaattgtgttaacactttaaaatgttaggaggtgtaggccgggtgtggtggctcatgcctgtaatcccagcactttgtgaggccaaggcgaggtggatcacctgcagtcgggagtttgagaccagcctgaccaacatggaaaaaaccccgtctctactaaaaatacaaaattagccggccatggtggcgcatgcctgtaatcccagctactcagaaggctgaggcaggagaatcgcttgaacttgggaggtggaggttgccatgagccaagatcacgccattgcactccagcctaggcaacaagagtgaaactctgtctcaaaaaaaaaaaaaaaagaaaaaaaaagttagaaggtgtgataatggggcttggagactttcatagaagagaggctaaatcaacagaaaatggcaatgttttgtttttattttaaagatcattaagctatcaaataaagccttagttaatactagaaactaaataacttttttatgatgattgcctatatgcttgagatgtaaaaatgtcccatatatttcagacaaaattctctttgaagttagaacacacccaagaataaacttttat

SEQ ID NO: 64192 - DNA, 1185 bp, Homo sapiens
ttatgatgatggaatcagttctgtattttaactgtggtggtggccacatatatctacacatatgataaaactacctataactatacaaacacacaaatgagtacatataaaaccagtgaagtcggaataatctctagaccaaagtcaatttcctaatttagatattgtactatagctagacaggatattatcattgtaagaaattgccggtcatggtggctcacacctgtgttcccaaaactttgggaggctgaggcaggtggatcatttgaggtcaggagttagagatcagcctggccaacatagtgaaaccccgtctctactaaaaaaaaaamaaaacaaaaaacaattagctgagcatgatggcatgtgcctgtaatcccagctacctaggaggctgaggtaggagaaaagcttgaacctgggaggcggaggttatagtgagctgagatcacgccagtgcactccagcctgggccacagagtgagactccgtctcaaagaaagaaactgagtgaaggacacacaagaatttctggtacattttcacaactttctgtgattctgtatttcaaaataaaaggtttgtaaataaaagaattgtgttaacactttaaaatgttaggaggtgtaggccgggtgtggtggctcatgcctgtaatcccagcactttgtgaggccaaggcgaggtggatcacctgcagtcgggagtttgagaccagcctgaccaacatggaaaaaaccccgtctctactaaaaatacaaaattagccggccatggtggcgcatgcctgtaatcccagctactcagaaggctgaggcaggagaatcgcttgaacttgggaggtggaggttgccatgagccaagatcacgccattgcactccagcctaggcaacaagagtgaaactctgtctcaaaaaaaaaaaaaaaagaaaaaaaaagttagaaggtgtgataatggggcttggagactttcatagaagagaggctaaatcaacagaaaatggcaatgttttgtttttattttaaagatcattaagctatcaaataaagccttagttaatactagaaactaaataacttttttatgatgattgcctatatgcttgagatgtaaaaatgtcccatatatttcagacaaaattctctttgaagttagaacacacccaagaataaacttttat

SEQ ID NO: 64193 - DNA, 1185 bp, Homo sapiens
ttatgatgatggaatcagttctgtattttaactgtggtggtggccacatatatctacacatatgataaaactacctataactatacaaacacacaaatgagtacatataaaaccagtgaagtcggaataatctctagaccaaagtcaatttcctaatttagatattgtactatagctagacaggatattatcattgtaagaaattgccggtcatggtggctcacacctgtgttcccaaaactttgggaggctgaggcaggtggatcatttgaggtcaggagttagagatcagcctggccaacatagtgaaaccccgtctctactaaaaaaaaaaaaaaamaaaaaacaattagctgagcatgatggcatgtgcctgtaatcccagctacctaggaggctgaggtaggagaaaagcttgaacctgggaggcggaggttatagtgagctgagatcacgccagtgcactccagcctgggccacagagtgagactccgtctcaaagaaagaaactgagtgaaggacacacaagaatttctggtacattttcacaactttctgtgattctgtatttcaaaataaaaggtttgtaaataaaagaattgtgttaacactttaaaatgttaggaggtgtaggccgggtgtggtggctcatgcctgtaatcccagcactttgtgaggccaaggcgaggtggatcacctgcagtcgggagtttgagaccagcctgaccaacatggaaaaaaccccgtctctactaaaaatacaaaattagccggccatggtggcgcatgcctgtaatcccagctactcagaaggctgaggcaggagaatcgcttgaacttgggaggtggaggttgccatgagccaagatcacgccattgcactccagcctaggcaacaagagtgaaactctgtctcaaaaaaaaaaaaaaaagaaaaaaaaagttagaaggtgtgataatggggcttggagactttcatagaagagaggctaaatcaacagaaaatggcaatgttttgtttttattttaaagatcattaagctatcaaataaagccttagttaatactagaaactaaataacttttttatgatgattgcctatatgcttgagatgtaaaaatgtcccatatatttcagacaaaattctctttgaagttagaacacacccaagaataaacttttat

SEQ ID NO: 64194 - DNA, 1185 bp, Homo sapiens
ttatgatgatggaatcagttctgtattttaactgtggtggtggccacatatatctacacatatgataaaactacctataactatacaaacacacaaatgagtacatataaaaccagtgaagtcggaataatctctagaccaaagtcaatttcctaatttagatattgtactatagctagacaggatattatcattgtaagaaattgccggtcatggtggctcacacctgtgttcccaaaactttgggaggctgaggcaggtggatcatttgaggtcaggagttagagatcagcctggccaacatagtgaaaccccgtctctactaaaaaaaaaaaaaaacaaaaaacaattagctgagcatgatggcatgtgcctgtaatcccagctacctaggaggctgaggtaggagaaaagcttgaacctgggaggcggaggttatagtgagctgagatcacgccaktgcactccagcctgggccacagagtgagactccgtctcaaagaaagaaactgagtgaaggacacacaagaatttctggtacattttcacaactttctgtgattctgtatttcaaaataaaaggtttgtaaataaaagaattgtgttaacactttaaaatgttaggaggtgtaggccgggtgtggtggctcatgcctgtaatcccagcactttgtgaggccaaggcgaggtggatcacctgcagtcgggagtttgagaccagcctgaccaacatggaaaaaaccccgtctctactaaaaatacaaaattagccggccatggtggcgcatgcctgtaatcccagctactcagaaggctgaggcaggagaatcgcttgaacttgggaggtggaggttgccatgagccaagatcacgccattgcactccagcctaggcaacaagagtgaaactctgtctcaaaaaaaaaaaaaaaagaaaaaaaaagttagaaggtgtgataatggggcttggagactttcatagaagagaggctaaatcaacagaaaatggcaatgttttgtttttattttaaagatcattaagctatcaaataaagccttagttaatactagaaactaaataacttttttatgatgattgcctatatgcttgagatgtaaaaatgtcccatatatttcagacaaaattctctttgaagttagaacacacccaagaataaacttttat

SEQ ID NO: 64195 - DNA, 654 bp, Homo sapiens
atgtctatatacttccacacttgsttatccctctgattgagagcactttgaaatcagtccctaaacactctgtgttataaatattctctgtaaacctttcatgtgtatttgcatgtaaataatgaaatatttgataagcagaatacaccacaaaaaattacatcaagacaaaatttattgaaaagcatcctgatttttgtcgttaaaactcataaaactagagcttaatcacctctagattctttttacaaaagttaggtaaaaacaatttccatttacattttttctacttactatcctatgacctacatagttcagcataattaataactggaaatttttgacctcctctgtgtatttgcaaaatgtaatattcccaagtataccttagcagagtcttctgtggcaaaaaaatattcactaagaattataatctagaaagcctttgtctatctatatagcttcagacaaaatagcattttatagatcataatggtaatgtaaacattcataacttaccccaattagctgaaagtcttgacatataagattacagccatagatcgatgaagatgcagcagaaaaggtatggcatatttagaaggctagttacactcatcataacaacagaaactaaaatatgtattcttttgg

SEQ ID NO: 64196 - DNA, 895 bp, Homo sapiens
acattatgtgtagaataagacattagaaatagattatgtaataaatgattacaactgtgtacttagcagaaatttcaaaagccaggtctgaggaaccacacaataggaaaatatttgtttcctgagattagagagaatctccctcttgggaaggaaagaagtggtggataaaatatcttgttcaggttcatggatgttttaagttggtgattttgcttgttctataaaaaaaaacatctgtaaatttacagatgtactaaaaaagtctagcaggggcctcaaatacttgcctgaattttcacataatttttaggaggtctttcatgaaaatttccctgggtttcctcatcctggcaagtgttcaagaaaaaagctgtcatcaaactgaggcatcataacctgtcggatagtgttgcttggaattagaaagtctaaaagagagtaaaagtctaattttgaactattcatatttctattcaatttgtgttaattttattcctttccttcctgaaaaatctgtgccttaaaaaaataattttcagtggtaaagatattgggaccctgaagaaagggagccaagaagagrtgcaactgtttttagtttagttctttggtgctttagcacttacggcaatttcatcattgaatttgctgtcatttcaaaattttgtctttttattaatcttaatattaatattgaatattttaatattaaaattaagccgattagggaaagctaaaatattgagatgtgctgatcacaaaaagaggaaggtaaggaggatacaaaccctgagccacattggactatttgatccctgagcatgtcaagtgccccgattttgttttatctaatcctttgctcaggtcacccatgttgcccttatacatggtt

SEQ ID NO: 64197 - DNA, 701 bp, Homo sapiens
acttaaagttaacttctagtgagtatggttcacactttcttgttttttcatgactcattttcttttgttaagaactgaatattttaggtaatatgttatctcacctctagattatgttttgtttttctgaaatttttcttttctgtttttctttttagtaccttgtattgacttacaatgcaaaatctgtctccctcccatggtatatccaatgatacttccacattttattaccctggcttcatagttttaaatttttaattgctcagtttttaaatttaaatttaaagttttattccaggctgccttagaaagtccaaatttggtctgagcacagttgctcattcctgtaatcctagtattttgggagatagaggcaggaagattgcttgagctcaggagtctgagactagcctgggaaacwtagtgaaggcctgtctctacagaaaatacattaaaaaataattagttggtttcaatgatgtgtgcctgtagtcccagctactgaggtggctgagatcagagaatcacttgagcctgggaagttgaggtgacagtgagccatgattgagccactatattccagcctgggtgacagactgagaccctgtctcgaaaaacaaaacaaacaaacaaaaacacccaagaaagtacatgtttggatagcttagaggttagtcaattatggaaacataatatgt

SEQ ID NO: 64198 - DNA, 550 bp, Homo sapiens
  misc_feature (1)...(550): n = A,T,C or G
tnnnnnnnnnnnnnnnnnnnnnnnnnnnnnnnnnnnnnnnnnnnnnnnnnnnnnnnnnnnnnnnnnnnnnnnnnnnnnnnnnnnnnnnnnnnnnnnnnnnntaatatagagttaaataatgaggcaattgtcacacacacacacacacacacacacacacacacattcattgtgggagatggaatttttctttttatcctcaatagattaataaaaacatcataatttgagtaacttttgtagaggcttaattgagaacttgatggtatccaatgggtagcccaataattatttatttttctgaacctaaatatcacttactatctcatattattatatgtctaatttttaagtaagaaacattttagctctagtratctgggcagtgattttttacttttagaaatgcatctaattttcaattggattgatgggaaaatattttatattatttccaaatatttactagagaaattttgtcttctcaagaacttatttctctttaggtttgagataatcttttctatatggtcttatcaattcaactatt

SEQ ID NO: 64199 - DNA, 847 bp, Homo sapiens
ttaagctgccctagtggttgacctttctgaggttggtcaacctttccttggattctgtgggcttccatgtatgtatgtatgtatgtatatgtatatatatatatatatatatrtatatatatatatatatatatataaaatatttacatatatagtgtacttttaaagttaagcagtgacattaatacccaaggtctatattaattgtttttgaacaaacattcctaaccaatcaatttcatcgtcatcattattacatgcctcaaatgtaaaacacaattagaggggaaaaaaagaaaaacataaaaggtaacaaaaatcagctgtaatccttacacatgtagacctccccacttaacatttttataaatgtacttcttggtttctccacatatgtgaagattgtgtttttgtagactttttgtggaatgatattttaagtgaacatgcagaaacatttgaagatgatgccagcgaggacagtatatgggaaagtctttagggccactatggggagttatctgtggatgttttgtgtggcctggcaacagaattgctatagtagacactgctgtaggaactgaatctcagacctgtgagcatggctcccatggtggccaccaaggtcactcccctgtcaccccactccttcaagtcacagaccaagtggttatctcattggtcatctctgattatggggaactcaaggtaatccattcccttacctgaactctgctcaccagatgaataactgataatatatagggtggatggtcaaggggtgaggtgctgaacacactggcagtgagaaaacagtgggaagtcactggagccatctcctctttga

SEQ ID NO: 64200 - DNA, 847 bp, Homo sapiens
ttaagctgccctagtggttgacctttctgaggttggtcaacctttccttggattctgtgggcttccatgtatgtatgtatgtatgtatatgtatatatatatatatatatatatatrtatatatatatatatatataaaatatttacatatatagtgtacttttaaagttaagcagtgacattaatacccaaggtctatattaattgtttttgaacaaacattcctaaccaatcaatttcatcgtcatcattattacatgcctcaaatgtaaaacacaattagaggggaaaaaaagaaaaacataaaaggtaacaaaaatcagctgtaatccttacacatgtagacctccccacttaacatttttataaatgtacttcttggtttctccacatatgtgaagattgtgtttttgtagactttttgtggaatgatattttaagtgaacatgcagaaacatttgaagatgatgccagcgaggacagtatatgggaaagtctttagggccactatggggagttatctgtggatgttttgtgtggcctggcaacagaattgctatagtagacactgctgtaggaactgaatctcagacctgtgagcatggctcccatggtggccaccaaggtcactcccctgtcaccccactccttcaagtcacagaccaagtggttatctcattggtcatctctgattatggggaactcaaggtaatccattcccttacctgaactctgctcaccagatgaataactgataatatatagggtggatggtcaaggggtgaggtgctgaacacactggcagtgagaaaacagtgggaagtcactggagccatctcctctttga

SEQ ID NO: 64201 - DNA, 847 bp, Homo sapiens
ttaagctgccctagtggttgacctttctgaggttggtcaacctttccttggattctgtgggcttccatgtatgtatgtatgtatgtatatgtatatatatatatatatatatatatatatrtatatatatatatataaaatatttacatatatagtgtacttttaaagttaagcagtgacattaatacccaaggtctatattaattgtttttgaacaaacattcctaaccaatcaatttcatcgtcatcattattacatgcctcaaatgtaaaacacaattagaggggaaaaaaagaaaaacataaaaggtaacaaaaatcagctgtaatccttacacatgtagacctccccacttaacatttttataaatgtacttcttggtttctccacatatgtgaagattgtgtttttgtagactttttgtggaatgatattttaagtgaacatgcagaaacatttgaagatgatgccagcgaggacagtatatgggaaagtctttagggccactatggggagttatctgtggatgttttgtgtggcctggcaacagaattgctatagtagacactgctgtaggaactgaatctcagacctgtgagcatggctcccatggtggccaccaaggtcactcccctgtcaccccactccttcaagtcacagaccaagtggttatctcattggtcatctctgattatggggaactcaaggtaatccattcccttacctgaactctgctcaccagatgaataactgataatatatagggtggatggtcaaggggtgaggtgctgaacacactggcagtgagaaaacagtgggaagtcactggagccatctcctctttga

SEQ ID NO: 64202 - DNA, 847 bp, Homo sapiens
ttaagctgccctagtggttgacctttctgaggttggtcaacctttccttggattctgtgggcttccatgtatgtatgtatgtatgtatatgtatatatatatatatatatatatatatatatrtatatatatatataaaatatttacatatatagtgtacttttaaagttaagcagtgacattaatacccaaggtctatattaattgtttttgaacaaacattcctaaccaatcaatttcatcgtcatcattattacatgcctcaaatgtaaaacacaattagaggggaaaaaaagaaaaacataaaaggtaacaaaaatcagctgtaatccttacacatgtagacctccccacttaacatttttataaatgtacttcttggtttctccacatatgtgaagattgtgtttttgtagactttttgtggaatgatattttaagtgaacatgcagaaacatttgaagatgatgccagcgaggacagtatatgggaaagtctttagggccactatggggagttatctgtggatgttttgtgtggcctggcaacagaattgctatagtagacactgctgtaggaactgaatctcagacctgtgagcatggctcccatggtggccaccaaggtcactcccctgtcaccccactccttcaagtcacagaccaagtggttatctcattggtcatctctgattatggggaactcaaggtaatccattcccttacctgaactctgctcaccagatgaataactgataatatatagggtggatggtcaaggggtgaggtgctgaacacactggcagtgagaaaacagtgggaagtcactggagccatctcctctttga

SEQ ID NO: 64203 - DNA, 957 bp, Homo sapiens
cccagccatctgagcacgtagatttttaaaaagcttggatgacatatcccctagtaagagtatcatactagcaatattatatctcatgtaagtaatattataaacaatcagtttgatagataacactttttattatgaacagttttgtttgtttgtttgtttttctgagacagagtcttgctctgtcgcccaggctggagtgcagtgatgcgatctcggctcactgcaagctctgcctccygggttcacgccattctcttgcctcggcctcctgagtagctgggactacaggcacccgccaccgtgcctggctaatttttttgcgtgtttttagtagagacggggtttcaccgtggtgtcgatctcctgacctcatgatccgcccgcctcggcctcccaaagtgctgggattacaggcgtgagccactgtgcccggccaacagttttaaacataaagaaaggtgagctccatatgtctaccagctggatttagcaattgttaacattttgccctatttgctttatgacctattatctctatctctctatctatccacccaccttacctatctgtgtttatatattatttgcccaatcacttgaaagcaaattgcagacatcatgagccttcacccctaaatacttccttagcaaggtgaatgcccaaggggttcaccttgcccgctgcctagagagctgattcatcaagacaggggaattgcaatagagaaagagtaattcatgcagagccagctgtgcagaagacctgagttttattattactcaaatcattctatccaaacattcagggagcagagtttttaaggataacttggtgggtgtggggaagccagtgagccaggagtgctgattggtcagagatgaaatcatagagagtcaaagctgtcttcttgtgctgagtcagttcctgggtgggggccacaagatcagatgagc

SEQ ID NO: 64204 - DNA, 602 bp, Homo sapiens
aggaggtggcacctccctctgggaggggtctctgcacccaccttctgctctcagaggcagcaggagcttgtcagctgcctcagccctggggtgaccctgggaagtcgctaaaagggaaatgaggaagtgagtgtcagtttgttagtcatggcagatgggggctccctcctggtgctgaagcatggtgaggwtgctggcaggaaggggctttgggacagagatggaagtagcacttgagtggggagcagggaaagagatggaagggttctctgatgtctcctacccatcttgctggtattgatgtttgtagtgtgaccaaacctatctttttgaacttgcaacaaactaataattacaagtagggacgggcggctacttcccaccctacccacacccacagatcacctgccccatcccagatgtgccacactgtgcatgtacacggccccgtgggcacatgctacaggtgcttgcccctcacctgggccacagcatctccagctgggcccccattggcctttggtaccccaaccagaccccatttctttgagcctgagagagtcagtgacttgcaagattccagcatttcagggagaaagtta

SEQ ID NO: 64205 - DNA, 713 bp, Homo sapiens
catctgcatcttcccacccatcttgatcaatggttccttcttctcatagttgcttatccttgggattctccctttccttgccccgcatcaaggtctgtcaatcctatctccaaaaactagtaaaagcattctccagttacctagctgctacattaaccaatactctccatttcctctagaagagcacattgactcaggaccatggcactctgagtgcttgcagctaatatgaaattaatttctagtattatcctatctacattttcacttcttccagtcaaatgatatccttatcagaagtcagttgtatttgtttccaaacctgcttayaccagttgtacttattattgaaattatgtatttccatgaaacattacataaactggtataatttgcactttaaaaagtttggttctagaaaaactaggtagaatattttggaaaaccacaaagaaaaattgctaaatgagttatttttaaatcacatatgtgcaaaattggaaaaaaatatttaaatagaaatttctgggctctcaacctcatccttgtgtcataaaaacctttacagatgtcttttaaattctcgcttctcttcaacagaattaaaactaaaaatcatagaggatgtaactatgggtatggttcatacaaaatgaaaccaaaaaaaaatcaattcagaacttcaactcatatattcacgttcaacaaatggt

SEQ ID NO: 64206 - DNA, 661 bp, Homo sapiens
tgtgtagtagaatatatactgtgcttgttttaatagagtttgcacagacacttgaaatctattgatattctagatagtgtatgtatgtgtcataaagaaccaatactcaggaggaatggacaaaggaaataatatttgttgagtattgccatgtactaggcaatcagcctttaaataataatagtagtaaaaatggtaacagttattattctgaatgagtgcttattctgtccatgcactgagccattcaatccttttggcaaatcttactacgtattctctccatgttacagatgagtcaagaagctctaagattataagtaacctgcttaaggtcacacagccagtcagtgccagagccaggcttcaacctggtctagccagggattgyttggttgtatggtcagatcttatctaagtcttgttcaaagaaaaaaatttttttgaatatttttattttagaacagttttagattttgagaaacattgtaaagatagtacagagagcacccatatacccaacacccagtgttggccattgttaacttattaaattactatagcttatttttataattaataaactaatattcatacattcttaaggtccatagtctgatcagatttccttggtttttatctaatgtcctttttccatcca

SEQ ID NO: 64207 - DNA, 1176 bp, Homo sapiens
aaaaaaagatatcaggcccagaatatttcaggatacagtgctgagaacagagtactggaattagccactctaggaaaaaaggagtttagccttgttataggagttaaagactgaagcaatttaaacaaggtccttgtatatcagagcactttccttctggtattcttgttagtttaacccatgataaaattctggattttagtaaatctgattcctgattaaatttttttcctgaaaaccctctgccaggtaatttttggggggattggagtggtaatgccctgcttttctctcttttccattttcaagacttttcctaagctggactatttgaatcccatctccagctctcaactacccaccatgtaatataagctgggcataatgttagaagtacttatcatgccttatcytattttagtctcatagcaattctgggtgcagatgctattatttattcctattttacagaaaagaaaattgaggtatagggattaaataaatcgcccaaggccactctgctagtaagtggtgaagcagggatcaacccactggaatgccttttccttggggtcctaagacctgcatagtccttaatcagaaggagatgaaagagcctatttgacagctcaggtaactcagttccgactcgagtttgttgtattactcttgcttcctttacacatttctgccttgttcatgagaactcctgttcccggatttttttgtcatagttcccataactatggttttatctgattccctataccagggtttcttaacagtgacttttttttttgagatgcacatctttgttgtatgtatgtgtgtgtcaggggtgggtgggtgggtgggtgaaatggggctgttctgtcatttctcgttcagtagcatacccgggctctatctgctagatgtcagtagtacccccagatgtgacaaccaaagtgtctccagacattgctaagtgtccctgcggtggggagtggaggtggtcggccttggtttggagcccctgtctcataccgacattcctgactgctggttagattgtcttactcagactgagactctgccttgcttaaacactaaccctgaatgtcagttctgtgcctggaccctcttagcaccacacctttgtgacgctagtcacttgctggaatcgctgcatatttt

SEQ ID NO: 64208 - DNA, 1176 bp, Homo sapiens
aaaaaaagatatcaggcccagaatatttcaggatacagtgctgagaacagagtactggaattagccactctaggaaaaaaggagtttagccttgttataggagttaaagactgaagcaatttaaacaaggtccttgtatatcagagcactttccttctggtattcttgttagtttaacccatgataaaattctggattttagtaaatctgattcctgattaaatttttttcctgaaaaccctctgccaggtaatttttggggggattggagtggtaatgccctgcttttctctcttttccattttcaagacttttcctaagctggactatttgaatcccatctccagctctcaactacccaccatgtaatataagctgggcataatgttagaagtacttatcatgccttatcttattttagtctcatagcaattctgggtgcagatgctattatttattcctattttacagaaaagaaaattgaggtatagggattaaataaatsgcccaaggccactctgctagtaagtggtgaagcagggatcaacccactggaatgccttttccttggggtcctaagacctgcatagtccttaatcagaaggagatgaaagagcctatttgacagctcaggtaactcagttccgactcgagtttgttgtattactcttgcttcctttacacatttctgccttgttcatgagaactcctgttcccggatttttttgtcatagttcccataactatggttttatctgattccctataccagggtttcttaacagtgacttttttttttgagatgcacatctttgttgtatgtatgtgtgtgtcaggggtgggtgggtgggtgggtgaaatggggctgttctgtcatttctcgttcagtagcatacccgggctctatctgctagatgtcagtagtacccccagatgtgacaaccaaagtgtctccagacattgctaagtgtccctgcggtggggagtggaggtggtcggccttggtttggagcccctgtctcataccgacattcctgactgctggttagattgtcttactcagactgagactctgccttgcttaaacactaaccctgaatgtcagttctgtgcctggaccctcttagcaccacacctttgtgacgctagtcacttgctggaatcgctgcatatttt

SEQ ID NO: 64209 - DNA, 1129 bp, Homo sapiens
tctccaagacactgtctacaattcctcagcaggaattaatctctcccttccctggactttcataccacctagttaccatctgtgagctcttactatatatctgacattgtgccaatgcatttatctatctctgcatattatccttgatgcatataactatataatcctctatgcataatcttcacagtgaccctcatagatgtcattatttccatttacaggggaagaaacttactattagaatggtcgataccttggtcaagtttacatgaagtttaaagagcagggctgggtttgaccaggtctgtctccccttggagcctcagatcttgactcatcctttgtgtctgtgtaacagtcttaccacaatcagcctcagaatagtaaaaaatgcaattctccatctctctcacacaagtttgtgagtccctggaaggccactcttatttcctattcatttgtaccaccaagtgactagtattttccttccacataacaggatgatcaatacatctggactgaaatgaacttatgaaatctttattgctccaactgtaactttctctcctatccctgctaaccctctcactctcttcttttttcttttcttgctatccagtactaaacccaagtgaataattctcccagtttagaaaatggatagcaggcagaactacttggaattagggtgaaagtttttcccaccttaattcctggtgtttaaaatgaaaatagtctattagagtctcaaatccttcacaaaatatakaaacacttgataatttttgcctaaattttgagtaaggtaaccaacatctcattcattacaaagagttgttaccattttacattatacccataaatcataaagaactttatataaaatttcttccaaaacattaatcatacaaacataatttttcttattttttcacccaataaaggagaagagtcacatcttctaatgagaaagagtttgaattcaaagtttttagaataaaaattcagaagttctattttcttgtgaatagtaggaaaagagatttctcagctgaccaaagtagcaaagacacagctcacattaggaaaaattatagcttaacgaaaaagaaaattttaaagtctatgg

SEQ ID NO: 64210 - DNA, 1129 bp, Homo sapiens
tctccaagacactgtctacaattcctcagcaggaattaatctctcccttccctggactttcataccacctagttaccatctgtgagctcttactatatatctgacattgtgccaatgcatttatctatctctgcatattatccttgatgcatataactatataatcctctatgcataatcttcacagtgaccctcatagatgtcattatttccatttacaggggaagaaacttactattagaatggtcgataccttggtcaagtttacatgaagtttaaagagcagggctgggtttgaccaggtctgtctccccttggagcctcagatcttgactcatcctttgtgtctgtgtaacagtcttaccacaatcagcctcagaatagtaaaaaatgcaattctccatctctctcacacaagtttgtgagtccctggaaggccactcttatttcctattcatttgtaccaccaagtgactagtattttccttccacataacaggatgatcaatacatctggactgaaatgaacttatgaaatctttattgctccaactgtaactttctctcctatccctgctaaccctctcactctcttcttttttcttttcttgctatccagtactaaacccaagtgaataattctcccagtttagaaaatggatagcaggcagaactacttggaattagggtgaaagtttttcccaccttaattcctggtgtttaaaatgaaaatagtctattagagtctcaaatccttcacaaaatatagaaacacttgataatttttgcctaaattttgagtaaggtaaccaacatctcattcattacaaagagttgttaccattttacattatacccataaatcataragaactttatataaaatttcttccaaaacattaatcatacaaacataatttttcttattttttcacccaataaaggagaagagtcacatcttctaatgagaaagagtttgaattcaaagtttttagaataaaaattcagaagttctattttcttgtgaatagtaggaaaagagatttctcagctgaccaaagtagcaaagacacagctcacattaggaaaaattatagcttaacgaaaaagaaaattttaaagtctatgg

SEQ ID NO: 64211 - DNA, 1129 bp, Homo sapiens
tctccaagacactgtctacaattcctcagcaggaattaatctctcccttccctggactttcataccacctagttaccatctgtgagctcttactatatatctgacattgtgccaatgcatttatctatctctgcatattatccttgatgcatataactatataatcctctatgcataatcttcacagtgaccctcatagatgtcattatttccatttacaggggaagaaacttactattagaatggtcgataccttggtcaagtttacatgaagtttaaagagcagggctgggtttgaccaggtctgtctccccttggagcctcagatcttgactcatcctttgtgtctgtgtaacagtcttaccacaatcagcctcagaatagtaaaaaatgcaattctccatctctctcacacaagtttgtgagtccctggaaggccactcttatttcctattcatttgtaccaccaagtgactagtattttccttccacataacaggatgatcaatacatctggactgaaatgaacttatgaaatctttattgctccaactgtaactttctctcctatccctgctaaccctctcactctcttcttttttcttttcttgctatccagtactaaacccaagtgaataattctcccagtttagaaaatggatagcaggcagaactacttggaattagggtgaaagtttttcccaccttaattcctggtgtttaaaatgaaaatagtctattagagtctcaaatccttcacaaaatatagaaacacttgataatttttgcctaaattttgagtaaggtaaccaacatctcattcattacaaagagttgttaccattttacattatacccataaatcataaagaactttatataaaatttcttcyaaaacattaatcatacaaacataatttttcttattttttcacccaataaaggagaagagtcacatcttctaatgagaaagagtttgaattcaaagtttttagaataaaaattcagaagttctattttcttgtgaatagtaggaaaagagatttctcagctgaccaaagtagcaaagacacagctcacattaggaaaaattatagcttaacgaaaaagaaaattttaaagtctatgg

SEQ ID NO: 64212 - DNA, 643 bp, Homo sapiens
gtgtttgaactgcttctgctcagtcaatatgcaaagaactgggtaaggcctttggttttggctcctaaacgtccctgtcttcttcaaaggttctcattttaaaatactagctatagtctatcaataattagctgagagtgctgcacactaaataagtttctacatttgaaagtctcctaactctttcgggccccttgcaaattaccactgttgcatgttagtggtgggcctctgatgagctttcyagacccttcttcaaaaccagtggacttattcccagctcttgagagttctattggaaggaaaccctcaggtatcagtcctctttagaattgtcttgcctgaaaagggacacctccaccaaggtcacctcctctttccagggtagcatgaatccaatgactgatgggtgttgggttacggaggcccgcttgaccctcctgcccttgctagcaacaattctgatcatcattccagcttcagatctttccaaggtgtctccactgaggccatatatggctcagctgctccctttgactaatccttttttcccttactttccacaggtggtgatcctaagagcactcccatatacacatccagcaccttaaaaatccatcagactctgcttcctaaggatccc

SEQ ID NO: 64213 - DNA, 643 bp, Homo sapiens
gtgtttgaactgcttctgctcagtcaatatgcaaagaactgggtaaggcctttggttttggctcctaaacgtccctgtcttcttcaaaggttctcattttaaaatactagctatagtctatcaataattagctgagagtgctgcacactaaataagtttctacatttgaaagtctcctaactctttcgggccccttgcaaattaccactgttgcatgttagtggtgggcctctgatgagctttctagacccttcttcaaaaccagtggacttattcccagctcttgagagttctattggaaggaaaccctcaggtatcagtcctctttagaattgtcttgcctgaaaagggacacctccaccaaggtcacctcctctttccagggtagcatgaatccaatgactgatgggtgttgggttacggaggcccgcttgaccctcctgccctygctagcaacaattctgatcatcattccagcttcagatctttccaaggtgtctccactgaggccatatatggctcagctgctccctttgactaatccttttttcccttactttccacaggtggtgatcctaagagcactcccatatacacatccagcaccttaaaaatccatcagactctgcttcctaaggatccc

SEQ ID NO: 64214 - DNA, 878 bp, Homo sapiens
tctagtggagacacagcatagaaatggtggtccagggtgagacagaactgcttccaatcccagtgccacctgtgtggttccagctgtgtgcttctcttcctccaatcttgtttaatcatctctaatacgggactaataacatatacatcagactattgtgagggttgaatgtaacgatattccaaattgttgcatgtgtccagtacttaacatagtgccaagaacaaagcatgtatcaataagtatgaataaccttctcagcgcacacctccaaacagtgratttctggccggtgacaagcaatggttcccagcggtcctacaggttacggtttaacttaccactagccaatcagtaagtttgcctcagaccacatcacaattcttttgcaagcctggagcttggtgaaaaaaaagggggaaaataatcaatgtccctaaggcagatgctgaaagattaacctcataacataattctctcaccagaattgtttcctgaatgtctatttaaattttaattctgcaagtaaaataaaattggtaataatgaaggtgattaagatggtatttgtccagggaacgaatctcctcacaacatacctaagagagagatatatgtacagaaaacgaagcacagtaaaataccacttcattactatcggagattttccccaaacacagagaaagctccacagagctgagcttaagccagaactctgttatttacttggcctaatgccaaaacaggccagagacccctttcacctacttctctttaatcccaaacccatgtctcggtttgatctaagaaagagccaaatgcccaggaagcgccagggtagagaaaagcagccagctgcagagtggcctccgtgccag

SEQ ID NO: 64215 - DNA, 552 bp, Homo sapiens
aaacataggcaaattctagcctatgttacattaaaaacaatgtcagtgcatttttcatgttaaagattttttcaaaactaaagctttttctttgctgtgctgaccacaaacaaattttaagagtttcaaaagtctggcaaaaatagaaaaaaaaaaaaaaagctgaagcaacattgaactgcacaatgtaagcactgggcatgcacaaattttcaaaacaaaggaaggaaatcatccctctctacaacgtggttaggctgatttttaagaaataaaatgtaagaaatcagaaaagcaaatgtttggcacctacatatccaatatctggcaccgtgcagagcagaagagtgaaagaaataatgaagaacaaagtagttactttgcttcaggwgttcgtgatctatagttagaaaccaatataaacattttgagtatatttcaaagaaagagcaaaagcaggccgggtgttgtggcttgcacctgtagtaataacactttgggaggctgaggtgggaagattgcttgagctcatggttttgataccagcctgag

SEQ ID NO: 64216 - DNA, 1594 bp, Homo sapiens
cccagcacacacatatgtataactgaagcaagagttgtacttaacaatacttacttatccatgtgttatgcaccttgatattttgtattctcttttacccctttctctgtgtctgtgtgtattccttttcccccccacccacccgataccsttgaggaaacaatacattgatttcattacttgctaatgtgttgcaacccctttgagatgtcctactagttatgatgagatgcttctaataaaagttacaccagtagaaaatgccaatatttcataaggccaggatgatgacttagatagcactaataatacaacactttaggaaagttcatttcattttatttttaggaaggacactaagcttcaaaaatttaaatttgaatgaaagagggtcttaaaaatctattgcaaaaaggactcagctgaataatctgtggcacacgtttaaatcgccttggaccacaccgccatgttccagggctcaccaggagccatccagatgagagacctcccagcccttgtgacttgactaagaaattaaatccatgttatcagcacgtttttaactggatgtgatataagtttaacatattttgtaatcattttatttataaatattttgtctaaatgttatgatattccaggttttccaaaagaatcaaccaaaaagaagttataaataaacgttatatttggtacgggagttaagctaaccaaatttataacccagatttaaatacacaagaaaatcagtttttaaagttttgtttaatagaaaccagtgtaatacatcaaacattaaacaactaaaaatgtatatgaatatttattttcacacacaaggtccctcagacattgattcttaaattcaaaacaccaaagtcattatatgtaccttttcatgttttctaattgtgaagaaaataaattttacttaaactgttaatatttgaataaagtatgcattcataattatgttcttgtctttgaagttgattttccaagcagaactaaatcagttttatcttcagtagatcttttagaaaggaagcaatcctactaggaagatacactacaaatgtttattgtggtaatctttgaatagtaaaatgaaaggtgattttggtttccttttctatatgttcttatattatatttttcaggtttttctctaagttcttttctgtgatttttaaatcagggaggaaaaattaattcagtctaaacacttaatgttttttccacaggaagtatcctcatggctattttgttattttctttcacttaggggaaaatggctttgttggcctcaaatggctgctttattagatgcaatgaagcaggggacatagaagcaaaaagtaaaacagcaggagaagaagaaatgatcaaggtaacgatgacattttatacagatgactgcattcacacatgcaatatgactgtatctctttaaaatgttaagtcatcatttactgtcactttaaagatttacttaatagctttttataatgtggtgttcaaatagactcatttttaattacaaatctcatagttgatggcttgtttctacaatgtggtagagaaatcagtg

SEQ ID NO: 64217 - DNA, 1675 bp, Homo sapiens
gccttcctgattgtctatttaaaaataacaataatgataataataagaaatattcatggatcactagatatgttgaaatacactcaaaggtagattcatttctgttctactatacccttgtaactatcagtctataaaatagttttattagaaagacacagtcaccttcaagccaatagcagcttataaatacggggcaaggagcctggtgtggggaggctgagaaataattgagaaaaccagtagatatgaagctaacaaataacactgtcgaccagaatgaggcagataagccagaggcaattcaagtggccggtcaagacaggtagacagacagaagccaggagtgagagacgggaggtccaaagtacaataaaacactcaagcaccagtcaatccatgggaacttacagcgggggggcggatgaagggaggagcatccaggtagaggggaaggaatggaggtgtgaatgggaggcaggagggcacaagctatttgatatgtttggagagtgaggtgtttttttgaggctgagaaaataactggaagccagaatctggaggactgggtagaccatgttaaacagcaagcatttgattctgcacgtgttggacgccagtgcagggcttctaagcaaggcagtgacatgatcacgtcacattttaggaaggatataaattaggcatggccacaggcaggaagacctgagggatctcatacagtcagggataagagtctaaacgacaaggtggccatgaacattcaaagaaagaagactgaagagaccttagagggcagtccccatgggacctcagtgaaggggtttgggagactcacagctttctgctgtgaagtcaaagatatcacaagctatcagaataaaagaaacagtcctatggctgggggtaggtggatgaatgtggttccattttgaacaagaggagaaaattcaggtaattcatttggattgacaaagcaaaagaatttgaagctgaacattatagaagcaaaaacaattcttatgataatggggtataggaaacacgccaaagaaagcacagtatttcttgtttctcttctgattcaataaataatattttctrttaaggattttgataacttgttttaattaatcaaaaggagacaagacaaatttgaacttaaaagaataagaaaagcagttgtctttttagaaaaggtgagtcagtatttcctatggtcttaaatcatccttcaaataatgggctatgaaacaaatgagatcctacttatctagccttttcctggatagattaaaaactgtatcaaaatcttactatattgcaaagacactaattcactcaattgagaatccacagtatacaaacatataaatcaagggaattttaaaaccaatcattgtgttcaaaatgggaagattattcaaaattttttctacatattttagaataatttaacagttaaaaaccctgtactttataaaaacattatccagtatttaataaagtgtatctataacaatgtcaacattggaatttaacagtttacaaagcacttttgatacatcacatttaaatgaaggtagcaatgagttcagtacattcatgtagattagaaaacagtagtttttgaagattgcatttgttcatgtatgtcagaaggtttgaactattt

SEQ ID NO: 64218 - DNA, 1510 bp, Homo sapiens
actccaaaaacaccttattgtttattgataaggcaatttctagtgccatttgtgccatatttctgtagtcctattttgccatatgacatgattgaaatcaacacctcttagaaatagttttgctgcctcataattgattaccatcatgataacctgtagtcagtgtgaaatagagataaaaattaatgtacttagttaaatgcatatgaaggtctaatcttgttccagagttactcttactggattatttttagatttttattaacattactggtctctaactttactcagtctggataagaaaaagaataccatgcaattgttaactatttgatgtttactagattaactattaatatattgttgtggtccatagttaagagttactttgttactagagatttcattatagtggtgtttaatatagttttgggtatttttaactaaaaatcattgttatccttcaactgtagattctactatgaaatgaggaaaaatcagcaatagaattaattgggttcaaagtatataaataatgatgtgggaaagggaagtcagagggtatctctggaagaactgatttatctgaaggtaatactgagtgaaagaacctaagattgtagacaaagcatgctttatgcaattttgctggtacatagtagtagtagaggctctataaatgtgttgggtgtttttgtttttaagagacagtgtctcgctatattgcccaggctggayttgaactcctgggcttaagtgatcctccagcctcagcctcccaaatagctgagactgtaggtacatgccactgcacctggcttctataaattttgataaataattgttgtggcaccaaatatgccttttattcagctagttatgtgagaattatttttaatttactacacttgacaaattaccttggatagttaaaaagttaattctattctgtgaaattaagctttgtaaaaatagtataattgacctaatattcaaggccagcttaaatttgtttaacttttaagtcttttaaaggactctttagcccacaaattggagtgttagctagattacagtgttttcctttatcttccttcccctagtgcttctgctatgcccagacgttcaaggtcactcaagggatttgtgcataatggggcaaaaggttggttaatatggtcctatgctctcagtctctaggtaacaggagaattcgagtggacgttgctgatcaagcacaggataaaggtaaggaaactggtagagatttctgtttggtaatggtcccaggatgacaccaagccatcctttcccagaaaatttgaataggggtagtggtgggcctgcctgaatctacagtaacagttttcaatcagttttgccccacaggggacttctggcaatgtttgaagacattgtagttgtcacaattggagggagtgctgctgacataagtagaatccaggggttaattctatagggaataggacagtccccatcaacaaagaat

SEQ ID NO: 64219 - DNA, 1663 bp, Homo sapiens
gcagtatgcaccctttaatgtctggtatcttttgttcaactttgtgtgtgtgagattcatctgtgytgttgagtgtagttgtaaattcttcattcttattcctttatgatttcccattgtataaatataccacaatttacttattcgttttacagttgaaggggagcttgacatggtggaggcatagggaaaaggcgcagagtggaggagccaaatgccttcacattttatacctggcaccaggactctgtaagcagaaactgtaagcaaactaaatagacttggccctaacctctatgtgcttgttcattctagatagtaaatactttgaggacaggggctggctttctctttcccttctctactaactccatgactcctacaagggcactcaaaggaatgttgatattattcaaaataggttgtctaaatggagaaacaataaaatgcaattaagataatgtaaaacatgaggcatgagaaaaagcccaggactttccagatgaaaaagagacagctaatgggcagagaaaggggagaagaagtaacataaagcagcatagaacaatactcatttatcttgctatcatgtaaatgagtctaattaaagagtgtttgtagggcactagtaaatcctctgataaaatgcataaataaaacagtactttggtttgctattttcttgttcacagcacaggaacttcccttggtctctcatttttgatcgttttagatatattttgttccattcacatgattttttctgattcctgaagcagcaacagaactgaataaaccaataattgtataaagttgacattcatcacagccatgtaaaggtttggtatttcagccaattttgctttcctcatttttttctttgtatcactgtggattctgcatattctcgtttttttttttttggtagaatatattataacttctattatttttaaatttcttttaatgacttgaagttgctccaccgtctcaataatcagtgtgttaatatattaataattgttgctatgtcccagaaagtggtagtaaaagcattgttgagctaataccagtgcaatacataaattattcattgaaatatatcatgcctatttgactgtattgctgtattctactagcaaaacatctcgtgctttattgtagactctcatttcgattaaaaaaaattaagaaggccacactcattctggtggattcaaagactaataattgggccgctctagaaacggacctcaagggaatgcaaatgagcgaaaaacctgaaagggagtcagagcaggatttggttttcttgttttctgatctatccctgtttattagtcagcgaggactgccataacagggtaacagcttcggttggtttaaatgacagctatctattatcttacggttctggaggctggaagtccaagatcagcctgttggtagggttaatttctcccgaggcctctgtctttgccatgtagatagctgtcttcttccttctcacacaatcctccctctgtgtgtatctgtgacctaatcgcctcttcttataaggacccggtcatattggtttggatccacccgaatgattttgtttcactttaattacctctttaaaggtcctatctccaaatacagtcccattccaaggtagtgg

SEQ ID NO: 64220 - DNA, 2284 bp, Homo sapiens
gctacagagcttgactaacctacccagaggcagaatgatatggtggttaaaagtgtgctctgggccgagattttgccactgcacttcagcctgggtgacagagtgagactccatctcaaaaaaaaaaaaaaaaaaaaaaaaatctgctctggctggacgcgggggctcacaactgtaatatcagcactttgggaggctgaggcaggaagatcgcttgaagtcaggagtttggaatcagaccctatctctagaaaaatgttttttaaaaattagctgggttggtggtgaatgcctctagtcccagctactcgggaggctgaggcgggaagactgctggagcttgggagttcaagcctgcactgagctatgatcaggccactgcactccaatttgagggacagagagagaccccatctctctgaacaacaaaaatgtgtgctctggtgccacacggcctggttagatcctttgtccaccacttagatgcatgttatataaatgttctcctcagtttcctcgtctgtaacttggggatggttatgctgccccaagaagtggttatggggactaaatgcatgtgggcatattggttagtattcaaccagcttgatttttcctggagagggagaaagagcatgcagtgaggtggcatggtcaggtgcattgggacaaggattatttcctctggcttctgcctcctgggaggtataaggagggatctgaaatctgtctgcagaccccagagttggggactgcagagggaaattgagatcagggactstagtctggcagaaatgagtgctgcatggggcattgggttccttccatcagaggcatggggtgtgttgcagacagtcatgaaatgtggctgaatcttgcaagggaccctcggtcctatggttgctgcttgagacaaagacccctgtcagtggaacctggtgacattcacccttctgtgtcaggctgcagacagcaggagatggcagcagattacacccaacaggaaaagggccattgccaccccacaggttgccatagaaggagatgacatctctccctctcctcctccagcagtgtcagctggggaagtggtgggtggatgtgcacaaaagagtagaccacagagcatgctccttctcctccggtctgctggggccccaagagagtctgcagcccttggccaaggaccggctgacacaggagaacaaaagaccttaggctgggataacatggtggtgcagttcatcctctggagctccctgtgagatcagactggagccagtctccagctgagaccacatctcacttagctcctttcctgccatatcctgttttccttactcctatctcctgagacttcttcctgaatgaattacatgcactcaatccctgcctcagtctctgcttttagggaacttgacctaagacagaaatcttagtactaaatactttgcaaggcctcagaagctctgctatccacaagcaggtgagatattaccttccctaccacctggcagtcatagtctatgatgcgattcagctttatggaagtgcttctctaaagaacttcccccaatttaagacgatcttaatttgcttacttgtttactgtccatttagctgctctaaaatgtgagctccaaatcaggggccgtgtctggttggttactcatttcctgagacctggaatgggcctagctcagagcaggtgctcactattgatggaatgcatgttgaaagaatgcatgaatctcatgtctttttgtgggtgaaaaactcatcctattctcaccctgattaactttctttctttctttattttttttttttttcaaaatggagccatgatctgtcacccaggctggagtgcaatggtgtgatctcagctagctgaaacctctgccttctggattaaaccaattctcctgcctcagcctcctgggtagctgggattacaggtgtataccacaacgcccggctaattttttgtatttttaatagagacagtgtttcaccatgttggccaggctggtctcgaactcctgacctcgtgatctgccctctttggcctcccaaagtcctgggattacaggcatgagccaccatacccagccactcttgattaacttaatggaaatatttacagagattctttctcttctgggttctaacgtcttatctgtaacctctgcaggtaatacattttccttcctgatgatagcatttctatggttgctttcacttgcaaatcctctaatgcttatttattccatttctgattggc

SEQ ID NO: 64221 - DNA, 1106 bp, Homo sapiens
tacatatgtacatacttttgaaaaaagtctgtacagttcggatcttcattcctggtaagccaaggaacctggacaaacaccagaattctgtccctctgagaatgccggacaggtttaccttcatcaccataaaattttggaacaaatgtggtaactgcaggttctctccacaatgagtaactgaaaattgaggcagtatttcagatcctaaaaaactgatgaagtaattcaccacacatttgggttgtttttgacttttcctactatgaagagtgctagtaggaagaatggtgtacaagtatctgtttgattccctgcttttagaatcctttgcttgtttgtgggtttgtctgttctttcttgagacaggatgtcactccagtcagccaggcttttccagtgtgtaatttttgttgtttccttttgtcaagttttagaagttgttattttatttctattgaattttaaggcatttttagatatgtattaaaacattatcacacaggccgtgtgttacattgcaattatttttatcgttcttttaagaaacaaaaggttttagcttagatatcttccaatttgtgaagcttttctgattttgactttttaaaaaatgctgtcatatacaagaaacccttggattaaaaatgccatgaatatttctcttttcttgcagtcataacttmggtggatgtcatcaattagtctccgggttatagcatgttttcttgaaagtgtttcgcaatctattttgggcattgagaatttcatcaaacttaagtgaatgtttctacattcactattgaggggaatagtcccatctgatgctttattatttgcatatcttgcttccacaagaccatttcatgcaaagacttgtcttctccccaatgccagatcattacaacatgatatggaatcaactggccaaaaatgggaaggttatctctggaatgtctatttgactccattgatctctccatcttaattaagacaaagtatatgctgtattaatgacataccattgctgcaaattctcaagtcagaaagtgtagttataacttcttgtcatttagtcgctgaatcttatgtcacagatgcacatg

SEQ ID NO: 64222 - DNA, 842 bp, Homo sapiens
gatgacctaccggagagacacaattgtggacaatggcccgttacttttgtatgtttgctgattagatttcatagtccatttctcattaggtacaaagatcaaagttgacctacacaagagtagagaggtccaggacagaactcagggctccgcagaaccacagaatcttgggtgtaagattgctcaagaacaaaaatgtgcttattcagagtgtttctgtgtgacatgtgtgtcaactacagtgcaatgagcatgacacgcaggcaggatatcaatacggctcacctcaaaagcagttatgagcattaaaggacacccatgcctaggtcccggktaaagagataagactctcccacaccctgtgtgaagccacggcatgtggattgctcatgcttctggggatcattctcctgaaaatggtggctcctttctcactgtggagcatctttctaagcagtgtcctttcttcccccaggacactttacttcaggcacaggaagccttctgatggagcacacctggcccatgaaaagacaagggaaagaaatggggccaaaggtcacagtcctctcattccatcatcctccttaaaatcatcctaatttcatgggccctgaggccacggctgtttctttaaaactagaggccttggcgccgggcctcaattttgccctgttccttactgtctaagaaaggttgggaaaatccctagagccaggatcttcattcctggtaagccagagagcctgaagacacacccaaattctgtccctcttacttcagggaacatgtccactttcgtcagcattacaatttttgcaccaaatgtgctaactgcaatt

SEQ ID NO: 64223 - DNA, 842 bp, Homo sapiens
gatgacctaccggagagacacaattgtggacaatggcccgttacttttgtatgtttgctgattagatttcatagtccatttctcattaggtacaaagatcaaagttgacctacacaagagtagagaggtccaggacagaactcagggctccgcagaaccacagaatcttgggtgtaagattgctcaagaacaaaaatgtgcttattcagagtgtttctgtgtgacatgtgtgtcaactacagtgcaatgagcatgacacgcaggcaggatatcaatacggctcacctcaaaagcagttatgagcattaaaggacacccatgcctaggtcccggttaaagagataagactctcccacaccctgtgtgaagccacggcatgtggattgctcatgcttctggggatcattctcctgaaaatggtggctcctttctcactgtggagcatctttctaagcagtgtcctttcttcccccaggacactttacttcaggcacaggaagccttctgatggagcacacctggcccatgaaaagacaagggaaagaaatggggccaaaggtcacagtcctctcattccatcatcctccttaaaatcatcctaatttcatgggccctgaggccacggctgtttctttaaaactagaggccttggcgccgggcctcaattytgccctgttccttactgtctaagaaaggttgggaaaatccctagagccaggatcttcattcctggtaagccagagagcctgaagacacacccaaattctgtccctcttacttcagggaacatgtccactttcgtcagcattacaatttttgcaccaaatgtgctaactgcaatt

SEQ ID NO: 64224 - DNA, 754 bp, Homo sapiens
cctcctagggggagtgtcttgggcctggggccacgtggcagggacagagacgggtccatggcagtgtctgctcttctctgtgaaggcaaaargcctctgagggagtattacagccgcctcatccaccagaagcatttccagcagatccaggtctgcaccccctgactgcagggccaaggactacccccgcttctaggtgagaggccagcaggaggctcagggaggaggcggggccttaagcagggggagcaggggtgggcatgatgtactttttctgaaaaggtggctctggaggccacttggggacaggacctgggctctggctgaactcccgggaggaggctacttcctggtgtgccagcccctccctgccaggtcgccccagaggccctttaccaaggggtttgaggaggccacgtcctttcagtctgccacgccctccattgcatcctcttccttcctccaggaggctgggcctgggtttggggccactgttgcccaggtgggggagggcagtggctttgggaggaacagggacgatgtgtcaaacagcatcgcctctcccagtgagatggttctcctttgcctccgtctctttccccattgatttctccaagtggggagtcatggcttggtcctgatacgtctctagagctgcatcttccagcttcgagtgagcagagcagttggagtctgagggccttttcctggcaggattctccagctagtctttgttttagacagtcttgctccg

SEQ ID NO: 64225 - DNA, 994 bp, Homo sapiens
ctcttcaagcatactattaaaaacagaaattatggccaggtgcagtgacttatgcctgtaatcccagagctttaagagaatagggagggaggatcccttgaagtcaagaatttgagaccagcctggacaacataaaaagactctatctctacaaaaaaaaaagttaacaaaaatgagccaggcacttggcacacacctrtagttccaactagttgggaggctgaggccagaggctgtctgggaagcttgagcccaggagcttaaggttgcagtgaatgagaccctgtctcaaaaaaaaaaaaaaaaagggaacagaaattataaagaaaagatagaaagatttgattctctgtctctctctcactgaagtttaatgtactttgttggttacagtataagataattatcttgtttagcaaaaatatgtttaaatggcttgttaattaaagtgtacataacccaaactccagtaatttgccctaaaatcatcatgaattgaagaaaatatttcattctaaacatattaattacagtataattcataatttaacaaattggaaatataaaaaattgaaaaacataaattttctaaaatttattaaactaaattaattatgcttcacccaacctagggcatataagtaccaatttaaaatactgttagttttgtgtgtcaggggtgtgtgtgcattgactagaaagatgtttatagtaatatagcaaaacagcttacagaaagtatataaatttatttgtgattttttaagaaaaaaaaataatcctgagtacttttctgaaaacaaggctcccagacttttccaccatttaattacatttaaccatcttagcaatatattcatgacacaaggacgtcctctttagtattctttttttttttttaattttactttaagttctgggatacaagtgcagaacatacaggtttgttacataggtatacatgtgtcgtggtttgctgcacctatcaacctgt

SEQ ID NO: 64226 - DNA, 1207 bp, Homo sapiens
aaaaacagttacctctcccagtctttataaactagctttatactgagaaagacattcactaattagcccaactggagattctgtgggcttctcaaaccttttctgtgaatatatcttctctaaacttgtgcatatacatttcccattagagaggttttgtcaggttctcttgctctgacaagtgagtgtcacaaatttccgtaccggtttcaatgcagttgatttcacactcacttgggatgcatgaacctcttaactgctctctggatttctaacaaagataatttgtctgtgtattgttattgaatcagtgtctccactggggaaggaggtaatggagctttctattttggcatcttgctgatgtcctccctcaaagcataattaattgtataaataagaacaaatttctctaaagtatcaaatagttattagarcacacaggttacaaaagggtatttttgatagagcaaagttccatccttccttttctacctctcttttccaacttacactgtagttgaacttggggtttggattgcaaagcaaatttctaaggaaaagggaccttacaaggaaattttagaataagtcttactgatatttttagagcatccaaaataagtctcttgggaagtaagtttctaaaatttcatcactcagtcttttcttcatcactcagtcttgaagttggaaaatcatattttttagtagccttataaaaaagtgtcagaactttatgtaataagtagttcaaatcacctcaattttcctactgttttcaaatatctttgtcatgaagtgatgagtctcaactgcaaaatttttattagctgtcaactttccattgaccaatgattcattttctcatgtaataaatcacttccactccactacacagtaggaagcttcgtggtgtgtttccagcataattaaaaatagtttgttattctcagcttctccttgactatttgaataaagatattagagaaccatcaaagtctgcatactcaacacaggattgtcacacagttggtcagagtgccaaaaaccaaagagaaggaaaccacagttgaagaaaaagcattcttctggccaaaaggaaagatgagtacaactgcctcatacattctatttctcaaaaactgggttcatatatgtaaaaattcacacacacatctatatacccaaatatacctacacacac

SEQ ID NO: 64227 - DNA, 1013 bp, Homo sapiens
gaattcaggggaataagatatggatgaaaataaacgtatgtgagtttaattgatcatcaaataattaagcaggggggtcatttggaaagaatatatattaggaaatttaaaaataagcctgatgttagaatcctaagcaccatgtataggataagctactaaaaggaaaaccaaggaagaacattggagaggtggaatctagaggtaaaactgacatcagagaagatggggtgatatactttaagaaacaaggcattgttagagagaccactagtgagaaagagagaaaaaaaaagtatttgatggacaacaacaaggtcaactgtcaatgaaaaattcatgtagtgcttatatttattaagcttcccaaaatagtagatataattccaaactttcctttcctaatctgtccactcaaagaacagaaataagtgtaccaattaagaatatgagattatcacattaatattaagtacaagaataataagaaaagagactgtgtgtgtgtgtgtgtgtgtgtatgtatgtgtgcatgtgacacaaagagaatactatgttaaggaaagattattaaacaaatgtgcatgataatttgctagctgcatgaacaaatcaatttagctcttaaccttacactctgtcaatattaactctagatgatttgwaacattaaaagtttttaaaggatagaaattagaaaaaagtatgtgggtaaacatttgactaattttaagatgaggagggactttctaaggttaaaatcagtgaaagaaaaaaagaaaacaatttgcatgtaaataattttataatatatgcgtatcaaaaatcttctaacaaatattgaaaaattagaaaaatgtttccaacaaatactacggaccatgtactatttgcactggcagaatctgtctgatgtaaaattttggaagtgtagagtctactgatgccttgtaactttcaggggacggcttggacagtaaattgtggttagttttaattaatttcagctttta

SEQ ID NO: 64228 - DNA, 1171 bp, Homo sapiens
cacaaatatagcaaaagtatttgttaagctgccatatattactcaacatacttatatctaagaatttatttgataaaataattttatttttgttagaataattttagtggaagatatgaacattttttaaaacacatatttcattgtttaatatataccatatactgtataagtttgcctcccaacattcrttcaggccatcttttctagaacatccttccccttttggcaaaatagtgtgaataccccaaggtccatttcaaatgtctctttctccatgatttctcttattcccctcccagcatgtacatggcatcagaacaaattgtttcctctgatagttccaaagtccttttctgtacctccactacaatacttatacttcctgtccattctgtgagaaggagatggcaaatatccccttgtttcactgatgttgcactctccaggacctccagcagtggctggaacatagtagattttcaaaatccactccttcctttctcctttcctcccttcctacttcccttcctccatttcttccttccttcgtatatttattcaacagacaattatcaagtgcctattgtttaccaggcaatagttttaaaaacagttgtgattaagacaagccctcctacattctagtgagggggagaatcaaaatgtaaaaataagttaacattgataagtgttgagcatatatatatacacaaacacactatatatatatgtaaataaaaaaaataaaacacttcaaagggagcaaaacagaatgagagggactcttttattttagggttaggagaagactctcttgggaggtatcatctaagcttaggcctgaatggcaaaaggaaaccaactgtgataccctcctggggaaaactatgtcagccaaaggactagtgagtgaaaccccctaatggaagaagaaacctgacttgttttagggacaaaaaaaaaaaaaaagctggaggatttctgttgatgtcagtcaatgccaattttttgagcaatgagtatttccaggcatatagaaacagagtagtttgtctgggacccagacaaggaagtatcttgtttctctagtgaatagaactgaaaaaggaggcttaattttgtttccccttaccgaagtagataaagattaactattaataaaatagaa

SEQ ID NO: 64229 - DNA, 1171 bp, Homo sapiens
cacaaatatagcaaaagtatttgttaagctgccatatattactcaacatacttatatctaagaatttatttgataaaataattttatttttgttagaataattttagtggaagatatgaacattttttaaaacacatatttcattgtttaatatataccatatactgtataagtttgcctcccaacattcgttcaggccatcttttctagaacatccttccccttttggcaaaatagtgtgaataccccaaggtccatttcaaatgtctctttctccatgatttctcttattcccctcccagcatgtacatggcatcagaacaaattgtttcctctgatagttccaaagtccttttctgtacctccactacaatacttatacttcctgtccattctgtgagaaggagatggcaaatatccccttgtttcactgatgttgcactctccaggacctccagcagtggctggaacatagtagattttcaaaatccactccttcctttctcctttcctcccttcctacttcccttcctccatttcttccttccttcgtatatttattcaacagacaattatcaagtgcctattgtttaccaggcaatagttttaaaaacagttgtgattaagacaagccctcctacattctagtgagggggagaatcaaaatgtaaaaataagttaacattgataagtgttgagcatatatatatacacaaacacactatatatatatgtaaataaaaaaaataaaacacttcaaagggagcaaaacagaatgagagggactcttttattttagggttaggagaagactctcttgggaggtatcatctaagcttaggcctgaatggcaaaaggaaaccaactgtgataccctcctggggaaaactatgtcagccaaaggactagtgagtgaaaccccctaatggaagaagaaacctgacttgttttagggacaaaaaaaaaaaaaaagstggaggatttctgttgatgtcagtcaatgccaattttttgagcaatgagtatttccaggcatatagaaacagagtagtttgtctgggacccagacaaggaagtatcttgtttctctagtgaatagaactgaaaaaggaggcttaattttgtttccccttaccgaagtagataaagattaactattaataaaatagaa

SEQ ID NO: 64230 - DNA, 1171 bp, Homo sapiens
cacaaatatagcaaaagtatttgttaagctgccatatattactcaacatacttatatctaagaatttatttgataaaataattttatttttgttagaataattttagtggaagatatgaacattttttaaaacacatatttcattgtttaatatataccatatactgtataagtttgcctcccaacattcgttcaggccatcttttctagaacatccttccccttttggcaaaatagtgtgaataccccaaggtccatttcaaatgtctctttctccatgatttctcttattcccctcccagcatgtacatggcatcagaacaaattgtttcctctgatagttccaaagtccttttctgtacctccactacaatacttatacttcctgtccattctgtgagaaggagatggcaaatatccccttgtttcactgatgttgcactctccaggacctccagcagtggctggaacatagtagattttcaaaatccactccttcctttctcctttcctcccttcctacttcccttcctccatttcttccttccttcgtatatttattcaacagacaattatcaagtgcctattgtttaccaggcaatagttttaaaaacagttgtgattaagacaagccctcctacattctagtgagggggagaatcaaaatgtaaaaataagttaacattgataagtgttgagcatatatatatacacaaacacactatatatatatgtaaataaaaaaaataaaacacttcaaagggagcaaaacagaatgagagggactcttttattttagggttaggagaagactctcttgggaggtatcatctaagcttaggcctgaatggcaaaaggaaaccaactgtgataccctcctggggaaaactatgtcagccaaaggactagtgagtgaaaccccctaatggaagaagaaacctgacttgttttagggacaaaaaaaaaaaaaaagctggaggatttctgttgatgtcagtcaatgccaattttttgagcaatgagtatttccaggcatatagaaacagagtagtttgtctgggacccagacaaggaagtatcttgtttctctrgtgaatagaactgaaaaaggaggcttaattttgtttccccttaccgaagtagataaagattaactattaataaaatagaa

SEQ ID NO: 64231 - DNA, 859 bp, Homo sapiens
aaaaatcaaaacaattgactcatggacataggagaaagatgggtacccagaggctgggggctgggtgaaggtgggaatagttaatgggtacaaaaatagttaaaatgaataatgaatgaggcctactatttgatagtacagcagggtgacaacagtctataataacttgattgtacattttaaaataaagagtgtaattaaactgtttgtaactcaggggataaatgcttgaggagatggatacccctttctccatgaggtacttatttcatattgcatgcctgtatcaaaacatcttatgtactccataaatatatacacctactatgtatccacaaaaactaaaaagaaaaaaatagtgtatatctcatgtgattgttctgaggatcaaataagataatataggtcaattgtttagcatggtggctggcacatagtaaacacccaatgaatatcagccatsatcatcaccgagccattaccatcttttttgtaaataatatttgctcgtcttttttcgtacatgactagattgaacattcgtcatgaaaatgcttgggcattcattttggtatccctgacacctaacacaatgtctagaacagcataggtactcagaatatatttttgaatgaataaaaaaataaggacgcaaaatactgtatacttaagaaagggaccagttattcttttttaatccaaatattttaaaaatcatataacctaaaattaccagggaggtgaacatacatctcctattctgaaaagccactgcatatgggaaacaggaaatctcattgcattaatactttttttttttttttgagacggagtctcactcttgttgcccaggctggag

SEQ ID NO: 64232 - DNA, 859 bp, Homo sapiens
aaaaatcaaaacaattgactcatggacataggagaaagatgggtacccagaggctgggggctgggtgaaggtgggaatagttaatgggtacaaaaatagttaaaatgaataatgaatgaggcctactatttgatagtacagcagggtgacaacagtctataataacttgattgtacattttaaaataaagagtgtaattaaactgtttgtaactcaggggataaatgcttgaggagatggatacccctttctccatgaggtacttatttcatattgcatgcctgtatcaaaacatcttatgtactccataaatatatacacctactatgtatccacaaaaactaaaaagaaaaaaatagtgtatatctcatgtgattgttctgaggatcaaataagataatataggtcaattgtttagcatggtggctggcacatagtaaacacccaatgaatatcagccatcatcatcaycgagccattaccatcttttttgtaaataatatttgctcgtcttttttcgtacatgactagattgaacattcgtcatgaaaatgcttgggcattcattttggtatccctgacacctaacacaatgtctagaacagcataggtactcagaatatatttttgaatgaataaaaaaataaggacgcaaaatactgtatacttaagaaagggaccagttattcttttttaatccaaatattttaaaaatcatataacctaaaattaccagggaggtgaacatacatctcctattctgaaaagccactgcatatgggaaacaggaaatctcattgcattaatactttttttttttttttgagacggagtctcactcttgttgcccaggctggag

SEQ ID NO: 64233 - DNA, 822 bp, Homo sapiens
gcatacmaaattatatgagtaaaaaagtttttaaattaattttctgtgcagaaggccaaatgtggttaaatctcaagaagaaaccagtgatcctatgttcactgttggttaggaaacatagtaagacatgacagagggttgactttatacaaataaatcaggtttattttattagaattggtataattgacatactttatcttttgtacattttgaggtgtatcttttatacattttgataaacatacattgttgtgtagccaccgctacaatctccagttcatttccactagctcttaaagtacactcatatcccttgtagtccctcctagctccttagaccatgccaaaaatcgacctatagtctaccattacagttactgccttttccagaatctcttaaaaattaagtcatatattatctaggcttttgatttggctttttttacttataaatatatagttgcggccaggagcagtggctcacacctgtaatcccagcactttggaaggccgaggagggcggatcacgaggtcaggagatcaagaccatcctggctaacacggtgaaaccccgtctctactaaaaatacaaaaaaataaaattagccaggcttggtggcgggcgcctgtagtcccagctactagtgaggctgaggcaggaaaatggcgtgaactcaggagacggagcttgcgttgagaggagatcgcaccgttgcactccagcctgggcgacagagcgagactccatctcaaatatatacatatacatatagttgcaattattttgtgttgttagaaatataagtagttcattccttt

SEQ ID NO: 64234 - DNA, 543 bp, Homo sapiens
agctgggcatggtggcacaggtctgtagtttcagctacccgggaggctgagatgagaggatcagctaagccccggaggtcgaagctgcaggaagctaaagtaggaggatagcttgagcccaggagttcatgccacagtgagctatgatctgcactccagcctggaggacagcatgagactgtctcaaaaacaaaacaaaacaaaacaaaaaacaaaaaaagaagcttttgctctggaagtttgaagaggtaattaggaattctcatcagtagagaakgcagcttttgttgccggttctgcagccatctgattgggaatgaagctgaaattcagtgccattttctcatcattgatgagagatactcagaattgagaacactttatgctctctaaagggagatatgttgctagtgtaaattactatgcctttctgttattgaataattgaactacctataaaatggggagaatcttttatcatgcaaatatttttatgaattatggattaaggattatagaattgtataatgaaatagggtaaga

SEQ ID NO: 64235 - DNA, 573 bp, Homo sapiens
tcagatgaaaaatataaatgtgcaaacttctactcttaaacgaatgaatcaccttttaagtatgtattgaaattattttcataaggggcacccctcaccctccagtccaagaacaatggtactagacccactttaagaaacacccatcacttaactgtgccttttttgaagtagggggtgtccatttaattagttttaatttaaagaccaattaacaaggtttcaacatagaacaacataataaaaatcgatttttttatttcctgaactactgaatcatctctgatgattctgactggatctgaatttatttgtacaatacaattttattccaaagtgtttacgaaaaccacattttagttctttccctacttggttccacacccttctgtgttttagcccattaacctcaataaacctgctcagtttgccatttgatttcagtcagatgccttattccattttttctgtcctgcaaccataatgtgacgacaatctgggtacaatygcagaatcccacgctacgccacaggacatggtgtggccattcacgtgccttaacagttcagaaac

SEQ ID NO: 64236 - DNA, 677 bp, Homo sapiens
gtgtgtgtgtgtgtgtgtgtgtattgtttgtttgtttgtttgtttttgagatgaagtcttgttctgttgcccaggctggagtgcagtggcatgatctcggctcactggaacttctgcctcctgggttcaatcgattctcctgcctcagcctcccgagtagctgagattacaggctcccaccaccacgcccagctaatttttgtatttttagtagmgatggggtttcaccacgttggtcaggctggtctcgaacttttgacctcgggcgatccaccctcctcggcctcccaaagtgttgagattacaggcatgagcctctgctcttggccttgttagcatagtttggagagaacaaaattgtttttcatctcacttacagaatagttttctaacaattacatagaacattttaattgcaaatgcagctgactccgaatagctaggcaaattagcataaatacaaaactgaaagctgctaggatagtcctaaattaagtcaggctacaagaagaaattttaggtaacaaaaaagattaaacatagataactcacaaaattggcgttacagttcttctggccgttggtgcttacaactgtgcgtacttcttacttagcacaaggcatttctgagaatttgagtgctcaatatatacttgctaagtgaatgaatgaatgca

SEQ ID NO: 64237 - DNA, 677 bp, Homo sapiens
ttgaaatggcttttcatgttattctgatgtgttttcttcattaaggcccaagttcctaaaacattcattctcttcctcttttctagaaaagaggtcttgcccgccagcaattcccacatgggtattggggcaacaccatgatacatattcaagataaagtacaggaaaagctttttgcagtggaataaaatgttaaaggraattgctttccttgatagcaatcaggtcaccaaagtgagatgaagaaaaatttttttgagaatgcaggatagaataatattatttcccttatttctaagagttaaacaatttaggattaaaaattttaaatatactagaggggtccatgaattttaatagtaataaaatggttatttaatactgcacaatcctcagcttttaaggaaaaacatgtttgacttattaattatttaggacaaattttggtgaagttattccaacttgcatggcttaggaatgacaatttggggatttacatttcctaactgcctaatgaagtctgctccttccttccctagactatatgtatttgctggtactcttaatatcacattttataaaacaaatgagatcacaagggcatatatgtttttttctctgtgtgtgtctgtgtgtagcatttctgagtatgtatgaatatgaagtatgctttgatt

SEQ ID NO: 64238 - DNA, 633 bp, Homo sapiens
ctgatccatggcctggggtggactggggtctcttgctcttaggtgcaattcctggagcagcagaaccaggtgctacaaacaaaatgggagttgctgcagcaggtgaacacctcaactggaaccaacaacctggagcccctcttggagaactacatcggtgacctgcggaggcaggtggatttgctcagtgcggagcagatgcgccagaacgcggaggtcaggagcatgcaggatgtcgtggaggactacaagagcaagtgagactccaggcagggcaaaacaggggagaagcatggccggaaactggtcacaggggcaagacattcggcttcagtgtttgtgtgtaagggtggggggcggggcatgcaggctctgcactgcacaactgcaggaggcrctgttttgtatgtggcaacccgggtagaatgatattggcagccagctgtcaattgcattgggtggggaggggcaggatagcttcatggatgttgaaaccaagtaagcctgatttccagtgtggcctctgccacttactagctgcttacaaattcatctttttaagtttctagtgttcacattagtaatgtgggaatagcaagaaccttccttgttggattgttgtgggtagatctg

SEQ ID NO: 64239 - DNA, 701 bp, Homo sapiens
cagggtcttctccatgctcccagggcaccagcttttaccaaaaaaaaaggtaacctccccatccaaatcccagtcaaccagccaactgaccagctccctctggccctgtctcagttcaaattcccaaaaacagactcagatgaagatttgtgtacaggaagtttattggagaggatcaatatgtaaggaagtgaatgaagcaggattggggattggggaaaagttaaactcctatgtagttgggttggctgcaacaaaggtctcagcaaatcccaccaagcactagacctgccaatggggagagatcatagcctagggcaaggygttcctggaaaggcactcttctaagagcaatcaggagccacagcagctggagaagtgagtgctaggttctcaaaagggtgagagcccaccacccatccactacagaccccacctagggggctgatcctgcttctgtttctctcccagccttgcctcactctgtcatctcatctactaccacagacataattttggaggtgggctcttcccacaacttggccccacttccctgcaatcctgtaagcccctctgctgtccctcctgctaagctaggttatcaggggaaacaccccacataattcaatgtaggttcttttctattttccctaagtgtaggctggtctgagaaataaagggaaagagtacaaaagagataa

SEQ ID NO: 64240 - DNA, 767 bp, Homo sapiens
cctgaccgcacagcaaatccacccccacctatgtagagcagytcatgttgttggtgacttctctagattgcctgttcgcatgaaaacagaataatcagtagatcctctcacggggctcagaggagaacaacgtcagaggaaaggatacctcaagtctgcttcataattcataattcaatctcagctgggaatcgcatcaactcctgtatagagtaacaagagcagcccttctcaatctgttccccttgctcaccctcccaacccacagtcgcctcatggccactgttcctagacttgcacaaacactcacactctcccaggcccctcaacctgtatgccttccaccctttccaagcccgggatcaatacagccgtgcctggaccaggtgaaaccaaggaaaactataacttgtctcccagcctttctcaacagcagggaaatccccacccttttccctcttgttcaagtgagggaaagtctagagggtaaagcagtgcagcatacagggccaggatcagtgctcatcacgtgcaccctggtcaaaggccctgactggacagcactgctgaacgaagcctgaggcacatttcaggaatgaatgagttaatcaattgcctatcatacagatgggaaggttgacagagtgcctgccacgacggagtgcagtgaggacccttgcctatcctgtctcctctgggtcacccacctgcacgcctggccctccagggccaccttgatgctcatcagctcctggtactcacagagc

SEQ ID NO: 64241 - DNA, 767 bp, Homo sapiens
cctgaccgcacagcaaatccacccccacctatgtagagcagttcatgttgttggtgacttctctagattgcctgttcrcatgaaaacagaataatcagtagatcctctcacggggctcagaggagaacaacgtcagaggaaaggatacctcaagtctgcttcataattcataattcaatctcagctgggaatcgcatcaactcctgtatagagtaacaagagcagcccttctcaatctgttccccttgctcaccctcccaacccacagtcgcctcatggccactgttcctagacttgcacaaacactcacactctcccaggcccctcaacctgtatgccttccaccctttccaagcccgggatcaatacagccgtgcctggaccaggtgaaaccaaggaaaactataacttgtctcccagcctttctcaacagcagggaaatccccacccttttccctcttgttcaagtgagggaaagtctagagggtaaagcagtgcagcatacagggccaggatcagtgctcatcacgtgcaccctggtcaaaggccctgactggacagcactgctgaacgaagcctgaggcacatttcaggaatgaatgagttaatcaattgcctatcatacagatgggaaggttgacagagtgcctgccacgacggagtgcagtgaggacccttgcctatcctgtctcctctgggtcacccacctgcacgcctggccctccagggccaccttgatgctcatcagctcctggtactcacagagc

SEQ ID NO: 64242 - DNA, 315 bp, Homo sapiens
cttaagctcaggaatttgaggctgctgtgagttatgattgcaccacygcactccaacctggatgacagatcaagaccttgtcttaaagaaactctggatggtgattttttctagagaggatataattttctggcaggcagatggggtacagttggatcaaggttgatctatttctgctttgcctttattcctagaaaatatccctagggtctcagctgagagcctatggtgtttaccaggccccttcaaccctggtgagctctgaaatctaacccctaacccaataagattgatggaatttttgctcaccttttt

SEQ ID NO: 64243 - DNA, 524 bp, Homo sapiens
tgagacagagtctcgctctgtcacccaggctggagtgcagtggtgcaacctcggctcactgcaacctccacctcctgggttcaagcgattctcctgcctcagcctcccaagtagctaggactacaggcacccrccaccacgcccagctaatctttgtatttttagcagagacggggtttcaccatgttggccaggctagtctcgaactcctgacctcaaatgatccacccaccttggcctggccctgaggccatgaagccaaatacggccactagctgagcactggcttctatgcctcttaaaagtgtctgcaagcatgatagtcactccattttcctgtagatcatccaaaattctctatgaaacagtctttcctcttttattcattgagccctctatgttccaagcactgtaccacacatcaacaacacagggagaatgcaggttcccttaaccaagtaaagtgaagccctcctccacctaggttcacattaaatgtgtaactctcacccttatgacttaat

SEQ ID NO: 64244 - DNA, 524 bp, Homo sapiens
tgagacagagtctcgctctgtcacccaggctggagtgcagtggtgcaacctcggctcactgcaacctccacctcctgggttcaagcgattctcctgcctcagcctcccaagtagctaggactacaggcacccaccaccacgcccagctaatctttgtatttttagcagagacggggtttcaccatgttggccaggctagtctcgaactcctgacctcaaatgatccacccaccttggcctggccctgaggccatgaagccaaatacggccactakctgagcactggcttctatgcctcttaaaagtgtctgcaagcatgatagtcactccattttcctgtagatcatccaaaattctctatgaaacagtctttcctcttttattcattgagccctctatgttccaagcactgtaccacacatcaacaacacagggagaatgcaggttcccttaaccaagtaaagtgaagccctcctccacctaggttcacattaaatgtgtaactctcacccttatgacttaat

SEQ ID NO: 64245 - DNA, 1237 bp, Homo sapiens
tacactcaaggtagaatttataatagtttatgaatacttactatgagcctggcacagtgctagctgctgtaattactaaaataaataaaattaatttcctccctcaacaatctttggttatagttgatgaagcagacatgtatgtagataattatgacacaatgtagagacaactaaagtatgatatattattaccatgacaatcagtgcttccagaataatattgaaaacaaaaactaacatgttacaattcaatttcaaacccttgagtattttttttctattgtttaatagataaaggtcaacttcttcatgagctcttctgtgatctggacctggaatacttttctaaacctatttcttaaaagaaccattttaataccccatacttcaaccatgccaagatactatgtttgcatcttctcttgctctgaatttaattacatatgaaactattagatatatcagcatattgtggctatatatgtgtgtgtacgtgcatgaatgtttgtttatgatttttaactcccaacyagattttaaatgatctgatcagaaaaacaaaacttagatttactgtgtcctgttctaatggataacagtgctaactacacatcaaatcactctataaaatttttagtgtaaaaaacaaaagaaagcaagaaaggaaaaattagagatggaaggtgagagagaatgggaatgatatttggctccaaatactgggactttctataacactgtttgttgttcattccagttgccactaggcacatgtggctatttaaatttaattaaggaattaaataaaaatttagctcctcagccaaactagtcacattttaggtgcttaatgtccatatgtgactaatggctacagtactgaaaaatacagaatatttccatcattggagaaaattgtattggaaagcattgatctatagaatgtaatcaatgcccctcttaggtgctaatatatctcaaaacttttatatggcaaaaactgcaatgacttttgcaccaacctaatagtaaccttcaggtattttaaaagctaataacattccaggttagtgttttaagtaatgttctaaaggaaccaaagcttagtgtgtccagaacagaagctcaatgtgtgttgatttaaccctattcttgtggtaacttttcccggcctctctattcgctatggaatgtaacattttaataaagcagacattttatctagtcacatgca

SEQ ID NO: 64246 - DNA, 1367 bp, Homo sapiens
agtccaggcaaaaatctattccaatacacacatgccactggcccacaaggtcactgactgttttttagaacactttagcaaaaggaattcaaaaaatgcctgctgaataacaaaaacaaaacaaaatgaaacaaaataaaccatgagttatagtttgatagctagttttgtcacattcaaaaaagtaaatgaattaaatgatacataaaattacaaccatttgcttgttttataatttagactgtcaaaagtggtcaacattcatgaaatttatgtttagtgtgtctaattcttggaatctagatttgtaggtgcccctcccccmaaatttcacaaactaacatgtatggactggaatcaaaatgaactcacacatttcattgttcccacttataaaagtaaaatatctctgtggcatatattaccttttgtatgtattaaatattaaaaattgtttaagaataaataaattacatttcatttccatagggaaatgtggatacttcatgatcttgagaagagaatccacaccaagtattagagtaaaatgaaaagaaatagaatttgttatctttaaaattacataaaccgtatttaagtttacaacatcgtagggatcccctcatgtgatagtttgatttattttgatcgagaaaatatacaataatacacaactactagaaatgtatacttcactaatcacagtgacatatacaaacatttaaaaataatagttgaacaatattatgaatacagttatattgaaattttaaattacatttaaatcagtggatatctgaacccctagaatcactgttgtcagtctgaggccaaaggttgtggattgcaaatttggaagctttgctacaagtgagaaactatagttgttgaaaaaagatatttcccaccattgcttagcactttgtggttccaagacattaagtgaatgaattggccatgtacagtgttactgtggattgaagatgcatcaatacaagtacatattcaaaagaataataaaatcacaaagactatttctttattcccctcttacttgacttctctgcagcatgtaagagtaaaccattgtctcctttttgacactgcttcctctccaggcttataaaataccattttaatttggtatctctctcacttctctgaatctcctgtccatatttctccctctctaccttgctttttaatattggggttcccggggctaatcatggacctttcttctgatctctctctgccatcaccctgtatgtaataacataaaatccattggtttttttggaagaaaaccaaagcaccattaagcataaacatttattcagaagaccaagacatgtgattgggaggaa

SEQ ID NO: 64247 - DNA, 1231 bp, Homo sapiens
catgccttccaggcatcatactgaatccttccattttatttaattttgaggataatttattcaactctcactattcagataataaacaattatcctatgacagacacagatgtgagaagtaagactcaagttaaataacttgcccacacccaactcctaaatgacacggttgagatttgaagcagttttctgactgaccacaaagctcacattctcctaaccactctgcagtattgccattattcactgtcctaccttctaacaattagaattcagtttgataaaaacatatactattgtgacctctatgtatgccaaagttctgcaaacttctccaacttcagtgtaacttaatgaagtagaacaaatcagtttatccatgttatgttctattcagaatttgtggcattcactgttgttatcttagctttgtttactctctgttgttcttactgaaactgcttctcatcttcagacagttctcagcagcagtaaaatcaatctttgtgaggccatgctattaaaaaaaattgggaggtaagatacagaaagatgtatttaaagtacatgatattttccatcctttctcttctaccttcaaagatagaatccagcgtatagggattttccccatctgaaaaaaaatctattctgacagtgtatgcagaaataaaattctactaaagtacccattttcttctcctaattttttaagtgtaaactactataaaattcaaatggaattaagtttttttttgtctgaagaacatattcaatatgcaattttagttcttcagtttcccattatcgggctgggtattctgcatatttctccccttaatttgacatggcatgtctagtctaataacacgaatcttccctctttttgtttttggatggagacacaagatttggtggtgggtgacaatggctccagtgacagtgtgcaattaagaactttgtgcataactcatggaaatcccatttttactttgcacacatgccacagaattccaactgagtgttccctagcctctgggggagagagaagaaatgcttcaagaagtgtttttaattcttagagcatttcatttcagatttcttaaatcattaattgatataggtcctataaagtkcctccatttaatcaattgctttggtttacgttgacactgatttgactttagaactagattccattcctctttcttggtgtccataataaagctct

SEQ ID NO: 64248 - DNA, 1384 bp, Homo sapiens
tctaagtatcatgaaaagaatgatagattcttgcaataaatatggtattatcctctatttgaggtaagttatttctaatgcattttgccatgagaactgcattttccttctttggcagagaatctccttttcctagcaaaaagctctttgtacctacaccaagcattccaaaaatacagatgcactgaatatttgatctgtgctttcattttttaagtttctaccatcattttatcatcaatgaatttttatcagtgtttacagatctgaaataactacagagctgatattaggaagatattatgataatataggtcataagacatagctacaggataaatatagatctgatacgagaaatgtagaatgagacagaaaattccaagtcaataatctcaccaatactgaaagatgcacatacaaccaaataattacatgtaaaagatgacaactgaataagttctataatctagttaacagtattgtatcaatgctaattgycatagttacataaaatgacaacactgagggaagctgggtgatagacaggcacaccctatgtattgtttttgcaacttttgtaagcctataattatttcaaaataaaatgttaaaaacaagcaaagagaaaaaaaaatgccataattcattaacaggatccaaagacctccctaaactgccaaagaagtacatggaacagaaaagattaagaaaccctggcctaatccttcttggtaaccacaagcagaggtgaggctcaatcacaggcctgggtatcttccagaaaactacttcgagttgacaagattcaaacaaatccatttccaggaatttttgcgtatctttttttccttatataatggttcaggtcacaattcctcctccatccagaagaatagaaagaaaacttttgtagtgctttttgctgactgattgcagactatctttctggaccactcttacccccactctccctaatttagtaagcaggtaaaactaaatgagatgaggttggcaagaactgccaatccaagttaaaaagaaaagaaaagaaaaagcaaactataaaagagctgatctctccttacttttgccatctaattaatgtgtcagttctttcaagactgaagacagaatcaggaacatgacttactgttgaagatgtaagaaatatttttctgattcattttatcagaaaatttaagttttatattaagaaacattagtaggtcatattttatgctcataaatatgtatcaagtattttaaatatttaacatattatattaataaatatattgttaaaatagtataatctaaagatgtagctttcaaaattctttttgtaaataatacagtgccaagtaaataaaacaaatataat

SEQ ID NO: 64249 - DNA, 673 bp, Homo sapiens
atgtgggttaattataaaactagaaaaataaaacaatgtatttatatgaaatacacatttttgttagattttcttaatgttgactttggagacaaggctaaaaattatacacacagagtatattctatgaggcatgttaaataagcacaacatttaaatgagctttttcaatagtccaatggcttgtcagttttataatagtcagatattagatttagctgatctaatttatctcagtaraattaggcaattactttttttctgtaaggtccaaactctttattttctcttttggaggaatttactagcaatatttgatcttggtgacttgtactagatacaatttctattctcgtttactttctgcttcaagacagtccccagttcagcacttctttaaggatcctctgaattccttcagtttgagcaggaagcaaagaaaagagctagggagaagaacagagaaaagggagaaaatcaaagaagcatgtcctctgacacacgaataatcttgatgtccttgcctgttcataaagcaacttggaagacagttcccaaaaggaagccctgaaatgctttgtgctctgtggaaacattgtggggccacccaaagagactgagaaacagccatcatttgggagaaagtgacttcataaacatacaatttaatgta

SEQ ID NO: 64250 - DNA, 673 bp, Homo sapiens
atgtgggttaattataaaactagaaaaataaaacaatgtatttatatgaaatacacatttttgttagattttcttaatgttgactttggagacaaggctaaaaattatacacacagagtatattctatgaggcatgttaaataagcacaacatttaaatgagctttttcaatagtccaatggcttgtcagttttataatagtcagatattagatttagctgatctaatttatctcagtaaaattaggcaattactttttttctgtaaggtccaaactctttattttctcttttrgaggaatttactagcaatatttgatcttggtgacttgtactagatacaatttctattctcgtttactttctgcttcaagacagtccccagttcagcacttctttaaggatcctctgaattccttcagtttgagcaggaagcaaagaaaagagctagggagaagaacagagaaaagggagaaaatcaaagaagcatgtcctctgacacacgaataatcttgatgtccttgcctgttcataaagcaacttggaagacagttcccaaaaggaagccctgaaatgctttgtgctctgtggaaacattgtggggccacccaaagagactgagaaacagccatcatttgggagaaagtgacttcataaacatacaatttaatgta

SEQ ID NO: 64251 - DNA, 673 bp, Homo sapiens
atgtgggttaattataaaactagaaaaataaaacaatgtatttatatgaaatacacatttttgttagattttcttaatgttgactttggagacaaggctaaaaattatacacacagagtatattctatgaggcatgttaaataagcacaacatttaaatgagctttttcaatagtccaatggcttgtcagttttataatagtcagatattagatttagctgatctaatttatctcagtaaaattaggcaattactttttttctgtaaggtccaaactctttattttctcttttggaggaatttastagcaatatttgatcttggtgacttgtactagatacaatttctattctcgtttactttctgcttcaagacagtccccagttcagcacttctttaaggatcctctgaattccttcagtttgagcaggaagcaaagaaaagagctagggagaagaacagagaaaagggagaaaatcaaagaagcatgtcctctgacacacgaataatcttgatgtccttgcctgttcataaagcaacttggaagacagttcccaaaaggaagccctgaaatgctttgtgctctgtggaaacattgtggggccacccaaagagactgagaaacagccatcatttgggagaaagtgacttcataaacatacaatttaatgta

SEQ ID NO: 64252 - DNA, 1098 bp, Homo sapiens
ggactgacatttaacactcatctcatctttgctttatccctatagtgatgaggaactcaccagttcataagaaaacccatcccactattgaagagtgttttattttttmgtctattttttccttataatgagccaatattttcttcatggcaacttccattaggaattgccatggctagaagtcaatagttttgatttgacgatctcttcccttctgtgcaccaggcttactgaacctctaagaacttatttggtagattttaaattatttctttctgtatttcttgggataaatccttgaaaggtttttgacaattactgcagggataactctggatcttatacccgctgattagaatgggtcctagtaagggagggcctctccagaccacctatgaaattttgtatgttcttcttcagttctatggttctatatttttcctcctctttcagctgagatgtttggggtatactgcatttcttctttaacgttctatgggaatttagtttagcactgagtggctgttatacatttcagtgtggaatagacaatgaatggtctctttcaaagagccctagtcatcacattcgtattttggaatttttctgtctttgtcttggaacttttacacagatcaatcctcataatctaagctttatttgtacttatctactattccaaatataagatattcttctgatgggaatatacgagctttttgagccaataaaaaggctgttgggctcaatctcattacatttgtgacataccacaagtttggctccatatcttcacaggtaaaaatacagaactccattatgtgattggatcacccattacctggaacataatttattcaaataatgatgcaaaaataagctcattaccccaaaagtacctctcatttctttattctacctcatgagaaaatgggttagttttcttctctattgtatgtgtgtgtcttcgtgtgtgtgtaggattagctgtctttgtaattcacttgttctttgctaatgaaacctctgcatcgctaacaaagcagaaaataaaaaaggtaaatagcactcctcagaaagaatttgtttcttgttaca

SEQ ID NO: 64253 - DNA, 563 bp, Homo sapiens
atcttttcacattaatttaaattactttattaaaatgattcattttctttaaaaacacatcacaaattataggaatacagatatgttctgagtttactagtgcaacacattactctcgttacttcttcctcatggagaacaccatataaatgtgaaaaacagacactttcgacagaatttctaaaatctgatgatgctcagtaactatgtcaattaacaagaaaacatatctctgagtcaatcctttgaacaccagaaactcttttatgtttggatgctactggaaaaactgtccttggaaaaagcagctctaaygcatttgagcaacaatgaaatttcacatgaggaaaggttagagccgggtgcacaccagaaaactaattgctgagagctgcctttatatacacactgcagtaattcatagagataccatttagaaagagaaaatcaacaattctgttctgtagacactgtgtcctctagaataggggagaaaaagagaggttcttatggctctgaggattttctgaaaggcacaattgtatatctatcactggaaattg

SEQ ID NO: 64254 - DNA, 576 bp, Homo sapiens
aacaaagaacatcccatatataaagttgaccttcaggaccaccaaagtccaccatttattagtgcttctttaacatccacaatggccctgtcatttttccccacctgtcactactgctaggcagcctgtgagagtgggmagatgtcaaatggctcacgtgtaaatgccagtgctgtcagcccatcctcctagacattgttgtgactattaattttgtgtcacctctcatactttcatttctggtttgttctgtgagaatttcctgtttatgtgtcagcttcccctacaatgatagtgagttacttaagaaaagggactatatatgcttggctgtgtgtctccaatgctaaacatagcatctggaacataatatgccctccatatgtgtttattgtatatgaatgaaaattcattgaatactcacagaaaattcatataaatttattgttatttaaagatgcttaaatctgtgaggctatcacattatctgatttacattttttcaggtatttattttcctctttccttctataattggtggtatttctccctgggagagtgtttgtgtgctacgga

SEQ ID NO: 64255 - DNA, 855 bp, Homo sapiens
ccactccccataaaacgagtacccaccacacccaggcacaaaggggacggtaggtggggtgagtccctgctgtctggctgagatctggcagtgcaggagctaagcgggggacacagatggacggtgctgggccgggagtccctgcaggctcccctgaaggccccctcctgtatgggtggatgtgggcatcagggcgggtggggaatgcccttgtgtcagggctgtgagcaatagaataaccccctgccccagcaaagygcctggcagtgctgggagaccctggcaactcctcccacctgggcagaggtgcccccagaagagattgtcccacaggccacacgcctgtcccaggaccaaagctgccccgaccattcccctcaaagccagtttccctgctagcgcccattctcaggtgctgacgcagagcaagacgaggggcgcggggctgccaaaggtgcttctggtccggggacacaagggaagccagcaggcgacgcgggtttcaagtgaggcagactggtcttgggctccagaggaagcacagggaggtgaggaggtgtgtggggggctgcagacgggctttgcaaggaggcgtttgcttcagcaggcgggccctaggagctttcccactgtgggttcctgattaagcagaggccagaggcaggtagagccagagtccacaggaggctcctgacgtgcgtgagaagtctggggaggtaggtgaggcaggctgtggggaggtggacacccaggaagccacagagcgtgaggacgggcccaccccaagtagcaacatgttttatgtgggcctcagcaggtcaaggagggagatggtgccgggggccaaggacccaa

SEQ ID NO: 64256 - DNA, 524 bp, Homo sapiens
atattgttgtgaatatttttccacctcattaaattttcttctaccctgtcattttaaatgactacataacattccactatatggacatgccataattggaacttcatttttcacaaataaataagtaaatcttgggkaatttctcccgcaggtcaagcataattgctgcaagaggtggtagagcaatgctgaggccaggatgggaggaaaggaggagcgcagggagtgggaatattggttggagttttgatttgaggatctaccaggggctttaagaaatgggagctggtgagagacatttaaaagagaaaaactgcccaagagggaaggagggaggggaggtgatagactggataaggtttctgagatggattacatggcttggctgtgtgcccatccaaacatctccttgaattgtagctcccataattcccacatgttgtgggagggacccggtgggggctaattgaatcatgagggtgctttcctccatactgttctcctggttttgaataagtctcacg

SEQ ID NO: 64257 - DNA, 524 bp, Homo sapiens
atattgttgtgaatatttttccacctcattaaattttcttctaccctgtcattttaaatgactacataacattccactatatggacatgccataattggaacttcatttttcacaaataaataagtaaatcttgggtaatttctcccgcaggtcaagcataattgctgcaagaggtggtagagcaatgctgaggccaggatgggaggaaaggaggagcgcagggagtgggaatattggttggagttttgatttgaggatctaccaggggctttaagaaatgggagctggtgagagacatttaaaagagaaaaactgcccaagagggaaggagggaggggaggtgatagactggataaggtttctgagatggattacatggcttggctgtgtscccatccaaacatctccttgaattgtagctcccataattcccacatgttgtgggagggacccggtgggggctaattgaatcatgagggtgctttcctccatactgttctcctggttttgaataagtctcacg

SEQ ID NO: 64258 - DNA, 1845 bp, Homo sapiens
gaccacagtattgtactgttctgtacacacggggctcagggtctgtaggtgaaaatggatgtttatgggagtctccccaggtggagcagactgatttctctcgtggccatgcctcttagtcctcagcaagaggaacccaatgccaagggtcttatgaacgacccagaaaggaagcggaggctactgcagccagcaaaaggaatagggaggtgcagtggggtgggatcaaaactacctccttttgatctctgtctttacaaagacaatctgaccccatgccagccagcccttttacataggattgaggggagcacatgcctagccttttcagactcggagggggggatctttggaaatcttccgtgattcttgttatgttgccgagggagcctcaggattgtgtaaagtcaaaataccacatgctctgtgaccttgagccattggatcttagcttccttattgataaacagaaggggtaataaaaaaatctatgtcatacatgtggggattaaatgccagaatgccacctttctaaagaaaaattcaatacctacttttccctgggagagtggtctgtaaatgcagggtctcaggcatctgactgctagttttctagacaaattcccccttttctgggtcctggacctcagtgtagtgtcctagacctcagatctgtcctgtcaattgaactcggatccactcgtttacattaacaaaagcatcaagaggcatatgttggaatggtactatgagatggactgtatgtaagttgctctggcctgtccagtctattctttctctgcacgcaagccatatgggtccaaaacttatcagagggatgtttgaggatcatagattcagaaccagagaaaagaattctatgactccattgtcaactggctttgtcagactgaagcatgtatctttatggcaggtgcctgcctgtcagatgaacagacactcacagaaccctggagggcaggtttggaagatgactttctcctaggaaggcacaatacgattgattagggttctgcttaccaaattacaatctcactccaatattatctctctgagtttgctcccaaatcaccttgactggagttttgggtgtttataaatcctcaagtcacccaattacagataatctctgcactgacattttcagttgccaaatcacttccactgtgtgtgggttttgctaggtttagctcacaggggaagatggcattccccatcctgaattcttggagttctccttatctcatgattaccctcctgtagactaccaatgtagaagtwgagctgaacaaccaagggttattattactgaaacattggggtgtgtcatcattttgtgttgttaataacaaaagttagacctcagatctcagcttccagactggggactctctctcctgggtataaggatagtaaactaatttgtgaagtgccaggaacacttacctgactatcagtgtccaatattctctgtcttgattttgtttggtctcacatagccctcctaagaagctgatatcttgacatatgttaactgctcattgctttcagcattaatgcagtgggtttattccatctgaggagctgtcttctcctctgttggtacagaacatcagtcagtgaattgtataaatatttctttgatgcctactctgtaaccagataaacacagaaggccatagaccacaagtcatgatctttgaagagaaaactcctgagtgtttggtcagcagacattgcaagtgacagtaggccatagaatctttttagggggctgtggggcaagctcttagggtatgcaggggccctcctcttttcctctct

SEQ ID NO: 64259 - DNA, 560 bp, Homo sapiens
tccttgttgagtttgagttacatagggtcagggcaaggagctgtggctacagaacatgattttgtcatggtgggtggtcaaaacaagtcaaccctttatgaatggcaaacatgcctatgtcaaggtcattgggttcattgcctcacattccccagagcaatcaccaagtttcctccacttggtccaagagctggtcctgaacaatcaatggaggctgggagttcccaggagttacccacgcctactgctagaagaccttaccttgctggggtcagccacgctgatcaaggcatcatataggttctctagcctctcccagttytttccacacagcaccagccttgccccacctgtgtggaacacccgagcacactctgtggggaagaaggaaacagggcagggcacactgtgtggatggagccactgacagtgaaccccctctcttgggaactcatgaattcaaaaaactcagaagtcttagcaccacgaggtcctttaggggtcacttcattgaactccctccccgggctggaatttttgtcatttccagcctctgctta

SEQ ID NO: 64260 - DNA, 671 bp, Homo sapiens
tgctcagttgcagacgtctccttaatgggtgtatgacctcaggcaagttacttctctaagacagaacactataatgtatctcaagacactttggcgatgactaaataagartgcacctagtatagaagaagtaatacatggtagttttaaaaaaagtatcaacatttggtacaaatattccataaaaataaagaactccttttttttagatctacttctgtgttctccaagcaacttttaaagccacttaatcgggtctcctaagtgggcctttccagggagaaagaaccctgaacaaatgacttcctttagtcctcaaactggatatgaaaagttactcatgttaagttcatcatgtagcaggccaatttgtacatcattgttgtgcttgataagtgtaatgcatctttcctaagtcctttttttaaagtcccttttaattattttattttacttattttgggacttatttatttatttggaacctctcaatcagaggtccccccagagtggtctcaaacccctgagcttaagcaatcctccctcctcagcctcccgagtacctgggattacaggtgcatgccaccatgcctacctccctcaagtcttatcctcagcgaatgggatgataaaatccaatttctgatcttcttaggaaggaaccaggccat

SEQ ID NO: 64261 - DNA, 1430 bp, Homo sapiens
cgtatcttaaaaatagatgtacataacttacattttcatcttatataacaacctcttatgttactttcctctttgtaaaacacataacacgttcagggctcactccctcaccctactattctaggattcagtgaacgcatgtgtgttactgtgagccatatgcttcgtgagttgttagagtctgaacttttcttagtcttcgtcttcccagtctgaagatgttaatttttacaaatgtttctctgggcacctgtcccttcacctgtttgtcacttagctacccccctttgaattagtgctattggttctgaggggctatcactggcaccttacacagttgagagtgtagttgcagcagggctcagatgaattgtaggtgggttctcaaccgtggccaatttgtactgccctccttttgctatggatagaagcaaattccaaacactaaaggagcctgaagaatggtctgtttgtttccagtatcattttgttttgtttttgttttctattactttcaattacttaatttttagcaaaagaagcatatgtaaatggttgttaaaaatcaaatagtactaagcgtaacaatctatcaattccattctctccctgtgccacccttctgatacccaccaagttcattctgtttgtgcttagtaaaccagttactgtgatgatgggtcttacaaaagatttattcacagggcagataaaacatttattcacagggcagcccaataaggaggtgggagaacagctctcaaagcctgcctgaagataagacttagggatatttatgggttagagaagcagggtggtctaaggcaagaggaaaggtgattggcaatggggaaaaataaagtcactagtgatctgtgcaagcatagtcagggttcatggctcttcacaagatgcatgttcagaaaatggtagcattagcatgttctaagggtagagtttttggctttctgacatcaaaaggccacctctcaggcacttgcacaggatcagctgaaggatcagtggtctcaaccagtttgaactggataggagctgccccaagttcctgaaaaacaagcagccattaccatggtgacgtgtacatcagaaatgttmtccgtaaggaagccaggagtttagtggcgtggcttttagctatatggggacgaaagaaagcaagcaaccaaaagcaagcagggcaggttaggtttggtggacctaatcagattagcttctcagttttacttccaaacccccaaagccctcggtcttcctgccctgttccaggctcgttgcagtctagagctatcatcatgagacttccctgcgccactcccttatcttggaatgctatttcttaggtcccattgaattatcttctttagtttaccttttctgggagtacatccttcagcagcttcctaagaaag

SEQ ID NO: 64262 - DNA, 1430 bp, Homo sapiens
cgtatcttaaaaatagatgtacataacttacattttcatcttatataacaacctcttatgttactttcctctttgtaaaacacataacacgttcagggctcactccctcaccctactattctaggattcagtgaacgcatgtgtgttactgtgagccatatgcttcgtgagttgttagagtctgaacttttcttagtcttcgtcttcccagtctgaagatgttaatttttacaaatgtttctctgggcacctgtcccttcacctgtttgtcacttagctacccccctttgaattagtgctattggttctgaggggctatcactggcaccttacacagttgagagtgtagttgcagcagggctcagatgaattgtaggtgggttctcaaccgtggccaatttgtactgccctccttttgctatggatagaagcaaattccaaacactaaaggagcctgaagaatggtctgtttgtttccagtatcattttgttttgtttttgttttctattactttcaattacttaatttttagcaaaagaagcatatgtaaatggttgttaaaaatcaaatagtactaagcgtaacaatctatcaattccattctctccctgtgccacccttctgatacccaccaagttcattctgtttgtgcttagtaaaccagttactgtgatgatgggtcttacaaaagatttattcacagggcagataaaacatttattcacagggcagcccaataaggaggtgggagaacagctctcaaagcctgcctgaagataagacttagggatatttatgggttagagaagcagggtggtctaaggcaagaggaaaggtgattggcaatggggaaaaataaagtcactagtgatctgtgcaagcatagtcagggttcatggctcttcacaagatgcatgttcagaaaatggtagcattagcatgttctaagggtagagtttttggctttctgacatcaaaaggccacctctcaggcacttgcacaggatcagctgaaggatcagtggtctcaaccagtttgaactggataggagctgccccaagttcctgaaaaacaagcagccattaccatggtgacgtgtacatcagaaatgttctcygtaaggaagccaggagtttagtggcgtggcttttagctatatggggacgaaagaaagcaagcaaccaaaagcaagcagggcaggttaggtttggtggacctaatcagattagcttctcagttttacttccaaacccccaaagccctcggtcttcctgccctgttccaggctcgttgcagtctagagctatcatcatgagacttccctgcgccactcccttatcttggaatgctatttcttaggtcccattgaattatcttctttagtttaccttttctgggagtacatccttcagcagcttcctaagaaag

SEQ ID NO: 64263 - DNA, 1430 bp, Homo sapiens
cgtatcttaaaaatagatgtacataacttacattttcatcttatataacaacctcttatgttactttcctctttgtaaaacacataacacgttcagggctcactccctcaccctactattctaggattcagtgaacgcatgtgtgttactgtgagccatatgcttcgtgagttgttagagtctgaacttttcttagtcttcgtcttcccagtctgaagatgttaatttttacaaatgtttctctgggcacctgtcccttcacctgtttgtcacttagctacccccctttgaattagtgctattggttctgaggggctatcactggcaccttacacagttgagagtgtagttgcagcagggctcagatgaattgtaggtgggttctcaaccgtggccaatttgtactgccctccttttgctatggatagaagcaaattccaaacactaaaggagcctgaagaatggtctgtttgtttccagtatcattttgttttgtttttgttttctattactttcaattacttaatttttagcaaaagaagcatatgtaaatggttgttaaaaatcaaatagtactaagcgtaacaatctatcaattccattctctccctgtgccacccttctgatacccaccaagttcattctgtttgtgcttagtaaaccagttactgtgatgatgggtcttacaaaagatttattcacagggcagataaaacatttattcacagggcagcccaataaggaggtgggagaacagctctcaaagcctgcctgaagataagacttagggatatttatgggttagagaagcagggtggtctaaggcaagaggaaaggtgattggcaatggggaaaaataaagtcactagtgatctgtgcaagcatagtcagggttcatggctcttcacaagatgcatgttcagaaaatggtagcattagcatgttctaagggtagagtttttggctttctgacatcaaaaggccacctctcaggcacttgcacaggatcagctgaaggatcagtggtctcaaccagtttgaactggataggagctgccccaagttcctgaaaaacaagcagccattaccatggtgacgtgtacatcagaaatgttctccgtaaggaagccaggagtttagtggcgtggcttttagctatatggggacgaaagaaagcaagcaaccaaaagcaagcagggcaggttaggtttggtggacctaatcagattagcttctcagttttacttccaaacccccaaagccctcggtcttcctgccctgttccaggctcgttgcagtctagagctatcatcatgagacttccctgcgccactcccttatcttggaatgctatttcttaggtcccattgaattatcttmtttagtttaccttttctgggagtacatccttcagcagcttcctaagaaag

SEQ ID NO: 64264 - DNA, 701 bp, Homo sapiens
atccttcttcctttgcctcccgagtatctgggactacaggcatgtgcccagtgagccttcagacatttaaaaccatgttgtaagtgacatcagtgaaaatggtggaataaagacatcgaggctgggcgcagtggctcacgcctgtaatcccagcactttgggaggctgaggcaggtggatcacgaggtcaggggatcgagaccatcctggctaacaaggcgaaaccccgtctgtactaaatatacaaaaattagctgggcgtggtggcaggcgcctgtagtcccagccactcgggaggctgaggcaggagaattgtgtgaacccaggaggtggagcttgcagtgagacgagattgcgccactgcacactccagcctgggcaacagagtgagactctgtctcaaaaaaaaaaaaaaaaaaaaaaaaaaaaaaaaaaaaargagacatccaaaaattcatcccttcataaaagcaacaaacaccaagaaaagggcaaaaaaaaaaattgaccataataaactttttcagaactctagaaatgtaaccaaagtcttgcagcaacccgaggagcatttattcaagaaaaatttctgtaagaacagtgagatttgtgttaacttgccttagaccattcctcactctctagctcagtagttgccttgaaaaacagcccacatccccaagcagagggagcagaatgga

SEQ ID NO: 64265 - DNA, 701 bp, Homo sapiens
atccttcttcctttgcctcccgagtatctgggactacaggcatgtgcccagtgagccttcagacatttaaaaccatgttgtaagtgacatcagtgaaaatggtggaataaagacatcgaggctgggcgcagtggctcacgcctgtaatcccagcactttgggaggctgaggcaggtggatcacgaggtcaggggatcgagaccatcctggctaacaaggcgaaaccccgtctgtactaaatatacaaaaattagctgggcgtggtggcaggcgcctgtagtcccagccactcgggaggctgaggcaggagaattgtgtgaacccaggaggtggagcttgcagtgagacgagattgcgccactgcacactccagcctgggcaacagagtgagactctgtctcaaaaaaaaaaaaaaaaaaaaaaaaaaaaaaaaaaaaaagagacatccaaaaattcatcccttcataaaagcaacaaacaccaagaaaagggcaaaaaaaaaaattgaccataataaactttttcagaactctagaaatgtaaccaaagtcttgcagcaacccgaggagcatttattcaagaaaaatttctgtaagaacagtgagatttgtgttaacttgccttagaccattcctcactctytagctcagtagttgccttgaaaaacagcccacatccccaagcagagggagcagaatgga

SEQ ID NO: 64266 - DNA, 748 bp, Homo sapiens
ccaagaggagtgtggctgaggagtgagacgaaggtctctgggacactttcagaaggatgagactttgtccagccagtcctcattatgccaggcaaaggaactgcctgtactcataactgtggaaggggaaccacataccatgggcaggtggtccatgggggcagtgattaagagcaagtcctagaactcacactgccttttgggagttaaactgaaacgaactcacaacccccagatcccagacatgcatcacccttgagaggcccctactccctgcacctctccttcccagtgcttagcacaagtgtaattatgatgtggataatcatttgtctaatttaatgtctgtccccaaagggcctttgtctgtcctgttgtatcactctacccctaggacctaacatggtgcttggcttatagtaggtgctttgggttcaatgaattaaaaataaatgtttttaaaagaaagactgaatgggtctctacactataaaacttgacagcgaccccaacatctcccccaaaataacatcaaataaaaagcacgtggctaactgatagaagtacagaaagatgaggaccacaggggcagacatgcagggcacagcctggyactgtccacaggccaggagcccagcaggcccacatgagctggcaggctattcagtggcacctggtgactacctactgaataagcagtgaatgaatccacaacttccctgtgagacagacacaggacgggggcagg

SEQ ID NO: 64267 - DNA, 748 bp, Homo sapiens
ccaagaggagtgtggctgaggagtgagacgaaggtctctgggacactttcagaaggatgagactttgtccagccagtcctcattatgccaggcaaaggaactgcctgtactcataactgtggaaggggaaccacataccatgggcaggtggtccatgggggcagtgattaagagcaagtcctagaactcacactgccttttgggagttaaactgaaacgaactcacaacccccagatcccagacatgcatcacccttgagaggcccctactccctgcacctctccttcccagtgcttagcacaagtgtaattatgatgtggataatcatttgtctaatttaatgtctgtccccaaagggcctttgtctgtcctgttgtatcactctacccctaggacctaacatggtgcttggcttatagtaggtgctttgggttcaatgaattaaaaataaatgtttttaaaagaaagactgaatgggtctctacactataaaacttgacagcgaccccaacatctcccccaaaataacatcaaataaaaagcacgtggctaactgatagaagtacagaaagatgaggaccacaggggcagacatgcagggcacagcctggcactgtccacaggccaggagcccagcaggcccacatgasctggcaggctattcagtggcacctggtgactacctactgaataagcagtgaatgaatccacaacttccctgtgagacagacacaggacgggggcagg

SEQ ID NO: 64268 - DNA, 598 bp, Homo sapiens
caagacactctctcgaggaaaaaaaaaaaaagaaaagaaaaacaactcaagggttggataacattgccagtataaccataattcaaaacaagcagcagaatttggaggataatttgtttaattctcaggaaaatgtgaaactctgaaactgctttttgagtgcagggtatttccggggcttttcctaaagtcttaacccttggctctgaccccttatttgaagtttggagagcagaaccgaggattgtattactacagttgtggacacaggagaggggttagtctccccccgctccaggagtaagggatgctgggctgctcgaacacaggccttgttagaactcccttcaaacaggatcccagagatgtggggagaaggtaactggccttaagaatgattgcgctacagcttttgaaaactataatgcctttcaaatatggcttattgcttggatctcaatatctcccacgtatcttgggtggaatattttgctgaagatctttctgtcaatcatttacaatcatgtgctgcaaaatgaagtttgsgtcaacagtagaccacatatatgatggtggttccgtaagcgtataatggagc

SEQ ID NO: 64269 - DNA, 664 bp, Homo sapiens
agagcatctctacagccagagcagccctggcgtcctctgccctgccccaagcctggttagtgttctcagccatggtgtcctccatccacactgctggagggtttcaggccccttcccttctcctggcaccatctccaggctggacatgtctggaaggtgagggccatctccacttgtcctcacccctacctctcatcccgagttcactagcaaggtcacaaaagcatgtgtatgagatgcacacacaaagaggccaccgctgggagcactgggccaaagaagctacaggatcaattccccaatcacactcaattgcattcattcactacacacctattaatgaggactcatgactgcacctctaccagccattgctccacaaggtaaaatcaccrtcgagacaaaccagaaggaggactggaaaaaaaaacaaacaataatggcctctaaagttgtggcagtactgcgaaaaggagtctccttccagggtggacagcaggccctgatcagaggagcaggctaagggtgcagtgcgctcaggtatggataccaccgcccctcatcacccacaaccagccacactcagggctggtggatctgaggcctggagccagttagggagctgcccagccacagtccatcagagccagctgagaacctggca

SEQ ID NO: 64270 - DNA, 2057 bp, Homo sapiens
ctgggacccatggcccagccaagcacatataacaaccatcatgagtggtctatagtttttctctgattgtctcttcaatttcagatgaaatcagttccttatagagagaagttaaaraaatcattatgaagagagcaatagcccagtagaaaaatgttcaaaaagcacatacggaattataaccacctgaattcttcctgcctgctgcataaagaccatggcattatagtggagaaaaagtttaagagacccaaggctggtcatgccacatgggagacagagtttgttctggaatcatctcgtgctcacaggttagaggtttttcaaaggcagtctggcagaaggggtggggatggtgaggtaacagttacttgctgctgattgtatgaaatcacagggggggtcagagctgtcctctaggctgaatggcttctgggtggagccataggagcagggttggtgggtccaagtagagccatgagtgtcagacatgccaaaaaacctgaaaagatactctaagggccaatctacaataatggtgtgattgcaggggtaattggggaaggtgcatatcttataacctccagaataatggctgatactcgtttatgtctgcaccttagcaggatccgggctctcctccttgcccccagcctgatggcctcccattagctttacaaaagcagctgagttttgggggaggcctattatcatttaaagtataacttaactgtctctcggccaggcgtggtggctcatgcctgtagtcccagcactttgggaggctgaggtgggtggatcacctgagatcaggtgatggagaccagcctggccaacatggtgaaacactgtctctactaaaaatacaaaaaattagccgggcatggtggtgcaaacctgtaatcccagctactttggaggctgaggcagtagaatcacttgaacccaggagagagagattgcagtgagccaagattatgtcacagtagaaagaaaagaaaagaaaagggaaggaaggaaggaaggaaggaaggaaggaaggaaggaagggaaaagagaaagaaagagaaagaaaaagaaagaaagagaaagaaaaagaaagaaagaaaaagaaagaattttgtcccaggaagagggccggcctgatgtggttccagcaaactgacacaggccaaagtgtgcatgttacagagaagatcaggagggtgtcaggacttccaaacaccctggagcaaattctggaggcccagctgttgccattgatgtggcagatcccagcatacgaggagcaaaggagagatgaccttcttctggctctgagagtccataaccctttgaggaagattaagcaacaggcacattctcacatttatttaatctttaacacccctactggctaggtattgttaactgaatatcacagatgaaggacccaaggccagagaactaagagctatgcctggcctaataccttttccactacagtgctccctgatggtggactttcatatcaaaaaagcacaaacagttacaagcagttacaagcagtagcagtaatagaagtaaaaatgatgcaataatgccatgcaatagaatgcttattatatgcccagctgggttctcagtgtttggcgtgtagcaactcagtgaatttctgcaacagcatcataaagtaagtactattattaattccatcttgcagattaagaaactaagtgtggctgagaatatagatggcagacatttctttcagatcttacaacttagaagggctctggataatttggaattgctagtacctgtgtctctttttctggaggcctttttctgatgccaggaaggtccgctgtacctgtttttaaggcaaagagaagtgccgagaccagctcagttggggagaccctaacccagtggtgctagaggaattaaagacacacacacagaaatatagaggtgtaaagtgggaaatcaggggtctcacagccttcagagctgagagccccgaacagagatttacccacttatttattaacagcaaaccagtcattagcattgtt

SEQ ID NO: 64271 - DNA, 582 bp, Homo sapiens
gtatctggatgctgagtgaagatgagacatgaacagaggcagaggccagcatgagcttggacctttggagatgatgactagaaccagggtaggagaggaaagggaggacctgaggtgacccccgtgacctccaccaatggtgaggaaatagcaatggtgtgtgcagcgatcacggtgtctctcgttgaagggtacatctatccaaccatacccatggatgtcgcacccaaccatggtgccctggcctccacctgaggggagatacgccatgaaaaagatatgctgtgtttctggccagcgcttgggtaccaacctgagcctttgtgtaaggtggtgtttgcgggaaagcctcataaagaattgtcagcgtaggaggcagagcaaatgctctccaagctccccatagtcagggactgtgcacagctgaagaacatcrgagaaacatgcacagagaagccactggaaaaaccaccccaaacccccaaaccgtcttataaagaacacacccatgaagacagtacactaaatggtttgggaaagaaagttaatggaaactttttttattttattttatttttttga

SEQ ID NO: 64272 - DNA, 741 bp, Homo sapiens
tcctcccactgagcataatgaataatcttgaacattatgagtagaacaagcattagacagctcagaaggcagactggctggggcctcaggatgcaagaatggcacagaggtgagttcttggactcacctcagggcagaggactccagcaatatagaaatgcyaacaggcacaaagaaagccctggcagaagaaaggagcagcctacccagacagaaaacttagacagtacccactcgactccagccacaacacatgcaaaacactgctgcccttccccatccacacaagccagatggggccccagactctcacccccacctggcagtaacaagccatcagtcacttctaagccagagcagtatcaaaggaaccagctgcaacagaaggttccagtgagataagtaagacccagagtcttctgacatagtacgaaatgtgcacctctttcaatagaaaatccctgtcatgccaagaagcagcaagatcacaaagtggatgaaacaaggcaagccatagatgccaacatccagcatagaggtgctatcatagagtgacctcacagggacttaaagcagccacagtaaagatacttcaagggcaatggcaaacataattgaaacaaatgaaaaaacacaaagcctcagcaaagaaattgaaatcctcaagaaagaaatagaaaatacaaggaagtaaacaaattttggactgaaaaatcaaataataaaacaagtttggatatt

SEQ ID NO: 64273 - DNA, 1048 bp, Homo sapiens
taattttttaagctagtttatatatacacataaaacaaaattaaaaggttcaaaagggcatacagtgaaacgtaagtctctttttacattgtgtcccagttttcctacccaaagcaacctctattgccagtatcttgtataatctttgagatataggcacatatacacacatgtgcgttttaaattcctcttttttaaggcattgatgagaattataaattgtggatggttaaagacagtggtccctcttctggtccaatatggtttccttgtctttttgtgttgttcccctttcattgagcctagtccccctaatattttgcagatttttcagtccctttatatgtttcccaaattctagtattgaattttttacaaatggtattcctaagaaagtttacttctacaatatgttctataacatttctagtagttatacaaaaaaaaagttcatggttcccttaaactygctcggagtacctaattttgtacctccatatggaaaggagaggtattttaattctgtttcttttggcagaaataataattttttgattgagctttagctaataatggattttcatgtttatttctgatttcagctaaattataaactctgtaatagtaatgaccaggccttataccttgtatttcttatagcacgcaatgccagcactgctctgaagacagcagatatttaatagtgtttgtggattgagtgattaaatggaaaaagcagatcttcaaaccttgccaagaaagcaaaaaatgaagcaaaaacaaaataaaaatttcagtacagaaaacaaataccaagcgaaatcacaaactgtttgttccctttgcaagtgtctggataacaaataggtgagaaatttttaaagttctattttatttataattgacgcataattgtacatatttatggagtacagtgtgatgctttaatacatgtatacatcgtaccatgattaaatcagggtaattagcacatccaacaatttaaacatttatcatttctttgtggtgataacattcaaaattcttt

SEQ ID NO: 64274 - DNA, 561 bp, Homo sapiens
tttatggctgcatagtattccatggtgtgtgtaccacattctctttattcaatccaccatttatgggcacctaaattgattccatatctttgctttaaatacttttaaagtgattgtgtattttgaagttttatttttcctttgtgtaggttttaactgttctcctttgctgttttttaaattataatagatctattattcttttcatatttttttttgccctatgtgtaacttaaatcatctagtttgakttttttggttaattctcttaggttattatattttaaaattatattagaccacactatacacaatgttctccatgatgcttttttaacataagaaaataagatgattgcccttttatattgatcacttcagtgtaatacccacatacttactttaattgcttcctagtaagctttagtttgtcatttttttaagaaaatctcctcatttcactgatttatttttaaatgcaatattgaaatgaatatttttgtgcatggagatttttgtgaagcaacctaagtatttctttaatggaaatcactgtaactt

SEQ ID NO: 64275 - DNA, 561 bp, Homo sapiens
tttatggctgcatagtattccatggtgtgtgtaccacattctctttattcaatccaccatttatgggcacctaaattgattccatatctttgctttaaatacttttaaagtgattgtgtattttgaagttttatttttcctttgtgtaggttttaactgttctcctttgctgttttttaaattataatagatctattattcttttcatatttttttttgccctatgtgtaacttaaatcatctagtttgatttttttggttaattctcttaggttattatattttaaaattatattagaccacactatacacaatgttctccatgatgcttttttaacataagaaaataagatgattgcccttttatattgatcacttcagtgtaatacccacatacttactttaattgcttcctagtaagctttagtttgtcatttttttaaraaaatctcctcatttcactgatttatttttaaatgcaatattgaaatgaatatttttgtgcatggagatttttgtgaagcaacctaagtatttctttaatggaaatcactgtaactt

SEQ ID NO: 64276 - DNA, 666 bp, Homo sapiens
gcatctggtgagagtcttcttgctagtggagaccctcggcagaatccaaggcagtgcagatcatcacatggagagggggctgattgtgctaccccaggactgtttctttttataaaaccaccagtcccactcccacggtaacccaataatccacctctcaatattgccacattggggattaaatttcaacatgattttgggaggtgacaaatattcaaaccatagcactgtccttccactgcttcctctcwtccttgattccttccttccttcttcctttctgtaatgtaccaaatatgaactgttctcctttacatgatgtattttctttacccccttcactcctgactcctctactcctttcttatatcttgcagctatcaatttgtccattcctcaggaaaaccttcctttaaccttcaaatctggtatcctaacaatatatcctacttgtctcattataccatatttttaacacatatacattattcttaaaatacatatttgaacaaatatgtttctcataaatttattctctatattttacatatatatttgtctctacaaatctctcattttcacaaataaaaaagttcaattaattactcaaaataggaataatataaactattttctctcaaaaacactagatgctgagagagagag

SEQ ID NO: 64277 - DNA, 1236 bp, Homo sapiens
ctgggatcatgagtattacattatccagtatccacctcacttgtcactcattatatggcagccattttactttagtagaacagacacaaccctcaagtccagaggtggcttatcctgtttagtataagccaatccgtcaagagagctcttatccctctttccctagatattgagtccaggatgggcaatgacctaaattggtccccacagaatgaaatacaggacttctgtcaataactgaggggaaagatttgtttcttggtctgattgatgtagtgtgcatctgtgaggactagaaccattacagctacagctgacacataaagaagagctaagagaatcccagagagtttgatcaaaccacatccaaagcttcactacatctggatttttagctgttatgtgaaccaatacatttattatttaaagagtttgtgatgaagatcatgtaatatatgcctaaagttttcattaacatctttgccattacatggcgagtgctcaccggagaataaagtcgaagtgaagcaaagcagcactgggaaagaaagcaggatagattgattgctggtgacatcactggaggtcccttcttcactgtaaattaatgcagtatcctttcttatttaaattaatctgagttgggtttcttctacttgcaaatgtggagtcctgactaattcaatagtgtttctggtttgtacaatttagtggctctgaaatgattatctgattattttctcagtaaaaggggaccaccatgggaactagatttgaaaataaaacaaagaaataaatataatggtcgttcagaactaaattgagtgtaatatagccactagtcagaaaaactaaatttattattcagcccaaatcaccaattcactactttaaatgatagtattgactaaaaaaatagagaaagtttgaaaatggcttaaataaawtaattctgtcacccttaatacctagttaatgcctattctatatgcttccataggatgattattatttgtactacattgcaggcttcaaaggaggcttgaggcttcctctttcaccaaaaccatgaaatgaagaaagattatgtagatcaaggttaaaagcattgctgggttccaatgttaagggctaaaacttccaatatggcaaaggggtttggcatccctgtggcttcattttttaccttgttgttattgttttaagaaatctcctctctttgctttcttcatggga

SEQ ID NO: 64278 - DNA, 453 bp, Homo sapiens
cttcagggtgccgcagcctcactttagtgaggcaaacgttgactgtttgccttgccattgccccgacaacggcggtgccggccctggcacgaggcccaggtgtgtactctgggaacatcgtccctgcagagctgggcccctggaggatcactccgactgagctctccctggctaggggcctgggggacagagtrggggatgcagagtaagcatctcctggtgtctcccctaaaacccagtgctggggagaagcccggccagcccctggcctctgacccagcagcctgaggacgtggaggcctctgggccccttctccgtctcctccctttcccctaccccaggatatgagtcatgcgggccccctccccatgacctcaccccctcactattccacagctgggctccgttctgggaactgaaaggggggcagctctcctggggtggggtggggg

SEQ ID NO: 64279 - DNA, 2333 bp, Homo sapiens
gggataaaagtacttcaaatcctcaaaagaaatcatatacttggttttgtaactccaaatggaaaaaggatattatgataggtcattctatataaaaatttatatcatctttatgcttcttagatattcaatcaataaatcagttatttttgatggcatattgtccaatagtgcaaagtaaggacacaatgtaatagtaaaattgtgatacagcagagtagcaaatgaagtcctggttccaaacacattagttttgtttgtttgtttgtttgtttgttttgttttgttttggcttctttaacaaagctgggaggaaaaaacaagataaaaaataaaagttgttgaggtacttaggttagcctgtaagtaatctttaatattttatgtaattattttcaaagtaaaattttttataggtctaagcttcagagacaagaaagaaagtgttggaatatgatgttgcatgtagaggaataaaatttgtctattaaaaagatttttttaggatttaaaggaaatccacttgataattttctacatgtaggaaaatcacttttgaaattgctgttttttcatctttttccactttttcctaaaaggaggtcaaattaaaacaaataacagagcatgcacttattttgtattttgagaaaataaaatcataatttgagaagaaaaaccctccagtgtgaagatgtgaagattcaaggtgcaaggaattagcagggcaagtacaatgaagtggaataattagagaaagctggtaattaaaygcttctgatgactgaagagaagagaagacaaaagccggctggtaatgtatgcttggcctctctgcagctacaggatacagcacagaatagaagggcttaaaatcagagctgaaagtcaaagggttactgtttctaagaagcattcatgtaaatagggcttggaacctagttataggtgcaaaagtataatactttgttaacatctagtttaagttacatattgtgtaaaagcttttgagacttattacaaagtttatgtaggcaaataaatttcttaaaatatattctccagatcatatttgtattaatattttaatgtacatatcactaatatttacaacattgctttagaggatattaagcataagtagagtgctactctctcaatttattcatacttatgtgaagcttaacttgtcatcagggtgccttgactcagagtattccattcattgaaggtagtttgctcaatttgcaggactagagcttagaggaaaaagagccaggcttgcagatccaaacttgttaactgttggcatgcattcagaggaatttgtgacatatttggagaagtaaacgaaagaagcttgaaatacttatcacattagcaggagaacttattgtcagttccatttatttcttcaagaaatacttaccgagagcatttaatgtaccggaaagtgttcaactctgtagaagcggcactgaatgaaagttgactaaaacctgcgccctcaggggtcttgctttccacgtgctgaagagtagaatttaaacttaattttgaacatcagagaagagggcaatccatcagaactagaagaggtagataaggttttagaagataaaggagaaggcaataagcaaggaactccagaaacaagaacgataactgagatgattaagaaatggtgcaagttggaaatgagggagaaagagcctcaggtagaaaaggtagcagatgaggaagtgcctgggaagtcgagccaaatgatggcaacgctgatgcaaaataaaccagagagcaattttgatattaatttcacacaattagaaaatactagaatgattattttaaaaacggcttagaatgaatgacatcgaatattacagtgaaactaaatgtacatatatttaaatagaaaataaacatattccaaacattaaataaaatgcacatttgtaagaaatttaacattaagtttatactattattttaatacaaagtatcaaagagtctcaatttgtctcagttaaaaattagaagtaaaaagtatacatctgaataatttaaataaacaggctggtctcaaagtcccaacctcaggtgatccgcccacctcggcctcccaaagtgctgagattacaggcgtgggccaccgtgcctggcccaaaaaaatcatattttcaaataacgattttggtaggcctttaaatatataaagcaaagctacctctccaattttgaaaatttgaagaatttttagagtttattttactttgattcctgagaaatcttttgagtaagcaattttttttgtattactgctttttgtattg

SEQ ID NO: 64280 - DNA, 2333 bp, Homo sapiens
gggataaaagtacttcaaatcctcaaaagaaatcatatacttggttttgtaactccaaatggaaaaaggatattatgataggtcattctatataaaaatttatatcatctttatgcttcttagatattcaatcaataaatcagttatttttgatggcatattgtccaatagtgcaaagtaaggacacaatgtaatagtaaaattgtgatacagcagagtagcaaatgaagtcctggttccaaacacattagttttgtttgtttgtttgtttgtttgttttgttttgttttggcttctttaacaaagctgggaggaaaaaacaagataaaaaataaaagttgttgaggtacttaggttagcctgtaagtaatctttaatattttatgtaattattttcaaagtaaaattttttataggtctaagcttcagagacaagaaagaaagtgttggaatatgatgttgcatgtagaggaataaaatttgtctattaaaaagatttttttaggatttaaaggaaatccacttgataattttctacatgtaggaaaatcacttttgaaattgctgttttttcatctttttccactttttcctaaaaggaggtcaaattaaaacaaataacagagcatgcacttattttgtattttgagaaaataaaatcataatttgagaagaaaaaccctccagtgtgaagatgtgaagattcaaggtgcaaggaattagcagggcaagtacaatgaagtggaataattagagaaagctggtaattaaacgcttctgatgactgaagagaagagaagacaaaagccggctggtaatgtatgcttggcctctctgcagctacaggatacagcacagaatagaagggcttaaaatcagagctgaaagtcaaagggttactgtttctaagaagcattcatgtaaatagggcttggaacctagttataggtgcaaaagtataatactttgttaacatctagtttaagttacatattgtgtaaaagcttttgagacttattacaaagtttatgtaggcaaataaatttcttaaaatatattctccagatcatatttgtattaatattttaatgtacatatcactaatatttacaacattgctttagaggatattaagcataagtagagtgctactctctcaatttattcatacttatgtgaagcttaacttgtcatcagggtgccttgactcagagtattccattcattgaaggtagtttgctcaatttgcaggactagagcttagaggaaaaagagccaggcttgcagatccaaacttgttaactgttggcatgcattcagaggaatttgtgacatatttggagaagtaaacgaaagaagcttgaaatacttatcayattagcaggagaacttattgtcagttccatttatttcttcaagaaatacttaccgagagcatttaatgtaccggaaagtgttcaactctgtagaagcggcactgaatgaaagttgactaaaacctgcgccctcaggggtcttgctttccacgtgctgaagagtagaatttaaacttaattttgaacatcagagaagagggcaatccatcagaactagaagaggtagataaggttttagaagataaaggagaaggcaataagcaaggaactccagaaacaagaacgataactgagatgattaagaaatggtgcaagttggaaatgagggagaaagagcctcaggtagaaaaggtagcagatgaggaagtgcctgggaagtcgagccaaatgatggcaacgctgatgcaaaataaaccagagagcaattttgatattaatttcacacaattagaaaatactagaatgattattttaaaaacggcttagaatgaatgacatcgaatattacagtgaaactaaatgtacatatatttaaatagaaaataaacatattccaaacattaaataaaatgcacatttgtaagaaatttaacattaagtttatactattattttaatacaaagtatcaaagagtctcaatttgtctcagttaaaaattagaagtaaaaagtatacatctgaataatttaaataaacaggctggtctcaaagtcccaacctcaggtgatccgcccacctcggcctcccaaagtgctgagattacaggcgtgggccaccgtgcctggcccaaaaaaatcatattttcaaataacgattttggtaggcctttaaatatataaagcaaagctacctctccaattttgaaaatttgaagaatttttagagtttattttactttgattcctgagaaatcttttgagtaagcaattttttttgtattactgctttttgtattg

SEQ ID NO: 64281 - DNA, 2333 bp, Homo sapiens
gggataaaagtacttcaaatcctcaaaagaaatcatatacttggttttgtaactccaaatggaaaaaggatattatgataggtcattctatataaaaatttatatcatctttatgcttcttagatattcaatcaataaatcagttatttttgatggcatattgtccaatagtgcaaagtaaggacacaatgtaatagtaaaattgtgatacagcagagtagcaaatgaagtcctggttccaaacacattagttttgtttgtttgtttgtttgtttgttttgttttgttttggcttctttaacaaagctgggaggaaaaaacaagataaaaaataaaagttgttgaggtacttaggttagcctgtaagtaatctttaatattttatgtaattattttcaaagtaaaattttttataggtctaagcttcagagacaagaaagaaagtgttggaatatgatgttgcatgtagaggaataaaatttgtctattaaaaagatttttttaggatttaaaggaaatccacttgataattttctacatgtaggaaaatcacttttgaaattgctgttttttcatctttttccactttttcctaaaaggaggtcaaattaaaacaaataacagagcatgcacttattttgtattttgagaaaataaaatcataatttgagaagaaaaaccctccagtgtgaagatgtgaagattcaaggtgcaaggaattagcagggcaagtacaatgaagtggaataattagagaaagctggtaattaaacgcttctgatgactgaagagaagagaagacaaaagccggctggtaatgtatgcttggcctctctgcagctacaggatacagcacagaatagaagggcttaaaatcagagctgaaagtcaaagggttactgtttctaagaagcattcatgtaaatagggcttggaacctagttataggtgcaaaagtataatactttgttaacatctagtttaagttacatattgtgtaaaagcttttgagacttattacaaagtttatgtaggcaaataaatttcttaaaatatattctccagatcatatttgtattaatattttaatgtacatatcactaatatttacaacattgctttagaggatattaagcataagtagagtgctactctctcaatttattcatacttatgtgaagcttaacttgtcatcagggtgccttgactcagagtattccattcattgaaggtagtttgctcaatttgcaggactagagcttagaggaaaaagagccaggcttgcagatccaaacttgttaactgttggcatgcattcagaggaatttgtgacatatttggagaagtaaacgaaagaagcttgaaatacttatcacattagcaggagaacttattgtcagttccatttatttcttcaagaaatacttaccgagagcatttaatgtaccggaaagtgttcaactctgtagaagcggcactgaatgaaagttgactaaaacctgcgccctcaggggtcttgctttccacgtgctgaagagtagaatttaaacttaattttgaacatcagagaagagggcaatccatcagaactagaagaggtagataaggttttagaagataaaggagaaggcaataagcaaggaactccagaaacaagaacgataactgagatgattaagaaatggtgcaagttggaaatgagggagaaagagcctcaggtagaaaaggtagcagatgaggaagtgcctgggaagtcgagccaaatgatggcaacgctgatgcaaaataaaccagagagcaattttgatattaatttcacacaattagaaaatactagaatgattattttaaaaacggcttagaatgaatgacatcgaatattacagtgaaactaaatgtacatatatttaaatagaaaataaacatattycaaacattaaataaaatgcacatttgtaagaaatttaacattaagtttatactattattttaatacaaagtatcaaagagtctcaatttgtctcagttaaaaattagaagtaaaaagtatacatctgaataatttaaataaacaggctggtctcaaagtcccaacctcaggtgatccgcccacctcggcctcccaaagtgctgagattacaggcgtgggccaccgtgcctggcccaaaaaaatcatattttcaaataacgattttggtaggcctttaaatatataaagcaaagctacctctccaattttgaaaatttgaagaatttttagagtttattttactttgattcctgagaaatcttttgagtaagcaattttttttgtattactgctttttgtattg

SEQ ID NO: 64282 - DNA, 683 bp, Homo sapiens
atttaggtggaagtacttagcggctgggatgttgcggggctgggggagacgtgtagtctgaattaggaatcaagggggtggataaggaaggcaaagacattccaatgcgagggaacagcatatgcaaagttcaaggtaccaaacacggcagagaatggtgactaagctgttatgaaggaaaatgatcagactagaggatggaaacatagtacctgggaggccacgaaggaccttctctgccctgccaaggaatctacactttatctgaggccacagagagccattaaataccacttaagtgatactatgtgtaktgttaaatgatccacctagaattgagttcctaacgtttattgttcaaataatgcttctgctagactccactaacagtacaatgtagatttcccatttctcagtcatgctactaaatagaaattgactcctccaaagatagtgaccagcattattatttccttcattgcagtgggagagctctgagttatgcctaatgatagattagagggaattcttcagagtagacttttcacacagttaaagaaatccatctgtttaccagggaagtaggataattggaatggtgcttttgaaaaattactcataggcaacattgtgtgagataggtatcagagtctcaaggcagggagatcagtaaggatgctgat

SEQ ID NO: 64283 - DNA, 683 bp, Homo sapiens
atttaggtggaagtacttagcggctgggatgttgcggggctgggggagacgtgtagtctgaattaggaatcaagggggtggataaggaaggcaaagacattccaatgcgagggaacagcatatgcaaagttcaaggtaccaaacacggcagagaatggtgactaagctgttatgaaggaaaatgatcagactagaggatggaaacatagtacctgggaggccacgaaggaccttctctgccctgccaaggaatctacactttatctgaggccacagagagccattaaataccacttaagtgatactatgtgtagtgttaaatgatccacctagaattgagttcctaacgtttattgttcaaataatgcttctgctagactccactaacagtacaatgtagatttcccatttctcagtcatgctactaaatagaaattgactcctccaaagatagtgaccagcattattatttccttcatkgcagtgggagagctctgagttatgcctaatgatagattagagggaattcttcagagtagacttttcacacagttaaagaaatccatctgtttaccagggaagtaggataattggaatggtgcttttgaaaaattactcataggcaacattgtgtgagataggtatcagagtctcaaggcagggagatcagtaaggatgctgat

SEQ ID NO: 64284 - DNA, 284 bp, Homo sapiens
atccccatgaccctaacaccactcataagtcctcatctctcaatatcatcacatgggggatcaaatttcaacatgacttttaatgaggacmaactcaaatcatagcaatgcctttcctgaaaatcataacttacagccagagagaaactttggcactggggagaaatgaaagccattaggtaccaccaagcacagactaggtacttaatcatgttaaatgaaagccataaaaacagacaggcagagagtaatagagatttcacacccatcttcaactagcatgc

SEQ ID NO: 64285 - DNA, 710 bp, Homo sapiens
aatttacttggagctttgtagattgatttcctgactttatgaatctaggagaaaggaaaacagactctggaacatctcaccagacaagcacatgacagcaatacaggcctctttctagggctcagaagccaaacagactttgtacctatttgctctcttcacccccgtggtgtgaaacagacaggaagatgaggtcatttagcaaatcatctgactccagcttgaaatcagtaacccagtaaaaaaagtacttgaggagcatagggacatcaaacctagggacatcaaaagaatgcctggcytgggcattctgataaggtctaatattgaggagaggatggtaaaagtgactcaattgatacttgaccccagaaagtgctcctccagcctccagatgcctggatctacctctaggggtgggaggaactggggaaacaaagccaaactctctcaatcatgaggtactatgatattgcatctgaattctgagtttctacatgctgaaataatactgttttttctacaaaatagtttaatgtaggaagctctccaagacaaatcatagaaatcctagagtgaggttacgacttgtctgcagcacccacaggtaacctagcagtaactggcataagaaaaatgtcgaatgaatgaatgaatgaatgaatgaatgaatgaacagatggatgaatgaactccatggggcacctaat

SEQ ID NO: 64286 - DNA, 710 bp, Homo sapiens
aatttacttggagctttgtagattgatttcctgactttatgaatctaggagaaaggaaaacagactctggaacatctcaccagacaagcacatgacagcaatacaggcctctttctagggctcagaagccaaacagactttgtacctatttgctctcttcacccccgtggtgtgaaacagacaggaagatgaggtcatttagcaaatcatctgactccagcttgaaatcagtaacccagtaaaaaaagtacttgaggagcatagggacatcaaacctagggacatcaaaagaatgcctggcttgggcattctgataaggtctaatattgaggagaggatggtaaaagtgactcaattgatacttgaccccagaaagtgctcctccagcctccagatrcctggatctacctctaggggtgggaggaactggggaaacaaagccaaactctctcaatcatgaggtactatgatattgcatctgaattctgagtttctacatgctgaaataatactgttttttctacaaaatagtttaatgtaggaagctctccaagacaaatcatagaaatcctagagtgaggttacgacttgtctgcagcacccacaggtaacctagcagtaactggcataagaaaaatgtcgaatgaatgaatgaatgaatgaatgaatgaatgaacagatggatgaatgaactccatggggcacctaat

SEQ ID NO: 64287 - DNA, 694 bp, Homo sapiens
actttgcttttaaagagtgaggttttttttaatcatttactcatttatcatctgtttttatatatatttttgtttctgtttttgacacagtcactctgtggcccagactggagtgcagtggcatgttcatggctcactgcaacctctacctcctgggttcaagtgattctcctgcctcagcctcccaagtagctgggattgcaggggtgcacaaccaagcctggctagtttttggatttttagtacaaatgaggtttcatcgtgttggccaggctggtctcaaactyctgacctcaagtgatccacccacttcagcctcccaaagtgctgggattacaagcatgagccactgtgcccagccatatttttacaatttttaatacagaaggtatgaatacactgaagttattttggctacctagtgtctatcttttcttcttctatcaatactccagcttttgtttgcatatccacttacccttctcaatattttcttcttatcactatcccatcagtacttcccatccttcagtccagagttcagggcacaagacagtataaaccaaattgatgcaaagaggcttgtgttgggagagtctggaagttttaatcagtttctgaaagcgctaccaggaaagggcctcttcttgttggttatggacaaggagctaagtaccctggaagctgcttgcag

SEQ ID NO: 64288 - DNA, 721 bp, Homo sapiens
ttttttataggtcagcccacatgagtttttatacagcaaaaatcaatatctccctacccccacctaaaagcatacaaacctttccaatattactttcaaggagacctaagtggcttatcatgatctccaaaatcacacataatttggctcctgcataccctatcacccattcacgttaccaatctaacttactcagacccaatcacaatggattttcttctttctgtcttttgaccacagaaatcttagttccccttgcaattcctttgccctggaatggtctatttcaaggtgaggtctcaacactgacttctttttaaattattttctttcctagttttttacttctttgtttatctccctcctgcttattcacatgtaaaatagaatagaagctgagaggtgacaatgtgttagcagcccttgctcgctctcagtgcctcctcggmctcgaaaggcatctgctctggccacgctttaggagcccttcagcccgccgctgcactgtgggatctcctctctgggctggtggaggctggagccagctccctctgcttgcagggaggtgtggagggagaggcgctggcgagaaccagggctgtgcatggcgctcgcaggccggcgcaagttctgggtgggcacaggttcggtaggccccatactccaagcagccagccagcatcaccagtgccaggcagtgaggggcttagcactcaggcca

SEQ ID NO: 64289 - DNA, 477 bp, Homo sapiens
tgcagtgttccattaccccatccatattgcatgagkggatacctgactctctccacttcccgttctccctcctcctgggtatggccccatcatcctgtaggtccaggtggagccaggtgtaggctccaacctggagctcgcttacagcagagtccaccctttttgggtcacacatctccctgtggaggcttgactatggtttctaagaccccagatccttgttctttatgctgggcaataggaggttggggaaaacctttctgtcctcaggcagatgacctagaaacctcaagcccctctcctcaggattgtggggccaatcttattccccaaacctggccctatcccaaccccaggacctttctttactgttcatatgcaggacaaagcacgttcatatcccagtgagggagcaattgagaatcacccttttcacgtggcagcagctcacaatttagggaacattagcatgttctt

SEQ ID NO: 64290 - DNA, 477 bp, Homo sapiens
tgcagtgttccattaccccatccatattgcatgagtggatacctgactctctccacttcccrttctccctcctcctgggtatggccccatcatcctgtaggtccaggtggagccaggtgtaggctccaacctggagctcgcttacagcagagtccaccctttttgggtcacacatctccctgtggaggcttgactatggtttctaagaccccagatccttgttctttatgctgggcaataggaggttggggaaaacctttctgtcctcaggcagatgacctagaaacctcaagcccctctcctcaggattgtggggccaatcttattccccaaacctggccctatcccaaccccaggacctttctttactgttcatatgcaggacaaagcacgttcatatcccagtgagggagcaattgagaatcacccttttcacgtggcagcagctcacaatttagggaacattagcatgttctt

SEQ ID NO: 64291 - DNA, 563 bp, Homo sapiens
actaaaaatacaaaaattagccaggtgtggtggcacgtgcctgtagtcccagctactcgggaggctgaggcaggagaatcacttgaacccgggaggcggaggttgcagtgagccgagattgtgccactgcattccagcctgacgacagagcaagactctgtctcaaaaaaaaaaaaaaaaagaaagaaaaaaaaagaaaagtrcccatcacaaagtgctcaaaaagggatattcatctactctttaaaaatctttaataggagccacaatttgctccttgtcaggagagccttattctaaggtaataacataatgatttctttactttcccagtctgggtggcataaggggtattgggggtgcttttgggggatgcatgtagtcctctgcttaagtccaggtatgggcagcagacccaaaatgaatgaagcagccttccagcctctgcattcagtgaagttactgtgacataactccttgggacatgacagaactgctttaagagtcttaggaggagtgagagatttggggaaccctgcatgaggtgcagggggtccttaagg

SEQ ID NO: 64292 - DNA, 940 bp, Homo sapiens
tactcagcaggctgaggcatgagaatcgcttgaacctgggagccagaggttgcagtgagcygagatcgcaccactgcactccagcctaggtgacagagtgagactccatctcaaaacaaaaaggccaggcacagtggctcatgcctgtaatcccagtactttgggaggccaaggcgggcagatgatttgaggtcaggagtttgaaaccaggctggccaaacatggtgcaaccccatctctaataaaaattttaaaaaatacaaaaaaattagccgggcatggtggcacgcacctgtaatcccagctactcaggaggctgaggcaggagaatcacttgagcttgggaggcagaggttgcagtgagccagaattgtgccactgcactccagcctggacgatgaagcaagactcccaaaataaaaagggggggagaaattgggggatgtatagccaagaaaagaatgttatgaaataacatactagttttcttcaactgtaggaaaagtaatgtggaagaatacaccaattccttttcttgcttttttttctagacaaggtctcggtctcattacgttgcccaggctggtcttgaactcctggcttcaagcaatcttcctacctccacctcccaaagtgctgggattacaggcatgagcaccaagcccagcctagatcctgtttcttctatcagtctccaaggaataaaaccaggacagataaaacctatgatacatattttcggtctgtaaggcaaatcttccttactatcagaaatataatgaactccctcatgactattacctgccttgtaagcacaaactagtcaagtgcttattaagaaggatatagcacagctccaagcaccaaagagcttgctgcacagaatacttcagatgtcttcaagtggttctcaacactttagtattcaaaagaattaact

SEQ ID NO: 64293 - DNA, 754 bp, Homo sapiens
tctaagatgcacctttctttaccttttgtactccttggatcttttaaactgattcttcaggaaactataggttcaaggtactcttctatatgaccaaccataagtctcagaattctgtttaaacaagaaaaaatgttagatttattcaacttacatagaagtttatcattaaaagggttttaaaataatttttaaaaataaaatttagaactgtcacaaaaatgtatataaccaattttaaattctataaattgtttctaaaagaaaacaaaataacttaaaacatgaataaactaaaacaatcacttaattctggtacagaagttaaaagataaaagtattaaaaaactgtaactataaaaatgttaatgagyatacaacataaaaggataacattgtgacatcaataacaagggaagagtaagaaagttacatttttatatgcaattgaagttagattgttatacgcttaagacagactgttttaactataaggtgtttttatatataagccccatggtaatcacatgtgaggactgacacaagaaaatgagaggggagtcaaagcacaactacaaaaaataaagaaagaaagaaagaaacacagagaaaaacaggaggaaaggaaaagagggacaacagcactacaagaaagacagcaagcccttctctatcagtaatcactttaaacgtaaatggattaaactcctcaatcaaaatacatggagtggctgaatggatttaaaaaaaaaaa

SEQ ID NO: 64294 - DNA, 1605 bp, Homo sapiens
tacaattttcaaaggaatctacttctcttactccagatatagagctsacgtgcttcagaacaaggtgtattagatgcaatattataaaattctacttattataaaaataggaacaagtttaaacttgatctatgattcctactacattggttatatacataaagcaaaatcttttagcatatttcaaaaatatgaaaatgattataaatctgtgtcttactacctatcatttcaggacaggacttctgcttataaaacagttattatcaccagaaatgttaaaatctacttacagtgctcatgacattttgccaaattttctaggtcatccacatgatagtaatcatagcctgatgttcccagaacttcaaatggcaaataccctattatgggtggtgccctaaattacacagaaaacaatcattattataagtttttccataataagaaatatttcaactagaaataaactttggggggggggctttatttttcaaaaaatgggaacaggtttcaaagtcctaatttaaaaaaaagtttgcccttgatccattaatttcaagaattatataacatgactattaccttttcatggaatttaaaaatggaattacctgtgatctagaaacagaaacttccattctaaactatgtctagatgtaaactcttcattgggttcttcaacagtgcacatttcctacaaataaataattaaaatttataaatactttgtgtccttaagaatattaaatattgctacatataaaaataagtcatggccaggtgcagtggctcacacctgtaatcccagcactttgggaggctgaggtgggcaaatcacttaggtcaggagtttgagaccagcctggccaacatggtgaaacccgatttctactaaaaatacaaaaaatagcagggcacggtggcgggcacctgtaatcccagctattcggcaggctgaggcagcaggatcacttgaacccaggaggtggaggttaaataaatacataaataaatagtcattactagataaacttttcctaaacaagttagttgtttctatgtatgtatatatttacctatttctttgtttgacacagggtctcactctgtcactcagcctgaagtacagtggtgtgatctcagttcactgcagcctcaacatcctaggctcaagcgatcctcctgcctcagcttcccaagtagctgggactatagggatgcaccaccacgcccggctaatttttgtatttttatttgtagaggtggggggtctatgttgtctaggctggtcttcaactcctgggctcaagcaacctgcccaccacagcctcccaaagtgctgggattctaggcataagccaaaatgcaggcccttctaaacaagttaatatattttaattttccagtactaaagaatgtggtaataaataacctttagatgcaagcttttgggtgggtacttctcactctacacattttccattcacacatgcctataaacgcttattcaaaattcagacctctctcctgaattacagttccattattccaaatatctgaatgtcctcatacatctcaaattcaatatgtcctaaaataaac

SEQ ID NO: 64295 - DNA, 941 bp, Homo sapiens
ggcaagtcacttaacttccctaagcctgtttccttataatgtaaaatgagggatcgtaatggcatctaacttatagggttgtcataagaattaatgagataatgcatataaaatacacagcatgtagtaagcactcaaatgttaacaactattatttcataagatcaaaacaaaccaagcaagactggcttaagatcttctattaattcagtactttgtcctatactatgatgtccccccaaatttatttgagacagagtcagactctgtctcaaaataaaatgcaaacacagttcactgcagcctcgacctcctgggctcaaatgatcctccygcctcagcctcctgagtaactgagaccacaggtgtgtaacaccatgcctggctaattttttgtattttttgtagagatggggtcttgtcacgttgcccaggctggtctcaaactactgggctcaggcaatcctctcgccttgctctcccaaagtgctgggattacaggcatgagtcacctcgcctggccccgccgaaattttaaatcttagcctggctgcctctttccagtcagtttctagtggttaactctttcactttcccacttccctacttgtcatctgtttgttgggtccaggaaataaaaataaaatacctaattttacatttgaaaaggtaagttatatgtggcaaagagccacttgtacatttcaaataaaaatttaaaagttaccttctaaaaataaagattccaaaaacctagatttttggactttcccttttaatagagataatgaacaacacacaaaaggatcctaaaatcttccacaaaagtagggcaatattgatatataataatcactggttaactgcaaaggatatatactaaaaaattagttatacaatttaatgagtgtcttgataactcatcgtttcaaaaatattat

SEQ ID NO: 64296 - DNA, 596 bp, Homo sapiens
aatgggaggagggcccgcgccgcacctcaacctggcagaggacgtcacgagccaaggcggtcgccgggccaatgggaggccgtcgcgggcagggacggggccgggaggagtcggggctgggccgcgccgaggcagctggctgactccagtttagccgccgccggagaggacgggcgccgagccggggctgcggacttcggcctgcccctcacctcactcccgctgcttgcacctcccggatggtgctgactgctccctaagcggcggcggcggcgagtcgtgaggacgcgccgcggaggctgttcggggtcgaggcttcccgtcgccggcacttcctcttgcggcgcccgtgcgcgccggccggcaggcgggatggcggccgcggctccrgggaacggccgcatcggcgccccggctgcttctgctctttctggttccgctgctgtgggccccggctgcggtccgggccggcccagatgaagaccttagccaccggaacaaagaaccgccggcgccggcccagcagtgcagccgcacctgtggctgtgcagggccccgagccggcccgggtcgaggtgagcgggccgggatggggc

SEQ ID NO: 64297 - DNA, 3565 bp, Homo sapiens
aagcaattctcatgcctcagcctcccaagtagttgggattacaggcgtgtgccaccacatctggctaatttttatatttttagtagagctggggtttcaccatgttggccaggctggttttgaactcctgacctcaggtgatccgcccacctcagtctcccaaagtgctaggattataagcataagctaccgcgcccagccaaaaaactgaatagttttaatatttatcaagtacttattttgtcccaggccctgttctgagtgctttacatatagcttcacaatgccgacatgagatgactaccgtccggtcttcattttacagatgagggaacttaggcacaaagaggttaagcaacttaattaaagttacacagctagtaagtgggagagcaagatttaaacttgtgctatctgcctctggagtagcgtgagctcttaatcactcgcttggaggattgctggagtaactggcttttctcttgtgctatggacagttgacaatttaacctaagcatataacttttcaatatgtaattgacagtagaagtgtgacaggatggtggtttacacacatgtatgatactcttttctaaataagagtttctgggctgggcaggttggctcacactggtaatcccagcactttaggaggctgaggtgggaggatcacttgagcccagcagtttgagaccaacctgggcaacataggcagaccctgtctctacaaaaaattcaaaaaatgagccaggcatggtgatgcatacctgtggtactagccactgggcagtttgagatgggaggattgcctgggcctggaaggttgagactacagtgagccatgactgcacgactgcactccagcctggacaacagagcaagactttgcctcaaaaaaaaaaaaaaaaattctgtaaatgatttgcgagtgaagtggtgaaactttcttttcaaacctttaaatgcttatgagatcttcttttaccctttcaggagtggtcattcactgtaaccacaggatcccatttggagactggtttgaatatgtttcttcccctaactacttagcagagctgatgatctacgtttccatggccgtcacctttgggttccacaacttaacttggtggctagtggtgacaaatgtcttctttaatcaggccctgtctgcctttctcagccaccaattctacaaaagcaaatttgtctcttacccgaagcataggaaagctttcctaccatttttgttttaagttaacctcagtcatgaagaatgcaaaccaggtgatggtttcaatgcctaaggacagtgaagtctggagcccaaagtacagtttcagcaaagctgtttgaaactctccattccatttctataccccacaagttttcactgaatgagcatggcagtgccactcaagaaaatgaatctccaaagtatcttcaaagaataaatactaatggcagatctgcgatttctgggtccactttctgagatgctttctaaaaccaaccaactgataaaaagtagatgagacttctccaagctgcttcacaagcaaactaaccgaaaaaccgaaaatatacaaacagcttcacacacacacacacacacacacacacacacacacacacacaaaggaagatcatcaatggctgcggtagcctagtaggaatggactatataataatatagcaggtgctcaataactgtttgttgcatttcagtaaaagcagaataacctttcaaaataataacaggctgggtgcaatggctcacacctgttaatcccagcacttcgggaggccaaggtgggcagttcgcttgggcccaagagttcgagaccagcctgggcaacatggtgaaaccctatctccgtgaaaaaatatgaaaattagccaagagtggtggcacatgcctgtagtcccagatacttgggagtgggctgagatgggagaatcgcttgagcccaggaggtcaagggtacagtgagccgaggtcatgccactgcactccagcctggcctgggcaacagagcaagaccctgtctcaaaataataataatatataattttacaccaaaagtttcaggaaaaaacgagtttgttggagttagtttatactttcacatatcaccacaaagatctccagttaaataactatcaatatccatttccattcatctccccctcaaatcatagcctaacagaacactttgaaagctcttttatttaatatttttttacatcctttgaagggagtgcttcaaaaatgaaagcatcagaagataaaatatttttatatttatgcatagcaagccttcrtgaacggaagtgacacactctggattgaataatactgtagcctcattcatatgtagttattcaaattggattaatgtctgtgtgagtttatttgaactagcagaaagtatctgaagatattcaggaataaagtttatacttaaaatagcttatgttaaagaaaatacctgtgattaattcagagggaaataaatgcatggtataaaagaaaaccaaaaacttaaaaaataatactatagcctgagcaacacattaaaactgcacacttgtgcagcgtaagattctctggcttattggctgaggtgttaagtttattccttttatgaagatgtcctattacagtcagctaagcactaaagctttgcatttatatgtactttgctatgggggaaagaaccttatgattaataagacacatatcaaatgcatagtcaatcattcccacccccatccctggagctgtaacccaaaactgttaaactaagattcctttgttttttttgtttttttgagatggagtctcactctgtcgcccagactggagtgcagtggtgggatcctggctcactgcaacctccgccttctgggttccagcgattctcctctgcctcagcctcccaagtagctgggattacaggcacatgccaccatgcccaggtaattgttgtatttttagtagagatagagtttcaccatgttggccaggctggtctcaaactcctgacctcaggtgatccacctgcttcggcctcccaaagtgctgggattacaggtgtaagtcactgctcccggatgcatgtcaagcacattggaaagttcttacaacaattctgatggaggattttctctcccatcaaccaaacaccacttaagattaacctgtggctcagtctacttaaataaatgccatatttattttacttatcatttagaatttgccattctcaggaacaaaactttttgtacattggaaatggaaaacattgcagtttggtcttaatttccacatgaatatcaagtgtaatttttaataaattatttggagaaaaatgtattttattttagcatgcaattttatgcccaggttagactagagatttggctgatgttctggaatctcattgtactcttaagtaaaataacgagcatcccatgacgcaccctgtcaggggttgtgagaaagctgcagtgtccagtttcccacccctgtttcctgctgtctctctcccactcatccctgttt

SEQ ID NO: 64298 - DNA, 1234 bp, Homo sapiens
ctattagtgtttatattttaccatatcacataaaatcaaaaaagactgcaataatatattttcatttacccccattcctttgtgctatttttttatatacagcttctacatatttgatgaaacctacaatacattgttagaatttttgcttgaatgaacaaatttaggagaataaaattaagctaatgaaaatatatttttgatatggtttggctctgtctccactccatcttgaattgtagttcccataatccccacgtgttgtgggacccagtgggaggtaatttaatcatgggggtggttaccctcctgctgttctcagtgatagtgagttctcatgaaatcggatggttttataaggggtttgtcccactttgctcagtacttctcctacctgccacatgtgaagaaggatgtgctgcttccacttctgccatgattataattttcctgaggcctccccagctctgcagaactctcagtcaattaaacctctttcctttataaattacccagtgatttattaatagcagcgtgagaatggaccagtacaactatatgtctaccaacatatataccattatcaatatttttattgctggtttaatctcttcagtccaaacaactttctttactattttatgtagtgtatattttttatgatgctgccatgacattttcacattacttaaaaaggggaaaaacatatgccaaccagagttgtatacttggtgaaaacagtatacaaatattaaaccaatttgaagtcattttcaggtaaacaaaaattatggatgttaaccgtggggaggtttgtccagtagtatgtatacaatcagggacaaagtggggaaattgcttaagctatatttgtttttctctttgtatacagcaataaaaatatctggctcaaaaaagagctttgctcagagtacaaggaaaacctgttaagatggaagatggaggttgcaatgcagataataaaaaaattagtggtccctaaattaattttgttatttctttattattttatttttcrtacatatatttaattttaacaattcagtattttttaaattgcttatttcatttagaaatgcagacttcctacttctgttaaaaaatctgcagatcttacattagtccctcatatatactgttaacacttagtggatcttgaaattccaagttctctacagtcatctccactttatcctgcctattaatgaaatgc

SEQ ID NO: 64299 - DNA, 672 bp, Homo sapiens
tagaccacacttacatgaaactctgtagagaartacctcagctatactgcaggccccccatacaaacaaaattgtaggctggagacaatgagagactaatatagctttatgtgatggacaaatttcagtttatcctcatgggtttcagctcattctcaaatactctactttgtctttcttctctctcactttatttctatttttcctttctagcttcaggaccatcatctgacataggggaagaagacttacatagaaggcctaaccagcacccaagatcatgtaaggtttaaactttataatatatccattttgtttctcatagttctccttttctcatcaaatcagaactgataacagtgatccatattttgaaacccagtgtcctgtctgaagtttctgctttcaatgattcccagtgtcttagttcaggctgctataatgataataccatacactgggtaacagaaacaacaaacatttttttctcgcaactctggagactggcaagtgtaagatcaatcaaggcactggaagatttggtatctggtgagggcccactttctggttcatagatagccatcttctggctgtgtcctcacatggtagaaaaggagaaagaattccctggggtcttttttataaaaagggcacaaatcccattcatgaggg

SEQ ID NO: 64300 - DNA, 818 bp, Homo sapiens
tgtagacttggcttacataggccaaagttataagcctacaatgttgaagagataacatcctttcatcactggagggacttaagaggggatctcaaacaagtttgttcattcaccctagtagagtctttcccatcttcaacatcagcaactttctaggcatccaggttcctatcttcaggaggataggagcatcttatgtggctgccatttgctctgggccattgacaagggtcaattgacccatggagtaattcagacaccactgagcaaattgggggagggatcaaatgatgttactcttgctggacaatgtacaggctcatcactgctgctgaatcctgtttattgatgacctgagaaggataactggtacatggtagaggtaatagtatggtacatcctcccctggcaagtggaggatctctagatactgactcagctcctgataactgctagtattgcccacygacctcctctaccaggccaactctgaggagctttgtgacactaactctgctgctggtcacaaggtccctaccagcctctccacttcccacctcctcactgtgtccccttgcccactccaagatacacacatctctccctgagctattctttctaatcctctcagaacgggatggggatagccagctcttcatcctcaaatctattattaaccataaaatgcttttcttttgctaatctgaatatgcaggttcttgcaaagaaattcccttctttaaaagcaactggttttttttgttttgttttgttcttttaaccaaggacctcagaagtgtgcttggaatttcatgtcg

SEQ ID NO: 64301 - DNA, 661 bp, Homo sapiens
ttaatatgtaaaaatgtttgaaacgttagattcttcaggacatctggaatagtcatcttgcaaactcatcatgtgagtgattatcagcttttcaagaacatgtataacctgatggatacaagtttgccacaagttgcatttttattcactttttaagagagtgggattcaggaggtattgcaggtttagcagctacatggcatgaatgtaataaatgtatgaagacaatgaccaacacttaaggaagggcctggaccacattgttaagtatggaggccactgggcacatgtgactcttgagcagcttaaatgtggccagtgcaactgagggactgaatttttaattttgtttaatattaattaagatgtaaaataataagatttcaatttgtatatgttgaaataatattktggatatttttgattaaataaaatagaattatttcactttattctttttactttttgaaaatgtggctaccagaaaacttaaaattatgtttgatgcttacaatcggtttccattagacagtactagcttcatctagaagggtaaggggcaaagttattcggaaagcatttgctggggtatggcatttgtgcaggcatacaaggaactggaacagatgctctgctcctcagctcagccctgggcttgtcc

SEQ ID NO: 64302 - DNA, 661 bp, Homo sapiens
ttaatatgtaaaaatgtttgaaacgttagattcttcaggacatctggaatagtcatcttgcaaactcatcatgtgagtgattatcagcttttcaagaacatgtataacctgatggatacaagtttgccacaagttgcatttttattcactttttaagagagtgggattcaggaggtattgcaggtttagcagctacatggcatgaatgtaataaatgtatgaagacaatgaccaacacttaaggaagggcctggaccacattgttaagtatggaggccactgggcacatgtgactcttgagcagcttaaatgtggccagtgcaactgagggactgaatttttaattttgtttaatattaattaagatgtaaaataataagatttcaatttgtatatgttgaaataatattttggatatttttgattaaataaaatagawttatttcactttattctttttactttttgaaaatgtggctaccagaaaacttaaaattatgtttgatgcttacaatcggtttccattagacagtactagcttcatctagaagggtaaggggcaaagttattcggaaagcatttgctggggtatggcatttgtgcaggcatacaaggaactggaacagatgctctgctcctcagctcagccctgggcttgtcc

SEQ ID NO: 64303 - DNA, 2050 bp, Homo sapiens
  misc_feature (1)...(2050): n = A,T,C or G
tgctcagggcccacattaaggaaatagaggctgagttagtgacagggtggcagtcccatagccttcctgctgtgattcttcgaaatctcaaagatcatggtagtacttactagatcacattgatgttaagcacacaatgggcaaatgcagaattatagttgggcctgagatgtctgaacgatgcttgggtggtaattttaatacaaagagcggagaattctgccttgtttgttcaccattattagtttggcgatttgatggtaacaaaatgccttctgtgttcactgttggttgaaatattatgggctgttttttccaaaatttgcatttctgccgtggcgggaatgttaaccagttgacctattgatgcttcaagtacatacctacaaacaaaaaatagtaaccatgttttacataggtatttytgtaaactctacacctacatgatacatgtagaatgaagaaagtaagtcatatttttttctatctcctctacccttacacaaataattatcttttacttatttatgtttcttttcttttctttttttttttgagacagaatctcactttgtcacccaggctggagtgcagtggcacgatctcggctcactgcaaccttcacctcccaggttcaagtgattctcctgcctcagcctcctgagtagctgggattacaggtgcctgccaccattcctggctaatttttgtatttttaatttagatggggtttcaccatggtggccaggctggccttgaactcttgacctcaggtgatccgcccacgattaaaatgacatatcacattgtttccctaataattgaaaaattatagatccttaaacataaaagtttctaatagaggtttgggaagaatgtgttaatgtttctaatttttgtgaaagaggaccaaagtccatcagtaacatttaaattattagctaaacctagacaattcagaaaaaagtttgatgattatgcttttatcatatgtgtgagcatacaactcttgagcatagagttctactttactattggttaatttgggattattgtttaatgctattttcacttcagcttccttgattcacattcttttgtagagctaatgtttatagtgaatataggcaaactgactgtaatgttagcccatgtctccacatttattaaatttgctttggatgagttattgacagtttgaggccattacaatgtcagcatagatgccaaaaatgatggttttattaagatgcctgaaactatcatgttgaccatgctctgctcctgttattttgaaaaggtaagttcaaaatataattatgaaattaagatgattgttattaattgatgttccaacagcaagaatggaacacacatatatatgtaagcaattgacagttctgttgtaatccatattagaaattctttttcctaaacagtatgttgacttagttcagtgcaagacttgattttatgtcggtggcactgatcagatctctggacctttaaacaaactatttacannnnnnnnnnnnnnnnnnnnnnnnnnnnnnnnnnnnnnnnnnnnnnnnnnnnnnnnnnnnnnnnnnnnnnnnnnnnnnnnnnnnnnnnnnnnnnnnnnnntctagaggatccccctcgattgagaacattgaaaaactatcgggtgtggttcaaaaagaacaggctttaacaggcaattggaatgctagtctgaagttggctctcttattcccttagcaagaggcaggggaaatgggtcaaagtccattgggatgggtaatgaggggacaacaccagggaagactcattggcaaaggctaaagcatttgacccattaactgtcatttaccagtaactccatcaacattatacttctcttttctatctaaactgaaacgattattcaaagcttttattcagattttcattcatttaacgttcaacaaatacttcctgagtttctatagtccttgctacccaaattctggttcataaaacatcagcatgcacatcatctgggagcgtgttaaaatgcagaatctcaggc

SEQ ID NO: 64304 - DNA, 658 bp, Homo sapiens
gatccaccctctttaattccacattctcctccctagagcaagcaatgtcaatcatctatgggggcaacggcagggcacatctactaacttgtccctctttatcaactcttgtccatttctaccatggcaattggttaaaaaagattctaattagcccaagatccttacttaaaatgcttaagtttttaataaaagaatttaataaaatccggcattattctatattactattagtttatgtgttctaccacactggtcttctttcagtcacacaagttaacttcagcctttaccactggaccttttaaatgttccttcctctgtcttagattcattttctcttcatttatctgtttattttctatttctttgtatcaaagtttaatttcttcaggaaatcttccctgatcctagtatgtctttcccttatctcatgrcactgtgagacttattttcacagatcttactctgctgtaatgttatgtttgtgattattttattcatgtctgcctcaaccgttaaagagctgtaagttccacaaaaacagagatagttttatatattgagtcttgaaaacagaaagttcttaaaagaatatttgctgattattggattgactgatattggtggtagaaggtcctttattccactcagattt

SEQ ID NO: 64305 - DNA, 393 bp, Homo sapiens
  misc_feature (1)...(393): n = A,T,C or G
cttgtcccttgactttggacttgaacatgtgattgttctggtgaattcaatgcagatggaagtaacagtgtgcttatggcttaataaaactcatatgtttcttttattctttcttatcttcctaccatcatcttgagaagcgattctgggttctccagagaaacagaaactaaasagtctctcgctctctctctctctctctctctccctggggnnnanantaaatatatntntatatatatgtgttttttttgtgagngagagngngcttgtggggggagagagagagaggtgtttagtaggaagagaaagagagaaagacagagtgagaaatagagatttatgataaggagttgggttataggggtgtggggggtgagatattacaaagat

SEQ ID NO: 64306 - DNA, 718 bp, Homo sapiens
  misc_feature (1)...(718): n = A,T,C or G
tttttcacaaatgggaatattttcaagtgatgtttatccatacagaaatgccttaaaatagtaacctcctctggatcaacagttgtaccaaataaaatttcaaaataagggatataaataagcaatctatttatcttttgctaaatatatgtggttctactgacaacagatttttgcaggccttggacaaactccatcacttatcagaacttcagcagaaaaaaataagaggcttatatggaggccattttaaaattacgagctatgagaggagactgttgtgtccagaacctttattgataagacatccctccactcaatcaggaagaggaattactgtgaaagtaggttttcattttctggaggttagttgttcttatgaaataggtagtaattccttacatcgactcggtttgncagagtacagagtactgaccatacattatctcaagcccggaagtaatcccctaaggtaggaattgttgcttctacattacaggtaaggaaactggcactcaggagggtcccaaagtctcattcctgagttggggagcaaaaagagacttcagaatcctgtaagtcacacagctcagcctgtgctagatgtgtagccgtgggcacctcgctccctttctccayaccccagcatcactggagcaccggctgtgctgccacactccccaggtgagtcacaaacaataaaagggcctggatggta

SEQ ID NO: 64307 - DNA, 740 bp, Homo sapiens
taggacaggggtctcargccgtaccccattcacgacacaggacctcttacagatcagatgaaaaggacattggtgattgttgtattgaccatgacacaattcagttagaggtaggccttcatgtcacggcctttatacacactgtcctcattcaagagtgacctcggatgaaggtaggaggcatggtaaggactgagatgagatttctctcctgtgagaaatgagtgagagatgtcttatggaaaatgaagtgatgttcattttctttctgtgtttgtggactgagatcactacctattgcactaaataaataaataaataaaccaaacgtatcatttcactcatctgcttgaaaccagtggcctcttagctccctcctagtaaaggcagggtccttactgtggagtgtgtaatcgactccatgtgcccctctgccttcacatcccattactcttctcacttactccactccagtcctcccggcctcctggctgttacttacacatgctcagtatttattaaaatccctgcctcagggattttattcttcttgtcccttttgcttgcagtactctccctggccattctcatacattcccctcacctcctttaagtctccctaaatgtcaccttctgaaacaatcccttccaactctgtttaaaactgtgtctcctactccaccctactcctcactccacctcaccttccaataggttctaaaattatttgtttgtttact

SEQ ID NO: 64308 - DNA, 740 bp, Homo sapiens
taggacaggggtctcaagccgtaccccattcacgacacaggacctcttacagatcagatgaaaaggacattggtgattgttgtattgaccatgacacaattcagttagaggtaggccttcatgtcacggcctttatacacactgtcctcattcaagagtgacctcggatgaaggtaggaggcatggtaaggactgagatgagatttctctcctgtragaaatgagtgagagatgtcttatggaaaatgaagtgatgttcattttctttctgtgtttgtggactgagatcactacctattgcactaaataaataaataaataaaccaaacgtatcatttcactcatctgcttgaaaccagtggcctcttagctccctcctagtaaaggcagggtccttactgtggagtgtgtaatcgactccatgtgcccctctgccttcacatcccattactcttctcacttactccactccagtcctcccggcctcctggctgttacttacacatgctcagtatttattaaaatccctgcctcagggattttattcttcttgtcccttttgcttgcagtactctccctggccattctcatacattcccctcacctcctttaagtctccctaaatgtcaccttctgaaacaatcccttccaactctgtttaaaactgtgtctcctactccaccctactcctcactccacctcaccttccaataggttctaaaattatttgtttgtttact

SEQ ID NO: 64309 - DNA, 668 bp, Homo sapiens
tgcccaggctggaatgcagtggtgcaatcacgggtgggctatcacagcttactgtagcctcaaccttctgggctcaagcaatgctgctgcctcagcctcttgagtagctagaactgcaggtacacaacagcactcccagctaattttctgatgttttttgcggggtgggtgggaggtagagacagggtctgactatcgtgcacaggctgctctcaaactcctggcctcaagtgattctcctgctatggccttctgaagtgttgggattacaggcatgagacactcggcctggcctaagaaagcatatagatttataactgattgcctaactatcatttcagtcactygtaaaagagaaagactcattgattttagagtcctatataacaaaaccaccagctgatttttagcttaccaggagaagccaattagggctaggacggttgcttctcacccttacttgcctgcgccttcctctgcccttccaggtctgccatctccagatcccatccagccttaagtcttggtttaatcctaatgctagaagttcctagaatgttccagccttttcccactcccccaatccatgatactggcctgatcaatttgcttagggcaccattgctgcgtttctcccaacttgcagcctgcccttgctacagagcaat

SEQ ID NO: 64310 - DNA, 894 bp, Homo sapiens
tactttttacaggcaagtatgaaccactttgaggttttyttcccactcccaattctcaattcctatgggtgcggtatcatctaagagaataagcattcttgaatattctggacatgtggcatggccttctgtaccaactcttctagatgtgcttgcctggtgtgccatggaccctgaatcgatataaacaagtatacttcgggtgtccccagttgctaaagatattaagtttcacacataataaatattcagaaactgcatgctgaaaataaagaaaagaaaatcaatgccttataacgaaattcatctcaaagaatcccaatgaatactgatataattttaaattatatactttttttttttcgagataggatctggctctgtcacacaggctggaatgcagtggcatgatcatggctcattgccacctctacctcctgggctcaagtcatcctcccagctcagacccccgagtagctggaactacaggcacacgcaccgcacctagctaatttattaattttttgtagagacagggttttgccatgttgcccaggctggtcttgaactccagggctcaaatgatttacctgcctaggcctccaaaagtgatgggattacaggtgtaagccaccacgcctggcctatatactttttcttttctaacataactattttcaaatatcagtctaatgaatgagaaaataagctactggaataaagagcttatgaaaagataagtagagggagaggaggataatatggcggccaagtgacctctctattccgctgtttcccccctctacactccttgctggctgtgccgaggagcaggggcaagagggcttgttgtctaaaaaccagaactatgaagccaactataagaacagataa

SEQ ID NO: 64311 - DNA, 870 bp, Homo sapiens
  misc_feature (1)...(870): n = A,T,C or G
ctaattttttgtatttttagtagtgacggggtttcacatgttgggcaggctggtctcgaactcctgacctcaggtgatccatccgcctcggccttccaaagtgctgggattacaggcgtgagccacccctcccggcccagccccatgttttctcaggaactggagttccctttaggaagcaagtaacagaggtgctgggctgcccgggcctctaggtcgtcttctttcccaggctctgtgctctcaccagagtgcgcgttcgggaagcagggagaggaccaggaaagacgcctgagacggagagtgggcaccggccgggggcaggcaggtccggcccctgggggtcagagtgcagcgccggtttgaggcagttcggccacttagctgcgactcgaartgaatgagtcacttcccctcctcgggcgagctcctggctttgccccagcaagcgggaactcccaggatcaggaaggtcccagagaaactcccnaggggggaagccgaggccgtccagagagatccagggtacacacagtgacagtgccagctccacattcccgaccaccgggccagggctggttccacgctgtcatttctctcgctgccccagccgcgggccaccgccagacagacagaccggggatcctcgtggcggcgtgaccttgggttagtcctagagccgcttctagcccggtttcctccgccccaggttaggaccacgtgggtaagaagatttcctctgtagtaggggctgtttaatgtgtaacagaactggctgctggttctttacaattgcccaactgctctgcagaggcgagaagcaattgcggctgagcctcccgggaccttcgcgggagggaggagaggagg

SEQ ID NO: 64312 - DNA, 772 bp, Homo sapiens
ttcgggatccgcccgcctcggcctcccaaagtgctgagattacaggtgtgagccactgtgcctggcctagattccaaatttctatattcaaaatttctgagatgggctttgctattcagatgaattcttaagggaaaatcacatttctaatctaagtgtcaaactatgattctggacagtrtatttttcaagaactgatcatgtccctcaaaactatataaaataggaaaatatttctgggaaaaaattgcacttaccttattagagaagctcacgaggtccctcaacataagaacagaaccaatcatttcttcctgaccagaagaaacaacaataaaacaaaaagaaaatgcaaggagagggaaattagcttgtttgggttaaagttacagcttgcctatgtagaaatagtacagattccctgctttttggccaaaagaccaattggaggccagaccttctgtacagagaccattactgttgtctctggttttccttggaatccagcatctctcctgtgtgccccctagacatcctcagcacactccatcagggaactgacacgagggctgatgaaataagggtgcagagctaagcaacaatttatttattattttattttattttattttattttatttttttgagacggagtctcgctttgtcgcccaggctggagtgcagtggcgcgatctcagctcactgcaagctctgcctcccgggttcatgccattctactgcctcagcctcccgagtagctgggactacacgc

SEQ ID NO: 64313 - DNA, 937 bp, Homo sapiens
tcagatgctcaccagcagctttctgatgaaattcaattgcaggggttagataccaacctggagaagagcagagaatgtgctgtctgcggtcccagtagcrcacagccgcctgtgatggaacctggggccaccactgctccaggcccttgcgattataatgaaaggtttgtggggaattctgtatgggaaggaaagtgcagaaagaaaaggaaacccggtcatgtttcagtcacatatctggcttatttgattacaaatcatgcccttcaccaggctttgctggaaattcccttgctgtgattgcaggctcattcctgggagtcaggcccaggctgaccatggggatatgatgtggttagaagccaaaccagcggggctgctgcaggcactcgagggagaagtcttaggtagagtagagcttattaaacgattgactaaaatccatggccactgcttcagacagttcaccataaggggcgagtcacatacaaaacatgctctgtcttccctgtggggcctggacttgactggaacatactgtggtgcagtgactgagggggcaccgcggaaggcctggtggtaactacttgcttattccgagtgcagtcaaacctggcagggaggcagggcttgggaatgggactcaaggaccgtgcctctggccagcagggacgagggtcagttagccggtcatcttcgtgtcccccatcataggaccctgttttcagctgttatcaccacctcaccctgctgatgagccccagcgagccctgcaggagtgggtgaggcacagcaggttcctttctcggcggcggctccaggccccacctctggcaagaccagccttactctcagcctccctcctcccacatggctccaatgaggtgagtgtctctgtctcaggctgtgcaaggccaggccagcattataatcatgc

SEQ ID NO: 64314 - DNA, 937 bp, Homo sapiens
tcagatgctcaccagcagctttctgatgaaattcaattgcaggggttagataccaacctggagaagagcagagaatgtgctgtctgcggtcccagtagcacacagccgcctgtgatggaacctggggccaccactgctccaggcccttgcgattataatgaaaggtttgtggggaattctgtatgggaaggaaagtgcagaaagaaaaggaaacccggtcatgtttcagtcacatatctggcttatttgattacaaatcatgcccttcaccaggctttgctggaaattcccttgctgtgattgcaggctcattcctgggagtcaggcccaggctgaccatggggatatgatgtggttagaagccaaaccagcggggctgctgcaggcactygagggagaagtcttaggtagagtagagcttattaaacgattgactaaaatccatggccactgcttcagacagttcaccataaggggcgagtcacatacaaaacatgctctgtcttccctgtggggcctggacttgactggaacatactgtggtgcagtgactgagggggcaccgcggaaggcctggtggtaactacttgcttattccgagtgcagtcaaacctggcagggaggcagggcttgggaatgggactcaaggaccgtgcctctggccagcagggacgagggtcagttagccggtcatcttcgtgtcccccatcataggaccctgttttcagctgttatcaccacctcaccctgctgatgagccccagcgagccctgcaggagtgggtgaggcacagcaggttcctttctcggcggcggctccaggccccacctctggcaagaccagccttactctcagcctccctcctcccacatggctccaatgaggtgagtgtctctgtctcaggctgtgcaaggccaggccagcattataatcatgc

SEQ ID NO: 64315 - DNA, 937 bp, Homo sapiens
tcagatgctcaccagcagctttctgatgaaattcaattgcaggggttagataccaacctggagaagagcagagaatgtgctgtctgcggtcccagtagcacacagccgcctgtgatggaacctggggccaccactgctccaggcccttgcgattataatgaaaggtttgtggggaattctgtatgggaaggaaagtgcagaaagaaaaggaaacccggtcatgtttcagtcacatatctggcttatttgattacaaatcatgcccttcaccaggctttgctggaaattcccttgctgtgattgcaggctcattcctgggagtcaggcccaggctgaccatggggatatgatgtggttagaagccaaaccagcggggctgctgcaggcactcgagggagaagtcttaggtagagtagagcttattaaacgattgactaaaatccatggccactgcttcagacagttcaccataaggggcgagtcacatacaaaacatgctctgtcttccctgyggggcctggacttgactggaacatactgtggtgcagtgactgagggggcaccgcggaaggcctggtggtaactacttgcttattccgagtgcagtcaaacctggcagggaggcagggcttgggaatgggactcaaggaccgtgcctctggccagcagggacgagggtcagttagccggtcatcttcgtgtcccccatcataggaccctgttttcagctgttatcaccacctcaccctgctgatgagccccagcgagccctgcaggagtgggtgaggcacagcaggttcctttctcggcggcggctccaggccccacctctggcaagaccagccttactctcagcctccctcctcccacatggctccaatgaggtgagtgtctctgtctcaggctgtgcaaggccaggccagcattataatcatgc

SEQ ID NO: 64316 - DNA, 549 bp, Homo sapiens
tataaaacactatctcaatgtgtcattccttacagagagttgtccacagctcctcaaatcttcagcataaagtcccccatgaggttgccttcgatgacaataccagcttctttcttgctgctccctcatcccaccctctgcctcagtcactaaatatccttccatgaaagatccactgggttcttaaaatttcttctatcaagatacatttttcaaaaaagtttgtctttctgactagatgatgagcactgtattggggacagcaacttccatctctgtgtctccacacccagcaccttgtgrgtagaacatgctcagtaaatgtgtgttgatttcattactcacaagggcaggaaatatgccatattccttttttgatcctctaggtaataagttctcaaaagtagtttgtgaataagggaataaatcataaaacgttatgtccccaactgaaagaatttgtgctttgtcctcagacatatgcacatccaaagacaataatgccaatatgggccttgtctttaaagaattcattgtgccctgcagttc

SEQ ID NO: 64317 - DNA, 989 bp, Homo sapiens
aacccacaagcttgaagtaaatatttgttgctgtaagccacggcaatttggttgttggttatgcaacattatcgcattaaaaaaaaaacctggctaatacagctagtgaatgggaaaaaaaagagattacttattccattttgccaattactgagcattttgatgatgcactagaatatgtcactatgattttacctgtttaccttgcaaatgcacttttactattttttttttttttttttggtgatttgttttgcagttttcagtatgattctgtgatggtatacgtaagtattttaattgtacctgtattagtccgttttcatgctgctgataaagacatacccgagactgggcaatttacaaaggaaagaggtttattggatttacagttccacgtggctggggcggcctccaaatcatggtggaaggcaaggaggagcaagtcacatcttatatggatggcagcaggcaaagagagagcttgcgcagggcgactccagtttttaaaaccatcagatctcatgagacctatttattatcataagaacagcaccggaaagacctgcccccattattcaatcatctttcaccaggtccctcccacaacacrtggggattatgggagctacaagatgagatttgggtggggacacagagccaaatcatatcagtaccattccactagactgaaattgacactgtggggcaggaaaaatatcttttctttctatccttcttagtttttagctgtaacaaaagacagattaacaaaagaaaagcataaaagtatatttaatataaatattacataacacaagagcctccataagaaaatgaagacccaaggaaacaattacacctgagtgtttttatgctaggtttgatgaagaatagtgagtcataggaaaaagtaatatgccaaagcaaggtctaagctcagacccctaagctcagatgtctcagagaaggattagtggaggttcttt

SEQ ID NO: 64318 - DNA, 1209 bp, Homo sapiens
aagaaaagagtggttaaaattgcaataaaaaaacagcggggtgggtgaaacgagatcggcagaaagttgatggccgctaaggtaatgtgtttcacggtgttattgtgtctacttttgtgtgtttgagcttttttacgacttacatatacttctaaagtctgcgatcgtattcaacaggtaaactcagcaaggcgtgtgccttgtgtttttttgttcgttggtttgttttgaaaacyggaatttgaatcttaaagagtggtaactctagaaatccaatttttccttttctccaggatttgctatttttgttgttgttgtccagagtgtcttggtgtccttctttcttcagagacagaatgattctttcctcctggtataaaaagggcacccgtcccacgagaatcttatgacctgcttcagaggaaggtcaaaaacctcttcctgcacctgcaatttctcaaattccttccaactaaaatatttaacattgccaaagtggcacatttttgggtagtgtgtgtcctaaaccccgttgacacacgtattctataaaaaataaagatatctgcctggacagattcgttcgatgggaactacaggtttcccagatcttatgagaaagaagagaaagtacagtgttcctccccaagaaagagtagatggaataggcattttgtaatttaccaagcactagaaataaatacgttgtttttctaaccaaaaaaccctgggtgttttcatctagcaaccttcatcagcttctgcagtttagtttacctaactctatcgagttctgtaatcttgattccatggacagcttagagaacaagtcccttcggtccctttatctgttcatttacagccatcttgttggggtcacagataagtacccagctcattaggcactgacccctactgaagtaatcatcataaaccaccacgagctcttcccagttcaactgatgtgtaaactatttaaggacaagatgaaatgaacaggaaagattttctggtttagtttaattgcttctcaggtggcctctcatttaccaagctctgctacaagtaagaaccaaaactaccctagtgaaactaatataaaccaccccagtactttggggaatatagcctgtttcaacagatccctgggagtctgcatttccagattgaaagaaagattgtctcagtctatttgttgtgctggtgaaa

SEQ ID NO: 64319 - DNA, 1768 bp, Homo sapiens
agcctctcttgtgaggccctgggcacatcactgccctctgtgggctctgtttcctcatctggcagatgaacaaacgatgagcctgttgagcagcctcacagcgtcctgatggggttcagtaaggaagggaatttatgggtgcttgtaccttgctcttcccacgaaggatgatggtgagagcactgctgagagccacatgaaactgagtcatcaggaggccctgtgaggaaggcgtggttccatcacacttccttgatgaaaaaatagtctcagggaggtccggccacctgcccaaggtgacacaagcagtaagtgttggagctgggagtgaatctagaatcagggcagagtggagttggtgggagcattgcaacagctcactcaggctggttatctaggacctgaggtcaagggggcttaggtataactgagggaggagagaatagtctccctgaccttgttcctgaccctggcaggtggagacctccaaactggccatgcaggagatgattcctcacacagcacagatgaggctgtggggcagcaggtgagtggatctgtggtgggaggggctccagggagccgaagggcagtcttcttccccaccagctggaggcctccacatcaagagagcagggggtcttcctcccccagccctgccctcctgtggccacagggcctgaaatgcctccattagagggagcagagaaaccaaccgcctgggcaagctgggctcagtgtagatttggggaacagtgagacaggggaccccatgccctcatgacttgttaaaatcccagcatagaagtaactgggggtgtctagtggccttgggggccagccggggagatgggggagaggaggggagggctgggggaggcagctgagggtcctgggctgttccaggttggagaccttgggaaccagtgtccaggcagaagtgggtggtgagatttcaggggacagatcttgggtgggcacctgataatgggagctcaccaccactaccaccccaatggccagggtgacgtgccttctctgggccggtggggggtgggggttcctcattaacctggtgaagctgggcactgccatgaaggactgtgtgggtgggagtgagcctggggcaggcaggttggggaccaggatcctcaggcttgggaggagagagccctggacacagacctttgatcacagcaagccccctcctgtgtgagccccacygtcctccccatgccccctgagctggggcgtcaggcccatcttacctctgagtggtggaggctccagagcagcttccagtccctgttccctgagtggtgaatctgaagagctgtccgactgcaaagctgcaggagctgcaggagctggactcagcctctccctcaggtagtgcccatggaaggagagggaaattgggcccttcccaggtcaggcagctcctaaatgtccgagcattttctttctatacagggcctctgtttgtttgtctgttgtcagagagtgttggggcaaaaggtccctgagccacagctcccacacctcctcatctagagcccagagcttgatgcaggtcccagtgctgttctatgcatatttctcacccctgctggcctggcagaagtgcagcatgggagggtgtggggatgggggtaagtcatgggccaggggcctttctgagggtctttggctggctgcctttcagggaaatgtgatcaacacccagaaaggaaaaagggagcagctgaggccctcactttgggggagg

SEQ ID NO: 64320 - DNA, 767 bp, Homo sapiens
tccagccccagggaagccttcagatgacggcagctctgggaggcatcttgcctgcaacctcatgtggmtacagctaaaccagagccacagaactaagctgctcctgaatttctgactcacagaaatggtgtgagaaaatgctgattgctgttttaagccatgaagttttggggtaattcatatacagcaataagtaactgatcagatggattattcagtcagtggtgtggggatagccagctagaattggggaaaaaataagttggattcttactgaattctgcatcaagaaaattccagatgtgctgggcatggtagcttatgcctgcaatcctagtgctttgggaggctgaggtaggaggattgcttgggcccaggagtttgaggctgcagtgagccatgatcatgcctctgcactccagcccgggtgacagagtgagaccctgccttgggggaaaaaaagaaaatctcagatggatcaaatatttaaatgtaaaaatggaaccgttaatttattataagcctgaaaaattttaaacttttggggtggagaaggatttcctaactatgaatatgcaatccccaagccataaattaaaataacaaaccttataaacagggtgaaagataaaccaccaattaggaagatttgagcaacctgtattacaaaaggcagtgtctcggagaactcttaaaaatcagtaagaagactctataaatgggatggctgaggacacgaacaggcaattcacaaagtagaaataaat

SEQ ID NO: 64321 - DNA, 767 bp, Homo sapiens
tccagccccagggaagccttcagatgacggcagctctgggaggcatcttgcctgcaacctcatgtggatacagctaaaccagagccacagaactaagctgctcctgaatttctgactcacagaaatggtgtgagaaaatgctgattgctgttttaagccatgaagttttggggtaattcatatacagcartaagtaactgatcagatggattattcagtcagtggtgtggggatagccagctagaattggggaaaaaataagttggattcttactgaattctgcatcaagaaaattccagatgtgctgggcatggtagcttatgcctgcaatcctagtgctttgggaggctgaggtaggaggattgcttgggcccaggagtttgaggctgcagtgagccatgatcatgcctctgcactccagcccgggtgacagagtgagaccctgccttgggggaaaaaaagaaaatctcagatggatcaaatatttaaatgtaaaaatggaaccgttaatttattataagcctgaaaaattttaaacttttggggtggagaaggatttcctaactatgaatatgcaatccccaagccataaattaaaataacaaaccttataaacagggtgaaagataaaccaccaattaggaagatttgagcaacctgtattacaaaaggcagtgtctcggagaactcttaaaaatcagtaagaagactctataaatgggatggctgaggacacgaacaggcaattcacaaagtagaaataaat

SEQ ID NO: 64322 - DNA, 767 bp, Homo sapiens
tccagccccagggaagccttcagatgacggcagctctgggaggcatcttgcctgcaacctcatgtggatacagctaaaccagagccacagaactaagctgctcctgaatttctgactcacagaaatggtgtgagaaaatgctgattgctgttttaagccatgaagttttggggtaattcatatacagcaataagtaactgatcagatggattattcagtcagtggtgtggggatagccagctagaattggggaaaaaataagttggattcttactgaattctgcatcaagaaaattccagatgtgctgggcatggtagcttatgcctgcaatcctagtgctttgggaggctgaggtaggaggattgcttgggcccaggagtttgaggctgcagtgagccatgatcatgcctctgcactccagcccgggtgacagagtgaraccctgccttgggggaaaaaaagaaaatctcagatggatcaaatatttaaatgtaaaaatggaaccgttaatttattataagcctgaaaaattttaaacttttggggtggagaaggatttcctaactatgaatatgcaatccccaagccataaattaaaataacaaaccttataaacagggtgaaagataaaccaccaattaggaagatttgagcaacctgtattacaaaaggcagtgtctcggagaactcttaaaaatcagtaagaagactctataaatgggatggctgaggacacgaacaggcaattcacaaagtagaaataaat

SEQ ID NO: 64323 - DNA, 767 bp, Homo sapiens
tccagccccagggaagccttcagatgacggcagctctgggaggcatcttgcctgcaacctcatgtggatacagctaaaccagagccacagaactaagctgctcctgaatttctgactcacagaaatggtgtgagaaaatgctgattgctgttttaagccatgaagttttggggtaattcatatacagcaataagtaactgatcagatggattattcagtcagtggtgtggggatagccagctagaattggggaaaaaataagttggattcttactgaattctgcatcaagaaaattccagatgtgctgggcatggtagcttatgcctgcaatcctagtgctttgggaggctgaggtaggaggattgcttgggcccaggagtttgaggctgcagtgagccatgatcatgcctctgcactccagcccgggtgacagagtgagaccctgccttgggggaaaaaaagaaaatctcagatggatcaaatayttaaatgtaaaaatggaaccgttaatttattataagcctgaaaaattttaaacttttggggtggagaaggatttcctaactatgaatatgcaatccccaagccataaattaaaataacaaaccttataaacagggtgaaagataaaccaccaattaggaagatttgagcaacctgtattacaaaaggcagtgtctcggagaactcttaaaaatcagtaagaagactctataaatgggatggctgaggacacgaacaggcaattcacaaagtagaaataaat

SEQ ID NO: 64324 - DNA, 660 bp, Homo sapiens
aggctgtgactccaaagcctgccctcttaacctctctgctgtctcttctgtttgtgcagtggggggccctctttcatgctgtttgtttacttcaaaggcttggtgtttcttgtatttctgttcacatttgtaggtaaggatctgcaactcagcgttgygtgaaggttctcacgcaggagctcagcttcaggtgactttgcaggggaagggcagggagcatatagcggggcagggtattcactctgctgccctgctcgctggggggccggcggggtgggcttctgctccacggagttggtcactttgtcggctctgctgtcttccttgttaggacctctcatcggagagttgcatgcatgctcaccgacctcccaccccttccccggagcagacccctgagtcagacagttcaaacgaggacttgctcagctcttccagcttctcgttaattacttggccaattatctatggcctgcttctcctggcctgtgctgcactgataatgggattatgctgagcttctgctgaggaaacttttcaactgacatgggttccttctatttctttagatttgccatcattggtcccgtcacttttctagaaatttaatctgttccacaactctttattgtgcggggcaatgtgctgggcattagaaaa

SEQ ID NO: 64325 - DNA, 660 bp, Homo sapiens
aggctgtgactccaaagcctgccctcttaacctctctgctgtctcttctgtttgtgcagtggggggccctctttcatgctgtttgtttacttcaaaggcttggtgtttcttgtatttctgttcacatttgtaggtaaggatctgcaactcagcgttgcgtgaaggttctcacgcaggagctcagcttcaggtgactttgcaggggaagggcagggagcatatagyggggcagggtattcactctgctgccctgctcgctggggggccggcggggtgggcttctgctccacggagttggtcactttgtcggctctgctgtcttccttgttaggacctctcatcggagagttgcatgcatgctcaccgacctcccaccccttccccggagcagacccctgagtcagacagttcaaacgaggacttgctcagctcttccagcttctcgttaattacttggccaattatctatggcctgcttctcctggcctgtgctgcactgataatgggattatgctgagcttctgctgaggaaacttttcaactgacatgggttccttctatttctttagatttgccatcattggtcccgtcacttttctagaaatttaatctgttccacaactctttattgtgcggggcaatgtgctgggcattagaaaa

SEQ ID NO: 64326 - DNA, 711 bp, Homo sapiens
aaacctgagaaatcaagcttttgtggttatgtttttcaaactggagcacattgctgttcaaaacaaaatcagagttctgttaataaataaggagagaatggatattggtaggcaacttgctgtgtcagctgcaggagttatgtgcttagaggtggtaattgaagtcaagagtgtgattaacattactcagggggagtatacagagtaagaagagaatccatgaagggactgaaaggaagtttagtgttgaagagactggcagaagaataggtattctcaaagggaaccaagaacgaggggcragtgggaggaggtggtcacctggagggtgtggaccagtggtacacaggttaggagagggggaagggcagagtttacattgcccgtatgctggcgagtgaagtccactaggaactgagacatgaacttgaggcttagcaaaagagagcgacttagagaaagagcacccgcactggtgactgtgggctgcatggtgaaggggggcaaagcagtgacagcgggagtgagcccctctcaaaaactgatgccaactacgcaggacagagagggggcggggaagggggagtgacctgagggagactggggctcaagaaaagcctttttgtgttggttgttttaaaggctggcgatactgtagcatgcttagttctaaggagaggaagggccattaaagacgtttgagaaggatcc

SEQ ID NO: 64327 - DNA, 711 bp, Homo sapiens
aaacctgagaaatcaagcttttgtggttatgtttttcaaactggagcacattgctgttcaaaacaaaatcagagttctgttaataaataaggagagaatggatattggtaggcaacttgctgtgtcagctgcaggagttatgtgcttagaggtggtaattgaagtcaagagtgtgattaacattactcagggggagtatacagagtaagaagagaatccatgaagggactgaaaggaagtttagtgttgaagagactggcagaagaataggtattctcaaagggaaccaagaacgaggggcaagtgggaggaggtggtcacctggagggtgtggaccagtggtacacaggttaggagagggggaagggcagagtttacattgcccgtatgctggcgagtgaagtccactaggaactgagacatgaacttgaggcttagcaaaagagagcgacttagagaaagagcacccgcactggtgactgtgggctgcatggtgaaggggggcaaagcagtgacagcgggagtgagcccctctcaaaaactgatgccaactacgcaggacagagarggggcggggaagggggagtgacctgagggagactggggctcaagaaaagcctttttgtgttggttgttttaaaggctggcgatactgtagcatgcttagttctaaggagaggaagggccattaaagacgtttgagaaggatcc

SEQ ID NO: 64328 - DNA, 688 bp, Homo sapiens
ggggtgtttcagccacaagaaggaatacaccaccgacacctatgaccacatgggtgaaccttgaacaagggaagtgagaaaagccaatcacaaaggccacaggactcccttcccaggaaatgctggtaatgggccacgggactccctcccaggaaatgctcagaacaggccacgggactccctttccaggaaatgctcacaacagacagacccacagaggcasgcagtagccgactggtggctgagggtttgagggcacgggagacagcagggtgatggataactagagggttcgggcttccttgagaggggatcaaaacgttctgcgaagggtgacggtggttgcactagccgtggacataaaagtcgctgaactgcccccttcaaagggacgaggtacgtggaatgtgcgtcgcatttcaatagagctgttagaaatggcgggccgggtggggagtgagaaacagcaggaagcgtggatgcagctgccagagcctgcggggctgaaaccagcctcttcctttgcatgtaccacgatttcaacttcaagagcagctctccacggggaggacaagggctgagaggggctgcctggagggagctccagggtgaaggagaaactctggggctccgtaaggaaatgtccttacttgtatcctgcttgggctgggaaatgtgaggctgaagg

SEQ ID NO: 64329 - DNA, 688 bp, Homo sapiens
ggggtgtttcagccacaagaaggaatacaccaccgacacctatgaccacatgggtgaaccttgaacaagggaagtgagaaaagccaatcacaaaggccacaggactcccttcccaggaaatgctggtaatgggccacgggactccctcccaggaaatgctcagaacaggccacgggactccctttccaggaaatgctcacaacagacagacccacagaggcacgcagtagccgactggtggctgagggtttgagggcacgggagacagcagggtgatggataactagagggttcgggcttccttgagaggggatcaaaacgttctgcgaagggtgacrgtggttgcactagccgtggacataaaagtcgctgaactgcccccttcaaagggacgaggtacgtggaatgtgcgtcgcatttcaatagagctgttagaaatggcgggccgggtggggagtgagaaacagcaggaagcgtggatgcagctgccagagcctgcggggctgaaaccagcctcttcctttgcatgtaccacgatttcaacttcaagagcagctctccacggggaggacaagggctgagaggggctgcctggagggagctccagggtgaaggagaaactctggggctccgtaaggaaatgtccttacttgtatcctgcttgggctgggaaatgtgaggctgaagg

SEQ ID NO: 64330 - DNA, 688 bp, Homo sapiens
ggggtgtttcagccacaagaaggaatacaccaccgacacctatgaccacatgggtgaaccttgaacaagggaagtgagaaaagccaatcacaaaggccacaggactcccttcccaggaaatgctggtaatgggccacgggactccctcccaggaaatgctcagaacaggccacgggactccctttccaggaaatgctcacaacagacagacccacagaggcacgcagtagccgactggtggctgagggtttgagggcacgggagacagcagggtgatggataactagagggttcgggcttccttgagaggggatcaaaacgttctgcgaagggtgacggtggttgcactagccgtggacataaaagtcgctgaactgcccccttcaaagggacgaggtacgtggaatgtgcgtcgcatttcaatagagctgttagaaatggcgggccgggtggggagtgagaaacagcaggaagcgtggatgcagctgccagagcctgcggggctgaaaccagcctcttcctttgcatgtrccacgatttcaacttcaagagcagctctccacggggaggacaagggctgagaggggctgcctggagggagctccagggtgaaggagaaactctggggctccgtaaggaaatgtccttacttgtatcctgcttgggctgggaaatgtgaggctgaagg

SEQ ID NO: 64331 - DNA, 537 bp, Homo sapiens
atgaaacacaaagagaaatgtacacaaaacatgaatgtataactccagggattatcacaaaatgcccatcacccagacacccttctgctcctcccagtgaatatccactcccttcacctgactaatatctaatatcctgactttaacataatagtctagtttttgcctgtgtttggaatttaygtcagtggaatcatacattattttgtgtttggtgtctatcactcaacactgtgtttataaaattcacctatgttgctccatgtttaggtttgttcattttcattatccagtattgggttgcatgaatatacaacaagttattcaaccattccctaaacatttggattatgtccaggttttagctattataaaacaatgtggttatctctttgaacaccagagtttagttttgcctgtttaaggaaattttataaaatgctactgtgacatacattcttttgtgtctggcttctttcactgaattcgatgtttgcaagattcattcatgctgttgatgtaactggagctccagtg

SEQ ID NO: 64332 - DNA, 537 bp, Homo sapiens
atgaaacacaaagagaaatgtacacaaaacatgaatgtataactccagggattatcacaaaatgcccatcacccagacacccttctgctcctcccagtgaatatccactcccttcacctgactaatatctaatatcctgactttaacataatagtctagtttttgcctgtgtttggaatttatgtcagtggaatcatacattattttgtgtttggtgtctatcactcaacactgtgtttataaaattcacctatgttgctccatgtttaggtttgttcattttcattatcyagtattgggttgcatgaatatacaacaagttattcaaccattccctaaacatttggattatgtccaggttttagctattataaaacaatgtggttatctctttgaacaccagagtttagttttgcctgtttaaggaaattttataaaatgctactgtgacatacattcttttgtgtctggcttctttcactgaattcgatgtttgcaagattcattcatgctgttgatgtaactggagctccagtg

SEQ ID NO: 64333 - DNA, 537 bp, Homo sapiens
atgaaacacaaagagaaatgtacacaaaacatgaatgtataactccagggattatcacaaaatgcccatcacccagacacccttctgctcctcccagtgaatatccactcccttcacctgactaatatctaatatcctgactttaacataatagtctagtttttgcctgtgtttggaatttatgtcagtggaatcatacattattttgtgtttggtgtctatcactcaacactgtgtttataaaattcacctatgttgctccatgtttaggtttgttcattttcattatccagtattgggttgcatgaatatacaacaagttattcaaccattccctaaacatttggattatgtccaggttttagctattataaaacaatgtggttatctctttgaacaccagagtttagttttgcctgtttaaggaaattttataaaatgctactgkgacatacattcttttgtgtctggcttctttcactgaattcgatgtttgcaagattcattcatgctgttgatgtaactggagctccagtg

SEQ ID NO: 64334 - DNA, 537 bp, Homo sapiens
atgaaacacaaagagaaatgtacacaaaacatgaatgtataactccagggattatcacaaaatgcccatcacccagacacccttctgctcctcccagtgaatatccactcccttcacctgactaatatctaatatcctgactttaacataatagtctagtttttgcctgtgtttggaatttatgtcagtggaatcatacattattttgtgtttggtgtctatcactcaacactgtgtttataaaattcacctatgttgctccatgtttaggtttgttcattttcattatccagtattgggttgcatgaatatacaacaagttattcaaccattccctaaacatttggattatgtccaggttttagctattataaaacaatgtggttatctctttgaacaccagagtttagttttgcctgtttaaggaaattttataaaatgctactgtgacatacattcttttgtgtctggcttctttcastgaattcgatgtttgcaagattcattcatgctgttgatgtaactggagctccagtg

SEQ ID NO: 64335 - DNA, 1053 bp, Homo sapiens
acagagtctggctctgtgacccaggctggagtgcagtgatgcaatcatagctcactgcagcctagaacaactgggctcaaatcatcctcccacctcagcctcctgagggctcaaatcatcctcccgcctcagcctcccgagtaactgagatgacaggtgctgttaatcaatccattgtcaggttctcagacycaaacattaagcctccagaggaactgaagttttctctccccacctcctacagttttggtgagacaaccaggagataaagtcactccgcagcttctgaagctacagttgagagaccctgagacctgatgaagctggagaaaggtaggaatccttacccagtctgtctcctggatctctgcttgtggaaccaggttgaacaagtggtaatatcactactagtctcatgtttctttccaaacttagattagtagtagaaaacctttttgtaaacttgttcttggtatacatctagtgtttttatttttgctatgagtattctgcatttctggtccctgccccttcagagatggtctttgctttcctttgtcttgttgtcatttgtcagaaagaggagaattgtagggcagaacatgggcataaggtctttttataagcctgtcatttaagcccaccaagcagactggtgacttcatatttctcagcagaccagcatctgtttaggcaaactttgcagtgtatctctcagaaaaaaatcaaatgagatcttccttttgtctatttgtatgtcctgagaaattggctttgttgccaagtgagaacatctctctctggtctctgttacctgggggtctgattgttggttcccatctggctgctagtcaaaaaggccagggacccatgacatgaagtagaaagtagcattctctttgtctgaccatgccagctcttaggggagttagtcttaagaggctcaagtccatgagggcttttgtcatctcaaccttcaccaaaatgagtgactgaagcataagtctcaatcaccgaggattattgagccagcttaagtgcatgcccaggaaa

SEQ ID NO: 64336 - DNA, 687 bp, Homo sapiens
ccttaagaatggtttagcattaaacccttggtgatgagtgggttctctctctgttagttcaagagcaggttgcttgaaggagcctggcatgtctcttgctccctctctggccatgcgacacacctgctcacctttcaccttctgccatgagttataarcttcctgaggcctcactagaagttgagcagatgctggtgtcacacttgaacatcctgcagaactgtgaaagaaataaatctctcttctttataaattacctagtctatggtattccttcatagcatcataaaaacgactaacacactggctcaatcaactaacttttcttaggttcagttttttgtttctgttttgttttgttttgttttgtgtttttggagacagggtctctgtcacccaggctggagtgcagtggcatgatttcagctcactgtagcttgacctcccaggcccaagcaatccttccacctcagcctcccaagtagctgggtctgcaggcacttgccaccaggcttggctaatttttgtattatttgtagtgatggggtttcacatattatccaggctggcctcaaacttctaggcttaagcaatcggtctgcctcagccacccaatgtgctgggattacaggcatgagccaccacacccagccaggttcagttttttaatctattaaataggaataa

SEQ ID NO: 64337 - DNA, 1027 bp, Homo sapiens
atgattcgcaattgcaaaaacatggaagcagcctaaatgcctatcaaccaatgtgtagataaagaaaatgtggtacatatacaccatggaatactactcagccataaaaaggaataaaataatggcatttgcagcaatgtggagttggagaccattcttctaagtgaggtaactcaggaatggaaaatcaaatattgtatgttctcatttataacggggagctaagttatgaggatacaaaggaataaggatgatataatggatttgggaacttaggggggaakggtgggagcggggtgaggaataaaagactacacattaggtgcagtgtatactgctcaggtgatgggtgcaccaaaatctcagaaatcaccagtaaacaacttatccatgtaaccaaaaaccacctgttccctccaaactatggaaataataaagaaagaaacaaagcaagcaagcatatgaaacattaaatactggtaatccagaaaagaggagcaaaattaacagttttgaattaagaactgttaatcaaaacttttatatccaactcagttgttgttctggtacataaaggtaatagtctcaaatttgcaagaacataaaagatgatcactcctgaacatttaacagtctagtcaaacaacagattgaaattaacaaactcataaataggtatgtgaaaagactcctggtaaatactgaccctatatttaaatacaactaatgtaaaataactcatgatcttataaaatgtaagtaaaatgttctaattcttgaaacagaagctagtcaatatagtaatactactactataaatgagctgagacaaaattcacaaaatataaccactattggttagttggggaaaattatgtgggggataggtgggaagaagtaaaatcagtttcttaatttttcatataatagagccaatagatagtttcatatctgacactgacagattgagaaagtggttgaagcatattagttaattagattacatagttgctaagttatcaaaaaa

SEQ ID NO: 64338 - DNA, 556 bp, Homo sapiens
tgttcttgcagcttggtggtattttgtgtgtatatatgtttttaattgaggtgagacatatatgaaagtgcataaagtatactaatcttaggtatagggctcaatgatttctcaatcaccatatgtatatccatgtaatcaccactcagttatagaatattttcaacactgtaaagttcccttgtgccrcttcccaagtaataccacacctaccacctgccctacctcctcagaggtaaccactattctgacttctatctctatagattagttttgcctgttcttgacactttatatatgttcttgaacatatcacactgttttctcttctgcatctggcttctttcactcatcatcatccctataagagtcatccatgttactgtgtataggaatagtttgttaattttttgttgttgagtagtatgtagtattcaattttataaatatgccagaatgtattcattctcttattgaagatgagaacccaaaccatctacatttatacagttgactacctaccttagcatgactctactatttcactggcatcatc

SEQ ID NO: 64339 - DNA, 1286 bp, Homo sapiens
tggccagggcacaagccaagcacagcctgcggggccaagtaggcagggtgcctccagtggtgagtctgaagccgagtgaggccctgggcaagggtgtcaccagctgcagaggtctctggctggcgaactggcaccaaaaaatcctgcgtcatttctacagggaacatttatgagggaagaaggtgtatagtaaatttctagcagccctacagtttttagtaataatttcatttgaagtccattgctggtgttctcacttctaagtcagagctaagcattgggtacacattgggtttccataaagaygggaacaatagacatgggggactgcaataggggaaggagagggagtggggcaaggactggaaaactacctattgggtactatgcttactgcctgggtgataggaccattggtacccgaaagctcagtgctacgcaatatacccatgtaacaaacctgcacatgtataccccatgaatcaaaataaaagttgaaattatatatacatataagttgtaaatatttataatgcataatatataaaatatataatcatatatatatgataagtccattgctgggcatctcatccttctgcactcattttatcactgactgtattgatatggaaatccttaatgctgttttggtcatttttccaggcacgtagtaggtctgtacttcattgttcctttagaggtgagaccatgtgatttgcttcggccagtggaatatgagaagtgatatgtgtcatatctaggtgaaaatttcaaatcctatgattcctcaggtctgcttcccagtgctgcagtggttgtaggagtaaatgttgagatggagactccatggtcttcatcctggagtaacagtgactagaagagctcccttgcaatctgcaatggacagtgaaaaattacttttgttgtgttaagctgctgaggtttgggagatgtttgttactatctagcccttcctggctgataaaattccagaacaatcacaaataaatattgaagagcatcgatggatgtttgtctcagcccatgagtacaaaaattaaagtctgcctttacatctgattgagcaatctcagatgaaatatcaattcaatttattcacttagcaagtatctactgaggagcttctgtgtacaaagcactacatgaagggtaaaaaaatctgtatttggctgggtgcaatgggactcatgcctgtaatctcagcactttgggaggccaaggtgggcggatcacttgaagtcaggagtttgagaccagcctgg

SEQ ID NO: 64340 - DNA, 2199 bp, Homo sapiens
tgcattcaagacatacttttaaaatttttttctcaatatttctaggctatgcaattcatagttttttttcaaatggttgtgagtctccaaagtatatagcaataattaattgaaaaaaaaattcacatataaatggaactgtgccattaaaagccatgttgttcaagggtcaactgtattgctagattaaagggaaggagtgcagggagataaagatgtgcctggcagtttaggtgagagggacatactaaagagattgtggattttattcagtgggccataatgcaaccctggaacttttaaagagtgacacggttagacctgcattgtagaaagatcatttgggttactgtgttggaaatatattagaggacttggaactgaaagccatgtctgtacattctcacttgtctggatacgttgcagrtatcagaatgagtgaagtacattttaagaaatacctgtccgcagcatacaaatttttcaaatgaagactattagaaaatctttaaatatactttgtctagaattgtttattatgtgaatgaagctcaaatatgaattaagatgatctaaagacaatacaatttttggtccgaaatgtaatgtattgtgttcatattcatagcattttccaatgaaggtcaaagttctattctctgttcttgttcttttgctgcaacagagatacagcaacgcagggaacacataaaatgaaacccaagacaggcatactgttcacattccaagtgtttagctatataatttctttgcaataagtatgataattctatattaatctctgacagtaaaaataaaaagtaaaaattgcaagactatcagggatttccctactatacgtgtcaataaaagctgcctacctttgcacagttactgactctatctgaggtttagctacttcagctctaaaaatctctcttggaagtggtggtatcaaagttatatttagttctttaattttaagagagtttagacaattaattttgcctacagatactacattcatatataggatttagttatgccaagaccagagatagaaaagtatgaggttgcccaaatttgtcaattacacctttctctcaaaatggaaatttctttccatttgaagtaaaatgtcaatgataaaaacactagtactatcttttttgactgtatgtccacatttggctgcatgcatgggtcctaaggcagtttttaaatttatctttggcatgaagtgtggtgtgggcattttcagagccatgtgaaactccagttaaaaatatagcacaacaaatcttcacataattgggttttttttggtattaaaatatgactcagatcttacctaacaaatccacattttcttgcgaaaatcattgggatatttagatcccttattaaaagaggaaaagtatacgtggtttgaagaaagtttgtgaatgaatgtttgagaactgctccatatctaatgactaatgctcagcagagactctgaacaaggaaatggctctgctctggcataaaatatttcaaaattattaatagctaaaataacctggaggtattccattttttacagtgtaattctgacagttctccataagcccttgatttaagtgatgattaaaaataaaagttaatagcattactagattatgttggaacacttttgaaagtagtttaaggtaatttcatggtatgactaaccatttttgtaatatagcatatcttatatataaataattgagaaagaagattaccaatcctttgattagtctccaaaatattaactcaatctttgtagtacaattgaagcaacagttatgagcattgtattcaggggaaattataatcaacaaaaattctgcacacacacacacacaaagaattgaaccattctttaaatattacatgttgtgtgattgccgcagaaatttggtaaataatttgcaggtgataaatcaattcactcataatcccaccatgaagatataacagtcttcagtatatttcttttgtgctttttgtttcatcaaacatataatacacacatccatgtttttaaagcaaacacagaccctatactgtgcatcattttaataacctgcttttgtttattcaccaatgtattttccattcattgcacattttgttactgcaacacattaaatacctttgcagattcccactatg

SEQ ID NO: 64341 - DNA, 2199 bp, Homo sapiens
tgcattcaagacatacttttaaaatttttttctcaatatttctaggctatgcaattcatagttttttttcaaatggttgtgagtctccaaagtatatagcaataattaattgaaaaaaaaattcacatataaatggaactgtgccattaaaagccatgttgttcaagggtcaactgtattgctagattaaagggaaggagtgcagggagataaagatgtgcctggcagtttaggtgagagggacatactaaagagattgtggattttattcagtgggccataatgcaaccctggaacttttaaagagtgacacggttagacctgcattgtagaaagatcatttgggttactgtgttggaaatatattagaggacttggaactgaaagccatgtctgtacattctcacttgtctggatacgttgcaggtatcagaatgagtgaagtacattttaagaaatacctgtccgcagcatacaaatttttcaaatgaagactattagaaaatctttaaatatactttgtctagaattgtttattatgtgaatgaagctcaaatatgaattaagatgatctaaagacaatacaatttttggtccgaaatgtaatgtattgtgttcatattcatagcattttccaatgaaggtcaaagttctattctctgttcttgttcttttgctgcaacagagatacagcaacgcagggaacacataaaatgaaacccaagacaggcatactgttcacattccaagtgtttagctatataatttctttgcaataagtatgataattctatattaatctctgacagtaaaaataaaaagtaaaaattgcaagactatcagggatttccctactatacgtgtcaataaaagctgcctacctttgcacagttactgactctatctgaggtttagctacttcagctctaaaaatctctcttggaagtggtggtatcaaagttatatttagttctttaattttaagagagtttagacaattaattttgcctacagatactacattcatatataggatttagttatgccaagaccagagatagaaaagtatgaggttgcccaaatttgtcaattacacctttctctcaaaatggaaatttctttccatttgaagtaaaatgtcaatgataaaaacactagtactatcttttttgactgtatgtccacatttggctgcatgcatgggtcctaaggcagtttttaaatttatctttggcatgaagtgtggtgtgggcattttcagagccatgtgaaactccagttaaaaatatagcacaacaaatcttcacataattgggttttttttggtattaaaatatgactcagatcttacctaacaaatccacattttcttgcgaaaatcattgggatatttagatcccttattaaaagaggaaaagtatacgtggtttgaagaaagtttgtgaatgaatgtttgagaactgctccatatctaatgactaatgctcagcagagactctgaacaaggaaatggctctgctctggcataaaatatttcaaaattattaatagctaaaataacctggaggtattccattttttacagtgtaattctgacagttctccataagcccttgatttaagtgatgattaaaaataaaagttaatagcattactagattatgttggaacacttttgaaagtagtttaaggtaatttcatggtatgactaaccatttttgtaatatagcatatcttatatataaataattgagaaagaagattaccaatcctttgattagtctccaaaatattaactcaatctttgtagtacaattgaagcaacagttwtgagcattgtattcaggggaaattataatcaacaaaaattctgcacacacacacacacaaagaattgaaccattctttaaatattacatgttgtgtgattgccgcagaaatttggtaaataatttgcaggtgataaatcaattcactcataatcccaccatgaagatataacagtcttcagtatatttcttttgtgctttttgtttcatcaaacatataatacacacatccatgtttttaaagcaaacacagaccctatactgtgcatcattttaataacctgcttttgtttattcaccaatgtattttccattcattgcacattttgttactgcaacacattaaatacctttgcagattcccactatg

SEQ ID NO: 64342 - DNA, 534 bp, Homo sapiens
ttttattttcctacaatagctttcctactggaattcaggatctggactctgcagtgggctcagacataagctcctttattataagcagtgtgatcttggcaggtagatcacttaaggtccatgtctcagtgtcctgatctgttcagtaagatttgcactggaaccaacctcatacagttgctgtcagagtgaacatatacgaagacttaaaagaataatctgcacaggaaaggcattacgtatgtattggctgctacttccaatacttccactactaatattactataccattttctgtgaagctatcttaaaactgtcccattctcaagccccctcaattttcctctaatctctcagtctcagtaggtgacgcaggtttcttcaatgttccagagaaaatgggggcctttgggaccaaaaccttctcaacttctcaccacattcctctcaaactactaagggactttatrtccttctttttctcccatcacagaggagaaagtcctctactagtctttctagtacttccttta

SEQ ID NO: 64343 - DNA, 1020 bp, Homo sapiens
tctgggaaattatgatctttccttggcacttgtggtcatcttgtaaaaatgagatgatcctccaccccaaatttgatttgaatatcaagactaatgatatccatgcaggtatcaagagagtataaaaaggtttgttacataatgagactttgtggagagagcagggcatgcttccaagcagatccaaaaaattgcttgaaggakaatagagactgtttggcttttattgtggttaggaggtagagttgtcatgatttttgcacatccataggccagagcttgcacagtttaaactttccactggcacaaaggaagctgttaccaggctttctcagctttcccagatgcggtacagaaggcagaaggggagtcatggagtttgaaaaactgtcagtagtcaaatgtcaaaattggagttaactcttcactattacactatcttggaactatgtagggaaggggatttggagatatttagaggaggtatggtgatgctgagttaaatagccacacatctcataaactgagcatggtctcagacttctttatcccatggtactcaggtcaacaaggtgccactgtggatgtgagcagtattttctaaaaataaaacagtcacttttgaagttaaaataatatccactttaaaaatcaagatgaagaccagaaaaccctttaaagtatgtaaagagaaaaaaaaagtaagtgacataagccttaaatcatagtaaatcatcaactaaatatggctagaaggtttcccctgccagatatcttgcctgtggaatattgcctgctctcctaactactccccagaattattgtgatagagaagaggattggtacttgaaaattatatatatatatatggttgtcttctttagatagttcacactattaaacacaggaccacactttctcaaaatttctcaaagacaaatggtgtatataatataatgaatgtggatattcacctccagcacacacatgaactggaaatttcagcttaattaggaaaaa

SEQ ID NO: 64344 - DNA, 1020 bp, Homo sapiens
tctgggaaattatgatctttccttggcacttgtggtcatcttgtaaaaatgagatgatcctccaccccaaatttgatttgaatatcaagactaatgatatccatgcaggtatcaagagagtataaaaaggtttgttacataatgagactttgtggagagagcagggcatgcttccaagcagatccaaaaaattgcttgaaggagaatagagactgtttggcttttattgtggttaggaggtagagttgtcatgatttttgcacatccataggccagagcttgcacagtttaaactttccactggcacaaaggaagctgttaccaggctttctcagctttcccagatgcggtacagaaggcagaaggggagtcrtggagtttgaaaaactgtcagtagtcaaatgtcaaaattggagttaactcttcactattacactatcttggaactatgtagggaaggggatttggagatatttagaggaggtatggtgatgctgagttaaatagccacacatctcataaactgagcatggtctcagacttctttatcccatggtactcaggtcaacaaggtgccactgtggatgtgagcagtattttctaaaaataaaacagtcacttttgaagttaaaataatatccactttaaaaatcaagatgaagaccagaaaaccctttaaagtatgtaaagagaaaaaaaaagtaagtgacataagccttaaatcatagtaaatcatcaactaaatatggctagaaggtttcccctgccagatatcttgcctgtggaatattgcctgctctcctaactactccccagaattattgtgatagagaagaggattggtacttgaaaattatatatatatatatggttgtcttctttagatagttcacactattaaacacaggaccacactttctcaaaatttctcaaagacaaatggtgtatataatataatgaatgtggatattcacctccagcacacacatgaactggaaatttcagcttaattaggaaaaa

SEQ ID NO: 64345 - DNA, 1056 bp, Homo sapiens
tggtcttgtgtttatcagcgtttgttctccagtgaactgcaggtgcagagatgagtaatttaatttgcaggagaagtatgaggaagcttatgtcaaaagatgcaattttcaagtaattgccatgttactaacagtgtgaaaacagttacagtaactatgtgtttattcctttccaaagttaacattatatttgttttcttattagcttttcttatttagttctcttgagtcaaagggattccaattgtgttatcatgtgaatggaacataatacggcaattcattttcattaaactcaacttagaggatggcttatggagcctagcaacaaggaataaaggaagaattagccagaagcatttttgtttctgaattttctgagccaagtaktcatgtcatttcactctggggaaaaccaataatttattcaatttttccaatcagaatcacttggtgcttaaaagacaaacttggtgcttaaactaaacttgaaaggcattatgtaggaaaaggaaacataactaagacaatatacattttagaagaaatattatttttagtaataggttagtcaatgtgcagccgtaactcccaaaaatgtctacaagaaaggtaagttttttagtgcacaaacaatgcagatggcttacattatcatgttaatattgtgttcttggcagacatccaatactttctttttcctttaatatttaggttgaaaatttgcaaaaataaaaacaaatcattattttgattctggaactcacatcatttaacttttttctctttaaatatgcttacttcctaattagtcttctggctcttaaccttaatattgtagtttattataaaaaaaagaagctcccagagtaatctttaaaaatgaaatttgatcatatgactcctcagctcaaagacacttaaaaggcttcccatcacctgaggaataaaactccaaacttgaccaagccagaacacccagacctgatccttgtttacctctctgatatctgatcaaattattttccacttggctcacatcacttaattaccttt

SEQ ID NO: 64346 - DNA, 1056 bp, Homo sapiens
tggtcttgtgtttatcagcgtttgttctccagtgaactgcaggtgcagagatgagtaatttaatttgcaggagaagtatgaggaagcttatgtcaaaagatgcaattttcaagtaattgccatgttactaacagtgtgaaaacagttacagtaactatgtgtttattcctttccaaagttaacattatatttgttttcttattagcttttcttatttagttctcttgagtcaaagggattccaattgtgttatcatgtgaatggaacataatacggcaattcattttcattaaactcaacttagaggatggcttatggagcctagcaacaaggaataaaggaagaattagccagaagcatttttgtttctgaattttctgagccaagtagtcatgtcatttcactctggggaaaaccaataatttattcaatttttccaatcagaatcacttggtgcttaaaagacaaacttggtgcttaaactaaacttgaaaggcattatgtaggaaaaggaaacataactaagacaatatacattttagaagaaatattatttttagtaataggttagtcaatgtgcagccgtaactcccaaaaatgtctacaagaaargtaagttttttagtgcacaaacaatgcagatggcttacattatcatgttaatattgtgttcttggcagacatccaatactttctttttcctttaatatttaggttgaaaatttgcaaaaataaaaacaaatcattattttgattctggaactcacatcatttaacttttttctctttaaatatgcttacttcctaattagtcttctggctcttaaccttaatattgtagtttattataaaaaaaagaagctcccagagtaatctttaaaaatgaaatttgatcatatgactcctcagctcaaagacacttaaaaggcttcccatcacctgaggaataaaactccaaacttgaccaagccagaacacccagacctgatccttgtttacctctctgatatctgatcaaattattttccacttggctcacatcacttaattaccttt

SEQ ID NO: 64347 - DNA, 582 bp, Homo sapiens
  misc_feature (1)...(582): n = A,T,C or G
tnnnnnnnnnnnnnnnnnnnnnnnnnnnnnnnnnnnnnnnnnnnnnnnnnnnnnnnnnnnnnnnnnnnnnnnnnnnnnnnnnnnnnnnnnnnnnnnnnnnnctggttccatccatgatgttgcaaatgacagtatctcattcatttctatggctgaatagtgtatttgtatattatrcatagtgtatagtgtgtgtattgatattaatagtgtatatgtatgtgtatatgtactacatgttctttattcattagtttgctgatggacacaggttgcttccaaatcttggctattgtaaacagtacttcagtaaatatgggagtgcagatccctcttcaatatacggatttcctttcttttggctgtatacctagcagtgggattgctgaatcacatggtagttctatttttagttttttgaggaacctccatactgctcttcatagtggctggactaatttatattcccaccaacaccagatgaggctcccttttctccacatcctcatcagcatttgctattgcctgtcttttgaataaaacccactttacctggggtaagatcatatctcactgtggttt

SEQ ID NO: 64348 - DNA, 917 bp, Homo sapiens
ggtaatagaaattttcaaggtacaaaatagggcactagattttaacataatatactacataactttcactgctgtggtttcagattccacattggaaccatcctttaagaaactagctaggacttgtccagttttggtgtagtatcaaagaagattatccccacttatctgaaaaagttattataatactcctccttttttcaagtacatatctgtgtaatgctggattttattcatatacttcaaccaaagccatatattgcaatagacccattgcagaagcagatctgagaatccaactgttttctgttaagcagtcattagggaaatttgtaaaaatgtaaaacagtgctactctttaattttcttgtgttgaaaaacagtactttttcataaaatatgttatttatatttacatgtagtaggtttattattgtgttttaggatgtatcaattcttaaaaatttctctcatttcaatttctaatacagcaactcacaaacaaaagccctttgaatcttcaatttttaagygtgcaaagtggtcttgagataaaaaatgtggagaatcggtgctgtatttattccatgtttgccatggctaggggtaaaaaggagatgggaggggtggaaaagtgaatattgatagtgtcccagctgcaaccctagtgggagagttgcacatcatggaagtgacatcccttaactttatctgctacttgggtaaatctcttcataccttttatggggctaaatttcttaggaaacatgaacatccctaagatccatcagtagatgctagaaagtgataatttgagagcaggtttagcagagaaaatgaaagcattcccatacaacccactcaaatgcagagctgctggcccggccccatacaaatttgagaaaagtagggagatc

SEQ ID NO: 64349 - DNA, 917 bp, Homo sapiens
ggtaatagaaattttcaaggtacaaaatagggcactagattttaacataatatactacataactttcactgctgtggtttcagattccacattggaaccatcctttaagaaactagctaggacttgtccagttttggtgtagtatcaaagaagattatccccacttatctgaaaaagttattataatactcctccttttttcaagtacatatctgtgtaatgctggattttattcatatacttcaaccaaagccatatattgcaatagacccattgcagaagcagatctgagaatccaactgttttctgttaagcagtcattagggaaatttgtaaaaatgtaaaacagtgctactctttaattttcttgtgttgaaaaacagtactttttcataaaatatgttatttatatttacatgtagtaggtttattattgtgttttaggatgtatcaattcttaaaaatttctctcatttcaatttctaatacagcaactcacaaacaaaagccctttgaatcttcaatttttaagcgtgcaaagtggtcttgagataaaaaatgtggagaatcggtgctgtatttattccatgtttgccatggctaggggtaaaaaggagatgggaggggtggaaaagtgaatattgatagtgtcccagctgcaaccctagtgggagagttgcacatcatggaagtgacatcccttaactttatctgctacttgggtaaatctcttcataccttttatggggctaaatttcttaggaaacatgaacatccctaagatccatcagtagatgctagaaagtgataatttgagagcaggtttagcrgagaaaatgaaagcattcccatacaacccactcaaatgcagagctgctggcccggccccatacaaatttgagaaaagtagggagatc

SEQ ID NO: 64350 - DNA, 539 bp, Homo sapiens
taaagacctgtttcttggcttattccttattcaccaagctaggttccagcgtaactgwtgtgaacctggatattgaactaaccagagatgggtccactttcatatatttgatatttgtcagactgagataaaaatggaagtcgagacacaaaatctagaaaagatattgtttttgacattaaagagctaaacatctagacatttgatcagtcttgatgagtaaaagccattgggacaatttgaacttgttaagcaattccagtcttaaaagtttttgcacatctagttagaagtgttcaaaccagtataacatggccaagtcccatgatgtattagggacactctttgagtaacagtcagagaacttgagttctagtcctgcttgtccagatagctagcaagcatgtgacctgccagagcctctttccttacatgtgaaataagcatatgagaacttgccctgtttctttgataggattgctgggaaaccaaatgagaatatccagctaaagtagacacactgtgacacacttgagccc

SEQ ID NO: 64351 - DNA, 606 bp, Homo sapiens
cactcttcaggaaagggacattcctggaggcagaaatgtagcgcagctctgaatgagrccccaaaagatgggagatgcagaagcccctttgggaggagaggacacctgggcaacccttgaccccctttcccacccccacctccaggttgggagcacgttcctgcacgtggctatgctgtggggcctctctcatgagtcagagcggagggagacagctgtgcctctggagtctgcttttaattgtctggaaatgcagagatgtctggtttttgcctgagcaaaataggagtttatttttgtactatcccgagctggctaaggagagtcacgtagctgtgggcggggtcttggggatgaggaggggtacagcaggcagggactatgctgaagtggagctggctgtaggaaccccagggaggcacagggggagcatgaagaggagctacacttccctcccttagtgcccgggcagaaactcccagggcccttcacagaaccttggaggaacattcaacacccccatctctaggacagccccagccttgtcatcctccaattgctgtggtaacacggggactggagcagtgagattattaggccttcagg

SEQ ID NO: 64352 - DNA, 1269 bp, Homo sapiens
tgagctaacacttcctgtgtgcttagtgtgtactggaaacttcttccattgctgtttcatttgagccccacaatagttctgaagggtacatatggatccatttcacaggtgagaaaacagcacagcatcccgagagcaagagacaatcccagagtggtagcctcggcagctgcccagccccaaaacctgggcccttagtcacagtgcagcagatacaccttcagttgttcattaaagcaattgccatggcagccaccgagcaaggctttgctgccctcacaagaatgcacccaaaagtaatacaaagagtgcatttccatccatagccaggtcaggcttctctgctgaggcagacgggtgtcctctgcagctagacagagtctgcaaagcctgtgtcccccaggagggttggcacacctgtcatgggcctctttgcacaggtatgcctggcatctgggaggtgccagtgctgatggcttctgacagcagctcccatcctggctggctgctgggtgcaggcttctggctgctgtggttttggctgtgtatttttaagtgtgttctacctgcagccccagaccaggggcttagcgtgtgcccccccgatgagcatgtgcccagttgccccgtggctgtggctggccatgtggctcaggccggaagagaaagacaggcaatgtggccaattcatactggggaccctgaagatacagcttcagtggctgctctgagagagccagggccacctcttactgtcagacaagaaggccggctgccccaggcctgacagtctgccatgggcctgcacctgtcctctctcctgcctctcgtttccctctggtggtagcttctcacccagaatggggaggcagcgggaaagatgatagggtcctgtcttagtgtgttcaggctaccgtaacaaaatatcatagactgggtagcttaaaaacaacagaaattagtttctcatggttctggaggctgggaagatcaaggtgccagtaggctcgatgtcttgggaargtccaccttctcacagatgtcactcgtgccgcatcctcccatggtggaggggcccagcaagctccctcgaggccttccatgagggctccagtcctgttcctgagggctctgccctgatgacccagttacctctcagaggctccagctcccagtaccacctccttgggtgctagggtttcagcatgtgagttgtgggagttcacagtcattcagaccacagcagctgcccagccctggctttgagtt

SEQ ID NO: 64353 - DNA, 649 bp, Homo sapiens
tggaggaaacttaccccctatccttatactggtgcaacttcttccaagacctcaaagttggacaacgtgagccagtcttttttcttgtctccacttgctagggctgtcactgggacagtcctggggcgggatggggtggaggggcaatggatgaatggatggatgaatggacagtagtccagggaggatgtccctgtctgtcctgaactgggcccttcctccaatgagaagccttcctgagtgagtttatacagtcaacccttggtatccatggaggattagttccagggtccccagggatgccaaaatccatggatgctcaagtctctgatataacatggccaagtattttttattttttattttttgagatggagtttcactyttgttgcccaggctggagtgcgatggcgcaatcttggctcactgtgacctccacctccggggttcaagcaattctcctgcctcagcttcctgagtagctgggattacaggtatgtgccaccatgtctggctaattttgtatttttagtagagatggggtttctccctattggtcaggctggtctctaactcctgacctcaggtgatctgcccgcctcgacctcccaaattgctgggattacaggtgtaagccaccgcacctggc

SEQ ID NO: 64354 - DNA, 1572 bp, Homo sapiens
ttgggccctgctgacccaggcaaggcgcctttgtgatgcttgcctttatctcagaatgtcactggtgcttagcacccgtccgctctctgccctgcctctgtgttctacagcagctacacacagacagtggtatctgtgagcagctctgtggactcaaaggttttctccctgagaggcgtaacccaggccagctgattcatcagaatcaggtgagtgtgacctgctctcttccctccatgctgacttggggacagtggctaatggtgtgggtggtgctggcctctgggcacgtgctgaggagggtcatccctgarcactcaccgggtgcccgttctacgctgcccgtgtggacagttgtctctttcatcctcatggtggctcccgcatgtacccatttgacaggtgagatgtctggggtcagagaggcggtaactggcctgggaatcccaacaggaccctgggttttgctcttggccctgccctgtgccatgttggacttcaggcctgaaccctgcggcctccttgccccagatcccaaatctgtccagggtttctgatccccactgggatggggcagagcctcgccatggcagagccactgagatggatccattgtgggtgaggtggaggggagggtcctcagaacacatctgtgccctaagctgggtcttgatggtccctgtgggacccactgaacacacatggtcctttgtccgagagtgggatggggagccttctgcctttgggcagtcgtggaaaatgaaggatccctggtgagctggctggagggagactgtcttccctcctgttaaaaggggtccaggtactggggttctccgcaagtatttctttctctgtctgatcctctcgaggcctcaccctccttttgccctgagtgttcccaggagggatggtccatctaggtgttctccagaaccaaggacccactgttcttcctcagtgacccaggaaaatgaagccccctcctgtatggatagctcagaatggtggagtccaccgtccctccccgagagatgtggtttccacgagcataggggctgctttggagacagtagattattttcatcccccaaaccaaacaccctcctgcttaactggcgttgttcctaaagtggcttcactggtgagactgaagggccacagtagcccaagtgatgagtggagtagaaccgagcagtcaggagaggtcttgttcccgtaggaaactgggcatctctgtggtccctgagcatcccaggaggccgactgtacagagacctctggtccctgaccccagtctgcctccacatccctggaatagcccatcatgggcccttcaaccttggcaggtggacaccattcaacatgctggggcaggtgtgtacccgtttcatggcatttggggacaacaggattctctgtccaggtcccagtattctcaagtccttgggaagatgcccacccctgcttggggcttgagactccagagacccatgcaggtgtgggccactgggtctggccccttttcacctgagggcagtggtggaaggggggttacaccgccaggcagaa

SEQ ID NO: 64355 - DNA, 713 bp, Homo sapiens
tgggctccctaggagcacagggcagggacgggtggccactacmcccagacccttgcacccgttaccttggacccctcatcaaggctccctctggattacagggacaccgagctgggctgccagcagacacggggcctaaagcctgttggaatctacagcagcactgatcgctttgggattctgcagtgagtcctctgtgctcccctcagcccctaaagcacttatttcagcttagggatgggtttacttttagaagggactttctgaagcagaacatgtctgcccaggtcgggccaacctcctttccaggatcagaactcctccctggctcccctgcaggtccagcctgaggttgttgttaggccagtggtgcggggcccatctagggagtgggtgggaatggagagggggctaggtcaggcccctgggctctcagcagttctgtctccgagttagcacaagaggaggggggcagcctgagggtctggccctgttcacttggagacaaccccagtgagatccaagggttgtggccacagggtgaggagacgcctggtccagcctcggggctgttgtccagcaggtctctgagggcccacctgcccctgttcacccccatttccctagagctacagccctcactgtccccatggggaagggggaaaggcatggggacagtaggggctgtggccttaggggaatgggggagaaga

SEQ ID NO: 64356 - DNA, 713 bp, Homo sapiens
tgggctccctaggagcacagggcagggacgggtggccactacccccagacccttgcacccgttaccttggacccctcatcaaggctccctctggattacagggacaccgagctgggctgccagcagacacggggcctaaagcctgttggaatctacagcagcactgatcgctttgggattctgcagtgagtcctctgtgctcccctcagcccctaaagcacttatttcagcttagggatgggtttrcttttagaagggactttctgaagcagaacatgtctgcccaggtcgggccaacctcctttccaggatcagaactcctccctggctcccctgcaggtccagcctgaggttgttgttaggccagtggtgcggggcccatctagggagtgggtgggaatggagagggggctaggtcaggcccctgggctctcagcagttctgtctccgagttagcacaagaggaggggggcagcctgagggtctggccctgttcacttggagacaaccccagtgagatccaagggttgtggccacagggtgaggagacgcctggtccagcctcggggctgttgtccagcaggtctctgagggcccacctgcccctgttcacccccatttccctagagctacagccctcactgtccccatggggaagggggaaaggcatggggacagtaggggctgtggccttaggggaatgggggagaaga

SEQ ID NO: 64357 - DNA, 621 bp, Homo sapiens
agtgagaaccacagtcctggcttggggatggctgcccgcttgtgtcaggaccccacctagagactgggacctgacctaagactggtgtgtctgtggcctgaggatggcacgtcccagggtcccaaggccagcccactggcactcatttgctcaaaggccctcagcctttatggtctgcccttccctggctccttctagctgggtcccaccagggctccagagcccaagacccagcatccacgggtggctctgcgaagcctggcagctccgctaactccaacattcctcatttgacagcaaatgcggcaggagatgagatgaaagagcaagtggatggaaatgctgggagaatgggagacatatcagaacagcaaaaaagtaatgtgtggagggagaggcccccagaaccactctctgcagagacaggggacaggcacccatggctgtggcctggcaccgtcagcctctcagagggcaggtggcacacagtgctcacccagaggaccgcaggcctggttgccagctttactgcccgttcatgcaagcawcaccttgctgagagggaatctgaatctagggctggggatgcctcctgctgacccgaaggaaagaaaaggtcca

SEQ ID NO: 64358 - DNA, 683 bp, Homo sapiens
tttaggatgtctctgcctcacgcrgtcagacccagagagagccaccctggccaagtgatctcggcttttattgaagacaccttccttgtgttgccagcttgttgggagcctttaggatgtcccacaggagcccggggctgacccccagagcccaagtcagacacctttcatcttcatcagcagaaggcatctcatcttccccaaggccgccctgtgtatcatggagccacgccctctggctctgattctgtgcagctgactctctcctccctgagagtcctcttgcccttcagctgcccaggctccagcttcccttggtacccacaaatgggccaaccaagcccagatggcagcatctccccatcccgtgtcccctggcccggccccacttccaggagacgaccacgaagcccagcacccaccctattctggccaccccctgtcgtggcctcaaagtcaggcttgccctcccggcaccctggcccaggaggcctccaggggcacctccagccaggctccaggggaagctctcatcaccctccccagggccaaggccacatggtggggtcaccagatgggagggtgggaggcctcggggtctggggggctctgcagctgcccagctcttccagctgatggctccacatcttgggagagggctctgatttcatgatgggctgggg

SEQ ID NO: 64359 - DNA, 1028 bp, Homo sapiens
tgcatttccacatctactacacctatatcccctgactctcagagatctagcaacttgcctgcaaacttgagccttcctcactacaagttaggccttggcatcttttgcccagactactacagtcctcactggctccaccagccatctcctcccacccccacccatcctctgtgtggtccacacacaggtctgatcttgtcacttgccagtgcaygaacactaagggacctctgttgtggaaatcagactagtttcagaaactctgaagtggggctgtaaccatttagtgaagctctgcacacaggaagagatgcggggagcaacctccactaagagccagggactccttcacctcagttcttaacctgggagttttatgggttcattttgatacatgatgtgatccagggcctgtacccgcttctagaagttatcttgggatccacaggagaaagacttcgcactttttaagtatataaacctgcagactatatgtgaatagttttaagtacagtatatatcttaaaaaggggccaggcacagtggctcacgcctgcaatcccagcactttggaaggccaacccaggcagatcacgaggtcaggagatcaagaccatcctggccaacatgttgaaaccccatcgctactaaaaatacaaaaaaaaattagctgggcgtggtggcatgtgcctgtaattccatctacttgggaggctgaagaggagaatcgcttgaaccagggagtcggaggctgcagtaagccgagatcgcaccactgcacgccagcctggcaacagaggaagactccgtctcaaagaaaagggagggagtaactgtaagtaaatatccattggaaaagtgatttaaatatacattttagaaacaaggagagtcacaattagcaaggtaaagtagactctgaaaggacaagcagatgtgcatttccaaaggcggagtctattctgttcagtttctactttatgagacatctaatttttggtgatggggtggggaacaatttccaatgc

SEQ ID NO: 64360 - DNA, 960 bp, Homo sapiens
gtgattgtacatacttacggggcaaatatgatgttcaatgaatgtgtacatagcataacaatcaaatcaggataattactgtatccatacatctcagtccatttgtgtttctataaaggaatacctgaggcttggtaatttatagggaaaaaggcttatttgacttccaagtctgatgtctggaaatgttaagattggrcatctgcatctggcaagggccacaggctgctttcactcttggtggaaggggatggagagccagagccaccctctacagagatccaatggtgagagagaaagggtggtggaggaggtgtcaagctcattttaactattttactaacagagcaagaactcacttattacttttacgaaagcaccaagccattcttgaggcattcatccccatacctccaaatatctctcattaggttccacggaacttcatcattggggatcaaatttcaacatgaggtctggaggggtcagaaaatagcaccatcattttaaacatttattatttatctgtgatgacagcattcaaaatgttctcttctggctaccttgagagggatgcggcaaattatgatttacagaagtcctaccagaaaacactattttagccagtgttaaacttgaatttcaaaattactagttgtatggagtagaaatcagcaaactatggcccatcggttaaatctggtctgctgcctgtgtttgtacaatccacgaattaaaaattgttgaaaaataaaagggaaatatcatatgccatgtaaaaattttatggaattaatatttcactgtatataaatagactattcatttatctctcacctatggcttctttcacactgtaactggagttgagtagttgcaccagaaaacgtaatacccacaaacttaatatatttaccatctagttgtttgcagaaaaatgtttggttaccccagcacaga

SEQ ID NO: 64361 - DNA, 1071 bp, Homo sapiens
tgaggcttaatgggcaaatgggcagagtagaaaactcggggtctagctgggactaccagctgcgttcccaccctggatttccaggggtcgtcatttttgccctttctaaccaaaggtcttgcctctcgtgggggtggggacggggtctccctctgtggccctcttccaaacccttcccgcatctcccctccagcatctgacgccccacttcgaacgctcgcgggctctccctcccctcccagccgatctccctctgcgagtgggagctccacccccgcggctgtggccccccggctcggtggcggttacgtggctgttcagccgctcgctctccgccgcccctgcgtcgcctccccacagtaacgacgccatggctgcgattgctgctcccgcccccagcacgtgcttccaccaccggcgcgaggcggtgctggccccatccgctggccaatgggcttccttagggggcaggcgtccgcgtccgcgcccgcgaccaccgcggtgcggcgcgcaggcgctggaaggctgggtggcgcgcggaaggggcggagggcagagagcggggcggggggcagagagcggggcggagggcagagagcggggcggagggcagagagcggggcgaaagggcgcggaccggagggcagagggggcagcttccgcagagtggagagcgccccccgcgccgccccgcggcccgccgctcacacagccctccaggcgggagccccccggactccccgccgcgctttacgccccgtgtcggtttccctggaaatttccgcctccacatcacaagatgtcagaaaggttagcgaattggttagsaaagtggagacaaaatctgatgaatttgatatgacgaatgacctcgaatgccacagttgcggaaaggaagcagaactgttcaagctctaactgctgttcctgccctagatacctgtgatgttccacataggctttttaaagcttttattctgaaatgtggtctcttgttaaaaacattacctttcggtataacctctacgtcctacatgcgtttgcataatccggtatagatccctggatccc

SEQ ID NO: 64362 - DNA, 733 bp, Homo sapiens
agtcttccttttatttaaaatagttgattctcaatcctggatgttgtaactcccacagtagacttttggtgatgtctagagacatttttgatggtcacaatcgaaagagtgctgctgcatctagtgggtagaggccaggaatgctgccaaacatcctaaaatgcacagaacagcccccataacaaagaagtatcaagacaaggctgggcgggtggctcacgcctgtaatcccagcactttgggaggccgaggcaagtggatcatgaggtcaggagatcaagaccatcctggctaacacagtgaaaccccgtctctactagaaatacaaaaaattagccgggcgtggtggcgggtgcctgtagtcccagctactcgggaggctgaggcaggagaatggcgtgaacccgggaggcggagctttcagtgagccaagattgcaccactgcactccagcctgggcgacagagtgagactccatctcaaaaataaaataaaataaattaaattaaattaaattaaaaataaaaaaagaagtatcaagacaaaaacrtcaatagtgctgaggttgagaaaccctgatttacaacattaatatctttcactctgcatcaacatttacaacatctgtccctcccaaatgaggaatctcatttattattagtaatttcaggacaggaactaagtgaaataaattactaagtgaaaggtagtaactaaatgttcttcttctgag

SEQ ID NO: 64363 - DNA, 733 bp, Homo sapiens
agtcttccttttatttaaaatagttgattctcaatcctggatgttgtaactcccacagtagacttttggtgatgtctagagacatttttgatggtcacaatcgaaagagtgctgctgcatctagtgggtagaggccaggaatgctgccaaacatcctaaaatgcacagaacagcccccataacaaagaagtatcaagacaaggctgggcgggtggctcacgcctgtaatcccagcactttgggaggccgaggcaagtggatcatgaggtcaggagatcaagaccatcctggctaacacagtgaaaccccgtctctactagaaatacaaaaaattagccgggcgtggtggcgggtgcctgtagtcccagctactcgggaggctgaggcaggagaatggcgtgaacccgggaggcggagctttcagtgagccaagattgcaccactgcactccagcctgggcgacagagtgagactccatctcaaaaataaaataaaataaattaaattaaattaaattaaaaataaaaaaagaagtatcaagacaaaaacgtcaatagtgctgaggttgagaaaccctgatttacaacattaatatctttcactctgcatcaacatttacaacatctgtccctcccaaatgaggaatctcattkattattagtaatttcaggacaggaactaagtgaaataaattactaagtgaaaggtagtaactaaatgttcttcttctgag

SEQ ID NO: 64364 - DNA, 648 bp, Homo sapiens
atgttccaacaaactttaaagtaccttgaagtcaaattgtctgtttttgttttgttgttgttgttgttgttttcttaagtgttacattaaaactctaaccaaggaaagggttctttaagaacattcccttagagggataaagttgagaagtgtgccttttttttaatggcttgaagtttcagaggtgataaaaattaaaatcacactactatttgaagctcattttctatgcaggtttttaaacgtcatttatgtatcattctttttatatatcacacttaagcttgtgttagcttttttcttttgccccagatcaaactgaacaatgtatataacactatctgtctgtaaaatactttttttaagaaagcatttatatttatatgacagcttgaactgacaacmttgtgtatatagatcatcttgaagtattatttcacattgaaaagaagaaaatatattgataactatagatgttatgaagaagagggtatttctagttttgtactaaaaatcaattggatgaactaaatccaaaacatgacactgtaggcagcagttttaagtcttatttttactgtttatatatttgaatgctgctacaacagatgatcttcatccctgaagttttcagctaaacttggtttc

SEQ ID NO: 64365 - DNA, 617 bp, Homo sapiens
aaagagctgcacccccacctcaggaagcctggagaaagccaggcagcagcaggacagtgagattttgttcaacaaatctgtattcatagccagatactataatgggrgttggaaaatacaaagatgtgaggggctctcagcttgtctgtaatgaagtgatcagggcagggcaagagtgtcagattcagtcatgtaggagcagccctgtgcagaaagaaccccacggccagggagggaggctcaagggaacatatggctgtcaccatatgggagtcgagagggctgagaagaaagacctccggggagagtatctgaggcttcctaaatgctcatacctcaatttatagcagagtgctgtcacctgaattccactcacactgctctgctgggtctcctcactaaagcaagcacacccactgagaactacggcacgcttgggccatctggcccctctcccacaccctgcaacacacacacatacacacacacacacacgcacacacatgcatgcacacacaggcacacactcaccaactgaggtctgtgaacaatacaacctcagtcagttgcactgtttcatttgtacatattaccgtaaccaacaaatgactgcaaaa

SEQ ID NO: 64366 - DNA, 667 bp, Homo sapiens
aaaggcttagatctgtctcctgggcatgtccttaactctggcaaataaatctcctaaaatgattgagacttgtcacatcattttcctcaattgacacctcttaagaaatcacctaacaagatcagtgtagtggatgctgtggtgtgtctcccagacacactccatccctcggctactagggttttggaggctgacttcctcagttaaatgctgctccaggattttccctcggttgttgaaagccaccttgtggtaggcatgccaccttcttgggggcgacccctatcaaatgactggctgatatgtaygtacgtgagcatgcttggggaagtgcatcacaaagatactattcctcccacaaatctccctgaaactggatttattttctttactatgagagataacactactaatatcagataaaccttttttcctcatattgtttcaaggtggtctatcacaggtaaatagacttcctgtgcaaggtaaaagtttaaaagtctaaaattaagtgtattcaataataataccaatctaagaccaacatatttatgtctttttaacataatttctactgtattcttgaaaaattatttttcatttaaacagctatttttataatttatttcacaaatatttaataaattttatcacttgtataacatat

SEQ ID NO: 64367 - DNA, 667 bp, Homo sapiens
aaaggcttagatctgtctcctgggcatgtccttaactctggcaaataaatctcctaaaatgattgagacttgtcacatcattttcctcaattgacacctcttaagaaatcacctaacaagatcagtgtagtggatgctgtggtgtgtctcccagacacactccatccctcggctactagggttttggaggctgacttcctcagttaaatgctgctccaggattttccctcggttgttgaaagccaccttgtggtaggcatgccaccttcttgggggcgacccctatcaaatgactggctgatatgtacgtacgtgagcatgcttggggaagtgcrtcacaaagatactattcctcccacaaatctccctgaaactggatttattttctttactatgagagataacactactaatatcagataaaccttttttcctcatattgtttcaaggtggtctatcacaggtaaatagacttcctgtgcaaggtaaaagtttaaaagtctaaaattaagtgtattcaataataataccaatctaagaccaacatatttatgtctttttaacataatttctactgtattcttgaaaaattatttttcatttaaacagctatttttataatttatttcacaaatatttaataaattttatcacttgtataacatat

SEQ ID NO: 64368 - DNA, 667 bp, Homo sapiens
aaaggcttagatctgtctcctgggcatgtccttaactctggcaaataaatctcctaaaatgattgagacttgtcacatcattttcctcaattgacacctcttaagaaatcacctaacaagatcagtgtagtggatgctgtggtgtgtctcccagacacactccatccctcggctactagggttttggaggctgacttcctcagttaaatgctgctccaggattttccctcggttgttgaaagccaccttgtggtaggcatgccaccttcttgggggcgacccctatcaaatgactggctgatatgtacgtacgtgagcatgcttggggaagtgcatcacaaagatactattcctcccacaaatctcccygaaactggatttattttctttactatgagagataacactactaatatcagataaaccttttttcctcatattgtttcaaggtggtctatcacaggtaaatagacttcctgtgcaaggtaaaagtttaaaagtctaaaattaagtgtattcaataataataccaatctaagaccaacatatttatgtctttttaacataatttctactgtattcttgaaaaattatttttcatttaaacagctatttttataatttatttcacaaatatttaataaattttatcacttgtataacatat

SEQ ID NO: 64369 - DNA, 1003 bp, Homo sapiens
tgcatgaaatggtggtgtttttttcagggtgtgttgtcgctaatgggtaaatagttctgtttctcttgcagaggatgaaaaacacatatccagaatttttgcaggcagtgagttttcttccatcataatatgaacagttttgtaatggtaaacatgagagcagcacataaataaatgaaaaatcccccttgaaaatctgaatgggtttttagcacccaagtacctaatattcaatttctggtacaaccagagccaggtgttaaatttctctagttactgtcactaatgcaaattagattctttttctgctcgtaaaaaatcaaatccacattagaaattagctataaaatgtaatgacttaaatgctatagtgttttacaaatctctctgcatttctatggtagataatgctgtaaaacagagagaagataataaaatatggtaggaagttatttaaaggtcttttgtgactgcttacttaaaaatctgatgtattcttttgctcttcttcctgtctgtcccccctccactgtgggaaatgagcatatttatgattctatttttttacagcttagaagtaatcaaatccatttttaagtgatgttataagagctagaaagatcatttgcgttaytgaaaaaaagaatatcgcccagagaagtttacacctttgcaacttttaatcattggtattgtaaaacatcctgaggaaagtttggactggttaaacaaggagcttaattagcattttaaactctttattaacagtatcaccaaatttacctagaagattgtttgataatcctcacccaccaccctaccccctttctcctgcacaagaatatccaaacgcaaaagagaaacccctctttaatatggagtattaaaaaaaaaatcctacaatacacagcagagcacaattgaactgggaagaacatgaaagctatgtatttattcacatttaaatcctagcagcatcccatttgctcagctatggaatgca

SEQ ID NO: 64370 - DNA, 1003 bp, Homo sapiens
tgcatgaaatggtggtgtttttttcagggtgtgttgtcgctaatgggtaaatagttctgtttctcttgcagaggatgaaaaacacatatccagaatttttgcaggcagtgagttttcttccatcataatatgaacagttttgtaatggtaaacatgagagcagcacataaataaatgaaaaatcccccttgaaaatctgaatgggtttttagcacccaagtacctaatattcaatttctggtacaaccagagccaggtgttaaatttctctagttactgtcactaatgcaaattagattctttttctgctcgtaaaaaatcaaatccacattagaaattagctataaaatgtaatgacttaaatgctatagtgttttacaaatctctctgcatttctatggtagataatgctgtaaaacagagagaagataataaaatatggtaggaagttatttaaaggtcttttgtgactgcttacttaaaaatctgatgtattcttttgctcttcttcctgtctgtcccccctccactgtgggaaatgagcatatttatgattctatttttttacagcttagaagtaatcaaatccatttttaagtgatgttataagagctagaaagatcatttgcgttattgaaaaaaagaatatcgcccagagaagtttacacctttgcaacttttaatcattggtattgtaaaacatcctgaggaaagtttggactggttaaacaaggagcttaattagcattttaaactctttattaacagtatcaccaaatttacctagaagattgtttgataatcctcacccaccaccctaccccctttctcctgcacaagaatatccaaacgcaaaaragaaacccctctttaatatggagtattaaaaaaaaaatcctacaatacacagcagagcacaattgaactgggaagaacatgaaagctatgtatttattcacatttaaatcctagcagcatcccatttgctcagctatggaatgca

SEQ ID NO: 64371 - DNA, 778 bp, Homo sapiens
atatgtttttaataaagacccctacttggacttaaaaatgtaaggccttttgtagaattttaagatagttagacattaatgttttgttccttgaaaatctggacgatttttaaaactgaagttttaaataccgcactgttagtagaatcctaaacacttagtattatccatattaccaattaagccaaacaccaattaagccacctaatctacgcctgctggatttatcttttactatcttctatatgtaatttatacataatgttgactctccaatattgtgattcagaatggcccaaggtttaaagatcctgataaaataatgcaaaagtcattagcattaaagctgaagcttccctcccacgtgatgcaaggaggttaatgctatcttcgcttctagccagcatgaatatttattggcacataaagtcaggttgaataacatggaactgaaaataatgtaacacagactttcccagtgacccaccccctctccagtgtaactcttgattccagagactgtctaccattgggggaaaattcaacataaaaggagcctttgaaatatgagttagttgactcagtaggctctaaatccaaatagattattacatttcaggaacaatgcctgttaacccatattttgatwaattcagttataatattttcccttggtttttgtctattagcccttttacttatgtagttgttactacctgtttcaccagctcaggagagaaatttgaccacatctcatattcttcaaattaaaatggct

SEQ ID NO: 64372 - DNA, 564 bp, Homo sapiens
gacttgggaaagaaaaaggagtataaaagcaagtgtctccttccatattttcagggcataatagcctccccttccctgaacagtaatacattgtcataatctgagtagcaggacggacatgtgatttttcaccagtcattgctaagagtggaacgcactgtaaacctgcactggaaagttctttatcctgtctcactgctgctctcagttatgttttacccagacagaaatgggataaattccactgaaacagctacaatatgagaaatagaggagttaatcattattaacattgattaatacatactgatttcaaaagtacaccatatagacacatgcagaaatgcatattgcttgctttatggttgatgtgagaattgtttaaagtctagtaaagtgaatgtcgtaaaatagagactttctaagcataygcttttgagaaagaccattttgtcatcagcttagctttctctgccacctctaccttgcagatgcctttcaaaacggaacctgttaaacttaccaaacttgtcatttgtttgcaaagcttgatgccatgggtta

SEQ ID NO: 64373 - DNA, 583 bp, Homo sapiens
atgtcagcagaggccacatggggagcccagattcctgcctccaagggaagaaatgacatgtccctctacttccccactaggatggtatcagaggaggtccaaggaagagtcagggcttctgccattacctggggtgatcaagttgctccagatgtcttcctagttagaacttcaaaagtatagtcagagcccgggcgcggtggctcacgcctataatccyaggactttgggaagccaaggcaggctgatcacctgagattaggagttcaagaccagcctggccaacatggcgaaaacctgtctctactaaaaatacaaaaattagcctgaagtgatggtgcactcctgtggtcccagctactcaggagggtgaggaggagaatccttgaaaccgggaggcaggaagccgagatcgcaccactgcatgaccgcctgggtgacagattgagactccatctcaaaaaattaattaattaatgaaataacaaatgaaagcgttgtcagaattctgggattctaatcccaattccaccatttaccaacaggataatcccagacatatttccccatctccacagggaaa

SEQ ID NO: 64374 - DNA, 583 bp, Homo sapiens
atgtcagcagaggccacatggggagcccagattcctgcctccaagggaagaaatgacatgtccctctacttccccactaggatggtatcagaggaggtccaaggaagagtcagggcttctgccattacctggggtgatcaagttgctccagatgtcttcctagttagaacttcaaaagtatagtcagagcccgggcgcggtggctcacgcctataatcccaggactttgggaagccaaggcaggctgatcacctgagatyaggagttcaagaccagcctggccaacatggcgaaaacctgtctctactaaaaatacaaaaattagcctgaagtgatggtgcactcctgtggtcccagctactcaggagggtgaggaggagaatccttgaaaccgggaggcaggaagccgagatcgcaccactgcatgaccgcctgggtgacagattgagactccatctcaaaaaattaattaattaatgaaataacaaatgaaagcgttgtcagaattctgggattctaatcccaattccaccatttaccaacaggataatcccagacatatttccccatctccacagggaaa

SEQ ID NO: 64375 - DNA, 1495 bp, Homo sapiens
ggccccagtttcactccagccctggcccctgtccactctaggtactcagtgcagctgctgaccccggccaacttgcttgctaaaatcaacgggaaggacagcattgagaaagagcatgtcgaagagatcagtgaacttttctatgatgccaagtcctccgccaaaatcctggctgaccagcaggataagtacatgaagtgagatggctgaggttttcagcagtaagagactccccaggtgtgcctggcctgggtccagcctgtgggcgcttgcccctgggcttggggctgccgtccccactcaggcgtggtctgcagcgctgtcagttcagtgtggaaagcatttctttttaagttatcgtaactgttcctgtggttgctttgaaagaacccttccttacctggtgtgttttctataaatcttcataggttattttgattctctctctctctctctctaagttttttaaaaataaacttttcagaacagttttagatgtacagagtcattgtgaacatacaatagggagttcccatgtatcttgtacccagtttcccttcttgttaacgtgttacatcagatagcacatttgtcaccgtgaatgaccaatactgatgcattattmtactgcgttcacattttctcagttttacctaatgtcctttttctgtcccaggatcccatccaggataacccattacaactagttgtcatgtctccttagatgcctcttggctgtgacatcttcttagattttccttgttcttgatgaccctgacagttttgaggaggactgatcaggtatctgtagaacatccctcagttggggtttgtctgatgcttttctcatgagtagactgggattgtgggttatggagaggaagactagaggtgaaatgtggttctgatcacatcgtatcatgtgtggttctcatcacatgctagcaacatgactcatcgttgatggtgagcttgaccctttggctgaggtcatgtttgtcgggtcttctcactgtaaagttactctctgctgcctttccatactgaattctttggaaggaagtcactatatgcagcccacacttaagtggcaggggttatgctcacctctagagaactgagtatttaccaaaattatttgggattctgcatggaagattgtatcagaatggacttacggaagttcattgtatactttagtagatttattttgttgctcaaattgagccagctttggccagtgagagctcttgtcagttggctcgtgtgtccctatctctgaagtgtccctctgaagtgtccctatctctctggccgaatctctgcgttcgcccactaagtaagcagcaagggcaagtgcagcactgggcagtgcaccttactggaatgtgccttcccagtaggatgagagctgcgttcttgcccttgccaggcctgtccttccctgctggctccgtggtgcctgaggtggggctaagtacccggacgctgttcc

SEQ ID NO: 64376 - DNA, 443 bp, Homo sapiens
gatgtatttggaaacgtgtgccaaaaaataaacagtaaaatccagagatgcgggtgggggtgggggtgggggtggtgtcactatttctccaattgaaaggaggacacccccaacaagtctttaaaaaatctaaagctttctgaatgtttccctttcttccccaggccaacacataggcctggctcagaccctaaaaatattaagctattaaggctttttttatcttggttttaagataaagaatcaacaaaaaaaagctttccaaaacttaatcatataaattcacttataagcctccccacaacattgaatcaataatccagtayggcctgtaatcccagctacctaggaggctgaggcaggagaatcacttgaacctgggaagcggaggttgcagtaagctgagatcatgctaccgcactccagcctggggtcagaccgag

SEQ ID NO: 64377 - DNA, 670 bp, Homo sapiens
gtggatcccaagaaagtcttaagaggatgtcttactgcaccaatagctttcacttcattactgccctgcagttattttacattatttaatcccaaatcccatcttttggattctaccttcctcttgcattttaaatctttaatgggagcctctggcggtccatgggtacaatgattagatacctgcagagagaaactgaaaaattaatcrtggtttccattttatatttttgtattacactaaaaattacttacttgtagagctaacttctacactcctgcaatatgttccttaacattgcaaatgctgagaatgatttcagataaagcatgtccaaactgagccagtaaacagccttaagttattctttgagatttgtatgctgggttttcatccaaatttcatttcaaataattttaattaagacgcatttattgatagaggtttgttacatgtggcctaaaaccagggcaagagtaccccaggctaatcataggaatgacgttaaaattgtttattatccttttatgaattttcctgcttaaattaccgaatttcgcaactctatgcaaaatgtgaaacactgtaaccacatacagtttattatagaaactgatgtatgcattaatctgacctttacctaaatacctccttaaccacaaggaatgag

SEQ ID NO: 64378 - DNA, 795 bp, Homo sapiens
agtcttcctaataaagtcaatctcatgatgagtgaattcacttcagaaaacattatttaggtaaaattacattgasggagggatgaacttaaggacataatgaaaagtacctcaagacatttgccgtcagttttcttcggtattttcttctgtatttggataagacttagaatatcagcaagactctttacctaaatccattggttcagaaatgtacagatcatgagtgctgtaagattgtatatgaaaccagattttattttcctattgaattatcaccattagaccatttaactgttctaatttattcactggtttgaacccaaagcaaagtctacctcttaaggaaaataaaacagcaaacagtacattctgagataaatcaaatttattggatagtttagtgagaactttttcataaaaataagaattcctataatttaatctaccctagtttaaagagactcaagaagtgttagaaaatctctggcagcataaaaatggctctaactagccccagcatctagacactcactaatatgtgatttctaattacttttgtagtttgtcactgtttagcacaatgaaagctaattgaccagaaaattttgcttagattatacttagctatggctaaatttttaccgttattattctggtttctttgtgaatatctcaactttactgcctcattaaactttaaattagattttgattataagagtattttatgaaaattttcaaacaactgcaatattcacacaggagctatagtactcttaaagccactgtcac

SEQ ID NO: 64379 - DNA, 821 bp, Homo sapiens
tccttttgagttcttcagaaaatatttaaagtttcctttactaaactttttgaatgaatttacatttttttttcctattaatggtagcatagcatgttttaaagttctatttttgctgggggcagagtcttacttagcttgagggttacttgagcatttttattagcagcagctttattatctatgattagatttcacctgggccaattcattactctcaccttccacacttcagagtaggtagataaacttaaaaatagtcaaaggaacaatttagggcatagtttacaaaataaatctagcctctaagtaataaccagcagaaaatgaaaaacaattttttttttattttggtgcattaaatgaaaaatacaagaaaatatgtatatattttggatagaatttgcaggttgtaaacttagcagaggccgggtgcggcggctcaygcttgtaatcccagcactttgggaggcttaggcgggcagatcacttgaggtcaggagtttgagaacagcctggccaacatggtgaaaccctgtctctactaaaaatacaaaacttagctggccatggtagcaggcacctgtaataccagctactcagaaggctaaggcaggagaatcacttgaacgcaggaggcggagcttgtggtgagctgagattgtgccattgcactccagcctgggcaacagagtgagactccatctgaaaaaaaaattaaattaaattaaataaataaacttaacagaaagttaagcaaacacaggcttcccatatgaagtaattagcattttgcaaagagggaacatggcattaataaa

SEQ ID NO: 64380 - DNA, 821 bp, Homo sapiens
tccttttgagttcttcagaaaatatttaaagtttcctttactaaactttttgaatgaatttacatttttttttcctattaatggtagcatagcatgttttaaagttctatttttgctgggggcagagtcttacttagcttgagggttacttgagcatttttattagcagcagctttattatctatgattagatttcacctgggccaattcattactctcaccttccacacttcagagtaggtagataaacttaaaaatagtcaaaggaacaatttagggcatagtttacaaaataaatctagcctctaagtaataaccagcagaaaatgaaaaacaattttttttttattttggtgcattaaatgaaaaatacaagaaaatatgtatatattttggatagaatttgcaggttgtaaacttagcagaggccgggtgcggcggctcatgcttgtaatcccagcactttgggaggcttaggcgggcagatcacttgaggtcaggagtttgagaacagcctggccaacatggtgaaaccctgtctctactaaaaatacaaaacttagctggccatggtagcaggcacctgtaataccagctactcagaaggctaaggcaggagaatcacttgaacgcaggaggcggagcttgtggtgagctgagattgtgccattgcactccagcctgggcaacagagygagactccatctgaaaaaaaaattaaattaaattaaataaataaacttaacagaaagttaagcaaacacaggcttcccatatgaagtaattagcattttgcaaagagggaacatggcattaataaa

SEQ ID NO: 64381 - DNA, 868 bp, Homo sapiens
actttccaaggaaaaaatgtgttttatggcttgagtttatctgtctagtgaccttgcagctgcacagctagagaaacagggtcttcacaatgcctgggaaaggaggagagataaggcttactagccacagaaaaacaggcagataatttttaaagggctccagctctttctctttctcagggggaattgggttttcttacatagaactgagtttctgcttacacattctttaatttcttttaactcctattccaaaacaagtaagttcttcttatttttgggggggatagagtctcgctccatcacccaggctgragtacaggggcgcaatctcggctcactgcaacctccacctcgcagatttaggtgattctcctgccttagcctcccaaatagctgggattacaggtgcccgccatgacgcccagctagtttttgtatttttagtagagacgaggttttaccacgttggccaggctggtcttgaactcctgaactcaagtgattcgcctgcctcagcctcccaaaatgctgggattacagacatgagccatcgcacctggcctcataatctctttagtggtcataaaacttcttctttttctttttatattttataattagtccatactgtctaaaatctatgctttaatccaatttgtcattgatcctagtatactcctttattactgaagtagctctttgaatagtcttccaggtttttaagtcctctcccttcctgtataataggttgattgtgtcagttctttgttggttgcagagtacagttcaaactttccaacacaccgtttcagacttttagaatctggctccattctgttattctagcttcgtttactgtgttatt

SEQ ID NO: 64382 - DNA, 1048 bp, Homo sapiens
cagtgggggccgggcgtggtgactcatgcctgtaatcccagcactttgggaggtcaaggcgggtggatcacctaagatcaggactttgaggccagcttgaccaacatggtgaaaccccatctctactaaaaatacaaaaattagctgggtgtggtgtcaggcacctgtaatcccagctacttaggaggctgaggcagaagaatctcttgaacccaggaggcgaaggttgcagtgagccaagatcgtgccattgcactccagcctgggtgacagagtgagtctctgtcttaaaaagaaaaagagagagagagacagacagacagagagagagagagagagacagagagagagagagagagagagagaaagaaagagagaaagaaagaaagaaaagaaagaaagaaagaaagaaaggaagaaagaaaaagtaagtcagtctcagtgtgaacaagcgtcatttgtgtctggtgatggacgtgacaaggctttcttatgtttgcttttcctcctcacctgttcatcctccttccctgcactgctgctctctagaagcgctttcccaaataaagtccttgcaacaagccttggtctcagggtctgctttcagggaactcaggctaaggtaattagtcacagacatgggcctaggaagcagattctcaggatgggattttggagctggaaaacacagagctaagaaacacgaggctggagtgagtggcatctggtaacatcacgattgctaaggatctcaccctggtggcttgggatgaggtgcaggtggaaggtaaagcactgggcrtgtggcagctctgacacctaagtggtattggggcgaggggaactataacgattttggaggttcctggtctttgttaaatgctctggacgtcttgaaaaaaaagtcaaacaggtttccacctgcaactgtcagcttgaggcaggttgtggaagcaaagcggctccataactgcattcatggagacgctcattttattcgtagaatgtgtggatgaaaatcaggcacagcactgtgttattaggaaaa

SEQ ID NO: 64383 - DNA, 1048 bp, Homo sapiens
cagtgggggccgggcgtggtgactcatgcctgtaatcccagcactttgggaggtcaaggcgggtggatcacctaagatcaggactttgaggccagcttgaccaacatggtgaaaccccatctctactaaaaatacaaaaattagctgggtgtggtgtcaggcacctgtaatcccagctacttaggaggctgaggcagaagaatctcttgaacccaggaggcgaaggttgcagtgagccaagatcgtgccattgcactccagcctgggtgacagagtgagtctctgtcttaaaaagaaaaagagagagagagacagacagacagagagagagagagagagacagagagagagagagagagagagagaaagaaagagagaaagaaagaaagaaaagaaagaaagaaagaaagaaaggaagaaagaaaaagtaagtcagtctcagtgtgaacaagcgtcatttgtgtctggtgatggacgtgacaaggctttcttatgtttgcttttcctcctcacctgttcatcctccttccctgcactgctgctctctagaagcgctttcccaaataaagtccttgcaacaagccttggtctcagggtctgctttcagggaactcaggctaaggtaattagtcacagacatgggcctaggaagcagattctcaggatgggattttggagctggaaaacacagagctaagaaacacgaggctggagtgagtggcatctggtaacatcacgattgctaaggatctcaccctggtggcttgggatgaggtgcaggtggaaggtaaagcactgggcatgtggcagctctgacacctaagtggtattggggcgaggggaactataacgattttggaggttcctggtctttgttaaatgctctggacgtcttgaaaaaaaagtcaaacaggtttccacctgcaactgtcagcttgaggcaggttgtggaagcaaagcggctccataactgcattcatggrgacgctcattttattcgtagaatgtgtggatgaaaatcaggcacagcactgtgttattaggaaaa

SEQ ID NO: 64384 - DNA, 641 bp, Homo sapiens
ttcagtgaaggtggaaggaaggtccaggccagcaaaaatggtgtcataaatttcatccagtaacaactccaaacctgagcaaagacagcaagactttcagagatggtctcattcagaaaggaagccctgaccttgttgtgcaaacagatactgagagagacagccttcaccagcatcattaggcaataagtctgaacaacactttaacagtttccaaagtcagagctgctgtggatggttgtgcaggctgttcatagaaacaaaggagcagtgcttatagaataaragattaaatccatcctgtgctccactcgccaatttcggggctgcatctgcccagagcggggcacttctttccaatgtgcacaaaggcactatgtgggccagcagcagctgcattcaccatactgcaagatgacagtttgctaaggttgtgtcctcctcaatgcccacagcagcctggcagggggcaggcagtcactctagctgtgctttacaagcaatgttatccaggttttcagacctgaggaatcacactccctcccttcagatcacctgaggggtatcactcacctgtctcagccagttcccgcccttggctgtcagcacagtggcaatacccagatacctcagggaacctc

SEQ ID NO: 64385 - DNA, 591 bp, Homo sapiens
cagatcacaggttaaacttggagggaaaagcaagcaagctgccagccagaaatatcatggaaaaaaaggattttgtgggcttaccactccatggaacaaaaacattcttccatatatgatcctaaggaaaacgaaatcaacctttccagcttgaaaaaaatcatatggtctggtgagtcattgtgcatctggggaaattgtggtatcttcagaaaatacatttagttcaaagaggaatcctggatttgagttatgttgtttctaaatatagatatacatcaagacaaatatagggkgtgtgtgtgtgtgtgtgtgtgtgtgtgtaacatatttttcctatctaaacactaacaggaatccacatcacataatcatagaacattaaatgtagaaggaattttaggaatcagctcattccaatctgtgttcctgccccaccactccaacaaaacattctcattttagccacctcaaccactgtgagctaaactcagcatttttcaggaatcaccttgtttgaactctcagcagcactcaagactgttgacaacttcctcaccatgcaacgccctcccaccctagctttcgcga

SEQ ID NO: 64386 - DNA, 824 bp, Homo sapiens
tgcatggctgggaaatagttaactaaagacgtccatatagctgtcatgagaagggtacttactgggcttctggtaccatccgaagggataggtgtggacttcaatgtcaggagagccacagtccaaaatgcgccaggctcctccattctcctcactgcacatctgaattcccaagctgttcagagtgagacatgtcacctctcctcctggggtggaaaaaaaaaaaamaaaaaaccacaatcaggaaactgagtacaatggaagagtctaataaatgagaaaaattctgcaagtacattgttcagcagacatttgggatacaccactatatttcagatactatctcagccactgctgaaaaacctggtacctgaactcaaggagcctctgatctaagagcaaagggatagagctacttatcaagcacctaacatgtgcttagggctgtgctaggtctctgttggtatcacttcacttggtcctcacataaccttacgaggaaggtagctttggtagccctatatacagatgaggaggaaacagaggctcagggagattaagtgacttttccagaatcacacactagtaagggaatcaaccaagcattaagtacacatcatgcaaatggatccaaagttcgccaagctgcttggcctaagtgttgaaagatgaacaaaagatatccaagccaagagtagaaggaaggaagtttggccaggtagaactgcacatgtaaagtgatgatcactggactaggagccatgtctcagctaccacatttattagccagttgccctctccaagcccccatttccttatctgtg

SEQ ID NO: 64387 - DNA, 1896 bp, Homo sapiens
attaattatgtctttttataaggcaattatcctaacagaaagtaaataggttgtagtgttaagacagatataaatctgaattcagatgctataatgctataatattttaaaatatgtgtggtcttctgcatttacttaactttgatgttccagtttttattatcttttgaataggaataatgatatctactgcacagtactggtagaaagattctatctctacatagtgcctgacacatggaagatgattaatgaacagtgcctacttttaaaaataacataatctctgtctttaagatgatgagcatcttctcactgtgtcttcacatggcagaaaggggaagggagctctctggggtctctttcacaaggacactaatcccattcatgggggttctaccctcatgacttaattacttcccaaaggccccacatccaaatatcatcactttgggtatcaggtttcaacacatgaatttgggggaggggkaataccaacattcaatctacagcagaaggaatgctagaattgatttaaagatagtcatctgtattctgtgaatcccaccaccatctctcatgggaaggctctactcttctccctcccatcttcttcaacaagaccacttgagagctcgatatttaccagagtctagaccagcaagtgactcacacttgaaaatgtcgctaagcagaagtctgtctgtacctctctgtgatggccaagcagaagcaagatgcactccacgggagcagattcattcccaccattctgcctgatcaggccgtgtgactttcctttgggccacatgagcatcccagaatgtaaccaggctgacaccatttaggaaaacccctgccccaatgggaagcctgctaaatcaaagtaacccagaaggaagagtctctggggtataaaccatttaggatatttctaggggagtaggagagtaggatgtgatggttggttgagagttcgctgtctgcatcatggacctgtcagtaaaaagggctattataaagtttcagtcaaaccaaaccaaacaagatggcacaaaacaaaacccataggcatgctttcaaaaagagtagtcaacactaaacatcaatgaagcccaggaaatatcagttttaaaggatccgtaagctcagagagatcccccaccagataatgacagcactagtcaagtaaaaactttcttgcctctgtttctttcagtacttcttccctaggcatgacacaccatgcctagaaagaggtagtgaagaaacagtgcaaagtagggaagtagggaggaagacagaacaccccattccttatttttgctttgtagtctttcagagatgctcactaagagaggagagcaggtttaaatttaggtttcaaacattaattatattgtgtttgtattagttgtctatgacagtattagaaatcaccacaaacatagtggcttaaaacaatataaattaagtagaccacagttttccatgttagaagttcagcattgcttaactgggttatctccttagagtctcataaggccaaaatcaaggtgctgaccagagctacattgcatttggaacttgcagtcctcttccaagcttatgcctgtttttggcagagtacagttccttgttgttgcagaatttaatccccatttccttgctggctgtgtgccagggacctcactcatctccttaagagcaaccaacttcttctcatatggctcactccatgtttaaagctagcaagagagcaatgagtccttctctgactttctcttctgcctcagcctgggacagtctttgatttaagggctcatgtgattagttcaggaataacctgattatctccctatcttaaagtcaactctgccatatcacataacacaa

SEQ ID NO: 64388 - DNA, 605 bp, Homo sapiens
tgacccctaatgtaaactatgggctttttgtaaaaatgatgtgtcaatgtaggttcatcaaccataacaaatggatgactctgatgaaagatgttcatagtgggcaaggctgtgcctgtgtgcatgtgtggggccggagttaacgagaactctctggattttctgctgaattttgctgtgaacctaagtgttttagacataaagtctatgtaaaaggaaacaaataaacagaaaacaatgaggattagatatcccttctccatcttgaagctaatcatgtgatccccagggttgatgtggaaaaaagaggaatgtacaggacattacagcttagcagctcaggctcaatgttaactgtgatggctaatattatgtatcaatctccctgggttacagtgcacaattgcttggtcaaacaccagtctagatcctgttgtaaacgtattttgttattcattaatttttatttgtaattgatacayaaagttgtacaaatttgtgtggtacagtgtgatgtttcaatgcaggtatatattgcataattatcaaatctgggtaattactgtatctgtcgctttatacatctatcattttcttgtagtgat

SEQ ID NO: 64389 - DNA, 1582 bp, Homo sapiens
aaaaacaagctgaagcataagttttatctacctagtatccacatagagttacagaaatagaagcaataaagcacaaagttaggcagccttctaacatgatcccctgtgtaatccattgtcctggggatgggctggatctagtgagtagcttccaacaaatacggtacaaatcgaatacagcaaaagtggtcatgtcatttcctcgattaagttacaagaaactgtatcttcctttttactgaaactcactctgtctctcttgttcactttgataaacccagctgccatgtggtaagcggctatggagagatccacayggcaaggaactaagggtggacttcggccaacagccagtgatgtactgaggctctcagttcaattgcccataagtaactgaatcttgccaacaaccactgaatgagtttggaaacaaaccctgcctcaggcaaatcctgagtagactgtaccaacagctgatgccttgattaaggacttgtgagaggccctaagctatgccaacatttattcctgccccacagaaactgtgaaatgctaaatatgtactttttaagctgctaatatttgaggacaatttgttacacatacacacacacacacacacacacacacacacacaggctagtccatggaggcaggtcctactattcaaaatatagaagccagaaatgggaaaagtgggcatcatgcatggatgctgaccttttaaagtacagcacatcatcccttttatattcattcctctcacatttttagcccaccaaatacccaactataaacaatcaagtaaataactcctatattgtccagcataattcatggagattttacggtagacgtactaataagataataaatgctcaaaacttaaaaccatttctcattattaaactcccaaagtgacattaaaacccacaaataaagtcacattcctttatagaatttaatgacaaaataaattacactacagcatgtttttcccctaaaattttatattttgttcagtttaagccaaaatgagcaatattctgatgtctgggtagaagtgtggttctttactcagcagtgaaacttgacatattctttactgaagtaaaaggtacttcttccacctctccaaagttaagtctctcctcatatgtctctacatgttagcattagtttgctagggctgccatgacaaaataccacagcctgggtagcttagtgacagaaacttattttcttgcatttccagaggctaaaatctgagatcaatgtgtcaatagtttgttgttgttgtttgtttgtctgttttcttcctgaggcctctctttctggtttacaaatggttatcttctccctgtgttttcacatggtatttcctttgtctgtgtctgtgtcttaatctcctctggacataagggcacctgtcacattgggttggggtgcaccatatgacctcattttaccttaattaccttttgaaatgtcctatctctatatgtagctacattctgaggtacttggggttacaacttcgatatggattctgagggagcacaattctgcccataacagtgac

SEQ ID NO: 64390 - DNA, 508 bp, Homo sapiens
aacaaagacatgaagtggaagccagaggtgagttcaaattccagatctgttactcatttgtacaaataagttagataattgcttaagcccttcgaactacagtctccttatgtttcaacggagataatactttctacttcacagggctgttggaaggattgttagatgatctaagaagactctagcaatgtctctagtagatttgcctgccatctgaagcccttatattccacccactctctgtgaataagccaaatcttgacctctccccaatctctctcagttttaactcagcttccaacctcaattttcaagcagaagatttccaaataaagatgtatattttcttatttatttgaaatgatatctggaatagtagtttccaacctccycattggattagattatatccctgtacattctgcaggtaagaataaaatgtttgacagagaaacacgttgtattgtttctgtcaatatggatgctgttatattgtttgaagcaaatt

SEQ ID NO: 64391 - DNA, 522 bp, Homo sapiens
aaaatatctaatacctattgagtattcattatggggcaagcactgatttcagcattttgcaartattaactcatttaattggctctatcaaatactgttatattcgtattacttgtgaataacctgaggtccagagaggttgggtaagtttccccaatcattcagcaaagaatttgaacatggatagtggagctgtaagactcatgttcttatcttaactcttactcattctgatataacacaaacaacactgagctggattttggagacactgatgcttggcttgctctgccactagctctgtgaccttagacaagtttcttaacttttcgagttaagaagtcaaaattaaggtgtattcttctccttaccagcaaaacaaaagattgaactacataacctacaaaagctctctaactctgactttccatatagtagtcctctcttatccacaagggttgtgttttaagacccgcatccccacccagtggatgcctgaaactgtggttagtaccaaaccct

SEQ ID NO: 64392 - DNA, 522 bp, Homo sapiens
aaaatatctaatacctattgagtattcattatggggcaagcactgatttcagcattttgcaaatattaactcatttaattggctctatcaaatactgttatattcrtattacttgtgaataacctgaggtccagagaggttgggtaagtttccccaatcattcagcaaagaatttgaacatggatagtggagctgtaagactcatgttcttatcttaactcttactcattctgatataacacaaacaacactgagctggattttggagacactgatgcttggcttgctctgccactagctctgtgaccttagacaagtttcttaacttttcgagttaagaagtcaaaattaaggtgtattcttctccttaccagcaaaacaaaagattgaactacataacctacaaaagctctctaactctgactttccatatagtagtcctctcttatccacaagggttgtgttttaagacccgcatccccacccagtggatgcctgaaactgtggttagtaccaaaccct

SEQ ID NO: 64393 - DNA, 761 bp, Homo sapiens
tttctatgaaatttattactagcttttaaaaaataattgataacatcctaaatgatattttaaaataattaccaatatttcccacttttggctacaatatacattcaatttttctgatacctgtatttaccttatgtcttgtgagaattmtggaaaaatttccagaagttaaaatcttcagtgaataaaaataagtaacaataaatttggtagaaggtaagaagttctatatttacagggattatttagtcaagtgtttaattacatcatatggcattcactatactgttgtcagcactttcttaatggtagtaaaattcctgtgctttcatttttttttttgacggggtggggggttctagtttaaattcaactccattgcaaaacacttccagttcctagtactatctctcaatctatcttctgataagaatctaactgagtaaacaaccctctgctacttttaaattgttccttaagcaagtaatctttgctaatgtaaattgcaccatttggggaaaatgtttttatttaatttataagactgggtaaaaattattatcacacaaatacttttgcattttcttttcagcctccctgagagctctgcttggtctgtgtactgctcaatttccccacccaacctggagtgggactacatcaaacttaaaagcttctgcacagcaaataagacaatcaacagagtgaaaagacaacctatacaatgggaaaagatattttgccaactatgtatctgacaa

SEQ ID NO: 64394 - DNA, 761 bp, Homo sapiens
tttctatgaaatttattactagcttttaaaaaataattgataacatcctaaatgatattttaaaataattaccaatatttcccacttttggctacaatatacattcaatttttctgatacctgtatttaccttatgtcttgtgagaattctggaaaaatttccagaagttaaaatcttcagtgaataaaaataagtaacaataaatttggtagaaggtaagaagttctatatttacagggattatttagtcaagtgtttaattacatcatatggcattcaytatactgttgtcagcactttcttaatggtagtaaaattcctgtgctttcatttttttttttgacggggtggggggttctagtttaaattcaactccattgcaaaacacttccagttcctagtactatctctcaatctatcttctgataagaatctaactgagtaaacaaccctctgctacttttaaattgttccttaagcaagtaatctttgctaatgtaaattgcaccatttggggaaaatgtttttatttaatttataagactgggtaaaaattattatcacacaaatacttttgcattttcttttcagcctccctgagagctctgcttggtctgtgtactgctcaatttccccacccaacctggagtgggactacatcaaacttaaaagcttctgcacagcaaataagacaatcaacagagtgaaaagacaacctatacaatgggaaaagatattttgccaactatgtatctgacaa

SEQ ID NO: 64395 - DNA, 1029 bp, Homo sapiens
caacaaacagactgccttggagggtgggaggtaggaaacaggaacagcaggagactgagctccataaaatgtaattgtatttctactgctgcagacatagaaaattatgcctaaagaagccccagagtataaattggctaggaacattgtgttctttctaggcactgttttaagatggttagtgacaaataagaaggttcataagaaaggtggttgggtctgaaaacagatttggagactaattgatggtgggaatgttttgcctggaaaaaggaagacttgtagagggaagatagtaacagagtcactgtttccaaatatctgaagggctggcaggtggaaagatattaaatacattctatgtggctccagagggcagatctgtgagtatcggactacaaagtggcagatatcattagctctccataataacgggtcaaagtgaaaaaaaatgaacacttaaagagtgccttccaagggggtgagcttcccatccctggattcactcaagcacagagcacatggccacaattcttcaagaggatatctacatttggtcagtgcatgggccacttggatttgtggtgcctctctttacacatttgacccatttgatcattaccgccattttcaggttttacaagttctgtaacaaatagtggggggttttttgtgatcagtattgcaatgtttgggtgactgcctagtgaaacatattgttttcattgttaagttcatggaaataaaaggtaaaaccttttctttttaacttagaggaaaccacactgtatttatttttttctcattcccagcctacttcctgcttttcctgcagctcagcattgcatattgatggtccttgggctttgcttgcctcttcacatgtgttttatttttgcctgcaaagtatttttggtgatttgctttattgtgactgtaaagtattktttaatgagtttgaatgctgttaggcatattgctcattctctaggcctatacagttgccacgactgccttctacctaggctt

SEQ ID NO: 64396 - DNA, 641 bp, Homo sapiens
ataccttacgtatgatactttctgctttggtcacacatttcattaaatttattgtcacatcttcaataccctttcacactgacctcatccttctatggtgtcgtcaaccccagctatttrccctctctgcacctaggcagactcatgtggtgtgagcactgcaggatcctactacagagccaaacaggctggtgccaccactgggtcctgggctccagccatagctccatctgcaatgttctgtgacccttccaagcacattttccttttctgctcagtagcttctccaaatattatgaataacttttttcaagccccccagcacttaccctttcctcttctcaccactcctagccttttatttttacaatctcaccttttacgctgagtagatatcatattaaatattagttgtcatatttattatctaatcctctatcacactgtgcccaagagcttttcacatgtcattcaatctttcctcaactaaaaataaaagatgcatgcaagtacagtttaaaactaatgattcatttaatttaaagcagatgcatttatctttctatgcagttttttattttcaaattattaacaacatgtcatttctaagattttaataaattcgctgtcacacatgaaac

SEQ ID NO: 64397 - DNA, 642 bp, Homo sapiens
ttttgtttgtttgtttgttttattttgttttgtttttgagatggagtctcactgtcacccagtttggagtacagtggcacaatcttggctcactgtaacctctacctcttgggttcaagtgattctcctgcctcagcctcctgagtagctgggactgcaggtgtgtgccaccacgtttggctaatttttgcatttttagtagagatggggtttcaccatgttggccacgctggtctcaaactactgacctcaggtgatctgcccgcctcagcctcccaaagtgctggtattacaggcatgagccaccatgcctggccttaggtattatttctatgttctatattatgctgaataaaacacgagtaaaaataattaattggaagccataatgttgcagaaagaacgtgacatgcagtgaaagctgaattagagtctggtcttmtctgtagttctaactctagaactaacaagtcaagtgtgtttattagtaaaaatatttcctggatctgaatgtcctcacttgtataagaagaaggttcaattaagtgacctctaaggtactttcttccctaaaatttctattgttttgtaaaacgtgaatgattgtgaaataaaaatgaaataaaaagaatataaagtggg

SEQ ID NO: 64398 - DNA, 625 bp, Homo sapiens
gcacaggctggctccctcctctactgcagtggaaatcttcagctttgagagctgcagaggactgggaaaagaactgaatggttctcaccaggtgcaaagcgcacagcatgatttgttctctcctcgagtggctctatggggtcaatggcaatgtggggatagtactgggtacagtaattatgaaattatgtgtctgggattagaaagaggaaagagggaaggaatcttaaaagcaggcaggcaggccagacgctgtagctcacgcctgtaatcccagcactttgggaggctgaggcaggtggatcacgaggtcaggagttcaagaccagcctggccaagatggtgaaaccctgtctctattcaaaatacaaaaattagccgggcatggtggcaggtgcctgtaatcccagctacttgggaggttgaggcaggagaataacttgaacctgggaggcggaggttgcagtgagcagagatcacagaactgcactccagcctgggtgacagagtragactccgtctcaaaaaacaaaacaaaacaaaacaaacaaacacacacaaaacacaaaaaacaggaaggcttcctgaaggaggaagactttgaaagggcccagaggtatcttct

SEQ ID NO: 64399 - DNA, 521 bp, Homo sapiens
ctgttatcagacacaccaaagtattgtttaaatgtctttttgaatcattcaaaattatctaaatctgttatgttaggaccttggcagcattgccaaattttacccaatctatatgttttggaaagacttttgggatggcatctaaaagctctctggctaaagcgctagcttctattctgttgtataccttcatttgctctattaaagttttccagaggattttgccaattagcatttttaatccatttggtgtccctctcttctgaaatcaayagtccccctagtagctgggaccacaggcacgtgccaatatgcctgtcaaatttttgtattttttgaagagatgggctcaagcaatccacctgccttggcctcccaaaatattggaattacaggcgtgaaccactgcacctgactatgacccaatttttatgttctgttttatcccagggagtataaacaagagcaggtgtgcctcagttagtagattttgtctggaatggacagggagcttctcagga

SEQ ID NO: 64400 - DNA, 521 bp, Homo sapiens
ctgttatcagacacaccaaagtattgtttaaatgtctttttgaatcattcaaaattatctaaatctgttatgttaggaccttggcagcattgccaaattttacccaatctatatgttttggaaagacttttgggatggcatctaaaagctctctggctaaagcgctagcttctattctgttgtataccttcatttgctctattaaagttttccagaggattttgccaattagcatttttaatccatttggtgtccctctcttctgaaatcaatagtccccctagtagctgggaccacaggcacgtgccaatatgcctgtcaaatttttgtattttttgaagagatgggctcaagcaatccacctgccttggcctcccaaaatattggaattacaggcgtgarccactgcacctgactatgacccaatttttatgttctgttttatcccagggagtataaacaagagcaggtgtgcctcagttagtagattttgtctggaatggacagggagcttctcagga

SEQ ID NO: 64401 - DNA, 580 bp, Homo sapiens
ctaccttttttgagttgattttttttccatgaaactacagagggcaaaggggaagttttcccttggcccttttggtttctctctcagaaagtcatcaccaactaacttttggggcatacaggacgtttattaaacatatatttaccagggagaaatggacacagcttgtcttacaaagataatgaaatttcatgtttctgttgtttcagattcttccaccgcatctttaataaaatgttgacttgtgttaggcacaattatacaggaagcagagcttagttcacagaataaggcatcctgaatcctctgagtcaatagctagacttagaaacattttgaaataaacgtcattccttattcctaaggattcagactctgtagcttgctatatgcaagagtagaaagtatatctcaaatgtattagccattcacacaccctgtacatcaataattttaccaatgacagcccatttytaaaaggtattgtcataattaatgggccattgatattacaaaacaaaactgatttccaaaatttattataaaaattaacaaactttggtcataaagatagttgaaa

SEQ ID NO: 64402 - DNA, 1946 bp, Homo sapiens
aaaagtggaacatgtccccctgtaattaagcataagcttattcatgccaaatmttcaccatgaaatcaccttcattataattattgatctttttggctgattataaccattattccagttatctcatgataaagaagatagtgtttgaaggccactgactattagcgtgtattttaaagcagattttccaaaatactgatatatttattacattaagaaacttgcagaaagtgcaaaattccttagattgactgggaatgtgctggttgcatggtattcactcctgtgaagtagagaaaccatattgttttccctgaaatattacaaaaaaaattgtgaaattcaaaaaatactaggaacaggtgaaaaacttcaagttgaattataaaaaatataatatttttacaaagaattttctaaactaacagtattttatcttaatatctatcatcatgattaagggataattatcatgcacttaagggaaccataaatttcaatacatctaacatatttctctttcttttaatgtttcattaagtaaatggtacatgctaacaacacattttaatttggtatactttatttcttctttgtttctatttttgaattattttgctcttacggaacttttaaaagtctctatctcactttagtgaagcattgtctgccacctttttaaaaaacggtgtcaacttttgtgttactgaaggtttcaaattgttggttagatttagtaccaagttgtaacattttaattggaagctaagcttattttacacttgggtgtggattttaccaacactagtgattcaagaacatttaaaaattggttatacacttagaaccactctttccttcttacattacatatggattttctttggaaacaaaattgatatttggaagttcagattcacaaagagaatggaactattaaagataattatttgcactaaaaaatattcatgagtggattacattgaattatactttcctctcatgcatttaaaataggttttgatttttcaaagttaatttatatttttattaaaatatttactatatgaactgtaatgattcttctaaatattttatatccatttaatgttttcattggtacataaaatactcaagttatttcagagctttaaggaaatcgccatcattctttttgttaatataggtatattagaattcagtataaaggaataacgtatacatgttttcaaattgacccagtttcaagttttatccttcatttcatgcagttaatcctgaaagattccctgcagggtgaacaaaactacttattttgttttatattttcttgcaaaaaaaaagcaaacaaataaactacaaattcattgcttagtctcagtcattatatctagaaatgaagttggatttcatcataaaaattattaatttgattatctttacagacacaatattttaatttcattgacggttccatgggtccctagtatattgtcaaagtcttcccattgtgtatattacccttgactttttcttttgctactttttattataatttaaaattgctacaatctgccagcctaatgggagggacaacacaacttgagagttgaacagtggtttctagaaccttatatgccttcatgaaagtgttggctccaccatttgacagctgggtggccatgaatgaaccaccgaatatatataagccctactctttattttaaaagagatattataaaactatttaacttaacagggcttttattatgattaaattaaatattatatgtcaatatatttgcacaaagtgagaacacaacaaatctttgtgaatatatttgagactttttacaatttgtggacaaacatgaaaaatcttcttggttaaagttctcagtgtgagcttttttttcttaattagttattcaatgcacttgatgcat

SEQ ID NO: 64403 - DNA, 693 bp, Homo sapiens
ctgcactccagcctgggcaacagagcaagactccatctcaaaaaaacaagaatgatgcaatggactttggggtcttggaggaaagagtgggaaaggggcgagggatagaagactgcaaatatggtgcagtgtatgctgcttgggtgatgggtacaccaaaactcacaaatcgccactaaagaacttactcgtatagatcacctgaggtcaggagttcaagaccagcctggccaacatggtgaaaccctgtctgtagtaaaaatacaaaaaattagctgggtttggtggtgggtgcctgtaatcccacctactcaggaggctgaggcaggaraatcacttgaacccaggaggcagtagctgcagtgagctcagtgagctgagattatgccattgcactccagcctgggcaacaagagcaaaactccatcttaaaaaaaaaaaaaggaacttattcatgtaaccaaataccacctgtaccccaataacttatggaaaaaaaaaagaatccacttcatgtagtaatatatgataagcacttagtaaatgccaattgttatgttcttgcctgggcaacttttggttgtcaactgagtagaaaaaagcgccatcttttagaaatctgtaattccttcttatctgtatgttaccttcattttcataaaaggtaagcagtaaagtgtactgtatcataca

SEQ ID NO: 64404 - DNA, 1175 bp, Homo sapiens
tgcttagtgctctgcaccaatgaaaaagcctttctgtttttcctcactcttcacttccaactttctactattaattctttttctccttttctcttcatataacaaccatttttgtcttaatgaaaaacttaaagtaggctttattaaaacactcacatattgtttcttcatctgtaaaatgaaggattggattacatgatcttaaaagtccctatgggaagactccatgatctacatgtttgatggagataccattttattaagaaaaaaattatgcaataatctattaccaagacacatatcatgacaatcattgatacagaacatttttattcaggatttaaagtctggttttattcaggatttaaagtctggttttattcattacagatttttaaaaattcactaaactacttcaaagaaaaaaataacttcataatttttgtgtatgtaatttgcctgtgtagaggggaattgtataaatctacccactttgaagacctaagtgtgtaatcaaggggtgtttattggaaaatttatattaagtaactgataacctgggattttgattaatttgtgtcttagaaacattatgactaagaaactagagacaagtccttgttcatttgtaagattcctaagtgtatctcatatctttccaaatgttcttgactcttgattttaaagtcccatttatctcaaccatttctccatcacagcaaactttatcatactaaaggcatcctcttatatttgttatagcacagtacagattattagctttcaggatcataatctgtgctaaaagggttaaggtagttttgtagtaggatttttaaaaattattttatattttatctctatagyactcaataatttatcacaaaggttacaaacccaaatgaaccaatctgcactgatcctggccacccattcttcggtgccgtgagttctatgtcaactagttactacttaacttcttaccaggggtgatagaactaagagaagatagtaacaggaaaagaatgttctcaaccctctaggaactcagaaataggtgagatagtgataaatgggaatgttaacaattgcctattgggttgttggaagggttcataaacaaataaagagtacctgtaattatatggcactatgaaaatctgcatagttttttt

SEQ ID NO: 64405 - DNA, 614 bp, Homo sapiens
ccctcaccccattgaagtatgtgccttttatcacagtatttccagtgccttgcaaataatacacctttgaagaatatgaaagattaataaatgattgaatgagtaaatgtgtgtaatagagagtgaaaaatcatagaatttcaaggagggacagcatacttttctttttcattatcagagaaagaactccacgttatgataagattttagtaagtgtggcatgcacaatgggctgctgaacattaggcagaatatcatagaaagatgaaagatcagtagatttatagaaagatgattratagatagatagatagatagatagatagatagatagatagatagatagatgatagactgataattgttttagctacatagtattcaatccctataagggaaaatatcctactggtattatataaaattttatccatagtttttgagtaatagtgcatacacttaaagtactttaaggcactcaaaatgggtaatttgttaacatacttacagtgccattggcccaaatatttctaagaatctgaataagtcttagaattaatacccttttagggaaaataaattattttaacacaccttgatctgaaagttgtgga

SEQ ID NO: 64406 - DNA, 614 bp, Homo sapiens
ccctcaccccattgaagtatgtgccttttatcacagtatttccagtgccttgcaaataatacacctttgaagaatatgaaagattaataaatgattgaatgagtaaatgtgtgtaatagagagtgaaaaatcatagaatttcaaggagggacagcatacttttctttttcattatcagagaaagaactccacgttatgataagattttagtaagtgtggcatgcacaatgggctgctgaacattaggcagaatatcatagaaagatgaaagatcagtagatttatagaaagatgattgrtagatagatagatagatagatagatagatagatagatagatagatagatgatagactgataattgttttagctacatagtattcaatccctataagggaaaatatcctactggtattatataaaattttatccatagtttttgagtaatagtgcatacacttaaagtactttaaggcactcaaaatgggtaatttgttaacatacttacagtgccattggcccaaatatttctaagaatctgaataagtcttagaattaatacccttttagggaaaataaattattttaacacaccttgatctgaaagttgtgga

SEQ ID NO: 64407 - DNA, 614 bp, Homo sapiens
ccctcaccccattgaagtatgtgccttttatcacagtatttccagtgccttgcaaataatacacctttgaagaatatgaaagattaataaatgattgaatgagtaaatgtgtgtaatagagagtgaaaaatcatagaatttcaaggagggacagcatacttttctttttcattatcagagaaagaactccacgttatgataagattttagtaagtgtggcatgcacaatgggctgctgaacattaggcagaatatcatagaaagatgaaagatcagtagatttatagaaagatgattgawagatagatagatagatagatagatagatagatagatagatagatagatgatagactgataattgttttagctacatagtattcaatccctataagggaaaatatcctactggtattatataaaattttatccatagtttttgagtaatagtgcatacacttaaagtactttaaggcactcaaaatgggtaatttgttaacatacttacagtgccattggcccaaatatttctaagaatctgaataagtcttagaattaatacccttttagggaaaataaattattttaacacaccttgatctgaaagttgtgga

SEQ ID NO: 64408 - DNA, 614 bp, Homo sapiens
ccctcaccccattgaagtatgtgccttttatcacagtatttccagtgccttgcaaataatacacctttgaagaatatgaaagattaataaatgattgaatgagtaaatgtgtgtaatagagagtgaaaaatcatagaatttcaaggagggacagcatacttttctttttcattatcagagaaagaactccacgttatgataagattttagtaagtgtggcatgcacaatgggctgctgaacattaggcagaatatcatagaaagatgaaagatcagtagatttatagaaagatgattgatwgatagatagatagatagatagatagatagatagatagatagatagatgatagactgataattgttttagctacatagtattcaatccctataagggaaaatatcctactggtattatataaaattttatccatagtttttgagtaatagtgcatacacttaaagtactttaaggcactcaaaatgggtaatttgttaacatacttacagtgccattggcccaaatatttctaagaatctgaataagtcttagaattaatacccttttagggaaaataaattattttaacacaccttgatctgaaagttgtgga

SEQ ID NO: 64409 - DNA, 614 bp, Homo sapiens
ccctcaccccattgaagtatgtgccttttatcacagtatttccagtgccttgcaaataatacacctttgaagaatatgaaagattaataaatgattgaatgagtaaatgtgtgtaatagagagtgaaaaatcatagaatttcaaggagggacagcatacttttctttttcattatcagagaaagaactccacgttatgataagattttagtaagtgtggcatgcacaatgggctgctgaacattaggcagaatatcatagaaagatgaaagatcagtagatttatagaaagatgattgatagatagatagatagatagatagatagatagatagatagatagatagatgatagactgataattgttttagctacatagtattcaatccctataagggaaaatatcctactggtattatataaaattttatccatagtttttgagtaatagtgcatayacttaaagtactttaaggcactcaaaatgggtaatttgttaacatacttacagtgccattggcccaaatatttctaagaatctgaataagtcttagaattaatacccttttagggaaaataaattattttaacacaccttgatctgaaagttgtgga

SEQ ID NO: 64410 - DNA, 763 bp, Homo sapiens
ctttctttcccaagaagacaatttctctctatcattttttgtcatttatttttctttcattgttttctttctcatctgttcatatttttcttttctcctttcttaattaaaaaatcacataaatatgtgttcttttactaccaaattgtcagaatcagaattttatattttgaggtgtttttggtgatgttctagtctagtcccttctgcatgtgttactaggaccaaagtcttagagatttcagggtcctacaaaaatcttgctttcgaatatgactaggtatatagctggaaccttgaaaaaattatttttctttctctcctttttacagaataagttgtctgctttctgccccatcaagagagtgttttcctctccataatgagaatactaaacatcatagcactattcctcaatgytaattatctcacaagctgttcaccttcttccctcaaagaaaaaataataatttgagggtagggttgtaatgattgtaattcaattatttgctccacagatactttttaagcacattcgaggtacaagcaattcatgttgggcatttgtctttaacagttttttcttctagtagctattaaagtagcagcagcataagtagtgagctgataccactgagaaatgtgataggaacaaacggtagctaaaggaattagagaaaataaaaagaaatctacatacttagactaaaaagagggagggcattagaaaatggcctttgtcatttaagctgtctagacttta

SEQ ID NO: 64411 - DNA, 419 bp, Homo sapiens
ggatccatttacattttttgaggtatggtaacagtattgtgattagataagggaaatatatttatttttaaaaaactgcataacaaggaygaaacacaatgtgatctgtaattgacttcaagttactttagtcaaaaaatagatgatgcaaatataccaaagtgttaacaattgttcaatctaaatgatggccataagtgcttggcatattgttctcttttttcttttgcttgaaattttctatagtaaaaaataggatagtaagaagaaaaatgaagtgaatatatgaaggcagaatatatagtggagaaaagtccgcaatggaaataaaaccacatgagcctggttttgaccctgaatcatcccctgtcaaggcctcagctgcctcctatacctaatgagggcttagaacaaggttg

SEQ ID NO: 64412 - DNA, 1165 bp, Homo sapiens
tatttggagacggaatctcactctgtcgcccaggctggagtggagtggcgtaatcttggctcactgcaacctccacctcccgggttcaagcgattctcctgcctcagtctccccaagtagctgggattacaggtgtgtgccaccacacctgggctaattttgcatttttagtagagacggggttttaccatgttggccaggctggtcttgaactcctgagctcaagtaatctgcctgcctcggcctcccaaagtgctggaattacaggcgtgagccaccgcgcccagccccataggtaacattttaaggtactccaagtctrtaggccatggaaacagactttttcccccttttctttgtctgtaaaacccgtttccacatagaatcctccagggtttaaactccttgtgagggtaccattcttcccagccatgcagcctctccgagaataaaacctgaacctcctgatggcgtggggctgagggaaccagtgttccgttccacatgcgtcctgcagggcagtgtggctgggccttgcagggactgcgtcccgaggcctgggtctctggttttggctctgctgcaccttccttgacagtcagcctttgctgccgcctgtgccctccggtgccccagttagacccactcatcaccccgaaaggaagttgaagccagcttgaagccaggctgaacgtttccaagaagagatttccttctttgccttgtgattcttccaagtcggccaggttttctgtcattttccaaacccggagttctggaggtgtctttgccctgctccgggaaggctctctgtgtctgtggggtacggtcccctggcctcttggggggtgttcggggggctcctttctgtctgtttttacaccttgattttactctgcattattactgatcaagcagtttattttttaccccagcacactggagcctgggggagcggtggggagctttaagtaccagatgaagatgcacaattttaaaattttggcttatgtcgacagttttggttttcactttctctcaagttcactttgccggtgttgttttcgtgtaaacactgaattctgtggctggggcatttttgagacaacttgcttgtgcttaaccaggcgtggcacgagggtaagaggattttctgatagcttga

SEQ ID NO: 64413 - DNA, 699 bp, Homo sapiens
ccaagctcaaaataaaggaaaacacttgggtaccagaaataaagaaattaaagctgaaatgtcaattggtagctgagaacatgatggccacagggatttttgttcacaattcatgctaaggggccagtgactgggttcccagtgcccacccaggaacatcagggtttgtcttagaccatggacagtggaggagctggaacaggaagcccctgggtggtaagaaggagctaaaaaacttttcccatgggcctttctttagggccctgggagagggtaaaggcatgagaagtcaaaacataagcctgaaacgtgaacttggaaaattaagtgaaaaccaggaccactgaatataacttattagggaaaaaaggatcatgacaaggatggttcttttcaaaattcctgtatgaacttaaaaattcataaawttgaaagataaaaatagtttgtcaaaacatttgcaaaataatttgttaaatagaacaaatctttgaaaaatataactttcccaaataaactgataaatgcaagaaaacaaattgttctatcactatcagtatttttttaaagtgaaagaaaactactaaccagaaaaatacagatgattttataggtgagcaccaacaaatatataagaaatagtatttaggctggtccaagtgcaatggtgtttgcaactaagtgattacaaacagttgt

SEQ ID NO: 64414 - DNA, 699 bp, Homo sapiens
ccaagctcaaaataaaggaaaacacttgggtaccagaaataaagaaattaaagctgaaatgtcaattggtagctgagaacatgatggccacagggatttttgttcacaattcatgctaaggggccagtgactgggttcccagtgcccacccaggaacatcagggtttgtcttagaccatggacagtggaggagctggaacaggaagcccctgggtggtaagaaggagctaaaaaacttttcccatgggcctttctttagggccctgggagagggtaaaggcatgagaagtcaaaacataagcctgaaacgtgaacttggaaaattaagtgaaaaccaggaccactgaatataacttattagggaaaaaaggatcatgacaaggatggttcttttcaaaattcctgtatgaacttaaaaattcataaatttgaaagataaaaatagtttgtcaaaacatttgcaaaataatttgttaaatagaacaaatctttgaaaaatataactttcccaaataaactgataaatgcaagaaaacaaattgttctatcactatcagtatttttttaaagtgaaagaaaactactaaccagaaaaatacagatgattttataggtgagcaccaacaaatayataagaaatagtatttaggctggtccaagtgcaatggtgtttgcaactaagtgattacaaacagttgt

SEQ ID NO: 64415 - DNA, 917 bp, Homo sapiens
cctcagaaataatgccacatatctacaactatctgatctttgacaaacctgacaaaaataagcaatggggaaaggattccctatttaataaatggtgctgggaaaactggctagccatgtgtagaaagctaaaactggatcccttccttataccttatacaaaaattaattcaagatggattagagacttaaatgttagacctaaaaccataaaaaaccctggaagaaaacctaggctataccattcaggacataggcatggacaaggacttcatgtctaaaacaccaaaagcaatggcaacaaaagccaaaattgacaaatgggatctaattaaactaaagagcttctgcacagcaaaagaaactaccatcaatgtgaacaggcaacctacagaatgggagaaaatttttgcaatcccacacttatcttaaagtttatggttaaaaaaatatttaaacatatttggggtttaaaatagcccttaccacacttaagcacaggctgccttaatacacttcctgataacaagtgtgtaggtgtctttgcaacacagagaagtgacaaataaaaactttgcaacaaggaaaacacaaatctagacatgactgtttcatctctgtgtaataatctctctaaatgaaagaatatcacagaaatggagaaatgtccaggacataccatcagagraatctgccccttcctcacttggaatgtatttctgcagtcaacaagtaaatttggttcacaagtgattccctaaaatttctagttgctcccagtgtttttatatgagtgccgttactacaacttcgaaatatgctggccataaagaaaacattattaaaattacacaaaagcaacaaaatcaaatcccaaccacttacagttctgtatttatctcctttcttcagggaaa

SEQ ID NO: 64416 - DNA, 2190 bp, Homo sapiens
attaggacatcatccagctttgagattctgggccccctaatcataggcatagcaatggctggtcacaagctctgttaacacactgagaaaattccagcatcagtcccacacacagatgatgggaaattatgttttttgtttcctgaatgccacagagtcaagctggcattctggataagcaattttctttctttctttatttttttatttatttgaggcgaagtcttccctctgtcgcccaggctggagtgcagtggtgcgatctcggctcactgcaacctctgcctcccgggttcaaatgattctcctgcctcagcctcccgagtagctgggattacaggcacccacccccacacccggctaatttttttgtatttttagtagagatggggtttcactatgttggtcaggctggtctcaaactcctgacctcaggtgatccacacacctcggcttcccaaagtgctggattacaggcgtgagccactgagcctggccagcaattttcacttacaggtcttcttcttcttcttcttctttttttttttttttttttgagacagggtcttgctctgtcacctaggctggagtgcagtggcacaatcagctgactgtaaacttgaactccttggcttatgatcctcctgcctcagcctcccaagtagctaggactacagacatgtgctaccacacctggctaatttttttattttttgcagagacagggtctcactaagtttcccaggctggtctcaaactcctgggctcaagcgattctcccacctcagcctctcaaaatgttaggattacaggcatgagccactacacctggccacaggtgttcttcttggttgaggtcagctcaaggattgttgggggcagagtgaagagactgttgtggagttaaccctaaagaagaccaccatgtacagctgtacaagatgtgcactgcacaaaggcatcaggttaaggaggcaattgggagctgacactaagcctgtacactacttacacagccatgggattgtggtttggggaaactttgtatacattaagtgctgtggtggccctgccctacagctctcctaacctctacctcccaaagctccattaagtccagagatgcagtcccataagaaactctagggtgcagtccacctttgttattttctcctttttatgtactccaactccttcccatacaagcaccagggagatttgtcatcagaaaaatcacattttattgatcacttttatttaaaattacaaaaatataaataaaaatagtgaaatataaatattcagtgtaaggagtggtcctcaccccacccagtgaggattggatgaactaggctaaaaggaagggataactggccaagaaagggacatctatgtgaaagtgaaactgagacagtgctggtcacaggtcatgctgcagaataatacattcccaggcactgtcacgtgggggacccaagaggccccaggagtgacctataacctctccagaaagaccactctgtgtggcatcacagtccacacagtttaaggaaatatttagacttaacaatcagacaccagctcttactcacacttacactcacagcccacacacaagtgtgcaaacatacacacacatatatatttcctgatacattcatggaatatcagagccctgccctgaagtcgttagtgtctctgctccccaaaccgctgctcccacattggctaagctccctcaagagacctcagctgttacacttcctaattgggaaattattcatttctcaaccatgggcctcacaaatgcccaccgtcgggggagctggctctcccttcacccatgcacaggagatgccctgccctttttaactcctgcaggcttcagtccagaaaaagacaagttgctggtcagtaacatgttgagtcaggaccacccctccatcctggccagaggggtctgggcagccagcacccaggcctatgcctgagggtaaagctattgtcgttcrccctggtgggtggcacaggcaaatccatctgtgcagagcctatcttcccagtctcttcttacagctgatggagatgactctactgcaaaaatgacaaccagcaagaaagcgggtggtgcccgtttcctccctggggaccctcagagggccaggccattctcttccttggtgtgactgc

SEQ ID NO: 64417 - DNA, 1122 bp, Homo sapiens
tttctggggccagtttgagggtcccaaacatgtagatgacaaattcctagtcctttacttggggagacaggccctcatgaaacctgggccccaggccaggtctcacacctgtaatcccagcactttgagaggccaagggaggaggatcgcttgaggccaggagttcaagaccagcctgggcaacatagtaagagcctccccacatctctaccaaaaaaaaatttttaattagcggagtgtggtggtgtgtacctatagtcctaactacccaggagggtgaggcaggaggatcccctgagcccaggagctcgaggctgcagtgaactaaggaagtgccatggcactatagcctgggtgacagagtgagaccctgactcaaaaaaaaaaaaaaaaaaaaaaagtgccccaaagcagcagccaagtcaatccctcattgtgaagttaagaccctttctgtcaaatttcaatgccatttaaattaagattccttgcaatgccaatttttttttttaatgctttgtgagctaggcgtgctggcccacatctgtaatcccagcactttgggaggccaatgtgggaggactgcttgaagccaggagttcaacaccagcctgggcaacatagcaagaccccatgtctaccaaaaaatacaaaaactagctaggtgtggtggtgtgcacctgtagtcctaactactccagaggctgagatgggaggattgcttgcacccaggaggttgaggctgaagtgaaccaagactacactactgcattccagcctggacaacagatagggaccctgtttctaaataaatacattaaattaaattaaatgcttcgtaactacctgttaactcctagaacagaaactgctgtctggactaagaatgaatctgcattcacatcacactctggtgtcaatatcggaagaaactgayaactagcatcccctctttctccaccagtgatatttacgtggcactttaggtcagaggctgcaaactggaagcgactggtgggatcaggcctggggtatgtgctgcctggctgacatagcctttataaatttgagccaacagttaaaactaacatgaaggaggcttgcagcagtgtggggtgggga

SEQ ID NO: 64418 - DNA, 647 bp, Homo sapiens
gatgatttcagaaagaaccaaatgttacagtgttttggaagacaaatcagtggatcatcaaatatcatcatcaagccaagatgtacttaaagggattcagcatttatatcacctttcttagtgtgtgagttaagtttcatagtagacaggattctaaatcatttagcatattaaatctacattttatctcccccagacaggacaaactaacctgcaaaatcatagagatggtctatgatatagtagtaagagttacctttgctttccaataaatctcttctaaattttatgctatttcttattcatgaatggaacatagtcaatggaagtgcaaaaaaggaccccagtgccagagaagactaagtcgtttttatttttatcaatgtgtaaattcagatttttggaaacatgtttagaaatatcaaaaacgttatatactaataaagcaataagatcccaaaaagagatacataaaaatgtaataaaggtgatttwaaaacctaatgttttgctgaagatccatttgaaaatgaagtccattttatttaccactgtacttaatacattataataaaaaactttatcaagagtatagtttcaccactcaactatgttggagggaaaaataaattcaattatttcattag

SEQ ID NO: 64419 - DNA, 715 bp, Homo sapiens
caggaataaaaagaggatcacgccataatggtcaaaggattaattcgtcaaatttatagaagctcggtgcccactcatcatcagtagcctatcagagggtcacacaataaattagttgtggtgcggaactataacctctgcttctcgatcataatattctcttcctttcctttacagtacttagcacaatatgtattttttctacttgtatgttatcagtccccctattagacagcaaactcaaaattccagaagatatacatatattatttggcaccatatcacctggtcctaatacatgttctggcatgtacttagcttcccaaaaatagttgttgggagaacaaatgacacccatgctcctgatattccggccattcaacatagcataatcctttccattaaccataaggaaaagcataaaacatcacttggatcaaatggagcaattcatatacatatttttccatacttaagattaaaaatttctgcttaacattacagcttataaaatacttcacagaataacacaattatcccttatatttccagatgataattttcatttcaatttccaaaaacaaastttttaaaaaagaatctctaaaatgtgtctgaaagggtaaaaaaaaatcataaaaatgatagacaattgaatcacacattttcaggcaatggcttattttcttattggcagcagcttaaattgtattca

SEQ ID NO: 64420 - DNA, 1672 bp, Homo sapiens
tcttgtcaaatggcaggttgccatttcagaatctaccagacaaattatcagctgaaaacaaggaaaaattactagatacctaacagagaaaggaattatatggcattgctggaatcgtgaagaagcattaccaatactaattgcataaagtagattttccaggtgatttttttgtttgattttcttctaccttttgctgtgtatttcacttcgtattttaaaagggcatggataattctgagaaaggaaaattcactgggctcaaattagggagtcccgacttttccattgactttcttagaaaagtctttacttattataatgaacttcttcatccacaaaattagaggagtaagctagatgaccttcatgtccctgcaacagataataactatgatctaggatgattctattatacggctgctttgttaaacggttcaattgggggtgagggggtggacactgaaattagcaccaagaaaacggtctgaagattctcaacagatttgatttctcaaaccatctatgcctatcctggttcactggaaataatccttacataaatactattattcctaaattaagtagtacatgctgaatagtattggcctagttcagaatagccatctatatgctaatcaatgcatatagccctaacggagaatgcagaatatatcacaagactgcgaaaaacaaaaacaggcaaaggcttcttgatcgaccacttaagaggttatgtagaggccatacggtggagttawgaagtgtgtttccagtggagaatgccatctactgacattaaaatactcaatattcatatgattttattgagtgaagagtcaacagtggatttcagacagggatcagtgaagaatctggtatgtaaaaataaaaggccatcaattattagcttctctttggggtttctgtgggtatatgtttaataactgtcatagctcaagacagttcagtctgacccccattagtttaaaaatataatcatagcagccacagcagctagcccatgcttgaatagtttgactgctcttaacaggcgccccattaaccaatttctttgcatgcactcagatttctatcagaagtgctcgattcatttcagagaagagaatagggactattcataaaagtagaatctgtcttcctgggtcaaaaacctcctctgtctcttctttccactcaacctttcttatgacttcccactcataataaagtcatctcatttagagcttgttaatcccttgatcaagccattatgtagaggtagagagtgataagagctaagaaaaaaacttgatctcaattataattaaaaaatgcaaatgaaaacaaatatattttcactcaatgttttcgtctattgagttggcaaagatcaaaagtgttacactgttgataaatgcctggggtaatagacattcacatacatttttggtgagtgccttcattagtacaaactctatggagttatttagcaatatttataaaaaactaaaaacagcataccaatttttagctatatagtttttagacagcctgttattggtcagaatagctaccaaaatagggttgctgtaaagataaaatgagataaggcatgtaaagagtattaaaaaaacttgcattgtactagtattaataagcattgataaat

SEQ ID NO: 64421 - DNA, 1371 bp, Homo sapiens
tcttccttcagcctcccgagtagctgggactacaggtacatgccaccatgcctagctagacttatgctttaaaagaaagtggtaaaatagtatatacatgtttgcaatttcataaaaaataaaaatatatcctattattttattctaaagtacatctttttaatttttaattcatctgttactasttgtacattaaaattacattgcacattttaacagtgtatacattcttagctccctttgactccaccataaaaagccgttattgtctcttcctaaatttaggcaataaaacctctctcatgcctgtatacattcttcacatgcatttccctttccctgaagcactctcccccttgatcttcacgtgcctgtttttctcatcctgtgaaactcagaggaaatgattttttgtcagaaataccagccttccaatttttcacaaatttcgttatttatctgttacttgactccctctgatagactttaaactccctaagtggtagatctacgtttgatttatttatcactctctttttactcctagcatctaggtaggcactcagacatttattaaactaatatactcgtgggtatgtttatatctcaactggtgcaaaaagttaatagttgttctaaggtcatctatgattctctttttgcattgctgtatttttccaaattttctaaaatgaacacatattacttcagaaatcccttgttaaagagatttttttctctctctctctttataatgcttttctcaggcctttggttttgcgatattctctggatatttgagccaaagacagtcatttgcagcttggccaccagaatgtgaatattagtcacatctatggagaagacattggaatatcttgtactcctgaaagtgattatgattttcaaagattactcaaaaaggaaacagttttgtttggttttgttttaattgacaacactttgcacaagattgtttcaaacagcatgaaatcacttctggaggtgacagcaataaatcttgttctttaatggcatcaatggcagaatccatagaggaacaagattaactcatcctggaactagaccagccctcgaggtcagaaaggcgacaagacagggagcccagtcagaaaacactctgcttgcaagtatggtaacaaataaaggacaaccttctagaaatagagacagaagtccaaaagcagacaagagagggttgttgaagcatgaggaggaagactcatgtcacagaaaagcccaggagcatcaatcaaagtcctgggaagcagactgaatttcaggggctgaatttcaatccttgggagagaaactttaagtcagataaagtctcatcctacatttcatgta

SEQ ID NO: 64422 - DNA, 1371 bp, Homo sapiens
tcttccttcagcctcccgagtagctgggactacaggtacatgccaccatgcctagctagacttatgctttaaaagaaagtggtaaaatagtatatacatgtttgcaatttcataaaaaataaaaatatatcctattattttattctaaagtacatctttttaatttttaattcatctgttactagttgtacattaaaattacattgcacattttaacagtgtatacattcttagctccctttgactccaccataaaaagccgttattgtctcttcctaaatttaggcaataaaacctctctcatgcctgtatacattcttcacatgcatttccctttccctgaagcactctcccccttgatcttcacgtgcctgtttttctcatcctgtgaaactcagaggaaatgattttttgtcagaaataccagccttccaatttttcacaaatttcgttatttatctgttacttgactccctctgatagactttaaactccctaagtggtagatctacgtttgatttatttatcactctctttttactcctagcatctaggtaggcactcagacatttattaaactaatatactcgtgggtatgtttatatctcaactggtgcaaaaagttaatagttgttctaaggtcatctatgattctctttttgcattgctgtatttttccaaattttctaaaatgaacacatattacttcagaaatcccttgttaaagagatttttttctctctctctctttataatgcttttctcaggcctttggttttgcgatattctctggatatttgagccaaagacagtcatttgcagcttggccaccagaatgtgaatattagtcacatctatggagaagacattggaatatcttgtactcctgaaagtgattatgattttcaaagattactcaaaaaggaaacagttttgtttggttttgttttaattgacaacactttgcacaagattgtttcaaacagcatgaaatcacttctggaggtgacagcaataaatcttgttctttaatggcatcaatggcagaatccatagaggaacaagattaactcatcctggaactagaccagccctcgaggtcagaaaggcgacaagacagggagcccagtcagaaaacacwctgcttgcaagtatggtaacaaataaaggacaaccttctagaaatagagacagaagtccaaaagcagacaagagagggttgttgaagcatgaggaggaagactcatgtcacagaaaagcccaggagcatcaatcaaagtcctgggaagcagactgaatttcaggggctgaatttcaatccttgggagagaaactttaagtcagataaagtctcatcctacatttcatgta

SEQ ID NO: 64423 - DNA, 1371 bp, Homo sapiens
tcttccttcagcctcccgagtagctgggactacaggtacatgccaccatgcctagctagacttatgctttaaaagaaagtggtaaaatagtatatacatgtttgcaatttcataaaaaataaaaatatatcctattattttattctaaagtacatctttttaatttttaattcatctgttactagttgtacattaaaattacattgcacattttaacagtgtatacattcttagctccctttgactccaccataaaaagccgttattgtctcttcctaaatttaggcaataaaacctctctcatgcctgtatacattcttcacatgcatttccctttccctgaagcactctcccccttgatcttcacgtgcctgtttttctcatcctgtgaaactcagaggaaatgattttttgtcagaaataccagccttccaatttttcacaaatttcgttatttatctgttacttgactccctctgatagactttaaactccctaagtggtagatctacgtttgatttatttatcactctctttttactcctagcatctaggtaggcactcagacatttattaaactaatatactcgtgggtatgtttatatctcaactggtgcaaaaagttaatagttgttctaaggtcatctatgattctctttttgcattgctgtatttttccaaattttctaaaatgaacacatattacttcagaaatcccttgttaaagagatttttttctctctctctctttataatgcttttctcaggcctttggttttgcgatattctctggatatttgagccaaagacagtcatttgcagcttggccaccagaatgtgaatattagtcacatctatggagaagacattggaatatcttgtactcctgaaagtgattatgattttcaaagattactcaaaaaggaaacagttttgtttggttttgttttaattgacaacactttgcacaagattgtttcaaacagcatgaaatcacttctggaggtgacagcaataaatcttgttctttaatggcatcaatggcagaatccatagaggaacaagattaactcatcctggaactagaccagccctcgaggtcagaaaggcgacaagacagggagcccagtcagaaaacactctgcttgcaagtatggtaacaaataaaggacaaccttctagaaatagagacagaagtccaaaagcagacaagagagggttgttgaagcatgaggaggaagactcatgtcacagaaaagcccaggagcatcaatcaaagtccygggaagcagactgaatttcaggggctgaatttcaatccttgggagagaaactttaagtcagataaagtctcatcctacatttcatgta

SEQ ID NO: 64424 - DNA, 1371 bp, Homo sapiens
tcttccttcagcctcccgagtagctgggactacaggtacatgccaccatgcctagctagacttatgctttaaaagaaagtggtaaaatagtatatacatgtttgcaatttcataaaaaataaaaatatatcctattattttattctaaagtacatctttttaatttttaattcatctgttactagttgtacattaaaattacattgcacattttaacagtgtatacattcttagctccctttgactccaccataaaaagccgttattgtctcttcctaaatttaggcaataaaacctctctcatgcctgtatacattcttcacatgcatttccctttccctgaagcactctcccccttgatcttcacgtgcctgtttttctcatcctgtgaaactcagaggaaatgattttttgtcagaaataccagccttccaatttttcacaaatttcgttatttatctgttacttgactccctctgatagactttaaactccctaagtggtagatctacgtttgatttatttatcactctctttttactcctagcatctaggtaggcactcagacatttattaaactaatatactcgtgggtatgtttatatctcaactggtgcaaaaagttaatagttgttctaaggtcatctatgattctctttttgcattgctgtatttttccaaattttctaaaatgaacacatattacttcagaaatcccttgttaaagagatttttttctctctctctctttataatgcttttctcaggcctttggttttgcgatattctctggatatttgagccaaagacagtcatttgcagcttggccaccagaatgtgaatattagtcacatctatggagaagacattggaatatcttgtactcctgaaagtgattatgattttcaaagattactcaaaaaggaaacagttttgtttggttttgttttaattgacaacactttgcacaagattgtttcaaacagcatgaaatcacttctggaggtgacagcaataaatcttgttctttaatggcatcaatggcagaatccatagaggaacaagattaactcatcctggaactagaccagccctcgaggtcagaaaggcgacaagacagggagcccagtcagaaaacactctgcttgcaagtatggtaacaaataaaggacaaccttctagaaatagagacagaagtccaaaagcagacaagagagggttgttgaagcatgaggaggaagactcatgtcacagaaaagcccaggagcatcaatcaaagtcctgggaagcagactgaatttcagrggctgaatttcaatccttgggagagaaactttaagtcagataaagtctcatcctacatttcatgta

SEQ ID NO: 64425 - DNA, 1174 bp, Homo sapiens
aggttaaacatgtcttctcatggggcttggccactatcagtcccaccttcacccttactgctcttttctccagtctgtttgcaggtcaacaagttggaattttcagaggagaacctttagtcaagacagtgatggaaggacaaattttacagctaaatacctcaataataattggacttgtagctacctagggtatattgactttctttgacataaaggatttgaaatagggtgagggtycagaggtagggatgtttggcccaggccctccctattgcagtctagaatagaaacatgcagggtaaggcagagagagtagcacaaatataagactacagaaagcaggacagctcctcccaggagagaaaaaaaataaggataaattctagatccgcaggccaaagaaagtaatagggcattactttagccctctttttttttttttttttttctttttttgagacagagtctcactctgtcgccaagctggagtgcagtggcataatcttggctcactgcaacctccgcctcctgggttaaagcgattctcctgcctcagcctcccaagtagctgggactacaggcgcacgccaccatgcccagctaacttttgtatttttagtagagacagggtttcaccatgttggccaggatggtcttgatctcttgaccttgtgatctgcccgcctcggcctcccaaagtgctgggattacaggcgtaagccaccatgcccggcccattttagccctaactcttatttgcctggctctttaaatgtctttgtgtatgtccagaaggagctgaaggaagaaggatgttttctgctacaaagaaaaaatgaaggttacttccacaggaccagcactagggggcactggagcaaagtatacttagcataacctgtaagactgccccagagcttccaactctgggaatcaggggaacagaggaaaacctattggtgaaacccagtgcacttccatttcaaataacgatcaaagctttttcttgatatagtcttctcataaactttatttaatagtgtttactgttgagttaaattataacttgaatttaaacttcaattataactaccattcataatctcctgaatgagtgtttatgacaatagaaaagaaaaaaaattttagaaaagtactctttaaaaagcga

SEQ ID NO: 64426 - DNA, 655 bp, Homo sapiens
ctttccattctgttctgttgatttgtatttctctatgccaatgccattctaccttgattactgtagcttcctagaagtcctgaaatcagggagtgtaaggcctccaactttgttctttttcagaatgtttggctattctaggtcatttggttttccatataaattttagaatcaacttggcaaatcctttaaagaaaggtgttgggattttgattggtatttattgaatctataggtccatttggggagaattgctctattaacaatattgagatttccaattcatgaacatcaacattctccatttatttaggtcttatctatttttgttgtaagtgttcatagatttttggttttgcgaactacctacactgcctgtttttatgcggggacctgggaagattaaacaactatgctctcaccactgctgccatctttsctaaatctcttttaccaacttcttgaaaacaatgcttagttcattaatttttattcttttttattataaaaataggcatttgtgactataagatttcctctaagcactgctttagctgtatctggcaaattctgatgtatttttgttggcattcatttcaaaatattgtcattttttattgggacttctttgatccactgattatttttaaaaatt

SEQ ID NO: 64427 - DNA, 573 bp, Homo sapiens
actctaagaaaaagctacattgagactgagaggaaaaaaggtcctaattggttcataatggctgtcaggagcatggaacaggacatgaaggcataaaggacatgcccatcctttcattcattcattttttcattcattcatcttgcaaatgattagcatcaaatgctatgcaagyggctggggagaccatgtgaagcaaaaaggtagttcctgttttcatggagcttatatttgtctctctaaagtccagctgcttttcaggggaggaaattacaacagggaagaaactttccaaagccatactgagagccagtgacaaaactggctatagctccttccctaccctcttgccagcccctccttccgtcaaaggagcagcaaagggatcccagttccccattcctgcccaacacacacagatgttctgccatcttctcatgtatcttaaccccagactctgaaaatggcagcatattctcatttattttagagaaatgcttttgaatacctattgtgtacagggacactgaattgggacacataaaaactgcctccaagaagctggttgactga

SEQ ID NO: 64428 - DNA, 573 bp, Homo sapiens
actctaagaaaaagctacattgagactgagaggaaaaaaggtcctaattggttcataatggctgtcaggagcatggaacaggacatgaaggcataaaggacatgcccatcctttcattcattcattttttcattcattcatcttgcaaatgattagcatcaaatgctatgcaagcggctggggagaccatgtgaagcaaaaagrtagttcctgttttcatggagcttatatttgtctctctaaagtccagctgcttttcaggggaggaaattacaacagggaagaaactttccaaagccatactgagagccagtgacaaaactggctatagctccttccctaccctcttgccagcccctccttccgtcaaaggagcagcaaagggatcccagttccccattcctgcccaacacacacagatgttctgccatcttctcatgtatcttaaccccagactctgaaaatggcagcatattctcatttattttagagaaatgcttttgaatacctattgtgtacagggacactgaattgggacacataaaaactgcctccaagaagctggttgactga

SEQ ID NO: 64429 - DNA, 573 bp, Homo sapiens
actctaagaaaaagctacattgagactgagaggaaaaaaggtcctaattggttcataatggctgtcaggagcatggaacaggacatgaaggcataaaggacatgcccatcctttcattcattcattttttcattcattcatcttgcaaatgattagcatcaaatgctatgcaagcggctggggagaccatgtgaagcaaaaaggtagttcctgttttcatggagcttatatttgtctctctaaagtccagctgcttttcaggggaggaaattacaacagggaagamactttccaaagccatactgagagccagtgacaaaactggctatagctccttccctaccctcttgccagcccctccttccgtcaaaggagcagcaaagggatcccagttccccattcctgcccaacacacacagatgttctgccatcttctcatgtatcttaaccccagactctgaaaatggcagcatattctcatttattttagagaaatgcttttgaatacctattgtgtacagggacactgaattgggacacataaaaactgcctccaagaagctggttgactga

SEQ ID NO: 64430 - DNA, 690 bp, Homo sapiens
cagtggaatttaaaatacaagcttcccctagctctccaatgctgggtttgtctaatttcgtgcttcaaaactttggcacagattgtgctgtgtttgtctgtgtgtaccccagtgtctatgtgggtctgtgggtgtgagccccatgtctgtgtgtgcctgtgggtgtgagccccgtgtctgtgcctgtgggtgtgagccccgtgtctgtgcctgtgggtgtgagtccccgtgtctgtgcctgtgggtgtgagtcctgtgtctgtgtgtgcctgtgggtgtgagcctgtgtctgtgtgtgcctatgggtgtgagcccatgtccatgwgagcctgggcagctgctccacaggaagggaccaagacaatggtttaagctacaccacagatgacacctctccagcaggaagcctgggggtcgaacctgcccctcgggagaccccctcccttccctgaaacacctgaatttcttctaagtaccccctaccccatgtcatcttgcgctattactgctgctgctgacactaataccaacttaagtgggctggcacgagaaaaagagaaaagaaacccacacaggttatgcctgcagcagcagcgagaatcaagtgaaattgcccagtgcatgcccagtccccaaatcccacacacaagatcggattttcttccctttccctcccctgcctctcacaac

SEQ ID NO: 64431 - DNA, 548 bp, Homo sapiens
agatgccagttgagaacttgctcagatcagcttttcttctgtagttttctgtggagcactaagcacatgattttaaatatcattggcaaagcaatgtcttcattcctcgcaaaattttttatattagtcaaaaatttgttcaagataaatatttttaaaagatgccacttcatttccaccacacacacacacacacacacacacacacacasagagagagagagacagacagagagagagacagaaatgagaaggtaaatgttgcctttttcttatggaaagaatttcaaccaagagacctgtatgggggtagacagcaaagcatcccattagtggggctttctatgttctgttctttcttctctttgatgcagatacattattattatggatctgagtgattttcataggcaaatacactgaaatatcattcatgatcttctttcacagaattaggcaaatttaataagtattccagaactttgttttaccatgtccagaactaggataacatacactacatgctaatatatttaaaacatgtataa

SEQ ID NO: 64432 - DNA, 747 bp, Homo sapiens
acactgagaagaatagatgattacaggaataaattcattcaggttgccaacctcatttgcagagaccctgcagtaaaaacactgctggataaagaaggtcacatatgggttttatattggtctattttaggaatgctgaatgaatgcctctctcaatactatgtcttctgtagtttctccgagaaatccttggacaatttaaacttttccttcagctctggttactatctgattacatgctgatggtaacctaatatatatggttgtctcctaagtaactagagctatgtyatatttttgtattcctccctactgctattgcaaaagtaaaaactcagtctgccctgccttcttgaccccactctctgtgagcttatttattctcttgctcttccacggctggttatcagtaccatctacttatttaccaagctatcaaatgtagagacaagcagctctgttccatattcctagctaaccatgtatctgtactttccaagccctattgagagtttacaaaatcctttgaaactgtttcacttggcctctgccctctgccttgatttattcaagacttattatttctatcttggactaatataaccatattttaaaagtgtctcttgtcctcctcttttccacttgctctatttttacattgccaccagaattacccttgaaagatgcggctatacacatactgagatgcttaaagatctgctttaaaaattatttgagggtattaag

SEQ ID NO: 64433 - DNA, 747 bp, Homo sapiens
acactgagaagaatagatgattacaggaataaattcattcaggttgccaacctcatttgcagagaccctgcagtaaaaacactgctggataaagaaggtcacatatgggttttatattggtctattttaggaatgctgaatgaatgcctctctcaatactatgtcttctgtagtttctccgagaaatccttggacaatttaaacttttccttcagctctggttactatctgattacatgctgatggtaacctaatatatatggttgtctcctaagtaactagagctatgtcatatttttgtattcctccctactgctattgcaaaagtaaaaactcagtctgccctgccttcttgaccccactctctgtgagcttatttattctcttgctcttccacggctggttatcagtaccatctacttatttaccaagctatcaaatgtagagacaagcagctctgttccatattcctagctaaccatgtatctgtrctttccaagccctattgagagtttacaaaatcctttgaaactgtttcacttggcctctgccctctgccttgatttattcaagacttattatttctatcttggactaatataaccatattttaaaagtgtctcttgtcctcctcttttccacttgctctatttttacattgccaccagaattacccttgaaagatgcggctatacacatactgagatgcttaaagatctgctttaaaaattatttgagggtattaag

SEQ ID NO: 64434 - DNA, 1162 bp, Homo sapiens
cttgaaacttaagatgttcagatttttaaatataatattaatttattagaaagaagcttctatttgaacagaaattagtgaaacatacatattagttacaataaagatgataacaggcaaaagttgaactgttttgttcaggtttgcaccttgagcaggagatagtcaggagtgtggaaggataaaatagtaaagaacaaatcgaattatgttcttgcttctttccttccatttccttgagctaaataatgcctgtcctaagaggtgcagtgactcagagctctagttctgatatccacagaagtaaatcagggtggtacaaagccctatgctttgtggaatgataaaaaatagaaggacaaccagcaagctttatgaagtcttttctccacagcgtttgctccaaatccctagactgataatttccatgtaaggttctgagcgttttttgtgccatgaactcctctgacagtctagtgaagcctataatttcacctcaaaatatcggtgaacattagaagcataactaggctgggtgcagtggctcaatcctgtaatcccagcattttgggaggccgaggcaggcggatcccttgaggccaggagttcgagaccagcctagccaacatggtgaaacctcgtctctactaaaaactaaaagctaaaaaaataaaataaaaaagccaggagtggtggcgcatgcctgtaatcccagctactcaggaggctgaggcaggagagtcgcttgaacccgggaggcagaggttgcagtgagccaagatcacgccactgtactrcagcctgggcagcagagtgagactccatctcaaaaataaaaataaaaataaagttagaaactagaaaaagaggcaatcactagcactactcaacattacactgggaggccttgccagatttctgagaggttaaaaaacaaacaaaaaacaaaacaaaaagataagacctaaagaaagaaatgtgacatttcctggactatttagccaaattaatgtcagaaaaatatataaggaaagatatgaaaagaaaaaactaaatattgttattttcagattatttgattacctatgtaggaaaaagtatctgcaaaaaagtattacgggattctatgtaaatatataaaaatcagttgcattttattagg

SEQ ID NO: 64435 - DNA, 1884 bp, Homo sapiens
atttctcaataatcttataatcagttagtttacttgtcatctcacttcaatcgatgattttcmtatggtaacatttaacttacctgatgctagtcattattaatgtatttctgtagattgtaaaacatctagttatcacactgtctatgttagcttgttccagctcatgatttattttcattttttctaggatatagacctgcagctaactggatttgatttataagagagaaatctgcagtcaatgcccactcttgccacactgctaatatggaaaacagaatgttcaataggatatggtctgataaatagtgatgattgaagatgctgctccaatacatgtgaaatcaatgggagatatctgctgtctgaagatctttcagagcttttctcgacaagctcccctgtaagaaatcggaggtatattctaccattatacagtctttctcaagtggatataaatacgtttgcctcactgtaaccagacaactagacaactaatgtgggaccatggcactgcccagatgcacgtggccaaattatgtttggagagcagtgatggcatgcttggtacaccggggattgggtgccccattgactctctgtatgttgggatgtttgcttcaggctggccatgtgctatcacaaaaattggatgatgtggacccactggtggctaccaactttggaaagataagagggattaagaaggaactcaataatgaaattttggggcctgttattcaatttcttggggttccatatgcagccccaccaacaggggaacgtcgttttcagcctccagaaccaccatctccctggtcagatatcagaaatgccactcaatttgctcctgtgtgtccccagaatatcattgatggcagattgccagaagtcatgcttcctgtgtggtttactaataacttggatgtggtttcatcatatgtgcaagaccagagcgaagactgcctatatttaaatatatatgtcccgactgaggatggtgagtttattgcaggaaaaacagggagatatatttatatattttttctattctaagttctaacaatattaattcatgtgtactggtagtatgcatggcttttcctgttggcatgtagacatattttacatgcgtgcatggtgctctttttgtttatgtgtgtcagtgtatctgtacttatttttttcctgtgcttactcattttctttcctccacagcacgtatatttaggtagaaatgggtttctaatttccatttcctaccaaatgacttctgagaagatgcatcaacatttcctcattgcatgtgcaggctcaacgaattggggatctttcgcactcagtaaatgcaggagcgtattgagttagatagtggtgttgcatgttccggcggtctatgatggagcgccatgttattttctagtcttctattcatttttcagtaaaaagaatatccaaggaatgtgccagaaagcccggcaagaaaatatgtagaaaaggaggtatgtataaaagtggaaattaaaaatgggggaaaaagcttgcagaggaagaacaagatactctccctaaggatgatttgctgatgctgggaagtaaatggttaggtgatgtttggaatctgatgaaggctgtcaaggaatataaaggtgtttaaggagagctctagctgagtagattacattggcaaagctcattggttgtgccttgtgttctggtgctggtagcatcggcaagagttgaatcttggctttgagtttgtgtttagtggaatatgtacttaggctattatgatacctgcaaggaaccaaaacaatgctgtcttaggaactggtaactttgatctctgaactcttttctacagatatatatttgtgttcc

SEQ ID NO: 64436 - DNA, 1884 bp, Homo sapiens
atttctcaataatcttataatcagttagtttacttgtcatctcacttcaatcgatgattttcctatggtaacatttaacttacctgatgctagtcattattaatgtayttctgtagattgtaaaacatctagttatcacactgtctatgttagcttgttccagctcatgatttattttcattttttctaggatatagacctgcagctaactggatttgatttataagagagaaatctgcagtcaatgcccactcttgccacactgctaatatggaaaacagaatgttcaataggatatggtctgataaatagtgatgattgaagatgctgctccaatacatgtgaaatcaatgggagatatctgctgtctgaagatctttcagagcttttctcgacaagctcccctgtaagaaatcggaggtatattctaccattatacagtctttctcaagtggatataaatacgtttgcctcactgtaaccagacaactagacaactaatgtgggaccatggcactgcccagatgcacgtggccaaattatgtttggagagcagtgatggcatgcttggtacaccggggattgggtgccccattgactctctgtatgttgggatgtttgcttcaggctggccatgtgctatcacaaaaattggatgatgtggacccactggtggctaccaactttggaaagataagagggattaagaaggaactcaataatgaaattttggggcctgttattcaatttcttggggttccatatgcagccccaccaacaggggaacgtcgttttcagcctccagaaccaccatctccctggtcagatatcagaaatgccactcaatttgctcctgtgtgtccccagaatatcattgatggcagattgccagaagtcatgcttcctgtgtggtttactaataacttggatgtggtttcatcatatgtgcaagaccagagcgaagactgcctatatttaaatatatatgtcccgactgaggatggtgagtttattgcaggaaaaacagggagatatatttatatattttttctattctaagttctaacaatattaattcatgtgtactggtagtatgcatggcttttcctgttggcatgtagacatattttacatgcgtgcatggtgctctttttgtttatgtgtgtcagtgtatctgtacttatttttttcctgtgcttactcattttctttcctccacagcacgtatatttaggtagaaatgggtttctaatttccatttcctaccaaatgacttctgagaagatgcatcaacatttcctcattgcatgtgcaggctcaacgaattggggatctttcgcactcagtaaatgcaggagcgtattgagttagatagtggtgttgcatgttccggcggtctatgatggagcgccatgttattttctagtcttctattcatttttcagtaaaaagaatatccaaggaatgtgccagaaagcccggcaagaaaatatgtagaaaaggaggtatgtataaaagtggaaattaaaaatgggggaaaaagcttgcagaggaagaacaagatactctccctaaggatgatttgctgatgctgggaagtaaatggttaggtgatgtttggaatctgatgaaggctgtcaaggaatataaaggtgtttaaggagagctctagctgagtagattacattggcaaagctcattggttgtgccttgtgttctggtgctggtagcatcggcaagagttgaatcttggctttgagtttgtgtttagtggaatatgtacttaggctattatgatacctgcaaggaaccaaaacaatgctgtcttaggaactggtaactttgatctctgaactcttttctacagatatatatttgtgttcc

SEQ ID NO: 64437 - DNA, 1884 bp, Homo sapiens
atttctcaataatcttataatcagttagtttacttgtcatctcacttcaatcgatgattttcctatggtaacatttaacttacctgatgctagtcattattaatgtatttctgtagattgtaaaacatctagttatcacactgtctatgttagcttgttccagctcatgatttattttcattttttctaggatatagacctgcagctaactggatttgatttataagagagaaatctgcagtcaatgcccactcttgccacactgctaatatggaaaacagaatgttcaataggatatggtctgataaatagtgatgattgaagatgctgctccaatacatgtgaaatcaatgggagatatctgctgtcygaagatctttcagagcttttctcgacaagctcccctgtaagaaatcggaggtatattctaccattatacagtctttctcaagtggatataaatacgtttgcctcactgtaaccagacaactagacaactaatgtgggaccatggcactgcccagatgcacgtggccaaattatgtttggagagcagtgatggcatgcttggtacaccggggattgggtgccccattgactctctgtatgttgggatgtttgcttcaggctggccatgtgctatcacaaaaattggatgatgtggacccactggtggctaccaactttggaaagataagagggattaagaaggaactcaataatgaaattttggggcctgttattcaatttcttggggttccatatgcagccccaccaacaggggaacgtcgttttcagcctccagaaccaccatctccctggtcagatatcagaaatgccactcaatttgctcctgtgtgtccccagaatatcattgatggcagattgccagaagtcatgcttcctgtgtggtttactaataacttggatgtggtttcatcatatgtgcaagaccagagcgaagactgcctatatttaaatatatatgtcccgactgaggatggtgagtttattgcaggaaaaacagggagatatatttatatattttttctattctaagttctaacaatattaattcatgtgtactggtagtatgcatggcttttcctgttggcatgtagacatattttacatgcgtgcatggtgctctttttgtttatgtgtgtcagtgtatctgtacttatttttttcctgtgcttactcattttctttcctccacagcacgtatatttaggtagaaatgggtttctaatttccatttcctaccaaatgacttctgagaagatgcatcaacatttcctcattgcatgtgcaggctcaacgaattggggatctttcgcactcagtaaatgcaggagcgtattgagttagatagtggtgttgcatgttccggcggtctatgatggagcgccatgttattttctagtcttctattcatttttcagtaaaaagaatatccaaggaatgtgccagaaagcccggcaagaaaatatgtagaaaaggaggtatgtataaaagtggaaattaaaaatgggggaaaaagcttgcagaggaagaacaagatactctccctaaggatgatttgctgatgctgggaagtaaatggttaggtgatgtttggaatctgatgaaggctgtcaaggaatataaaggtgtttaaggagagctctagctgagtagattacattggcaaagctcattggttgtgccttgtgttctggtgctggtagcatcggcaagagttgaatcttggctttgagtttgtgtttagtggaatatgtacttaggctattatgatacctgcaaggaaccaaaacaatgctgtcttaggaactggtaactttgatctctgaactcttttctacagatatatatttgtgttcc

SEQ ID NO: 64438 - DNA, 1285 bp, Homo sapiens
tctgcatttccctaaaaatcaagtggtctagtatttttttctaggtacatcttactgacctttaaaaatcagattcacttttttttcagtcatctatttttaacatcattctaatttaatagtatcatccttcaaaatttcttctcttccacagagagaaactcaatcctttgtgaggcctatttattatctcttcaatgacatctcttactaggtaccagtattctttaaaagtcccttccttaacatgttttcttaatacagaacaatattcttctgacatgccttacttacattttcttttacatgccataaacttcttgatttggtaccccaattaacagcgtatgcaaatattagagttattgaaatttggaaaaagagagactcttgggagagatgaaacttgagaggggcagtacaaaatcaaaagcatctagaggtgtggtctagtggaagctggtccagatggggagcttcaaagaaagtcccaagaagagagcgagaaggcaagttgccttctcagggcaatgaagttctgctgtgactgctccgccttctttgtgatctcttctgattggtaactgtgtgggtagtttcagatttaaatgaggaacaacaagttcactctgaaagkggttattttaaattaaatttgtggtttcactcattatcattatcaactctctatgaaatgactgctgagtaaggaatactctgctaagcaggcagagggaagattctaacaatgtggagaatacaaatttattgttttgcaaaagattgttaacactatttgtccatcctttctaagtgtagattatatatatctctttaagggttgactttccttcttttcccctttcttatttattcagagacttgacctgccttttactcccgaacagcaaaaaacaaccaaaagctttgcacttggtgtgtgtgtatctgtgtgtatgtgaatctgtgtatgttgaagggacggcaagtgtttgtatgaatttctgtgtatgtatcagaaagaaacagaggctaccaggagtaaggattttacttctctcttcgtacttcatgaagcaggtttttgccccggagttatttttaaagtataacatcatttggcaacttggtaaatatagatattcataattatctataaccatggttacgagagtaaatctagtccaacaaagtcaaatttactctagaatgatatagttatttgctcaaagttattttccaacatgcactcagaataggttaaaatagattttcatctcataaa

SEQ ID NO: 64439 - DNA, 767 bp, Homo sapiens
gcataattccacgtacagataatttttagagatccttggcatttgtattatagggtagtgattacaagcacaaaataagagccagattccctgggtgtcaatcctaatctgtgttctattagttgtgtgaacttgagcaagttatttgacttccttatgctttttacctttttttgcaaaaytgcagaatttgtaaacaaggaagtaacagacctcatattattgctctgaggattacacaagataacaaggcaagtagttaaactagataaccattttattcctgagaacgtggccaggcatgtagtaagccagtctaagtgctagctcctgatatggcattttatatagtcactgcactggagaacagctttttgatctagttggttttttagggattcggagtgaactatatcactgtttctaataacagcagttaacatttttctagagcactttgcaaaacttattgatattcattattcattcaacaattatttattgaatacctgagctaccaagcaatattctaagcacttcagctgtgaacaagactgataaggtcccctagatagggagttttcatttcagagagaaaagataaaaagaaaaaaaaatacaaataaacaagcttaatttcagagagggagaaatgatatgaagcacatcagtcaggagaatgtgctgaaagatgattactgggctcattctatcaggtggcccagcaggccacggtgaagaagaaccaatgtgttgaaaactctgac

SEQ ID NO: 64440 - DNA, 767 bp, Homo sapiens
gcataattccacgtacagataatttttagagatccttggcatttgtattatagggtagtgattacaagcacaaaataagagccagattccctgggtgtcaatcctaatctgtgttctattagttgtgtgaacttgagcaagttatttgacttccttatgctttttacctttttttgcaaaactgcagaatttgtaaacaaggaagtaacagacctcatattattgctctgaggattacacaagataacaaggcaagtagttaaactagataaccattttattcctgagaacrtggccaggcatgtagtaagccagtctaagtgctagctcctgatatggcattttatatagtcactgcactggagaacagctttttgatctagttggttttttagggattcggagtgaactatatcactgtttctaataacagcagttaacatttttctagagcactttgcaaaacttattgatattcattattcattcaacaattatttattgaatacctgagctaccaagcaatattctaagcacttcagctgtgaacaagactgataaggtcccctagatagggagttttcatttcagagagaaaagataaaaagaaaaaaaaatacaaataaacaagcttaatttcagagagggagaaatgatatgaagcacatcagtcaggagaatgtgctgaaagatgattactgggctcattctatcaggtggcccagcaggccacggtgaagaagaaccaatgtgttgaaaactctgac

SEQ ID NO: 64441 - DNA, 767 bp, Homo sapiens
gcataattccacgtacagataatttttagagatccttggcatttgtattatagggtagtgattacaagcacaaaataagagccagattccctgggtgtcaatcctaatctgtgttctattagttgtgtgaacttgagcaagttatttgacttccttatgctttttacctttttttgcaaaactgcagaatttgtaaacaaggaagtaacagacctcatattattgctctgaggattacacaagataacaaggcaagtagttaaactagataaccattttattcctgagaacgtggccaggcatgtagtaagccagtctaagtgctagctcctgatatggcatttyatatagtcactgcactggagaacagctttttgatctagttggttttttagggattcggagtgaactatatcactgtttctaataacagcagttaacatttttctagagcactttgcaaaacttattgatattcattattcattcaacaattatttattgaatacctgagctaccaagcaatattctaagcacttcagctgtgaacaagactgataaggtcccctagatagggagttttcatttcagagagaaaagataaaaagaaaaaaaaatacaaataaacaagcttaatttcagagagggagaaatgatatgaagcacatcagtcaggagaatgtgctgaaagatgattactgggctcattctatcaggtggcccagcaggccacggtgaagaagaaccaatgtgttgaaaactctgac

SEQ ID NO: 64442 - DNA, 767 bp, Homo sapiens
gcataattccacgtacagataatttttagagatccttggcatttgtattatagggtagtgattacaagcacaaaataagagccagattccctgggtgtcaatcctaatctgtgttctattagttgtgtgaacttgagcaagttatttgacttccttatgctttttacctttttttgcaaaactgcagaatttgtaaacaaggaagtaacagacctcatattattgctctgaggattacacaagataacaaggcaagtagttaaactagataaccattttattcctgagaacgtggccaggcatgtagtaagccagtctaagtgctagctcctgatatggcattttayatagtcactgcactggagaacagctttttgatctagttggttttttagggattcggagtgaactatatcactgtttctaataacagcagttaacatttttctagagcactttgcaaaacttattgatattcattattcattcaacaattatttattgaatacctgagctaccaagcaatattctaagcacttcagctgtgaacaagactgataaggtcccctagatagggagttttcatttcagagagaaaagataaaaagaaaaaaaaatacaaataaacaagcttaatttcagagagggagaaatgatatgaagcacatcagtcaggagaatgtgctgaaagatgattactgggctcattctatcaggtggcccagcaggccacggtgaagaagaaccaatgtgttgaaaactctgac

SEQ ID NO: 64443 - DNA, 1357 bp, Homo sapiens
tgctcaaggctgctcaggaggccctgtgagtttcagcacacagggaacaactactccatcataggctcttgtattggttttgtctcattccctattacatcacgctggttcttcattcctatttcctgggatcatttcctaacaaattaccctcatcggtgcttttaacttaggttttgctctcagggaaattcaaagtaaggtgatgtatataactagatcacttggcaatctcgaaaatttcatttgaaggagagatgaagatgaaaccacctttgcaagaattacaacagtgagataaatctaacctaactgaccccatcttgcttctaacctccaagttgcccttgctcattcctgagtgtaggccaaaccaacaattggaggaatttagtttatagtttaactttaaaacaaagaacaaactccttcctaaaactaatgataggccacaagattagaattatgggaggggcctgaattctgctaaaatataggtgtcattaaatgataaccagctatagttccctagcccgctttcctataattccttgctgcttgggagtcatacggccagaggtcgcaaggtctgtaactttcctgccattaccaaattgttcctatagataacataacctaagattggtcttttgagatgtttttcagactttcacattctggcaaccaactgactccacctggacccatgactcatgactcaaccagtcctgtggcccccagccagacacagattcagcacatgaggtccattcaccccatgattgcatctccagccaatcagcagcacccattccctagccccctgcccaccaaattattcataaaaaccctagcctttgagtgcttgaggaggtactacttaaagataaccgttaaagtattaccagactatcttgytaattatagaataaataaatgtctcaatgcgcttttctgatagctaaaccttgatgaaactatttctttgtatcacataacattgcacaatctttgtgacttttagtctgcttcccaaataaaagtataccattattaaaacataactatttttatgggatatactgctaacaaattagcaccaattttgacaaatgtcattttgcttcctatcagagacaaataaaaaaggtcattcgttttatatttttattttgatgtttaaaatgatctataaatgcataaaattcataaacatatggaaatgcatagaatgcatgtaaaacataaagaactggcaaagtctggaaaatacagggtcttataaatttctagaagttgccttgaaaaactcactgccaccaatgttgtgtgatgtgttgaacaataaatgtaaaaa

SEQ ID NO: 64444 - DNA, 2390 bp, Homo sapiens
tcatgttaacatttttttcaaattttaatgatgtttcctccctctttagataaacatttcacacagaaacagtattttatttatttatttattttgaaacagaatctcacactgtcacccaggctggagtgcaatggtgtgatcttggctcactgcaacctctgcctcctgggttcacacgattctcctgcttcagcttcctgagtagctgggattacaagggcataccaccatgcctggccaattttttgtatttttagtagagatggggtttcactatgttgaccagactggtctggaaatcctaacttcatgatctgcccacctcggcctccaaaagtgctgggattacaggcatgcccgccagagacagtattttaataaattcccaaggtactgcctgtgcagtggaacatgcaagccacggtgaggtgctgatgcaggtttcagataggggcactcatgagctaatagaggctcacaaacaagctccgaatctgtgtctcacaagccattgtgcaccaaacttggaagatgtcaatgccatataactttttttaaacattagagatactataaaacactgcaatgttttaaaaaatcaaatacattctttaatcaaataaattctaaatgtttaacaatagtaacttggaaaaaatgaagggcagggagagtgggacaaagaggatatggarctttcatttaatagttaatatatttttgtatcttttgaaattttacaatgagattattactttaaaaactgtgcctaggttctactccagggaagacagaaaaaaaaaaaaaggaaaaaaaaaactgggcctagggaatagcttagtggacaaatatgcatagtcagtaagccagattgtatgagtccaaatcccagaactgtcacttattaactataggacctccagtaaatcactcaacctttctgagtcccagtttcctcttatgtcaaatggggaaaataattatagtatccacctcatagggttcttgtgtgtgcttaaatgaattaatatatgtaaagtacttagaaaaactcatagtgcatagtgaggactttatcactattaccttttattataattaaagtatattaaattaaggtcagctcctgcaactagtatttaagatgaggaactagtctgctatttctttgcccagcttctgatgcctcgagaatcagcttgaagcttttgctatttcttgcatcatacaaattctctggatagaatgagtttggtgttgtcccctgaccagcttccatcaatgggtccccttggacatggaaaccattttggactgaatcttaagagtttcttcacccactcagacttcatttaattgcctttcaggtcatgacacagattaagtaactgttatggcaccggcaccagcagtttctactttatcatcacagagtttactcttcactgtaaattgttttcaaactccttctttccccctgcttaccagcataaatccacattaagatttttctatcttcctatagcatgaaaaatctaggtaggagatttaaggcaatttggtagatatagcccgtgggtgtctgtgttcatttgtcacatgctgatgtactactggagacttataagcatcaatgtatctatttctcgttcacatgtaccttcattagggaaaatagtccatagaagttttacggacaataaaaactcattaaaaatttaatattccaactctattaataacttttcaatataaaacattgtaaactatttctccatcttctcatcacacttaatccagtaggtttcaattgggagtgtacaaaagaatactcaatggagtgttctccctagagaacacttttggttaatggagtgaaggtccttttcacacctcctacagagggatctagatttgcaaggagctaagcagattagaattcacggcaagtgtgtcatggaaacagcatttttagacatcagccaatttatggggaaaaggaagagagagcaatgcgtttaaatagcacattgttgatatgcaaataggatcatgtagttcaggcctaaaacgatttagtaatttcacgtcccctctaaggcaaaatctcaactttgccagggtgttaaaaactccataatccaggtcccatgtatctttcaggcctcaacttccatcactcttctgtgtgatccagatgtcctaaatgatatggagtctcaagaatgattctatgtcatttcattttctaagtctttgcccatgctttcccctccttagggaaaagcacccctttaacattttttttatttaactgccaattggtcatcctgtaagggtttattcacataccactccttctgtggaagccttattgacttccctac

SEQ ID NO: 64445 - DNA, 1072 bp, Homo sapiens
tgcatgagttagatggtgtatgtcatccttcttattagagtcgcaggaggtcacagaggaaggacccttactggacgccaacacactacatttcacaaatgagaaatgaagcccagagagggggggatgaccctgcacagcgcccaggtgcaaccttgagtgcatcgggctggggggcagctgagaccgcaggaggcacgctctagagcactgctggatgccagatggctccggcactggctcctgaggatgctgctcgggtcccaggggtgctcaccaggaggaggcgagagcaggccggccttggagtgctaatgaatccacagggcagtaaacactgcctccatctccaagcacgggcacacaggcttttttttccctctcagagcttctcagggcaggcttctctgggatgcccaccttctccacccctccttctcctcccggcaggttccactgctcctggtgctggcacacctggcagtctgcccatgtggtcatcctcttccacatgttcctggaccgcgcccagcgggcgggctcggtgccatgcgcgtcttcaagcagctgtgctatgagtgcggcacggcgcggctggacgagtccagcatgctkgaggagaacatcgagggcctggtggacaacctcatcaccaagcctgcgcgagcagtgctacgaggaggatggtggccagtaccgcatccacgtggccagccgcccggacagcgggccgcatcgtgcagagttctgtgaggcctgccaggagggcatcgttcactggaagcccagcgagaagctgctggaggaggaggtgaccacctacacctctgaagcctccaagccgagggcccaggcgggatccggctacaacttcttgtctcttcgctggtgcctcttctgggcctctctctgcctgctcgttgtttacctgcagttctccttcctcagtcctgccttcttttagtggagctggttaagggtgggagagggcacatgggcttgagagtggggaggacacagtctggacttgatcctgctacagattcaacatatgactggacaatccggtcac

SEQ ID NO: 64446 - DNA, 707 bp, Homo sapiens
atggtatatatggtacctatttcatttaacattctaagttgtgctccattgaacattgtcttacctaaatgattgtgcacatctaaccatttctaaagataaattttcagaagtgggttcatgggaagaaaaacacaagaatgtttgaaattcttttgtatataatgccaaagtgccttctagaaaagttcatgtccacatccaccagtagtatttcagagtgtctatcttactgcatactgccaggatcagatattctattaatctttgttaatttgatggatcaaaaagactttgtgatttaatttacatttctttacgagtaacatagagagagagagagagagwgtgtgtgtgtgtgtgtgtgtgtgtgtatatatatatatgcttttgttccaggcctaatatatatttattaggcctgggacaaaagctttagtgaaccaaatttaataaagctttggcataaattgaaggaaggtccagtaatatactgaggctgctttcaataaaaacagcagaacatgtatgttcaaattaatgcttgtcccttcaaaatactaattaaaatcaactccattgatgacaccattgcttaagacatcttgggaatcttgtgtttggtctgacttctgaagcacctttggtttctttaggatttccctagtggtggcatgactccaccttttgctgatgggctcagaatt

SEQ ID NO: 64447 - DNA, 575 bp, Homo sapiens
cttagccataaatcyctccagctccctatattcctaccagatggcatagagttggggactgagaaggcatattcactggggaccagcatttgggcagtagaggccctaagagagtgagggaagctcttggaggatttggtattggtagtaaaaaggactccttttgggtactagcttatccagaacttaaaatgttggagcagcaaggagctgtgagtcccatggtaagctcatcagtcagctcagcccaaaggatctggaggacctgacggctgcttctctggaatctgagccaaggaaggcaagccaggaggatgagatcacagtcacctcattaatgtactatgtgtaacacaagtgggtggcaagaagagctctcgttgcagagaacactttgtcttaatgcttagtcaaacaaggacaagtacatttcaaaatgtgtgacattttagcaggagacaggtacagattcataatcctttctccacaattataaaatttaaaaggctctgaaaaacagaagctcttttgtcagtgtgggaaaaaacctcacatagtggcaaaaacctttttga

SEQ ID NO: 64448 - DNA, 582 bp, Homo sapiens
atactgaagttatttacaggagtaactggggaggttgcacatcttgtgacttccagaataatggctgaattcaggcattcaggcccttctcatcctcctaacttggtggcctttcattaattttacaagggtagtttagttttggggaaaggctattatcgtttacactataaactcaatttctgccaaagttagcttggctyatgcccaggaatgagccaagacagccaacctgtgaggctaaaagcaagatggagtctgccatgtccaatttctcttattgccataattttgcaaaggtggtttcatctccatccattgtcaacttacaagggaaaaacagcatcatttttctctgatttcctcaacaatgcaagaagttcatgtgtatcagacatttaccgaagtttgaaataacccatagttttataagaccaaggagcactgcagataatttaaaataacaagcatgactcttctttaaaaacccctggagaaaatagatgaggtaaatatgccaaaaaggtaataacatctaaaactggatagttacacagtgttatcttgctattttatttgatt

SEQ ID NO: 64449 - DNA, 1443 bp, Homo sapiens
gtgtttttttcacctatatttataatatcatcatcattatcttctgtaatcctcacacttactatatttgcaacatttcagcaatctccccatcactgaaaatatacaactgcatcactaccaatgatcagtatttctttactatcagcttcttctaacaacttcagccaataaaaacttagtgtaataataaagattgacataattgttttttcatcaatggccccacatatttctaagtttgtgttggtggttttattttccaacattggagtagcaaaattctgttcctagcatttgttgatgttgacttaataatatcattctgagcattggcagctctgtaaatggtatccttgagwataacctctttaaggaagtcttagattcctggcttctgttcactgaagcaaacatacagtttggaaagaagtgctcagacttgcttttcagtctctaaagctctttggctccaaggctacactcctgatgtcatcttgcaaggaaaagaaaaactgaaaacattatgcaagaagttcaagaggagggtttgtaaagccatggtccagaagtaatagaactttacatttttcttctacatcagcttgctggtaataagcccatattgctggtacaaagtggccattgaatcatcataaagtagttctctaattactcatactttcttgtttgcacaggtaatttgcatatacctttcaaatttcttggatgtaggctttcctcaggtactgtcaattttatcttgttttaaaaacacagtgctggccaggcacagtggctcatgcctgtaatcccagcactttgggaggccaaggtgggtggatcccaaggtcaggagttcaagaccagcctgaccaacatggtgaaaccccatctcaactaaaaatacaaaaattagctgggtgtggtggcacgtgcctgtagtcccagctgcttgggaggctgaggcaggagaatcacttgaacctgggaggcaggggttgcagtgagcggagatcatgccactgcactccagcctgggtgacagagtgagactctgtctcaaaaaaaacaaaacacagtgctgcatgccaagcacagtccatctgagtttagtgttattaaaacctatagaagctttctcatgcgtcagtaccatgggaaaacagtaccaatatagagctttaatatcaaatttaatatcaaaattataaataggttccggactaaggtttacatcagacagtattttaacaagtttatcaagattttggctgtttctaagatatgttagttctgaataaaaaagaactattatttgaattatcaaataattaataaattattattaaataattaatatttgaattattaaaattaaataaatcaaattattatttattaataaatttaattcaataaatttaagttagtatttaataa

SEQ ID NO: 64450 - DNA, 1443 bp, Homo sapiens
gtgtttttttcacctatatttataatatcatcatcattatcttctgtaatcctcacacttactatatttgcaacatttcagcaatctccccatcactgaaaatatacaactgcatcactaccaatgatcagtatttctttactatcagcttcttctaacaacttcagccaataaaaacttagtgtaataataaagattgacataattgttttttcatcaatggccccacatatttctaagtttgtgttggtggttttattttccaacattggagtagcaaaattctgttcctagcatttgttgatgttgacttaataatatcattctgagcattggcagctctgtaaatggtatccttgagaataacctctttaaggaagtcttagattcctggcttctgttcactgaagcaaacatacagtttggaaagaagtgctcagacttgcttttcagtctctaaagctctttggctccaaggctacactcctgatgtcatsttgcaaggaaaagaaaaactgaaaacattatgcaagaagttcaagaggagggtttgtaaagccatggtccagaagtaatagaactttacatttttcttctacatcagcttgctggtaataagcccatattgctggtacaaagtggccattgaatcatcataaagtagttctctaattactcatactttcttgtttgcacaggtaatttgcatatacctttcaaatttcttggatgtaggctttcctcaggtactgtcaattttatcttgttttaaaaacacagtgctggccaggcacagtggctcatgcctgtaatcccagcactttgggaggccaaggtgggtggatcccaaggtcaggagttcaagaccagcctgaccaacatggtgaaaccccatctcaactaaaaatacaaaaattagctgggtgtggtggcacgtgcctgtagtcccagctgcttgggaggctgaggcaggagaatcacttgaacctgggaggcaggggttgcagtgagcggagatcatgccactgcactccagcctgggtgacagagtgagactctgtctcaaaaaaaacaaaacacagtgctgcatgccaagcacagtccatctgagtttagtgttattaaaacctatagaagctttctcatgcgtcagtaccatgggaaaacagtaccaatatagagctttaatatcaaatttaatatcaaaattataaataggttccggactaaggtttacatcagacagtattttaacaagtttatcaagattttggctgtttctaagatatgttagttctgaataaaaaagaactattatttgaattatcaaataattaataaattattattaaataattaatatttgaattattaaaattaaataaatcaaattattatttattaataaatttaattcaataaatttaagttagtatttaataa

SEQ ID NO: 64451 - DNA, 642 bp, Homo sapiens
cctcagccaaaaattcccttttggaagaaaaagacaccttatctgccatcactagagaccctttagactccaattggttacaccctgtgaaggactggcccacaactaaycagtggctgaagtggagacttggcctacagccaagcagaggcttaagtggaaacttgttatcacaggagtgaggatgtggcctgtatgctgcttactcttgcctagaattggatgcacctgcttgtttttttgttttgtttttttttttttttttgcttatgttttaaaccttggttaccctaatttcctattcttctgtcacacaatcatataaaaattagtgatgaactattttacattctttgtgtatgtgtgcctgtgtgtattataaccattttattgtggtgtgattggcatacaaaaagctgtacatgtttaatgtacacaacgtgatgggtttggagataactatacacatatgaaccaccaccactgtcaatgctgtaaatgtatccattacctccaaaaggtttctcccaacccctttgggttttttgctgctatcgctctgttttggcttttcctttggtggtaagagtacttaacagaagacctactattttatatttttattactaagtatttgaaatc

SEQ ID NO: 64452 - DNA, 694 bp, Homo sapiens
ctcatgaatggtttagcaccattcctttggtgatgagtgatttcttgcccagttcatgagaaatctggttggttaaaacggtctgggacttcttccttctctctyttgctcctcctctctccatgtgatatgtgggctgccccctttacctcccaccatgattgtaagcttcccgagaccctcaccagaaactgagcagatggtggtgccatgcttgctgtacaacctgcagaaccatgaaccaagtaaacctcttacctcaggcattttttatagcaagaaaaatggaccaacacagtctctgagagtactgttacaaccaatctgttagcagacttattatgaaccacctccccactacagaatgcttttcattctggttccatcatgtttatggtaaaaacactcaaagaggaaaattcagccctctttcacttatctaatttactccttatttcagccaaaagaaaacaagccaaacatccccattaaatcttttccctatccagtaaatacaaagctactcaatttccctggctaataacacatatgttatcatgaatgtttttctttttaattcactttgctttctcagccatagtgtcagtttattgagggtaaggatttaatttctcaacacttctagaattgtacaaggtgcagcatgatagacactttaaaataatgttggttt

SEQ ID NO: 64453 - DNA, 694 bp, Homo sapiens
ctcatgaatggtttagcaccattcctttggtgatgagtgatttcttgcccagttcatgagaaatctggttggttaaaacggtctgggacttcttccttctctctcttgctcctcctctctccatgtgatatgtgggctgccccctttacctcccaccatgattgtaagcttcccgagaccctcaccagaaactgagcagatggtggtgccatgcttgctgtacaacctgcagaaccatgaaccaagtaaacctcttacctcaggcattttttatagcaagaaaaatggaccaacacagtctctgagagtactgttacaaccaatctgttagcagacttattatgaaccacctccccactacagaatgcttttcattctggttccatcatgtttatggtaaaaacactcaaagaggaaaattcagccctctttcacttatctaatttactccttatttcagccaaaagaaaacaagccaaacatccccattaaatcttttccctatccagtaaatacaaagctactcaatttccctggctaataacacatatkttatcatgaatgtttttctttttaattcactttgctttctcagccatagtgtcagtttattgagggtaaggatttaatttctcaacacttctagaattgtacaaggtgcagcatgatagacactttaaaataatgttggttt

SEQ ID NO: 64454 - DNA, 1936 bp, Homo sapiens
acagatagcgtgctgaggagctgagaatgccagaaaacataaaccacgatctctaccctcaaaaagtaagctgaaattttccttttcatagaagctaccctggggaaaaaataaacacactgcagagaaacctctgtatcattccagtgcccaatggtcataccaatgacccaagtacataatgtgagatcgtgggtaatgactgcaggatctctgaggcaatcattcaagtttagaggaacttgttttgaataatggtccgtgtatatttgctgacaaacactgacgttatggctaccattcgtggtggcacagatgctcccttcttttgcattcttagtatgaatgaacactgtctgtaaacatggacttcttttgtaaattcacaaagctttagaagcaaaagaaattatttcttaaaaaataacaaaccttcaatggttgcaatttcatttctgggtgggccacttaatgcctccaaatacagcaagttccttctgagcatggttcactgtttttaccaccaacgtgctaaatgccatttcctttccttgcacacatctatcaaaactctctaatatcctcagaactaggttaagtgctcctataatacattctcaacacaccctgaatgtttcattcaaagtgttccttccagttaataattgtagaattattggttacatgaatgcctccactgccagattacagattgcatagagcagaaacaccatcattaaggcttagcataaaacctggcacttagtagacttaaatgaataaatgattgactcttatgtgatacttataattcagtacaaccacatttcttaccctaaaccactaacaagaagtgaccaatgtatccagccatcatcattctctccttctcttacctttctaaaagtgttgttaacataggagaaaatgtaagtggtcaattaaaccatgtacagtatggttttaaaacacatagaaatggtatagcagtaccagatgctaaataagaaatatcagtgtgaattcatgtcattttccagctccattactaccaaaaacagtccaacaacagctgcagtagctgtacttttgccctaygttcactctcatatgttttgctagtattcagactatggtaccttatactattctttaccatgaggagcaagaactcttgtttccttggaaggaggttgtgtctacatctagggcaggaaaaatcagcagagtcataaggccaacatacccaggcattaaaatataataacaggacaatggctcgggtattgctggctatgggaaatctaaagactaaattatttttgtgataaacaccattcaaaagttaagaacaataagtacttaagagtctcatgatacaatacataaaacttcaatgtcaaaagaaaagcaactccatctaatgttcctataagcaggtccaatatctcaaccaataattaacttgatattcagttcctataacatcacatgaaattacaaaatccctggagaaaaaatcaaaataataaaaccctacgaagctatcaaagtataacacttggaaaatataagatctaatacatgagtatgaatcaaaatcatggtgctgatgttttaggtttaagcataactttagaaatagttttgaaatgattgtatttgtgtatagtttatctcctgttaaaagaatcagatatactagtttgagtataatctaaattgcttcagggaattaatcaacttgcaattgttgtttaaatgtttggaaaagttggctttttttaattttatgtatttaattcatcatcaaaatgcacagtggttggtgttgctttccattttcagagatctctgggacaaaagacctatcaataagaatttaaaatatatagaaaacttcaggccttaggctgcaattgagtccccacaagaa

SEQ ID NO: 64455 - DNA, 1936 bp, Homo sapiens
acagatagcgtgctgaggagctgagaatgccagaaaacataaaccacgatctctaccctcaaaaagtaagctgaaattttccttttcatagaagctaccctggggaaaaaataaacacactgcagagaaacctctgtatcattccagtgcccaatggtcataccaatgacccaagtacataatgtgagatcgtgggtaatgactgcaggatctctgaggcaatcattcaagtttagaggaacttgttttgaataatggtccgtgtatatttgctgacaaacactgacgttatggctaccattcgtggtggcacagatgctcccttcttttgcattcttagtatgaatgaacactgtctgtaaacatggacttcttttgtaaattcacaaagctttagaagcaaaagaaattatttcttaaaaaataacaaaccttcaatggttgcaatttcatttctgggtgggccacttaatgcctccaaatacagcaagttccttctgagcatggttcactgtttttaccaccaacgtgctaaatgccatttcctttccttgcacacatctatcaaaactctctaatatcctcagaactaggttaagtgctcctataatacattctcaacacaccctgaatgtttcattcaaagtgttccttccagttaataattgtagaattattggttacatgaatgcctccactgccagattacagattgcatagagcagaaacaccatcattaaggcttagcataaaacctggcacttagtagacttaaatgaataaatgattgactcttatgtgatacttataattcagtacaaccacatttcttaccctaaaccactaacaagaagtgaccaatgtatccagccatcatcattctctccttctcttacctttctaaaagtgttgttaacataggagaaaatgtaagtggtcaattaaaccatgtacagtatggttttaaaacacatagaaatggtatagcagtaccagatgctaaataagaaatatcagtgtgaattcatgtcattttccagctccattactaccaaaaacagtccaacaacagctgcagtagctgtacttttgccctacgttcactctcatatgttttgctagtattcagactatggtaccttatactattctttaccatgaggagcaagaactcttgtttccttggaaggaggttgtgtctacatctagggcaggaaaaatcagcagagtcataaggccaacatacccaggcattaaaatataataacaggacaatggctygggtattgctggctatgggaaatctaaagactaaattatttttgtgataaacaccattcaaaagttaagaacaataagtacttaagagtctcatgatacaatacataaaacttcaatgtcaaaagaaaagcaactccatctaatgttcctataagcaggtccaatatctcaaccaataattaacttgatattcagttcctataacatcacatgaaattacaaaatccctggagaaaaaatcaaaataataaaaccctacgaagctatcaaagtataacacttggaaaatataagatctaatacatgagtatgaatcaaaatcatggtgctgatgttttaggtttaagcataactttagaaatagttttgaaatgattgtatttgtgtatagtttatctcctgttaaaagaatcagatatactagtttgagtataatctaaattgcttcagggaattaatcaacttgcaattgttgtttaaatgtttggaaaagttggctttttttaattttatgtatttaattcatcatcaaaatgcacagtggttggtgttgctttccattttcagagatctctgggacaaaagacctatcaataagaatttaaaatatatagaaaacttcaggccttaggctgcaattgagtccccacaagaa

SEQ ID NO: 64456 - DNA, 1936 bp, Homo sapiens
acagatagcgtgctgaggagctgagaatgccagaaaacataaaccacgatctctaccctcaaaaagtaagctgaaattttccttttcatagaagctaccctggggaaaaaataaacacactgcagagaaacctctgtatcattccagtgcccaatggtcataccaatgacccaagtacataatgtgagatcgtgggtaatgactgcaggatctctgaggcaatcattcaagtttagaggaacttgttttgaataatggtccgtgtatatttgctgacaaacactgacgttatggctaccattcgtggtggcacagatgctcccttcttttgcattcttagtatgaatgaacactgtctgtaaacatggacttcttttgtaaattcacaaagctttagaagcaaaagaaattatttcttaaaaaataacaaaccttcaatggttgcaatttcatttctgggtgggccacttaatgcctccaaatacagcaagttccttctgagcatggttcactgtttttaccaccaacgtgctaaatgccatttcctttccttgcacacatctatcaaaactctctaatatcctcagaactaggttaagtgctcctataatacattctcaacacaccctgaatgtttcattcaaagtgttccttccagttaataattgtagaattattggttacatgaatgcctccactgccagattacagattgcatagagcagaaacaccatcattaaggcttagcataaaacctggcacttagtagacttaaatgaataaatgattgactcttatgtgatacttataattcagtacaaccacatttcttaccctaaaccactaacaagaagtgaccaatgtatccagccatcatcattctctccttctcttacctttctaaaagtgttgttaacataggagaaaatgtaagtggtcaattaaaccatgtacagtatggttttaaaacacatagaaatggtatagcagtaccagatgctaaataagaaatatcagtgtgaattcatgtcattttccagctccattactaccaaaaacagtccaacaacagctgcagtagctgtacttttgccctacgttcactctcatatgttttgctagtattcagactatggtaccttatactattctttaccatgaggagcaagaactcttgtttccttggaaggaggttgtgtctacatctagggcaggaaaaatcagcagagtcataaggccaacatacccaggcattaaaatataataacaggacaatggctcgggtattgctggctatgggaaatctaaagactaaattatttttgtgataaacaccattcaaaagttaagaacaataagtacttaagagtctcatgatacaatacataaaacttcaatgtcaaaagaaaagcaactccatctaatgttcctataagcaggtccaatatctcaaccaataattaacttgatattcagttcctataacatcacatgaaattacaaaatccctggagaaaaaatcaaaataataaaaccctacgaagctatcaaagtataacacttggaaaatataagatctaatacatgagtatgaatcaaaatcatggtgctgatgttttaggtttaagcataactttagaaatagttttgaaatgattgtatttgtgtatagtttatctcctgttaaaagaatcagatatamtagtttgagtataatctaaattgcttcagggaattaatcaacttgcaattgttgtttaaatgtttggaaaagttggctttttttaattttatgtatttaattcatcatcaaaatgcacagtggttggtgttgctttccattttcagagatctctgggacaaaagacctatcaataagaatttaaaatatatagaaaacttcaggccttaggctgcaattgagtccccacaagaa

SEQ ID NO: 64457 - DNA, 3268 bp, Homo sapiens
ttggagaaatggctgattctagtgctagagcaggaaatatataagatgagcctgaatatcttgtagtatcagagagtaagaaagtctccactccctcctttagaaaaacccatggccgggcgcagtggctcatgcctgtaatcccagcactttgggaggctgaggtgggtggatcacctgaggtcaggagttcaagatcagcctggctaacatggtgaaatgccatccctactaaaaatataaaaattagtcagatgtggtggcggacacctgtaatcccagctactccagaggctgaggaacgggaatcacttgaacatgggatgcagaggttgcagtgagccgagttcgcgccactgcactccagcctgggtggcagagtgagactctgtttccaaaaaaaaagaaaaagaagactccatctgtgtttggtacatgggtgcctacttaaaatttttttaaactaaatgcattaaaaatgtcggttcaaatgtgaaacatttggggggttaggtttttcttaaagggtggttgaaagaaaaaacaatctcagaaacagttttaagaaaaaggagaataatctgtgttagatattcaagggactgcaaattggtccatgtaaatttgttacaattgaaaaatattatacaattatctagaactttttttctaatacaacagtaagaatattatttaaatatactctcctggccaggtgcagtggctcacgcctgtaatcccagcactttgggaggctgaggcaggtggatcgccagaggtcaacagtttgagaacagcctggtcaacatggtgaaaccctgtctctacccaaactacaacaattagctgggtgtggtgacatgcacctgtaatcctagctacttgggagactgaggcagaagaatctcttaaacctgggaggtggaggttgcagtgagctgagatagcaccattgcactccagcctgggcaacaagagtgaaactccatctcaaaaaataaaatatataaaatataaataaataaataaaataaatatactctcttgaccttcttgattaaataccccatcctaaatggatttttaaaaaactactgacagatcaattaatctctaaattctattgaaacaatcaaaccatatgtgtatgcagacactactcagtgacagactatacataagaataaaagagagtttaattgtgattaaatacagtcaagaaggaatatatctgggtgtaaagacttagccagagtctaattttttttacagtacaatagcaagccagaacattttttagtagctattcagtgatatcgaataagataaaatctgatatacacaggtactttaacaaaattccatctgtttttcaatcagaaactttgagaaaaataacaaagatttatcttttataaaagcttcacttattcttcagcaatttagtatactgagggtgatgaacttagattttgttgttgttgaacttatataattaagtaaaacctcactttccaaaccagcttgcctgaatttcttttaaattctttaaaggaaaggagatagtgggtacctgtaccaagaatgaagaacacaccccagtggagctttgggggtaatataattcgtgctatctcagtttctcctgtcagtctctaaagttaaaaattaaagttaaaagttgtctctaaagttagaaattgatcagttagggagctgtgaattatacttaattagcttttggtagcagccaataatctccatcatgcatctgatatgcattagctatactcacagagtaaaattttaaattccctattcacagatttaaagagattaatttaccaatttttgtttcctaagagagaaaaacaaactcctacattttatttttatgtggccttcaatttctattcaatccattgaccaaaatggcccttaatgaaaaaaaatttttttctatcactatgtccaagtatacacatgtaagtaaaatattcagtcagtgttaaaatatgtarcctttacttgaaaacagcattgtttaggaaaacactcaagatgactaactgattccttactattaccaaagagatctttttatttgagtatgttgacactgtgaagacacagtgacagatttgcagggctagacagaccatgaagaccgtcttcagggtagaggggtcctgatccagaatcaagggaaaaatttatctgccttataacttccttgttagttcatggagagaaaaatatttttcctcacaaaacataactatccattcaaacttacactgatttcattcagcacatttccatttctgtttccaatatcaaggactctagttagacatgaagagttatataaaatgcaatcataaaacatacagagctaaattgtttcttctaaaaacctaaacaataaacaaggttgtatgtaattgaactctaaaatattacctaaatacaattctttaccaaaaaagaaattcataagtacttaagtagaggccagtctaaaggatttgctagataatttgcttcctaggcctcaactttacttacaagattcacttctgactcccaaagatatgtagaaatatctgggttctgacaaatctagatattacactaacaatcttggcagttaacacaaaaatctacacatcacattttaaaagtttaatttgctaatgcaatcaaacccacatttgttgtcttatgcttaaattataataactgtaaagtattaaacatatcattaaattgttaccccccaaaattgctgatgtcttagatcagtgattatttaaaataagtttctctgctatgcatgtattgacatgcagaaaaaaatacaagttttctaattaataagttgtaatagagcagctagaaattggcttccatgtaaaattttaagaattccattttgggaaaaactatgttataatttttaaaaattagagtttcataaatattgaaaataagactctggactgtgagaatatatcacagtggtgccaccaatactcactggctggtttccagagtgttcaatgttcactatgtatttcccatgttttctgtccattcttgaactgcaaatatcacaagcttaactccagaaacgttttccagcctcttcattgccctttatacctaaaatcttgagaaataattgagttgattaatagtaaatcaactatgagacatcagtgccagtgtggattagactaaataataaataattattctttacatg

SEQ ID NO: 64458 - DNA, 3268 bp, Homo sapiens
ttggagaaatggctgattctagtgctagagcaggaaatatataagatgagcctgaatatcttgtagtatcagagagtaagaaagtctccactccctcctttagaaaaacccatggccgggcgcagtggctcatgcctgtaatcccagcactttgggaggctgaggtgggtggatcacctgaggtcaggagttcaagatcagcctggctaacatggtgaaatgccatccctactaaaaatataaaaattagtcagatgtggtggcggacacctgtaatcccagctactccagaggctgaggaacgggaatcacttgaacatgggatgcagaggttgcagtgagccgagttcgcgccactgcactccagcctgggtggcagagtgagactctgtttccaaaaaaaaagaaaaagaagactccatctgtgtttggtacatgggtgcctacttaaaatttttttaaactaaatgcattaaaaatgtcggttcaaatgtgaaacatttggggggttaggtttttcttaaagggtggttgaaagaaaaaacaatctcagaaacagttttaagaaaaaggagaataatctgtgttagatattcaagggactgcaaattggtccatgtaaatttgttacaattgaaaaatattatacaattatctagaactttttttctaatacaacagtaagaatattatttaaatatactctcctggccaggtgcagtggctcacgcctgtaatcccagcactttgggaggctgaggcaggtggatcgccagaggtcaacagtttgagaacagcctggtcaacatggtgaaaccctgtctctacccaaactacaacaattagctgggtgtggtgacatgcacctgtaatcctagctacttgggagactgaggcagaagaatctcttaaacctgggaggtggaggttgcagtgagctgagatagcaccattgcactccagcctgggcaacaagagtgaaactccatctcaaaaaataaaatatataaaatataaataaataaataaaataaatatactctcttgaccttcttgattaaataccccatcctaaatggatttttaaaaaactactgacagatcaattaatctctaaattctattgaaacaatcaaaccatatgtgtatgcagacactactcagtgacagactatacataagaataaaagagagtttaattgtgattaaatacagtcaagaaggaatatatctgggtgtaaagacttagccagagtctaattttttttacagtacaatagcaagccagaacattttttagtagctattcagtgatatcgaataagataaaatctgatatacacaggtactttaacaaaattccatctgtttttcaatcagaaactttgagaaaaataacaaagatttatcttttataaaagcttcacttattcttcagcaatttagtatactgagggtgatgaacttagattttgttgttgttgaacttatataattaagtaaaacctcactttccaaaccagcttgcctgaatttcttttaaattctttaaaggaaaggagatagtgggtacctgtaccaagaatgaagaacacaccccagtggagctttgggggtaatataattcgtgctatctcagtttctcctgtcagtctctaaagttaaaaattaaagttaaaagttgtctctaaagttagaaattgatcagttagggagctgtgaattatacttaattagcttttggtagcagccaataatctccatcatgcatctgatatgcattagctatactcacagagtaaaattttaaattccctattcacagatttaaagagattaatttaccaatttttgtttcctaagagagaaaaacaaactcctacattttatttttatgtggccttcaatttctattcaatccattgaccaaaatggcccttaatgaaaaaaaatttttttctatcactatgtccaagtatacacatgtaagtaaaatattcagtcagtgttaaaatatgtaacctttacttgaaaacagcattgtttaggaaaacactcaagatgactaactgattccttactattaccaaagagatctttttatttgagtatgttgacactgtgaagacacagtgacagatttgcagggctagacagaccatgaagaccgtcttcagggtagaggggtcctgatccagaatcaagggaaaaatttmtctgccttataacttccttgttagttcatggagagaaaaatatttttcctcacaaaacataactatccattcaaacttacactgatttcattcagcacatttccatttctgtttccaatatcaaggactctagttagacatgaagagttatataaaatgcaatcataaaacatacagagctaaattgtttcttctaaaaacctaaacaataaacaaggttgtatgtaattgaactctaaaatattacctaaatacaattctttaccaaaaaagaaattcataagtacttaagtagaggccagtctaaaggatttgctagataatttgcttcctaggcctcaactttacttacaagattcacttctgactcccaaagatatgtagaaatatctgggttctgacaaatctagatattacactaacaatcttggcagttaacacaaaaatctacacatcacattttaaaagtttaatttgctaatgcaatcaaacccacatttgttgtcttatgcttaaattataataactgtaaagtattaaacatatcattaaattgttaccccccaaaattgctgatgtcttagatcagtgattatttaaaataagtttctctgctatgcatgtattgacatgcagaaaaaaatacaagttttctaattaataagttgtaatagagcagctagaaattggcttccatgtaaaattttaagaattccattttgggaaaaactatgttataatttttaaaaattagagtttcataaatattgaaaataagactctggactgtgagaatatatcacagtggtgccaccaatactcactggctggtttccagagtgttcaatgttcactatgtatttcccatgttttctgtccattcttgaactgcaaatatcacaagcttaactccagaaacgttttccagcctcttcattgccctttatacctaaaatcttgagaaataattgagttgattaatagtaaatcaactatgagacatcagtgccagtgtggattagactaaataataaataattattctttacatg

SEQ ID NO: 64459 - DNA, 3268 bp, Homo sapiens
ttggagaaatggctgattctagtgctagagcaggaaatatataagatgagcctgaatatcttgtagtatcagagagtaagaaagtctccactccctcctttagaaaaacccatggccgggcgcagtggctcatgcctgtaatcccagcactttgggaggctgaggtgggtggatcacctgaggtcaggagttcaagatcagcctggctaacatggtgaaatgccatccctactaaaaatataaaaattagtcagatgtggtggcggacacctgtaatcccagctactccagaggctgaggaacgggaatcacttgaacatgggatgcagaggttgcagtgagccgagttcgcgccactgcactccagcctgggtggcagagtgagactctgtttccaaaaaaaaagaaaaagaagactccatctgtgtttggtacatgggtgcctacttaaaatttttttaaactaaatgcattaaaaatgtcggttcaaatgtgaaacatttggggggttaggtttttcttaaagggtggttgaaagaaaaaacaatctcagaaacagttttaagaaaaaggagaataatctgtgttagatattcaagggactgcaaattggtccatgtaaatttgttacaattgaaaaatattatacaattatctagaactttttttctaatacaacagtaagaatattatttaaatatactctcctggccaggtgcagtggctcacgcctgtaatcccagcactttgggaggctgaggcaggtggatcgccagaggtcaacagtttgagaacagcctggtcaacatggtgaaaccctgtctctacccaaactacaacaattagctgggtgtggtgacatgcacctgtaatcctagctacttgggagactgaggcagaagaatctcttaaacctgggaggtggaggttgcagtgagctgagatagcaccattgcactccagcctgggcaacaagagtgaaactccatctcaaaaaataaaatatataaaatataaataaataaataaaataaatatactctcttgaccttcttgattaaataccccatcctaaatggatttttaaaaaactactgacagatcaattaatctctaaattctattgaaacaatcaaaccatatgtgtatgcagacactactcagtgacagactatacataagaataaaagagagtttaattgtgattaaatacagtcaagaaggaatatatctgggtgtaaagacttagccagagtctaattttttttacagtacaatagcaagccagaacattttttagtagctattcagtgatatcgaataagataaaatctgatatacacaggtactttaacaaaattccatctgtttttcaatcagaaactttgagaaaaataacaaagatttatcttttataaaagcttcacttattcttcagcaatttagtatactgagggtgatgaacttagattttgttgttgttgaacttatataattaagtaaaacctcactttccaaaccagcttgcctgaatttcttttaaattctttaaaggaaaggagatagtgggtacctgtaccaagaatgaagaacacaccccagtggagctttgggggtaatataattcgtgctatctcagtttctcctgtcagtctctaaagttaaaaattaaagttaaaagttgtctctaaagttagaaattgatcagttagggagctgtgaattatacttaattagcttttggtagcagccaataatctccatcatgcatctgatatgcattagctatactcacagagtaaaattttaaattccctattcacagatttaaagagattaatttaccaatttttgtttcctaagagagaaaaacaaactcctacattttatttttatgtggccttcaatttctattcaatccattgaccaaaatggcccttaatgaaaaaaaatttttttctatcactatgtccaagtatacacatgtaagtaaaatattcagtcagtgttaaaatatgtaacctttacttgaaaacagcattgtttaggaaaacactcaagatgactaactgattccttactattaccaaagagatctttttatttgagtatgttgacactgtgaagacacagtgacagatttgcagggctagacagaccatgaagaccgtcttcagggtagaggggtcctgatccagaatcaagggaaaaatttatctgccttataacttccttgttagttcatggagagaaaaatatttttcctcacaaaacataactatccattcaaacttacactgatttcattcagcacatttccatttctgtttccaatatcaaggactctagttagacatgaagagttatataaaatgcaatcataaaacatacagagctaaattgtttcttctaaaaacctaaacaataaacaaggttgtatgtaattgaactctaaaatattacctaaatacaattctttaccaaaaaagaaattcataagtacttaagtagaggccagtctaaaggatttgctagataatttgcttcctaggcctcaactttacttacaagattcacttctgactcccaaagatatgtagaaatatctgggttctgacaaatctagatattacactaacaatcttggcagttaacacaaaaatctacacatcacattttaaaagtttaatttgctaatgcaatcaaacccacatttgttgtcttatgcttaaattataataactgtaaagtattaaacatatcattaaattgttaccccccaaaattgctgatgtcttagatcagtgattatttaaaataagtttctctgctatgcatgtattgayatgcagaaaaaaatacaagttttctaattaataagttgtaatagagcagctagaaattggcttccatgtaaaattttaagaattccattttgggaaaaactatgttataatttttaaaaattagagtttcataaatattgaaaataagactctggactgtgagaatatatcacagtggtgccaccaatactcactggctggtttccagagtgttcaatgttcactatgtatttcccatgttttctgtccattcttgaactgcaaatatcacaagcttaactccagaaacgttttccagcctcttcattgccctttatacctaaaatcttgagaaataattgagttgattaatagtaaatcaactatgagacatcagtgccagtgtggattagactaaataataaataattattctttacatg

SEQ ID NO: 64460 - DNA, 3268 bp, Homo sapiens
ttggagaaatggctgattctagtgctagagcaggaaatatataagatgagcctgaatatcttgtagtatcagagagtaagaaagtctccactccctcctttagaaaaacccatggccgggcgcagtggctcatgcctgtaatcccagcactttgggaggctgaggtgggtggatcacctgaggtcaggagttcaagatcagcctggctaacatggtgaaatgccatccctactaaaaatataaaaattagtcagatgtggtggcggacacctgtaatcccagctactccagaggctgaggaacgggaatcacttgaacatgggatgcagaggttgcagtgagccgagttcgcgccactgcactccagcctgggtggcagagtgagactctgtttccaaaaaaaaagaaaaagaagactccatctgtgtttggtacatgggtgcctacttaaaatttttttaaactaaatgcattaaaaatgtcggttcaaatgtgaaacatttggggggttaggtttttcttaaagggtggttgaaagaaaaaacaatctcagaaacagttttaagaaaaaggagaataatctgtgttagatattcaagggactgcaaattggtccatgtaaatttgttacaattgaaaaatattatacaattatctagaactttttttctaatacaacagtaagaatattatttaaatatactctcctggccaggtgcagtggctcacgcctgtaatcccagcactttgggaggctgaggcaggtggatcgccagaggtcaacagtttgagaacagcctggtcaacatggtgaaaccctgtctctacccaaactacaacaattagctgggtgtggtgacatgcacctgtaatcctagctacttgggagactgaggcagaagaatctcttaaacctgggaggtggaggttgcagtgagctgagatagcaccattgcactccagcctgggcaacaagagtgaaactccatctcaaaaaataaaatatataaaatataaataaataaataaaataaatatactctcttgaccttcttgattaaataccccatcctaaatggatttttaaaaaactactgacagatcaattaatctctaaattctattgaaacaatcaaaccatatgtgtatgcagacactactcagtgacagactatacataagaataaaagagagtttaattgtgattaaatacagtcaagaaggaatatatctgggtgtaaagacttagccagagtctaattttttttacagtacaatagcaagccagaacattttttagtagctattcagtgatatcgaataagataaaatctgatatacacaggtactttaacaaaattccatctgtttttcaatcagaaactttgagaaaaataacaaagatttatcttttataaaagcttcacttattcttcagcaatttagtatactgagggtgatgaacttagattttgttgttgttgaacttatataattaagtaaaacctcactttccaaaccagcttgcctgaatttcttttaaattctttaaaggaaaggagatagtgggtacctgtaccaagaatgaagaacacaccccagtggagctttgggggtaatataattcgtgctatctcagtttctcctgtcagtctctaaagttaaaaattaaagttaaaagttgtctctaaagttagaaattgatcagttagggagctgtgaattatacttaattagcttttggtagcagccaataatctccatcatgcatctgatatgcattagctatactcacagagtaaaattttaaattccctattcacagatttaaagagattaatttaccaatttttgtttcctaagagagaaaaacaaactcctacattttatttttatgtggccttcaatttctattcaatccattgaccaaaatggcccttaatgaaaaaaaatttttttctatcactatgtccaagtatacacatgtaagtaaaatattcagtcagtgttaaaatatgtaacctttacttgaaaacagcattgtttaggaaaacactcaagatgactaactgattccttactattaccaaagagatctttttatttgagtatgttgacactgtgaagacacagtgacagatttgcagggctagacagaccatgaagaccgtcttcagggtagaggggtcctgatccagaatcaagggaaaaatttatctgccttataacttccttgttagttcatggagagaaaaatatttttcctcacaaaacataactatccattcaaacttacactgatttcattcagcacatttccatttctgtttccaatatcaaggactctagttagacatgaagagttatataaaatgcaatcataaaacatacagagctaaattgtttcttctaaaaacctaaacaataaacaaggttgtatgtaattgaactctaaaatattacctaaatacaattctttaccaaaaaagaaattcataagtacttaagtagaggccagtctaaaggatttgctagataatttgcttcctaggcctcaactttacttacaagattcacttctgactcccaaagatatgtagaaatatctgggttctgacaaatctagatattacactaacaatcttggcagttaacacaaaaatctacacatcacattttaaaagtttaatttgctaatgcaatcaaacccacatttgttgtcttatgcttaaattataataactgtaaagtattaaacatatcattaaattgttaccccccaaaattgctgatgtcttagatcagtgattatttaaaataagtttctctgctatgcatgtattgacatgcagaaaaaaatacaagttttctaattaataagttgtaatagagcagctagaaattggcttccatgtaaaattttaagaattccattttgggaaaaactatgttataatttttaaaaattagagtttcataaatattgaaaataagactctggactgtgagaatatatcacagtggtgccaccaatactcactggctggtttccagartgttcaatgttcactatgtatttcccatgttttctgtccattcttgaactgcaaatatcacaagcttaactccagaaacgttttccagcctcttcattgccctttatacctaaaatcttgagaaataattgagttgattaatagtaaatcaactatgagacatcagtgccagtgtggattagactaaataataaataattattctttacatg

SEQ ID NO: 64461 - DNA, 763 bp, Homo sapiens
cttaacatacccaaatgagtcagcaaaccttattttactcttgacaacaaaaaacttgataatttttcattgctctgatgagaaacagcattttgtttataactgccatttatttgttgagtaccaaatttcaccaaattaccatattttgactgatgaaaagaaatacayactgttcaaagcaaacactgaccaaagacactatgtcctagggaagtagaataatacacttttgaaattttagatgatattctatttagccaaacaccaaattggacaaattttctttgaaaggtaaattatctttactcatgattcccattcttatatctccattccagagtataatattttttttaaaaggtgtaacaaaggttggagttgtattatttttaagcaagaaaaaaaaccatcaacattactgggccagatggaaaaagagtaatgagaaagcagaatgaaaaagaaaaaaggaagagtgaagttattgggaaaaaaaacattgcccaaaggacttagtagttacctacaacacatatgaagggacagagcagttaaaaaaaaaatccctatccaaagtgtggtggaggcacatggaggctagtaatattaatattcaaatttaactattgctctatttttgaaaagaagaaaaacttcttccaccccagaggataatcaaaggagatttcctggggtttccccttaactctcagacaatattatgaataactcacatacaccaagtattaagatccattta

SEQ ID NO: 64462 - DNA, 2551 bp, Homo sapiens
ttaaaatctttcatgaatttcaattcgaccaaaaacctgtcacacctgttttactaataaaaatgtttgttttaaaatgtttcctttggttccttgatagaaaatggttaaataaaatattttctaatatatctccaatatatgtcagaatctttattatggcatttaatatttctataatttcatagtatgggtatatatgatattcaaacaaaataatgactcctcaattatgcttgtttgggttttccaaataacggattaaatattggaaatcataaagttttaagatatagttctattagacagattccaaaaagaaacacaattgaggaaggatatttttagatgtctttagaaatgtcttatgtttctgagaatcaagtggtgcactattattcctgtaattttaaatccattttggatatttgtagcaataatgacctttacaaaggatctaatttatatcctggtagtatttttttgttagtaggctctagtccactaatttttatgacttcaacaacatatacaatctcttaaatcactagcataaaaaaactgaatctcaacatgttcaaactttgatagtcaccaaaaatatacacaggatttttatgacatttatatatatatatatataccaatgatagttattatgcttcttctctaaaaaatgtcttacttagaaaatgatagatatggtcttggttaatagaaatttgccttgcaagcattaatacaaaatcgacttctaatagcaagaagattgtaacttaataagaatattgacatatgcatgctttgttaatttatttgaattacatagatatgaacatgagagattttaagcatacattcttatatcatgttcttaaaatagattctattaaaattatgatctattatctatctatagtttaatctctttactatacaaaatataagctttcttgaaagcataataagtgagatttcgttaaattgacaacagtagtaggcagttctcagtgagcctaaggcagaaccttccttgtcaggtgaaacggtgctgctaaacatggagtgaccttcatagaagtcataaatatagtagcagctttctaaagtatagcatgtaatttaatcctttattaagtattgttaacaactttcataccctgtatttatttaaagcaacacttacaatctcaggcaatattattattaaccaatatgcctttaatattaaagtaagagatacttgtatatacaaacttcaaattctatgcataacatttcaaaaaccttgcaacattttaaaaatataatagattcatcaagctgtccaaattcatatagtgacaaataactgagattatgacccaaactttttatttttttattggttatattgttttattggtacactctacaactgttttgaaatagaatttgaatacgaatttgaaattgatttttttctagaaaattaatgatatgatggcatcatatgaataacagtttgtggttttctaaagtaaatgtctcgcacatactgattttacctcatggttttggaaagcccatttctcactgtgtggtatacaggttactgcatgatctaatggtccagcacaattttgaaatttagattttgacaaatcttagtttaaagcctggctttatttaatagttgtgcgactctgggtagcatattcaatttctattggcttcatattttcattattgaataaggatgattgtaacgctacccagaattggattcagtgagattatacatgtaaagcacttagcacaatatttggcacataataaatgctaaagaatttggctgttattataattttagtaygcattattttaggaatattcacatacttataaaagttctaacaattattaacatcaaagcaaataataaaatccacgagaatgttttatctttcaagcatattatgataactatatctacccttcaagtgtgttatattaaaatgtgatcaaatgaacagcaggagaaattgaagggaacacagatgaatcacatgtaatctggggatggaagaggcccaatgtaggaaattgggtattacataaatgggaagcatgcacccctggaaccccatgactgggtgatgactgagaaacacacaggctaatcctctcattagccccagtggagatgaaccactccttccccatgagaagtctgtctgtgtcacatgacttctagaatcctctagtcagttgaacgtttcagcacctgcatcaaatgaacaatttgtgccatgtaagattggctacttctccttgaatgggatccatgagagattgtttcatgtgccagcctctctatagagggaatgcccattgtgcttgcaaatttaagtcatgactctggctgttgtgttcctttgttaccatgtaatgtttatttaaaggatatagcttcaataagacaatccacatctctatcatttaattaaaggcagttaacattatcctcagtttataaagtagatatgtgaggcttagaacggttaagaat

SEQ ID NO: 64463 - DNA, 666 bp, Homo sapiens
attctccacccatgattagagggaacctgttaggacccaaggctgactgtgcccctcccctggtgaaacactttcgagggctccccattgctcttggactaaccccctaagttttgttgcagcctccacggccttgcatggcatcttctggtagtctctgyacttcacccatgctggcctcccttctgtctccagagcccactcagccagtttctacctcaggaactttgcactctctgtgcccttttccttgacttctctgccactggatcacaccgctgtgtcatcctagtccacactgcggccagagggagcttcctggaccctacatctcagcaggtcctctgctgcctaagtactctcttgggctagataccccatccccaaatccaaagtcctggatggggctgaggctgcctgcgcctcctccagcctcctctcctgagcttcttttagtgcgctcaaaggcctgcctctctgccagggtttctgagcctctggctgggccattctccattgtggggctgttctgtgctctgtaggacactaagcagcatctggggcttcgatccactggatgccagcagcactctcctcagttgtgaaaactaacatctccagacagcaccaaatgttcccggggagaacaaaatcaccgcggtcagg

SEQ ID NO: 64464 - DNA, 707 bp, Homo sapiens
ccttcctgctgagctgcctcacgcaagtgactcaacctctctgatgcccaaagaaagagatctgtcatggaggctacatcccacatgagtggggcttttccacatggggtacgtatgagtcccagttcacacactggcactgtagagtttcttcatgtttccacaaatggaactgattttccatcttgtgccatggttatgccaggctggagggggctttatctaatggtgattcccacccttgccaccgccccaccccacttctcctgggaaggccctgggtcccttggtctttcgtgaggccaaggtgttggggataggagtgaggacgggggcattggtgttgggtgttgtcttcccactaggcattgcctgatgcaggctggcccccacctgaggctctgcttgctgctgtggctgtccctttcccattgcccctggtcctaggggtcatttggctgcttcccrgctacttcaagggctgcttggaggctgcctttccagaatcctggagaagttgcttctacctaaggttctgggcctctctgggctcagtcccaggctaggggccacccctgacaccccctctctgtacctaccctgcgacgctggctctggttctgggtaggggagccttgctctctgcaagatgtgagttcttcctgctcctctcaacttttgaaactcaaaagccaggaagcctcctg

SEQ ID NO: 64465 - DNA, 707 bp, Homo sapiens
ccttcctgctgagctgcctcacgcaagtgactcaacctctctgatgcccaaagaaagagatctgtcatggaggctacatcccacatgagtggggcttttccacatggggtacgtatgagtcccagttcacacactggcactgtagagtttcttcatgtttccacaaatggaactgattttccatcttgtgccatggttatgccaggctggagggggctttatctaatggtgattcccacccttgccaccgccccaccccacttctcctgggaaggccctgggtcccttggtctttcgtgaggccaaggtgttggggataggagtgaggacgggggcattggtgttgggtgttgtcttcccactaggcattgcctgatgcaggctggcccccacctgaggctctgcttgctgctgtggctgtccctttcccattgcccctggtcctaggggtcatttggctgcttcccagctacttcaagggctgcttggaggctgcctttccagaatcctggagaagttgcttctacctaaggttctgggcctctctgggctcagycccaggctaggggccacccctgacaccccctctctgtacctaccctgcgacgctggctctggttctgggtaggggagccttgctctctgcaagatgtgagttcttcctgctcctctcaacttttgaaactcaaaagccaggaagcctcctg

SEQ ID NO: 64466 - DNA, 685 bp, Homo sapiens
aaccatatgtatcatattattagtgttgattgcctaaaagggaacacccrgggcctacctcaatgatttgcccaggtgggctcagtttcatttctttctctgacattctcaagcatcagtgctggattaccctaaggggcttcctcagatcgcctgtgctgtgcattttcccaaaagttcacaggcaagagagggaaaaaaaaaagaacaactcaaagctactaaagcaaccgcagaaatgcaggtcaaaatgaaaaggctctgaaattgctgagaaaggaaagaagtgaaagcagcaaaaagatggcagtcaaatgccaagagagattcaagggcaactcaggtgtgtaaagaaagaggtttctgttcctaccaatttgtgtttatgctcacaaatgtgtgcctgcgggatcaattatactctacactgttggccagcttttcttttctctttggagaaacgttccaaacgttcaaatccttctttttctggtccccctacttcttttcaatgagttatctacagcatgttgttttcctctagagtttccattcttcaacctcttgtcttttcccccactattcccttcctttaaaaatcttatctgcagccaaggcttcaattaccatctaaatgaaaatgactctaatattacatgtttagttccatctctttctcagaatg

SEQ ID NO: 64467 - DNA, 685 bp, Homo sapiens
aaccatatgtatcatattattagtgttgattgcctaaaagggaacacccggggcctacctcaatgatttgcccaggtgggctcagtttcatttctttctctgacattctcaagcatcagtgctggattaccctaaggggcttcctcagatcgcctgtgctgtgcattttcccamaagttcacaggcaagagagggaaaaaaaaaagaacaactcaaagctactaaagcaaccgcagaaatgcaggtcaaaatgaaaaggctctgaaattgctgagaaaggaaagaagtgaaagcagcaaaaagatggcagtcaaatgccaagagagattcaagggcaactcaggtgtgtaaagaaagaggtttctgttcctaccaatttgtgtttatgctcacaaatgtgtgcctgcgggatcaattatactctacactgttggccagcttttcttttctctttggagaaacgttccaaacgttcaaatccttctttttctggtccccctacttcttttcaatgagttatctacagcatgttgttttcctctagagtttccattcttcaacctcttgtcttttcccccactattcccttcctttaaaaatcttatctgcagccaaggcttcaattaccatctaaatgaaaatgactctaatattacatgtttagttccatctctttctcagaatg

SEQ ID NO: 64468 - DNA, 685 bp, Homo sapiens
aaccatatgtatcatattattagtgttgattgcctaaaagggaacacccggggcctacctcaatgatttgcccaggtgggctcagtttcatttctttctctgacattctcaagcatcagtgctggattaccctaaggggcttcctcagatcgcctgtgctgtgcattttcccaaaagttcacaggcaagagagggaaaaaaaaaagaacaactcaaagctactaaagcaaccgcagaaatgcaggtcaaaatgaaaaggctctgaaattgctgagaaaggaaagaagtgaaagcagcaaaaagatggcagtcaaatgccaagagagattcaagggcaactcaggtgtgtaaagaaagaggtttctgttcctaccaatttgtgtttatgctcacaaatgtgtgcctgcgggatcaattatactctrcactgttggccagcttttcttttctctttggagaaacgttccaaacgttcaaatccttctttttctggtccccctacttcttttcaatgagttatctacagcatgttgttttcctctagagtttccattcttcaacctcttgtcttttcccccactattcccttcctttaaaaatcttatctgcagccaaggcttcaattaccatctaaatgaaaatgactctaatattacatgtttagttccatctctttctcagaatg

SEQ ID NO: 64469 - DNA, 613 bp, Homo sapiens
tgaccagctatcttagtctagcccacaagttatcacagcatcacaaaaaacactgcagtgcatatgaaaacatttaaccactgtcatccatgaaacagaccaataacagtwgacagtgaggcaggagtctaagaaatagcaataaattgttatgaattgcctggaattaataaattaaacatttggaacaattgcagtaagtagcttagagtaatatttaaaaaacaaacgacaagtgttaaggtcaagtaggtcaaacagaggaattcacataactagagaaacaattagaaaggtaacaggcctgccttaatcaggatgctcatttgcttgacaaagtaaattttgaccctgatgaggggactgatgctgtgttcactaccatgctgtgctgtccttctgtcttctacaccaaattgcatgagctcatctgggggcagggactgtctttcatttctagactccctagctcttagcaaaatggctgtcctgtatacatctgtctagatatagatcaggacaacagacaattaattctattgggtcctaaatataaagactatgaaagagacatctgcagttcctgatagctgccatgatggcaactgctgag

SEQ ID NO: 64470 - DNA, 613 bp, Homo sapiens
tgaccagctatcttagtctagcccacaagttatcacagcatcacaaaaaacactgcagtgcatatgaaaacatttaaccactgtcatccatgaaacagaccaataacagttgacagtgaggcaggagtctaagaaatagcaataaattgttatgaattgcctggaattaataaattaaacatttggaacaattgcagtaagtagcttagagtaatatttaaaaaacaaacgacaagtgttaaggtcaagtaggtcaaacagaggaattcacataactagagaaacaattagaaaggtaacaggcctgccttaatyaggatgctcatttgcttgacaaagtaaattttgaccctgatgaggggactgatgctgtgttcactaccatgctgtgctgtccttctgtcttctacaccaaattgcatgagctcatctgggggcagggactgtctttcatttctagactccctagctcttagcaaaatggctgtcctgtatacatctgtctagatatagatcaggacaacagacaattaattctattgggtcctaaatataaagactatgaaagagacatctgcagttcctgatagctgccatgatggcaactgctgag

SEQ ID NO: 64471 - DNA, 412 bp, Homo sapiens
attctgtgttgggtgacatcagccagcaaattctctttttttgtgtgatcaagttggaattccgtcatttgcaaagtagcccaacttgtacatagaatgtcttatacttacaaggtgcccaataaacatatattggttatctggttggtttgatgtcagtgttttttctgtatcttttgcttgtgtactttstactctataccatcattctcaataaggcttgttcaaaacaaagtctgcagtttgcctgtaataactaggtgacctaaccccctatactggcatgaggaatatgtctgtgtttcagtttcctaatttataaaatatggcaaataataatagcagctacttatttagtatctactaaatttcaggtgctggtctaacacttaacatacattatcctaattct

SEQ ID NO: 64472 - DNA, 412 bp, Homo sapiens
attctgtgttgggtgacatcagccagcaaattctctttttttgtgtgatcaagttggaattccgtcatttgcaaagtagcccaacttgtacatagaatgtcttatacttacaaggtgcccaataaacatatattggttatctggttggtttgatgtcagtgttttttctgtatcttttgcttgtgtactttgtactctataccatcattctcaataaggcttgttcaaaacaaagtctgcagtttgcctgtaataactaggtgmcctaaccccctatactggcatgaggaatatgtctgtgtttcagtttcctaatttataaaatatggcaaataataatagcagctacttatttagtatctactaaatttcaggtgctggtctaacacttaacatacattatcctaattct

SEQ ID NO: 64473 - DNA, 1762 bp, Homo sapiens
acatttaagtctttgaagattatgggaacaaaaactcagttttaagtgtcagggaattgctgtatgatttttaccacatcacttaacttctaagttttctaattattgtattgtacaactgaaagaatgatattcacacacacacacacacacactccatacccttgaacactgagagacaatagactgatcaggaggctcttacatctgcaagaaacaaaactggagactagcaggacacatagcttctgagtgatggcgtaacaagttgctatttataccccatcttccattcaccaatgtgaactaggggtctatccctgcaagagagtaattttagagaatgagcttccgggtgagctcacagsttaacactgcttgtatcaccatcttgagtcagcagtggataatgctgtgcagaataaactaattttagtcctctgcggtatccttgtaaacacttcatagtgattctttaaaaagtcagtgggaacttgctatctctgcttcatttcctactcccaataatttgctagggttatttttaggtaactgtgtcttacaggatttgtttaggtgagctcctctgtttcagaatggccatgtgaaaattctgccacagattttgaagtcagaaggctgtctggttaaatggatccagaaaaattactaacagatatggtgacaaaggacatggaaatgtaagtgtcctgtatgtgctacaggaaaaagtgctgcccatctttccctcatttcagcaacactttcagtgagccccagctcatggaaagagagacgaggagagaaaaaggcttattcctgaagctaatagctttccttctctctctaatactatatgtttgcagtgacaatgatccctcagcttctgaatcatctcctcattctgtgatgtacccctgggttctgagtttcatttctttggcagtcagtcacatgctgaatatagagcacctctaatttgttcagtgtctcatggatcactgagaaagaatagggccttatgacaaactccactggtcagagcgcccggatctaggtgtgtgatcacagcctttaacacttgaccaggaactcatatttcatggagtgagaattgtgagaccttgcactagggttttgtgattctgagaaagatgctgggtttggctgtatttatcaaggaatgtggataccaagagaaggggctgagttgggaagaagggggtaaagagaattctaggcaaattaaacctctcagcaacgagtatcccataggccagaaagagtgtgaagggattcagtcatatgtgaaagaagttctgtggtttttgtcttgtctttcttgaaaacctctggccctggaatgtttgatatcgattttccctggtctaaaaagagaattagagaatttcaaatgaagtgtatgtgacacaaagtgagaagagaaggagggagggagaaaagagaggcagaatcggaaatgttaataggaaaaaggaagaaaatggtgtgtcctgtaattacttatataagaaaggcagctaataagtgttccagggtagaacttctatttcttgaattcattaaaagtaattttgagactcctggattggtggcagtggaggcaagactttgctaaggagaactttgtttaaatgtctctttccaaagcaaatacacatcataccaagatatacaacctatgtgtagcttcactgtgctgctggaaactctgcctcactaggtgattcttctttactga

SEQ ID NO: 64474 - DNA, 485 bp, Homo sapiens
  misc_feature (1)...(485): n = A,T,C or G
gnnnnnnnnnnnnnnnnnnnnnnnnnnnnnnnnnnnnnnnnnnnnnnnnnnnnnnnnnnnnnnnnnnnnnnnnnnnnnnnnnnnnnnnnnnnnnnnnnnnnattaacttgttaaggataaccagcatttctttctctgtctatataagcaaagaggcccttacacatgtactcacagagatttgtacaatgtttacattctacaaatgtattgccaggatggcaaaaaatacagaaaacaacccaaacatctatcagcaatacgataaacactttttttacatattcttagaatggagtattatataactttggaaaatcagtgaaagttacccacatcaacatagatacctctcaaaatatratgtaaaacaaaagaagcaagtcacagaaagctatacatattattctatttgtataacattcaaaaaggcaaaaataaatactgtgttgtttttgaatataaagtataagtggtacaaaaca

SEQ ID NO: 64475 - DNA, 1923 bp, Homo sapiens
atgaagaagggattcctttattatcttagtaactgtattttatctactttttaggaattcttcaatgcttagattaaaatattgttttaattggataatactatcacataattcaaaagatgttaaaagatgcacagtgggatgtcagtctccttccatttctgtccctcgtgcctcagctcccctctgggcagtaaccattgtgtgtctttcttgtgtgtcattccagagatgttctatgcatatgcacacttatgtccttttccttacatgaataataagtcattatatatgctgtgctgcccttgcatttttccccttgcatattttaagctaagtttacattagagatcactgcatcttggtacatgaaaaatgaccttgttatttttaatgtctttatatatgctcttgcatagttgtgtcatggtttatttaaccattactgtattgagtacatatactatatatataattgagattgttttctgtcttccagtgataaaattctatgtattcacaattttcttctttctgcaccctctcstttttccccatgactttgattttgctcacaaaacaaaatgattgacatgaaactttaggtccacccctaggcaaaaaatgcagcaactttggtcacaacaaaatttcttttcccccgtccatctctatcagcaaaaccactacgtttagtttcataaaaaagagatgaataagggaatatgctaaaaattctggcagtagttatgttttcacacacttctggatccatggttttcaaactttcatgtacataagaattttctggggatcttggtacaatgtagattcagcaggtggggcctgagggtctgcatttataacaagtgccaggtgatgcccagattgctgggttgggccaccacactttgagtaaaaagacttgtggaaatttgttgccatttcattttaatgtagtgagtggtgatgtttagatttcacaaatacccataatcatcctgtttcacaggctgggagtagtgaggttggtggccaatagtggtgtcttttgcttatatgaaagttgaataaatagtctatgtttagtttctgttttagtgtattttataaaatccttgatttaggtgtgtgatacactttagttggtatattttcaaattaatattttagtctataaattaagattatagagataatgaaagagcttctgcataacaaaaggaactatcagcagactaaacagacaacctatagaatggaagaacatttttgcgaactatgcatttgacagaagtctaatatccagcatctataaggaacttaacaaatttacaaggaaaaaatgaaccccataaaaaagtgggcaaaggacttgatagacacttttcaaaagaagacatacatgcggccaaaaatcgtgtgcaaaaaagctcaacatcactgatcattagagaaatgcaaatcaacaccgcaatgagataccatctcacaccagtcagaatggctactattaacaagctaaaaaagtaacagacgctagtgaggttgtggagaaaaaagaatgtttatacacctttggtgggagtgtaaattagttcaaccattatggaagatagtgtagtgattcctcaaagacctaaagacagaaatatcatttggtccagtaatctgataatcccattggtattttttgggtatataataccaatgggatttttttgggtatctaataccagtgggattatggaaaaatcttggctatatacctgaaggagtataaatcattgtgttataaacacacatgcatgcatatgttcattgcaacactattcacaatagcaaagatatggaatcaacctaaatgcctatcaatgatagactgggtaaagaaaaggtggtacatatacaccattaaatact

SEQ ID NO: 64476 - DNA, 1923 bp, Homo sapiens
atgaagaagggattcctttattatcttagtaactgtattttatctactttttaggaattcttcaatgcttagattaaaatattgttttaattggataatactatcacataattcaaaagatgttaaaagatgcacagtgggatgtcagtctccttccatttctgtccctcgtgcctcagctcccctctgggcagtaaccattgtgtgtctttcttgtgtgtcattccagagatgttctatgcatatgcacacttatgtccttttccttacatgaataataagtcattatatatgctgtgctgcccttgcatttttccccttgcatattttaagctaagtttacattagagatcactgcatcttggtacatgaaaaatgaccttgttatttttaatgtctttatatatgctcttgcatagttgtgtcatggtttatttaaccattactgtattgagtacatatactatatatataattgagattgttttctgtcttccagtgataaaattctatgtattcacaattttcttctttctgcaccctctcctttttccccatgactttgattttgctcacaaaacaaaatgattgacatgaaactttaggtccacccctaggcaaaaaatgcagcaactttggtcacaacaaaatttcttttcccccstccatctctatcagcaaaaccactacgtttagtttcataaaaaagagatgaataagggaatatgctaaaaattctggcagtagttatgttttcacacacttctggatccatggttttcaaactttcatgtacataagaattttctggggatcttggtacaatgtagattcagcaggtggggcctgagggtctgcatttataacaagtgccaggtgatgcccagattgctgggttgggccaccacactttgagtaaaaagacttgtggaaatttgttgccatttcattttaatgtagtgagtggtgatgtttagatttcacaaatacccataatcatcctgtttcacaggctgggagtagtgaggttggtggccaatagtggtgtcttttgcttatatgaaagttgaataaatagtctatgtttagtttctgttttagtgtattttataaaatccttgatttaggtgtgtgatacactttagttggtatattttcaaattaatattttagtctataaattaagattatagagataatgaaagagcttctgcataacaaaaggaactatcagcagactaaacagacaacctatagaatggaagaacatttttgcgaactatgcatttgacagaagtctaatatccagcatctataaggaacttaacaaatttacaaggaaaaaatgaaccccataaaaaagtgggcaaaggacttgatagacacttttcaaaagaagacatacatgcggccaaaaatcgtgtgcaaaaaagctcaacatcactgatcattagagaaatgcaaatcaacaccgcaatgagataccatctcacaccagtcagaatggctactattaacaagctaaaaaagtaacagacgctagtgaggttgtggagaaaaaagaatgtttatacacctttggtgggagtgtaaattagttcaaccattatggaagatagtgtagtgattcctcaaagacctaaagacagaaatatcatttggtccagtaatctgataatcccattggtattttttgggtatataataccaatgggatttttttgggtatctaataccagtgggattatggaaaaatcttggctatatacctgaaggagtataaatcattgtgttataaacacacatgcatgcatatgttcattgcaacactattcacaatagcaaagatatggaatcaacctaaatgcctatcaatgatagactgggtaaagaaaaggtggtacatatacaccattaaatact

SEQ ID NO: 64477 - DNA, 877 bp, Homo sapiens
ttattttgatgatcgtaaatggcatcacttaatagtatccaccacaactcacaataataattctcacagattttcttttgtatattctgcttttccttgccttggactgagagcrtttgattttgaagagctgactgcttataaagtttacctgtttatgacactctggctgtgctcttggtgcttctaacagtccctgaaagagcaggcagataaattaacttaacagtgagcctgcattgattccctggtgtggcttcattgagctgtgccctgcaaagggctgagctgggtgtacaacagggataaggacatgtacaatgtgtgagggggagctcaccagttggtatcccttgtattttagcctatgatgtgtggcatacaccatcatgctgtgattttcatttctttcctttgcctttccatgtctggcctcccatacacccttgtcattttcttcttcactgtgtcttttgtatgtgtctctcttcaataaaatattctactctgaaagaatatgagagctcatcctgtcccactgcatgcctattacaagaatcacttctattgcattattggtcaatactctgatttgtacttgcatatttctagtaccaaataattcactacttttccaggaattttattactgggaaactctaattattagaaaatatttcattcatagtgtcgtgaaaatcctttcctctacagtggttatcctttggttttgttttcagaaagtattcaaaataagaatgattcctgctttacatggtaactcatcatcaaacatttagggtcagccgttatggcccaaccgaagccccacccccagtcaatacacacacacacacacacacacacacacacacac

SEQ ID NO: 64478 - DNA, 997 bp, Homo sapiens
attttatgaactctgcaacattaaggggaagatcaaacttaaaggtggccatttcaggctttacatagcmctttataattttattttcatctcttcgagtaacgtgggtgtaatgccagcagaccagttatgttccagagatgaaataactatcttcagcagcttggcaatcaaggatctattgtctaaaaatcttcctggtgtttgtaatgtaaaattgccaaagcatctgcttttttatcctagcagagctcagatggttcacaatgtccacaggcccacataccgtctctgaccttctgccatagtgctcaaaagatgttttacactgatgtgcaaagtgctctttcccataaaaatgttacagccatgaataaaggtaaaagagctgcaaatataattatatgaatgaattaatctatatgctgatttatactacaggaaaataaaaacagcaatgttttaccacataatgtgaacataattttgtttctttttaatgcgttcagacaccagtcatatctatcttatctatgtatcagcatttacagaatgcaactgttgttaaattactttttccactcataaatcagccttgtgaacttttcctcaaggatacaacctgtgaagaaattgttagatggaatatagaattggagctataagaacaaagagataataatgtggctacaaagaataatgaatgtgtagattttggatgttgcttctaatttcacttcaaaaggttgttacagcaaagtggtatagtcacacaccaaaaatgtgcacagtaaatacaggatggggatgaattagtggtactttaggaatgggttgaggtgggttttaggaaacagcaatttgaatataaattaatgatgctgtattgatatagaaacatttcatttgacacatggccaagtgctattcaattttaaaaggacaataataatagcagttgtaacatcaatagcctgtatatctcagctagacagtt

SEQ ID NO: 64479 - DNA, 655 bp, Homo sapiens
tccaatttgaagaaacggacatctagcattcttattaaacatgtattaacacgaggagccaagatggccgaataggaacagctccagtctacagctcccagcctgagcgacrcagaagacgggtgatttctgcatttccatctgaagtaccaggttcatctcactagggagtgccagatagtgggcgcaggtcagtgggtgcgcgcaccgtgcgcgagccgaagcagggcgagcattgcctcactcgggaagcgcaaggggtcagggagttccctttcctaatcaaagaaaggggtgatggacggcacctggaaaatcgggtcactcccacccgaatactgcgcttttccgacgggcttaaaaaacggcgcaccacgagattatatcctgcacctggctctgagggtcctaccccagggagtctcactgattgctagcacagcagtctgagatcaaactgcaaggcggcagcgaggctgggggaggggcgcccgccattgcccaagcttgcttaggtaaacaaagcagccaggaagctcgaactgggtggagcccaccacagctcaaggaggcctgcctgcctctctaggctccacctctgggggcagggcacagacaaacaaaaagacagcaataacctttgcagatttaaatg

SEQ ID NO: 64480 - DNA, 655 bp, Homo sapiens
tccaatttgaagaaacggacatctagcattcttattaaacatgtattaacacgaggagccaagatggccgaataggaacagctccagtctacagctcccagcctgagcgacacagaagacgggtgatttctgcatttccatctgaagtaccaggttcatctcactagggagtgccagatagtgggcrcaggtcagtgggtgcgcgcaccgtgcgcgagccgaagcagggcgagcattgcctcactcgggaagcgcaaggggtcagggagttccctttcctaatcaaagaaaggggtgatggacggcacctggaaaatcgggtcactcccacccgaatactgcgcttttccgacgggcttaaaaaacggcgcaccacgagattatatcctgcacctggctctgagggtcctaccccagggagtctcactgattgctagcacagcagtctgagatcaaactgcaaggcggcagcgaggctgggggaggggcgcccgccattgcccaagcttgcttaggtaaacaaagcagccaggaagctcgaactgggtggagcccaccacagctcaaggaggcctgcctgcctctctaggctccacctctgggggcagggcacagacaaacaaaaagacagcaataacctttgcagatttaaatg

SEQ ID NO: 64481 - DNA, 1905 bp, Homo sapiens
aattccataaagagaaaaaaatcttatataactaaacagaatattcatcggctgcttggtcatgcaagattccataatgtcttgctgtcagtgaaattctgaagtgtaggacaggaatgatggcagtatgtaagctgaagttcaggattgaaacattccatgttgaaaagggccaccacacgctggtactaaggaagttaatgggtagttaggaaaaacccagcgtatttcctaccctcacaactgaatacttctgacactagatgtatgtaaggtgtttttcaacaccaagcagctctccattggacactagctgagtctaactcaattccattctgatgttatctggagatatcctacagatcaagcactcattcccgtaagactgccccctgcttcagatgccattgcacatagtaggctgtcatgtatgcttctgactaatcggctataaactagtgttcccactacactctcgagttcaacttgctagaacggttcacagaacccaaactttgtccatggcaatggggatagggcaagacctgtgggaaggggcttccataccctctgggtgtgccacttccaggcacctccatgtgttcagtaatttgacagctctaagaacccagttcttggttttgtagagccttcattacataggcataaccaaaatcattgcctacccatgatcaactcagtcttaagcatctttcctcctgaatcatgctttggtctttcagtgaccagcccccatccttgaagctatctagggactccagccactagtcatctcattagcctaccagacatgcctataaccctggagattccaagggtttttagaagctgcatgtcaggaaatgaacaagaccaaatgcatgtcattatcacagttccatcagtatatcttctaagacttcttgaagtatctagatgggcttaggccctctttcatatttgcccaccaccaaccctatctacctcaagacaaacctgaggtttgtgaggcagttatgtcagatggctgtgcctcataggttagtctttcctttttaaccattccatttctgctgttgagctccaaaaaggcatcctaaatggctttcaaaaagcctcaggcctatgaagattgtgatatgggaaagctataggatggtcagttaaccaagtaaggaagaaaccaaagactggagaaatcaactcagaattgatctcccaatctgagagtccccttgagtggtgaagtgctgaaactaaggctaaacctgtctgtagctcctcgaggattagaacacgggcaactgacttatggtggtgtcctcctaggactttcttccaagctagacgtgattagacatttcacatgtgtctgtgtaatgttgagatattattagttgatggaaatagagggtttctggtggataattaagtgacttttaatttcatmctttacttaattatagacatattcctcagatttgggctgagatgaggggcttgtacctcatctggctgggtatgaaaggttcttgtagtccggattcccttagaagcaacctgacaggagtttgggtagttaatatggatgtggtactgataagcagggggagacaggtaagaaagtgttcagagtttctactggtagtagagcgggaaggggcacttaattctgctgagatctcccagatgtgctcagttaaactcagatgttcctctcaagcagataatttctatcagtttcaagttgctttaaagcctagtaagctcaaagttaaatacattaaggttagaacttgttagaatggctataactgaattctagaaacagtggaatccaagattacaaggcagcttgataacatctaaacagtacaaatattaaaagaaaacagcattgatgca

SEQ ID NO: 64482 - DNA, 650 bp, Homo sapiens
tcctgtggaagaaggaagctctctggggtctttttcataaggacactaatcgcattcatgagggctttgccctcacaagctaattacctcccaaagaccctaccttctaatatcgttacactagtgattgggtactaacataggaattttrgagcaacacaaatattcagatcatgtgatggggctctccattagaaacccatactattgcaggcatctatactttttttgttcaatagatacatgaagacaaactaggaagcttgaaaatagatcaagaaaattcctttgtgaatatatgagttgccggaagaatcagagaaaggccaacacgtgagacccattttaaaacaaatcattaaacaaaagtatcattaaaggaaaaacaatctcagtgggtatattaagcaggttcaattctcaaagaaagctcctcccatacccaggaaaaccaaaccaacttgttaattttttagactttacaggtaaagataggaatttttaagtggccaagatgaaaaaagatactaaaagttggaagaattaaaacaaatctacccctttttctcagactgcaggacaagagcattgctcaggaagaaaccactagaaagcacagagatctgaaactctccatccctgccaggcca

SEQ ID NO: 64483 - DNA, 1688 bp, Homo sapiens
tgctcagcttctggggaggcctcaggaaacttacaatcatggtggaagacgaaggaagagcaggcaggtgacatggttggagcagcaagagacaaagggaaggaggaggcgctacacacttttaaacaaccaggtctgatgagaactcactgtcatgagaacggcaccaagaggatggtgctaagccattcatgagaaatacacccctatgatccaatcacctccgactaggcttcacctccaacattgaggattataatttgacatgagatttcggcagagacacagatctaaaccatatcaggaggtgaaggtgatatagccatcattggggatccagcttattattctctgaaaaatcatcattttcactgagagagacatttactgatctgacagatgcttctttacaaaatctctgatcatccagtcttctcccgagggggcctataagaactgtgtgcctctgacaagatgaagaaagaattgatggaaatttcctagtctttatcatgcaggccctggcagaagggaggcaaggatctgggaataggaagaaggcagaaaaggaaggaggtcagggggaagggcacttaagtatcatgtagggagatgctgggaattacaaagaaacagctggctctgttttctagacttcagatcatcatagtgggctattccccaagcccttccagacagcatttcaataagaaggaaagaattttgtaccctggagtagtgctgcaggagtccactggcaaggtgatgatgatgtagctcaaggcagaaagcaaggatgcacaatgaaggggtgtatggtgggttctattatcgtttgaaatatttgctccttcctccccccacaacccagtggaaaatgatactcccttcaactcccattgacaggcttggtgatatggcttttggtgctcctccctgcagagggattaaaaatctccactgtattcaactatgggrtagccacgtggcttgttttaaccagtaaatatgagccagagtcttatgcgttacttctgagaagaagctctcagaagcagctattgctttttcacttttcttttccctttgttatgagttcagtaatgtaggccttctctgtcagcctgaatcctgagtgaaaacagcatggaacaaaggtgcaagtgggtggtggtaagtttagaaaacagggcaaaacatttgtttacaagtcccataatttttcacactggacaagaaacagtgagaaataacctgtgttgttgtaagccatttatattttgggactgctagttatcacagcataatgtaacccatactcacaggtaaagggagtctgtgggagctggtgaggcaggccattattggtgttaatggcaagtcagaaaatgtcaaagccaagaattcaactatacaaagggttttgtgccaggcagggatgaataatgatgatgggatgaaaggatttgggtgtctgaaggactggggctagaaattataatgagagatagtaggtcttacctgttgacaggttgagctccagagccaaatcccttttcctccactgccttggaaagttactctgtacttcagtttcctcttctacaaaatgagggtaataaaagcagcacctaattatagcattgttgttgggactaaatgagttattcacatgtaatgagtttccc

SEQ ID NO: 64484 - DNA, 553 bp, Homo sapiens
aagttgggaaaagccatgaaattacaggcatgactaaaggattattatgttcatgaatcaaaagatttgggatgatatccagcagtcagatttcctaaagaggtcaaagtctgggaaattctagtcatggggttatctcctcaagccagcacaagagtcaagagtgattaaaaaccagaatcatattgatccttttccagaaagacaagataaaaatgacatgtccaattctatccaggctattaatagaagttctcatatcttgagtaaaataaagatagctaatgtgctgaatgattatkatagctcagataccaaaacataatccataaaagttcaaaaagtaacaaattttattcctaatagccatttaaaaattcaaacgaagggagaaagcataaatccaaattcagggaaactgctgctcaagctctggtgtttgcctttaaggtagtaaagtacttgactcatcaaagtaaaatagcaatgtcctctgaagaaagtcacaacatatggatgtctaaacataggaatacatggaactgctttagca

SEQ ID NO: 64485 - DNA, 1240 bp, Homo sapiens
tcaatggctaggattcctcaaagccattccagctaagattcatacctcagagccaccaaagtggcaaatcataaataggttaaagcatctccccactttcaatgcaaggtattttggtcctgtttggtagaaagaaaagaacacaggaggggagattgggagcccacactcgaattctggttctgccaaaccagccttgtgatcttgggtaaattccctaccacctctggactccatcagtaaaattgggcgtggactaggtgatctcatagatccttcctgctggaacattctatggcttgaattatattctcctaattattgtcaaaattgctgttattaagtatctactgtgtgccaggcactttaaataaatattgtgtctaatcttcaaaacaaatttgcaaggaaggtttttggagataaggaaactgagactcaggattaagtaacacacctaaagtcacaggtgagcttggaactgaacccaagtgtgcccccactccactggaatttgcttgccaggatgccaatgagttgtagcttcatttttcttagagactttcctggctgtggttgaacaatgaaaaggccctctagtggtgtttgttttagggacacttaggtgataacaattctggtattctttcccagacatgtaacaagagtaacatgtgtgaaagcagcaaagaggcactggcagaaaacaacctgaaccttccaaagatggctgaaaaagatggatgcttccaatctggattcaatgaggtaccaacttgtcgcactcacttttcactattccttaggcaaaacttctccctcttgcatgcagtgcctgtatacatatagatccaggcagcaacaaaaagtgggtaaatgtaaagaatgttatgtaaatttcatgaggaggccaacttcaagcttttttaaaggcagtttattcttggacaggtatggccagagatggtgccactgtggtgagattttaacaactgtcaaatgtttaaaactcccacaggtttaattagttcatcctgggaaaggtactckcagggccttttccctctctggctgcccctggcagggtccaggtctgccctccctccctgcccagctcattctccacagtgagataacctgcactgtcttctgattatttatcaaagggagtttccagctcagcatacacaaggcagagagtgcagacagaacatcaaggggacaattcagagaaggatcc

SEQ ID NO: 64486 - DNA, 1240 bp, Homo sapiens
tcaatggctaggattcctcaaagccattccagctaagattcatacctcagagccaccaaagtggcaaatcataaataggttaaagcatctccccactttcaatgcaaggtattttggtcctgtttggtagaaagaaaagaacacaggaggggagattgggagcccacactcgaattctggttctgccaaaccagccttgtgatcttgggtaaattccctaccacctctggactccatcagtaaaattgggcgtggactaggtgatctcatagatccttcctgctggaacattctatggcttgaattatattctcctaattattgtcaaaattgctgttattaagtatctactgtgtgccaggcactttaaataaatattgtgtctaatcttcaaaacaaatttgcaaggaaggtttttggagataaggaaactgagactcaggattaagtaacacacctaaagtcacaggtgagcttggaactgaacccaagtgtgcccccactccactggaatttgcttgccaggatgccaatgagttgtagcttcatttttcttagagactttcctggctgtggttgaacaatgaaaaggccctctagtggtgtttgttttagggacacttaggtgataacaattctggtattctttcccagacatgtaacaagagtaacatgtgtgaaagcagcaaagaggcactggcagaaaacaacctgaaccttccaaagatggctgaaaaagatggatgcttccaatctggattcaatgaggtaccaacttgtcgcactcacttttcactattccttaggcaaaacttctccctcttgcatgcagtgcctgtatacatatagatccaggcagcaacaaaaagtgggtaaatgtaaagaatgttatgtaaatttcatgaggaggccaacttcaagcttttttaaaggcagtttattcttggacaggtatggccagagatggtgccactgtggtgagattttaacaactgtcaaatgtttaaaactcccacaggtttaattagttcatcctgggaaaggtactctcagggccttttccctctctggctgcccctggcagggtccaggtctgccctccctccctgcccagctcattctccacagtgagataacctgcactgtcttctgattatttatcaaagggagtttccagctcagcatacacaaggsagagagtgcagacagaacatcaaggggacaattcagagaaggatcc

SEQ ID NO: 64487 - DNA, 1240 bp, Homo sapiens
tcaatggctaggattcctcaaagccattccagctaagattcatacctcagagccaccaaagtggcaaatcataaataggttaaagcatctccccactttcaatgcaaggtattttggtcctgtttggtagaaagaaaagaacacaggaggggagattgggagcccacactcgaattctggttctgccaaaccagccttgtgatcttgggtaaattccctaccacctctggactccatcagtaaaattgggcgtggactaggtgatctcatagatccttcctgctggaacattctatggcttgaattatattctcctaattattgtcaaaattgctgttattaagtatctactgtgtgccaggcactttaaataaatattgtgtctaatcttcaaaacaaatttgcaaggaaggtttttggagataaggaaactgagactcaggattaagtaacacacctaaagtcacaggtgagcttggaactgaacccaagtgtgcccccactccactggaatttgcttgccaggatgccaatgagttgtagcttcatttttcttagagactttcctggctgtggttgaacaatgaaaaggccctctagtggtgtttgttttagggacacttaggtgataacaattctggtattctttcccagacatgtaacaagagtaacatgtgtgaaagcagcaaagaggcactggcagaaaacaacctgaaccttccaaagatggctgaaaaagatggatgcttccaatctggattcaatgaggtaccaacttgtcgcactcacttttcactattccttaggcaaaacttctccctcttgcatgcagtgcctgtatacatatagatccaggcagcaacaaaaagtgggtaaatgtaaagaatgttatgtaaatttcatgaggaggccaacttcaagcttttttaaaggcagtttattcttggacaggtatggccagagatggtgccactgtggtgagattttaacaactgtcaaatgtttaaaactcccacaggtttaattagttcatcctgggaaaggtactctcagggccttttccctctctggctgcccctggcagggtccaggtctgccctccctccctgcccagctcattctccacagtgagataacctgcactgtcttctgattatttatcaaagggagtttccagctcagcatacacaaggcmgagagtgcagacagaacatcaaggggacaattcagagaaggatcc

SEQ ID NO: 64488 - DNA, 588 bp, Homo sapiens
aaaaaaaaaaaaaaaagtccttactttttaagcctgaataatattccattgtatagatgtatcgcacttgtttacccatggacatcatttgggttgtctccacaagmatgtattcctttttttttttcttttttttttgagacagtgtctcactctgtcactcaggctggagtgcagtgatgcaatctcggctcactgcaatctctgcctctcggcttcaagcaactctcctgcctcagactccctagtagctgggattacaggcatctgccaccatgcctggctaatttttgtatttttagtggagatgaggttttgccacgttggccaggctggtctcaaactcctgggcaatccacccgcctcaccctcccaaagtgctgggattacagatgtgagccactgcgcctggcaagaatgtattcttatatgaaagaatatcagtgaatcttgttgattctcactcccaaaaattcattggatggttttagttcctgattgacacagaagagcccagcaggcaggccctctctccttccatgtctataatcagatggcctcttaagccaggcccccctctcacattct

SEQ ID NO: 64489 - DNA, 588 bp, Homo sapiens
aaaaaaaaaaaaaaaagtccttactttttaagcctgaataatattccattgtatagatgtatcgcacttgtttacccatggacatcatttgggttgtctccacaagcatgtattcctttttttttttcttttttttttgagacagtgtctcactctgtcactcaggctggagtgcagtgatgcaatctcggctcactgcaatctctgcctctcggcttcaagcaactctcctgcctcagactccctagtagctgggattacaggcatctgccaccatgcctggctaatttttgtatttttagtggagatgaggttttgccacgttggccaggctggtctcaaactcctgggcaatccaccygcctcaccctcccaaagtgctgggattacagatgtgagccactgcgcctggcaagaatgtattcttatatgaaagaatatcagtgaatcttgttgattctcactcccaaaaattcattggatggttttagttcctgattgacacagaagagcccagcaggcaggccctctctccttccatgtctataatcagatggcctcttaagccaggcccccctctcacattct

SEQ ID NO: 64490 - DNA, 628 bp, Homo sapiens
tttctagaaattctcttttttttttccaactttttttattttatttttaattattatactttaagttctagggtacatgtgcacaacgtgcaggtttgttacataggtatacatgtgccatgttggtgtgctgcacccattaacttgtcatttacgttaggtatatctcctaatgctctcctttccccagccccccaccccacgacaggccccggtgtgtgatgttccccaccctttgcccacgtgttctcattgttcarttcccacctatgagtgagaacatgcggtgtttggttttctgtccttgcaatattttgctcagaatgatggtttccagctgcatccatgtccctacaaaggacatgaactagaaatcctcactgatcggcttaccggcccccgatgcacagccataaggtagctctgtgttgattcccagagtgggatcggaagtggccacaagttcaaggagacacgtaaacacacagaagagccgggtcagccacccgactctgtaacctccccccgggagaaagtgcgtgccacacgctcagcatgggcctggcccaccgtgggtgtgccagcaatgaacacactgccgccttgcccaccccaagtaaagggaacc

SEQ ID NO: 64491 - DNA, 628 bp, Homo sapiens
tttctagaaattctcttttttttttccaactttttttattttatttttaattattatactttaagttctagggtacatgtgcacaacgtgcaggtttgttacataggtatacatgtgccatgttggtgtgctgcacccattaacttgtcatttacgttaggtatatctcctaatgctctcctttccccagccccccaccccacgacaggccccggtgtgtgatgttccccaccctttgcccacgtgttctcattgttcagttcccacctatgagtgagaacatgcggtgtttggttttctgtccttgcaatattttgctcagaatgatggtttccagctkcatccatgtccctacaaaggacatgaactagaaatcctcactgatcggcttaccggcccccgatgcacagccataaggtagctctgtgttgattcccagagtgggatcggaagtggccacaagttcaaggagacacgtaaacacacagaagagccgggtcagccacccgactctgtaacctccccccgggagaaagtgcgtgccacacgctcagcatgggcctggcccaccgtgggtgtgccagcaatgaacacactgccgccttgcccaccccaagtaaagggaacc

SEQ ID NO: 64492 - DNA, 736 bp, Homo sapiens
cttgtcagctgtgttcttttgtgcttagttgtagtttttgctgtatttattgttttgatggtttgcttagttgcttgaatccatgagataatatattttatcagatttgaaaaattctcagctactatttcttcagatattaattctgtccctttctctctcttctttctttctggaactccttatatatctgttagatcttctgactgtgttctacccacattttcatattcttatcagttctttccatttttttctctttatgcgtcacaataaacattttctatttaaatacagtattcttaccttctgctgtgtaaattactacactttcatacatagattttactcatatttttcttttttcaactcattaagcataattattttgaagcccttatctgttaactgtaatatctagatcatctttggttgtattctttgcatatctagtaattttgatggtatgctgaacattgtaatgatatactgtacaggctctggatatttatcttttgctagaaagtggtatgtggtttttttttttcctgaaaatctattaaattatctgaaatactttgatgctgttgagacttagttttaggctttgttagggaaagcttattttagcattgttcttactsctagatatttgatcttatttcaagattttttttctgagtttgcacataaatgcccagtgttcactgaggtttctccctttggctggatccaa

SEQ ID NO: 64493 - DNA, 709 bp, Homo sapiens
tgaaattttctattcacataacacttgatctctatatgacatttgatactactgagcagggttctcttattctgagtgatctcttcacttgacttccatggtatctcattctccaggtgtggctcccatctctctagccactaagattcatacttctttgcagatttgccattctgtaactggactgtatatatggaaactccttaaggcctacgttgatgatttccaaatttgtacctctgggaccagaaacttaaagcaagcagcttactcacacttttgctcttggatgtcttaaaataataccacaaatgcaatagttctgagagaaagttttaaactcctcaatctgaaataaaatcttgttatcgtttagtgttccatatctcaccaaataggcctatcattcatgtaattgagcaagtctagattacaggaatcatctttgaattctccctctatctctttaattcactcctttctacatctactctacatgctctagtctcacctaaactaccatgttcgcctccttaatagtgtcattctatccacttgattcatcccaccattcctcagaaactttttaccctaaagttgaagcaaacctaataatttaaatgtgatctggtaagactcctgcctaaaatcttcaatagttccctattgaacmtaggacaaaaaccagaatcctcaaagcaggctctga

SEQ ID NO: 64494 - DNA, 1010 bp, Homo sapiens
tggttaggaaagactggtggaacaatctattaggaacctctgcatcatgaatcactagaaactacagtctcactattctctttacattcttctctctgaagaatctcactctttccctagctaggctattgctatgacactgctattattgtttagctccttctcacggcagtaaataaaaacctgcaaatctgcatctagaccaataatatgttccatcacttctttcagtgggttccccagttagatagttttactaaaggaatatgtgtttaacaaactttgacatttaggtttagcgcatgaattagccattctgggcatagctttgatctacatagatgctagctcagcaccgagaggctgtgtggaatgtgattcaccaaggcagttctgggcagagcmaatgaactggaaaatttcttcttgacctttctggccttgggtgtcctcttgttgcacaggggttacaatctcagtgatcagtgcttaacgattctgcaagtatatactgaaatactcaaatcctccttcagattgactctaaatattaacaaaagggtttcccaaaggtaaaaaataattttgcaatttaacaattaatacaagcttgtaaagcagtacaaattactgtatttttccaaaaaggtcgaaagaatttaaaagctatcatagagtggaaaagcttttttaggtctgatgtgtaaaatgtaaggactttaatgtgcgtttattagaggaaatgtagctgtgacatttggagtcagacatatttgggttcagatgcttgttcaaattctaagtcttattttcctcattggtaagatggagatagcaataggaaacatgtaagagcactctgaggaccaaatgagaatgtgtgtgaggtattttgtagtgtcttgctctatccagccacataacagagctagtattagcatcattattaatatacttgtttacaatctatggagttctgccttcctgacgggaacactcaacagtacgtc

SEQ ID NO: 64495 - DNA, 614 bp, Homo sapiens
ctgtctaccatctccctgcacatgtattattattattttaattataaggaataagtagaaaaggaaagggaaaatgtttcatgctttagtaagaactgatgggcacagtggctcatgcctataatctcagcactttgggaggctgaggtggaaggatcacttgagcccaggrgttgaagactaagtggcacaaattagtcaggcatggttgcacatgcctgagtcccaagtactcaggaggctgagctgggaggatcacctgagcctaggagatggaggcttcagtgagctatgtcacgctactgcactccagcctcggcaacagagcgagaccctgtctcctaagagggggtgaggagggagaaaaacaaaaacaaaaacacactgatacgtaaaatggaaaatgcctcccatctcttccagctccgccagtcacttctctttagaagtctttggtaactgctccagatttagaggtagctcaccccttccttgcaaaccagctccactcacaagaagaatcccgaattccatggaggcttcctggccagcctggaattccaggtaccttatgggattctggagcagtcctcagtacagggcaagatttttaa

SEQ ID NO: 64496 - DNA, 679 bp, Homo sapiens
tttttgttatcctgcttagaaatggcaatgaaatatgaatttgactaatttttaaagcaagacagagttgctagtcaagaagcaaatagttgaattacaaaaatccatagatacaagctacagataatattgtgcctttaaaatcatctgtaaggaatgtaatcattttcctctgtaaggaaaaggaaaactgattagattaattgccccaagttttaaaatatttcagttcatttccgtgagacttcctggggaagaaaggcacagcatcattagactctgggttttgctgcttacccttcatgtatctgcactcgcacagccttccaaacttcagagggaagagtggcttctttaaataatatgactgtgcgtgttgacattttcctgagaagtcccttttgtagaayccagaattgtgaactccatgaaatgtaatttgcagtacattctttaaacagaagagggtgctctcgggcaagctgatgctacccagctctagaaatataagcatttaaatttggtggtgcttgtattatgattagtgcaagatcttgggggcatttaataaagcatttcaaagcattgtgagtccagtggagtataattaaaattaatgcaatagacaaacacattaaagtattcttaatgcctagtctaaaaatgctgtcaaatacag

SEQ ID NO: 64497 - DNA, 1217 bp, Homo sapiens
ccactcggcaaaatctgattctaatatgcagccaaggtggaaaaccactgctaaaagaaagtcagcagctaatacgttcctatctccttttcttagttaggcagaaatcaccagctgtctacctacaataattctctctcctgaagggcagagcatcttggggcatacsttacctagctaagactgagggaagatgtaagcacagataacctggaggattagaaaagggaagaagtcaccatctgttgccacaactctgcctttttggcagggtctcacactgttgcccaggctgcagtgcagtggcatgatcacagctcgctgcagcgtctacctcctgggctcaagcaacccactgacttcagcctcccaaggagctgagactacaggtgtgtgtgccaccacgcccagctattttgtgtgtgtgagtgtgtgtgtgtgttttgtagagacaggttttcgccatgttgcccaggctggtctcaaactcttggtctcaagtgatccaccagccgcagcctcccaaagtgctggaactataggcatgactcgccgcacttggccacaactcttctaaacagcctttctatcctgcaaataggtcttgacctaaccagatggatacgttatttgatgattaaaaactctattatatttaaaattggctgtttatttatttatttgtgcaagtaagtgcagtagagctgtttatcccctaccactgtgtatgtgatttgcctgggtcaggtaccttatggtttgtgagtttcaagtagctgatttatatgataccctttagaaaactttcctacattgaaaactattagaaatttcttttacaaaaagccaagaactatatatggtcattttaatggtcatatctctccacctggcaatttactaccaggagtgttcaaagtgacttatctttcacccaaagtaggaaagctaaaagcagtcattgattcctactgatattataaaatccaattaaattattcaagctgggaaataagaaagctaaaagtgtctcttgttttccatctttttcataggaaggttttaaagctttatttctaaatgcttaggattggtaatcacctaactttctgtgacagcatactgttttactttattacacattctgcccttctcagaactatacgtagatcatgtatattttttaaattattcttggatcttggtacccataaaaa

SEQ ID NO: 64498 - DNA, 744 bp, Homo sapiens
ttgtctcatcagagaagatgcaaatttcattctctatgaaaacaaagatggactgtcatgagaatgccatcagggcactgaatatgaggagagaagaaataagagacaatcaggggcatttgtaattatgaagaaaccactgtttttttttttctgtagacctcctctgtggacaaccactatttttttgattcaacttttattttagatacagggggtacatgtaccagtttgttacatgagtatattgcatccaggaagtgagcataatactcgatagrtagttttcaacccatgcctccctccttccctgacccctctagtattctgcagtgcctgttcatatgttcccagttatgttcatatgttcccagtgtttagctccctcttttaagtgagaagatgcagtatttggttttttaatcttgaataaatttacttaagattatggcttccagctccatccatgttactgcaaaagacatgattttttatggctgcatagaattacattgtatatatgtaccacattttctttatccaatccaggcacccaggttgattctatgtctttgtttttgtgaatagcatagcaatgaccatataagtgcacatgtctttttggtgtaatgatctatttcattgggtatataccgagtaatgagattgctgagttgaatagtagctctgttttaagttcttttagaaatctccaaactgatttccacagtggatgaactaatt

SEQ ID NO: 64499 - DNA, 677 bp, Homo sapiens
acataggattttttgttttgttttgtttgtttgtttttaatgactgccacacatactctgtcctaaaagaaagagaagtttaacaacagcaaaataagcaggacataatcttgcaagtaaaaatggatgtggttagccttggggaaaactacacagttgacacttttcccatttcactttaaaccagcggagactaaagcagaggctggcctctgagagccattgctggagggtgggtgtggtgcatagctctgtcctttcaccttgcagccaagctgggggctaaatatggcacgggacagttgtgtgcattgaggaaactgagggatagaatagaagaataatgtgactgaacaaaaatttttttttctttgagacagagtctcactctgtcacccaggctggagtgcagtggtgtgatctcagctcactgcaaccttcacctcccgggttcaagcgattctcctgcctcagtctcctgagtagctgggactaaaggcacgcgccactatgcccagctaatttttgtatttatagtagagacggggtttcgccatggtggtcasactgttcttgaattcctgacctcaggtgatccacccgcctcagtctcccaaagtgctgggattacaggtgtgagccactgcgccaggtcctgaaaacaatttttaaatgca

SEQ ID NO: 64500 - DNA, 619 bp, Homo sapiens
agaccaagtgaccaggttctgtcactgtacatgtaaaaaaattgtttattctgttaacatgcagcagatatttgggagaactcataaagagagtgctaattttatgaaagggaagtgtaaggggtttcaagtgttactgggctaataccttggtcacactgacaggcaaaaggaacagtgtgttggatgaactggaccaatcgatatctctttaggtatctgccaatcatgccattagagtggaagactgcatggattagttcaagcagtttctcagatgctccaacgactcagccagacacttttccctaggtaggaaatgggaagaatgacttcattttggggagaatgaggaggcctccagatttggagagcactgggatatgytctcccattgatacctttaaacaaacctagccagttcaaatataagcattttaagtagagatattaagattctgggtcttgaccaggcacagtggctcacgcctgtaatcccagcactttgggaggctgaggcaggcagatcacgaggtcagaagttcaagaccagcctggccaacatggtgaaaccccgtctctactaaaaatacaaaaattagctggtcatggtcatgca

SEQ ID NO: 64501 - DNA, 1122 bp, Homo sapiens
ctgtattctgggagatagtattaaattttccctagatgtcatgattccatgttccacagcatcaacttttctatttaattctttatatatggatttaaattgtgccattggtgttttatttttctagcaatattttcttttcttaccatctctcattttatctattgtcttcttctctcaattgcctttttatctcaggcgattctcttaatatggcttctagtttctattttaaaacgtgctcttttcttttattttattgacctaacagtgcctgaaatgttgtcctgaaactgtaattgctgtttttcagaagtgaattcttcctctagtcttgcaactattattccctttccatgattttgttcgtttttctcaagtcagttgttttcctctttcttatttttaaaacgattacttatcaccaataaggcaggatcatgtgtttgtcaaccaaaaataatttgaaactttctttaccttaatggctgtttcattgtgttaaggcaatcttaacctcagatttagtgctagacagactgattcctcttccatttctgaatgttaccacgatctaagatatttttctttgttgttatgctttacattatcctatcctcacttcctggctaaaagattctctgtagtggtaagtcactgaaaataataataataacagaattgcatggttatgcttctttcaaagctcttcattccaactgtagagctttccatgtaggtactttatcttgaaggaagaaaacataagccttcagaagataggctagcatacaaccacaggtgaactaaagccagttattcgattatacaaaaaaatatgtgactaaaggtattttgtgtatcaaacatgataaaggttctagaaattatgargttgagtaaaaaaattgggggagcaatgaaactggcagaagatatctggaatctcacattatccttaaggttatacacagcctgagaataacaaattgtgataccactctatcaaaaagccatgagattgctttagattctaaaaaattatgaaaacagaataggggaacgggtctgtgagaaatagaccatgagcatttcctgttagaaatttaagatatacttccc

SEQ ID NO: 64502 - DNA, 1272 bp, Homo sapiens
gcatcttatagttgaagaaaaattggttttcaaattctcactttttcttgaagctcctagggacaagctaaataggctattttgttgcatgataatttttctttttctttcttctgttttgtttgtgggttttttgtttatttttcaaataacccaatagatcttttctttttcaactatttatctatgatagccacctaatagttctgacagaattatttatgttttttgatattaacctatttgtcccagatgatcacagaatttaacaatacttcaatttacattacaaccagtaagaattcaggattacttaataatctataagcatttatgttgtggcttctatacgtatattttgagtactacttttttgatgtgctgttttgcatccttttgtagcagttgatgcaatatcacaatattatcaaccagagcaagtgtgctgcttgaaataaaaacaatgaattttttaaaagggtcagattarataccagtaaaatatttaaagcattcacaatgaaaaaagaagagttaaaaagggaaaaagaataaagaaatacagaatgcttttaattgctttgagtttaaatttcccttgctcatgagcctcactgtggcttagcagacgatagttactttctcaactttatttgagaaattaactgaagagtgtgtgaatcttatatttatattttgtacactggctagcacattacaggtccttgggagaggctgaggagattatcaataaatatgagaataacattgttctctaattgttagaaacacaggcagcagacttcacctaaagccaaacaaatacaagaagaagaattaggtgctttggtcaaacaactggttaatggaatctaaaacaaacaaacaaaaacacactaaatgtagtttgactgaattcgttttgtatggttagcctagccataatgtgttactagtaatacttaagctaaagaaagtagttgcatttttaaaatgactaacatttgtcaacaacaaaaatttctcaagcctcgacttacatgcaagaacttggatattgatctcataaagcttaatatcactctaaagagacaaagcctaatactgactcaaaagaaaaaataatcaaagagcctagtagtgtctgtaccaagaactttagtgttcagaaaatcggttggggctagaaagctcaatggctgaagaaaagacaagtgctgagctgcaaagcttacgggaaggataaatgcagggtacgattgagggtatgca

SEQ ID NO: 64503 - DNA, 1272 bp, Homo sapiens
gcatcttatagttgaagaaaaattggttttcaaattctcactttttcttgaagctcctagggacaagctaaataggctattttgttgcatgataatttttctttttctttcttctgttttgtttgtgggttttttgtttatttttcaaataacccaatagatcttttctttttcaactatttatctatgatagccacctaatagttctgacagaattatttatgttttttgatattaacctatttgtcccagatgatcacagaatttaacaatacttcaatttacattacaaccagtaagaattcaggattacttaataatctataagcatttatgttgtggcttctatacgtatattttgagtactacttttttgatgtgctgttttgcatccttttgtagcagttgatgcaatatcacaatattatcaaccagagcaagtgtgctgcttgaaataaaaacaatgaattttttaaaagggtcagattaaataccagtaaaatatttaaagcattcacaatgaaaaaagaagagttaaaaagggaaaaagaataaagaaatacagaatgcttttaattgctttgagtttaaatttcccttgctcatgagcctcactgtggcttagcagacgatagttactttctcaactttatttgagaaattaactgaagagtgtgtgaatcttatmtttatattttgtacactggctagcacattacaggtccttgggagaggctgaggagattatcaataaatatgagaataacattgttctctaattgttagaaacacaggcagcagacttcacctaaagccaaacaaatacaagaagaagaattaggtgctttggtcaaacaactggttaatggaatctaaaacaaacaaacaaaaacacactaaatgtagtttgactgaattcgttttgtatggttagcctagccataatgtgttactagtaatacttaagctaaagaaagtagttgcatttttaaaatgactaacatttgtcaacaacaaaaatttctcaagcctcgacttacatgcaagaacttggatattgatctcataaagcttaatatcactctaaagagacaaagcctaatactgactcaaaagaaaaaataatcaaagagcctagtagtgtctgtaccaagaactttagtgttcagaaaatcggttggggctagaaagctcaatggctgaagaaaagacaagtgctgagctgcaaagcttacgggaaggataaatgcagggtacgattgagggtatgca

SEQ ID NO: 64504 - DNA, 514 bp, Homo sapiens
ttttttcagatagggtattcaattgctccaatatcatttattgaattagccagccttttttcagcagtttaaaatgccaacagtgtcatcactaaatctgtatattatgtgggtttgtggccactctcttgttacactatttacctattcctgcaccaatactatagcttttaaagtatattttactatttggtaaggtaatttaccttgctttttatatgttagtattatatccagccaccctctacctacctttctcattggttctcataatttttcagtttgggtttcctaggtaactgatcctgtagacttcaactactgacagttttatctctttatttctattaatcataccccatataagagttatttattttcccaaacatttaagatcagtctaattccagataaacatctctggaggaactcatttytatcagcttccccagaagtttttcttcctttctatccattcctcacccaaatttagtccttctctattcatccaagg

SEQ ID NO: 64505 - DNA, 391 bp, Homo sapiens
aacattaaagaagcctgacttgtggccttcaggggattcacagttggttggggagagagctggatctctaacaaggtgagcatgcygacagctcagctctgtaagcagaggaggggaaggtggggcacaggattgctcagagaggtcagggagggccctgcagaggcagtgacatttgagctgaatcctaagaaagagcaagctctctgtgatgacatgacagttagggaagagggtgttccaagagtggggacaggaggtacaaagtattgaggctggaaagaacataatgtgttcagagacatgcaaagaattcaggctcagctgtgaaagggtgacacggtcagggtgcagggtccagggcaggtaggtcttatgagccacagtaaca

SEQ ID NO: 64506 - DNA, 751 bp, Homo sapiens
tggcagagcactccactgtcgctgctctgcagactcccggattgccttcccctgtagggcagaagaggggcgcctcccacccaggcgggacgttttctgatacccaccaaagtgcagtctgggctgcccgcggccctaggctgcctcagcatgaccgagaggggtccacagggcggggcgcagggccaggagagacccacgcggcagtctgcagccggaaagagagctggactttaaggccttgaacttgtggagaatccagcccttaactccagatgttctaacatccacacatacacacagaccgtttctgagctctttctgctctgggtgcggtgtgcagtggaggagtgagaaactgaggcacagcaggatggagtactgagcagascccttctccccatattgtttggggcggagaagctgcgctagaatcagaagctccagtgaaggaccccggggccagggacaaccccagggaccctgcccccttgacctgcccgctgtccccacccctggccgctccccaggctccggtaggggtaatcagctgctgcgtgctgctgcaattggcggcgcagacccggcctggcggaggacgggcgggcggcgcaggggcgggcgaggggcttaattgcagggctttggccagcagtctgggctgcaactccactggggggaagggagcgggccccttagctcttcaggcccggctttggaggaagccaaaggcctttgggtaggtagccgg

SEQ ID NO: 64507 - DNA, 1322 bp, Homo sapiens
tggatccactgcactctagcctgggcaacagagcaagactctgactctaaaaaataaaaatatatatttccattttcttgaaaattatgtttaagcctcatatagagaaaaagttatgtgcaatttgtagaagttaattaattaatgagcaaatgattaacaaacaccttttgtgaattttatcttatatatcaggaaggctaaagggttgtgtagcagtcctgaagtaggcccttaagtgtaaaaaaggtaggactccaaatcaattacatgtcaaatatctttctcctatgaagagtggaggtacttaatcaatatccaatatatataacctgaagtagttctgcttttctggaaggaggatgggttgggctgaaagtgacaatttatgcatcagactcagggtgcccgtgatgggatttctatccaccttcacagagaatcccagttctcgctcccactttccaaacagctctgtctccaccttgcaggttaggggctctaaaattggtgtgctgctgccacaccatmacatttcacagagatgcagcctgtcttgtccatgctaaacgaggcagagaaggctcactttcttcttagcttcatctaaggcagggttgatgcaaagaaaaacaacccgactctgggtgctccatatattggtcaagcccagtgatatacaggttttaattaaaagttagggccaggtgcagtggctcagccctataatccgagcactttgggaggccaacgattacaggtgtgtgccaccatacccagctaattgtttccatttttagtagagatggggtttcaccacgttagccagcctggtctctaactcctggcctcaagtgatccacccatcttagtctcccaaagtgttaggattacaggcataagccactgcgcccagcccattatactgttgttgttgttgttgttttgtttttgagacaaagtcttgctccatcacccaggctggagtgcagcagcgcgatctcagctcactgcaacctccacttcccaggttcaagtgattctcgtgcctcagcctcccgagcagctgggattacaggtgtgcaccaccataccttgctaatttttatatttttagtagagacagggttttgccatgttggcttggctagtctcgaactcctgacctcaggagatccgcctgcctcagcttccaaagtgctggggttacaggtgtgagccactgcgcctggcccatgatactgtttttaagccccacagatgagatgtgcttctggccccccattactccctgttcaaaaactaaagtcgcaaacataaaa

SEQ ID NO: 64508 - DNA, 1322 bp, Homo sapiens
tggatccactgcactctagcctgggcaacagagcaagactctgactctaaaaaataaaaatatatatttccattttcttgaaaattatgtttaagcctcatatagagaaaaagttatgtgcaatttgtagaagttaattaattaatgagcaaatgattaacaaacaccttttgtgaattttatcttatatatcaggaaggctaaagggttgtgtagcagtcctgaagtaggcccttaagtgtaaaaaaggtaggactccaaatcaattacatgtcaaatatctttctcctatgaagagtggaggtacttaatcaatatccaatatatataacctgaagtagttctgcttttctggaaggaggatgggttgggctgaaagtgacaatttatgcatcagactcagggtgcccgtgatgggatttctatccaccttcacagagaatcccagttctcgctcccactttccaaacagctctgtctccaccttgcaggttaggggctctaaaattggtgtgctgctgccacaccataacatttcacagagatgcagcctgtcttgtccatgctaaacraggcagagaaggctcactttcttcttagcttcatctaaggcagggttgatgcaaagaaaaacaacccgactctgggtgctccatatattggtcaagcccagtgatatacaggttttaattaaaagttagggccaggtgcagtggctcagccctataatccgagcactttgggaggccaacgattacaggtgtgtgccaccatacccagctaattgtttccatttttagtagagatggggtttcaccacgttagccagcctggtctctaactcctggcctcaagtgatccacccatcttagtctcccaaagtgttaggattacaggcataagccactgcgcccagcccattatactgttgttgttgttgttgttttgtttttgagacaaagtcttgctccatcacccaggctggagtgcagcagcgcgatctcagctcactgcaacctccacttcccaggttcaagtgattctcgtgcctcagcctcccgagcagctgggattacaggtgtgcaccaccataccttgctaatttttatatttttagtagagacagggttttgccatgttggcttggctagtctcgaactcctgacctcaggagatccgcctgcctcagcttccaaagtgctggggttacaggtgtgagccactgcgcctggcccatgatactgtttttaagccccacagatgagatgtgcttctggccccccattactccctgttcaaaaactaaagtcgcaaacataaaa

SEQ ID NO: 64509 - DNA, 1322 bp, Homo sapiens
tggatccactgcactctagcctgggcaacagagcaagactctgactctaaaaaataaaaatatatatttccattttcttgaaaattatgtttaagcctcatatagagaaaaagttatgtgcaatttgtagaagttaattaattaatgagcaaatgattaacaaacaccttttgtgaattttatcttatatatcaggaaggctaaagggttgtgtagcagtcctgaagtaggcccttaagtgtaaaaaaggtaggactccaaatcaattacatgtcaaatatctttctcctatgaagagtggaggtacttaatcaatatccaatatatataacctgaagtagttctgcttttctggaaggaggatgggttgggctgaaagtgacaatttatgcatcagactcagggtgcccgtgatgggatttctatccaccttcacagagaatcccagttctcgctcccactttccaaacagctctgtctccaccttgcaggttaggggctctaaaattggtgtgctgctgccacaccataacatttcacagagatgcagcctgtcttgtccatgctaaacgaggcagagaaggctcactttcttcttagcttcatctaaggcagggttgatgcaaagaaaaacaacccgactctgggtgctccatatattggtcaagcccagtgatatacaggttttaattaaaarttagggccaggtgcagtggctcagccctataatccgagcactttgggaggccaacgattacaggtgtgtgccaccatacccagctaattgtttccatttttagtagagatggggtttcaccacgttagccagcctggtctctaactcctggcctcaagtgatccacccatcttagtctcccaaagtgttaggattacaggcataagccactgcgcccagcccattatactgttgttgttgttgttgttttgtttttgagacaaagtcttgctccatcacccaggctggagtgcagcagcgcgatctcagctcactgcaacctccacttcccaggttcaagtgattctcgtgcctcagcctcccgagcagctgggattacaggtgtgcaccaccataccttgctaatttttatatttttagtagagacagggttttgccatgttggcttggctagtctcgaactcctgacctcaggagatccgcctgcctcagcttccaaagtgctggggttacaggtgtgagccactgcgcctggcccatgatactgtttttaagccccacagatgagatgtgcttctggccccccattactccctgttcaaaaactaaagtcgcaaacataaaa

SEQ ID NO: 64510 - DNA, 1322 bp, Homo sapiens
tggatccactgcactctagcctgggcaacagagcaagactctgactctaaaaaataaaaatatatatttccattttcttgaaaattatgtttaagcctcatatagagaaaaagttatgtgcaatttgtagaagttaattaattaatgagcaaatgattaacaaacaccttttgtgaattttatcttatatatcaggaaggctaaagggttgtgtagcagtcctgaagtaggcccttaagtgtaaaaaaggtaggactccaaatcaattacatgtcaaatatctttctcctatgaagagtggaggtacttaatcaatatccaatatatataacctgaagtagttctgcttttctggaaggaggatgggttgggctgaaagtgacaatttatgcatcagactcagggtgcccgtgatgggatttctatccaccttcacagagaatcccagttctcgctcccactttccaaacagctctgtctccaccttgcaggttaggggctctaaaattggtgtgctgctgccacaccataacatttcacagagatgcagcctgtcttgtccatgctaaacgaggcagagaaggctcactttcttcttagcttcatctaaggcagggttgatgcaaagaaaaacaacccgactctgggtgctccatatattggtcaagcccagtgatatacaggttttaattaaaagttagggccaggtgcagtggctcagccctataatccgagcactttgggaggccaacgattacaggtgtgtgccaccatacccagctaattgtttccatttttagtagagatggggtttcaccaygttagccagcctggtctctaactcctggcctcaagtgatccacccatcttagtctcccaaagtgttaggattacaggcataagccactgcgcccagcccattatactgttgttgttgttgttgttttgtttttgagacaaagtcttgctccatcacccaggctggagtgcagcagcgcgatctcagctcactgcaacctccacttcccaggttcaagtgattctcgtgcctcagcctcccgagcagctgggattacaggtgtgcaccaccataccttgctaatttttatatttttagtagagacagggttttgccatgttggcttggctagtctcgaactcctgacctcaggagatccgcctgcctcagcttccaaagtgctggggttacaggtgtgagccactgcgcctggcccatgatactgtttttaagccccacagatgagatgtgcttctggccccccattactccctgttcaaaaactaaagtcgcaaacataaaa

SEQ ID NO: 64511 - DNA, 1466 bp, Homo sapiens
ctgagccaccatgaaagaagtctaactactctgctggagaaaccatgtggagagaccttgagaatacataagaagttggactcaagcccaacctttcagacgcccttctaaggcatcaggcctgtgaatgaacacatttttggccctccagatcactccaactgcctaatcaataccaacgagtgttcacagtcaacatcacatggagagaagttgcccagccaagccttgctcactgtcctgaccaacaagtcataagatataatagctgctgtttcaagccactaaatgttgggtagtttgttacagagctacacaaccacagataaccagactaagactcaaatgttctcagcccagaaatatggactctcacaaagaagagttaaagcagataccaaacattagtaattcctgtcttcctacctgtttcaagataggtaacatacgtatgttacacagaaaaacctcaagaatttccagttaaatgctatttcatactccccttcaatctccctatactgtaacccttccttcaacccttgtttatgggttaccatgaagcacgtccccaggtattgtcacattagcttgttataggaaacagagcaacaacacctcaatagcaatgaccacatctggtacccacatctttggtttctaaatatcattctccactccttggaaaacagactgattccaaggctgagacaggaaagtacaaggcctgaaataacttactgcaccaaaaatggaaacagtgttcaaataatgatggaggcatttcaaaagaacatttcaaaagctaggagccagcttgacaggactctcgctaatcaaatttgggacaatctgaacaacaacaaaaaaaatgatagtgtcagattacaacccctatgagaaaaatccatgagtccaagtgaatataaatacatgtgtgaataaataaaaagaagagaaatgtgtccttacaataaaatgccaactaataaatgtagaaggaatgacagaataagaaaactaccatcattaagtacaactgatttggtcaagaatcatcagtggatgctaaaatgagtacattagggtcaaaggcagaatagaatttacacatgaaaggatgaaccaccaacagcaaaaaatacagaatcacttctaagtttttcctgctaaaaaatagataagatgaaattaataatgaagaagcatcagacaagccgaaattgagggacattgtgcaaaatacctggcctattctcttcaaaaatagtatggttatcraagtatcaagtaactgttctacaatgaaggagacttttaaaacataagaaaatgcaataaataattctagattggattattttgctcaaaggacaaccaacatttgcctggggtccgtggattagatgagtgtgctttgcctccttccctgatgttgaatagttctgccatgatgatgtactaga

SEQ ID NO: 64512 - DNA, 624 bp, Homo sapiens
ttctcacatatgaaatgaagctgtgtactagctcaatgatgaacaagtttttcacaaccaaaccatattttatgattttccacacactttgaacaatatatttggaaagaattgtctgcacagcacaatgtgtttgtgaaataactgctgggcagcttccttttgagtagatgcattgttggcattaggcttttgtaatattaagaaaggttcattttgcccaattttctcccttcaggattttcctgttggaagtcacttggtccaaagatcttgactattgttttctggaggtctatgttagtccattttgtgttgctataacagaatacctgagcctgggtattctgtataaagaaaagaggcgtatttggctcatgattctggtgattggaaagtccaagattgggcagctgtgtctggtgagggtctcatgttgcttccactcatagtgaaaagaggagggggagtaggcgtgtrcagaggaatctcatggccagagaggaagcaagagagagaaacggaggaagtgaaactctttaacaaccagcttttatggaaattaatcaattcctgtgaaagccagaacttactcctgagggaagacattaatctgttcatgag

SEQ ID NO: 64513 - DNA, 581 bp, Homo sapiens
gcccccgcccccctccatgaggcctctcacaccctcccccggcccaggccacctcccccaaagcccactctccggaggccaaggctgtctggtgaacggctaggggctgctgggcacagagttcaacgctgcaaatatttattagayacctactgtattcccaggccctgagcagagctggcctccaaaacaaatgagaacagcccttgccctcagggagactgggggacgccacccctaacctgggaaggtgagaggggcttccagggcagggatacccccgacagaacctgctcaaagtgccagagctagacaaggagggaaggcttggctccgcagcaaagctcaaggcagagctccgcccctcccccatcaccttcagcccttcctccggtttctgccaagggtcatcactgaaagcaccctcagagtctcttttagaaagttacgggtctctgcggtcgtggtggctcacgcctgtaatcccagtactttgggaggccgaggcgggcggatcacttgaggtcaggagttcgagacgagcctggccaacaaggagaaattccgtctgtactaaaaat

SEQ ID NO: 64514 - DNA, 581 bp, Homo sapiens
gcccccgcccccctccatgaggcctctcacaccctcccccggcccaggccacctcccccaaagcccactctccggaggccaaggctgtctggtgaacggctaggggctgctgggcacagagttcaacgctgcaaatatttattagatacctactgtattcccaggccctgagcagagctggcctccaaaacaaatgagaacagcccttgccctcagggagactgggggacgccacccctaacctgggaaggtgagaggggcttccagggcagggatacccccgacagaacctgctcaaagtgccagagctagacaaggagggaaggcttggctccgcagcaaagctcaaggcagagctccgcccctcccccatcaccttcagcccttcctccggtttctgccaagggtcatcactgaaagcaccctcagagtctcttttagaaagytacgggtctctgcggtcgtggtggctcacgcctgtaatcccagtactttgggaggccgaggcgggcggatcacttgaggtcaggagttcgagacgagcctggccaacaaggagaaattccgtctgtactaaaaat

SEQ ID NO: 64515 - DNA, 692 bp, Homo sapiens
cttgagcccaggagagccaggctgcaatgagctatgatcacaccattgtactccagctggggcaacagagtgagaccttgtctctattgaaaaaaaaaaaaaaagaaaaagaaagaatgaccagaactctgactttaactcacaggaaagcaagtaattagaatacgaggtaagggctgtgattaaagcatayacaaggattgctagaccttctctggaggtgtaagcaatcatttccaaagaagtgatatttgagctgggtattgaataatgggagcacattttccaggtggtcaagaaggtaaaggatatttcaaggcagagggaatagtgtgggcaccagggaaggctgtgtgtctgagaagttgtggtggtttagtggtgttgggttgaaacatggatctcatcttgggagagtaggtagtgagagctgaggccagggaggtcagggctggatcacaaagtgtattgcatgcaaggtgagccggcagcttggattctattctctgggccactgggtaccactgatgtgtatgaggaaagggagtaacaaagtcagatgtaccctttatttatttgagacagggtcttactccatcccccaggctggagtgcagtggtgtgatcatagctcactgcagccttaaactcctgggtttaagagatcctcctgcttcagcttcccccttggt

SEQ ID NO: 64516 - DNA, 1258 bp, Homo sapiens
tgcatgtgattttaaatacaagatggaaaaaccagacsaccctctgagaaatgtttaatcactaaacacattgtatacatttctgtcatataagagatttatatttaatcatgatcccaatcagcaagtgtctcttcccactaaagggaacaaattataacttttcactgctgcagtaaacagcaaacagattgctgtttacacagaaagaggaaaaacagacataggacagagcatgaagattagaaacaagctattccctccttaatactaagtaaatagcagcaggcattttacagagcacattaaagggaacagactgctgtagaaatcaattgataaagacttgttaaatgaaagcaaactctgagcaattatattagcaagcaattagaataatctgtaaatggtagtaaggaccccacaacaaagaaaccacatggattgctgccccttccttttgtgctcatagtattattggctcgtttccattaaacagtaatatatttagtattgaaaaggaaataatgggacaataggacttatgagctgctgttatggcattaaacagaaagtgcccttatactgtgtagtcagagaaaatttgtctccagctgagactccagcaagtaaatgactattcttgccaagaggagatctatttaactctctctatgttaaaagcttaacagagaaattcacaaacagaaagaaccctgatcatagccaaaatgcagcagacagacacactgagtagagcatgaatgattggagagtcctgcatggcaccagcgccctatagaatatactgaaggccaatttcataagaagtaagtgatacatatttaggaaggggtatcttttaggaaaaatatggtgggatataacaccagaaaatccttggtctgaatcttggtcaagatatactatgtggccattagcaattttttgagactatttttgttttatctgtaaaacggaaatattaataatcaccttgagaagatatcagaactgcatgaaatagatgtgtgtggcacagggcccacatatggtaagggttcactaagagatggtttgtgactttattattactgaaggaaaccttgggtaatatgacagggaattagaataatatttagatagaaatagggaccctgacataaagaagggaaattttcctgacagaacattgtggggcaagaatgatataggacataaaaaaatgaataaaacttgagaaaagaggaccccagta

SEQ ID NO: 64517 - DNA, 725 bp, Homo sapiens
ttggctgtttacagttcctaaagtaatgaataagtttatatagacctgctgtgctaacaatgcctactcctttatatttcattagtaakattagtgatagagttaagaggaaattggaaagagaggtatgtctgaatctctggcaaatcacaattacatgactcagccaagtccataatcctctgacaaagccccatcaacactgaaaatcagttgaggtaatacatgtttagtgctcctgaagccttcttctctcaactcatcaaagtcattctccgtccagctttgtttggttgctggtgaggagctgtgttcctttggagggggagaggcgctctgatttttagaaatttcagcttttctgctctgttttttcccgatctttgtggttttatctatctttggtctttgatgattgtgacatacagatggggttttggtgtggatgtcctttctgtttgttagttttccttctaacagtcaggaccctcagctgcaggtctgttggagtttgctggaggtccactccagaccctgtttgcctggttatcagcagcagaggctgtagaacagtgaatattgctgaacagcaaatgttgctgaccgatcattcctctggaagcttcatctcagaggggtacccggctgtgtggggtgtcagtctgcccctactggggggtgcctcccagttatgctactcaggggtcagggacccacttgaggag

SEQ ID NO: 64518 - DNA, 549 bp, Homo sapiens
cttctgtacattctatccctttcgtttgccagtcatccctggtatactaygtgtacagactttgtaaaaattcagggccatggaaagttctgttttgttggtgtcactggcctcctttaacatggaggcaagcttgataactttacctttgaagccatgccaaagactgaaccctgctactcctagggaagctcatggacactatcactgaatgtaggtaatgttaacattcttgagaaggaggtgggtctattttctggtgtccttgagttcccctttcatcaacgtctcttctctaaagttttagacccattgggcaccagggaataggtgtatttaggacctctacatacattagaatccaaattccttatcttttaataattttttttaacaacaccatactaatttaatgatttttcattattcttctgccaaaaccagagactcaaaatgaggtgaagacagaggtgggtgaagcttctttgagcacttagaactataatcatttggcacttctttctgctccttccataacagacagttgta

SEQ ID NO: 64519 - DNA, 972 bp, Homo sapiens
gtttttataatattcatttggtaaaattatttttctctgttgagcattttaaagaaatatatttatgttctcttaggctcactgtaataagtctacttgtcttagtgttattaatttaaattgtgaaactgaaattaaaacataattcattyacttttttcaaattacaaagttgatgtgctcctaatggaactgagcatcctttcttatgtgacacttttctcatgtaattaattagttaagaggaagttgctaagtagatatctatctacttatctaaattctttttttagaagttttatgattttggaacccacatttacatttttaatacatttcaaagtaatttttgtatattatgtaaaacgatggtccaattttattgttttgcatgtgtatatacagttttcccaacactatttattgaaggaactgtccttttcccattttgtattcttggcacatatgtcaaagattaggagaccatacatgattgggtttttttcctgggctctctatactgttctgttggtctatgtgtctatttttatcccaataccatactgttttgattactatagctttgtaatatagttaaaattagggaatgtgatggccccaacattgctttgtcttaagatttatttggctattcatggtctttaaagattctatatgaatttttgaatattttttctatttctgtaaaaaatgtcataggaaatttatagggattgcattaaatctgtagatcacctcaggtagtatggacattatgataatacatctatactttgcttatttcctagccttcttttctggctctgatatgatcttaatactggtcccttggggaaaatgggaagatgttgctcaaagggcacaaactttcagttataacatgagcaattatgggatttaatgcaaaccacaggcagtgataatttggttaattaatttgatatgataaaa

SEQ ID NO: 64520 - DNA, 973 bp, Homo sapiens
catatactataactatatatatccaatatactatatattatatatactacgtagctgggcctcctagaaaaaaatgtgaaaattccagagcagaaacataactttggaatttatgttatattagcatgtacatagtattttatctgtgggaatagggcgtgtcattcacatggaaagtgaatagagggaggaggaggtgcttagtgctgtacctgtggcacccccaattcactgttcaagtcactgcatgtgagcttccatcctcacacagagatagggaacagaaatgcaaatttgggagtcattagcatatagctggtatttaaaaccatgagcactgatgagatcctctatgggaagaatgtggagagagagaagaaggtgcctagtctgagccctgaggtctcctcactgacagttcacaaagttcctccaatccctgcaggctgatttctgttcttgccaagtccctgaactaattctcctgaggcttgccagtgacccagttatttctcagtctgctggggatatcttctgctccttctcttccctcatccctgaggcatttgattttgttaaccacttttttcttgaaactctatcctacattagctttgtgatggtgttctgtcttgactttccttgtgtaatacttttttgagattcttttagtctctcttaccccttggatattgatgctcctcaagtcctttacttaacattctgtccttctaaatctaattcttcatcctgagtgactttatctaaaaccctgatgcagtggcttctaaactggccaccamgtttgtgtctctaaatctgcacatcttagctgtgaactagaccttccccttacatgttccacaggctctcatttcattaagcccaatgctgaattcttcttctttccttcaacattttgctttcacttctattccttattttggtgccatcttcttcactatttcccatt

SEQ ID NO: 64521 - DNA, 831 bp, Homo sapiens
gatctatgtctattatttctggactctcaattttattctattgatctatgtctattatttctggatttctattgtagtccattgacctatgtttattcttgaccagttccaaattgttctgattattttagttttgttgtaagttttgaaataggaaattgtaagttttccaactcagtttttagctgttctttttcaagacttgtttggctattctgggtccattgactttccatatgaattttaagatcagcttgtcaatttatgcaaaaaaactttctcaaatcttggtggagagttcactgaatctgtagatcaacttggaaattgttgaaatctcaacagagtatacacgtgctatggtagtttgctgcaacctacatgttctgcacatgtatcccagaacttaaagtataataaaaaaaaaaagaaaaatactccaagttttctaagagccatttgcttatcattaattaaaacaattttgcatgaaatctcaacagagttatatgttcatatctatcaccatgggatgtctcttcaattatttagatctttctttcaacaatattttggagttttagaatacaaacttgcatttcttttgctaaatttatttccaggtattttatttcctaatgcattgtaaatggaattgttttcttaatttcatttttggattgcccattccttacttatggaaatttattakttttgtttattgatcttgcatcttgcagtcttgttaaactcatttattagttctaatacctctccagtgaattctttaagattttctatgtacgagatcatgccatctacaaacagaga

SEQ ID NO: 64522 - DNA, 606 bp, Homo sapiens
ccagccctggacacttccaatgcaggggccatgagcggatgctggtgcccagaagccaagcagcacgagctgcagtttgcaaaatccagtggaggcccaaagaagaggacatagggcttggtgccctccattgctgcagagagggcacaatcacttctgggtgccccatgtgccatctgcagaaggagaagatgagagagaagaaaacacaaaaggaaaggatggcctgtgtgaatcttccctcatctttccatcaggttgaggtcttggaatccaaaaggatgcaattagacctggcattattccaggtgagtttgaagctcagcattctcagctactgtggggcagcagagaatatgtttcagagggtaactggggagaaatgtaaacaaaccaagctaagaggaaggaaacamcccctcaatacgagtctccacttcattatctctagaaaaatagtaatttgctttggtaatggattcttgcttctcccatgtcctgatgttgaaagaatgactggaatggcagctccgttgccataattgctcataaggttagaaggctgcccctcaaaattcccacattctcacagttcaggggtgacca

SEQ ID NO: 64523 - DNA, 900 bp, Homo sapiens
tgcattgtagaattatttcaaagtatctatttttaccccaaacaagtttacattttaattctaaaatctctattaaatcacaggagataggataaataaatgcacaatatacaaaacttgatgcctataaggcatcaaaaattgttgttttattagtaataattaaggacataattttaagctgtggaatcaataagtaattctggaggttttagtataaagtggatggagaaagacaatgttcaacatgactgctttctgccttcattccccatctctacaaagcactataattcgggaatgcaaaactcagcaagcaactacactccgtgaacgtaggcaaactttgcatctactgggggttcttaggaatgaattgctactgcagatatgagtccagtgatcacagtttcctgatggatttttagatgcacagcatgctgctgctaactgcgattctctgcttaaacaatccataagtctcattccagtgagaagaaaggaagcaacgtgctgggaagatttcagtggtcaggttgtaatctgacatgggcattttaaatgttttgcaaacaactgattagtcatatatcgtgttttaaagtattgagagttacatccaacaaactggatataayactattataataatttttttccactggctattcttgcataaagacattttaaaaatggactaagaaaaaaggtatttagttttatctgctttaatttgcttctcttcccaaaactattctgtatccaagaccttgttattcatacttttgagcagatagggagacaaacttgcaaatcttgtccatacttttatcacagccctttattccttctctgtctttggtaaaatatgtttcaaattttacttcaatacttgcaaat

SEQ ID NO: 64524 - DNA, 900 bp, Homo sapiens
tgcattgtagaattatttcaaagtatctatttttaccccaaacaagtttacattttaattctaaaatctctattaaatcacaggagataggataaataaatgcacaatatacaaaacttgatgcctataaggcatcaaaaattgttgttttattagtaataattaaggacataattttaagctgtggaatcaataagtaattctggaggttttagtataaagtggatggagaaagacaatgttcaacatgactgctttctgccttcattccccatctctacaaagcactataattcgggaatgcaaaactcagcaagcaactacactccgtgaacgtaggcaaactttgcatctactgggggttcttaggaatgaattgctactgcagatatgagtccagtgatcacagtttcctgatggatttttagatgcacagcatgctgctgctaactgcgattctctgcttaaacaatccataagtctcattccagtgagaagaaaggaagcaacgtgctgggaagatttcagtggtcaggttgtaatctgacatgggcattttaaatgttttgcaaacaactgattagtcatatatcgtgttttaaagtattgagagttacatccaacaaactggatataatactattataataatttttttccactggctattcttgcataaagacattttaaaaatggactaagaaaaaaggtatttagttttatctgctttaatttgcttctcttcccaaaactattctgtatccaagaccttgttattcatacttttgagcagatagggagacaaayttgcaaatcttgtccatacttttatcacagccctttattccttctctgtctttggtaaaatatgtttcaaattttacttcaatacttgcaaat

SEQ ID NO: 64525 - DNA, 1699 bp, Homo sapiens
tgataccattgcaacaaaagtgatataaattacagtttgggtgaaactttctaaaagcttctacctctgcctacctttgctctaytttttcttctctagaaaaaaatgttaagtttttaaatagtggacaggtcaccaagaatatgcgaaaatactttccccactagttcaatcttacctaatgtccctactcccagataatgaagagttaacttaagggatgaaatattaaaaaattaaaaaaattaaaaaaacacctcaggctactaaggaaaagtaacaccagtttaatattttgtaatgaaacaaatatgctttcatcataaatgataccaaaatgtataattatttgcttttctacatcatatttctaaatgttaaatatctaagtttgatcaatgaaaggactgtgcttttatacatatatatttatatatatatttatatatatattatttatgtatttatatatatttatatatatttttatatatatatttatatatatttatatatatatatatatttgagacaaggtcttgctgtcactcaggctggagtgaagtggtgcaatcacagctcactgcagcctccacttcgagggctcagttggttctcctgcctcagcctcttgagtagctgagaccacaggcatgcaccactgtgcctggctaatttttctattttttgtatagatggattctcactatgttgctcaggctggtcttgaactactgggcttaaataatcctcctgccttgacctcccaaagcactgggatcccaggcatgagccactgcacctggcctactttaaactttaaaattctaggttggcacaagatgcatatgattcttcaataaatactattaactgtttaaatactacttaataattataaaattagatgaggcaaacttatttgtgtcttgggtaagataattaaaacctcttaatttttaactataatttatctacattataaaatcctttccctggagaaaacttggataacttgatacacagcagatgctttcttagatgctaagagccataaaaaaaatagcagaaaaaaaatgcatccagccatattcatagtctaaggcaaagtcatttgagtataaaatggaagttaaaattttatagttttgcattgtcaaggttttaaattcaatttcctttaatgtaacttattagataagagtccaatttacccaaatgtttattttctggcaggacaggtttgaattaatctaggagaaagtcaatgatggcattctttatttaaaaaggatagctgaaaatttatgtaagagaaactaataattcacacatgtgaaccccccatatctgttctgtgcttttctcttgttagctgtctcctacaatgcatgctggttataacaattcaaaatgattagcttacagctgttcacgactccagtcccctggtttccacacacgtggcttcactgtttttaaaaggtgactcgaagtactcggctttaattgcattccctgatccagacacacagagggactcactggaagttgcagttctgaaaagattcaagagagcagaagacagtcattttattgtttctttctggaactgctttgaaaatagagtatgctgtattaaactgcagggtacatgagaaatatgcaaccatttttctccccattctgaatcaaaaat

SEQ ID NO: 64526 - DNA, 1699 bp, Homo sapiens
tgataccattgcaacaaaagtgatataaattacagtttgggtgaaactttctaaaagcttctacctctgcctacctttgctctattttttcttctctagaaaaaaatgttaagtttttaaatagtggacaggtcaccaagaatatgcgaaaatactttccccactagttcaatcttacctaatgtccctactcccagataatgaagagttaacttaagggatgaaatattaaaaaattaaaaaaattaaaaaaacacctcaggctactaaggaaaagtaacaccagtttaatattttgtaatgaaacaaatatgctttcatcataaatgataccaaaatgtataattatttgcttttctacatcatatttctaaatgttaaatatctaagtttgatcaatgaaaggactgtgcttttatacatatatatttatatatatatttatatatatattatttatgtatttatatatatttatatatwtttttatatatatatttatatatatttatatatatatatatatttgagacaaggtcttgctgtcactcaggctggagtgaagtggtgcaatcacagctcactgcagcctccacttcgagggctcagttggttctcctgcctcagcctcttgagtagctgagaccacaggcatgcaccactgtgcctggctaatttttctattttttgtatagatggattctcactatgttgctcaggctggtcttgaactactgggcttaaataatcctcctgccttgacctcccaaagcactgggatcccaggcatgagccactgcacctggcctactttaaactttaaaattctaggttggcacaagatgcatatgattcttcaataaatactattaactgtttaaatactacttaataattataaaattagatgaggcaaacttatttgtgtcttgggtaagataattaaaacctcttaatttttaactataatttatctacattataaaatcctttccctggagaaaacttggataacttgatacacagcagatgctttcttagatgctaagagccataaaaaaaatagcagaaaaaaaatgcatccagccatattcatagtctaaggcaaagtcatttgagtataaaatggaagttaaaattttatagttttgcattgtcaaggttttaaattcaatttcctttaatgtaacttattagataagagtccaatttacccaaatgtttattttctggcaggacaggtttgaattaatctaggagaaagtcaatgatggcattctttatttaaaaaggatagctgaaaatttatgtaagagaaactaataattcacacatgtgaaccccccatatctgttctgtgcttttctcttgttagctgtctcctacaatgcatgctggttataacaattcaaaatgattagcttacagctgttcacgactccagtcccctggtttccacacacgtggcttcactgtttttaaaaggtgactcgaagtactcggctttaattgcattccctgatccagacacacagagggactcactggaagttgcagttctgaaaagattcaagagagcagaagacagtcattttattgtttctttctggaactgctttgaaaatagagtatgctgtattaaactgcagggtacatgagaaatatgcaaccatttttctccccattctgaatcaaaaat

SEQ ID NO: 64527 - DNA, 662 bp, Homo sapiens
gtcctcagaacacagatctcaaccagaactgagtggtggaaaaagcgccctcaactctgagtcggcttcagaattggaattagtggctccgactcaggtaacaaaactgattattcaatgaacacatctttccctatatatagtgtatagcataaatgytttattttcattttgtacaaaaagtttgaagtattttttgtacattgcgtttcatgtgctgtttcattcagtagctatctcaatacttaaaatagctgaaatataggtgtgtgtgtatatatatatatatatgtatatctacacatttggctggaaaatgtgttaatgaattcactgtgtacttagcactttttccttgttctaccatttactgttctattattttgtaatacaaaatctgttctactctattattagcactatttacataacagaactcgatggagaggaaattgcatcttgagtgttcattcacacctatgccctgtggaatatactacacattggtaccctgactgtcacattaaaataaatgtcatgctgagaaatatattattatagtattaggagtcatgatgatgacaataagagctactatttatgagtgctactaagtatcagggacttcacgtatgttttttaagtgttatatataaaatact

SEQ ID NO: 64528 - DNA, 2225 bp, Homo sapiens
tatgaagtaaatttatcataaagtggcctgaaagtgtcagcttatctcaacagaatcttcctgaggcaataggaaccacttcccaatgctaagatgccctgagatacgagggatgttttggggctaggaagtacttgaacgtggagggaaagaagtgacattcagaactaagctgcctggctttatgtctaaaatgtaagcatggcagacagccaaaataggctagaatgcctcacattttatatccactgaatggtcaaatagaaatttccagaccactattatgttggcaaggagtctaggcccaatgtgatgtccttataatggaggaaaggaaattgatggcataatatagaatgccatatacatctttttactaattgtacaaacaattaagagttagtcacttgctcctagacttttagaagcaaattataaaattgtctacttgaacataggaagtacatttgttatggaataacagctggcaagtactaatttaattctatatcttcttctcacattcagaataaatgaattactaaaagggtgaactgtgaattcaaacttggctcagtaaggttctttccccctccaaagtgtcctgggcaattcctgtatttgttctgagctctttgtccctttgttctttttcttgcaaatgtgaaacaaatgcttggcacacacagaaagcctaattggttacccagctgatgaaggaggtggcttggaggtcgaatggccagctttgaagctgggaaagtccctgcagagtacgttttcaaaaggagagaagggtgggtgtagcctttcactctctggagaaagacaaatcacattttagcatgtgtgtgtcctttagctaagatttaaaagtaagaatcttattgctccacacaaagacagccctggtatggtaggtggtgtctgctctgctgatttcttaaatcctattttaaagatccttcaggcacatgaagttttgggtttcagtatctgtgtgcttaaattaagagcaccaaccggtgaggtgtgttggctcatgtttgtaatcccagtgctttgggaggccaaggcaggaggatcgctcgaagccaggagtttgagaccagcctaggcaatataacaagattcagtcactacaaaacaattaaaaaaattaaaaaaaattagccaggagtgatggctatcacctgtagtctcagctactcgggagactaggtgggaggactgctttagcccagaagtttgagccagcctgggtgacagagtaagaccctgtctctaaaaaaaaggagcacaaaggaacaaaggataatctcctcttacaatgaacgtgaaaagtgtgtgcgtgtgtgtatgcacatgtgtgtgtatgcgtgtgatagtgtagatctaataaaataccttcagggtgtaatcttattgtcacatatgcagacttttctcatggaccacatgtcagtcaccactcacagcttcataggctgtgggatcccactgcccagaggatgtcgctgacttcacttctatttgctgtagcagggggatttccagctcagttgcttctgagcaggctatgttttgccagtcacccttgtagcactttgtcctgtcttcttcactttagttcagctaatctattttggtgtcctgatgttccgtgaatattgtgcataaaataaggcagcacaggacagtggttaagactgtctgagtttgactgagtgcagtggctcatgcctgtaatcccagcactttgggaggctgaggcaggcggatcacctgaggtcgggagttcaaggccagcctgaccaaaatggagaaaccccgtctctactaaaaatacaaaattagccgggcgtggtggcacatgcctgtaatctcagctactctggaggctgaggcaggagaaattgcttgaccctgggaggcggaggttgcggtgagccragatcatgccattgcactccagcttgggcaacaagagcaaaactccgtctcaaaaaaaaatgtctctctgaaccttaactctgcccactaaaataaggataaaactataaagtattggatgaagtgcttatctacagctcttggaacagcactataagcatagtcatgatgcaaataaatatttatcgctactagaagattctactgaaagcattcatgcttgacacaaactgtagatatatgaggttggaaatgattacaaaaactattta

SEQ ID NO: 64529 - DNA, 544 bp, Homo sapiens
tcagcccgaaagtgttttctgttgtttggttgttgtcgttcttttaggattttatggagtactctcattacttatcacttagaccaaaagagaatgtcaaactgccaacaaagttgttttttctacatttctactaaataatgttaagtagtcaggttcatctttggaaggaagattcttaagtgctttggcctccagtagtttaratgagacttcttaaaactcaaaatcattttattggaaaatgctttattttctgtctttgtgaattatatttataataatgcatttaatttaggccttgggattttgtatacctttgggtgggcctcttcctcttctccccctgcatctctaataagcactgaatatcaaattgaaaccatgatattctgaaatcggaaagtttctgccttttgcagcttatttgatgggaataaaaatgactgatggcactctctcttggacccttttgttcaactcacctatgattatggagcctattagctggagttacaacctatttaagagcagtgcttaccag

SEQ ID NO: 64530 - DNA, 695 bp, Homo sapiens
ctaggaacaattcagtatccatctcttagttctaatctttatattttttttctttcatagggagttacacttgactctttcctcctgtgtacagttgtatccacagctagaaaggtataagcactccccgaagataaagttcccatcctaacagcttcctggcaggcgcagctgactgcacttcttggagtaagaaaggaaacttccctatggcccactgctccaggcctcccttctgttctccagggcagaagaagaaaggccccaaactaacactcactggagctttgggaatcacatgagctcctgtgtcttttcaatagaatactgtccattttgaggaaagaaracaaaaactgtctcctccttcaactcttaactttttataatatgccctcagccagatctaagaactgaaaattacctccagtagttttctgaacaaaatagcacctttgacagcttactgcggaggcagattctgggaatgttttaggatctcaacttatatctgaaactcttctcttactggtctaatatgcaataatttaaaccagtgtgaagcaaaacttaccacattttaaaatggaaatctaaatagttttctcgccagcttagggggacaaagaaaagtgcaggatgacttggggtacaaagatcattctaactcctgcttggcacggggtccttctgga

SEQ ID NO: 64531 - DNA, 493 bp, Homo sapiens
gaaggacaaggagaaggtgccagccataggacaacagtgggcagccgtcccctctcctgcatgggcaaaggcactgggcactgtcagcagattttgaccccgtctcctttaccctgcattgcttgagctacaggaccacatcactgaaatcaagcatcggactttagggggtcaagaaatgggattttagatctttaacttttggatgtgttgtttaaactactaaaagagcaatgagrggtggagggatggagtcaggctgcccagttgactttgggtaacttgcttttcctttccaaacccgtctcctctctgtaaatagggctagaaatagtgcacacctcagaggatgctgtgaggagtaagtgagacaatgcccttgaccgcccagcggggcccagcacacagggaacgcgtggtgcaagtgggagctcgtttgcactccagagtgggaggacgtgcaagctgggacgtggcttccactgcagtccag

SEQ ID NO: 64532 - DNA, 636 bp, Homo sapiens
tgttggaagagatctttctttattttccacggcaaatgccaacatctctgaacttttctttgttatatccataacacagatgtaaagacagagagaaattaagaaattagatccaggtgaaggtaaatgaacatctggcagaagcagggtcctttttaaattaattttttkggggggggtttattttgtttttattattattataaagtcaacacatgcttacaataaaaactcaaataaaaaagagtaaaaagtaatacttcctttcccttcagacctacttcccagaggagataggaaagatgcacagcttgcatatttttctagatatgttctattgagccatatttctgatcaaagatgatctgtcaaggatctggaagctgacttaacaaataacttgctattttttcaaaaaaaagtacaagatactgattgagcataaaagtcatggttcttaactgaatctcaaatcagagcgagtaccttatcatttggtcagtgtttttcataactaagacccttactcacctaacataggctacctaccataggtagcctagtatgacaacagggaaaatgttgcagaagaaacacatgtgtctggagcagttagcaaacacaaaggttcattag

SEQ ID NO: 64533 - DNA, 2190 bp, Homo sapiens
caaggctctgtccattttcttacagtcttcttcttttagtctgattagataatttccattcatgtaatttctgtctccaaatccactgactcttttctttgtcacaagcactctgcttttgaacatatccagtgattttcttcaaatttctaattattgtattttccagttataaaatttccatttggttcttttttatagcttctttttcttaactgagattattatttcttaaagcatggttataacagctgttttaaaatcactgcctaatataaaacatctgggtaatctcagggttggtatcttgtctcttcccttgagacttaatcagactttcctggttctttttgtgtcaagtaattttgtatcatatcatgaacatttgggatataagatgctatgagactctgggtcttgctccaattctatgaagaacaggatgtatttgaatctgtcctagatgtgcatcagccaggagccagcctgatatctgggtgggctatctatcccacagctacttggtatgctgtttagggtcagatctatgttgtatggctcaagggtgggcccagaagttcatacataacatcatgcggtccctttatgagctccctcttatctgtgaagggccccactctctgacactctactaccccacctccatcccccactgccacccggtcctctgactagaaagtcttgtacttcctgcaactagatctgtctctgcgggccaaacagcaagagaattaaaaaaagaaaaaagcaataggaatcattctacactgtttggaccatagttcctctgatcagagaggattcacttcccttggatttttaagtgtctggttggctgctgctgccaccacaaaactgcaggttcagaagagaggatcatatggcagagctgggagggaagaaaaacaagacagagcatttcttccactttctctgtctcatagagcctctcttcctgctccttggatcagaaatttcccttggaattcttgttgtttgcacctgtgcacagtcctaggattcatgctgtctttgaattcagactgggagatacaaaaagtggggaaaggatccaggaaactcattgccagagcttttgtacttaaaagttctattttccttctccagtctatttgctatcatttacctttcagagtcctcagacagcttctccaggcactctgcccaaggtttttagacacattcagtaggagagaaaggacagtatatttacttcatcttaaccacaactggaacctactatcattcttggttctgttggatgcaaattctaaggtgacagttacttgtattttgatgatattgttctactgttttctggcttcagttgttcttaggaggtctgctattaacacaaaaggctacctattgtatgaattctacatgcatatgtacatgatatttacatgatatttttacacgatattctagaagaggcaaaactatggtatcagaaagcaaatcagtgtttacctagggctgaggaaggaactgactacaaaaaagcatgcggggagtttctggagtgatagaaactcccctctgccttaaacgtgatgacggttacacgactatatatagttgtccaaattcatcaatctctacacttcaaacaggtaaattttactgtatataaattatacctcaataatgctgggggcggtggggggagtaaaaagaaagtatggtatcagtctgtattgttcttttataggtaatgtgtctttttttcccagctgctttacacgtttgtatttggtactgcgtagttttactatcatgtatttagtaagatttcttttttaaaaaaatttaaactcctatttgatatacattgtccttcctgtttctgtgggtttatgtcaattctgaaaaattctcagatatcatcatgttgaccactctcttcccattctatctagaactccaattagatgcatgcataactttttctttctagctttctattcatgtctcaacttttctttcatattttccatttccaactctttctgtagtacctktgggttatttctttagatatctcatttactaattctctctcttctgctcccatataccatttatctattaatttttaaatttcaatgatttttctaaattcggtcatttctgacattttctgga

SEQ ID NO: 64534 - DNA, 605 bp, Homo sapiens
agggtagggggacaaaaggtgtttggacatgttgaattcattgtgcttctgagggccagtagtaagaattagctgatagatagttgaaattttgactctagacttggaactgacaagttgagtcttgtctttgtactcagtgttctactgaaacaagttgtatgtagtcaggaggtgggttgtattaagggctgaggagggagaaggccattatccataataggtttatgtatttggcttagtctttatttaaaaaaaaaaaaaaaaaaaagtagagcaagaaatgttccttttgctgtgattggttctcatgaaaccggaagaacagttctccccacttaaattaccaccattaagcagtggttgcctttatcacatatacagaattctgtaaaaattttattccaaggttttagtccttgaagtagaccaaaaataaaataatttttaaactacttcccagaggagtgtttttctgctcaataaggaaacagtcacatggcatycaaactctatacaagcagtactgtgtcctttgtcctcacgcaaatctggttagttacctttccttaatgttatgttaatgcaccatcagaaatggttgc

SEQ ID NO: 64535 - DNA, 572 bp, Homo sapiens
ggaktccacactctagatataacagtgcaagtgcttagtagcactatccatgtctacatcagagggtttgctgattagcataaggatgccagaaataattccttggtgaaataaatgatattcaagatgtgtagttgacaagaaacattataagacaagtctactctttcatgaataaagcagatgacattgacaagcccagtagcctaacatctttggcataactaggtctagaattctatttgatcatctttctcctctagttaatggaggtctctgtcatcttatttttttttattttttattttttgagatggagtctcgctctgtcccctaggctggagtgcagtgacatgatctcaactcactgcaaagtccacctcccgggttcacgccattctctcacctcagcctctcgagtagctgggactacagatgcccgccaccatgcccggctaatttttttgtatttttagtagagacggggtttcaccatattggccaggctggtctcgaactcctgacctcgtgatcctcccacctcagcctcccaaagtgctgggattacaggc

SEQ ID NO: 64536 - DNA, 572 bp, Homo sapiens
ggagtccacactctagatataacagtgcaagtgcttagtagcactatccatgtctacatcagagggtttgctgattagcataaggatgccagaaataattccttggtgaaataaatgatattcaagatgtgtagttgacaagaaacattataagacaagtctactctttcatgaataaagcagatgacattgacaagcccagtagcctaacatctttggcataactaggtctagaattctatttgatcatctttctcctctagttaatggaggtctctgtcatcttatttttttttattttttattttttgagatggagtctcgctctgtcccctaggctggagtgcagtgacatgatctcaactcactgcaaagtccacctcccgggttcacgccattctctcacctcagcctctcgagtagctgggactacagatgcccgccaccatgcccggctaatttttttgtatttttagtagagacggggtttcaccatattggccaggctggtctcgaactcctgacctcgtgatcctccyacctcagcctcccaaagtgctgggattacaggc

SEQ ID NO: 64537 - DNA, 611 bp, Homo sapiens
ggatccaactgttactccacaaactaggacctttacaccacattggaggcaatagccctgaggttaaagggccgttccgtgtctaaccactgaagctcttgcttgaaggaaggtttcccaaaatgaacccccaaagaaactgaaaatggcatgaacgtacatcctgttactcaacactccccgagtttcataacgtgaagtcaggaagaaaaggtgccaacattcctgaatgttattatcattaaggagcaaactcttaatgttcccacacttgaacgttaaagagatgggatcattcagtctcctctttacttatggaattgctgcaaaaccatatgggctgaattaggcatccaaggctaatgtttcctaccattccctctggggggcctttggggctcatcccaggcacttggctttaaagacaaggatatcctatttggaaacacagtcatgagccctgatattartaagcacttcctgacttcaaagcatctttataaccattgccctaattaaatctcgtaacctcccagagagaatgcaggcttcatcatttccactttacaaatggagaaactgaggcagagccctatggaatatgaaaccgt

SEQ ID NO: 64538 - DNA, 1014 bp, Homo sapiens
  misc_feature (1)...(1014): n = A,T,C or G
gcatacaggtaccttctctgtataagggcataatgaagagagtctggttggagagtcaggtgagctacctttaagaagtattgcaaattcagtatcttctttcaaggccccatgtcttttcttgacgttgttcctttaatctgaaaagctttcttctccttcatcctcaaagccaagttcagaagtcatcccctgtgatagaccaccatccatcatctagaattacaacttctttttaaagttcctagtataataccaagatcagcccttaacactgatagtgtctttggtcttccgctttcccactgggacanatttttaaccctcaatttctacatttgtaaaatggggataataatgcttctttagagtgactgtaagaatacatgagtaaaagcactggaaatgcttcataaatantttggcattctaactatctcacacatgcaaattctatccttataagaagggttaaatgaaataagtttgtaacatgagcaagggtgaggtcttgactcagcatttgaaccagacacatacataactgttcctgaagaaacaaattcctgaatacttccatatgccacagttgagccatggcactgatcactaaccacctgggattaacactgccttgcagatagattccagcattcccaggcctgttcagtgcctgccacacatctgcatttctcatgtggagtattttctttgaaatatgggttcccactgagaggaaaaacatcttccctttgttggatgtgcagaagcaggatttggatggctgtcccctaaggatatactagaaggatccttgcataggtgacaacrttatggcaacgttagatgttactgttattccagggccctaaatgagtaggtttttcttttccttttcttatcttttaaaaaaatctcttatttttccagactttagggagttacttaatcctagttcttcagttttctcacctgttagggaaaataaatnctggtgtccattttattccncca

SEQ ID NO: 64539 - DNA, 582 bp, Homo sapiens
aatcctgaggcagaaaggaatggcagtgtataaggtgtcccaggacattcatagaaggaaattagttctggaaggtgggtagaggcaagatcgcagcaggcattgtatggcagatamaactagttggataaaattgggtgatgtgctgcctcacgtcacggggaagtgaaaatgaccacagtcaagtgtttcttaactggggtgctattggcatttagggcaagacagtttttcattgtgtgaactgacccatgaattgtaggaacagtacacttcaatggttgagcacccctcagttactgtgacaactaaaaaaagacatgcgtatattttcaaatgtcttctcctcctacttcagaagggaatggagtatggtcttagaataagaggcaaatgtctagatgggaggagcctgggctccctttgaggcagcaaagtcaaaggagatggcatggatgtaatatttagctttagggccactggtgggcctgggggcgattcccgtaggcttccatattggcgtttaagaggcagcgggagtcagctgtgaagcttaatctaagcaggactagatggagatct

SEQ ID NO: 64540 - DNA, 228 bp, Homo sapiens
  misc_feature (1)...(228): n = A,T,C or G
tcttttccccaggtggccctgcccgcagcttgcataactgatgctggattgtgatggccatgcaatggttaagagtaygggctctcagccagattgcttggatcaaataccgacaacatcatttcctcatcctgggacctcagggcatagggcatcttgcacaacctatgcacttcaatttcgtcatctgtcaaatggggatatgcctggtatctncccctataaaga

SEQ ID NO: 64541 - DNA, 746 bp, Homo sapiens
agctggtcacctcaggccacatgctttttacaggtgtgcagaaaagargccatgaccatacccgatctccccccatcatcctgccgctcttggaggtggccctgtcaattatctctcctctcttctacactgtcagcctctccctcgtcactggcttatttccctgggcccataaacatgccttggtgttgtcattgcaccaaggagaggatgggctctccttcccatgtgacaatgagagacagaagagactcacttcacccagccctggaagggtgtgtttacaaaaccatccctcgcacgggaaaatctcaagctgccttgcccgtgcacctcccactctgcctcatcccttctctcccctcccatgccacaggcctcagggctgggcttggtgttgtccatgccctcttgtccctgtcaccttctgctgctcctgcttctgcccccgccgttcccctgaaactgtcctggctgaaggcactggtggcttcgtctgtgcgactcatcgtgtctgtttccaccattccccccgctttctcctctggcctctccaggcccccgtggccttcatgccccctccctgcttggttcccttcctgtgtcttgggcttttccttcatccatctttctcttccttttcctttgtctgcctcttcagggtttccctgggctgtttcttaggagcctctgtcctcatgccacatactttctggaaaatctcatccacacccattgtgccagcc

SEQ ID NO: 64542 - DNA, 806 bp, Homo sapiens
tgacagtgaaattaaaacatcagtttaattttctgttgtattcgaagcttcatatttcaccttaggtattctttttgttttgttttgtttttttgtttgttttttaaaaaacaattttaattgaggtataatggacatacaataaactgcatatatttaaaakgtacaattagataatttttgcacccattaaatcatcaccacaatcaagatcatgaacatatctgtattccaaaatgcttcctctatccttttttttttttttgagagagtctcactctatttcctagacggaagtgcagtggcgcaatctcggctcactgcaacctctgcctccctagtccaagtaattctcatgcctcagactcccaggtagctgggattacaggcaagcaccaccacgcttggctagtttttgtatatttagtagaaatggtctttcaccatgttggctaggctggtctctaactcctggcctcaaatgatccacctgcttcggcctcctcaagtgctgggattacaggtgtgagccactgcacctggcttcacacttcttttggtattcttttttagtggttgcaaagttaaaatgaagatttttactgtacaaatagtaagcaattttttaaacataaagtaaacatatgctatgctaataagttaaattagcagaaaggtaaaaacagattcactcttcttctggaagaataaagaaaacaataaagaaaaccttatttgcacattggagtatagttctgccgctggccagactgtgtctatatttcttcataatccagtatctaaga

SEQ ID NO: 64543 - DNA, 806 bp, Homo sapiens
tgacagtgaaattaaaacatcagtttaattttctgttgtattcgaagcttcatatttcaccttaggtattctttttgttttgttttgtttttttgtttgttttttaaaaaacaattttaattgaggtataatggacatacaataaactgcatatatttaaaaggtacaattagataatttttgcacccattaaatcatcaccacaatcaagatcatgaacatatctgtattccaaaatgcttcctctatccttttttttttttttgagagagtctcactctatttcctagacggaagtgcagtggcgcaatctcggctcactgcaacctctgcctccctagtccaagtaattctcatgcctcagactcccaggtagctgggattacaggcaagcaccaccacgcttggctagtttttgtatatttagtagaaatggtctttcaccatgttggctaggctggtctctaactcctggcctcaaatgatccacctgcytcggcctcctcaagtgctgggattacaggtgtgagccactgcacctggcttcacacttcttttggtattcttttttagtggttgcaaagttaaaatgaagatttttactgtacaaatagtaagcaattttttaaacataaagtaaacatatgctatgctaataagttaaattagcagaaaggtaaaaacagattcactcttcttctggaagaataaagaaaacaataaagaaaaccttatttgcacattggagtatagttctgccgctggccagactgtgtctatatttcttcataatccagtatctaaga

SEQ ID NO: 64544 - DNA, 806 bp, Homo sapiens
tgacagtgaaattaaaacatcagtttaattttctgttgtattcgaagcttcatatttcaccttaggtattctttttgttttgttttgtttttttgtttgttttttaaaaaacaattttaattgaggtataatggacatacaataaactgcatatatttaaaaggtacaattagataatttttgcacccattaaatcatcaccacaatcaagatcatgaacatatctgtattccaaaatgcttcctctatccttttttttttttttgagagagtctcactctatttcctagacggaagtgcagtggcgcaatctcggctcactgcaacctctgcctccctagtccaagtaattctcatgcctcagactcccaggtagctgggattacaggcaagcaccaccacgcttggctagtttttgtatatttagtagaaatggtctttcaccatgttggctaggctggtctctaactcctggcctcaaatgatccacctgcttcggcctcctcaagtgctgggattacaggtgtgagccactgcacctggcttcacacttcttttggtattctttttyagtggttgcaaagttaaaatgaagatttttactgtacaaatagtaagcaattttttaaacataaagtaaacatatgctatgctaataagttaaattagcagaaaggtaaaaacagattcactcttcttctggaagaataaagaaaacaataaagaaaaccttatttgcacattggagtatagttctgccgctggccagactgtgtctatatttcttcataatccagtatctaaga

SEQ ID NO: 64545 - DNA, 806 bp, Homo sapiens
tgacagtgaaattaaaacatcagtttaattttctgttgtattcgaagcttcatatttcaccttaggtattctttttgttttgttttgtttttttgtttgttttttaaaaaacaattttaattgaggtataatggacatacaataaactgcatatatttaaaaggtacaattagataatttttgcacccattaaatcatcaccacaatcaagatcatgaacatatctgtattccaaaatgcttcctctatccttttttttttttttgagagagtctcactctatttcctagacggaagtgcagtggcgcaatctcggctcactgcaacctctgcctccctagtccaagtaattctcatgcctcagactcccaggtagctgggattacaggcaagcaccaccacgcttggctagtttttgtatatttagtagaaatggtctttcaccatgttggctaggctggtctctaactcctggcctcaaatgatccacctgcttcggcctcctcaagtgctgggattacaggtgtgagccactgcacctggcttcacacttcttttggtattcttttttagtggttgcaaagttaaaatgaagatttttactgtacaaatagtaagcaattttttaaacataaagtaaacatatgctatgctaataagttaaattagcagaaaggtaaaaacagattcactcttcttctggaagaataaagaaaacaataaagaaaaccttatttgcacattggagtatagttctgccgctggccagactgtgtctatatttcttcataatccartatctaaga

SEQ ID NO: 64546 - DNA, 644 bp, Homo sapiens
ctgcagcttcattcttgaagtcagtgagaccaagaacccaccaattccggacacacagggagtagggcacatctttgcttagaacattttccccaaacttgaacaaaattagggttcagtaaggaaataagaagaggaggttggttgtcggtaggtaacaaatagcatatgtcttagtgtaattttaccagtttttatttccttttgcttaagaggttcgctgtagattggtaacatatggcactgggctgcaaagatgagactgtaatgggatacaaaacacattaacaaaacgcatgctaaattacaatgctatggtcgtgctgcaaacgtaatgttgtgaaattatattcctgattagaaagtataaattgtgcaatgctatttggatgttagagtgattcattgagcttaaagacataaagmatagaaagctccctagtgctagcaatacccatttttcattgacctatgtccaacgaaccaaaagagaacccatgtggaattctcatacaaatgagaacgttagttaatataccacctactatacattgaaatcacggcaggttttcaacggttagtgacacagaaaatatttgtccagggactgttagcagtagttttttccaaagcaatatcccctg

SEQ ID NO: 64547 - DNA, 1215 bp, Homo sapiens
tgcatagagattgcaggaattggaggtgaagaggacgcagctgcattttcttaacttttgaatgaaaagcaattatgccaagagccttcatttcagattgtcagcatgggcctatgtcatacccatcctgacactcccaaactgaagattttaaaggcctcctgcctttgtcattgagacacctgtcaccaactacactgaatcagcatctctagatgctgggaaatacatattcaacatgaatctatgtaagacacaacagtagggaagctggaattcttcagaatccttaaagaaaaaaaatgaaaggaaagtttaagcctgaaaaatagctgaagtcgtaaagaaatttttcaccctgtaaaacatacttctgrttccattttcatttgtttgtaattgaaatcactaagctccaatgtcaagataacaatgtaaatttttgaaaatattttaaaaaatatattgactaaatattattggaagaaagtattgaggaaaaatatgggtttatccgtggaaactgtagcctatttgggcatattattacagcaggaaatatttctaaagactttatgttttatttcaagatagaataataattgattagaatgaaataatctattagtcatatagtctattctttaggaaacagggtaaaataaaaagaaactgattctttaaagtactagaaaaattttggtactctaaatgttaaatctcattttcaaacacatttattattcgttcttaccctcttcatccttgtcctcctgcttaggatcatatctacgagtcaattgcaaaagcagtgctcatttcccgcttactcgactatatcaagatattcaatttatgatttctgaattcaaaagagagacaacccccagaactccaagtgacacttagacgaactcagagttttatagttcaccagcttagatatctttccaaagaaaggctaatgatttctttattaccttattagctattagatggcacagttacacaaatgtatgcaatggtaaaaaattaataattgtatataactgatggagtaacaaaatcaaaatgtattatataagatgagcctttacctgaagcactcaatcaaattcctaatacattaatacatatgattttatgcattattaaaattagaaatgtagtagtacatatagtttctctaatcatagcccattttatcttgacaaa

SEQ ID NO: 64548 - DNA, 1215 bp, Homo sapiens
tgcatagagattgcaggaattggaggtgaagaggacgcagctgcattttcttaacttttgaatgaaaagcaattatgccaagagccttcatttcagattgtcagcatgggcctatgtcatacccatcctgacactcccaaactgaagattttaaaggcctcctgcctttgtcattgagacacctgtcaccaactacactgaatcagcatctctagatgctgggaaatacatattcaacatgaatctatgtaagacacaacagtagggaagctggaattcttcagaatccttaaagaaaaaaaatgaaaggaaagtttaagcctgaaaaatagctgaagtcgtaaagaaatttttcaccctgtaaaacatacttctggttccattttcatttgtttgtaattgaaatcactaagctccaatgtcaagataacaatgtaaatttttgaaaatattttaaaaaatatattgactaaatattattggaagaaagtattgaggaaaaatatgggtttatccgtggaaactgtagcctatttgggcatattattacagcaggaaatatttctaaagactttatgttttatttcaagatagaataataattgattagaatgaaataatctattagtcatatagtctattctttaggaaacagggtaaaataaaaagaaactgattctttaaagtactagaaaaattttggtactctaaatgttaaatctcattttcaaacacatttattattcgttcttaccctcttcatccttgtcctcctgcttaggatcatatctacgagtcaattgcaaaagcagtgctcatttcccgcttactcractatatcaagatattcaatttatgatttctgaattcaaaagagagacaacccccagaactccaagtgacacttagacgaactcagagttttatagttcaccagcttagatatctttccaaagaaaggctaatgatttctttattaccttattagctattagatggcacagttacacaaatgtatgcaatggtaaaaaattaataattgtatataactgatggagtaacaaaatcaaaatgtattatataagatgagcctttacctgaagcactcaatcaaattcctaatacattaatacatatgattttatgcattattaaaattagaaatgtagtagtacatatagtttctctaatcatagcccattttatcttgacaaa

SEQ ID NO: 64549 - DNA, 1144 bp, Homo sapiens
catgttatttgaagactgtttttagtgtttcttccttgtttgagggagatagacactgattttttcaatagaagttcatgaaactgtttatacatagcaatgctcaaattttccttgctgcctgagttgaagttaatattaaacaagtaatttcagaagtcatttagcttaattgtgtgaatgaaagaaggcaggaaagacattttgttttagcaatacataatatttcttataatacctagacacataggtgctagctctttttaattgaaatggacaaaggcaacaacgtaagaccttcagacacaggccttcttaaaaaattaatgcttccttggtattctttaaggaaccctcttcttccatctttttgaattttggtgttctttagacatttgaccctcaacttttttctctcttgctccacatgttaccaaggtaatccgattcttgtgcattgttgacttccaagtcaatacctccagatgagcttaatcatttgaaactcagaagagcatattcaaacacccattgtatacagcaagtatgaatcccaggccacaaaatcacaggccccaaaaataagttttctttacttttcaataattgaactttatttccattttaagaacccatttcacctgataattaaagcttaattttaataagttgaaggaacaatctgccttctccccagacttgcttttaagttctgggatcatgggagagttggagagcaatctgtttacatactcattctgtcatctgctaagatgtccctgttcctggttggtactctgttcatcaatccataaaaaccagtgctgcaacctctttgctgactgcgctaagttcagccctctttcatccatgtaggagacatcctaaggkatgtggaaaatccttttctgatcccaaaccactaatggctgtgggaaaatctgtgaagcccagtgtggccagtctacctagacatagcaaaagatgacttgttcctattcttgcctttgcttgttgtacgagaacatcataatttgccaagtctccagactcaagttaaatgagagtggtccctttctttcttctctgaaacccataaaacttttctctagtctaaggaggggaagagagttacagaaaagga

SEQ ID NO: 64550 - DNA, 848 bp, Homo sapiens
atttggagacgccaagtagctgtctgatggacataaacctatcaagttatattattagatttttgattcaacatttcttctgtcagatctctagcttttatttactattttgagtggcatacttgctggaagttcacactttttctggtaatgggtgyttttatctttcttatcttctagaagaaatatttgcatcaatatttttaaatcagtaattttgcttttgtgttttagtgtgttttatttcatactgtatttcattttcaaaattaaaggctttaggaaaagtgcttttattgttattaaacacagtatattcgcacttacgtaaatttcagagagttgggagtggtcatcccaaagactctgaactcatctcttggcataactacaatgcacatagacatattttggatttgtgtaggatgctagaaaggataaagaaatgttttaatttagccaagtagtttaatgacttatagaccataaacatccaggtagaaagcaatgcctatgtcttttccagtccactctggcagtatttacagccacatgttccaacggatgctgcataatgtgaataggtctctttacaatgaaatgcaaaggaaaaaaatcattatatcaaaaggatacctgcactaatgtttatcaaccctattcacagcagcaaatacatgaaatcgacttgtgtccatcaacaaatgattggaaaaagaatatgtggtatataccatggaatactactcagccataaaaaaaatcatgtatttttcagcaacttggatgcaactgaaagctattatcttaagtgaagtaactcagaaatagaaagtcaaatactcaca

SEQ ID NO: 64551 - DNA, 969 bp, Homo sapiens
cttgctttcataatatttcacattgtaaattgggcttcttatgattaaaaaggaggttactgaagagagaaacaatataataattgagctagaagcaagacttggagaaagggagatacaattagccttttgggactggtggaaatgttagaatatatgagcaaaggtaagtgcaaaaaatgagtatgactataacatattacacattggacattaatatcaaatataagcagggcccatctagaaataaatagttttcttgagagtacttctaaatacctttatcgcctggctctgtgccccaaaactctcattaccccagtttatctcctcttctatgactattttttctctctcttcatctacaactcttcaaaaaaaggtaattggtgattgctgcttcccttcttctttctctgttcttactaaaccattgctgttttaataaattagaaacaaaatactctgytcttctcaactatatttagtgagctacaaatatttgataagattcctctaagtgtggaacattaagactcatcctcactgagttcacttcccaattgggtttttagaaatgcagagatttagctacacaatgttcaagtaaaagactgtcaacacacacttttgaagctataaatggtacttcaagcatttggaaaagctttagtgttaatcagtgactaaaaactgaccttgataaattgcttaaccattcttactaattacacaatacatatccattgatgagtttatgggctttgcccatctccaaaaccaaccagaacctccttcaagaaaagactattgcagttccttccagtactttaattcattcttgtctattgtctactttaggcactatctcaagagacattttcaaaaatgcaaagtactcatttgccacttacagagagtatatgtatgtgacattgacataaggtaggtgtcctaaaatttttgtaa

SEQ ID NO: 64552 - DNA, 969 bp, Homo sapiens
cttgctttcataatatttcacattgtaaattgggcttcttatgattaaaaaggaggttactgaagagagaaacaatataataattgagctagaagcaagacttggagaaagggagatacaattagccttttgggactggtggaaatgttagaatatatgagcaaaggtaagtgcaaaaaatgagtatgactataacatattacacattggacattaatatcaaatataagcagggcccatctagaaataaatagttttcttgagagtacttctaaatacctttatcgcctggctctgtgccccaaaactctcattaccccagtttatctcctcttctatgactattttttctctctcttcatctacaactcttcaaaaaaaggtaattggtgattgctgcttcccttcttctttctctgttcttactaaaccattgctgttttaataaattagaaacaaaatactctgttcttctcaactatatttagtgagctacaaatatttgataagattcctctaagtgtggaacattaagactcatcctcactgagttcacttcccaattgggtttttagaaatgcagagatttagctacacaatgttcaagtaaaagactgtcaacacacacttttgaagctataaatggtacttcaagcatttggaaaagctttagtgttaatcagtgaytaaaaactgaccttgataaattgcttaaccattcttactaattacacaatacatatccattgatgagtttatgggctttgcccatctccaaaaccaaccagaacctccttcaagaaaagactattgcagttccttccagtactttaattcattcttgtctattgtctactttaggcactatctcaagagacattttcaaaaatgcaaagtactcatttgccacttacagagagtatatgtatgtgacattgacataaggtaggtgtcctaaaatttttgtaa

SEQ ID NO: 64553 - DNA, 666 bp, Homo sapiens
gcattcctttacaccaacaataggcaagcagagatcaaaccatgaatgaattcccgttcataattgctacaaagagaaaaaaaaatgcctaggaatatagctaacaaggaatgtgaaggatctcttcaaggagcactacaaaacactgctcaaggaaataagggaggacacaaamaaatggaaacacattccatcctcatggataggaagaatcaatgtcaagaaaatggccatactgcctaaagtaatgtatggattcaattctattcctgtcaagctaccactgacattctacacagaattagcaaaaactattttaaatttcatatggaatcaaagaagtccccatatagccaaggcaatcctaagtaaaaagaacaaatctggaggcatgcacgctgcctgacttcaaaccatactacaaggctacagtaactgaaacagcatagtactggtaccaaaccagacatatagaccaatggagcagaacagtgacctcaggaataacaccacacatctacaaccatctgatcttcaacaaacctgataaaaaccagcaagggggaaaggatctcctattcagtaaatggtgctgagctctttcttaaacctagggaaaaaaattaatgtacattaaaacaaaacaaacctttctacataacttta

SEQ ID NO: 64554 - DNA, 1072 bp, Homo sapiens
gagctgggtcatccattgatgcttatattttggagtgaggaattatacagttaacatttataactagccaaagttttatgacaaggattttcaaaatttcgtatctctgctttctaagtagaaattatatgctttctattgatattttttaaatatgtatttaatttgcataagtgcattttatattatttcaaaccatagaagctcagcataggctatcatagcctagcattttatagaggtaagacattcatcctcttacacagtaagtgttttttaatatttagtactgtaggttctcattattctttgactaatttgcaaatatatggtagcagccaagatgatttagatcttattaagacataaaacattaaagaagtttaaaaagaagcataagctgataaacaatatcaccaaaaaaataggataaraaatcctcataagggcatcaatatttgttatttaaagcctactaatttttagttagaatttaaagaagaagaaacagcattaaccaaggtacagtaaaaaatctgagaattttcaaatttgaatagaggaaagagtatactataagaatttgaactaatagaagctgtctacaaaatgtaggctgggcttgaatagattgttttcaatatcaatctccagattaaacagcaacaacaactaaacaagttttagtcattttgtaaaaaggattccagtgaaagaacattatcagaaagaagccagtgtattttattacctgaaacacataggtagtagtaaatgtaggtcagatgttgtggtccataccaaatgggtaaaatgaaatgcagatagtactctttctactacagaagtaaaactgaatgacaaccaagttgtattaggaatgctgccatacaaagaccatttttagaaagtggtgtatttatttttagaaaatcttcaagaaggcgggtgtctttattaaacatacggctaccatcagaaggcaaagatggagataagtgaacaatgcaacaaaaccaaaattgctgtgggtataaaatcttcattgcgggcataaaatagggaagataat

SEQ ID NO: 64555 - DNA, 1072 bp, Homo sapiens
gagctgggtcatccattgatgcttatattttggagtgaggaattatacagttaacatttataactagccaaagttttatgacaaggattttcaaaatttcgtatctctgctttctaagtagaaattatatgctttctattgatattttttaaatatgtatttaatttgcataagtgcattttatattatttcaaaccatagaagctcagcataggctatcatagcctagcattttatagaggtaagacattcatcctcttacacagtaagtgttttttaatatttagtactgtaggttctcattattctttgactaatttgcaaatatatggtagcagccaagatgatttagatcttattaagacataaaacattaaagaagtttaaaaagaagcataagctgataaacaatatcaccaaaaaaataggataaaaaatcctcataagggcatcaatatttgttatttaaagcctactaatttttagttagaatttaaagaagaagaaacagcattaaccaaggtacagtaaaaaatctgagaattttcaaatttgaatagaggaaagagtatactataagaatttgaactaatagaagctgtctacaaaatgtaggctgggcttgaatagattgttttcaatatcaatctccagattaaacagcaacaacaactaaacaagttttagtcattttgtaaaaaggattccagtgaaagaacattatcagaaagaagccagtgtattttattacctgaaacacataggtagtagtaaatgtaggtcagatgttgtggtccataccaaatgggtaaaatgaaatgcagatagtactctttctactacagaagtaaaactgaatgacaaccaagttgtattaggaatgctgccatacaaagaccatttttagaaagtggtgtatttatttttagaaaatcttcaagaaggcgggtgtctttattaaacatacggctaccatcagaaggcaaagatggagataagtgaacaatgcaacaaaaccaaaattgctgtgggtataaaatcttcattgcggkcataaaatagggaagataat

SEQ ID NO: 64556 - DNA, 874 bp, Homo sapiens
tgcatgcttttgttttaagttagttcaacttttattcagcaggggcctaggtgatcagcaacaagaagctgattttaaaataaaggttatgaaaaatggtaaggccctggagatgcttttcatggatttccaaagctaagaaattatcagtggtagccatgagttmagtttcagggttctgggaacaagcttgcttactttttttttccaagtaagactgggaattgctttttaaatattttctcagctaaagtggttcaagtcactggtgagatcttatttgcccaccaagtcctggtgaccagctaaaaaaaaatgtgaaaaacagattaaagacaactctggtttctctgtttatggagtgtcagaaaactaggatcagttttcttgccaactaaatcaaaaaggtatctgagctaacttactcaaatgttttaaaacatgtcccaaactaaaacttaacagcttgctctcttcatcagctcttgctcttgtcttgcttagttggtggaagtgcctacttgtccaggcgagagaccactgagttacatgtggcctcatcagacacattctgtgaccaagtccaggtgaagtccaccctctatgcctccaggacatccacccactcttctgaagaagctactgcagctacctaagattcacaagctttagtttttctcttctaagccatttttcacactgctttatcacaattatcctttataaaaaccatcctaaccttgaagattgcatcggttcacctttgtcaagggtgaagagtcaaagatcttcatcacagcatatgagacttttcccagtttgccagcagcccacctctctagcttcatcttttacaccccacccccaactcctg

SEQ ID NO: 64557 - DNA, 1659 bp, Homo sapiens
  misc_feature (1)...(1659): n = A,T,C or G
ggaatcagagctttttattagtactctattttaaatttgtctgttcacttaaaataagcagtgttttgcaagttagaatctgaactttttggagtaattgggaagcaaataaagctgcaccacatctgggcaatattgtaaatatttgaagaactttgcggatagttaaataaatggctcattacaacatgcggagttttcatgaaactgcytctttagagcacagatttgattattcagagaataatctgtcactcctcattcccgtcaaccatccattcttctgtattctttctccccctggcacttaaaagcaggactgctggcatccctttcctctctgattcctggtttccagacatacgaaaagccctacttgctaacttgattaaaccattccattaagtcttgattcagatggtttttgtttctacttaataataagttaaggaaaattccatttatctttgatagaaaagttaagcacatttcaaaggcaattatcagaggcaatgttgtaatttttaaaaatgacttttaaaaagttataacatttgctcatttatatttgaatgcttgacatttcatgacttctgaatgtgatattttaatagccaacacctttcaatacatctgttcaattctttgtttgccaaacattcttctcagtgcttgtatgtaagtagtttttcctgagagcgtaggaaatgatcacctccctcattcaggtgcttcgcatcatcataatttccccatattcttgttctgactcttaccattcagtatcagttaggtctggacctctgttactaagtagaaaatgttaaatttatcgatataaatatatttattaatcaaaaagccaagattgttttgcaaccttaaaccttagttttacttcagatagtaaacatcaaataactcttagaatgtcccttcccaagagtaatgactcacttatttttcttaaataccttgattgtgagatactttagtgatgacatatctgacaatgtgcattaaatggtgattcagccttttgattttatggttttttatgtttcttcattgtannnnnnnnnnnnnnnnnnnnnnnnnnnnnnnnnnnnnnnnnnnnnnnnnnnnnnnnnnnnnnnnnnnnnnnnnnnnnnnnnnnnnnnnnnnnnnnnnnnnatggacttctttcttaaaagggttataccagcaaccggaagccctgaagtgggaacagttgagtcagagttttttaaaggttgcagaggcagggaccagctgaagcccagagccgagttagagggactttgggatggttccagctgagagcatacagattgagcacatgcatccaggaactcacatgccagcgccagatccctaaccacgctgacacagtgcatcctctcctgcctaccaatgacccttcaatagtgcagaggtaagagaccgtgtggctcttgtctctcagtcgcagaagcagtgccttggtggaggtgtgagccagcaggtggctgttggggtggcatgccacataagccacgcattttagaccctctcttgtagggctagatgctgaaatagtcccattctgagcaaacaggagaagagtctgcctcatcaaccatatggaaacagaacctgtgagattcctatcagaaataa

SEQ ID NO: 64558 - DNA, 1184 bp, Homo sapiens
ctgtggacaaatgtggcctagacagtttcaaaatgaaaactaatggccagtgggaccatggaagttaatgttatgacagcaaagcccaagctaccacacgcagcctcaacatgcctgtactcacaaagaggatctggtgcttggcagtcactgctcatttctatctgtgattgggataccttttacattcctttcaacagagacatactgtaaattgctgaaaaattagttctgagaagttggatacaaatcagatttgggggatctctactgggcactggcttggggaaagagaaccaaaatcagcggatgtttctcactcaccctggccagcattactctttctttgtcttggtgtctgctacctttttagtcctgaaatcttgcacatcttacctaagggtaagcaagggtagtgccaccttgtgacaagtttcatttttcttagtctaaaacatttcttttattcttttgtgatctaggcaagagttgaacagagctgttttactcttcacctgtttgctatgtaggatatatagacagggctgggatgctggctgttcgggatagaaacagtagaaaataaaccaatttggcagcacatcagaatcgsggggaacattaagaattcagaatcctaaacaccatgactcagtgattcagttagtctggactgtggctcaactgactccaaagaagcttgggccatggattggtattggggatctactgatctaggtgaaatagtgccaagttaataaagcttccagacttggttttcttattttaatacaacatcttatttattataagatgtcaagatcttgagaggagaataaaagttcacaggacaggataactaagaaacacacgcagattcacacatgcgcacatacacacacaccggcaaaactgaaggtaggacaaggtcacatttgcagaattgcttcttccccaattgtgtattatgagagatggttgctgtggtgatgggaagagggctaaacacggagggcttgtcacaggggctgtaaactggcaagggcttaacctatagaaatcttgttgaaattatctctgcgaattgggttgagaggctgcctcatctagtctccatcagaggcccgttgcatctcttcaggttctattagtcactcgtattggttgtttctatcatcctgagg

SEQ ID NO: 64559 - DNA, 746 bp, Homo sapiens
atgtttggggcaagacaggcagatttccagattcttcaggttagttcttttgggtgtttttcttaatttgtttgaaatactgtgaatgctcagaaaggagacattccaattcaattataagtaccaaaaagcatttcaaagccaaacatagttttcttacttttcatgcttttgacatttggccaccactgcatggtccattggctaaagaattcaaagcctgccagactgaagttataggcgcataaagtagtggttctttttctgaactgaatatcagacttgtaaaacttgctaaaaagacacaaacttttaaaaatacaaggtctagcactagggttttcaagttgggctgggtactaattctctgtcacttcctagccacataaccatgggtttctctgagcccattttctcatctatgaaaatggatctggccaggcgcggtggctcacgcctgtaataccagcactttgggaggccaaggcagttggattatctgagtctagaagtttgagaccagcctgacccacatggtgaaaccccgtctctactaaaattataaaaattagctggatgtggtggygtgtgcctgtagtcccagctgctgaggaggctgaggcaggaaaattgattgaagccaggagtcaagaggttgcagtgagccaagatcgcgccactgcactccagcctgggtgacagagcgagactccatctcaaaaaaaaaaaaagaaaaaaaagaaaat

SEQ ID NO: 64560 - DNA, 791 bp, Homo sapiens
atcctaaagtaaccaaattttgtaaaagaaaaacttgaagaaaatagcagttctcacagagataaaatgtttagagaataagggtgtggagaacattgataataggggctggtagatactagcaataataagggtctgggatggtatagtataatgctatgattcaagactggggacttctgaagaagcagaagaaaatctggtctaggacagataatgttctgtaaatggcaatgaaaaacaagaaatacaccagcagatagtgtgaggagtggaaaagaatgcagccatcacttgagaaaggctgtaaaggaaacaattacttcaaagcagggcaaggttttagttaaagcaaaaatatcataaaatgagttaagattataatagattttgatggtgactgattcttaatgcttttacttctaaatcaaattggtatccattgcctctagtaattctgtatcagtttgcatgaattccattaatcctgactgttaatcttttagcagcttctgggcttctttatgtgtttttgttaaatataatttcactgaagtccagaktgagttgtttgatttccctaggtgtcagcagtcatgttgaagtgaaggcattttttctctcccctgtcccaccaacacaatgggaatatggtataaaagcagccaggctaatggaatggagatgaggcagttgaaggaagattttcggttctcagtccctactagtcttttcaggctcaaacacagtgaagatcaagctcagccattcattttctccttgtactcatg

SEQ ID NO: 64561 - DNA, 1243 bp, Homo sapiens
ttaaaaggttacacgcataggacaaatgataatgattattcacaggtgtaaagatcaggactaaataacttggattatatgtggataaagctagtttcaagttctgatctcttcctggtctcttaagaatggtgctgacctgtacgtgtatatttcattgttacctggataaaataatacactaagggataaaggtagattattgtaagaatataaatgtctgcagtatcctaagtgccttcagtgaggtacacttagcttcgttgcacatagcatcttaaagctatgaagctattacatattttatatagtttgtgaggcacaggcatatcaacccaggaacgttcaaaaatactgtttgaagtggagctctaaatattgctgatatacattctgtgtaacctagacagtcccctcccctcaccatttttcttttcttttctcattgcacagatattcatgactgcctatcacgttttaagctctaggttcaccgcatcaacaaaaaatacaacaaatacttattctcatggaacgtatatttcactggggtggcaggggagacagacaataagcaaaggaagattagatagataaatggagagattaatcaataaattgtttaggatatgtatcataccagacaataaatccaattgagagtttggagaaggagtgagagagcggaggttcattctggctgtcgtgtggagacaagggttggtaaggtagaaactaagaaactagttaggaatctattttaataattcagattggcaatagtttcctgaaggaaggtggtattgaagaatgtggtaagaaatsatgataaataaggatatgctgatagatagaatgttgggtgtgagagaaagggagaattcaagggtggccagggttttttcctgtgtatctagtggaatgacactgccatttacaggaaaggggaatgacaggagaggatttattttgttttatacggatttcacttttccctgcccacctagtctttgctgaaaactgaaatagaccaattaatattttgatttaaattcttatgcttaaaagaaagaataacaatggtgacagcaataagtaatatttgatagtacttatagtttgcaaaatattttaatatccagtaacgcatctgcaatgtatgatcaccctaaagatttctttctgcacctactcctaaccttcagaacaaaatgaatacatttttctagagatataaggtatt

SEQ ID NO: 64562 - DNA, 1057 bp, Homo sapiens
ctacttggttaccttccattttttaaggtaaatatatcatttacggaagagaaaatgatacgttttcccttgatggctagagtgaattaatgcattttcagacctgaatgtcgtgaccagttagcagtatctcaacagttcttccagtctaacgtgatactctaggtgaaaattgcaggttctgttctgaactcataatcttaagctgctgaaactaccttctgcttttttcctgtgttttttttttttcttatattatctttcccctcttttaaatccacaaactatacctacaaatcctagcacctagaaggctttgagagtcaccaggaacacacaatcaggtaaattgtctgtgattgcgggtcattctaaaatcaaaatagatttcagcggcggcttcaagaatcaaattggtcagacgtctctggtgctttgctcagatgccggcgccctagcagcctgctttcaaagagggtcttttcctaagatatgcagtgattattttatggaaattagctctacccacttgcacagttaattgcagtatgagaaggttccagaacagtacctccttgagttcgacagtaaatatgcacacatcattgtatgacgagcattccagaacacccacctcccagcaaagtaaatttgctggctgaataaacacctgggctgctttagcccacaaatggcaacaagtctcatgttttaccacaaatgtacactaagcctttttaggacactgcagagccttgtagcatggaaaggggcatctgatgtctgaattcytgtagagttggcctccaagaatctctctttttccacttgaggatatcaggttatgagtttttttttttgaagaatttgaagaaaattgtttgctcatccacttattacagggaattgtagttagtaatatctttggcgttaagtatttaaaaattaatgatatttttgggtgtgtgagggttggattgaggcaatagagagtatcctttagaaaaaccatttggaaattgctgctcctttaaaattatgtgacattaaacacttg

SEQ ID NO: 64563 - DNA, 1397 bp, Homo sapiens
gtttccctgaatctgttgcctccaggtgttaacacagaattaagcatccacaattgctgaaagtcacctggggcatggtgggttttgatcttcttccccttcttttcttccccttcttctttccttctttgatcttcttccccttcttttcttccccttccccttcttttcaatttctgcaataaattcagacatggacagacacattaagctgattcccctacacacataacaatccactgtctaatcctcacacagggacctcaggctcctcagcataagaataggacactgtgagagatatatttcaggaggcctgaaggctggtcatgatagaaattcctcggtttttctcccagaaactgtgggtaaaatgtccctattctagtagatcgttatcccaatatcatttgtcccaagtttgtgcaaacagttatgccatatttttccaatcaatttaaagcaaataccctcaaatgatttctaggagaaaaactgcaatatttagccctgtctcatcaaatactcagattgttcatggttgtgaggactttagacactgaaattagagtgaaaaaggaaatctacaaacccttgagtcaaaatcatagttctctgaatttgtcacatctgcccaggtccaatgtcatgagaataggatcagggcgccacaggtatggcctgagactaggaagagagtcttgctcactgacccatcccttgtctgggcttccaggtagaactagagtttcattcaacctacatgtgcctataggtcctcactgcggcaacgacatctctcagctcagtaatggccacttggagcaggaatatgatctttatatggaagactcagtggtgcttatcaccttcatagaaaggtactcacctcccacgtcaagagaaaagccaacatgtttttcctccaatgcataaaaggaacttccatagggctggcaggagtcaggctgttcaagacaactggaaggagttgaataacatctatccagtgagtcctgcaagacttcaggctctactacctccagcagctccctgctgagcctggaaaaggaggaaaaagtaaagaataagccaggggaaatcasacacaacagagccccaactaggtttcatgggtagcatagggaagtggttaagaaactaaaaggatagatccattaatgaggtaacaaattattgccttcatgttgggacagaacagggccaaatggaaaagaatgaaagagaaagacagatagacacacacacacacacacacacacacacacacacacacacacacacacagagagagagagagaacgagctcagtgaattgtccaggtgacacactgatgagggagtaacaggacactctgagttagtgccctcaggac

SEQ ID NO: 64564 - DNA, 1397 bp, Homo sapiens
gtttccctgaatctgttgcctccaggtgttaacacagaattaagcatccacaattgctgaaagtcacctggggcatggtgggttttgatcttcttccccttcttttcttccccttcttctttccttctttgatcttcttccccttcttttcttccccttccccttcttttcaatttctgcaataaattcagacatggacagacacattaagctgattcccctacacacataacaatccactgtctaatcctcacacagggacctcaggctcctcagcataagaataggacactgtgagagatatatttcaggaggcctgaaggctggtcatgatagaaattcctcggtttttctcccagaaactgtgggtaaaatgtccctattctagtagatcgttatcccaatatcatttgtcccaagtttgtgcaaacagttatgccatatttttccaatcaatttaaagcaaataccctcaaatgatttctaggagaaaaactgcaatatttagccctgtctcatcaaatactcagattgttcatggttgtgaggactttagacactgaaattagagtgaaaaaggaaatctacaaacccttgagtcaaaatcatagttctctgaatttgtcacatctgcccaggtccaatgtcatgagaataggatcagggcgccacaggtatggcctgagactaggaagagagtcttgctcactgacccatcccttgtctgggcttccaggtagaactagagtttcattcaacctacatgtgcctataggtcctcactgcggcaacgacatctctcagctcagtaatggccacttggagcaggaatatgatctttatatggaagactcagtggtgcttatcaccttcatagaaaggtactcacctcccacgtcaagagaaaagccaacatgtttttcctccaatgcataaaaggaacttccatagggctggcaggagtcaggctgttcaagacaactggaaggagttgaataacatctatccagtgagtcctgcaagacttcaggctctactacctccagcagctccctgctgagcctggaaaaggaggaaaaagtaaagaataagccaggggaaatcacacacaacagagccccaactaggtttcatgggtagcatagggaagtggttaaraaactaaaaggatagatccattaatgaggtaacaaattattgccttcatgttgggacagaacagggccaaatggaaaagaatgaaagagaaagacagatagacacacacacacacacacacacacacacacacacacacacacacacacagagagagagagagaacgagctcagtgaattgtccaggtgacacactgatgagggagtaacaggacactctgagttagtgccctcaggac

SEQ ID NO: 64565 - DNA, 1397 bp, Homo sapiens
gtttccctgaatctgttgcctccaggtgttaacacagaattaagcatccacaattgctgaaagtcacctggggcatggtgggttttgatcttcttccccttcttttcttccccttcttctttccttctttgatcttcttccccttcttttcttccccttccccttcttttcaatttctgcaataaattcagacatggacagacacattaagctgattcccctacacacataacaatccactgtctaatcctcacacagggacctcaggctcctcagcataagaataggacactgtgagagatatatttcaggaggcctgaaggctggtcatgatagaaattcctcggtttttctcccagaaactgtgggtaaaatgtccctattctagtagatcgttatcccaatatcatttgtcccaagtttgtgcaaacagttatgccatatttttccaatcaatttaaagcaaataccctcaaatgatttctaggagaaaaactgcaatatttagccctgtctcatcaaatactcagattgttcatggttgtgaggactttagacactgaaattagagtgaaaaaggaaatctacaaacccttgagtcaaaatcatagttctctgaatttgtcacatctgcccaggtccaatgtcatgagaataggatcagggcgccacaggtatggcctgagactaggaagagagtcttgctcactgacccatcccttgtctgggcttccaggtagaactagagtttcattcaacctacatgtgcctataggtcctcactgcggcaacgacatctctcagctcagtaatggccacttggagcaggaatatgatctttatatggaagactcagtggtgcttatcaccttcatagaaaggtactcacctcccacgtcaagagaaaagccaacatgtttttcctccaatgcataaaaggaacttccatagggctggcaggagtcaggctgttcaagacaactggaaggagttgaataacatctatccagtgagtcctgcaagacttcaggctctactacctccagcagctccctgctgagcctggaaaaggaggaaaaagtaaagaataagccaggggaaatcacacacaacagagccccaactaggtttcatgggtagcatagggaagtggttaagaaactaaaaggatagatccattaatgaggtaacaaattrttgccttcatgttgggacagaacagggccaaatggaaaagaatgaaagagaaagacagatagacacacacacacacacacacacacacacacacacacacacacacacacagagagagagagagaacgagctcagtgaattgtccaggtgacacactgatgagggagtaacaggacactctgagttagtgccctcaggac

SEQ ID NO: 64566 - DNA, 1397 bp, Homo sapiens
gtttccctgaatctgttgcctccaggtgttaacacagaattaagcatccacaattgctgaaagtcacctggggcatggtgggttttgatcttcttccccttcttttcttccccttcttctttccttctttgatcttcttccccttcttttcttccccttccccttcttttcaatttctgcaataaattcagacatggacagacacattaagctgattcccctacacacataacaatccactgtctaatcctcacacagggacctcaggctcctcagcataagaataggacactgtgagagatatatttcaggaggcctgaaggctggtcatgatagaaattcctcggtttttctcccagaaactgtgggtaaaatgtccctattctagtagatcgttatcccaatatcatttgtcccaagtttgtgcaaacagttatgccatatttttccaatcaatttaaagcaaataccctcaaatgatttctaggagaaaaactgcaatatttagccctgtctcatcaaatactcagattgttcatggttgtgaggactttagacactgaaattagagtgaaaaaggaaatctacaaacccttgagtcaaaatcatagttctctgaatttgtcacatctgcccaggtccaatgtcatgagaataggatcagggcgccacaggtatggcctgagactaggaagagagtcttgctcactgacccatcccttgtctgggcttccaggtagaactagagtttcattcaacctacatgtgcctataggtcctcactgcggcaacgacatctctcagctcagtaatggccacttggagcaggaatatgatctttatatggaagactcagtggtgcttatcaccttcatagaaaggtactcacctcccacgtcaagagaaaagccaacatgtttttcctccaatgcataaaaggaacttccatagggctggcaggagtcaggctgttcaagacaactggaaggagttgaataacatctatccagtgagtcctgcaagacttcaggctctactacctccagcagctccctgctgagcctggaaaaggaggaaaaagtaaagaataagccaggggaaatcacacacaacagagccccaactaggtttcatgggtagcatagggaagtggttaagaaactaaaaggatagatccattaatgaggtaacaaattattgccttcatgttgggacagaacagggccaaatggaaaagaatgaaagagaaagacagatagacacacacacacacacacacacacacacacacacacacacacacacasagagagagagagagaacgagctcagtgaattgtccaggtgacacactgatgagggagtaacaggacactctgagttagtgccctcaggac

SEQ ID NO: 64567 - DNA, 1356 bp, Homo sapiens
aggcagatgcaaaaaattcacagaactatgatttggactcaagggtttgtagatttcctccttcattctaatttcagtgtctaaaattcttgcatccatgaacgagctgggcatttgatgagacagggctgaatactgcagttttcctcctagaaatcatctggggcattttctttgaactgatgggaacaataaggcataactgtttgcacaaacttgggataagtgattttgggataacgatctaccagaatggggatatttcacccttggttctgagatgcaaaccaaagaatatcatgaccagctttcaggcctcctgaagtatatctctcacattgtcctgttctcatgctgaggagcctgagatccctgtgtggggattagacagtggactgttatgggtgtaggtgaattggcttattttgtctgtccctgtctgaatgtattgcaggaattaaaaaggaccaagaagaggaagaagaccaagacccaccatgccccaggtaactgagcaattgtgaacagctacttctgtgttgacatctggagactcctggttcagggaaaacagagcgggctgacattatcgattacatcttttcaagcaagcctgaattattcctactaacattgctgttggttttcattgcagtagatatttaggtttccatttcttcctccccttatcatttactaacctactgtaggtggaccagacttcaaaaactgtattctcatggcgactgcatggaaacttgagcacattttatggaaaattattgagcacagtcttttcatgatcmctgtatgctgtgtgtcctgagggcactaactcagagtgtcctgttactccctcatcagtgtgtcacctggacaattcactgagctcgttctctctctctctctctgtgtgtgtgtgtgtgtgtgtgtgcgtgtgtgtgtgtgtgtgtgtgtgtccatctgtctttctctttcattcttttccatttggccctgttctgtcccaacatgaaggcaataatttgttacctcattaatggatctatccttttagtttcttaaccacttccctatgctacccatgaaacctagttggggctctgttgtgtgtgatttcccctggcttattctttactttttcctccttttccaggctcagcagggagctgctggaggtagtagagcctgaagtcttgcaggactcactggatagatgttattcaactccttccagttgtcttgaacagcctgactcctgccagccctatggaagttccttttatgcattggaggaaaaacatgttggcttttctcttgacgtgggaggtgagtacctttctatgaaggtgataa

SEQ ID NO: 64568 - DNA, 1356 bp, Homo sapiens
aggcagatgcaaaaaattcacagaactatgatttggactcaagggtttgtagatttcctccttcattctaatttcagtgtctaaaattcttgcatccatgaacgagctgggcatttgatgagacagggctgaatactgcagttttcctcctagaaatcatctggggcattttctttgaactgatgggaacaataaggcataactgtttgcacaaacttgggataagtgattttgggataacgatctaccagaatggggatatttcacccttggttctgagatgcaaaccaaagaatatcatgaccagctttcaggcctcctgaagtatatctctcacattgtcctgttctcatgctgaggagcctgagatccctgtgtggggattagacagtggactgttatgggtgtaggtgaattggcttattttgtctgtccctgtctgaatgtattgcaggaattaaaaaggaccaagaagaggaagaagaccaagacccaccatgccccaggtaactgagcaattgtgaacagctacttctgtgttgacatctggagactcctggttcagggaaaacagagcgggctgacattatcgattacatcttttcaagcaagcctgaattattcctactaacattgctgttggttttcattgcagtagatatttaggtttccatttcttcctccccttatcatttactaacctactgtaggtggaccagacttcaaaaactgtattctcatggcgactgcatggaaacttgagcacattttatggaaaattattgagcacagtcttttcatgatcactgtatgctgtgtgtcctgagggcactaactcagagtgtcctgttactccctcatcagtgtgtcacctggacaattcactgagctcgttctctctctctctctstgtgtgtgtgtgtgtgtgtgtgtgcgtgtgtgtgtgtgtgtgtgtgtgtccatctgtctttctctttcattcttttccatttggccctgttctgtcccaacatgaaggcaataatttgttacctcattaatggatctatccttttagtttcttaaccacttccctatgctacccatgaaacctagttggggctctgttgtgtgtgatttcccctggcttattctttactttttcctccttttccaggctcagcagggagctgctggaggtagtagagcctgaagtcttgcaggactcactggatagatgttattcaactccttccagttgtcttgaacagcctgactcctgccagccctatggaagttccttttatgcattggaggaaaaacatgttggcttttctcttgacgtgggaggtgagtacctttctatgaaggtgataa

SEQ ID NO: 64569 - DNA, 1356 bp, Homo sapiens
aggcagatgcaaaaaattcacagaactatgatttggactcaagggtttgtagatttcctccttcattctaatttcagtgtctaaaattcttgcatccatgaacgagctgggcatttgatgagacagggctgaatactgcagttttcctcctagaaatcatctggggcattttctttgaactgatgggaacaataaggcataactgtttgcacaaacttgggataagtgattttgggataacgatctaccagaatggggatatttcacccttggttctgagatgcaaaccaaagaatatcatgaccagctttcaggcctcctgaagtatatctctcacattgtcctgttctcatgctgaggagcctgagatccctgtgtggggattagacagtggactgttatgggtgtaggtgaattggcttattttgtctgtccctgtctgaatgtattgcaggaattaaaaaggaccaagaagaggaagaagaccaagacccaccatgccccaggtaactgagcaattgtgaacagctacttctgtgttgacatctggagactcctggttcagggaaaacagagcgggctgacattatcgattacatcttttcaagcaagcctgaattattcctactaacattgctgttggttttcattgcagtagatatttaggtttccatttcttcctccccttatcatttactaacctactgtaggtggaccagacttcaaaaactgtattctcatggcgactgcatggaaacttgagcacattttatggaaaattattgagcacagtcttttcatgatcactgtatgctgtgtgtcctgagggcactaactcagagtgtcctgttactccctcatcagtgtgtcacctggacaattcactgagctcgttctctctctctctctctgtgtgtgtgtgtgtgtgtgtgtgygtgtgtgtgtgtgtgtgtgtgtgtccatctgtctttctctttcattcttttccatttggccctgttctgtcccaacatgaaggcaataatttgttacctcattaatggatctatccttttagtttcttaaccacttccctatgctacccatgaaacctagttggggctctgttgtgtgtgatttcccctggcttattctttactttttcctccttttccaggctcagcagggagctgctggaggtagtagagcctgaagtcttgcaggactcactggatagatgttattcaactccttccagttgtcttgaacagcctgactcctgccagccctatggaagttccttttatgcattggaggaaaaacatgttggcttttctcttgacgtgggaggtgagtacctttctatgaaggtgataa

SEQ ID NO: 64570 - DNA, 1356 bp, Homo sapiens
aggcagatgcaaaaaattcacagaactatgatttggactcaagggtttgtagatttcctccttcattctaatttcagtgtctaaaattcttgcatccatgaacgagctgggcatttgatgagacagggctgaatactgcagttttcctcctagaaatcatctggggcattttctttgaactgatgggaacaataaggcataactgtttgcacaaacttgggataagtgattttgggataacgatctaccagaatggggatatttcacccttggttctgagatgcaaaccaaagaatatcatgaccagctttcaggcctcctgaagtatatctctcacattgtcctgttctcatgctgaggagcctgagatccctgtgtggggattagacagtggactgttatgggtgtaggtgaattggcttattttgtctgtccctgtctgaatgtattgcaggaattaaaaaggaccaagaagaggaagaagaccaagacccaccatgccccaggtaactgagcaattgtgaacagctacttctgtgttgacatctggagactcctggttcagggaaaacagagcgggctgacattatcgattacatcttttcaagcaagcctgaattattcctactaacattgctgttggttttcattgcagtagatatttaggtttccatttcttcctccccttatcatttactaacctactgtaggtggaccagacttcaaaaactgtattctcatggcgactgcatggaaacttgagcacattttatggaaaattattgagcacagtcttttcatgatcactgtatgctgtgtgtcctgagggcactaactcagagtgtcctgttactccctcatcagtgtgtcacctggacaattcactgagctcgttctctctctctctctctgtgtgtgtgtgtgtgtgtgtgtgcgtgtgtgtgtgtgtgtgtgtgtgtccatctgtctttctctttcattcttttccatttggcccygttctgtcccaacatgaaggcaataatttgttacctcattaatggatctatccttttagtttcttaaccacttccctatgctacccatgaaacctagttggggctctgttgtgtgtgatttcccctggcttattctttactttttcctccttttccaggctcagcagggagctgctggaggtagtagagcctgaagtcttgcaggactcactggatagatgttattcaactccttccagttgtcttgaacagcctgactcctgccagccctatggaagttccttttatgcattggaggaaaaacatgttggcttttctcttgacgtgggaggtgagtacctttctatgaaggtgataa

SEQ ID NO: 64571 - DNA, 1356 bp, Homo sapiens
aggcagatgcaaaaaattcacagaactatgatttggactcaagggtttgtagatttcctccttcattctaatttcagtgtctaaaattcttgcatccatgaacgagctgggcatttgatgagacagggctgaatactgcagttttcctcctagaaatcatctggggcattttctttgaactgatgggaacaataaggcataactgtttgcacaaacttgggataagtgattttgggataacgatctaccagaatggggatatttcacccttggttctgagatgcaaaccaaagaatatcatgaccagctttcaggcctcctgaagtatatctctcacattgtcctgttctcatgctgaggagcctgagatccctgtgtggggattagacagtggactgttatgggtgtaggtgaattggcttattttgtctgtccctgtctgaatgtattgcaggaattaaaaaggaccaagaagaggaagaagaccaagacccaccatgccccaggtaactgagcaattgtgaacagctacttctgtgttgacatctggagactcctggttcagggaaaacagagcgggctgacattatcgattacatcttttcaagcaagcctgaattattcctactaacattgctgttggttttcattgcagtagatatttaggtttccatttcttcctccccttatcatttactaacctactgtaggtggaccagacttcaaaaactgtattctcatggcgactgcatggaaacttgagcacattttatggaaaattattgagcacagtcttttcatgatcactgtatgctgtgtgtcctgagggcactaactcagagtgtcctgttactccctcatcagtgtgtcacctggacaattcactgagctcgttctctctctctctctctgtgtgtgtgtgtgtgtgtgtgtgcgtgtgtgtgtgtgtgtgtgtgtgtccatctgtctttctctttcattcttttccatttggccctgttctgtcccaacatgaaggcaataatttgttacctcattaatggatctatccttttagtttyttaaccacttccctatgctacccatgaaacctagttggggctctgttgtgtgtgatttcccctggcttattctttactttttcctccttttccaggctcagcagggagctgctggaggtagtagagcctgaagtcttgcaggactcactggatagatgttattcaactccttccagttgtcttgaacagcctgactcctgccagccctatggaagttccttttatgcattggaggaaaaacatgttggcttttctcttgacgtgggaggtgagtacctttctatgaaggtgataa

SEQ ID NO: 64572 - DNA, 1356 bp, Homo sapiens
aggcagatgcaaaaaattcacagaactatgatttggactcaagggtttgtagatttcctccttcattctaatttcagtgtctaaaattcttgcatccatgaacgagctgggcatttgatgagacagggctgaatactgcagttttcctcctagaaatcatctggggcattttctttgaactgatgggaacaataaggcataactgtttgcacaaacttgggataagtgattttgggataacgatctaccagaatggggatatttcacccttggttctgagatgcaaaccaaagaatatcatgaccagctttcaggcctcctgaagtatatctctcacattgtcctgttctcatgctgaggagcctgagatccctgtgtggggattagacagtggactgttatgggtgtaggtgaattggcttattttgtctgtccctgtctgaatgtattgcaggaattaaaaaggaccaagaagaggaagaagaccaagacccaccatgccccaggtaactgagcaattgtgaacagctacttctgtgttgacatctggagactcctggttcagggaaaacagagcgggctgacattatcgattacatcttttcaagcaagcctgaattattcctactaacattgctgttggttttcattgcagtagatatttaggtttccatttcttcctccccttatcatttactaacctactgtaggtggaccagacttcaaaaactgtattctcatggcgactgcatggaaacttgagcacattttatggaaaattattgagcacagtcttttcatgatcactgtatgctgtgtgtcctgagggcactaactcagagtgtcctgttactccctcatcagtgtgtcacctggacaattcactgagctcgttctctctctctctctctgtgtgtgtgtgtgtgtgtgtgtgcgtgtgtgtgtgtgtgtgtgtgtgtccatctgtctttctctttcattcttttccatttggccctgttctgtcccaacatgaaggcaataatttgttacctcattaatggatctatccttttagtttcttaaccacttccctatgctacccatgaaacctagttggggctctgttgtgtstgatttcccctggcttattctttactttttcctccttttccaggctcagcagggagctgctggaggtagtagagcctgaagtcttgcaggactcactggatagatgttattcaactccttccagttgtcttgaacagcctgactcctgccagccctatggaagttccttttatgcattggaggaaaaacatgttggcttttctcttgacgtgggaggtgagtacctttctatgaaggtgataa

SEQ ID NO: 64573 - DNA, 524 bp, Homo sapiens
actgagtcttctggttagggtcatattcctactgcaagtggcccttactgagctgagagatgtcattgccacagggaggacctataggcacatgtaggttgaatgaaactctagttccacttggcagcccagacaagggatgggtcagtgagcaaggctctctccctagtctcaggccatrcctgtggagccctaatcctactctcatgacactggacctgggcagatgtgacaaattcacacaactctgattttgtctcaattttgtagatcttgtagatttcatccttcactctaatttcagcgtctaaaatcctcgctaccatgaacaatctgagtatttgatgagacagggctgaatagtgcagtttttctcctagcaaccatttgggggtatttgctttaaatcgattggaaaaatatggcataaccatttgcacaaacttgggacaaatgatattgggataacgatctaccagaatagggaattttacccacagtttctgggacaaaaaccaaggaat

SEQ ID NO: 64574 - DNA, 622 bp, Homo sapiens
ccctctccctgtctttctctttcattcttctctacctggccctggtctatcccaacataaaggcaataattcattacctcattaatggatctgtcctttttctttttaaacagttccttatgttagccatgaaatctagctggggctgtgtggtttctgattccccctggcttattctttactttttcctacttttccaggctcagcagggagctgctggatgagaaagagcctgaagtcttgcaggactcactggatagatgttattcgattccttcaggttatcttgaactgcctgacttaggccagccctacagcagtgctgtttactcattggaggaacagtaccttggcttggctcttgacgtggacagtgagtaccttactatgaaggtgataagcctccacctggtcttccagataggggtgatattcctgttccaagtggcccttactgacccgagagatgtcattgccrcaggcaggacctatgggcgcatataggttgtaatgaaactgtagtctcagttggaagcctagacatgaaatgggtcagtgagcaaggctctattcctagtctccagccatgcctgtggcaacctgagcccgctctcagcacatt

SEQ ID NO: 64575 - DNA, 1158 bp, Homo sapiens
  misc_feature (1)...(1158): n = A,T,C or G
tgagtagaacaaagtaagaatgagaggagaggatagtgaaatttgaggataggatgagaatgtaaatagatttatgtccatccattacaagattaataaccacaacgataaaagtcttgaatgttatttatttgcatatgagtgatatttcagtttgtggctgatacccttttggtattaaatggaagatgacaaatcatccaatattaattttagagggagacatctattgaaatctttgtgcagtcaggtcaagtttctgtgtacaaaaattagcagagaggttgctgctggttgacttcccctaggatggtgtctttctgaacattttgaaatgtagattgaaaaggtggatttgtcaactaactctgaagtgctgtagttagttgtgttttcatcattgttttattatttattttatttttaagatggagttttcgctcttgttgcccaggctggagtgcagtggtgtgatcttggctcactgcaacctctgccccccgggttcaagcgattctctcgtctcagtctctcaagtaactgggattacaggcacacaccgccacggccagctaattattttgtatttttagtcgagacgagaattcaccatattggcctcaggtgatccgcccgcctcggcctcccaaagtgttgggattatgggcgtgaggncacacggtgcccggcctgttttattgtttgaaaaacaagtacaggttgttattatccaagaattgttgatagagtatatactgtatttgaagtgtagaactgaggcagaggctgattaatataactagtttacwtttgttagcctttcacatctgtgaaggaataaagtacagacaaaagtggaaaacaaaccaggaaaaaaaaattgtgaagcacagagctgcttaaaagaaaaaagtcacagaaataagtcagtattttgtttagagactagaactccaactgctagccaactgcctagaatatagtaaatattttctagtttcttaaatgactagtaatattcctacattatgtgatggcatttcccaaactgtttaattagatgttagatttgtagccaaatatgtctaggaaatgcttaaacaatataaaacagttttaatgattggctttttagaacgttatatattagtgtgcttt

SEQ ID NO: 64576 - DNA, 1158 bp, Homo sapiens
  misc_feature (1)...(1158): n = A,T,C or G
tgagtagaacaaagtaagaatgagaggagaggatagtgaaatttgaggataggatgagaatgtaaatagatttatgtccatccattacaagattaataaccacaacgataaaagtcttgaatgttatttatttgcatatgagtgatatttcagtttgtggctgatacccttttggtattaaatggaagatgacaaatcatccaatattaattttagagggagacatctattgaaatctttgtgcagtcaggtcaagtttctgtgtacaaaaattagcagagaggttgctgctggttgacttcccctaggatggtgtctttctgaacattttgaaatgtagattgaaaaggtggatttgtcaactaactctgaagtgctgtagttagttgtgttttcatcattgttttattatttattttatttttaagatggagttttcgctcttgttgcccaggctggagtgcagtggtgtgatcttggctcactgcaacctctgccccccgggttcaagcgattctctcgtctcagtctctcaagtaactgggattacaggcacacaccgccacggccagctaattattttgtatttttagtcgagacgagaattcaccatattggcctcaggtgatccgcccgcctcggcctcccaaagtgttgggattatgggcgtgaggncacacggtgcccggcctgttttattgtttgaaaaacaagtacaggttgttattatccaagaattgttgatagagtatatactgtatttgaagtgtagaactgaggcagaggctgattaatataactagtttacttttgttagcctttcacatctgtgaaggaataaagtacagacaaaagtggaaaacaaaccaggaaaaamaaattgtgaagcacagagctgcttaaaagaaaaaagtcacagaaataagtcagtattttgtttagagactagaactccaactgctagccaactgcctagaatatagtaaatattttctagtttcttaaatgactagtaatattcctacattatgtgatggcatttcccaaactgtttaattagatgttagatttgtagccaaatatgtctaggaaatgcttaaacaatataaaacagttttaatgattggctttttagaacgttatatattagtgtgcttt

SEQ ID NO: 64577 - DNA, 459 bp, Homo sapiens
caacagggaccyggagatgcaactcagcttcagcatttgcagaggtaccgagaggcacttctgcaggggctaagagttggtagaaggaaaacaattaatataaggaagatttcagaagtgcttcaagaagctgatgagagcctaagtcagttttatgagagactctgtgaagcattctggctttacaccccatctaactctgaggctgctgaacatcagtgtatggtaaatacttcatttgtaaagcaagcccagggtgacatcaagcagaagctgcaggcatggataccacccagtctataaaagtggccaccaaggtgtgtgttaactgtgacccgggaacaaaacgggaaagaggaaaagcaacaacacagcagctttgcacgcaaggatttagtcctctcgcagccctgtgtatctgaagtagagggggccgagatggcgctacgagaaagcaaa

SEQ ID NO: 64578 - DNA, 498 bp, Homo sapiens
tgtacatgtgaagctgataaaggatagaatggataatggtacacttcaattgggaacattttcatttaacctggacattatttagagccatacggagagacgtatagacagaatttaaaaatgtatatttgtggctattgtttgctgtttaaaaatcagctgggtgtgtgccatgtctgtaactatgtttgcttttttctcctaaatagaagttagttcattatgctacatttataaacttattatttacacattcatttaaattaatgatttctaattagaaagwgcttttctttccagaaaaataagattttgatttttgagtgtttgtccttttttattagaaaattctaggaataatatattgccatggcataattactattgttcttttttaataaaataattatagaaactattctttaagaagagaaatggtagaatttaaagcacttaaataaatacaattaggcgtcctatgctgctaggatatcttat

SEQ ID NO: 64579 - DNA, 634 bp, Homo sapiens
atggcatgatcttggctcactgcaacctctgcctcccgggttcaagcaattctcgtgcctcagcctcccgagtagctgagattacaggcacctgcctccacgcctggctaatttttgtatttttagtagagatggggtttcaccacgttggccaggctggtctcgaactcctgacctcaggtgatcctcccacctyggcctcccaaagtgctgggattacaggcatgagccactgtgcccggtctagtctcttccttttcatataagaacactaaatccatcctagaggctctaccctcacaacctaattacctcccagtgaccccacctccaataccatcccacaggtgggttagagttcaacatatgaatttggagtgtgagagaaacacaagcattcagtccatagcagagcccaattgtgtctttaatagaattcatactaagctgcatttccaaatacattttcctgtgcttttaactccattaaaataaagattcatgaacacaaaacagtaaaatcagtaaaccaaactccactcctgctggctaaataatattcctccgtaagaattggtggttgttgggacaatttcttggatttattgcctttcccgcttgcttctggccagca

SEQ ID NO: 64580 - DNA, 634 bp, Homo sapiens
atggcatgatcttggctcactgcaacctctgcctcccgggttcaagcaattctcgtgcctcagcctcccgagtagctgagattacaggcacctgcctccacgcctggctaatttttgtatttttagtagagatggggtttcaccacgttggccaggctggtctcgaactcctgacctcaggtgatcctcccaccttggcctcccaaagtgctgggattacaggcatgagccactgtgcccggtctagtctcttccttttcatataagaacactaaatccatcctagaggctctaccctcacaacctaattacctcccagtgaccccacctccaataccatcccacaggtgggttagagttcaacatatgaatttggagtgtgagagaaacacaagcattcagtccrtagcagagcccaattgtgtctttaatagaattcatactaagctgcatttccaaatacattttcctgtgcttttaactccattaaaataaagattcatgaacacaaaacagtaaaatcagtaaaccaaactccactcctgctggctaaataatattcctccgtaagaattggtggttgttgggacaatttcttggatttattgcctttcccgcttgcttctggccagca

SEQ ID NO: 64581 - DNA, 573 bp, Homo sapiens
ttagaaattcrttttatctttcatatttaagatatattgtcactgacacaagtagctgaatctgaagaacaattaaagccagatatttgagcacagcaggactttgcctacctctcttgtctcttacctagagtatcattggtgtctatattattcaccttcatagcagataattctctccctcaggataggaaaattgattatcaaaagctgctggagcccgggcttggtggctcacacctgtaatcccagcaccttgggaggcccaggcaggcggatcacctgaggtcgggagttcgagactgacctcaccaacatggagaaaccccatctctactaaaaatacaaaattagctgggcatggtggcatgcacctgtaatcccaggtacttgagaggctgaggcaggagaatcacttgaacccaggaggcggaggttgcggtgagctgagattgtgccattgcactccagcctgggcaacaagagcaaaactgtctcaaaaaaaaaaaaaacctgctggaatttataacttatggtttccctcagtggggagagactaacatgcttttttct

SEQ ID NO: 64582 - DNA, 713 bp, Homo sapiens
aatcataatttcagtacagaatgttctaatatttaccttttttagtggatgggaatttaatacctgcaaacattataaattataaatgtaggttgtaaatgaccttatgtcactggagatgggagagggaatgagggttggatgtctcagcagtggcagcaggtgggggtacacacaatggagttacacacagggastgccaggtgctttgaaaatggttcatcctgtggtctcacttcagcctcgggggtatccctaaaaggtagttacttatgtggtcttacacttgagatcagctcagcaagaagcacatacagtgaccgaagagcacagcctggattcaaacccaagcctcaatgtgtgctctaatccggggatgggccgtttccactcccagtgggttgagtaccagaaccacctggagggcctggtagcaggcgccactctgtccaggcatggaggcagccaagcagaatgagtcaccccaccctaaactcaggggaggacaatgggaaggcagcagagggcaggtggaaggagctgagagaccaggtcaacaggcctctcagccacaagccctaagcagtgcggttcccacacctgggtgcagccttcaggcaggcaatagccatcatcagaggcaacagccatcatcagaaaacttttacttttatggttcatgatcattagaaaaatactgtagttacaaaatc

SEQ ID NO: 64583 - DNA, 713 bp, Homo sapiens
aatcataatttcagtacagaatgttctaatatttaccttttttagtggatgggaatttaatacctgcaaacattataaattataaatgtaggttgtaaatgaccttatgtcactggagatgggagagggaatgagggttggatgtctcagcagtggcagcaggtgggggtacacacaatggagttacacacagggactgccaggtgctttgaaaatggttcatcctgtggtctcacttcagcctcgggggtatccctaaaaggtagttacttatgtggtcttacacttgagatcagctcagcaagaagcacatacagtgaccgaagagcacagcctggattcaaacccaagcctcaatgtgtgctctaatccggggaygggccgtttccactcccagtgggttgagtaccagaaccacctggagggcctggtagcaggcgccactctgtccaggcatggaggcagccaagcagaatgagtcaccccaccctaaactcaggggaggacaatgggaaggcagcagagggcaggtggaaggagctgagagaccaggtcaacaggcctctcagccacaagccctaagcagtgcggttcccacacctgggtgcagccttcaggcaggcaatagccatcatcagaggcaacagccatcatcagaaaacttttacttttatggttcatgatcattagaaaaatactgtagttacaaaatc

SEQ ID NO: 64584 - DNA, 713 bp, Homo sapiens
aatcataatttcagtacagaatgttctaatatttaccttttttagtggatgggaatttaatacctgcaaacattataaattataaatgtaggttgtaaatgaccttatgtcactggagatgggagagggaatgagggttggatgtctcagcagtggcagcaggtgggggtacacacaatggagttacacacagggactgccaggtgctttgaaaatggttcatcctgtggtctcacttcagcctcgggggtatccctaaaaggtagttacttatgtggtcttacacttgagatcagctcagcaagaagcacatacagtgaccgaagagcacagcctggattcaaacccaagcctcaatgtgtgctctaatccggggatgggccgtttccactcccagtgggttgagtaccagaaccacctggagggcctggtagmaggcgccactctgtccaggcatggaggcagccaagcagaatgagtcaccccaccctaaactcaggggaggacaatgggaaggcagcagagggcaggtggaaggagctgagagaccaggtcaacaggcctctcagccacaagccctaagcagtgcggttcccacacctgggtgcagccttcaggcaggcaatagccatcatcagaggcaacagccatcatcagaaaacttttacttttatggttcatgatcattagaaaaatactgtagttacaaaatc

SEQ ID NO: 64585 - DNA, 1023 bp, Homo sapiens
atcttccaagtgagtgcatagatcaaacacagaaaaaagagagcattgagatttagttttaactgagcactcacactgtgctcaggactgggctggcactgagcactacacttcaaaggtacaagaggaatattagcaaaacaccaccctggcagtccctgggccctgcagcctggagagttgcaggccactgaatcacacatcccatcctctaatttcacttgggattcatcggcctaagtaacctaattgagtgtcataattgatttgggagactcatttccttccctggaaatcattaaaggtggctgcgtcatgcttaaaatagcactttttctaaaggaatcccctggactcgttcatgaggaagaaagaccctgtcagcaggtggcttctcagtcctgccggtccatgacctgcccagacctgccctctgcacaaaggttgctagtggctcctcgggcctccccaccaggcgcctttcagagtacacaaaaagggcatactgccattcctaatggaggcagccaccctgggcaaagggctggccactggcgttgttgtggtcatcaccccaattagcaagacacactctgtgccactaaagaatttttagcaggaaattcttttgtgagtgactcaacttccctgcatgaaatacctagatattgtgacttctttttcgaagccaatgttaaattcctaattaaactcttacctttgaggttttccaaccgagaaaacccactagaggtggccctaaggaatttgcaattccttctgttggatttcaccagtgagaggtgaagctgggaatagccacactgctgagaatacctttgtagtcacaggaggtggttctcttttcccttgattttaatccctcttttacttaggatggaaatagcctgaacccaaatctgaaagagtgatatcaagtctggataaaratgctgaagtgtagggtcacaaatggaaagctctctgaggtttaattttgtgaaattcatttatccctgaaag

SEQ ID NO: 64586 - DNA, 680 bp, Homo sapiens
tccaccagagctcagcactgatgacatcttgattttggccttgagagacgaagcacagaagccagcagagcccgtgagatttctgacctcccctaggaagtgtaagataatacgcttgtattgttttaaactatgttagtcgcagtttattccagcagccacaggaaacattgcccccgcacatgtcctcatttgcatgctttcttgtgtgctgctgctgctgctgggaacacctgttctttagctcgccattacgttaaaatctcacctgtcctggaaggcccagcttccacggccatccctgagcagcacttccctgcccttaatgacagagcagaatgaatcacattcttctctgtkcttagagaattttgcttctatctcaacaaagtgcatgcggtgagtggttagcatctacgcgatggtcgccttttgctgcactctgacccttgtccctagcccagtgcctgatagtctgctgtcaatcagatatttattgggaggctatgttggtgccacacagatgtgtcgtaggggctaggtatacggggatgcctaaatcagacccagggcccttcattctctcatggaccttctaggctacacatattcagtgcctcataaacatctgctaagttaattgaaccgaggcctcctagagacaaggaagccacagtcac

SEQ ID NO: 64587 - DNA, 695 bp, Homo sapiens
aggtggaaaaatgactgtcacagaaaataatataattgaatatttaaatttttcaattaaatttgaatattgaaacaattgcatatgcttatgatttttatatacaatattactatcactattttctttatttttaaratttgaatgatacagctgaattgtctacacaccttgactttttattttcttcttaacatgaaagtagaatgttctggtcaatttaagagcttaactatttttctatctctataatttaaatgttacagatctaaatttcagtttaaatctttaaaataagatttagaccatttttctgttcctagtctaaggtgtgttactttgaagcctgcgtgtgtagagtgtttcaccagtgggcattttgaaggcaattaccatgaccatttatgataattgttaaataaatgtatttatttattaattctcttaatacacagttactaagctagctacatgttccaagcatgattcagatagagggatacgtggctaaaaaagaaaaccagataaattttctcatctttcatggaacttacttctagtggaaaaaacaaagaaacagcacagaaataaaccattaatataatgtcatacaacataaaggaatataatgtaatattagttaacaaaagtagagtgagttttcttcaggtctgtactcaaaagtcgcctgctta

SEQ ID NO: 64588 - DNA, 906 bp, Homo sapiens
tataatatcaaacacatttcttatacagaagaataaataaatattttcttttgttttgtttgaaggaaatgcctgtagtctatgagaagacaccaaatctattaagtggaggcaattccttgaccataggtttacagcaaaaattaaatgagtgatcttgatttagatctttaaatttttatactcatttttttattagtggaatagcttatatttgcttacttacattttgttgttgtttttgttttttgtttgtttaagacagagtctcagtgtgtcacccaggctggggtgaggtgacgcgatcttggcttactgcaatctctgcctcctgggtttaagcaattctcatgcctcagcttcctgagtagctgggattacaggcaagcaccaggcatgcccagtaatttttgttatttttagtagagatggggttttgccattttggctaggctggtctcgaactcctggccccaagtggtctcctgggcctcccaaattgctgggattacaggcattagccactgtggctagccttattgcaatgttttcagaagagatatatttaatttctccgaagtttagaggggactatgttattttgttttattataatcccatgtttatttgaagattgaaagaaatgtggacactggagttgaagaaaaataaatagccatctttcctctcttagttatgcaactctcaaattctattttatcagagtattggtaattaacaatacttttctttatataatagggtgtaaatttggatgaattttaagtccccaaatgggccccagtgtggcyatatgctgagtggcattgagcaatttgcaatgcctgagtttgtttcagcacatgtaaagtggtgggtgataataatatctctccataggattgt

SEQ ID NO: 64589 - DNA, 673 bp, Homo sapiens
gactctgtctcaaaaaatataaataaaaaaaaaaaaataataataataataataatgttgcgtgttccttgggttagtgcagtgacccagaagagctcaagaatattttttactatatgaagatttgaccttacatagtaactccaaatgtaacagctgagtaagataggagtaacttcagtctacagtgttgtggattagacgaacaccttgtttcttctgttgttattgtacttaaatattgcctttaatattttagagttatagccatgaataagttatccgttttcaacatatgagattatcctctcccatagtggccttttctcacattatyatactttggtcattgtttgattagcatcagctccaatgaaggtggagatgagtggactgttttcccctgtgctaccaactctaacagaatatttaggaaaagtttgttatttatgaatgctgtttgcaacctgtatgggcctcacttaggttttttaaaatttattagctaagctcagaggactaaaatttatcaaatggaaataaaattttttggatgagtttattgtcatagcagtaggatagccaaacatctgtgcaagaagtgttaggtaaagacagaggagatttgtttgttaccctggcttggctcttggtagttgtctttttagaaaca

SEQ ID NO: 64590 - DNA, 811 bp, Homo sapiens
gatcctttaagatttaaatgtttaagacggcaggcacggtggcttgtgcatgtaatcccagcactttgagaggccaaggtgggaggactgcttgagcccagaagttggagaccagcctgggaaacataatgagaccctgtctctaaaaacaaaaaataaattagccatgcatgatggcatgcgcctgtagtcccttctacttggggggctgatgggaagatctcttgagcctgggacatcaaggctgcagtgagccatgattgtaccactgcgttccagtctgggcaatacagcgagaccctgtctcagaaaaaaaaaaaagtttcaagaatatttatctggtgaattatttttactgaaatacttgaattatttttactgaaatacttagatgggacaaggcaaggaggactttgcaacattagaaagatgagaggtagtatactctctcaaccactaggtgagctctttccattcctacartgcttctttctttctttattatcattattattattattattattattattattattattattattattctgagacacagtctcactcggttgccaaggctgaagtacagtggtgcgatcttggcttactgcaacctcagcctcctgggttcaagagattctcctgcctcatcctccaagtggctgggactacagacatgcaccactatatccagctaatttttatgtttttagtagagacagggtttcaacatgttggccaggctggtctcaaactcctgacttcaagtgatccaccagcctcagcctcctaaagtgctaggatcaca

SEQ ID NO: 64591 - DNA, 664 bp, Homo sapiens
ggatcccaaggtcaagagatcgagaccatcctggccaacatggtgaaaccctatctctactaaaaatacagaaattagccgggtggggtggcacatgcctgtagtcccagctacttgggaggctgaggcaggggaatcgcttgaacccaggaggtggaggtagcagtgagccaagattggaccactgcactccagcctgccaacagagcaaaactccatctcaaaaaaaagagagagagagagagggagacagggtcttggtatgttgtccagtctggacttgaacttctgtgctcaggcaattctctcaccctcagcctcttgagtagctgggactatcagtgtgtgccactgcacccagcttattattacactttttaaaggacccagagcttgaaaactagggcaagaaattgtttttgataatttctgctatttcaattcccygtgcccctgtaaagatttttgaactgtgcatcagtcagtactgccttctccaataaactttatgatgtgttctcaccctcattttcagcatttgtgtaacctgaagcatgtaagtgccaggcttgctgttgtggttgtaaaaaatagcaataccttttctctgtaaagtattggaccatatgatttggtgttgattacaatgaagcctgaagtgaca

SEQ ID NO: 64592 - DNA, 574 bp, Homo sapiens
caccgaaattaaggacagcaattctcaatactttcattgataacattttataacatgttattaataacaattaataacattatggactttaatgtggttttagcttactcaaatttgacaacatctttaaatctttttttttttttttttttttttgagaaggagtttgtctcttcttacccagggtggagtgcaatggcgccatctcggctcactgtagcctccgcctccttgattcaagtgattctcctgcctcagtctcccgagtagctaggattacaggcgtgtgccactatgcccggctaatttttatatttttagtagagacggggtttcactatgttggccaggctggtcttaaactcctgacttcaggtgatccacccgcctcggccttccaaagtgctgggattgtaggtgaaagccagccaccgcgcccggctctttaaatctttaagtgactattcttcagagtaattcactcaaaagtgaatagtatagaacactagctatgttttaaacatagttgtattaaatgtttctctctctmtatatatatatacacacacacaca

SEQ ID NO: 64593 - DNA, 783 bp, Homo sapiens
taatgttcccatcagcaatgagtacaagttcttcctgtgatcatcctttccaccatttaatattatcaagttctttaattcttccaataatcaatgatgaaatgcaatatataatcatatatttattgtccatttgatttttcaatctgtagtaaaatgtccacttacatcttatgcccatttttatatttttatctttttcttgttttgtagacattttaatatatattctaacaatactttattagttatgtgtgttctgtttatcttctctcagtttttgaatttgtatttttatgatgtctttacatgaataaaaattctttttaaattatttttattgtataaatttaaaatatagaacataatgttttgatatgcatatacatagggaaatgattactactgtcaaacaaatgatcatattcatcatcttttatagttatctttttgtggatataaacactatatgttaaaataaytaaatgtactattattttattttatggtgaacacttttttctttgttttaaaaaaaaatccttcctcaaggatatgtcttcctctttcaaaaagacactacatactttctttttgaaatttttaaatagtgctacagttagtccttaattcatttatatttgatgggtggaggaggcaaagggtcagacaggaagcaggaactccagtgtctgcttggagcccacagggaagtctcactattgtcactttcagaggaagagtgtaggtagaacttgctttaggccaacacagaccacagtg

SEQ ID NO: 64594 - DNA, 2034 bp, Homo sapiens
cccagtgtagttacaataggcagtggttttaattttaatatgttgttcatctgagcatttcagctatatacattgtacatagatattccttggaaggattcctacatagtgtcacttgaagaggtctgcaggtgaagttcttctgatcaatggattttcatggatcttgtgcagaagcaaagaacaatggaggtggccagttcccaggttagcacagacacaacaaagtattggatacagcatccagtatgaaggatgccatctttggtcacaaattagctttatagttaaagaggatgggggaaaactaaagcaaaatgccgtatatttgctaacagtggaaatgtcggggtatcccattaattaggccagttaggtcactcccctactgaaacaggaagctgcatattgagtgaatgtgtggtttctggtgtgagaactgggcagcccctcacttggcctcttgcttcaagtcctccttgcagaaatgccgaaggagctgctggagatcgcgctggaggtcgtcctggtctagtgcttctggtacatcctccaggtgctccaagtcaatgcgttttccatgctggtccttcaccacagccctcttctgtgtgatggctttactcattgttgtcctggagaaaagcagacaagagagaattacgctcttttcactgccagagggcagctgttaggaatgaaggtgaccattacactgagtacctaatgtcttacctttagatgtttccacagcaaactattagcataacaaactatagacatctttttgtgtctttcttttaaacatggctcccctctctcaaacgattcatgagatttttttaaaatgtgttttggaacaaggagtattttttaaatctttaagaaaaatttaaaataaatgaaaccatgctttaatttgatcttctcaaaaactaaccataaaatcattcatggtttgattaagtagcccttacttaayagagtttggttaattctgaaatagtaccacaagtaccttttgacaggctaaaaaaacctttttttaatttatttgaaacaccttggctgccagcttaaaccttacagtcataccctgacccaaacttcccaaaattatgttttcagagaagttttttatgaggcatatgtctttaaaaactaaaatattagtctatcaatatataagaaggtggctcccaacaaaagatgaagatctgcccaggtctctaaggcttcatatggagatggtgggggaggaaggggaaaagagaaaagccattgagagacaactgcttcctccggattctccaagcctcacatatgttgctcattttgtgtatttcttgccatttaacagtctgttgtttacttgcctcccttataagactggtggttacttgagaaaaggaactataacaccttttcttgagacggagtctcgttctgtcacccaggctggagtgcattggtgcgatcttggctcactgcaacctctgcctcccgggttcaagcgattctctggcctcagcctcctgagtagctgggactacaggtgtgtgccaccacacccagctaatttttggtatctttagtagagacagggttttgtcatgttggccaagctggtctcgaactcctgagctcagatgatctgtccaccttggcctcccaaagtgttgggattacaggtgtgagccaccacattgggccaggagctataacttttgtatagtcatattaattttaagtcatactaatattttcctgtaactgtacttaaaagtaatttgctcattctcaattcttttcactatatattcttctttttttttttagagtaaagtaaaagcaagtttattaggaaagcaaaggaataaaaaatggctactccataggcagagcagcctttttcactatacacttccaaatgcgggtcctcattccacaagtatttgacgaatgtgttgtatgggccagacactagtataacaaataaagaaattgaatctccgagaatttaagcaatagtcc

SEQ ID NO: 64595 - DNA, 1808 bp, Homo sapiens
aagggttaatgtatttttctatagctattttttgttttgttttgttgttttgctaaaaagctcgccttctccacttccaaagcaaagttaggctttggaattgcttgctggaattctcactgcttggctgcatcattttattcatttggttaaatgttttttgttagcagacggaagagctccaccacattaatgaggccaaaagcaatgactcatcygcgtctggaagtgctgattttaccctcatgggattgagagtagaaacctttttaatcaagacgatccgccctgctgccatggtgataggaagcaagttttcacaggtagttagaattggatgacacttcagcatttctcaggggagaaagataccactaccagcaactcctctctgatcccaaatgctttcaggaacgaatttcttgccctaatgatggttcttaattaggagtcacagtattaggtcactcatgtctgaaaaactgttgtttcacccttacacttcttaaactttgctctaataaagattataatgatgttacctactggacactatcatttggaaaaaatgacttaaaaagttgctttttttaaaagagcatcttcaagcccaaatctgaaaaaggttattaatagtgacaactttttaaaaattcatatttttcttatatcagaagtaattcgtattaagtatagagcatttggaaaattcaaaaaagcataaatagtaagatagaaattatcagtagccacaatagtcacaaatttttattaatgaagacttaatggatatttttccttgtttcttctatttatatagatgcttttctgttattacaaaaaataacttggttacataaatatgtctttgtattgctttttcaattaatgtataaaatgtcactctatgaattcatattatacattttatattttatgatatccccatgtattagctaggatactgctatctgctattctaaatatgcttccaactctcagtgacttaacccaacagaagtttgtttctttcacatgtagcaaaccaatgtgggcccgtctggtctgcaggcaacattccatgcatggattcaaggatctaccttcttccatttttttttttttttgccttccagatggagaaagagaaaatggaaaatgcacacctattttacagattctaggtctgaaagtggcccacatcatctccactcaaatcacattcatattgttgggaactatcacaaggctccacctggtcacacaggaagctgaaaaacgtagtctctagatgggcagctgattctcagcgataactcttttcaatggaagggaagcacatagttttagtgatcttacatggtccaccatgtaagtggatcatgaagtgtttcttacatgtccacccaactgggcaaccaatatccatgtgcaaacatctttctaaacacaatacaactgctttctttccgaggagccgtgtaagagtacactatgtaagatggttcctccaatcactacaccgtcaaaatcctagatttctaggtcatgaggctgtctctccaccaggcttgaatgtggctcctcccaagttggcaacatttgacttaaaaggcacctctgaccccctgtcatggaggggcatgaatgggatagctagaagtgtgagaattaatgccttatatgtcaatattatttagataaatattgtggaccacaatttgttgcttgttccagcaaaattttgactaggaaagacaagtctgtaaatcaagaaacaacttcatagtttgcctcaggaaatttcc

SEQ ID NO: 64596 - DNA, 614 bp, Homo sapiens
tttaggtcactccatagaacagaaacagatgcccattgtgaaggttcagtgagccaagattgcaccactgcactccagcctggacaagagagcaagaccctgtctcaaaaaaaaaaaaaaaaaaaaaaaaaagaaagaaagaaagaaagaaagaaaaaaacagatgcccatcaaaaggaaatgcattttgctgaaagtagcrcagttttcccagggaaataacatttgagccgagccttgaaagatgagtaaaagttcgtcaagctgaaaaatttcatcgtaagatgagtcgaacacagggtcattgtgagccgttggctggcccccgcagaaacctggcagcccctttcaggtgaacctccagtccattctttattcaggcaccagtaggatgctgtgctgggtggcattcctgccccagcaggggctaggcctgagtcacatgcagggcaggggcctggtcacagcctggggcctcacctgagaaagacctgtgagaaaacattccaatcccactcattcctgcccacaccagggctaggcacgtggggacagcagggacggtgaagagcatgtttgggaatgtgatgttctgtggtggcttgttaggaaat

SEQ ID NO: 64597 - DNA, 819 bp, Homo sapiens
ttgtccaggctggagtgtagtggcgtaatctccgcttactgcaagctccacctcctgggttcacaccattctcctgcctcagcctcctgagcagctgggaccacaggtgcctgccaccacgcccggctaatttttttgtattttttagtagagacggggtttcaccatgttagccaggatggtctcgatctcctgacctcatgatccgcccgcctcggcctcccaaagtgctgggattataggcgtgagccaccgcgcctggcccccattatctgtttttatcttcaaacacccctgaagagtgggtatccccatcctgggctgggaaacctggccaggttctgtccccaaccgtggcatgatggggtgggaggtcagagggccatcccctgctgtcactccttgtacctgcagagcctctyagcatgcgccactgtgcagggcaccccacaaactttacctcatttctctgcacccgtgaaatcggtcttgtcaaagcccttctgcagataggagaattgacgctcagagaggttaagaaaactgttccaaaacaagccaataatggggcagattccacatttgagtcttagagtctttctgactcaaagacttattatgttctttgctcttctctaagcctgtgatgtgcgggtgaggagggaaaggtgcaaatgaaactataaggcaccatctgtgcttgccagagccagtggtggggggcggacttgaagtgaaacgtttacaagccgttgtgactaagtgtcaaaagtgggcaaaatggcaagggctgtgaaatcagaggtaggtggaaactcc

SEQ ID NO: 64598 - DNA, 1365 bp, Homo sapiens
tgaacagttttctrttaacctaaataattcccatttctagttcctttttccaacatggcactgggtgatcaaacaatgcctacttgaccctgagcaaaaatgtttttttctgcatgctgcatgcaggtatatttgaaaaacattaagaatatgagcctaaattgatattttttaaattatttagggatgaacaagaacaaaagggaggacaaaaaggctagaaaaattgctactacattttccagaaatggagaatcaataaactctgagctgggtattttaagaaaggaaacaataggtttccacaagatgtttcttagaaatccaaatgagcctagaaatttccagtggtttaattgtggggccaaaatagttctatactagtgactgaatataaaagggttgattaaaatgcttttttagtagttcgtatccttgaaagtaaagtctctgctacaacctgtgccaataagagccagtaaacagctaattacattataacatgggttttttaattgttaattataataaaagaagcaacaacccaacaataatttgccagtccgtacatctgtgaagtttaaatgggaaaattgcctcttgtctcagcaaggatgtaattgattcttgggcacttaacgatataatactagtttctgcctgttcttctttcttccttcaaagagctgacaccattatgtcactgatataaatggaatcttgaaggtacatcaaaaattctgtctttttaggaaaaaaaaaaaaagccattgtggctctttagtgtggagcaggtgcgtagtcaagaaggattgatccctgggtcaaggtcagagttcagctccagatggagtttttcacccttttctatggggtggatggagcatatcttgtcatgttagcaacagtcattgtgaaccttctaaaatgttttaaagtaacattttaggactgtcaaatgagagagtaaaaaggccttgtcagaggctatctgttctcatgtcaaccgaagctaactggaaaagaactctgggttcttgaaactgaatttgattagtggagatggaccagaaaagtgtgcatcaaaaaggacttgcaaaatattagcctcactacccattctcaaactcaaacagccccttatatttcattttttcagtttgacattaagtacccaaggagcagaaaaggaataaatgtaaagagtccacatcaaagtgctgtctatatttccattccagccagtacattgttttaattgccatttaaaaatgttcattgttaaccgacagccattcttggtagtggatatactttaattctttataataaaccatacatatatatttttaaagcttaacagac

SEQ ID NO: 64599 - DNA, 1365 bp, Homo sapiens
tgaacagttttctattaacctaaataattcccatttctagttcctttttccaacatggcactgggtgatcaaacaatgcctacttgaccctgagcaaaaatgtttttttctgcatgctgcatgcaggtatatttgaaaaacattaagaatatgagcctaaattgatattttttaaattatttagggatgaacaagaacaaaagggaggacaaaaaggctagaaaaattgctactacattttccagaaatggagaatcaataaactctgagctgggtattttaagaaaggaaacaataggtttccayaagatgtttcttagaaatccaaatgagcctagaaatttccagtggtttaattgtggggccaaaatagttctatactagtgactgaatataaaagggttgattaaaatgcttttttagtagttcgtatccttgaaagtaaagtctctgctacaacctgtgccaataagagccagtaaacagctaattacattataacatgggttttttaattgttaattataataaaagaagcaacaacccaacaataatttgccagtccgtacatctgtgaagtttaaatgggaaaattgcctcttgtctcagcaaggatgtaattgattcttgggcacttaacgatataatactagtttctgcctgttcttctttcttccttcaaagagctgacaccattatgtcactgatataaatggaatcttgaaggtacatcaaaaattctgtctttttaggaaaaaaaaaaaaagccattgtggctctttagtgtggagcaggtgcgtagtcaagaaggattgatccctgggtcaaggtcagagttcagctccagatggagtttttcacccttttctatggggtggatggagcatatcttgtcatgttagcaacagtcattgtgaaccttctaaaatgttttaaagtaacattttaggactgtcaaatgagagagtaaaaaggccttgtcagaggctatctgttctcatgtcaaccgaagctaactggaaaagaactctgggttcttgaaactgaatttgattagtggagatggaccagaaaagtgtgcatcaaaaaggacttgcaaaatattagcctcactacccattctcaaactcaaacagccccttatatttcattttttcagtttgacattaagtacccaaggagcagaaaaggaataaatgtaaagagtccacatcaaagtgctgtctatatttccattccagccagtacattgttttaattgccatttaaaaatgttcattgttaaccgacagccattcttggtagtggatatactttaattctttataataaaccatacatatatatttttaaagcttaacagac

SEQ ID NO: 64600 - DNA, 1365 bp, Homo sapiens
tgaacagttttctattaacctaaataattcccatttctagttcctttttccaacatggcactgggtgatcaaacaatgcctacttgaccctgagcaaaaatgtttttttctgcatgctgcatgcaggtatatttgaaaaacattaagaatatgagcctaaattgatattttttaaattatttagggatgaacaagaacaaaagggaggacaaaaaggctagaaaaattgctactacattttccagaaatggagaatcaataaactctgagctgggtattttaagaaaggaaacaataggtttccacaagatgtttcttakaaatccaaatgagcctagaaatttccagtggtttaattgtggggccaaaatagttctatactagtgactgaatataaaagggttgattaaaatgcttttttagtagttcgtatccttgaaagtaaagtctctgctacaacctgtgccaataagagccagtaaacagctaattacattataacatgggttttttaattgttaattataataaaagaagcaacaacccaacaataatttgccagtccgtacatctgtgaagtttaaatgggaaaattgcctcttgtctcagcaaggatgtaattgattcttgggcacttaacgatataatactagtttctgcctgttcttctttcttccttcaaagagctgacaccattatgtcactgatataaatggaatcttgaaggtacatcaaaaattctgtctttttaggaaaaaaaaaaaaagccattgtggctctttagtgtggagcaggtgcgtagtcaagaaggattgatccctgggtcaaggtcagagttcagctccagatggagtttttcacccttttctatggggtggatggagcatatcttgtcatgttagcaacagtcattgtgaaccttctaaaatgttttaaagtaacattttaggactgtcaaatgagagagtaaaaaggccttgtcagaggctatctgttctcatgtcaaccgaagctaactggaaaagaactctgggttcttgaaactgaatttgattagtggagatggaccagaaaagtgtgcatcaaaaaggacttgcaaaatattagcctcactacccattctcaaactcaaacagccccttatatttcattttttcagtttgacattaagtacccaaggagcagaaaaggaataaatgtaaagagtccacatcaaagtgctgtctatatttccattccagccagtacattgttttaattgccatttaaaaatgttcattgttaaccgacagccattcttggtagtggatatactttaattctttataataaaccatacatatatatttttaaagcttaacagac

SEQ ID NO: 64601 - DNA, 1365 bp, Homo sapiens
tgaacagttttctattaacctaaataattcccatttctagttcctttttccaacatggcactgggtgatcaaacaatgcctacttgaccctgagcaaaaatgtttttttctgcatgctgcatgcaggtatatttgaaaaacattaagaatatgagcctaaattgatattttttaaattatttagggatgaacaagaacaaaagggaggacaaaaaggctagaaaaattgctactacattttccagaaatggagaatcaataaactctgagctgggtattttaagaaaggaaacaataggtttccacaagatgtttcttagaaatccaaatgagcctagaaatttccagtggtttaattgtggggccaaaatagttctatactagtgactgaatataaaagggttgattaaaatgcttttttagtagttcgtatccttgaaagtaaagtctctgctacaacctgtgccaataagagccagtaaacagctaattacattataacatgggttttttaattgttaattataataaaagaagcaacaacccaacaataatttgccagtccgtacatctgtgaagtttaaatgggaaaattgcctcttgtctcagcaaggatgtaattgattcttgggcacttaacgatataatactagtttctgcctgttcttctttcttccttcaaagagctgacaccattatgtcactgatataaatggaatcttgaaggtacatcaaaaattctgtctttttaggaaaaaaaaaaaaagccattgtggctctttagtgtggagcaggtgcgtagtcaagaaggattgatccctgggtcaaggtcagagttcagctccagatggagtttttcacccttttctatggggtggatggagcatatcttgtcatgttagcaacagtcattgtgaaccttctaaaatgttttaaagtaacattttaggactgtcaaatgagagagtaaaaaggccttgtcagaggctatctgttctcatgtcaaccgaagcyaactggaaaagaactctgggttcttgaaactgaatttgattagtggagatggaccagaaaagtgtgcatcaaaaaggacttgcaaaatattagcctcactacccattctcaaactcaaacagccccttatatttcattttttcagtttgacattaagtacccaaggagcagaaaaggaataaatgtaaagagtccacatcaaagtgctgtctatatttccattccagccagtacattgttttaattgccatttaaaaatgttcattgttaaccgacagccattcttggtagtggatatactttaattctttataataaaccatacatatatatttttaaagcttaacagac

SEQ ID NO: 64602 - DNA, 729 bp, Homo sapiens
taaagcttaagtttattaacttcacagagaatccacttctgcttggaaagcttctctgcccagtgccaaaaaggcattaagaagttgagggtaaagaaaatggacaaccatttatcatatggtaggtgtcactgaccaagacagaaattttaggttcttatttggtctttgaacccctgaggtgtgctgccttactgaatcaaacytgagccaagcccagctttctcttaagggcagggccctcatctttgtcttgttcaccaaatacctacccaagaaagtgcatcaataaatgtctgctgaatgaatgactatctggatgactgtgaatgaggaaatatagaaataaattcacactccttttttagactgagtgtcattgtttaccttctccaaagaactctttgcaaaatgttttgagctatgtgaagaaaggcttcatctaaacttattcatgaagcaggccaactagattgtgtcagagggctactaaagtcattctcttattggatgaaaaaatactctagtcataattaagaaacattaaactatatttataatcaaatattctttaaggggattggctttttcttctgggttgagtgggttttgctctcacgcacccagaaaaggccagacagtgtgttgtttgatctattttgttaaccttctcctctggcttatgttaccttaagttgacctttcaagtgctttgtcttctggcaaata

SEQ ID NO: 64603 - DNA, 729 bp, Homo sapiens
taaagcttaagtttattaacttcacagagaatccacttctgcttggaaagcttctctgcccagtgccaaaaaggcattaagaagttgagggtaaagaaaatggacaaccatttatcatatggtaggtgtcactgaccaagacagaaattttaggttcttatttggtctttgaacccctgaggtgtgctgccttactgaatcaaacttgagccaagcccagctttctcttaagggcagggccctcatctttgtcttgttcrccaaatacctacccaagaaagtgcatcaataaatgtctgctgaatgaatgactatctggatgactgtgaatgaggaaatatagaaataaattcacactccttttttagactgagtgtcattgtttaccttctccaaagaactctttgcaaaatgttttgagctatgtgaagaaaggcttcatctaaacttattcatgaagcaggccaactagattgtgtcagagggctactaaagtcattctcttattggatgaaaaaatactctagtcataattaagaaacattaaactatatttataatcaaatattctttaaggggattggctttttcttctgggttgagtgggttttgctctcacgcacccagaaaaggccagacagtgtgttgtttgatctattttgttaaccttctcctctggcttatgttaccttaagttgacctttcaagtgctttgtcttctggcaaata

SEQ ID NO: 64604 - DNA, 647 bp, Homo sapiens
cagtgggtccacaaagacagggtgaacaaatagctcctgacagttctttccttccactgcacgctgtgactctcaggctgcccttgcagacctctgcggaggcacaatttacatgttgtgaatcwcgtcagtttcatacaggacttcagagtccctctgtcttgagagctgaaacatcatgtatttaaaaaatggaaagatcaatgctaatggcctgaggattttgccgggcttggttcttctccttgcctctactctctggaaagccatcattaaaaactcaagatatttgccaaacactgtgccagtcctgttctaagcactggggacagaagaacaagtaagaaagtcacagccctgcacttctgtgcaggagtctagttggggtcagatggtaaagaggcaatcacagggcagagtgatccagaggcaactgacagtgaaatccatggagagaaacgctcctgtcactacacatggtatggactccccagcagtcagcggcactcgggtctgggaagagctgccagagggtgatggccatccctgcctgtatttctcagattcatggcaatgacatgagggttacaggccctgtggaagactgtgtattctcacacaggtcattctaaatggtttacatttta

SEQ ID NO: 64605 - DNA, 1769 bp, Homo sapiens
  misc_feature (1)...(1769): n = A,T,C or G
gactaggtttctctgggcacagcatgtgccagctcccatactccctcttcctctctctttcacagattgtgctggcaatgcctttctctgtccatttgtccatcagcacataggtcttacagatcattctttcaaaagatcccacccatttcgctgtggccagagaaggtggtagttttgcagtgttcagggcagagggcgcaagagggtggacagacctgctggcccaggcttctacctgtctgcacattactaatgtaggatctgggtatgcagctggtctttcttggcatctggggctggggtttgggcttggggtgccctgcccagcatggttcctctccctccagcagacaggcagcctcaggccccttggggtctcagaacacctccttgggaagaccyatccctctcttctgagggaggagatatcagcttcttctcttactcctttccatactcctccccctgccaggcacagtggatacacttgtctgaaggcctgaagtcttctcacactgggcctttaagagcctggcctcttaccccatcaaatctacccttgagcaggaacctgggggaatgcaggaactgagataactgtgattgaatctcaaactttgaataactgactttactctctgggctgcagttccatcatctgcaaaatggagtggtaatatagcacctacttcaaagattntgtgagattaacaaatcaatcctatcacatgctttctatagagtcttccacataataagggctccaaattagggctgtttatacatggaagtaaataactaaaccaatggcaaagatcaaccttctggtatgggagatgtgaggggagcaaagtgtgtcttgattctcaaaatccagcaaagtcaaccacaaatgcctctgcagctcctgagcttcctacttccagtcattgggttgtggccctggaatgggccttcatgggtcggctctagtccctcctgtagcaccaggatgtgccatgtatgcatctcagggtctttatgtttcccctccacccatgtcccacatgttgttccttcagctcctgctaccccacccttctctgttcagtaagctgcttctaccacgtcttcctcctacctaggtttgagaccatctcccaacaactctaagcccagccatccatggcccagtgatgtacactagaaagcagggcatgctcatcagaggacctaggcttcagaaaaacagagtgggtgagagggacggctgacatcagagcagggagaggggcaagtctgtgactgcaagtcaaaggcatggtggctgaggggttcagagagcaggaatggtcccagatatgtgggtgagaaagagagaacaaacctgggagcaggatattgtaagctgatgctgcccaagactgccactcctgcataagggaatggcaggtcctcacaccagtggcctgcagccttccctggaggctgagacttgtcccacggggtccaaagcccactctccccttctctccctgtccatggttcctttggcaaaatacattctggaatctacttctctttctttcttttttatcttaagcagttttatggaggtataattaacatatcataaaattcattgtaaattattcaatgaatttgagtaaatttatgagttcaatgattcttggtaaatttgtagagttctcaccacaattaaattttagagcatgtctaccaccccgtaaatgtccctcaggccccataactgctcctacccccta

SEQ ID NO: 64606 - DNA, 1334 bp, Homo sapiens
  misc_feature (1)...(1334): n = A,T,C or G
tgaaacctggatttcatcatcattaggctaataatcattataatcctatgaaacttcattattgaattccccctttaccatttccacatgtaacactcatttgttaataactaagataaaggtccataaaacaatattgctcccatgtaacacagcttccttctcattytcagtaagaatccagactttcatcagaggaatctaagtgcttcaccaagatgtgtcaattatttcaagatgacaggtattcgattcccaaattcatcagtgggggctaaaaatgtatcggttcatcaagcaaagcacatttctggaagcactctcaccatttgggaatcaaataataattgcaataccaacaccttgactttctaatggaatttttcaggagctaaagggttttgacacattcccccaacaacccactctcagatttatcttctttgtaggcttttgcaatagtaaaggtactggttttatttttctcattttgcagaagaaactcagattctcaattcagaagttgagtgacttacataagcaaagcatgctggaggcaaaaaatagagaacagctctttcactgtgaagctccaaccacttgactatacagcttcagcaacatcactccttgaattcaagccctgagctggccctctgactttacagagaagagtaagctggagtccccattctcaaagaatacaaaactcagtggaagaaccaaatgttaaaaatgagaatnnnnnnnnnnnnnnnnnnnnnnnnnnnnnnnnnnnnnnnnnnnnnnnnnnnnnnnnnnnnnnnnnnnnnnnnnnnnnnnnnnnnnnnnnnnnnnnnnnnngccttcagatgttcatccgctcttttatccttttgagttaatttttgtattgcgctctcttaagtaatcaattcaattaaaaacaaaacaaaacctctgagttgggtcaaatcaaataggcacatgggtcaccagttttgcaagttctgagcaggggatttcatagtgctctctgctactcttctgtcaggcttacagtcttttttgagttattggggagtaacccaggccccaaggaagacagtttggaacaagacttaccgtagtagtaggtactgatgggagctgtcctagggcaggcaaatatgctggctcccctgatgagaaaggccatatgaagatgaatgtgcttgcaagccggcttcacagctgggtgaggccttaccaggtgggattgaaactgatcccaggttctgggggtttcaggcctggcatgctcacctatacatatccttccagagcccaagtgctgccctggtttctggagatct

SEQ ID NO: 64607 - DNA, 1194 bp, Homo sapiens
cattgcaaatgtttacatgaaataaattaacacttgtagcactacaaaaatacaatgactacatgtgtgccagccccaagagattaacaggattcattaaaaatattaattcttagtgcactatatgttttatagccttgtcaaatgacacattttaaatttctaaaactctttataaactttccaatactgccagtgaatgaatgtgactactgatataatccatttaaagtcaacggctgcacactaaacctgaggcccctccagacttccaggtgcacctgaggggttaatgagaaggaatggaaaggagcgttttcaggaggaatactgtgagtccctgggcrtatacttcggcaatcatggagactagtctttggtctgaacatccagggagcagtgattcagcatccttaagtgatttctaaagaagtacattaaacaatgctttttgggcttattgaagacccccagggcaacctcagaaatcagtggaggagatagcacaacagaaaaacaggacttctggtcagcagaaacaatcatttttgttaatattaacccacagagagagaggtctgtagaaaatcagtttacaacaggatgagcttttcctcagttcaaatctatacacattgattgaactcaggaacttgatctagaaggtactttcattccccctctttactcagtaaaggttacatacactacaaggctggaattaagtaattcttctactaagagtccagtcactttttctgttcatcaaacagaaagtataaatgaaatattcttctgtgatggggatggatggaagggatttggtccaagcaggtgtaaagaaaggtccctgctcacagggagccaggaagcattatccaatgaagaagaaaattctaacacattagaggctaacctggagcactgactcccaaatacaatgggatacttaaaagagaggtcatccacatttcagggctacaatgctcagaggagtaggagcaaattatccaaagtactgtgcagggacagtagtgattgcctccttccacaattattggggagaatattgggagaaatgcaccccttctcacatccctatccagagagtgtagctgcctttccccgtttttggcagggagactgctcttccctctatattatataatgggagaagtgatgtagccaatgcat

SEQ ID NO: 64608 - DNA, 381 bp, Homo sapiens
actctgtaaaatgtttgttatgtattatgaaacacgcattgtatataatagagtacatgtagagtattttaaataagcattataattgaataaaatatatacaatcagccctctgtatttgtaggttccacatccatggattcaaccaacctcagatcaaaaatatttaaaaaagaaatttcatctgtactgaacaagtagacttgtcattattccctagacaatatagtgcaaaaactatttatatatgattaacattatattaggtattataagtaatctagaggcacaggggytcatgcctgtaatctcaacactttgagaggctaaggcaggaggattgcttgaggccaggagtattgtattttttttgtagagaca

SEQ ID NO: 64609 - DNA, 381 bp, Homo sapiens
actctgtaaaatgtttgttatgtattatgaaacacgcattgtatataatagagtacatgtagagtattttaaataagcattataattgaataaaatatatacaatcagccctctgtatttgtaggttccacatccatggattcaaccaacctcagatcaaaaatatttaaaaaagaaatttcatctgtactgaacaagtagacttgtcattattccctagacaatatagtgcaaaaactatttatatatgattaacattatattaggtattataagtaatctagaggcacaggggctcatgcctgtaatctcaacactttgaraggctaaggcaggaggattgcttgaggccaggagtattgtattttttttgtagagaca

SEQ ID NO: 64610 - DNA, 535 bp, Homo sapiens
tctcttccccacgtgcctcctttcagtcttacctgccccatctgagagctcctaaaccccatcagtcctgactcaggaatcaggaggytccttacacctgtggccaattggcccaagaggactcaggctcaataaagggtgtcaacagtccaacagaccctctctaaactgccaaacacaccaacactcacacacaacccccttccccactacacacacaattctggttctccaaacttcaagttaatcagtgcccagaaaagggtaacacagatagccaaaatgagccccaaatggagggtgccaccatggtgagaagtacggatctaaggtcaggtgaacccagtagaagagaaggggaatttacattatgaaaaccaaaggtccctgatgctttcagccagttccaacaggctatcgtgtacagttgtacagactgtgcactgcacaactctaagaaaggcccattcacctagacttgtacacccatttcaaggattctctggccgagagcagtcaagtccatcccttgtct

SEQ ID NO: 64611 - DNA, 577 bp, Homo sapiens
cctggtattgaattccagctctgcctcttactacctaggtggcttggctggtttcttagccttgctaagctctagctttgttatctataaaatgggaagaaaaataactgctacactgagttgttgcattagatgtgactgatcaggtaatgcatttagtgtaatatctatcacatggtaggaattcaacaaacttcagcygctatgatgaaactgccactcccattccacctcccgacaaaatgttgaggtttccctatgtccgagcacggacaacactgtgttgaaatgatcatatgacagcctgttgcaccactacacagaaaagctgggtctccatctccagtgcctaccttgccataagttctcaataagtgtttgacatgaatgcagtgggaacatactacacatggggccagctcactttttccctatcaatatggcttggaagagatccacgtaacctttccaggcttctggaaatttctctgtaacatgatattccttgtggtttgttctgtccttgatttgtctattcaacccctcactcttcaaaactaaaccagtcacttaggga

SEQ ID NO: 64612 - DNA, 577 bp, Homo sapiens
cctggtattgaattccagctctgcctcttactacctaggtggcttggctggtttcttagccttgctaagctctagctttgttatctataaaatgggaagaaaaataactgctacactgagttgttgcattagatgtgactgatcaggtaatgcatttagtgtaatatctatcacatggtaggaattcaacaaacttcagctgctatgatgaaactgccactcccattccacctcccgacaaaatgttgaggtttccctatgtccgagcacrgacaacactgtgttgaaatgatcatatgacagcctgttgcaccactacacagaaaagctgggtctccatctccagtgcctaccttgccataagttctcaataagtgtttgacatgaatgcagtgggaacatactacacatggggccagctcactttttccctatcaatatggcttggaagagatccacgtaacctttccaggcttctggaaatttctctgtaacatgatattccttgtggtttgttctgtccttgatttgtctattcaacccctcactcttcaaaactaaaccagtcacttaggga

SEQ ID NO: 64613 - DNA, 2937 bp, Homo sapiens
accaagcacacaaagataatgcactaaaggtgtgggcgacagaatcagacacatggactcattccagttctgccacttcccagttgtgtttcccagggctaagttcataacacctctaagcctcagttcctcatctgggataataaaagcatgaacctcacacagttgccatgaagattaaatgagatcatatatgtaaagctcttagcaaagtgcctggcacatggtctaaacattcagcaatgggtgtcttcactcttacttgaattactgccatagaactgaaacagagtcttagagatcatctacagttgacccttggccaacacaagggccaggagtgcygacccctgcccccacacagttgaaaatccacatataacttttgactccctcaaaacttaacacccttaaaacttaactgatagactacaattggttggaagccttactagtaacataaacaacacatattttgtatggcatatgtatcatatactgtattcttacaataaagtaagctagagaaaagaaaatgttaagaaaatcataaggagaagaaaacacattaaatattcattaagtggaagtggatcatcaaaaaggtctccatcctcaagtcttcatgctgagtaggctgaagaggaggaggaaaaggaggtcttgctgtctcaggggtattttatggaagtaaatgataaaagagactagtatctacacatattttatgcattcatgacatacctttttcttaatttttttggcatttctaggccatgcggctcatctgtgagccttttcaaattgttgtacatttcccccgcaaaaataatcccaatatgttcgttgaacaaaatctgtgtaaaagtggacctatgcagctcaaacccacatcattcaagggtcaaccatagtaaacaagctgatttcacagaagaggaaacatgctccaaaggggctccagcggcagaagcagcaggaggaggctggctggtgactcctacctggtgcagtttccatcagaacctggacccaccctgattctctgtgctctgatgactcagggccctcccaggactcagagagagtctgcagaaggagcagtcaggtgattctctcccctggacacatggtgagttgagatatttattgaataaatgcagagaagaccagaccagaggggtgcttcttggccctaagagaacatgtattcccccagaaacataaaggggcaccacccaggagaattaattaatccagtactgttcatctctttcaacaggccttcctgggaaggtcattccagactgtttattagttaggctttctttccacactatggtagctttctccccttcccgagatccacgcagatgaatttcctgctaatggcatcctcatcatgccgatacccaaaggttattttgcaaagatgcaattcagaaatagctttacatgtgcacgcatctgaacaaaaaatatactccttgatgcctgcctgatgcttcagctgagggcagctgcttgacaacagcttgacaacagggaagatgagagagagatgcagagaaaggaaaagagagagagagaaagagcctaaggagtgtggataccaatgggagcaacacaatcaatcacttctaaagggcgcatttgccctggagaaaaggtttaaggaaataagcaagcagatttaatgaaaaattctgagtctattgattgaaatctgtttgccttttcttactattcaagaacacgacatttttgcattaggcaattggtttatgacttatgtaaatagaaaacataaaaacttttcaagagatgagaaatttcaggaaagatgtttcattcaattgctctgcagtgctcctgtctccttccctgttgtctttgtgataagactggtccaggccccttcagactgaagcccctctctgctccactgctgataacgatcacaaacaaagacaataaagagctgctctcaatatgcatcacacccacctctctcagaagctgctccctctgcctggaaccccgcttcctctggactctttaccatcctcttgtccaccactgttagcctagaaggcagcattccaacactatctcctgccaggagccttgtctggtgttcccacacagcattaaggggttcctccagtgggttccaatggcgttttgttcccacccattgtgacaatgatcacaccgctgtaactaccaattccaagacacattttcccccacattttcatgttttgataggtcaatgggaccactcctattgtgaaaatgattactctgttcatactgctcaattttaaaacacttttttttcacacttgagtgtttctgaaaccagaatgttttgctaatgtggacactgagtgtggtagtgtttctaactttttttcttctgaaaatctgttagtatattgagagtacattctaagatcaaagagctgtgttacttacttgtgtgtcttgactgagaactcctagggagcagaaactgtgttccagtcatctttgtatctccatcccttagcacaaaacagttaggcagctattgctcagtaaaggttggagggagtgaggaatggggggtggcttctttttgtgttgctataacagaataccacaggctgagtaatttgtaaacagaaatttattgtctcacagttctgaaggctgagaagtctgaggtcaaggcatcagcaggttcgatgtcagatgaagacattctgttcttccacgatggtgccttgcacgttgtgtcctcacatgatggaaggcaggatgagagagagcccactcccagaaaccctttatatggcagcattaatccattcatgaggggagagccctcatgacctaaacacctcccattaggtcccacttcacaacacttgccttggggactatctaaca

SEQ ID NO: 64614 - DNA, 2937 bp, Homo sapiens
accaagcacacaaagataatgcactaaaggtgtgggcgacagaatcagacacatggactcattccagttctgccacttcccagttgtgtttcccagggctaagttcataacacctctaagcctcagttcctcatctgggataataaaagcatgaacctcacacagttgccatgaagattaaatgagatcatatatgtaaagctcttagcaaagtgcctggcacatggtctaaacattcagcaatgggtgtcttcactcttacttgaattactgccatagaactgaaacagagtcttagagatcatctacagttgacccttggccaacacaagggccaggagtgctgacccctgcccccacacagttgaaaatccacatataacttttgactccctcaaaacttaacacccttaaaacttaactgatagactacaattggttggaagccttactagtaacataaacaacacatattttgtatggcatatgtatcatatactgtattcttacaataaagtaagctagagaaaagaaaatgttaagaaaatcataakgagaagaaaacacattaaatattcattaagtggaagtggatcatcaaaaaggtctccatcctcaagtcttcatgctgagtaggctgaagaggaggaggaaaaggaggtcttgctgtctcaggggtattttatggaagtaaatgataaaagagactagtatctacacatattttatgcattcatgacatacctttttcttaatttttttggcatttctaggccatgcggctcatctgtgagccttttcaaattgttgtacatttcccccgcaaaaataatcccaatatgttcgttgaacaaaatctgtgtaaaagtggacctatgcagctcaaacccacatcattcaagggtcaaccatagtaaacaagctgatttcacagaagaggaaacatgctccaaaggggctccagcggcagaagcagcaggaggaggctggctggtgactcctacctggtgcagtttccatcagaacctggacccaccctgattctctgtgctctgatgactcagggccctcccaggactcagagagagtctgcagaaggagcagtcaggtgattctctcccctggacacatggtgagttgagatatttattgaataaatgcagagaagaccagaccagaggggtgcttcttggccctaagagaacatgtattcccccagaaacataaaggggcaccacccaggagaattaattaatccagtactgttcatctctttcaacaggccttcctgggaaggtcattccagactgtttattagttaggctttctttccacactatggtagctttctccccttcccgagatccacgcagatgaatttcctgctaatggcatcctcatcatgccgatacccaaaggttattttgcaaagatgcaattcagaaatagctttacatgtgcacgcatctgaacaaaaaatatactccttgatgcctgcctgatgcttcagctgagggcagctgcttgacaacagcttgacaacagggaagatgagagagagatgcagagaaaggaaaagagagagagagaaagagcctaaggagtgtggataccaatgggagcaacacaatcaatcacttctaaagggcgcatttgccctggagaaaaggtttaaggaaataagcaagcagatttaatgaaaaattctgagtctattgattgaaatctgtttgccttttcttactattcaagaacacgacatttttgcattaggcaattggtttatgacttatgtaaatagaaaacataaaaacttttcaagagatgagaaatttcaggaaagatgtttcattcaattgctctgcagtgctcctgtctccttccctgttgtctttgtgataagactggtccaggccccttcagactgaagcccctctctgctccactgctgataacgatcacaaacaaagacaataaagagctgctctcaatatgcatcacacccacctctctcagaagctgctccctctgcctggaaccccgcttcctctggactctttaccatcctcttgtccaccactgttagcctagaaggcagcattccaacactatctcctgccaggagccttgtctggtgttcccacacagcattaaggggttcctccagtgggttccaatggcgttttgttcccacccattgtgacaatgatcacaccgctgtaactaccaattccaagacacattttcccccacattttcatgttttgataggtcaatgggaccactcctattgtgaaaatgattactctgttcatactgctcaattttaaaacacttttttttcacacttgagtgtttctgaaaccagaatgttttgctaatgtggacactgagtgtggtagtgtttctaactttttttcttctgaaaatctgttagtatattgagagtacattctaagatcaaagagctgtgttacttacttgtgtgtcttgactgagaactcctagggagcagaaactgtgttccagtcatctttgtatctccatcccttagcacaaaacagttaggcagctattgctcagtaaaggttggagggagtgaggaatggggggtggcttctttttgtgttgctataacagaataccacaggctgagtaatttgtaaacagaaatttattgtctcacagttctgaaggctgagaagtctgaggtcaaggcatcagcaggttcgatgtcagatgaagacattctgttcttccacgatggtgccttgcacgttgtgtcctcacatgatggaaggcaggatgagagagagcccactcccagaaaccctttatatggcagcattaatccattcatgaggggagagccctcatgacctaaacacctcccattaggtcccacttcacaacacttgccttggggactatctaaca

SEQ ID NO: 64615 - DNA, 2937 bp, Homo sapiens
accaagcacacaaagataatgcactaaaggtgtgggcgacagaatcagacacatggactcattccagttctgccacttcccagttgtgtttcccagggctaagttcataacacctctaagcctcagttcctcatctgggataataaaagcatgaacctcacacagttgccatgaagattaaatgagatcatatatgtaaagctcttagcaaagtgcctggcacatggtctaaacattcagcaatgggtgtcttcactcttacttgaattactgccatagaactgaaacagagtcttagagatcatctacagttgacccttggccaacacaagggccaggagtgctgacccctgcccccacacagttgaaaatccacatataacttttgactccctcaaaacttaacacccttaaaacttaactgatagactacaattggttggaagccttactagtaacataaacaacacatattttgtatggcatatgtatcatatactgtattcttacaataaagtaagctagagaaaagaaaatgttaagaaaatcataaggagaagaaaacacattaaatattcattaagtggaagtggatcatcaaaaaggtctccatcctcaagtcttcatgctgagtaggctgaagaggaggaggaaaaggaggtcttgctgtctcaggggtattttatggaagtaaatgataaaagagactagtatctacacatattttatgcattcatgacatacctttttcttaatttttttggcatttctaggccatgcggctcatctgtgagccttttcaaattgttgtacatttcccccgcaaaaataatcccaatatgttcgttgaacaaaatctgtgtaaaagtggacctatgcagctcaaacccacatcattcaagggtcaaccatagtaaacaagctgatttcacagaagaggaaacatgctccaaaggggctccagcggcagaagcagcaggaggaggctggctggtgactcctacctggtgcagtttccatcagaacctggacccaccctgattctctgtgctctgatgactcagggccctcccaggactcagagagagtctgcagaaggagcagtcaggtgattctctcccctggacacatggtgagttgagatatttattgaataaatgcagagaagaccagaccagaggggtgcttcttggccctaagagaacatgtattcccccagaaacataaaggggcaccacccaggagaattaattaatccagtactgttcatctctttcaacaggccttcctgggaaggtcattccagactgtttattagttaggctttctttccacactatggtagctttctccccttcccgagatccacgcagatgaatttcctgctaatggcatcctcatcatgccgatacccaaaggttattttgcaaagatgcaattcagaaatagctttacatgtgcacgcatctgaacaaaaaatatactccttgatgcctgcctgatgcttcagctgagggcagctgcttgacaacagcttgacaacagggaagatgagagagagatgcagagaaaggaaaagagagagagagaaagagcctaaggagtgtggataccaatgggagcaacacaatcaatcacttctaaagggcgcatttgccctggagaaaaggtttaaggaaataagcaagcagatttaatgaaaaattctgagtctattgattgaaatctgtttgccttttcttactattcaagaacacgacatttttgcattaggcaattggtttatgacttatgtaaatagaaaacataaaaacttttcaagagatgagaaatttcaggaaagatgtttcattcaattgctctgcagtgctcctgtctccttccctgttgtctttgtgataagactggtccaggccccttcagactgaagcccctctctgctccactgctgataacgatcacaaacaaagacaataaagagctgctctcaatatgcatcacacccacctctctcagaagctgctccctctgcctggaaccccgcttcctctggactctttaccatcctcttgtccaccactgttagcctagaaggcagcattccaacactatctcctgccaggagccttgtctggtgttcccacacagcattaaggggttcctccagtgggttccaatggcgttttgttcccacccattgtgacaatgatcacaccgctgtaactaccaattccaagacacattttcccccacattttcatgttttgataggtcaatgggaccactcctattgtgaaaatgattactctgttcatactgctcaattttaaaacacttttttttcacacttgagtgtttctgaaaccagaatgttttgctaatgtggacactgagtgtggtagtgtttctaactttttttcttctgaaaatctgttagtatattgagagtacattctaagatcaaagagctgtgttacttacttgtgtgtcttgactgagaactcctagggagcagaaactgtgttccagtcatctttgtatctccatcccttagcacaaaacagttaggcagctattgctcagtaaaggttggagggagtgaggaatggggggtggcttctttttgtgttgctataacagaataccacaggctgagtaatttgtaaacagaaatttattgtctcacagttctgaaggctgagaagtctgaggtcaaggcatcagcaggttcgatgtcagatgaagacattctgttcttccacgatggtgccttgcacgttgtgtcctcacatgatggaaggcaggatgagagagagcccactcccagaaaccctttatatggcagcattaatccattcatgaggggagagccctcatgacctaaacacctcccattaggtcccacytcacaacacttgccttggggactatctaaca

SEQ ID NO: 64616 - DNA, 763 bp, Homo sapiens
  misc_feature (1)...(763): n = A,T,C or G
tcacacaacctcccaatataggttytgttagtccaattttacagatgtcctaggtcatactgttggtgacagtccagctggactcaaacctcggtctgcctgccttttgaaatccataccctttcaaccacaccatgtctcagtggggggggttnggcacactttacacagtgcacacacacacactcacacacacaaacacacacactcacgtgtcttatctactgtctgcagaggcaattgttttttggagaatgcaacatagaatacactgccaggtgcattcagagaagccaaatctcccataatccttcctggggatattgtttgccaagagaatggatttttgtggtgtttgtggggttttttgttttacagttttggggtttttttaaatgattaaaaaataaagcacgcagcttataacatttgagatttattctttacctggcaagcagctttgtgccgaaacagggctatactcccagtgctggcctaaccaccaggaagcctgctctgttgggcactgggctgagggatgaggggaacagcaaggttaacaaatgccaatcagccaaggacttgaccaggccaccaagtgccccaggaacatccattttttcatctaacagatatgcattcaatgcctatagggtcccaggcactagaggtaataaaatagccctaccctcaaggtgctcagtctgatgcgatggaacaaaattagtcattacaggcagagcacagttgctcacgcctgtaa

SEQ ID NO: 64617 - DNA, 763 bp, Homo sapiens
  misc_feature (1)...(763): n = A,T,C or G
tcacacaacctcccaatataggttctgttagtccaattttacagatgycctaggtcatactgttggtgacagtccagctggactcaaacctcggtctgcctgccttttgaaatccataccctttcaaccacaccatgtctcagtggggggggttnggcacactttacacagtgcacacacacacactcacacacacaaacacacacactcacgtgtcttatctactgtctgcagaggcaattgttttttggagaatgcaacatagaatacactgccaggtgcattcagagaagccaaatctcccataatccttcctggggatattgtttgccaagagaatggatttttgtggtgtttgtggggttttttgttttacagttttggggtttttttaaatgattaaaaaataaagcacgcagcttataacatttgagatttattctttacctggcaagcagctttgtgccgaaacagggctatactcccagtgctggcctaaccaccaggaagcctgctctgttgggcactgggctgagggatgaggggaacagcaaggttaacaaatgccaatcagccaaggacttgaccaggccaccaagtgccccaggaacatccattttttcatctaacagatatgcattcaatgcctatagggtcccaggcactagaggtaataaaatagccctaccctcaaggtgctcagtctgatgcgatggaacaaaattagtcattacaggcagagcacagttgctcacgcctgtaa

SEQ ID NO: 64618 - DNA, 763 bp, Homo sapiens
  misc_feature (1)...(763): n = A,T,C or G
tcacacaacctcccaatataggttctgttagtccaattttacagatgtcctaggtcawactgttggtgacagtccagctggactcaaacctcggtctgcctgccttttgaaatccataccctttcaaccacaccatgtctcagtggggggggttnggcacactttacacagtgcacacacacacactcacacacacaaacacacacactcacgtgtcttatctactgtctgcagaggcaattgttttttggagaatgcaacatagaatacactgccaggtgcattcagagaagccaaatctcccataatccttcctggggatattgtttgccaagagaatggatttttgtggtgtttgtggggttttttgttttacagttttggggtttttttaaatgattaaaaaataaagcacgcagcttataacatttgagatttattctttacctggcaagcagctttgtgccgaaacagggctatactcccagtgctggcctaaccaccaggaagcctgctctgttgggcactgggctgagggatgaggggaacagcaaggttaacaaatgccaatcagccaaggacttgaccaggccaccaagtgccccaggaacatccattttttcatctaacagatatgcattcaatgcctatagggtcccaggcactagaggtaataaaatagccctaccctcaaggtgctcagtctgatgcgatggaacaaaattagtcattacaggcagagcacagttgctcacgcctgtaa

SEQ ID NO: 64619 - DNA, 763 bp, Homo sapiens
  misc_feature (1)...(763): n = A,T,C or G
tcacacaacctcccaatataggttctgttagtccaattttacagatgtcctaggtcatactgttggtgacagtccagctggactcaaacctcggtctgcctgccttttgaaatccataccctttcaaccacaccatgtctcagtggggggggttnggcacactttacacagtgcacacacacacactcacacacacaaacacacacactcacgtgtcttatctactgtctgcagaggcaattgttttttggagaatgcaacatagaatacacygccaggtgcattcagagaagccaaatctcccataatccttcctggggatattgtttgccaagagaatggatttttgtggtgtttgtggggttttttgttttacagttttggggtttttttaaatgattaaaaaataaagcacgcagcttataacatttgagatttattctttacctggcaagcagctttgtgccgaaacagggctatactcccagtgctggcctaaccaccaggaagcctgctctgttgggcactgggctgagggatgaggggaacagcaaggttaacaaatgccaatcagccaaggacttgaccaggccaccaagtgccccaggaacatccattttttcatctaacagatatgcattcaatgcctatagggtcccaggcactagaggtaataaaatagccctaccctcaaggtgctcagtctgatgcgatggaacaaaattagtcattacaggcagagcacagttgctcacgcctgtaa

SEQ ID NO: 64620 - DNA, 996 bp, Homo sapiens
ttgtgttgttctaagattcctgaggcagattactccgttcattcccatacctatttcctgagcccctgctacatgcacagctggggccaatgagctgggagagctggagggaagggacacagcagtacttccccaacacccaatttggtgccatccatggcatgatgccacccaccctggctgagaatgtgtgaatgtcagtgtctgtcacttagaccagtgaggaggcactgaaatggtaaacccattggcatagcagtgctgggtggctgaagggtaacagacttagcctccactccacctctctgcctagaggccttgaggggcggcagctctggatctcagtgttctcatctggaacattcagggataatggtgatggcatgcagtatccgaactcagaagcagagtccccacatgtgcctcatgcattcatactggctgccccagggtaaggggtacaggagctgcaagaagcacaaaggagagaggtgtggacactccaggaactctgagctctgagctcagctctgcccatggccttggatatctcattgaacagcacttgacagacttgctttcctcccctgacagaaagaaaaaaaacaactgccaaggaatccccaagccccagcttattcaatagccgacaccaaatgccacatccattcattaatttagtaaacatggatggagtatcttctgtttgtaggtaatgcacaaggcactaggctacaaagattttttaataaaatatttttaaaataacaaaaagacacagcctcccaaaattcatgcagcattctagccaagctaaaaataagaatatttaaatttttwaagccagtgatttacctggtgtcttctggggtaaagaaataattacaaaacaatgataacaagtgttacttacaagagagtctaaattttagaacgaggctctagcataggcctaggcacatagtcaccgtccagtatccagggggatgggttcca

SEQ ID NO: 64621 - DNA, 695 bp, Homo sapiens
aggacttagttattgtcaaactcctaaggaattaaaaaaaagaagaagaaaaaataaataatcctggaggctttggaatgggagaattacctatctctgtgaaaatggtgatactttaccaaatatcaactargcaatttctatgtaagaagaaagagagatggccaatgaaagattggataatattttgaaataagaacccagcatgatcctctagggaagaaattaaaagaaatgttttatagagacctttaaatgttcaattaagtttatttagcaacttttttctaattatggcataactattctgagtagagatatcattgctttattctggatatttacaattgtgtctgaaagcccatttgtccttgggagactagcaatcagtaaagcagatgatgaagctataaatctatggaattgctttgccaaatatcagcatctcatcattatggtggtgaaatgagttcttgtacagaatgctattgaatacatctcacaatcactatttttcagtggcttaatctacactgcaagttgacttaaaaattttccctgaagctttggctataaataacaaattacagaaggacaaagctgaagaataaaaaaaaagttggaacagatttattttaaatatttcaatttgtgaatttctaaagcaagattatgtatttgcagtcatttctagc

SEQ ID NO: 64622 - DNA, 685 bp, Homo sapiens
ggatccatatattctttataacccttcagaaaacaagtagatgcttttaataaattatttcttgtaataaattctttttcaaatcttgttttcaatttctttatgccatgatatgtttattataaaactggctccaatttcccactccttcctrtatctacgccatttgcaatattaccttgcaggcggaaccttatttctctaccctttgaatctgggctgggcttgtcactttctttgggcaacagaagtgaaagcagaagtgaggtgtgtttttctgagcctaggtacagtattctggtgatgggtacacaaaaagaggatttggactcttcctttttcttcctgggaaccctgcctctttttcttccttttttttttttttttttttttttttcaggtggagtttctctcgtgttgcccaggctggagtgcaatggcgcaatctcgactccctgcaacccccgtctcccaggcacaagggattctcctatctcagcttcccaagtagcttggatgacaggtatgcaccaccacgcccggctaatttttttttttttttttgtatttagtagaaacggggtttcaccatgttagtcaagttggttgcgaactcctgacctcaggtgatccacccgcctaggcctcccaaagtgctgggattacaagcctgtgccaccgcgcc

SEQ ID NO: 64623 - DNA, 685 bp, Homo sapiens
ggatccatatattctttataacccttcagaaaacaagtagatgcttttaataaattatttcttgtaataaattctttttcaaatcttgttttcaatttctttatgccatgatatgtttattataaaactggctccaatttcccactccttcctatatctacgccatttgcaatattaccttgcaggcggaaccttatttctctaccctttgaatctgggctgggcttgtcactttctttgggcaacagaagtgaaagcagaagtgaggtgtgtttttctgagcctaggtacagtattctggtgatgggtacacaaaaagaggatttggactcttcctttttcttcctgggaaccctgcctctttttcttccttttttttttttttttttttttttttcaggkggagtttctctcgtgttgcccaggctggagtgcaatggcgcaatctcgactccctgcaacccccgtctcccaggcacaagggattctcctatctcagcttcccaagtagcttggatgacaggtatgcaccaccacgcccggctaatttttttttttttttttgtatttagtagaaacggggtttcaccatgttagtcaagttggttgcgaactcctgacctcaggtgatccacccgcctaggcctcccaaagtgctgggattacaagcctgtgccaccgcgcc

SEQ ID NO: 64624 - DNA, 996 bp, Homo sapiens
ggtagtttgcctgcacctagaccatgtgctgataacattaagtatttaatcagagaaatcccagtcccctagcttactatattatacaaaaggaggcagaatatgtcttatcaaaagctcttttttttttcctaagggaaatagtttaatgtacttgggataaaaaaggaccatttttgaggctgcagcagtctgtgatggctacatatgtttagagtaacaagagttttaaaagaatgtttaatttagtacttttaattttacaaacttttaaaaatgtttctaattattattatgtttcatatcattatatattgaaaagggttttttgtttgtttgttttccatgcttgggtatcgtaactgtggttttcaaatataaaatttagcggtttttttgtttcctcctttgctctttgaattaagagttccattttctcagtttattgtcttgtttcatctactgcaatagtcaggaaccataaaatatattctataattgacattgttacaaccaaagaatccaaagcaggcaaatgaaatgagtaattaaacatattttaatcatatttaatagagaaaacaatatatctgatccagttttttatattaatactgtaagttataatggaatataatttttctattttataataatgattaaatacttgcactaaaatgtactgcatatccatttattgtgagtaataacatttgtatagtatgaagaaattgaccctaccatttttagccctctttaaattgtaaagacaatgacaatacaaagttttcaaatttcaaaagtctacttagaagtggaccagctacaaaataacctttttatttcctttttattaaagctattatttcacactcatctagatatgtctaaactgttctkcgtaagaatcaataatggaaattaagggtgatctgatataatcaacggtcacgctagagtatcatcaaactccttttaagttacatacttaatctt

SEQ ID NO: 64625 - DNA, 996 bp, Homo sapiens
ggtagtttgcctgcacctagaccatgtgctgataacattaagtatttaatcagagaaatcccagtcccctagcttactatattatacaaaaggaggcagaatatgtcttatcaaaagctcttttttttttcctaagggaaatagtttaatgtacttgggataaaaaaggaccatttttgaggctgcagcagtctgtgatggctacatatgtttagagtaacaagagttttaaaagaatgtttaatttagtacttttaattttacaaacttttaaaaatgtttctaattattattatgtttcatatcattatatattgaaaagggttttttgtttgtttgttttccatgcttgggtatcgtaactgtggttttcaaatataaaatttagcggtttttttgtttcctcctttgctctttgaattaagagttccattttctcagtttattgtcttgtttcatctactgcaatagtcaggaaccataaaatatattctataattgacattgttacaaccaaagaatccaaagcaggcaaatgaaatgagtaattaaacatattttaatcatatttaatagagaaaacaatatatctgatccagttttttatattaatactgtaagttataatggaatataatttttctattttataataatgattaaatacttgcactaaaatgtactgcatatccatttattgtgagtaataacatttgtatagtatgaagaaattgaccctaccatttttagccctctttaaattgtaaagacaatgacaatacaaagttttcaaatttcaaaagtctacttagaagtggaccagctacaaaataacctttttatttcctttttattaaagctattatttcacactcatctagatatgtctaaactgttcttcgtaagaatcaataatggaaattaagggtgatctgatataatcaacggtcacgctagagkatcatcaaactccttttaagttacatacttaatctt

SEQ ID NO: 64626 - DNA, 923 bp, Homo sapiens
tgcatacttacaatgggagcatataaaaaagagagtagatgtggaggttttagtaaatgattagactatcatgatgaaattactgtctgaaactgcagtttttcaggaatagtgaaaacatcattggaataaactaagacatctactaggatttgagaagtgcaacataaaatgtcatagaagtcatgtatttgtttcttcaataatatttttactgtgcacctgctacatgctagggtcacagtgttaggcaaaccacatatggatccaatattttaaagcctaaacctaatcacaccagtcaatgaaaacttgccaaaaaatagtagttactttaaataaaaatacgtatttctatagaagataaaacagaaagctagcctaatgtggtggcaaggatcaagaaaaggctacctgaagaaatgtaacttaaaccacatcttaaaggtagacaggaggctaactggatggaaatggcttaccaacatttttccattggtggcagtagaaaaatgctctaacaaagttgcattgtaattccaggttttatccagttctgctgcaataaccagcaaccctaaaattttagtggtttattacaaccacagttgttttttctcgcaatcacaagtgtctttcacaaatcaactgcacctttttgtgtgtgatatgacaatctcagggcagagggagaagaccaatggtagacccacaagttatctcttaaatcctgtgcttacgagatgcatacaatgccaccactcacattgattagccaaagaaaactacatggccaagccttccatcagcagactcmataagtataatccttctacagggagaggaagcaaattttggagaacaataatacaatttaccaaaatttctagtaattttaaagtttataatatgatgctatttca

SEQ ID NO: 64627 - DNA, 755 bp, Homo sapiens
tgccaatctgagtccattaccattttcttgagctaactcagacatcattttctttagatactctataggagcacctaacatggcgcttgccacagaaatgattgactgttttctctctgtacatcctcattaactccaactcaatagaacaccaatttaatttgcctcctttgtataaatgtattcaatccaccccgtatcactgtagaatatctatacattgttctagaattactgttttcttattttatgtggatctggcttgctttaactatttcaaaaatggaggctacgctttttttttttgtttttttttttttgcctctttccatagtgccagcaaagagcttctaaatcacgacaaacagtaaatgcatgttgattataagtaaaacctatttttgctttcactttcctttgatatgaaagtcaattaaataggctgcagagaacagggagtttagaaggctgaaataagaaaaatatgtagcctggaaaaaaaatggagatgaccagtaagcaaagtgaaattgtatatactgcagactgatcggctctatccaaatgggtgctccttttggatatgagctcattcaaatggtaaatgatttcattcaaaactttcctttgrgaaaagtcacttggagagtccactttacataaaagaatccaatttaatcttcagtggaaaaagtggaattggacgagggcagagctctcctttcattttagagaataaaagtggcagcctggat

SEQ ID NO: 64628 - DNA, 1062 bp, Homo sapiens
atgaaaaaatgctcagcatcattaatctttaggtaaatgccaatcaaaaccacaatgaaatattacctgttagaatagctactgttgaaaasatgaaagataaatgctagcaaggatgtgaagaaaaggaaaccctctcttgtacactgttggtgaaaatgtaaataataccgccattatggaaaatggtatggagtttcccttaaaaaactaaaaatagaactaccatatgatctagcggtcccacttctggatatacatccaaagaaactgcaatcaatatgttgaggggatatctgtactcccacattcatggcagcaaattattcccaatagccaagatatgaaataaatgtaagtgtccatcagcagaagaatgaataagaaaatgtggaataatacatacatatatgtatgtgtgtaaatatatatacaaatgtgtatatataattcagccttaaaaaagaatgaaactttgttatttcagacaaatactgcaacttcaactcatagaagttgagagtagtattatggttaccagaggctggggtggggtggggaagagaaggaatggaaagttgttgatcaaagtgttcaaagttgcaaagaggaggaataagttttgagatcgattgcagagcagggtgactatagtccataataatgtagtatacatttcaaaataagagtaaatttcaaatttctcaccacagaaaaacttataagggaggtgctggatatgttaattagcttgatttatttattccacgttgtatacgtatattaaaacattacattgtaccccatgaatgtataaaactatgatgtgtcaattaaaagtattaagaaatataaggagagcacaggttaatttcaagagcagaattactttctacagcttgcaaatgccaaatcaaggatggttttcattgacacagttgatgttcaccagggtgatataattttaaggcttggtaataccctcctgacagaaacatctctccaaggatttatcactgatgcttgacaatccaccgttgtcagttaatcccttcaggttac

SEQ ID NO: 64629 - DNA, 1062 bp, Homo sapiens
atgaaaaaatgctcagcatcattaatctttaggtaaatgccaatcaaaaccacaatgaaatattacctgttagaatagctactgttgaaaacatgaaagataaatgctagcaaggatgtgaagaaaaggaaaccctctcttgtacactgttggtgaaaatgtaaataataccgccattatggaaaatggtatggagtttcccttaaaaaactaaaaatagaactaccatatgatctagcrgtcccacttctggatatacatccaaagaaactgcaatcaatatgttgaggggatatctgtactcccacattcatggcagcaaattattcccaatagccaagatatgaaataaatgtaagtgtccatcagcagaagaatgaataagaaaatgtggaataatacatacatatatgtatgtgtgtaaatatatatacaaatgtgtatatataattcagccttaaaaaagaatgaaactttgttatttcagacaaatactgcaacttcaactcatagaagttgagagtagtattatggttaccagaggctggggtggggtggggaagagaaggaatggaaagttgttgatcaaagtgttcaaagttgcaaagaggaggaataagttttgagatcgattgcagagcagggtgactatagtccataataatgtagtatacatttcaaaataagagtaaatttcaaatttctcaccacagaaaaacttataagggaggtgctggatatgttaattagcttgatttatttattccacgttgtatacgtatattaaaacattacattgtaccccatgaatgtataaaactatgatgtgtcaattaaaagtattaagaaatataaggagagcacaggttaatttcaagagcagaattactttctacagcttgcaaatgccaaatcaaggatggttttcattgacacagttgatgttcaccagggtgatataattttaaggcttggtaataccctcctgacagaaacatctctccaaggatttatcactgatgcttgacaatccaccgttgtcagttaatcccttcaggttac

SEQ ID NO: 64630 - DNA, 1062 bp, Homo sapiens
atgaaaaaatgctcagcatcattaatctttaggtaaatgccaatcaaaaccacaatgaaatattacctgttagaatagctactgttgaaaacatgaaagataaatgctagcaaggatgtgaagaaaaggaaaccctctcttgtacactgttggtgaaaatgtaaataataccgccattatggaaaatggtatggagtttcccttaaaaaactaaaaatagaactaccatatgatctagcggtcccacttctggatatacatccaaagaaactgcaatcaatatgttgaggggatatctgtactcccacattcatggcagcaaattattcccaatagccaagatatgaaataaatgtaagtgtccatcagcagaagaatgaataagaaaatgtggaataatacatacatatatgtatgtgtgtaaatatatatacaaatgtgtatatataattcagccttaaaaaagaatgaaactttgttatttcagacaaatactgcaacttcaactcatagaagttgagagtagtattatggttaccagaggctggggtggggtggggaagagaaggaatggaaagttgttgatcaaagtgttcaaagttgcaaagaggaggaataagttttgagatcgattgcagagcagggtgactatagtccataataatgtagtatacatttcaaaataagagtaaatttcaaatttctcaccacagaaaaacttataagggaggtgctggatatgttaattagcttgatttatttattccacgttgtatacgtatattaaaacattacattgtaccccatgaatgtataaaactatgatgtgtcaattaaaagtattaagaaatrtaaggagagcacaggttaatttcaagagcagaattactttctacagcttgcaaatgccaaatcaaggatggttttcattgacacagttgatgttcaccagggtgatataattttaaggcttggtaataccctcctgacagaaacatctctccaaggatttatcactgatgcttgacaatccaccgttgtcagttaatcccttcaggttac

SEQ ID NO: 64631 - DNA, 766 bp, Homo sapiens
gttttccagtggtgcaggttcaaacaacaacataattgcaataattaatagatttttcattaaaacttcagaattacttttcttcatggaataaagattcgaaacttctccataaaatgttgttgttattctgaacaactgctgccaccattttaagtctccaatccaaaataataacaaaggaaaaccatctttcaagaagtaataaaaccatatgacaagtaataaagggaaaaaagcaaaattctaagatgccgcattattgagtacagatattcaagtttaatagcatttaaaaaagcatgttatttcagcaagaaaaaaatagatctaaagagaggcacaaatttagaatttagacccaaactaaatttcaaatgcaatttgaataagatagtccccaacttatagtatgacctgtgatttttttgatttataatgctgtgaaaatagcattcattttgagaaattatgctttgtattttgattcaaagtttttgttttgttttattttgttttgttttggatatggagtcttgctgtgtcacccaggctggagtgcagtggcaygatctcagctcaccgcaacctctcccttgtgggttcaagcaattttcatgcctcagcctccccagtagctgggactacaggcatgggacaccacaactggctaatttttgtatttttagtacagaagaggtttcaccatgttggccagactagtctcgaactgctgacctcatgtaattcacctgccttatcctcc

SEQ ID NO: 64632 - DNA, 677 bp, Homo sapiens
tatttttcacttaagatgagtttattgggctgtaatcctatcataagacaaggagcatctgtatagagattacggtcatagattcttaaattgtataaatgaattgtacyatggtaatgagaacatgatgtggtgagaaaaaaatatttatttccacctagagtcttggagttttattacaggccattacaaaggtactacagagtgatccttgtatctttcattcagtttcccctaatggttccatcttatatagttatagtacagtatcaaactatagtaggaaacggatgttggtacaatgcgtatcagtctgttttgtgttactataaaggaatacctgaggctgggtgtacttataaggaaaataggtttatttggcttatggttctgcaggctatacaagaagcatggtgccagtacctgcttctggtgagggcctcagaaagtttacactcatagcagagggtgaagggaacctggtgtgtcacatggcaaagagaacaagagagagaaaagatgacagactctttttaaaaaagaatttcaacttttattttagattcaaggagtacatgtgcaggttttttacatggtatattgtgtaatgccgaagtttggagtacgacggatcccatcacccaggtactgagtacccaataaataatttttcaacc

SEQ ID NO: 64633 - DNA, 658 bp, Homo sapiens
ctcaaagtttcttcctrttttctattgctagaggatatcaatatcatgtagtggttagagttaggtgtcctggttctcagtattttctttaccacttattagccatctgaccttgagcaagtctcttaaatttgctgttcttcaatttactcataaataacctgggaacaatgacaacatctatctcatagggtttttgcaaggaacaaatgaattaataatgtccagtgctgagaataatgcctgacacataataattgctacatgggtgtcagctattacattgttttatttgtattttctctcaactctctgtttttaagaccaaaccatgttgctgttacagacatgtaattccttattctgaatgctgccccgtgttccatggtatgcacctacttgactttactttttcaatagttctaataatgactgcctaggttgctttcaaatttatgctttttttttttttttttttgagacagagtcttgctctgtcacccaggctggagtgcagtggtgcaatctcggctcaccgccacctccgcctcctgtgttcaagcgattttcctaccttagccttccaagtagctgggattacaggcatgcaacatgctcagctaatttttgtatttttagtagagacggtgtttcacca

SEQ ID NO: 64634 - DNA, 844 bp, Homo sapiens
tcctacactcctccattctctgggtacagaaattcatttcattcatctagggcaacctcaaatgtaaccccattggtgaagacttttttgaattcagctgctgtctgcaatatgctatactgccttctgtctgactgccttcccatgagaagcaggatggggtgggaggaaagtactagaatgggagaggaggtgaagcggggcatgtgctatgggtttgacttgggcaaggctgggtctagaaatttcagaattacctatatttaaggatctttacactataggatcacaagtagaaagcacactctrtgagagatgctcttgaggatacagagatgcttgggggataaatgacttcaatagacttccttgaaagcatatcattagatctctacaccagttatcaaggttttgtctctcagctccaaatgcttgattaaaggggggcagaacataagactagattagcaaaattcatctgcttggtagttctttttctgggacatggatttaatacctcatcaaggacctcaggcgaggaggtgtactcttgccaaaggacacaaaaatagtaggaatattgctccttcccatatactcagtgatatggaaggctgtcagtattgagtggctctgcagaagattcagactgtctttggatttgggtcatataatccaattgaccctataatattggtactagtggtgataaaagattctgtgtagatttcacggcaattcccaatgagaaaagcacaacacaggcccctggaatttgaagccagaccatggcaattgcagcagagaattataagtcattttagaaacagttcctcatatgtag

SEQ ID NO: 64635 - DNA, 1173 bp, Homo sapiens
attgtacatcttgaatatatataatctttatttgtcaattaaacattaaaaataaaaaattaaagaaattatcaggaggattttacaaaggagttgaatccttaatccttctcttacataaaatcagtgatccatgtaggcaaaaacacatcttataaacaataaaaagatagtactattttaaagtgagtcctaaaactaaacacatgtattatatcttgtaattctaatgaggtaggcactattattatgacatcttacagacagtgcaactgggacttyaagaattaaattaaatactgggccaaagttatgcaactagaaaatgacaatattcaagccctggtatttttaactccagagcaaggctcttggcatttacatttgactttcctaatcttatactagacaatactacctagcaaataacttaaatgtaatataatgtcagataatattatataaaaatctttctactctacccttttaagaaatctctcttcatcttacctttccactccctcccccaggctttcacaattccactcaaaccttcaaaacaacttgttcacaacttcgttagaatcaactgatcaatatgcttttcataatcaaatatctttatttcactcctaaagtgaaaatgtggaataaatggtcttcttcagaagaccactgtcaattttgattttctttttccttagagtggctggaatatttattacaatggcgcattttcacgaagaacaagaacccatcagagccttgcttttaaataatgctttgcacagttgattcaatcagcccatgactaattctaacttctgaatgaggggaaatagctgattttccaactctcctgagaacgctatacatattcatagaaatttggagtaataattgggaacaagcactattaaatcatcatttgttatatatatatttttctaatagaataaaaagagagattggaaaatgtcaacaagtgatttgtgtaaagtctcctaattcacaagctgacatttcttcaatggaaacgagttagaagtaatgctggcaaagactacattgttaattcagataatgtcactttgtctctttggaggcacttaatcaggcttgaataaaaatgaacaatgtgaaaattcctagagaaaatgcgattatggtatg

SEQ ID NO: 64636 - DNA, 1173 bp, Homo sapiens
attgtacatcttgaatatatataatctttatttgtcaattaaacattaaaaataaaaaattaaagaaattatcaggaggattttacaaaggagttgaatccttaatccttctcttacataaaatcagtgatccatgtaggcaaaaacacatcttataaacaataaaaagatagtactattttaaagtgagtcctaaaactaaacacatgtattatatcttgtaattctaatgaggtaggcactattattatgacatcttacagacagtgcaactgggactttaagaattaaattaaatactgggccaaagttatgcaactagaaaatgacaatattcaagccctggtatttttaactccagagcaaggctcttggcatttacwtttgactttcctaatcttatactagacaatactacctagcaaataacttaaatgtaatataatgtcagataatattatataaaaatctttctactctacccttttaagaaatctctcttcatcttacctttccactccctcccccaggctttcacaattccactcaaaccttcaaaacaacttgttcacaacttcgttagaatcaactgatcaatatgcttttcataatcaaatatctttatttcactcctaaagtgaaaatgtggaataaatggtcttcttcagaagaccactgtcaattttgattttctttttccttagagtggctggaatatttattacaatggcgcattttcacgaagaacaagaacccatcagagccttgcttttaaataatgctttgcacagttgattcaatcagcccatgactaattctaacttctgaatgaggggaaatagctgattttccaactctcctgagaacgctatacatattcatagaaatttggagtaataattgggaacaagcactattaaatcatcatttgttatatatatatttttctaatagaataaaaagagagattggaaaatgtcaacaagtgatttgtgtaaagtctcctaattcacaagctgacatttcttcaatggaaacgagttagaagtaatgctggcaaagactacattgttaattcagataatgtcactttgtctctttggaggcacttaatcaggcttgaataaaaatgaacaatgtgaaaattcctagagaaaatgcgattatggtatg

SEQ ID NO: 64637 - DNA, 757 bp, Homo sapiens
ttagataatcagaagaacaaagaygagattgacattgaaggtctatgaagaggttttgatgaatattcaaggagtaaaccattaaggatattttaaaattgagtttttaacttttagaaagtgtgacaaaagttatattgattactggaagcttaattttctcttccattctttagcacatcagtttccaggttgcattctcatagtagttgtaattcctatttcagactagtttataatcttcttattctaaagtggttgccttccattcttttaaaaccataaatcaagcatcctggaaaatgtgatgtcagaggataccaactcaatcaaagttgcaggtaggcaactcaaatcatagaccttttattctattcatatattattattattttcatattcagaggatacatgtgcagtttatattgtgtagtggcgaattctgggcttttagcgtaaccatcacctgaataacgaaaatcgtacccagtaggtaattttgaagccctcccccttctctcatcctcccgccttttggggtccccagtgtctgttagtcccctctgcttggttatatgtacctatcgtcttgctcccacttgtaagtaaggatacacagtattttattttctgtttctgagttatttaacttaggaaaatagccttcagctccatctatgttgctgcaagagacataattttattatttaacaaattgtagatcttaaattttaatatggccgtaataaaactgggt

SEQ ID NO: 64638 - DNA, 757 bp, Homo sapiens
ttagataatcagaagaacaaagacgagattgacattgaaggtctatgaagaggttttgatgratattcaaggagtaaaccattaaggatattttaaaattgagtttttaacttttagaaagtgtgacaaaagttatattgattactggaagcttaattttctcttccattctttagcacatcagtttccaggttgcattctcatagtagttgtaattcctatttcagactagtttataatcttcttattctaaagtggttgccttccattcttttaaaaccataaatcaagcatcctggaaaatgtgatgtcagaggataccaactcaatcaaagttgcaggtaggcaactcaaatcatagaccttttattctattcatatattattattattttcatattcagaggatacatgtgcagtttatattgtgtagtggcgaattctgggcttttagcgtaaccatcacctgaataacgaaaatcgtacccagtaggtaattttgaagccctcccccttctctcatcctcccgccttttggggtccccagtgtctgttagtcccctctgcttggttatatgtacctatcgtcttgctcccacttgtaagtaaggatacacagtattttattttctgtttctgagttatttaacttaggaaaatagccttcagctccatctatgttgctgcaagagacataattttattatttaacaaattgtagatcttaaattttaatatggccgtaataaaactgggt

SEQ ID NO: 64639 - DNA, 661 bp, Homo sapiens
tcctgagggccacagttcctttcaagcagcctttacaaggtctagaatctgctcctacccatggctccttcgagagtcaggggtgccaacatctcctgctgttgctcaccttgggccactgcataatccctcgtgcattccccaaatgctctgcatacatttgtaaatagtcattttagtaaaagcgcctcaaatcacccagcttgagagggctgtgagtttccagtcaggaccctcactggtccacaatggcagaatggttaccatgggaaggagggaagggtgggtgccatgtgcaaggccagggagtcagcaggagtgtggttaaggaagaaaagttgggaggctgaggcaggagaatggcgtgaacccaggaggcggagcttgcagtgagctgagattgtgctactgcactccagctgggcggcagagagagactctgtctcaaaaaaaaaaaaaaaaagaaaaagaaaggaaagttgccacataggggaaggagggagaatgaaaaagatcaaggggaaaagcaagaagaatcaaatggagagggaattcagggagggaattcagagagctcycgaggcaacgggatactatctgcacgaccctttctatagccccagatctcaggcgaaattcagcaagtgcaggccagccaatt

SEQ ID NO: 64640 - DNA, 1285 bp, Homo sapiens
aaaagatttctggaaggatacacaagaaataggtagcaatggtgttctctgctaagagaagaacagaggtgaaaagaaacaatttttttctgatcatttcccttacacatttaaaatattatatcataatttttatacttacaaaatatctttcaaatgaaagtactacaaaatgggcagtatcctatcaactgaggaaagataccctttcacttctcttgtttagaactcatttttccttcttaaattgagaaccctatctttcgtgaattctgaggactccttagcattatctattatttccattaccctatctctctattctcttctctgaattcccattagccaggtattgagggctctctgtgtatcctctataatctattatatttggtattgcaatgtgctgcttcctgagtagtttttgcagatcaaccttccagtttactaacagtcttttaaattgtgtttagactgccatttaagtcatccacttgcttcatttcatttttattttatttttktttttacttttagagacacagtctcactctgttgcacaagctggagcccagtggtatgatggattatagctcactgcagccttgacctcctggctcaagtgatcctctttcagcctcccaagtagctaggactgcaagcatgtgccactgtacctagctaatgtgttatttttattttttgtagagacagggtcttgctatgttgcctaggctggtcttgagctcctggcgtcaagtgatcctctcgttttggcctccctaactgctgggattacaggtattcatcacggtgcccagcctggtttattttattttaattactatatttttgattagtaaatgttctatttgattcttcttttcaagtttacttagtgattttgcatactgtcttattctttccagatgttttttaccatttaaatattcttagtttatgatcgcctttattctttttctattatttctagtacctgagacatttgtgcctccttttttttttcatgtaaccactgccttgtattcatgatggaattttttatttttgtgattttgtttgtaaattcatatttgttaagtcctggtccctgccatcccctcacatgggaatcccacgaggtagaaatggatggatggtttcccatttatctctatcaaggatatcaacaacctggactactttttttctcttttaaaacattaattcatagtttatgattttcttcgtaatgaagtaaatgcagtttttaagttcaaatgca

SEQ ID NO: 64641 - DNA, 842 bp, Homo sapiens
cttagagctaagcaaagaaagggtttcaaggaaaagtgagtagcagaacaattaacatggtgttcagaaaacagcaagaaatatgaagatgggaaagcaaggagtgggagttgtggcctgggtaccaagacagtgttttgtaaattccaggtaatcaatgaacctaggcatgaaggaagaagcttcacactctgagggacacagcctggaactcatccattcaacagacacttaccaagtgtcactctttgcatcacagctcccatcctgcttccatcttcatgtctcctccaactgtccagcctttcccttcactcactaagaccatggagattacaataggcccatccatgcaagagaaaatccaaaatgtgccttacaatgagccaacagagaggagagacagagagagagagagagagagagagagagagagagagagagagagagagaggaagcccggtctatataataggcattgttgccaggggacagggaatggtgcaggaactatcttggtcaccagttcacagcatgtggcctagaatacatcctaaacttcataaatgtaaagtcatccaaatgcaatggtaattgaactgggagaaggcagaagactgaggtgcccctgaggagctcagttgaggttcgttgaggtttgcagtgaacagtgaaaaaggaattggcttctgtgatttggtgcattcagacaccagcttcgctgcagcagcagtcaagagggaaatcaaaggactgccwtctacaccagcaacatttctcactagccacagagtaaatccaaaatagaactgggattttacagttgtcccaatgtttgcctt

SEQ ID NO: 64642 - DNA, 842 bp, Homo sapiens
cttagagctaagcaaagaaagggtttcaaggaaaagtgagtagcagaacaattaacatggtgttcagaaaacagcaagaaatatgaagatgggaaagcaaggagtgggagttgtggcctgggtaccaagacagtgttttgtaaattccaggtaatcaatgaacctaggcatgaaggaagaagcttcacactctgagggacacagcctggaactcatccattcaacagacacttaccaagtgtcactctttgcatcacagctcccatcctgcttccatcttcatgtctcctccaactgtccagcctttcccttcactcactaagaccatggagattacaataggcccatccatgcaagagaaaatccaaaatgtgccttacaatgagccaacagagaggagagacagagagagagagagagagagagagagagagagagagagagagagagagaggaagcccggtctatataataggcattgttgccaggggacagggaatggtgcaggaactatcttggtcaccagttcacagcatgtggcctagaatacatcctaaacttcataaatgtaaagtcatccaaatgcaatggtaattgaactgggagaaggcagaagactgaggtgcccctgaggagctcagttgaggttcgttgaggtttgcagtgaacagtgaaaaaggaattggcttctgtgatttggtgcattcagacaccagcttcgctgcagcagcagtcaagagggaaatcaaaggactgccatctacaccagcaacatttytcactagccacagagtaaatccaaaatagaactgggattttacagttgtcccaatgtttgcctt

SEQ ID NO: 64643 - DNA, 1996 bp, Homo sapiens
actctaattttatccaacattcctgatctttcctgttgtaataatagttgggtcatttaaattctgcactacagaattgttatttgatgtacctttctctctattaaatataagatccttaaaaacatgctttgtacgtttcattgattattgtatcccataaagcctcatcacaataaatatcaaatgggttgggtgagatcacttatgcaatataatcccagcactttgggaggccaagrcgggatcccttgaacccagaagttcgagatctgcctaggcaacatagtgagacttcatctctacaaagaaaagaaaaataaaattagctgggtgtggtggtacacacctgtagtcccagctacttctgggactgaggcaagaggatctctgggagaggtacaggctgcagtgagtcctgattttgccacagcactccagcctgggtgacagagtgggaccctgtctccaaaaataaaataaaataaactaggttaaatttttgagaagaacaattaatatcaaatgagtgaatgacgaatgtttgaacagaagagattatatatgagacaaatttacagcgttggtttgcaattgtgtttataattccacaaggaacaaaatcagggatatataagaaaatatctgctttagtcagggaggaaaaaataaagaattaagaaaaagagtcctaaaagtttagttactaatgaacagaatattcattatgcattggagtgtatctgagatttttgcaagaaggaggatgttagctaagaaaattgtatttgaagctcataagtgctttaaaattcttatacttacgggaatattaagctctgaaatgctaaagacagttacatgttttatactctgtagaaagggtttctatcataaaaataaaaaagaataattctgtatttaaattttttcatcattaaatatgatcacatttcaacttataattttacaggtacctacagaatactggacatacggattcagaatccataaggctttatcaccttgaatcaaggatttatttgatatcatcctcggtctttacttcctatcaagtaacattgttttgaaaaatagagttaacacatttgccataagggagtttttttttttttttttaaatacttcgcatactctccaatgcccaaaaatagcaaggtggtaaaaagagaattagatgatgatgttactgagtctgtcaaagaccttctttccaatgaagacgcagctgatgatgcttttaagacaagtgaactaattgttgatggccaggaagagaaagatacagatgttgaagaaggatctgaagtcgaagatgaaagaccagcttggaacagtaaactacaatacatcctggcccaagttggattttctgtaggtttaggaaatgtgtggcgatttccatacctatgtcagaagaatgggggcggtaagtaatctttttaagtgataaattactgtagtaaattgcaattgggtttctcaaatagctcctattattgctgtttctcattatttttgaaactttcaatttcattgtaaagctagagaaacccacttctttgtgggaagtgagcccagatatgttttcagattacgtttccacaggagcagatgggcttgctgtgaatgctcagggattgcttaagggtaacacattctcaacttctttctccggaagcttattaaacaactctgaataactgagtgaaacttttcttgcatcgtttgtgcttgtaaattattccctttgaagaataacctaaagcttctgatatatgacaatactggtgaaggaaaacagagaattttctctccgtgatttattaattcttaattttaagttgcctcattcttcaaaaaatacaaaatgatatgtaacttagaataattataatcttcaaatgctgatgagaacatttagatcccagcagaaggaatgtaaacagataatacaatgctagacattcttcat

SEQ ID NO: 64644 - DNA, 721 bp, Homo sapiens
tgcatacagaatccgatcacttctcagtaacttcacctctactcttcagcctaatccaccaccatctagattattagataaaatccagtctgttttccctgcttccacacttgccccctttatttttaacatggcagctataytgctcctattaaatacaaatctgaccatgtcacttatgaaaaatctgccaactgctttacatcttacttgagtagaaatgaaagtcctgagagtggttgtcaagtcccgtcaagaccttttacccctctgaacctttctccattcctccccagcctctttactaggcacactgcttttctgcctttctttgaactcaacatgctcacagcgcactttccccttattttcttgtctctatcagtactttactcaaaagtcattttctcagtgaggttttttgtttgtttgtttgtttttgtatatcctgtatagaactgcaatccccacaatcccccatctcctgcttattctacttcctcattttttctctatagcacttcctgccatgacattatgccaactttatattttgttgtttggtttccctgacttgaaggtaaccttcatgagggcaatgtttttttaaattttttttattttgttttgtttgattcactgccatttccctaccactcggtacagtgctggacatatactagttgctgaataagtaattgctgaattaatgacttttctt

SEQ ID NO: 64645 - DNA, 827 bp, Homo sapiens
acacaccataacaatagagtcagaaagacaatgtttaattgtattttatagtttcaaataaatttatatatttcatgtaaaaatcaaattattttctacttcatacccaatttttcatattctaaatacactcagggcaatatataatttttgatcacttggcatatatcaaagatttaaatccaacttccacaaaacatacttcttatacatttctacttatagaaatgctgtattatctgaattccaagaggaatacgaaaaaaagttgctttgcatggatcacttaaaattccatcaaaaatcaaaaatatatagatattgcattctgactccatgatctagaagacaggaactctttattttcatttttaacgttagcatccattatggtttttagttactgcccccaaaatgcttaaggtaggaagaaaagaaaggagaaagggagaggatggacaaaggaaaggaagaagagagagtgagagagaagragggaagaaagggtagaagagaggaagggaggaaggaaagaaggaagaaagggagggaaggaggagacaaggaagacaggaagggagggagaaaaaaaggaagtgaggaaaggagggaggaaagaaggaaggcaaacaggcagatacttcacatgtgctcatactgcccaggcctgcaacagcattcacactcatgtacttgccggaattccctgcattgctcaagatcagttttaaatctgactaattttatgattcttcttatcattcgcaagttgatgtgactgcttttccttttcttttctttttattatgaaaggtaagtttaatgca

SEQ ID NO: 64646 - DNA, 470 bp, Homo sapiens
cttaaccattcacacaaaaccgcatcactgaattagttctaacagtaactaattacagaacaacaacaacaaaatcaaaattcgctsttttattgcttttgagaaaaattcaaaaacaattaaaaaagcgaatatatcaagtgttggacatattagaattagaaaaataactaataaaaacgttaaagaggccggccatggtggctcacacctgtaatcccagcactttgggaggccgaggcaggcagatcacctgaagtcaggaattcaagaccagcctggccaatgtggtgaaaccctgtctctactaaaaatacaaaaattagccaggtgtgggggttcacacctgtagtcccagctactccagaggctgaggcagaagaatcgcttgaacctgggaggcaaaggttgcagtgagccgagatcccaccactgcactccagcctgggcgatagagcgagactccatct

SEQ ID NO: 64647 - DNA, 470 bp, Homo sapiens
cttaaccattcacacaaaaccgcatcactgaattagttctaacagtaactaattacagaacaacaacaacaaaatcaaaattcgctgttttattgcttttgagaaaaattcaaaaacaattaaaaaagcgaatatatcaagtgttggacatattagarttagaaaaataactaataaaaacgttaaagaggccggccatggtggctcacacctgtaatcccagcactttgggaggccgaggcaggcagatcacctgaagtcaggaattcaagaccagcctggccaatgtggtgaaaccctgtctctactaaaaatacaaaaattagccaggtgtgggggttcacacctgtagtcccagctactccagaggctgaggcagaagaatcgcttgaacctgggaggcaaaggttgcagtgagccgagatcccaccactgcactccagcctgggcgatagagcgagactccatct

SEQ ID NO: 64648 - DNA, 470 bp, Homo sapiens
cttaaccattcacacaaaaccgcatcactgaattagttctaacagtaactaattacagaacaacaacaacaaaatcaaaattcgctgttttattgcttttgagaaaaattcaaaaacaattaaaaaagcgaatatatcaagtgttggacatattagaattagaaaaataactaataaaaacrttaaagaggccggccatggtggctcacacctgtaatcccagcactttgggaggccgaggcaggcagatcacctgaagtcaggaattcaagaccagcctggccaatgtggtgaaaccctgtctctactaaaaatacaaaaattagccaggtgtgggggttcacacctgtagtcccagctactccagaggctgaggcagaagaatcgcttgaacctgggaggcaaaggttgcagtgagccgagatcccaccactgcactccagcctgggcgatagagcgagactccatct

SEQ ID NO: 64649 - DNA, 470 bp, Homo sapiens
cttaaccattcacacaaaaccgcatcactgaattagttctaacagtaactaattacagaacaacaacaacaaaatcaaaattcgctgttttattgcttttgagaaaaattcaaaaacaattaaaaaagcgaatatatcaagtgttggacatattagaattagaaaaataactaataaaaacgttaaagaggccggccatggtggctcacacctgtaatcccagcactttgggaggccgaggcaggcagatcacctgaagtcaggarttcaagaccagcctggccaatgtggtgaaaccctgtctctactaaaaatacaaaaattagccaggtgtgggggttcacacctgtagtcccagctactccagaggctgaggcagaagaatcgcttgaacctgggaggcaaaggttgcagtgagccgagatcccaccactgcactccagcctgggcgatagagcgagactccatct

SEQ ID NO: 64650 - DNA, 968 bp, Homo sapiens
attttagccacttttgctttctgtgacttctgagtcatttcaactctagggttctcagtttaaccgtaagtgggatctaccccaaaagactgttgtgaagataaaatggggtcattttgctaaaacacattatcaccaaacagtgatcagtgtcagtgtccatttcctaatgttttaagaaaagcagctaccagttaaataatcatttcttacctaagtacagagacttaggctcaaacgagcaaaattaacaactcttgatgtgtggagaaagtaaggataattaattatattatttaaaaagtataatgtcatttatatttctgacagtaaataatttattttttaagctcgctccttaatctgcaagtaataacacaagaatttgaaaataaacctctgttaccagcattgctgacaatataaatcttgttgaataatggggacatcaaatgaaaatatttaactgtaccatatcaagaggctgtcagtactctaaaagtgcaagaaaatctgtgtgcttatgtgtgtgcgtttaatgaaatgcctgtctggtaaggtgacaattaagaagggacctaaagaaagtgaggcagtggagtgtggattcctgagaggaataatattacagtcaaaaagaaaagaaaatgcaaaagtcctgaggcggctgtgtgctgcggctgttttagaaacgttgaggccaatgaagccaaagccagtgagtgacagggaaactgatggggtggagtcaggaaggtaatagacacgcagacttttaaaagaatcttgaggttcatgtaaggtctttggttttcattctaaatgagaagataacacattggaaggtaaagcagagaagtgatacaattgggtacatgtttaaaaagagtcactctggctgccatggagaggactgtgtgtgtgtgtgtgtgtgtgtgtgtgtgtrtgtgtgcatgtgcatgcatgtg

SEQ ID NO: 64651 - DNA, 968 bp, Homo sapiens
attttagccacttttgctttctgtgacttctgagtcatttcaactctagggttctcagtttaaccgtaagtgggatctaccccaaaagactgttgtgaagataaaatggggtcattttgctaaaacacattatcaccaaacagtgatcagtgtcagtgtccatttcctaatgttttaagaaaagcagctaccagttaaataatcatttcttacctaagtacagagacttaggctcaaacgagcaaaattaacaactcttgatgtgtggagaaagtaaggataattaattatattatttaaaaagtataatgtcatttatatttctgacagtaaataatttattttttaagctcgctccttaatctgcaagtaataacacaagaatttgaaaataaacctctgttaccagcattgctgacaatataaatcttgttgaataatggggacatcaaatgaaaatatttaactgtaccatatcaagaggctgtcagtactctaaaagtgcaagaaaatctgtgtgcttatgtgtgtgcgtttaatgaaatgcctgtctggtaaggtgacaattaagaagggacctaaagaaagtgaggcagtggagtgtggattcctgagaggaataatattacagtcaaaaagaaaagaaaatgcaaaagtcctgaggcggctgtgtgctgcggctgttttagaaacgttgaggccaatgaagccaaagccagtgagtgacagggaaactgatggggtggagtcaggaaggtaatagacacgcagacttttaaaagaatcttgaggttcatgtaaggtctttggttttcattctaaatgagaagataacacattggaaggtaaagcagagaagtgatacaattgggtacatgtttaaaaagagtcactctggctgccatggagaggactgtgtgtgtgtgtgtgtgtgtgtgtgtgtgtatgtgtgyatgtgcatgcatgtg

SEQ ID NO: 64652 - DNA, 968 bp, Homo sapiens
attttagccacttttgctttctgtgacttctgagtcatttcaactctagggttctcagtttaaccgtaagtgggatctaccccaaaagactgttgtgaagataaaatggggtcattttgctaaaacacattatcaccaaacagtgatcagtgtcagtgtccatttcctaatgttttaagaaaagcagctaccagttaaataatcatttcttacctaagtacagagacttaggctcaaacgagcaaaattaacaactcttgatgtgtggagaaagtaaggataattaattatattatttaaaaagtataatgtcatttatatttctgacagtaaataatttattttttaagctcgctccttaatctgcaagtaataacacaagaatttgaaaataaacctctgttaccagcattgctgacaatataaatcttgttgaataatggggacatcaaatgaaaatatttaactgtaccatatcaagaggctgtcagtactctaaaagtgcaagaaaatctgtgtgcttatgtgtgtgcgtttaatgaaatgcctgtctggtaaggtgacaattaagaagggacctaaagaaagtgaggcagtggagtgtggattcctgagaggaataatattacagtcaaaaagaaaagaaaatgcaaaagtcctgaggcggctgtgtgctgcggctgttttagaaacgttgaggccaatgaagccaaagccagtgagtgacagggaaactgatggggtggagtcaggaaggtaatagacacgcagacttttaaaagaatcttgaggttcatgtaaggtctttggttttcattctaaatgagaagataacacattggaaggtaaagcagagaagtgatacaattgggtacatgtttaaaaagagtcactctggctgccatggagaggactgtgtgtgtgtgtgtgtgtgtgtgtgtgtgtatgtgtgcrtgtgcatgcatgtg

SEQ ID NO: 64653 - DNA, 968 bp, Homo sapiens
attttagccacttttgctttctgtgacttctgagtcatttcaactctagggttctcagtttaaccgtaagtgggatctaccccaaaagactgttgtgaagataaaatggggtcattttgctaaaacacattatcaccaaacagtgatcagtgtcagtgtccatttcctaatgttttaagaaaagcagctaccagttaaataatcatttcttacctaagtacagagacttaggctcaaacgagcaaaattaacaactcttgatgtgtggagaaagtaaggataattaattatattatttaaaaagtataatgtcatttatatttctgacagtaaataatttattttttaagctcgctccttaatctgcaagtaataacacaagaatttgaaaataaacctctgttaccagcattgctgacaatataaatcttgttgaataatggggacatcaaatgaaaatatttaactgtaccatatcaagaggctgtcagtactctaaaagtgcaagaaaatctgtgtgcttatgtgtgtgcgtttaatgaaatgcctgtctggtaaggtgacaattaagaagggacctaaagaaagtgaggcagtggagtgtggattcctgagaggaataatattacagtcaaaaagaaaagaaaatgcaaaagtcctgaggcggctgtgtgctgcggctgttttagaaacgttgaggccaatgaagccaaagccagtgagtgacagggaaactgatggggtggagtcaggaaggtaatagacacgcagacttttaaaagaatcttgaggttcatgtaaggtctttggttttcattctaaatgagaagataacacattggaaggtaaagcagagaagtgatacaattgggtacatgtttaaaaagagtcactctggctgccatggagaggactgtgtgtgtgtgtgtgtgtgtgtgtgtgtgtatgtgtgcatrtgcatgcatgtg

SEQ ID NO: 64654 - DNA, 849 bp, Homo sapiens
ggtgtttaacagaagatctgaacagaaagaaaaaggagtcagtgaacatgaagactagataaatgatccagcttgaggaacagaaggaaaaaagaatgaagaaaattaaacagagcctagggaacctgtaggatgccaccaaggacaccaacacacgtgttactggaatttcagaagaaggaagagaaaaaggggtagaaagaatatttgaaaaagtaatagcagaaaatgtctccaatttgataaaatacatgaatctagctatccacaaagctcaacaaattttaagtaggataaatttaaataaatccacacgttttcaggttaaaataatcataccaattctggagttctgtgtgccttcctgcattgttaaggaatgatgtttggcataatttaaaataatacttaaggaaacaacattttaaacaaattgatataaagaggaaccagtgattgatccctcaaattctgcctttacttctctgacttcttaaatctgtcatgtcctcttgaaaccaaattaactaaattctgagaagagtggcttggttggtctcctgtttatgcaaatataagaatttaaaatattcctacactctttaccttttgaaataatctttagttggaaaaagcattaccgtggcgtaaatggattcactgacatgagtatcccactaaaacctaacccttcacccctgagaataaaaatctgagaaaacttttaggatggccctcatcaakatctgctaacagaaaaaggatcttgaggttcatagagaggcacgttttatgctatcattaccaccaggtggggtcctctttctcaggtacagtatagctttacta

SEQ ID NO: 64655 - DNA, 1649 bp, Homo sapiens
tgggttcctcccatcataccactactactaattacattaccatactgccattaactgcactatgctgtaagtaatggtcttgactgctgtctatctccccatatagtctgtgaaggtagaaaatgctctttggctagctttacatccttgatacatagcatggggcctgacatgcagtaatcactcaatgcttgttgaatgaatgaataaattatttgaactgcttaagagcccccaactaaccaatgatgtgaatgaataaattgatttgaactgctcaagagccccctactaatcaatgatgtggtgagggctagaacctcagtctttatcccaagaagcctttaaatcttccaactctgctattccagcagtcatttttctcccactcttttgggagcagatggaatttcctttttgccaagagaaggttcgagttatgggatagcaatgcattccttcttaccccgctgaatcccactgagacactggaattgctatccagtagctaactgggtggggggtgggtaggcgggggagcgaggttagggcgagggcagacattgagaagctgtaatgtgagaatcatctggaagtgttgtagtctggacagcgatgaaaagggcccagcagctccaagacagagttcatcgttgttggtccttgaagtcagggaagctgggcctctgatgctactaggctcctaacaatctttcctttccaaacatggccctttaacttgcaggtgtgtctccatccctgcagcacagtgaagcatggcaagaggaccctatgacagggaagccaacccctattccctgccaacactactcagtggaagggacagtccagcaggccgatatctctccaaggatccacctcscttcttcaaaccagggtttgaaccagctcctgggtcccaagtttacccactcttccagtttgttatttatgaaacacgtttgattccagctctttctatgtgccagatcctctgaaggttactgagatgagtaggacttgggccccgtcctgacggtttaggctggaagacaggcattcacactcacttgccaggtcatcattcagggaacagcttcaggctcgcagtgaggcctcaccttctcgtgcctgaacagcttcaacccctttgatgtttctctgcaggtgccacacgatggagattgttattttaatgctcacagggcctacgtgatgtggggcacccagttccagcagcaacccacatgcttgagtgccatgtaatcgcaggccttccagcagagttttcctgcacaggaatctagaaacagcacccacctcccacctccctcacaccgtctcattcctgcctgtctctctctgcagcctctttgtctccttttcttttacctttggctcacactccactatatgtctaagttttcactagtctggaagcctcttgtgttgttgattcagggccgttgtaggcaggctaagaattctcagcagttaaccatcacgttacctcccgccctcacagggtctccaaggggattaaggaagctggtgcttcttaggacaccaggacaccagacacgaggtggcctgcttagcaggtgcctgggttgtgtccatgaatacttgtgttcacccatttgtttgtt

SEQ ID NO: 64656 - DNA, 1649 bp, Homo sapiens
tgggttcctcccatcataccactactactaattacattaccatactgccattaactgcactatgctgtaagtaatggtcttgactgctgtctatctccccatatagtctgtgaaggtagaaaatgctctttggctagctttacatccttgatacatagcatggggcctgacatgcagtaatcactcaatgcttgttgaatgaatgaataaattatttgaactgcttaagagcccccaactaaccaatgatgtgaatgaataaattgatttgaactgctcaagagccccctactaatcaatgatgtggtgagggctagaacctcagtctttatcccaagaagcctttaaatcttccaactctgctattccagcagtcatttttctcccactcttttgggagcagatggaatttcctttttgccaagagaaggttcgagttatgggatagcaatgcattccttcttaccccgctgaatcccactgagacactggaattgctatccagtagctaactgggtggggggtgggtaggcgggggagcgaggttagggcgagggcagacattgagaagctgtaatgtgagaatcatctggaagtgttgtagtctggacagcgatgaaaagggcccagcagctccaagacagagttcatcgttgttggtccttgaagtcagggaagctgggcctctgatgctactaggctcctaacaatctttcctttccaaacatggccctttaacttgcaggtgtgtctccatccctgcagcacagtgaagcatggcaagaggaccctatgacagggaagccaacccctattccctgccaacactactcagtggaagggacagtccagcaggccgatatctctccaaggatccacctcgcttcttcaaaccagggtttgaaccagctcctgggtcccaagtttacccactcttccagtttgttatttatgaaacacgtttgattccagctctttctatgtgccagatcctctgaaggttactgagatgagtaggacttgggccccgtcctgacggtttaggctggaagacaggcattcacactcacttgccaggtcatcattcagggaacagcttcaggctcgcagtgaggcctcaccttctcgtgcctgaacagcttcaacccctttgatgtttctctgcaggtgccacacgatggagattgttattttaatgctcacagggcctacgtgatgtggggcacccagttccagcagcaacccacatgcttgagtgccatgtaatcgcaggccttccagcagagttttcctgcacaggaatctagaaacagcacccacctcccacctccctcacaccgtctcattcctgcctgtctctctctgcagcctctttgtctccttttcttttacctttggctcacactccactatatgtctaagttttcactagtctggaagcctcttgtgttgttgattcasggccgttgtaggcaggctaagaattctcagcagttaaccatcacgttacctcccgccctcacagggtctccaaggggattaaggaagctggtgcttcttaggacaccaggacaccagacacgaggtggcctgcttagcaggtgcctgggttgtgtccatgaatacttgtgttcacccatttgtttgtt

SEQ ID NO: 64657 - DNA, 593 bp, Homo sapiens
atcacagcatgcgtatgttggaatttattctgcattgtatgtcaaagtgaagaaattcagattccgtttatgtttcacaagcataacaaccgttgacaagttgctatgaaaagcagacattgactctgtcattattgcaaattattcatatttgaaaggttcatagtttagtatacattttcctttcctgattatataaatgtataatatttatagaaatatttccttctgaattatcaagagcaaaaatttagtataagtgtgttttaaaatttaaattcattaataatgttttgatctgtcttctatgtgtattagaggtatctaatataagaattgggtttttttaatctgccatgcattaaatttaatttggtaaaaggattaycagaactctctcccagccaagagcctctaacatactattttcctgattcaattctttgtcaggtctccctctgaaacagtctcactttgaaatatatattacttttctacaaaatatagtgtgtgttagtttttggaatccaaaatgatgttttatgatgctcattatgtaatgacatattattatccccataggcagctcttgg

SEQ ID NO: 64658 - DNA, 534 bp, Homo sapiens
ttcatttagtttagaatgatttctaatttctcttttgatttcttctttaatcgtatgtgttatttagacataggctatttagccatgcacagtggctcaggcctgtaatcccagccctttgggagaacaaggcaggtggatcacctgaggtcaggaattcaagaccagcctggccaacatggtgaaaccctgtctctactaacaaatacaaaaattagccatgcatggtggcgcatgcctgtaatcccagctacyagggaggctgaggcaggagaactgcttgaacctgggaggtggaggttgcagtgagccaagatcatgccactgcaatccaggctgggcgacagagcaagactctgtctcaaattaaaaaaaaaaaaaagaaagaaagaaagaaagaaagaaatgtgctatttcacttcccagcactttggagatttggagattatccagataactttcattatttgagattttattatttttaagctttattgagtatgtttagatatataaagaattgcacgtatttaa

SEQ ID NO: 64659 - DNA, 684 bp, Homo sapiens
agcactccctaaaaagtagctattgttgtctctcccacctgatgatgaccaaattattcacctggactgtcttagaactaagtcctgcccatgtcagtggctgcttggcacacacrccctgggccatctccagatctggctgactctggcctcatgtggtctttccatggcagctctagctagggggctttggcacataagtgcggtcagatgacatggtggaaatatttgttgaatggattgctagactcctttcctagaggctcagggtccacaaccaatgtcgtcatattgtatgtgctttgcattttaaattctctaacgtcatagtcttccccaggccagcatacatcctttacagggaataaggcactttcagaatgtcttatcagtccctcccttcgcatttcttgatttctctttctgtccttctctccctcatttcctttggtatgttcccttgatctccaacttttctttagtttctcattattctgactattccctaattttcacagcttccaaaatatttccagaatgggagattgtattactttttcctattgctgctataaggcttaaaacaacacaaacttattaccttagagttctggaggtcagaagtctcatggagctaaaatccaggtgccagcagggctggtttcttctggaggctccagagga

SEQ ID NO: 64660 - DNA, 543 bp, Homo sapiens
tggaagatgaggcctgagaaagccctgcggggcccctcaccttctccctagctgtggccaagagtgtctggccttgcctgcctcaggaccagcccaaagtggaggtgagaggtgagccccagcccccaggggaagggtgatggtggtcttggtctcagcatggttctggtagaggtgggttattttgaagatgatgaaccttaagcctctttctgatcttgctttaaataaatacttctgaacaacagcaacaacagaatagtgttgataggaaagccctccactccaccagaaccacgcggccttctcgtcctcccctcctccacttccttcctaagtcactgctccatgagctcttccacaggagatttacaaaayagaacacaaacaatccagttcccgcctctcactctgaactcctcccaagactcgtggggtgcggcagcccctgggaacacccagcccttcaaggtcaaacacagcccccgcccctcactctggggtaccctgccagaataagccccgacagccatgtggagcaga

SEQ ID NO: 64661 - DNA, 587 bp, Homo sapiens
tggttgttacacttgtagattatattgagctatgggacaaaaccagggttcgtgaagatagtaacaggtaggagttagcagaaaaagtcctgatcttgatccatagacccacttgctcaaatgcagaatgaggaatatgtcactttgtggcatcttttcctaaataaacgtacagatttttagtgcatttattaaaaagttgtctcaatgtgagtcattggtttgtgaggtacctgccaaaaaaaaatgagctcagactgcattaatccaagaatagaagtcagcaggcagagagcgatagctccactttactttgtgctggctagccacacctggaatagtgcattcatttttgggagccacatgtttagaaagctaaaaataatctggaacacaaaagtatgagtcaggtgatgaaactaaaaacacgccaaagtgagaatttactgagggactagggaacatttcaccttcaggaggaaaggtttgagggataaaaaayatgtcatcaagtttatagagggctagctatcatgtggaagacttttttgtatgatcctaagaggttgacactgaaatgatttgtc

SEQ ID NO: 64662 - DNA, 866 bp, Homo sapiens
cctggtcactaagaatagtaacagtaatccatttttaaagaatagcaaccaaaatgccttacatgctggataccatgcaagggactttatctcattccatctgtccaccccagacctcttaactatcccaggtaacctgacgatatcccaggctcatttcctgggttatcacagccacctttcatacctgggtccctggagggggctcaggtcagaagagggtatgagagcctgtttgtcacctaggatgtgctccagagtgattcagccacgccctggcgaaatctctgcagggggttttctagactctgtcctgataacagaaccctcccattttgtctttgctttcagctttcttgattctaagcttcaaattttgccatatactgggtcaaaggtacgtrcctgtaatcccaacactttgggaggctgaggtgggaggatcacttgaggccaggcattcaagaccagcttgggcaacatagcaagattccatctctacaaaaataaaaaaattagccgggcatagtggtgtacacttgcagtcccagctactctggaggctgaggtgggaggatggcttgagcccaggagttcgaggctgcagtgagctaggattgcaccaacgcactgtaacctgggcaacagagtgagactctgtctcagtaagtaaataaataaaataaaataaacgcccacctctgtggtcatatccttcagatacaacagatcaagtctttgggttgcagagcaaggatcaactcttgtggctatcacgagagcgctgaggtcatgagccatccaggagctggttaactctgcccatcaggacactcaagcaaaggccaatcctggtggcccacatc

SEQ ID NO: 64663 - DNA, 1192 bp, Homo sapiens
ctttttcccttttgtaaaaatgctggggtgtgtggctgggtttttgtttttgttttttgacagagtctcgctctgtggcccaggttggagtgtagtggtgcaatctcagctcactgcaacctccgcctcctgggttcaagcgattctcctgcctcaacctcctgagtagctgggattacaggcacacgccaccacgcccacctaagttttgtatttttagtagagacagggtttccccatgttggccaggctggtctcaaactcctgacctctggtgatccacctgccttgcctctcaaagtgctgggattacaggtgtgagcctcttygcctggcctgtggctgggttttgatagttctgaatagcgttgatcttgaaaccttaaagaaccattggcttggggtttctccagagaccaccccaggtctttgtcctggaaaatttgaagcgccatccatcctatcgacgaagttcatcatgtgtgactgtcccaaaacatgcgatgtgctcctgtattttcttgccacccctgggttttatgaggaacacctgggggttaagagaaaaacctgttcttcatacattttccgtagatttaatgacaggcaggcactgcctcaagggaacctggatagcattggctgatagaaggaatagagaatctagaagaggttcatttttttttttgagacagagtctcactccattgcccaggctggagtgcagtggtgtaatctcagctcactgcaacctctgcctgctgggttcaagtgattctcgtgtctcagcctccccagtagctgggattacaggtgcacaccaccacacccagctaattttgtatttttagtagagacgggatttcaccatgttggtcaggttggtcctgaattcctgacctcaagtgatccacctgcctcacctcccaaagtgctgggattacaggtgtgagtcactgcacccagtcaagaatctagaagagctttggtaaaggaaaatctttcttcaaagaatttcatctctaaggatgtgaaggagttggttgtccatgaatctgcagcacattctgttatttaccttgggggcctgcttttggagagccattaaaaatcccctctcagaaaactattgtccttgcccattgaaacacttaaaacactggttaagtgtcagatactttgcaaagtgctc

SEQ ID NO: 64664 - DNA, 641 bp, Homo sapiens
ggccgggcgcggtggctcacgcctgtaatcccagcactttgggaggccgaggcgggtggatcatgaggtcaggagatcgagaccatcctggctaacaaggtgaaaccccgtctctactaaaaatacaaaaaattagccgggcgcggtggcgggcgcctgtaatcccagctactcgggaggctgaggcaggagaatggcgtgaacccgggaagcggagcttgcagtgagccgagattgcgccactgcagtccgcagtccggcctgggcgacagagcgagactccgtctcaaaaaaaaaaaaaaaaaaaaaaaaaaaaaaaactcccttgttcaaagctttcatcacatcctattttagkggttaacaggcccatcttccttattagagtttgagctaaagggctggggactgtgttttatctacaacctctactatggtattgacacatagtaggtgctcaagaaacacttatctactgaatgcgtgacttaatgaatagggcggaaaagacaaaattaaacagagaggaacaccaggtctctgaggaggaaaatgaatttccagcagtaggtataaaggaaggcttcctggaggaagtgaaccggctgtagacagactgaagacactctaggccagggatc

SEQ ID NO: 64665 - DNA, 496 bp, Homo sapiens
atcctagagtgtgcagggacacagcaatggaagacctggtccctttgtctgtacttagtctatagccagttcattgtgagaaatttctttagatcgacacctgccactgttartccgggtttcccagtctgtcctttctaactcccttcctgccttaccccctaaaaagctacctcccctcttcccactcctgataatgaacactatgtactttccacgttcaaagcatgccacactccctctctccctcaccttggcctccctaacccaggcttgtcctagtgaaatcacttgcaaagcctgctagccctttcaacttgctgtgttttctccatcaaacacaattttcatcaaacatcccccaggagcaccttaaatgacttccttttgcctaggttctgatttagctttctcaataaggacctcaaagtcaagttcctagtgccacactaactctctacccagaagaggcgataggttttagtttgggggtggg

SEQ ID NO: 64666 - DNA, 990 bp, Homo sapiens
ttattccctactgatacctattgagaaggatatatcacaatattatttcttacagtattatgtgaaatattttctgatattagatttcagtacttctctacaaaacaagcaaacaaagttaatctggctaaactatataacctctatgtatcactacataattctttctcagtgctttttcagaattagaatgtttrtatgtaaagaagtgctttttacattgtctgacacatagaagatacttaaccagtgtttgttctattttattaatgctgttggttgttgttgttgtcgttgttttagagatggagtctcactctgtcacccaggctggagtgtagtgacacgaacatagctcactgcagtttcgaacttccgggctcaagcaatcctcctgcctcagtctcctgagtagcaagaaccacaggtgtgtacaccaccatgccctgctcatttgttatttttttctgtagagacagggtcttactatgttgcccaggctagtctcaaactcctgggctcaagtgattctcccatcttggcctcctaaaactttgggattacaggtataaggcactgactcagctattctccagtcatacaactatgtaattattgagagattatcatgaattgattctgtggtagcgggtacatcttatgtaaacttcagctttactggtgtctgctactcgcttgtttaatttcagtgactctgctgctctcattttgatctcagtcatgtatagtatcaacattttcttgcactttctgtattcggcttgtttgtaagctactcacaattatttcatgtaagaaggtttccacgttctttcatatggcattatgccctattgccttaagggctgagagttaatagcaaagaccccaagaataaacactacagtttctgtgactacaacattttacaaacttttatttgctattttttaaaatatctccacctgcccaacatatatttattaccta

SEQ ID NO: 64667 - DNA, 990 bp, Homo sapiens
ttattccctactgatacctattgagaaggatatatcacaatattatttcttacagtattatgtgaaatattttctgatattagatttcagtacttctctacaaaacaagcaaacaaagttaatctggctaaactatataacctctatgtatcactacataattctttctcagtgctttttcagaattagaatgtttatatgtaaagaagtgctttttacattgtctgacacatagaagatacttaaccagtgtttgttctattttattaatgctgttggttgttgttgttgtcgttgttttagagatrgagtctcactctgtcacccaggctggagtgtagtgacacgaacatagctcactgcagtttcgaacttccgggctcaagcaatcctcctgcctcagtctcctgagtagcaagaaccacaggtgtgtacaccaccatgccctgctcatttgttatttttttctgtagagacagggtcttactatgttgcccaggctagtctcaaactcctgggctcaagtgattctcccatcttggcctcctaaaactttgggattacaggtataaggcactgactcagctattctccagtcatacaactatgtaattattgagagattatcatgaattgattctgtggtagcgggtacatcttatgtaaacttcagctttactggtgtctgctactcgcttgtttaatttcagtgactctgctgctctcattttgatctcagtcatgtatagtatcaacattttcttgcactttctgtattcggcttgtttgtaagctactcacaattatttcatgtaagaaggtttccacgttctttcatatggcattatgccctattgccttaagggctgagagttaatagcaaagaccccaagaataaacactacagtttctgtgactacaacattttacaaacttttatttgctattttttaaaatatctccacctgcccaacatatatttattaccta

SEQ ID NO: 64668 - DNA, 990 bp, Homo sapiens
ttattccctactgatacctattgagaaggatatatcacaatattatttcttacagtattatgtgaaatattttctgatattagatttcagtacttctctacaaaacaagcaaacaaagttaatctggctaaactatataacctctatgtatcactacataattctttctcagtgctttttcagaattagaatgtttatatgtaaagaagtgctttttacattgtctgacacatagaagatacttaaccagtgtttgttctattttattaatgctgttggttgttgttgttgtcgttgttttagagatggagtctcactctgtcacccaggctggagtgtagtgacacgaacatagctcactgcagtttcgaacttccgggctcaagcaatcctcctgcctcagtctcctgagtagcaagaaccacaggtgtgtacaccaccatgccctgctcatttgttatttttttctgtagagacagggtcttactatgttgcccaggctagtctcaaactcctgggctcaagtgattctcccatcttggcctcctaaaactttgggattacaggtataaggcactgactcagctattctccagtcatacaactatgtaattattgagagattatcatgaattgattctgtggtagcgggtacatcttatgtaaacttcagctttactggtgtctgctactcgcttgtttaatttcagtgactctgctgctctcattttgatctcagtcatgtatagtatcaacattttcttgcactttctgtattcggcttgtttgtaagctactcacaattatttcatgtaagaaggyttccacgttctttcatatggcattatgccctattgccttaagggctgagagttaatagcaaagaccccaagaataaacactacagtttctgtgactacaacattttacaaacttttatttgctattttttaaaatatctccacctgcccaacatatatttattaccta

SEQ ID NO: 64669 - DNA, 1350 bp, Homo sapiens
tttcattctctgccaatttgagaaagttgtcaatcaagaagatcccagacgacagcacaattttgagattataatgcagggtgacaaaaaattatccccatagcttgatcattttgttattcaagtagtgatgtggcacctatacaggcccattgattttgatactgggagagagacaatcaggtaatctttatgagactgtgtgtggttaagaaacacctacatgttaagctactgtaatacatatttcctattacctcgggagatacyactggagattaaggatccaaataatagaaaaaataatagacagaatcagtatctatcatgtaggcctaggtttaaacacctaggtctgcttgattctaaagccagaatattttatttcctttcatttatttcattattcattatttattttttcttatttttcttcatccctttgttccttccttcattcattaccagcaccaagtttttgcttgtagtctacttttagtacactaaaaagtgtgtttgagtctcttacaaatgaaagagaactattaaagcgtcatcattaatacatgtcagaagacagcagaactgtaaacagagctcagttgcaaagttgagaatcttactattacagtcttctcagatattcggaagtgtgtttactgtagataggaggcatgcattcttattgtttagtaggttacataccacacaaactcaatcttgtgcacaatgcaaagaagagaggtatttaggacttccaccagaaatctgagattggaggctatattagtctgttttcacactgttgataaagacatacccaagactgagcaatttacagaagaaagaggtttaaaggacttacagttccacatggctggagaggcctcacaatcattgcggaaggcaaggaggagcaagtcatcttacgtggatggcagcaagcaaagaaagagatcttgtgcagggaacacctccccgctataaaatcatcagatctcgtgagacttattcactatcatgacaatatcacgggaaagaactgcccacatgattcaattaccaccaaccgggtccctcccacaacctgtgggaattcaagatgagatttgggtgggggcgcatccaacccctatcagaggcattaaactagtctccactgtagtcttgtcttttagggaaaggtctttgcaagtcacatttgtgaattaatcaagaatgctaaggcctgactattcctatccaggaattttcttccactttatttcaatcacccctatcaaaatgcttcattatttacacctgatttcaagtgtgttcaatcactctctctccacaggctttccctct

SEQ ID NO: 64670 - DNA, 1350 bp, Homo sapiens
tttcattctctgccaatttgagaaagttgtcaatcaagaagatcccagacgacagcacaattttgagattataatgcagggtgacaaaaaattatccccatagcttgatcattttgttattcaagtagtgatgtggcacctatacaggcccattgattttgatactgggagagagacaatcaggtaatctttatgagactgtgtgtggttaagaaacacctacatgttaagctactgtaatacatatttcctattacctcgggagataccactggagattaaggatccaaataatagaaaaaataatagacagaatcagtatctatcatgtaggcctaggtttaaacacctaggtctgcttgattctaaagccagaatattttatttcctttcatttatttcattattcattatttattttttcttatttttcttcatccctttgttccttccttcattcattaccagcaccaagtttttgcttgtagtctacttttagtacactaaaaagtgtgtttgagtctcttacaaatgaaagagaactattaaagcgtcatcattaatacatgtcagaagacagcagaactgtaaacagagctcagttgcaaagttgagaatcttactattacagtcttctcagatattcggaagtgtgtttactgtagataggaggcatgcattcttattgtttagtaggttacataccacacaaactcaatcttgtgcacaatgcaaagaagagaggtatttaggacwtccaccagaaatctgagattggaggctatattagtctgttttcacactgttgataaagacatacccaagactgagcaatttacagaagaaagaggtttaaaggacttacagttccacatggctggagaggcctcacaatcattgcggaaggcaaggaggagcaagtcatcttacgtggatggcagcaagcaaagaaagagatcttgtgcagggaacacctccccgctataaaatcatcagatctcgtgagacttattcactatcatgacaatatcacgggaaagaactgcccacatgattcaattaccaccaaccgggtccctcccacaacctgtgggaattcaagatgagatttgggtgggggcgcatccaacccctatcagaggcattaaactagtctccactgtagtcttgtcttttagggaaaggtctttgcaagtcacatttgtgaattaatcaagaatgctaaggcctgactattcctatccaggaattttcttccactttatttcaatcacccctatcaaaatgcttcattatttacacctgatttcaagtgtgttcaatcactctctctccacaggctttccctct

SEQ ID NO: 64671 - DNA, 1135 bp, Homo sapiens
tgagcatgggagagagaatgtggggcttcatagaggcggcttctagaattgacttttttgctgactgtggggtcagggctgagagaagcgtcaaaggcccaatgtccaggtgtccctagccggagaggtggggttcaaatcagcctccttcgggtccatgcagcgtggcaccatggtggctgccatgccctggctggctgacctcatgcaaggcaccgcatttcctgacctatgcacagggcataacaaggcgtgcccaccttaaggggcttcgtggggtcaaacaaagcaatgggtggaaagttcagggaacccctcagtgccctgggctcacaccaccagtctctgagtctatttccttacctggagtagatgaggttaacgtgcctgccttgcaggcccaggtatggaaagcattcagcacatttggggtaagagttcgaaagcctagtaactagggggcttaccccttaagcccatgggaactgctgtgggatccccgtggtcagcctggggttgacatctggggtgttgcaggggcgccccctgagggctgtgcactgtcagccagggagggcctgccaagttatgatgtcctgccctcagagacatgggtagggaggaggctrggaggggagggaccccgcccctagcagcctccggagactgaacacaggcccaggtgcccacccagcagagagctgcccccagcttccagccctgggtccagcaggatgcagaagcagcccctgcccactggatggggggcaggtggtaggggtgcccaggtgcccctgtgcccttctgccagccaggcctggaggcccaggagtaacgagataatcacagcaattgcagcgagataggactgtctgcttgtggagcactgagatgctggagcaggcggggggccgggagagtggcaggaagcttcctcaggcagagtcgctcgtcccaccagccggggtgccaggactctcatcctggaaccctgcactcccacccagccctagtcttggtgtccaggaagggctctgaggccttttgctcaaatgagcccatcatctaatgagggagaggagtgtgggtggggagctctgcgggctgcctggaactgactgtttagagttcaggt

SEQ ID NO: 64672 - DNA, 928 bp, Homo sapiens
agcatagctggattaagacaattgttggtttggaaaggggttaaagccttaagcgaaaaaatctacctaatagtgaatgaactatgtaattaacttggatatttttaagttcctatggttaaaggttccccatacttctctattcagagacatgagaagtatgattgcttcagtgttagttttcttacttttttttcctatttgtccctagtcactttgttgcaagctagaaaactgggggttctacatagggcagctctttgtgaaagtgttttatcccactggagaaaggggattgaaaatcagttaggaccagtgtatttcttgccccaccgaacactattcctataataaaatagctgaaagaagctgctgggtggagcttcggcaccttgtacaggaattccaatgaattaagacttttcattctgttttagcagtacatatatgtcctatttcgggaaaagtaaaaccgtcatttacaaaagaatgtcaatctgtatcctaagcatttatataaaaagttaaaacaaaacgaaagtgtagagtcttagacagcacctatatctacagaaccagagcctcattttaccagatcccctggtacattggtattggagaagcactgacatggcatctgagagtggggatggtatgaaagtgagaaggcaaaactgatcatcttatttcaagacactgtggcaattatgtggtttaaatttctttattactttaytacttttaggtttggcttacttggcttacttttcaggctcagccttcttcactgagaattacacacacccaaagcttttcatgtacttatttctaccagagacttcacccagtgcctgagttttcagtattagaagcgttttttttgcattaggtgtgggcagaggttaaaatattcatgtgttccctaaaa

SEQ ID NO: 64673 - DNA, 928 bp, Homo sapiens
agcatagctggattaagacaattgttggtttggaaaggggttaaagccttaagcgaaaaaatctacctaatagtgaatgaactatgtaattaacttggatatttttaagttcctatggttaaaggttccccatacttctctattcagagacatgagaagtatgattgcttcagtgttagttttcttacttttttttcctatttgtccctagtcactttgttgcaagctagaaaactgggggttctacatagggcagctctttgtgaaagtgttttatcccactggagaaaggggattgaaaatcagttaggaccagtgtatttcttgccccaccgaacactattcctataataaaatagctgaaagaagctgctgggtggagcttcggcaccttgtacaggaattccaatgaattaagacttttcattctgttttagcagtacatatatgtcctatttcgggaaaagtaaaaccgtcatttacaaaagaatgtcaatctgtatcctaagcatttatataaaaagttaaaacaaaacgaaagtgtagagtcttagacagcacctatatctacagaaccagagcctcattttaccagatcccctggtacattggtattggagaagcactgacatggcatctgagagtggggatggtatgaaagtgagaaggcaaaactgatcatcttatttcaagacactgtggcaattatgtggtttaaatttctttattactttattacttttaggtttggcttacttggcttacttttcaggctcagccttcttcactgagaattacacacacccaaagcttttcatgtacttatttctaccagagacttcacccagtgcctgagttttcagtattagaagcgttttttttgcattargtgtgggcagaggttaaaatattcatgtgttccctaaaa

SEQ ID NO: 64674 - DNA, 731 bp, Homo sapiens
ctattctttctcactcaaaagactcaactttctctgcttcaatttgttaaagccttagtccttttgtgtgtgtgtgtgtgtgtgtgtgtgtgtgtgtgtgacagagagtgtgtgtgtgttttacaaaaggtgcccttttcttaaataattgttataaygttcaagtgagggccatatggcctcccaatttttggatgacattgacaagtgcaatgcaaatttgcaaacaaaatgacatacatcttggagtgattaaactaattcttttttaatgactaagaatgctatgcccaaattccaaaccattctccaacattgatcaataacaagtacaaatagttgaacagtatgtaataaagacaaaagaaaagaagtacaattttaaattgtattctaagaacacagatcataatcaagtcttcatttaaaaaactaaaatgttttcacccttgtaagggtaatgaatgggaatgtttaaataaaccatggcaaattctattatggatgtttttaaaaatgaggtatttaagcatccaatgacacggaatagcttctaggatatagcaagttttaaaaagcagatgagagagtaattatataaattgtctaatgtgaaagaaagatctaaatatgtgagttttaagtattctgccttgaatggatttataactgtagagattattctttatatatgcgatttcaaaatcaaggcaaagtatgtctagttttga

SEQ ID NO: 64675 - DNA, 731 bp, Homo sapiens
ctattctttctcactcaaaagactcaactttctctgcttcaatttgttaaagccttagtccttttgtgtgtgtgtgtgtgtgtgtgtgtgtgtgtgtgtgacagagagtgtgtgtgtgttttacaaaaggtgcccttttcttaaataattgttataacgttcaagtgagggccatatggcctcccaatttttggatgacattgacaagtgcaatgcaaatttgcaaacaaaatgacatacatcttggagtgattaaactaattcttttttaatgamtaagaatgctatgcccaaattccaaaccattctccaacattgatcaataacaagtacaaatagttgaacagtatgtaataaagacaaaagaaaagaagtacaattttaaattgtattctaagaacacagatcataatcaagtcttcatttaaaaaactaaaatgttttcacccttgtaagggtaatgaatgggaatgtttaaataaaccatggcaaattctattatggatgtttttaaaaatgaggtatttaagcatccaatgacacggaatagcttctaggatatagcaagttttaaaaagcagatgagagagtaattatataaattgtctaatgtgaaagaaagatctaaatatgtgagttttaagtattctgccttgaatggatttataactgtagagattattctttatatatgcgatttcaaaatcaaggcaaagtatgtctagttttga

SEQ ID NO: 64676 - DNA, 1020 bp, Homo sapiens
tctataatttcagatcactgaaaggcaaccagcttattctcagctcacatatggaaaaacgcaatgtatggggagataaaggtggtctgctaagcaccctatggagaactccagcaccatawtacctcaggctactttctcaggttacacaaacctcctgaagtccctgaatcagaaggggaagaaacctgcgtaaagaccatccaatctagccccccttttcagaaacataattaacaaaactagccggaaaagagcattttctccagagcagatactccaacacttctcccactggcctaaatcaataaggtctttctgactttactttccatccatctcctcttagccaatcttccacagttacaaaacaactacttggcatattcatgcaggctgttcatgaacctgaaggaacatattaccccttggtcatctcttgtgttgaaaaatgaactcagttttctgaaattttcttcataaaactcattttccacttctggtaaattaaatttttattgaaagcctactgtgtgtcaggctacgtattcagctctaaagaaacaatggtgagcactacagacctcctcacagagtttatagttcggcaagcaaggctgacattaaataaaaatttacagtgaaaaagtaaaagtggctcttctcatctctgaacatcacaggtagaggagacataactgggcacctgaaatggctggactgtagggaactgctccagtttccccatcaagaggaataggcagacacacagcaccgaatccaataaactgaaggccggcaactcctttggttacaactaactgattcactgaaactcctgttaaaactgactgtgggtgtggagccaacagcaaaggtgttgtggtggtcatgaaggtgataaactgcccaacaaaagcaaaccacctcctatatgcaaatcgccaccaccaagaactccggggccactctcaacagcatccagcacatgctccacaagaagtaccatcacccagatct

SEQ ID NO: 64677 - DNA, 758 bp, Homo sapiens
gttacacataactttaacttcagactgttttagaaaccaactgataaaaatcactgccaataatccccataaacttgtaataactttaggtttataaattaatttcattattatgattactgatataactttcagctaatcgatcccttgtacgcacacaaaaaaaaagagggagaaagatatttctcattgagtgtcattttttgtggttactctgcaaccatttaagtgtgaccgatcattataagttccatatttctttacaaggtgattagtatcattttgatatttagtatattaatcagcatccactcaagacagcaaaaccataaagtaatttaaacacagaaagtttcatgtaaagaaatattaagtatataaggagttaaaaacatgaaggattgtgtacctcaggggtaaaaggaattttaaagaatagaggaataccggatatagggagragtcattacctctcaggggaagtgccaccaaccaaagaagtacatctgggtttttctgcctgggttgacatacatagactctgccccatggtgtatgggaaaatggagacgttcactacggtgctgcatcaagctgtcccaggggaggtgccaagcctcggaagtcactgcaaagctgtctgcaagggtgctgaggtggtgagaagccagctaagagggacttgggagaagcagccagtgaagaggtgtcctatgctgctggatcccatacagaggagcacatgaaggaccgggaag

SEQ ID NO: 64678 - DNA, 758 bp, Homo sapiens
gttacacataactttaacttcagactgttttagaaaccaactgataaaaatcactgccaataatccccataaacttgtaataactttaggtttataaattaatttcattattatgattactgatataactttcagctaatcgatcccttgtacgcacacaaaaaaaaagagggagaaagatatttctcattgagtgtcattttttgtggttactctgcaaccatttaagtgtgaccgatcattataagttccatatttctttacaaggtgattagtatcattttgatatttagtatattaatcagcatccactcaagacagcaaaaccataaagtaatttaaacacagaaagtttcatgtaaagaaatattaagtatataaggagttaaaaacatgaaggattgtgtacctcaggggtaaaaggaattttaaagaatagaggaataccggatatagggaggagtcaytacctctcaggggaagtgccaccaaccaaagaagtacatctgggtttttctgcctgggttgacatacatagactctgccccatggtgtatgggaaaatggagacgttcactacggtgctgcatcaagctgtcccaggggaggtgccaagcctcggaagtcactgcaaagctgtctgcaagggtgctgaggtggtgagaagccagctaagagggacttgggagaagcagccagtgaagaggtgtcctatgctgctggatcccatacagaggagcacatgaaggaccgggaag

SEQ ID NO: 64679 - DNA, 663 bp, Homo sapiens
cagtcagtgatacctatgtttttggctgtataatttgatatataaaatgtaaatagatagaaggatagatagataggcagataggtagatagatttgtactggctgtgtttagcaatgttaatgtaattatctttatccttagtctggctaaatgtttgtcaattatgttggtgttttcaaaataccaactgttagttttgttgatttattctgtttatctattctcttcttcatttatttctactctaaaacttagttcctttttctgctaactttggctttaacttgtcatttttctagttttttgaggcataaaattaggttgcttacttcaggtctttttttctattttgttttaggtgtttattacygaaaattttctttttagtgcctgcatttcatacgttttggtatgttgtcctatcattttcatttgtcatatttttttatttcccctataatttgttctttgaatgattatttgttcaaatgtacattgtttcattttcattttgtgaatttccggtttttcttttggtattcgtttctagtttcatttcatttttgtcataaacaatgcttggtatgattttgattttcacaaatttattaaaacttgttttgtggcctaacatatgatctcttctagagaatgttccaag

SEQ ID NO: 64680 - DNA, 663 bp, Homo sapiens
cagtcagtgatacctatgtttttggctgtataatttgatatataaaatgtaaatagatagaaggatagatagataggcagataggtagatagatttgtactggctgtgtttagcaatgttaatgtaattatctttatccttagtctggctaaatgtttgtcaattatgttggtgttttcaaaataccaactgttagttttgttgatttattctgtttatctattctcttcttcatttatttctactctaaaacttagttcctttttctgctaactttggctttaacttgtcatttttctagttttttgaggcataaaattaggttgcttacttcaggtctttttttctattttgttttaggtgtttattaccgaaaattttctttttagtgcctgcatttcatacgttttggtatgttgtcctatcattttcatttgtcatatttttttatttcccctataatttgttctttgaatgattatttgttcaaatgtacattgtttcattttcattttgtgaatttccggtttttcttttggtattcgtttctagtttcatttcattkttgtcataaacaatgcttggtatgattttgattttcacaaatttattaaaacttgttttgtggcctaacatatgatctcttctagagaatgttccaag

SEQ ID NO: 64681 - DNA, 1055 bp, Homo sapiens
catgtagagctgcaatacataaataatctcaaatggattttcctgcaagatgtggagatgtccaatatctcaaactggaattacttgccttagttactcagttgcttaccttaatcacttcacctttagttcacaccacaggccttttcgatctgctttcttctcccaaaacaccactgaaactgcccttgacaagctcagaagaaactcccaccagctgattccaacgggccaagcctcccttagccgctgcctcctttgtgaaatactattttctcttgccttattcgagacctcagctgcccatttttcctcctgatagattgactgtccctcccaaaatctttctatagttaatgttctaatgcctacttyctaaacgtgcaagagcttctggcggcaacctttactccttttcacttttctagctttactctcttcttgaggtgttttctttatttccatatattttcatagcactcttctactaatgactttcagtgtcaatgtcccctaaggttcagatttatacaacagcaactaccatcttttacagctgtgccccagtccacgtttaacttgtttatatcgttgattgatatctcagggaatctttgagttaaatttttaaaggaatggctaaatcttctagtaggaataaagtcattcaatctgttctctagtttaaaactgaatgcttgtagtcagtacacatttccaatagactaagatattccagtttcctagatgaccaaaggaagagatttcagtaccctaaagaaaaatatgcagaacaggagtaaggagaatactgaaattgtgagaagaaagagctagaacaacttggaaaattgccagacaacaaatgcaatgatttctaccaactaacgggttgtgattcaaacaaccctagaaaaggaaggtaaagatatattgaagaaaaaattcaggtgtagttttcaacaccctgtcagcaaatgttctactgaaagtctccacatcctgcaggaaaattcatttgagattatttgtgtgttttagttcttgattacaac

SEQ ID NO: 64682 - DNA, 1055 bp, Homo sapiens
catgtagagctgcaatacataaataatctcaaatggattttcctgcaagatgtggagatgtccaatatctcaaactggaattacttgccttagttactcagttgcttaccttaatcacttcacctttagttcacaccacaggccttttcgatctgctttcttctcccaaaacaccactgaaactgcccttgacaagctcagaagaaactcccaccagctgattccaacgggccaagcctcccttagccgctgcctcctttgtgaaatactattttctcttgccttattcgagacctcagctgcccatttttcctcctgatagattgactgtccctcccaaaatctttctatagttaatgttctaatgcctacttcctaaacgtgcaagagcttctggcggcaacctttactccttttcacttttctagctttactctcttcttgaggtgttttctttatttccatatattttcatagcactcttctactaatgactttcagtgtcaatgtcccctaaggttcagatttatacaacagcaactaccatcttttacagctgtgccccagtccacgtttaacttgtttatatcgttgattgatatctcagggaatctttgagttaaatttttaaaggaatggctaaatcttctagtaggaataaagtcattcaatctgttctctagtttaaaactgaatgcttgtagtcagtacacatttccaatagactaagatattccagtttcctagatgaccaaaggaagagatttcagtaccctaaagaaaaatatgcagaacaggagtaaggagaatactgaaattgtgagaagaaagagctagaacaacttggaaaattgccagacaacaaatgcaatgatttctaccaactaacgggttgtgattcaaacaaccctagaaaaggaasgtaaagatatattgaagaaaaaattcaggtgtagttttcaacaccctgtcagcaaatgttctactgaaagtctccacatcctgcaggaaaattcatttgagattatttgtgtgttttagttcttgattacaac

SEQ ID NO: 64683 - DNA, 1055 bp, Homo sapiens
catgtagagctgcaatacataaataatctcaaatggattttcctgcaagatgtggagatgtccaatatctcaaactggaattacttgccttagttactcagttgcttaccttaatcacttcacctttagttcacaccacaggccttttcgatctgctttcttctcccaaaacaccactgaaactgcccttgacaagctcagaagaaactcccaccagctgattccaacgggccaagcctcccttagccgctgcctcctttgtgaaatactattttctcttgccttattcgagacctcagctgcccatttttcctcctgatagattgactgtccctcccaaaatctttctatagttaatgttctaatgcctacttcctaaacgtgcaagagcttctggcggcaacctttactccttttcacttttctagctttactctcttcttgaggtgttttctttatttccatatattttcatagcactcttctactaatgactttcagtgtcaatgtcccctaaggttcagatttatacaacagcaactaccatcttttacagctgtgccccagtccacgtttaacttgtttatatcgttgattgatatctcagggaatctttgagttaaatttttaaaggaatggctaaatcttctagtaggaataaagtcattcaatctgttctctagtttaaaactgaatgcttgtagtcagtacacatttccaatagactaagatattccagtttcctagatgaccaaaggaagagatttcagtaccctaaagaaaaatatgcagaacaggagtaaggagaatactgaaattgtgagaagaaagagctagaacaacttggaaaattgccagacaacaaatgcaatgatttctaccaactaacgggttgtgattcaaacaaccctagaaaaggaaggtaaagatatattgaagaaaaaattcaggtgtagttttcaacaccctgtcagcaaatgttctactgaaagtctccacatcctgcaggaaaattcattkgagattatttgtgtgttttagttcttgattacaac

SEQ ID NO: 64684 - DNA, 1055 bp, Homo sapiens
catgtagagctgcaatacataaataatctcaaatggattttcctgcaagatgtggagatgtccaatatctcaaactggaattacttgccttagttactcagttgcttaccttaatcacttcacctttagttcacaccacaggccttttcgatctgctttcttctcccaaaacaccactgaaactgcccttgacaagctcagaagaaactcccaccagctgattccaacgggccaagcctcccttagccgctgcctcctttgtgaaatactattttctcttgccttattcgagacctcagctgcccatttttcctcctgatagattgactgtccctcccaaaatctttctatagttaatgttctaatgcctacttcctaaacgtgcaagagcttctggcggcaacctttactccttttcacttttctagctttactctcttcttgaggtgttttctttatttccatatattttcatagcactcttctactaatgactttcagtgtcaatgtcccctaaggttcagatttatacaacagcaactaccatcttttacagctgtgccccagtccacgtttaacttgtttatatcgttgattgatatctcagggaatctttgagttaaatttttaaaggaatggctaaatcttctagtaggaataaagtcattcaatctgttctctagtttaaaactgaatgcttgtagtcagtacacatttccaatagactaagatattccagtttcctagatgaccaaaggaagagatttcagtaccctaaagaaaaatatgcagaacaggagtaaggagaatactgaaattgtgagaagaaagagctagaacaacttggaaaattgccagacaacaaatgcaatgatttctaccaactaacgggttgtgattcaaacaaccctagaaaaggaaggtaaagatatattgaagaaaaaattcaggtgtagttttcaacaccctgtcagcaaatgttctactgaaagtctccacatcctgcaggaaaattcatttgagaytatttgtgtgttttagttcttgattacaac

SEQ ID NO: 64685 - DNA, 617 bp, Homo sapiens
attgaatgaaacaatgtccatgaaagcattttgcaaactgaaaaagctgtacatatgccgtatggtgtagtaatgacactgtggctttttatgtgtagtcctaaaacacataagctgctttccctcttcaacagtggagttcatctttttagccattcattccaaaagtattttttgaatccaacatattgctagagctttacataccctttagtttaatcttcataacaacaggatctctcccatttttaagatgctgtcactgagaatcaggaagtttaattaattcattcagaggtatgctacctgtaaaggaargagccaatgaatccactttgtttatttttttaaattttgaagctgtgttttttccaccatgtaagacatcttcgttttgtcagattagcggtaaagcttcctttcctcagggatctcacattatccaaaacatgaagtgatcataccatgactagaatatatacattaagaaaacaagggagaacagtgactaaatgctgcttttagagcagactttagaagagaggtgagagtttatttagctctctgctgtagccagggttgttcgttctagaaagaaccaaagcttagatggagat

SEQ ID NO: 64686 - DNA, 711 bp, Homo sapiens
ttaaaacaccaacagaatcagtttgggtatggatctggtaaacattttggagtctcatctttacatatgcaggtctttataaacccttgggtctgggtctcccaaatgatgcccagtgtcactaattgctggcacagtccccacccagcacctctgtgtccccttttttctgtacctaggaccatctcccttttcatttaccttcctgtggctcattccccttctcgacattcagtgctctgctatcccacacaggttgaccctgattgcatgatctaaagggagtttccagagtctcccttaacactttaccttgttttatttactttaaagcatttgtcactatctcacaatatcctatttcttcagttgtttgcttgtttatgatgtttcttctcctattagaaataaaaccccatgacagcaggatacttttgtgttactcattaagttcttccctacagcctaacactatgcctggaagatagaaattgcctcatgtatattttcaaatgaatgaatgaatggagaaatgaatggacggatagttgatatcctgcacagaaatgccaaacattttttgattgagatttttgatmcctgccagccatcatcaatccctgtcctctcatcttgtttacctctcggttcttttcttcctatattccaggttgcatgggcttgatccacaatgactcagctttcagccat

SEQ ID NO: 64687 - DNA, 1088 bp, Homo sapiens
cccagctgagcttcccaattgtttccaagatgtcccttccctctccaaccctctctatataaacccaccttactaatatcccaacacacaacctccccagcctagctttgctgcctgtactgagactatattatttactcattcacaaatcttcaaactttaaccctgagctttcttcgtagcacaacttaatagctacctttctattctgcttttgcagatcccctaatgccctttacattgtttgamtgtaatttctcttctgaatggagcaatgcacttaacgaacctcaatgttctgtattttatattaattaaagaacacatcttgtctctcagatattaagaagtggggaatatagatttcactctcgttcatttctacatcagaccttgtatgcagtagacacacagtgaatgttgctgaatgagaaatgagagatagaaatggaagccaagggttttgctttcttttggtttcagtttaattttacttgcccagctggttagaagacattttaaatgtgaacttcacctgtaaggaaacacagttcagcacagagaaattcttattcaccttagtcctccacagagctttcccccaagctgtgattcctctgcaggcaatttcgtgtcaatacatatgcagtagggttagtacaacccaggggagaatgagatttcatccccccagggaagcagagcaggacgctgaactatgtaaacatcccacccctcatttattattattattattatttgaagaaatttcaccaagctatttcagatcatccagattatttctttgaaaatttttgtattttagctctgctgttttctactttatgtcatttacttttattattttatccacattttatacattggagatcagattgtagcaataataaggaaatctatttatttggacctggaggcaaaattctgaatatatattcttctctagtagacctcaaccatatagtcttttcctagaaatggttttattagatttcttggaagaaagcagaaaagatttgctgaattacatctctaagtcatgatcagacagagagcggtcacaacgc

SEQ ID NO: 64688 - DNA, 1088 bp, Homo sapiens
cccagctgagcttcccaattgtttccaagatgtcccttccctctccaaccctctctatataaacccaccttactaatatcccaacacacaacctccccagcctagctttgctgcctgtactgagactatattatttactcattcacaaatcttcaaactttaaccctgagctttcttcgtagcacaacttaatagctacctttctattctgcttttgcagatcccctaatgccctttacattgtttgactgtaatttctcttctgaatggagcaatgcacttaacgaacctcaatgttctgtattttatattaattaaagaacacatcttgtctctcagatattaagaagtggggaatatagatttcactctcgttcatttctacatcagaccttgtatgcagtagacacacagtgaatgttgctgaatgagaaatgagagatagaaatggaagccaagggttttgctttcttttggtttcagtttaattttacttgcccagctggttagaagacattttaaatgtgaacttcacctgtaaggaaacacagttcagcacagagaaattcttattcaccttagtcctccacagagctttcccccaagctgtgattcctctgcaggcaatttcgtgtcaatacatatgcagtagggttagtacaacccaggggagaatgagatttcatccccccagggaagcagagcaggacgctgaactatgtaaacatcccacccctcatttattattattattattatttgaagaaatttcaccaagctatttcagatcatccagattatttctttgaaaatttttgtrttttagctctgctgttttctactttatgtcatttacttttattattttatccacattttatacattggagatcagattgtagcaataataaggaaatctatttatttggacctggaggcaaaattctgaatatatattcttctctagtagacctcaaccatatagtcttttcctagaaatggttttattagatttcttggaagaaagcagaaaagatttgctgaattacatctctaagtcatgatcagacagagagcggtcacaacgc

SEQ ID NO: 64689 - DNA, 460 bp, Homo sapiens
ttatgcctgcagtccttacctcacaagagtgaaattccccttcctttcagactctttagcaagcctcccagctggctccctgggtctcctctctgcccatttctccattgcataatggaaactatgctttcctcatgcctactgtaaggatcaagggagattatgcacatggaagtggcttgacactaagtgcagtgtagacattttgaagaggagagtgacagtgtctgaaggaaacatctatacacacacaratatccatgcacatgcagacacacaccgttttctttcacaaataaaccagtcaggctaaagccatacaaaaacgtagggaaagtctaataaaacataaatatttaacaaaaagtcatccctgtgttcccccattgagtttaactttctggattcttttattgaatattgacctgttccagagtagccatcattttattccattttc

SEQ ID NO: 64690 - DNA, 633 bp, Homo sapiens
ttcatcatcattaattgattcaaagaaaagtctctgcttctagtttatataacaaaacagccagagcctgcattgcagaaagggtcttagcaatgttataaattttggggttagagaaattgagaagtttaactaaaagaattggtctcagaagacccactcctacttaaaagcattaccctgaggattactgcccttgttggttgatgtttaatgtgtcattttagaatcaatggatgaaatttgggctggaaggcacacagggctgcatgtaggggaggggcagtgaggcacagaggaggaattgctgggagtcagcacatgtagctcgacattgcatggccagctctgtcattaggaagcatccgcaggggtcacaagtgtgtcacgwggcgagatgtcttagttttatctgtagaagttggggtaatgataccatatcagtcaggattctctagagaaacagaaccaacaagagattttatatgtaaatgagatctatcatagggattggctcacatggaggcggagaagtcccataatctgctgtctgcaagcttgctggagagccaggaagtggatggtgaatttagtttgagtctgaaggcctgagtataaggggtacagatattc

SEQ ID NO: 64691 - DNA, 811 bp, Homo sapiens
gatttcacccattaactagttttaccaacattgcaaagtcacgatggtaaatgttgggaatgaaatcttcaaaacatagcttttaactattctgtgtaaattgaaggtgtatctttttacataaagttctatgtacaaattgtattcatttaattttatagaattttgaaaagcactttaatttcacagacatttactacagaatacttactgttggctagtaaagatgacattaacaccattggagattttctttgtattaccttgaaataaaattatttgcaaaggtataacagactaaaagcataactataaatcttcattatcaagtttatgaaagagtattgagagaaactgtaaaatttaagatcaaatgagatttttaaagcatacacaattattgcctgaacatgtatagctggaataattatccttctgaaaattcagaaagacacattaataaatttaaaaataaaccatattaaagtatacctgtgtgtgcattagttctgtgtttcttccttgagcttcttttgtggatgagttaagtttattgaaattttaatattttacttggccataaatcctcatatattttctgtgtttttttatacttaggtatgtctagtgaatcaacatggtctagctgctatggccagtaatcccaaatttcacaagctcaayaaaaagaagtgttatttatatctcactctatatatagtccaatgtgggttggggacagtggctgctccatagtcatccagggacataggattgcttccacatctcctgggagtcaggcttcacctca

SEQ ID NO: 64692 - DNA, 653 bp, Homo sapiens
tatgtwttcctctgtgggctggttcagctgggtgtggttttctgcacttaccagaaacaaacatgaaatttgcatttttctttgggaggccgaggcgagtggatcacttgaggtcaggagttcgaaacccgtctggccaacatggtgaaaccaagtctctactaaaaatacaaaaattagcccggcatggtggcgcatgcctgtaatcccagctactcaagagactgagacacgaaaatcgcttgaacccgggaggtgaaggttgccgtgagctgagggatcacgccactgtactctagcctgggaaaccgagagagactgtctcaaaaaaaaaaaaaaaattgcatttttgctcaaattgctccctaatatatcaatcgctttggaacaaattcacattttcaaaacaagccttacagaagcataagacacagtgtatataccaaattctataatatagacttacaacaggataatttattaaggagactcaaggaggtaggagaggcccagtgaggggcagagacacccctatggttgccagacacttgttccctcttcatttttttcatcttctccattccaagaaggtagctaagtcttatgtaattatttgcctcagaggcatctgcagagccattcatttaatcaat

SEQ ID NO: 64693 - DNA, 1844 bp, Homo sapiens
  misc_feature (1)...(1844): n = A,T,C or G
ttattcaatagttgaaatttttagtaaaataactcttaacaagaaaaactcctggatgacttctaccaaacattaaaagaaagaaaaccaggcaaaaacaataataatataaaaagtaaaataaacaaattcatgcataaataaattttgaatctaccttcttttggccgtctctaccgtcattagctctgctcagggaccatcagtctatcatttgtatcattgcaatgtcttcttaaccagtgttcctcggtgcagctttgattcttcaagcataaaattaatgcacacatccgcacatgtgcatgcttgcttacatctcaatttatgtcacttaaagccactcaaatacgttccattgtttctaaaacaaatccaaattccttgctagactaacaagatttacaggtccagatctttgctttctgttggatctgatcttgtccactcctttcctggctcactaagtctctggcacccttgtgtaactaatatttattgaaattttttaagttcatctctgtcctagaaatgatacctctacctagaatgttcttgaccattctctaaatgatttgcttctttaatttcataggttaggatttaaatttcacttctttttgggggtctccctgactaaagtaggcttctatattaagattcttatttacgtacttaataaaacgtattgcaaattgcaagtatagaatatataggtcatatatagaaatagsataattttagttctctctctctgatacaggtaaatatgaaatcagaattagcaatctttaaaaaggaacagctgggtgccatggctcacgcatgtaatcccacactttgggaggcaggggcaggtggatcacctgaggtcaggagttcgagaccagcctgaccaacatggtgaaaccctgtttccactaaagaaatacaaaattagctgggcatggtggcgcatctgntaatcccagctatttggaaggctgaggcaggagaatcgcttgaacccgggtggcggaggttgtattgagcccaaatcgtgccattgcacctcagcctgggcaacaagagtgaaactctgtctcaaaaaataaagaaatgaataataaataagataataaataataaagaatgcatgttaattagagaaaaaaatcagaagcaaatcactgacttctaaaagtgctttgttatttccagtgattcttaaacttgtatgtgcatcagaattacttggaacacttataaaaatgcaaattattgagccacacccacataatttttgactaaacatatcttggttgggttccaagaatttgtatgtctaacttgttcttccttgaaggtgatgatgctggcgcagacatctctctttgagaaatactgatgtatttatattttcatggcacaatgcggtgctgaatttttaaactgaaaaatgatatgtttctgaaacatatcacttttttataatacagatagctaaacaatttgaccgactaactagtttgacttgaaactttcaattgaggttaaatttgtatctactctgtgctttattagtgtgacagattatgctgttttattttcctgtcattcaatgcacaaagataaggtccccattattttcaaactattttattatgaagccagacttgacccatctgaaatgtaaacctctatgtttgtaacaaagatttgtgatgcagttaatataatttttgaaaatggtatagcatgttgtagtaggcagaaagatagcccctcgtagatctaaacctctggaaatattgccttacatagtaaaagtgtttttgtgaatattttttaaattcaagatcttg

SEQ ID NO: 64694 - DNA, 1856 bp, Homo sapiens
tggaccttcactcaggaaattggtggctcagatcaagaagcttgtctcatgtaattgaatattgctggaggaatccaaagccttggtgtgctgcaacatgaagagggatctggaacaggccaacgagagaacatgtgaagtactgaagaaaatctggggttctgcccaagggttggactccatgtgaaaggacttagaaaggaagatgaacgagtttcgagtgtcaggctgcacactgaccacatggggttccggctgagaagaacaccattgcttccacctgtccttatccattctcacagcctgagacaagctcactggtagcttatgcttccaagcagcactaggaacattcacgctatttatttgggagtactgactccagaaagtacaggaagcttggactgctcggcgccattggtagggtcttccgtggtgcacttggccttatttattttttacgacatttgacagagggcagagagagagcaagcattaaaacggcagaagctactggaaacgttgtgaacaatctacagtcataccaccatgaacgctcccaatcttgtctggtctctgaagtacagagtagatgcgattgggcccaggttcgggcctgtttcattgttggatagaaggaacttcctgaatgctttgttccgcttaagctgcgtattgttgaagcactcaatggcccagccattcgactaggagcatccgtattgcctctttgtgatatggtttaggctaatgaaaagacttggtttccaacaccctcttctacctctgagcagatcccagatagctgatctaccattacgtttccgaaatcatgggacgaccagctgcaagtgagacgatgctcagtgggttgaaactgatcactcaggaggcagttggcaacggccttctctcccagctgtttggatcctggaccttcactcaggaaattggtggctcagaacaggaagcttgtctcatgtaatcgaatagtgctggagaaatccaaagccttggtgtgctgcaacatgaagagggatctggaacaggccaacgagagaacatgtgaagtactgaagaaaatctggggttctgcccaagggttggactccatgtgaaagaacttagaaaggaagatgaatgagtttcgattgtcaggctgcacactgaccacgtcgggttccggctgagaagaacaccattgcttccatctgtccttatccattctcacatcctgaaacaagctcactggtagcttatgcttgcaagcaggactgggaacattcacgctatttattcgggagtactgactccagaaagtacagcaaccttggactgctcagcgccattsgtacggtcttccgtggtgcacttggccttatttattttttacgacatttgacagagtgcagagagagagcaagcattaaaacggcagaagctactggaaacgtcgtgaacaatctacagtcataccaccgtgaacgctcccaatcttgtctggtctctgaagtacagagtagatgcgactgggcccaggttggggcctgtttcattgttggatagaaggaacttcctgaatgctttgttccgcttaagctgcgtattgttgaagcactcaatggcccagccattcgaccaggagcatccgtattgcctctttgtgatatggtttaggctaatgaaaagacttggtttccaacaccctcttctacctctgggcagattccagatagctgatctaccattacgtttccgaaatcatgggacgatcagctgcaagcgagacgatgctcagtgggttgaaactgatcacacaggaggcatttggcaacggccttctctcccagctgttt

SEQ ID NO: 64695 - DNA, 1856 bp, Homo sapiens
tggaccttcactcaggaaattggtggctcagatcaagaagcttgtctcatgtaattgaatattgctggaggaatccaaagccttggtgtgctgcaacatgaagagggatctggaacaggccaacgagagaacatgtgaagtactgaagaaaatctggggttctgcccaagggttggactccatgtgaaaggacttagaaaggaagatgaacgagtttcgagtgtcaggctgcacactgaccacatggggttccggctgagaagaacaccattgcttccacctgtccttatccattctcacagcctgagacaagctcactggtagcttatgcttccaagcagcactaggaacattcacgctatttatttgggagtactgactccagaaagtacaggaagcttggactgctcggcgccattggtagggtcttccgtggtgcacttggccttatttattttttacgacatttgacagagggcagagagagagcaagcattaaaacggcagaagctactggaaacgttgtgaacaatctacagtcataccaccatgaacgctcccaatcttgtctggtctctgaagtacagagtagatgcgattgggcccaggttcgggcctgtttcattgttggatagaaggaacttcctgaatgctttgttccgcttaagctgcgtattgttgaagcactcaatggcccagccattcgactaggagcatccgtattgcctctttgtgatatggtttaggctaatgaaaagacttggtttccaacaccctcttctacctctgagcagatcccagatagctgatctaccattacgtttccgaaatcatgggacgaccagctgcaagtgagacgatgctcagtgggttgaaactgatcactcaggaggcagttggcaacggccttctctcccagctgtttggatcctggaccttcactcaggaaattggtggctcagaacaggaagcttgtctcatgtaatcgaatagtgctggagaaatccaaagccttggtgtgctgcaacatgaagagggatctggaacaggccaacgagagaacatgtgaagtactgaagaaaatctggggttctgcccaagggttggactccatgtgaaagaacttagaaaggaagatgaatgagtttcgattgtcaggctgcacactgaccacgtcgggttccggctgagaagaacaccattgcttccatctgtccttatccattctcacatcctgaaacaagctcactggtagcttatgcttgcaagcaggactgggaacattcacgctatttattcgggagtactgactccagaaagtacagcaaccttggactgctcagcgccattcgtacggtcttccgtggtgcacttggccttatttattttttacgacatttgacagagtgcagagagagagcaagcattaaaacggcagaagctactggaaacgtcgtgaacaatctacagtcataccaccgtgaacgctcccaatmttgtctggtctctgaagtacagagtagatgcgactgggcccaggttggggcctgtttcattgttggatagaaggaacttcctgaatgctttgttccgcttaagctgcgtattgttgaagcactcaatggcccagccattcgaccaggagcatccgtattgcctctttgtgatatggtttaggctaatgaaaagacttggtttccaacaccctcttctacctctgggcagattccagatagctgatctaccattacgtttccgaaatcatgggacgatcagctgcaagcgagacgatgctcagtgggttgaaactgatcacacaggaggcatttggcaacggccttctctcccagctgttt

SEQ ID NO: 64696 - DNA, 1856 bp, Homo sapiens
tggaccttcactcaggaaattggtggctcagatcaagaagcttgtctcatgtaattgaatattgctggaggaatccaaagccttggtgtgctgcaacatgaagagggatctggaacaggccaacgagagaacatgtgaagtactgaagaaaatctggggttctgcccaagggttggactccatgtgaaaggacttagaaaggaagatgaacgagtttcgagtgtcaggctgcacactgaccacatggggttccggctgagaagaacaccattgcttccacctgtccttatccattctcacagcctgagacaagctcactggtagcttatgcttccaagcagcactaggaacattcacgctatttatttgggagtactgactccagaaagtacaggaagcttggactgctcggcgccattggtagggtcttccgtggtgcacttggccttatttattttttacgacatttgacagagggcagagagagagcaagcattaaaacggcagaagctactggaaacgttgtgaacaatctacagtcataccaccatgaacgctcccaatcttgtctggtctctgaagtacagagtagatgcgattgggcccaggttcgggcctgtttcattgttggatagaaggaacttcctgaatgctttgttccgcttaagctgcgtattgttgaagcactcaatggcccagccattcgactaggagcatccgtattgcctctttgtgatatggtttaggctaatgaaaagacttggtttccaacaccctcttctacctctgagcagatcccagatagctgatctaccattacgtttccgaaatcatgggacgaccagctgcaagtgagacgatgctcagtgggttgaaactgatcactcaggaggcagttggcaacggccttctctcccagctgtttggatcctggaccttcactcaggaaattggtggctcagaacaggaagcttgtctcatgtaatcgaatagtgctggagaaatccaaagccttggtgtgctgcaacatgaagagggatctggaacaggccaacgagagaacatgtgaagtactgaagaaaatctggggttctgcccaagggttggactccatgtgaaagaacttagaaaggaagatgaatgagtttcgattgtcaggctgcacactgaccacgtcgggttccggctgagaagaacaccattgcttccatctgtccttatccattctcacatcctgaaacaagctcactggtagcttatgcttgcaagcaggactgggaacattcacgctatttattcgggagtactgactccagaaagtacagcaaccttggactgctcagcgccattcgtacggtcttccgtggtgcacttggccttatttattttttacgacatttgacagagtgcagagagagagcaagcattaaaacggcagaagctactggaaacgtcgtgaacaatctacagtcataccaccgtgaacgctcccaatcttgtctggtctctgaagtacagagtagatgcgaytgggcccaggttggggcctgtttcattgttggatagaaggaacttcctgaatgctttgttccgcttaagctgcgtattgttgaagcactcaatggcccagccattcgaccaggagcatccgtattgcctctttgtgatatggtttaggctaatgaaaagacttggtttccaacaccctcttctacctctgggcagattccagatagctgatctaccattacgtttccgaaatcatgggacgatcagctgcaagcgagacgatgctcagtgggttgaaactgatcacacaggaggcatttggcaacggccttctctcccagctgttt

SEQ ID NO: 64697 - DNA, 987 bp, Homo sapiens
tctatcagtctttaatgaacaaatgctgctcatttgattgttgacatatttagaaakaagttgatattccaagatatcacttggcatttttctgttttgtaggaatgtacccaggtagataagggaagtcaaaatatataaatacacctaggtagattagggaagtcagaattatctaccatgaggcaatgcctataaaagattatttcttcccccttggacgtttagcaaaaggctgattgaacatattcagacatgcgttaaaagcaaaccatagtgactcaatagagaaaacactatacagacggatttaaatattgtatttcccattcaaatgtttacctttacatgtgttatatctataggtttgcatttgttacttttagtatctcaattttcattcagtaatttttgctgcgttattctctttgtcctttggaatatagaaatggagacgttgctattaaaaacttagaattattttttagtcaaagttttgaatatcaaatagcaatcagaaatttcaatttgcttcttaaggttttctttatttttccaaataagtatttattgctttaataattaagagattaaatatgaacaaacctgcacgttctgtacatgtatctcagaacttaaagtataataaataaataaataaatacgaaaaaatgaaatcgaatatggtattttaaaattttaaaaaccaaagttataaatgacaatctacaatcaaacagtaaatgaaagtgagaattttgggaacttcaattacactttgaaaatacgtgctcatttcgaaatcaatgttcctgacattgtgaaaaattcttgatttaattatattttaaatttaacaattcagtaaaaaacaaagtggtatttatcactctgtgctaagactacaaggggtactgcttttcatccattataattttctacttttaaataacaaacataattatttgttaaaatttgtattaaaaa

SEQ ID NO: 64698 - DNA, 987 bp, Homo sapiens
tctatcagtctttaatgaacaaatgctgctcatttgattgttgacatatttagaaataagttgatattccaagatatcacttggcatttttctgttttgtaggaatgtacccaggtagataagggaagtcaaaatatataaatacacctaggtagattagggaagtcagaattatctaccatgaggcaatgcctataaaagattatttcttcccccttggacgtttagcaaaaggctgattgaacrtattcagacatgcgttaaaagcaaaccatagtgactcaatagagaaaacactatacagacggatttaaatattgtatttcccattcaaatgtttacctttacatgtgttatatctataggtttgcatttgttacttttagtatctcaattttcattcagtaatttttgctgcgttattctctttgtcctttggaatatagaaatggagacgttgctattaaaaacttagaattattttttagtcaaagttttgaatatcaaatagcaatcagaaatttcaatttgcttcttaaggttttctttatttttccaaataagtatttattgctttaataattaagagattaaatatgaacaaacctgcacgttctgtacatgtatctcagaacttaaagtataataaataaataaataaatacgaaaaaatgaaatcgaatatggtattttaaaattttaaaaaccaaagttataaatgacaatctacaatcaaacagtaaatgaaagtgagaattttgggaacttcaattacactttgaaaatacgtgctcatttcgaaatcaatgttcctgacattgtgaaaaattcttgatttaattatattttaaatttaacaattcagtaaaaaacaaagtggtatttatcactctgtgctaagactacaaggggtactgcttttcatccattataattttctacttttaaataacaaacataattatttgttaaaatttgtattaaaaa

SEQ ID NO: 64699 - DNA, 546 bp, Homo sapiens
ttcccaatagtatgctagacaccagggttatagcaacaaataagacaaaaatctctggtcaaagcatttgcatttggggtggggttacgggatagggagagtaacaaatcaaataaacaatacaatagtaagaatgataaatcatttatcgtatatagtatgattttargtattataagtgttataaagaaaactaaaatgctgtaaggggaaaggaagtaatgtgggaagggagactggtcacacaagtttttcaaagaaggtaatgtttgaaacagagatccatttatcaatttgaatggtggaaatgaggctgtaaaacatcctagaaaagattatcctgggaagagagaagagaaagctcagagacacataggaattaattcattaggttgtaagaaaccatcattgaaatttaaatatgatgagccaggaaagataggcactattttcacatcttcagaaagtcctatcattaataagaaaataaatatattattcttttcttggaaaaataatctttacataacagagttagtcctttta

SEQ ID NO: 64700 - DNA, 465 bp, Homo sapiens
aggagttcgagaccaacctggccaacatgatgaaaccctgtctctactaaaaacacaaaaaattagctaggcatagtgggagcgcctgtaatccaagctactcgggaggcctgaggcaggagaatcacttgatcccaagaggcggaggttgcagtgagctgagatggcaccactccactccaggwtgggcaacaagagcaaaactccatttcaaaaaaaaaaagaacttctagcaatgttcgtcagagaatttgcagtaactcatgactctactatgttataaggaaataaccaaatccatgtgtgacttggagcattttgagacacagaattgctgaactacttggaaccaggatgaccaaacagaaactcataccaatccagggatggagatattttcttaatcattcttggctaaaagttttattaatgccttagtgtagagttgtaagaggtaaaatacca

SEQ ID NO: 64701 - DNA, 500 bp, Homo sapiens
gtcctcatgtctgatgtgttagcatattgtttgtgtgattacatgtggtgtcacaacatcatgaatgaatcctatttttaatgtactgcataaagaacaagcagggattataaagtgagattgtcacttttttaaaaaaaaatttttagacagggtctcattctgttacctagactggagtgcagtggtgcaatcatagcttactgcagcctcaacctcctgagctcacatgatcctcccacctcagccacccgagtagctgggactacaggcccacaccacaatgcccagctaagttttgcgtttttttgtagagagggggttttgtcatgttgcctaggctagtcttcaactactgagctcaagtgatccacccacctcggcttcccaaagtgctgggattrcaggagtgcaccactgcacctggccagattgtcactttaattgcaccaacaaattaatacagatcacagagaggttgacattcatctattaatgta

SEQ ID NO: 64702 - DNA, 1240 bp, Homo sapiens
cacattccaattcaatcagttttaaaaaattgttttaatttaaaattcagaataatgtttaaagctttatgttggacaaaaggcatagttatttgtattagtttcctgggggtagtcttaactagttgtcacaagacaggtggcttaaacaacataaatttatcctcttatcattgtagagaacagaagtccaagatggagctgttggcagggccacactctctcagaaaatcaaggtgtcacgctcgcttggacagctctaggggaggatcattcctgcctctcccagctcctggaggctccaggcatccctgggcttgtgactacatcactccagtytctgcctccatctccacgtggccttctcctctgtatctgtgtctcctcttctgtctcttagaaggatgcctgtcactgcatttagggcccaccctaatccaagatgatctcatcttcagattcttaactaatgacatctgcgaagatcctattttcaaataaggttccattcacggtttctgggggataggacatagacacatatttagggggtcaccattcaacccattataattgtacccagttctttctggaggctctaggggaggatcctccctgcctctcccagctcctggtggctctaggtgtcccttggcttgtggccacatcattccactctctgacaccatctctccagtgaattttcccacttttctctctatatctcttgtaagaacacttgtcatcagatttggggcctgctgcccctaatccagcataatctcatcttgattctcaccttaaaattacatttgcaaagattatttttccaaattcacaagttctagaggttaggacttagagctgtctttttcagagacacaagtcaatgcattatattaatatttagtgagttatctagattcactaagagtggagttttgaagaaattgagcaatgttatgaattgtaaagccaggatggaggcgagttctgtttccacatattggaatgagagatacgttactgactgtgaaagctatatactctgtgaaatactactattgcactacttggtgtagaaataccaacaccatcctttatattttccctgatagggtataacttaatatattagctaacgtcattgtcaaatagttggtcttggcttttttaaaaaaagagagacatagaagtgctttactctgttctcacgctgctaataaagacatacccaaga

SEQ ID NO: 64703 - DNA, 1240 bp, Homo sapiens
cacattccaattcaatcagttttaaaaaattgttttaatttaaaattcagaataatgtttaaagctttatgttggacaaaaggcatagttatttgtattagtttcctgggggtagtcttaactagttgtcacaagacaggtggcttaaacaacataaatttatcctcttatcattgtagagaacagaagtccaagatggagctgttggcagggccacactctctcagaaaatcaaggtgtcacgctcgcttggacagctctaggggaggatcattcctgcctctcccagctcctggaggctccaggcatccctgggcttgtgactacatcactccagtttctgcctccatctccacgtggccttctcctctgtatctgtgtctcctcttctgtctcttagaaggatgcctgtcactgcatttagggcccaccctaatccaagatgatctcatcttcagattcttaactaatgacatctgcgaagatcctattttcaaataaggttccattcacggtttctgggggataggacatagacayatatttagggggtcaccattcaacccattataattgtacccagttctttctggaggctctaggggaggatcctccctgcctctcccagctcctggtggctctaggtgtcccttggcttgtggccacatcattccactctctgacaccatctctccagtgaattttcccacttttctctctatatctcttgtaagaacacttgtcatcagatttggggcctgctgcccctaatccagcataatctcatcttgattctcaccttaaaattacatttgcaaagattatttttccaaattcacaagttctagaggttaggacttagagctgtctttttcagagacacaagtcaatgcattatattaatatttagtgagttatctagattcactaagagtggagttttgaagaaattgagcaatgttatgaattgtaaagccaggatggaggcgagttctgtttccacatattggaatgagagatacgttactgactgtgaaagctatatactctgtgaaatactactattgcactacttggtgtagaaataccaacaccatcctttatattttccctgatagggtataacttaatatattagctaacgtcattgtcaaatagttggtcttggcttttttaaaaaaagagagacatagaagtgctttactctgttctcacgctgctaataaagacatacccaaga

SEQ ID NO: 64704 - DNA, 634 bp, Homo sapiens
ttgcagtcatcgtgcatccttccagtgggcctcatttgcctgcctctgaaaaaccagatgcaaataaatatcagagcatgttcatgacagcaaaagaggctgcctcctgccccaaagcccctggggagggagaatgcaggtacccgctgcatcttctcaggcactggacacgaggcttagggtgttcccaggggcagaccagaagtggatggccctttatagggtttcactctggggccagatgcttaactaaacaatctaaaaaaaagattcatagttgtaattatgttctttctttacaaagaaagtaactgagctaatgctatatccaggacaattcttgggaaaagagaaaacgaaggaaatttgtcctwaagaagttactgcctaaactctcaattaaacatttattaagaacataatacatggccaggcctgtaatcctagcactttgggaggccaaggcaggtggatcacttgaggccaggagttcgagaccagcctggccaacatggtgaaaccctgtctctactaaaaaaaaatacaaaaacataaaaaatagctgggcatgatgataggcacctgtaatcccagctacttgggaggctgagatgggagaatcacttgaacccgg

SEQ ID NO: 64705 - DNA, 2225 bp, Homo sapiens
tcagaacgtatccacaacactgggcaatgcatgactctgtatggtgagggttgggggctgaaagataggatcaggtctgggttccttctgtacccctcacttttaagaggaacactacattttattttacaaggtgctttcatacccattgtcccctttggcgctcctaacccccacatgagtcaccaaacattatagatgaggaaactgaggcacagatgaggcctgggcattctcccagacaatcttcaggtaagctgggccctcctagctcagcgctcctgcagacctctatctgggcctccactcatgtggtccccaacagtccctgaacatgtcctctgtgcctggccctgggctcatcctccccccacctagaggagtttccaggtgagagacctggacacggagatgtgcactcaagtgccatgggggctacagtggggcacccacaggaagggggtggagtgtgagcagagctccatgttgcccaccctgtgggcccatgagccccctatgtatatcactaccaacacagggcctggatcccagcgtgtggtcagcgagggagaaatgaaagaaagggagaagggaaggggaggggtaagagggggcagagagaaggggagatctgtcaaccaggtaaggctagtgaagaccagatctcctgcatgtaccaaagctgggtcagacacttcctagtcattcatcacaaacacccactgaatatccactctatgccaggctagggactggaggtccttcggagaacaagccagacacatcccagcccctgtggaccttataggctgcaggatgyctgggctccatagccccagtgctgcctttgatcccagcccctcccatcacgtgctaactgcctgctatgtgcctatcccacatagactgggactccctgaaagcagaggacaggtccaaccctttgctgtgtccccggcacccagcacaagcctggccctgaatggcccatctgttggctgaactgaagaaatcatgcatccaaggattcaggcagcagagggtgggggaactgctttagagaggacttcctgaccaggacagcagcttgcagcccagccaaggcccagccagcttgttttgtcagacaagcagtagatacttaaagtgggacagactccgtgacaacacatggagattactggtctggctttttatctgcttttatcaaatgatccaaagcataaaacaagagtggctcagcagccacaacccaggccaggatcctatttctggactggaccactctctggattcaatattaaactagctctggccaagaatggctcagccaacaggaatctgaatgctcccccagcccgaacccacatctccatcaagaggaggcagcgtcccagagtcacgaagcacctggccaaacagagacagaacaattctggctgtgtgagatttttaaaaccttttggactataaatctccaaaaagtgagactcctcccgacagaccccaatctgatgccccgcttttctaagccctctaacttcttagcatgtcatcttagatgtctacattgtcttaccaagaagactgttattgattcaaagacaaggatgggtctcattcattgcttcctgctccagatcccagtacacaggaggtgcttaatacaaatttatagttttcacaacttagcagttctctaagaggaagacaccttccatccaacccctaacacaccagccacatgaaattccaaagggataaatgttaagtcctgtgataggattcaaattgcttcatgctgggtctccctgagttcccacagcaaagctccagtgtctatgtaaactcccagtggagaactaaccagactctagtctaacatttgttcccaagtcagcctccctgactgtgccctgcctaaggtgccttgttcatctctgctctgcagcacccagcacctcacctgacccatgggaggagcttactggttctttgttaaatgaagatgtttatcacgttactatttgccatagcgaatgaaaagcaggcaacaatctaaacgtccagcaccagaggaaagactgtgtaattatatcagggtgtgtgcaggtaaagaaatactgtatgaccactattttgagaggatgtggcacacgaagaaaaattttaaagtagagtatgaaagtatcatccatgccatgattcaaactatttttaaacca

SEQ ID NO: 64706 - DNA, 614 bp, Homo sapiens
cttttgaaacagaaatgaattggggaggggtgcagcacaggtgaagaagcgcctccagagactgagtcaatcccagaggggtattttcttacatactggtgcattgctaggactcttgggaagagtcaaaattgaaaccaggaataacgtgagagcattcattatttccaaaagccctaattggagctggcaaaatggtgacttggagaatggaaaggcacttcagaggctagtgtttttttttttttttccaaacatcctggtaagtgcgatgaggaagcatttggctgttaaaagaagctatcccaaaatacacaattgcaacttgcaatttaccgtatttcttaattcctcctgattttggactcacaatcttaaagatgcttgtttctatgtcttctatattctagatcttagcaataaaaactacaaggacgccctcctaggtaatcttttcatcttcagggttgcctaacaaaaggaaataatctctgtatttatattgctagatagttacaataatgtaatggcacttcctgagacaggtttctttttctttttgagaaacatggatttcttgaagtaraaggaaaaggatctgttcaatgtttcca

SEQ ID NO: 64707 - DNA, 618 bp, Homo sapiens
tgcaagagcacagccatctytttccccttcccaacttcccacaggctttccatcttattcaggagcaccaacccgaagtccaggagaaagaccctaagaccctagccagaaccatgtgtaggacaaaataaatagtgataaagggtgtgcagcaggaccccagtactctggaacccatctctgacagccttggttccagggagcttggtcagagcttgtggcagggggttgaagagccttggtggaaggggtgctttctctcacccctttcccaattttgcccttcctctcctctgccctggtctacttctcccatcagcagtagcttctcccatcagctgccccacaaccctctcctccctgcctctccagtctgcatcagtatctcagggaaacaggaaaacaccattctccaaacacatgtcctagggtcccagggttgcatggcgaagcgggctgtgctgacaatgaggttcgtattatttctatttacctaaaagttcaagaaggccttgctgacattgttgcttggggcccagcatttaaacttagtcactgcccagagcccttgttttaggaaagaatgagatggtccctgttgcataacccagagttggg

SEQ ID NO: 64708 - DNA, 2316 bp, Homo sapiens
tgggaaaggggtggaggaggtgaactgggagaagcagagagtgcaggaacaacagctgaagccaaggcaaggatgaagcccgtagggagagcaggaaaatattaatgggatttgctcctggcccatacagatcactaagagctttgagagggaactagacatgaggtctgtgttcacaggtcgatctcccctaccagaaggagcactccttgtaggcagggactggctctacaaggcttccctgctggagccaccacacctagccaagtgcccatcttatagtaggtgctcaataaatgtcagatggattgcagaggtgtagctgctaggaggggacaattggagaggaggggctctttctctgggtgggcttggctggcctcaggctatgggatagccaggacctatacccttcccccacaaccaggggttaccacggcaatgaccctccttccccacaggccctgtggtttcctctagagcttctttcactttcttcttctgctttccgccctccactcttctctcccctactcccacatcctcaacttttttgtcataaccacaggtcaccaatgaagagagccaggaacaaggtaggcaaggcactgtcccagggaaggtaggacacggaggaggggcttgaggggagtcacagagggcgaagggaagagtacagggtgcagcagtagaggccaaaggcactgcaaaggcgtgttgcagagggaaggcgtgtgggagcaaggacagatattcggaaagaaggtaacagtgcaggtggcagtgagtggaggtcatggggtgaagagtgggaacagagagggtggggggagtaaggtataaggtgatagcagggtggttggggacagaaggccagagggctccctgggtgaggggctggtgtaaaacagtaacactgtagcttagatgcgggcttcttctcttctggggccaggagccctcatgagaactaaatgaaacttcagggcaggcatggtggctcacgcctgtaatctcaacactttgggaggctgaagtaggtggatcacttgaggtcaggagttcgagaccagcctagccaacatggtgaaaccccatctctactaaaaatacaaaaattagctgagcatggtggtgcgcccctgtaatcccagctacttgggaggctgaggcaggagaatcgcttgaacccgggaggcagaagttgcagtgagccaagatcacaccactgcactccagactgggcaacaggagtgaaattccgtctcaagaaaaaaaatgaaaaacaaaaagataaataaaacttcaatggactccttccccagagaaragcagatatgcacatatgcataactggaggtggagacaggcttacagacctctgaagtccattcatgccctcccagagatccacaggatccaacataagaacccacaccaagctagacgcagtggctcacgcctgtaatcccagcactttgggagtccaaggcaggcggatcacctgaggtcaggagttcgagaccagcctggccaacatggcgaaacctgtctctactaaaaataaaaaaaattagctgggcgtggtggtgcacccctgtaattgcagctactcgggaggctgaggcaagagaattgcttgaacctgggaagtggaggttacagtaagccgagatcacaccactgcactccagcatgggcgacagagtgagattctgaacccacacctggtggttgtgggaaacccggtcactcagggtgagtccccatgggctccctttcccccatcctgtccccaccacaatccaggcacacttcatcctgttttcttctaccaagaaagctgcaaagtccaatcaattacaagctttccctcctcactcagctccctcaccaggtcagctggtcatttccctaccacctcctaaagggagccacatctcatgagtttccatcactttattttgcaaaaatagaaaactcagcaatatgcgatacagcggggtagaggggagatgtaaacagaggggaggggacagcaccctgaccccccaagagaacacagggagccaatgggaatcttatttggcagctaaatacaaactggggattggaggaagaaaggaggggtcacaggggccctgggctcccccacccaagacccctggaggaaggggtcaattccacggtgtaaacaaaagctaataaataaatagaggcttcctctgggtcagggcgggatcagctaagcagcatcccccctccctgggccaagctgctctggggagtaaagggtggaaggcactagggagagag

SEQ ID NO: 64709 - DNA, 1100 bp, Homo sapiens
cgtattcacaaaactccaaattatttgataattggacacttgagaaagtgccaaagtggtttttaggaaaaatcatatactttacattttcttctttttttgctattggggactttttgcatattgaccgcattctatagactactaggaggacatgtactgctaagtgtggtccacaggccacagagctctcagaaacagggcagaggcttctgtgtataatattttcaatgcttcactgcctcagtatgtggtgtaatagaatgagctccagcctaagaaaaataggcttgggttctggttccacttcagctcttttctgtgacatcttgagcaagtcatttaattatattatgtctcagtttctgtgctcagcttaacaataacaaacactgattgaacacttaccatattcaagtatttataagacacaggaatttctaattgtgtttataaatagataatttcaacatgtggtaaataaaatggtaaagatgtgttcagagtgctacaggagcagaggcaaagcatccagagtctagtctgcaaaaggtgcccttcccacctacattgtaggtatatgataaaaataaaataacattggtgaatgcrcttcatttttaaaaatgtaactcattgcattactattggtagtagctgtatagagaaatagcaggaaaagaaaaatatgttacgaattaaggtctgagttaaacaagatgaatagagagacttaacaatggaacagaatagaaactccagaagtgcaagcgaaagtacgcaatgaagatggcgtctaaaatcagtttgaaaaacatagactttttaataagtaagattaggataagttggtaataatatggaaaaaagatacagttgggtttattcttaaaagatattctaacataatttatgaaggggtcagagaggtaaagaaaagaggcaataaaatgaatactaaaagaaaatgtgggttaattcttttataacctgaaagtgagtaaaactttttgaccatgactcaaaatgtagaagcaataagggagaatattgaagaattttattacaaacataagccccaatgaaagacaaaacaaaca

SEQ ID NO: 64710 - DNA, 1100 bp, Homo sapiens
cgtattcacaaaactccaaattatttgataattggacacttgagaaagtgccaaagtggtttttaggaaaaatcatatactttacattttcttctttttttgctattggggactttttgcatattgaccgcattctatagactactaggaggacatgtactgctaagtgtggtccacaggccacagagctctcagaaacagggcagaggcttctgtgtataatattttcaatgcttcactgcctcagtatgtggtgtaatagaatgagctccagcctaagaaaaataggcttgggttctggttccacttcagctcttttctgtgacatcttgagcaagtcatttaattatattatgtctcagtttctgtgctcagcttaacaataacaaacactgattgaacacttaccatattcaagtatttataagacacaggaatttctaattgtgtttataaatagataatttcaacatgtggtaaataaaatggtaaagatgtgttcagagtgctacaggagcagaggcaaagcatccagagtctagtctgcaaaaggtgcccttcccacctacattgtaggtatatgataaaaataaaataacattggtgaatgcgcttcatttttaaaaatktaactcattgcattactattggtagtagctgtatagagaaatagcaggaaaagaaaaatatgttacgaattaaggtctgagttaaacaagatgaatagagagacttaacaatggaacagaatagaaactccagaagtgcaagcgaaagtacgcaatgaagatggcgtctaaaatcagtttgaaaaacatagactttttaataagtaagattaggataagttggtaataatatggaaaaaagatacagttgggtttattcttaaaagatattctaacataatttatgaaggggtcagagaggtaaagaaaagaggcaataaaatgaatactaaaagaaaatgtgggttaattcttttataacctgaaagtgagtaaaactttttgaccatgactcaaaatgtagaagcaataagggagaatattgaagaattttattacaaacataagccccaatgaaagacaaaacaaaca

SEQ ID NO: 64711 - DNA, 925 bp, Homo sapiens
attaattacatgggtccgtgaggccaagaagaatctcagagcactttctaatttcttcttctcccaatctccacctggaattgaacagkacaactgaactctgcaaatatggaatctattcttttctggagaattaagtgccataccaaaacatcatatctataatacatctagtccacctggaagatgttgaggtcccactcaaattaagataacaacaaaatcattattttttgtgcacctacatttagctggtgatttttatctatttcttctagtcctcataaaaagcttgaaaggtaagtcactagtgaagactagagagagaaacagcctccattttagagaaggataaactgggactcagtatggttaagtaatgagctcaagacctaggaactcattgagaactgagttgaattgaattcaggttcatctgactcaaatgtctgccttttctacctctcgtgagccaatagcaatggactgttgctttccatagtctaaagctggctctttcctgatgctattataaactcaaagtcctctgtgcagcatcaggggtttctgtggagtaaaaggttaatgatatagaataaattgtatctgaaatacataaaaccattgtatgaggggggctttgcatctaattctgactgaggaccatgagcagggtttgcctatgggagttattggggccctgctgacttagccacaggaaccaaggcactaaaccagttgacaagtagagtgtgggcctggctaagggtgaattatggcagtaggccacttattttcccctctgaatctgaaaatctctaaacccaaatcccatatgaagttggacccgaggcatagatctgaatttgaggaagcgtatctcttagataataggtatgagcccatgaaatgcagttggaatact

SEQ ID NO: 64712 - DNA, 925 bp, Homo sapiens
attaattacatgggtccgtgaggccaagaagaatctcagagcactttctaatttcttcttctcccaatctccacctggaattgaacagtacaactgaactctgcaaatatggaatctattcttttctggagaattaagtgccataccaaaacatcatatctataatacatctagtccacctggaagatgttgaggtcccactcaaattaagataacaacaaaatcattattttttgtgcacctacatttagctggtgatttttatctatttcttctagtcctcataaaaagcttgaaaggtaagtyactagtgaagactagagagagaaacagcctccattttagagaaggataaactgggactcagtatggttaagtaatgagctcaagacctaggaactcattgagaactgagttgaattgaattcaggttcatctgactcaaatgtctgccttttctacctctcgtgagccaatagcaatggactgttgctttccatagtctaaagctggctctttcctgatgctattataaactcaaagtcctctgtgcagcatcaggggtttctgtggagtaaaaggttaatgatatagaataaattgtatctgaaatacataaaaccattgtatgaggggggctttgcatctaattctgactgaggaccatgagcagggtttgcctatgggagttattggggccctgctgacttagccacaggaaccaaggcactaaaccagttgacaagtagagtgtgggcctggctaagggtgaattatggcagtaggccacttattttcccctctgaatctgaaaatctctaaacccaaatcccatatgaagttggacccgaggcatagatctgaatttgaggaagcgtatctcttagataataggtatgagcccatgaaatgcagttggaatact

SEQ ID NO: 64713 - DNA, 925 bp, Homo sapiens
attaattacatgggtccgtgaggccaagaagaatctcagagcactttctaatttcttcttctcccaatctccacctggaattgaacagtacaactgaactctgcaaatatggaatctattcttttctggagaattaagtgccataccaaaacatcatatctataatacatctagtccacctggaagatgttgaggtcccactcaaattaagataacaacaaaatcattattttttgtgcacctacatttagctggtgatttttatctatttcttctagtcctcataaaaagcttgaaaggtaagtcactagtgaagactagaragagaaacagcctccattttagagaaggataaactgggactcagtatggttaagtaatgagctcaagacctaggaactcattgagaactgagttgaattgaattcaggttcatctgactcaaatgtctgccttttctacctctcgtgagccaatagcaatggactgttgctttccatagtctaaagctggctctttcctgatgctattataaactcaaagtcctctgtgcagcatcaggggtttctgtggagtaaaaggttaatgatatagaataaattgtatctgaaatacataaaaccattgtatgaggggggctttgcatctaattctgactgaggaccatgagcagggtttgcctatgggagttattggggccctgctgacttagccacaggaaccaaggcactaaaccagttgacaagtagagtgtgggcctggctaagggtgaattatggcagtaggccacttattttcccctctgaatctgaaaatctctaaacccaaatcccatatgaagttggacccgaggcatagatctgaatttgaggaagcgtatctcttagataataggtatgagcccatgaaatgcagttggaatact

SEQ ID NO: 64714 - DNA, 925 bp, Homo sapiens
attaattacatgggtccgtgaggccaagaagaatctcagagcactttctaatttcttcttctcccaatctccacctggaattgaacagtacaactgaactctgcaaatatggaatctattcttttctggagaattaagtgccataccaaaacatcatatctataatacatctagtccacctggaagatgttgaggtcccactcaaattaagataacaacaaaatcattattttttgtgcacctacatttagctggtgatttttatctatttcttctagtcctcataaaaagcttgaaaggtaagtcactagtgaagactagagagagaaacagcctccattttagagaaggataaactgggactcagtatggttaagtaatgarctcaagacctaggaactcattgagaactgagttgaattgaattcaggttcatctgactcaaatgtctgccttttctacctctcgtgagccaatagcaatggactgttgctttccatagtctaaagctggctctttcctgatgctattataaactcaaagtcctctgtgcagcatcaggggtttctgtggagtaaaaggttaatgatatagaataaattgtatctgaaatacataaaaccattgtatgaggggggctttgcatctaattctgactgaggaccatgagcagggtttgcctatgggagttattggggccctgctgacttagccacaggaaccaaggcactaaaccagttgacaagtagagtgtgggcctggctaagggtgaattatggcagtaggccacttattttcccctctgaatctgaaaatctctaaacccaaatcccatatgaagttggacccgaggcatagatctgaatttgaggaagcgtatctcttagataataggtatgagcccatgaaatgcagttggaatact

SEQ ID NO: 64715 - DNA, 925 bp, Homo sapiens
attaattacatgggtccgtgaggccaagaagaatctcagagcactttctaatttcttcttctcccaatctccacctggaattgaacagtacaactgaactctgcaaatatggaatctattcttttctggagaattaagtgccataccaaaacatcatatctataatacatctagtccacctggaagatgttgaggtcccactcaaattaagataacaacaaaatcattattttttgtgcacctacatttagctggtgatttttatctatttcttctagtcctcataaaaagcttgaaaggtaagtcactagtgaagactagagagagaaacagcctccattttagagaaggataaactgggactcagtatggttaagtaatgagctcaagacctaggaactcattgagaastgagttgaattgaattcaggttcatctgactcaaatgtctgccttttctacctctcgtgagccaatagcaatggactgttgctttccatagtctaaagctggctctttcctgatgctattataaactcaaagtcctctgtgcagcatcaggggtttctgtggagtaaaaggttaatgatatagaataaattgtatctgaaatacataaaaccattgtatgaggggggctttgcatctaattctgactgaggaccatgagcagggtttgcctatgggagttattggggccctgctgacttagccacaggaaccaaggcactaaaccagttgacaagtagagtgtgggcctggctaagggtgaattatggcagtaggccacttattttcccctctgaatctgaaaatctctaaacccaaatcccatatgaagttggacccgaggcatagatctgaatttgaggaagcgtatctcttagataataggtatgagcccatgaaatgcagttggaatact

SEQ ID NO: 64716 - DNA, 925 bp, Homo sapiens
attaattacatgggtccgtgaggccaagaagaatctcagagcactttctaatttcttcttctcccaatctccacctggaattgaacagtacaactgaactctgcaaatatggaatctattcttttctggagaattaagtgccataccaaaacatcatatctataatacatctagtccacctggaagatgttgaggtcccactcaaattaagataacaacaaaatcattattttttgtgcacctacatttagctggtgatttttatctatttcttctagtcctcataaaaagcttgaaaggtaagtcactagtgaagactagagagagaaacagcctccattttagagaaggataaactgggactcagtatggttaagtaatgagctcaagacctaggaactcattgagaactgagttgaattgaattcaggttcatctgactcaaatgtctgccttttctacctctcgtgagccaatagcaatggactgttgctttccatagtctaaagctggctctttcctgatgctattataaactcaaagtcctctgtgcagcatcaggggtttctgtggagtaaaaggttaatgatatagaataaattgtatctgaaatacataaaaccattgtatgaggggggctttgcatctaattctgactgaggaccatgagcagggtttgcctatgggagttattggggccctgctgacttagccacaggarccaaggcactaaaccagttgacaagtagagtgtgggcctggctaagggtgaattatggcagtaggccacttattttcccctctgaatctgaaaatctctaaacccaaatcccatatgaagttggacccgaggcatagatctgaatttgaggaagcgtatctcttagataataggtatgagcccatgaaatgcagttggaatact

SEQ ID NO: 64717 - DNA, 1100 bp, Homo sapiens
attagtggcttttagctgaaccgctgagacaggtttttatctactagttacctgatttttttattttgtatgcatttagatggatttaaaagagcattatttttctcccttttttccagtatcctttccttggtcctgtacctaccagaatgggtggattctttaattctggctgttctcagtgccagataagctctttttatcttgtcaatgatatttatgagctggataccagtggtttaggtaagtgtacactgtgtgtttatagggtctttgtcatagaaaatgtagtacacgtaataaaatgtctataacctcacatctggaaaattttagagtacatggaagctggaagctgttctgcaaatgtgtggtgtagtgtatgagagggtacagtcgtaggttacaaagtaatgttttagaagcttaagtccattccatatttaaaatcacttgttaggtccaaaagttgaagaaattcttcatttgttgaaaggctgttggattttaaaaatgaagcagtaggctgggcgcagtggctcacgcctgtaatcccagcactttgggtggccaaggcaggcggatcacctgaggtcaggagttcgagaccagcctggccaacatggcaaaagcccgtgtctactaaaaatacagaaattagcgaggcaaggtggcgggcgcctgtagtcttatctactccagaggttgaggcaggagaatcgcttgaaccagggaagcagaggttgcagtgagccgagatggcaccactgcactccagcctggatgatagagcgagactttgtctcaaaaaaaawaaaaaataaaaataagaagcactaaactttgtagagaagagatttcttttgtaagctcctagtgaaaatcacaaatactccatagaccttttccttttatttatttattttttaaatcataaggttagtagatcctaccattcagagtgtttgaagcacatagattttaagctctcttaaggaattttaggtagtacctctggcaaaaaggtaattagtgcctttctttttattcttccttttcctttcattatcattttctttttgtctcaaaataatgaaaaa

SEQ ID NO: 64718 - DNA, 832 bp, Homo sapiens
tgctgccatttccactggcctttcccacaggggagcccgggggcccgtatgaccgtgagaaggggttgtgtctggtgggttgagctcagagcacgctggggaagctgcaccctcgtcttctttcacctgcagccaggacattttctgaggcctctgaggctgctggccaggacagggaggtttctgcagagcagggcagagagcgcctggctccggtgagaaaggggctgtcaggccaggcgcagtggcttacacctgtaatcccagcactttgggaagccaagacaggtggatcacctgaggttgggagttcgcgaccagcctgaccaacatggagaaacccccatctctactaaaaatacaaaattagccgggtgtggtggtgtatgcctataatcccagctactctggaggctgagggagaagaatcgcttgaacctgggaggcaaaagttgcagtgagtcgagatcacgccattgcaccccagcctaggcaacaagagtgaaagtccatctcaaaaaaaaaaaaaaaaaaaagaaaacacaaaaagaaaggrgctgtcaggcaggtggccaggccagggaggtttctgcagagcagggcagagagcccctggctcgggtgagaaaggggctgtcaggcaggtggccaggccagggaggtttctgcagagcagggcagagagcccctggctcgggtgagaaaggggctgtcaggcaggtggccagcagccctgagcctggagatggggattcaggagcccacctgctgctcggctcagagctgagaggagaaacagcccagaggaacagcggcctcccccatcccagct

SEQ ID NO: 64719 - DNA, 782 bp, Homo sapiens
aggatccccgayggttaggagcttggttggctgaggacaggtgtgggcagctcctgctgaggcaggagaggtaggcagcgccaggcagtcagggcctattaggacgaggactcacccagcctgaggagactctgaggaaacgcgtgatgcagacagacttaaaactgtaagaggccccatggctgctctggacagggagggttggcgggacaaaggcaggtggaggcgccacggagtctgttcatgggggttcaggagagagtgatgagggtgggctggcaccgagggggctcctccaagggagggttatgagaaattcccttggggccaaaggggattgacatgtggtcatgggaagggcagcccggagactccctcctgaatagtcaccaaggtccagttcccttgtgcatggcggaacccaggcctgtgggcggctcttccaccccatggggtgggggcacaggacagggaggaagcactttggggacccctcagagccccggttcagcgaacctcaggagcccgcgcaacccacagcccattctggaaatggtggtatcccacccaggggcccagtggggaggggaggtgggccaggctttccactgtgctctccttgtcatctgcagctgagactccagcccagctcactcctgtgtcttctcgtcctaatctctgacatgagtacagtaggactcacccgacagcaggtgctctcagatccctgcccatttctggccaaaagagccttcaggacagcccggcagtgccaggaatcg

SEQ ID NO: 64720 - DNA, 782 bp, Homo sapiens
aggatccccgacggttaggagcttggttggctgaggacaggtgtgggcagctcctgctgaggcaggagaggtaggcagcgccaggcagtcagggcctattaggacgaggactcacccagcctgaggagactctgaggaaacgcgtgatgcagacagacttaaaactgtaagaggccccatggctgctctggacagggagggttggcgggacaaaggcaggtggaggcgccacggagtctgttcatgggggttcaggagagagtgatgagggtgggctggcaccgagggggctcctccaagggagggttatgagaaattcccttggggccaaaggggattgacatgtggtcatgggaagggcagcccggagactccctcctgaatagtcaccaaggtccagttcccttgtgcatggcggaacccaggcctgtgggcggctcttccaccccatggggtgggggcacaggacagggaggaagcactttggggacccctcagagccccggttcagcgaacctcaggagcccgcgcaacccacagcccattctggaaatggtggtatcccacccaggggcccagtggggaggggaggkgggccaggctttccactgtgctctccttgtcatctgcagctgagactccagcccagctcactcctgtgtcttctcgtcctaatctctgacatgagtacagtaggactcacccgacagcaggtgctctcagatccctgcccatttctggccaaaagagccttcaggacagcccggcagtgccaggaatcg

SEQ ID NO: 64721 - DNA, 726 bp, Homo sapiens
aagacccaggggagtccaccaaacacgcgtcttgctccagcaaccaagtcagcaacacatccagagtgtcgcttcccagggaggccgtgtaggtctccgagtgcggggcttctacagggggctggtcacataggcaccctctgcctgtgcagccactgtggtgacagaagtcaggcgtgcgctgatcacactgcagagtccaggcagctggtagggaacggcttagttccctgagtgcacaaacgacctggtcaaccagtcactcaggaaacgttccaaaagccaagttcccggatgctggctggggatcwcccggatgctggctggggattacccggatgctggctggggatcacccggatgctggctggggatcacccggatgctggctggggctcatcgctgcacacgggcctccatgaacacgcgtcagaatcaggcagcctccggcctgctgcgcacgtcgttcctgcacaccgaggctgctgtgggtccagcttccccagagaccccagccctgggctccgccagcaccacccaccccgctccagcccagggatggagccgccgccttctctcctggcctctgagttgcctcccagcccccatctgacttctcagctctcccgtcccctccgtaacccactccctgcctcagtctcctgtgtggtaaatacacgagttctccagtgaggccccaactgctgcatccttggattaatttaa

SEQ ID NO: 64722 - DNA, 726 bp, Homo sapiens
aagacccaggggagtccaccaaacacgcgtcttgctccagcaaccaagtcagcaacacatccagagtgtcgcttcccagggaggccgtgtaggtctccgagtgcggggcttctacagggggctggtcacataggcaccctctgcctgtgcagccactgtggtgacagaagtcaggcgtgcgctgatcacactgcagagtccaggcagctggtagggaacggcttagttccctgagtgcacaaacgacctggtcaaccagtcactcaggaaacgttccaaaagccaagttcccggatgctggctggggatcacccggatgctggctggggattacccggatgctggctggggatcacccggatgctggytggggatcacccggatgctggctggggctcatcgctgcacacgggcctccatgaacacgcgtcagaatcaggcagcctccggcctgctgcgcacgtcgttcctgcacaccgaggctgctgtgggtccagcttccccagagaccccagccctgggctccgccagcaccacccaccccgctccagcccagggatggagccgccgccttctctcctggcctctgagttgcctcccagcccccatctgacttctcagctctcccgtcccctccgtaacccactccctgcctcagtctcctgtgtggtaaatacacgagttctccagtgaggccccaactgctgcatccttggattaatttaa

SEQ ID NO: 64723 - DNA, 1499 bp, Homo sapiens
aggtctagtggtgagtgagggaccaaagtcaggcaggctcggctccttcttgcagatccagggaaataagaaaggggatgttctggggtgaagtcaccccacccctgcttgtgtgtttgtggttctgtgcgcctgtgtagacggttgtttctgggtttgtgtgtgtgtgcatgtgtgtctaagtttcacctgcaggtgtgtgtgtctgggtcttttcacaggttttgcatgtttgtcttgtcagagatgtgttttctctggatacgtgctggcctgtctcgcccgtctgcagtccagcagcaggatggataaaggatgaacccgatcatctcactccctggtcacatccctcccatggcttctgcatcatcgggttctttgctgtaaccacagaagaccacccgtccagctgcattaagcaggagtagctcattacagatcacacttctctgactcccattatacacaaatccccaggggtcttgataaaatgcagaccccgactcagcaagtctggctgggatatgagatagtgcatttccaacaagacccagaggcagcgaattccttggggccagtgtggacatcaggaaggtcccgacgcttcatgggggcaaagactccatggctacaaatgtccagcccacaacaagggctgctccaaggaaggccactcaacctgaccccacagctcactctgctggccccgggaggggacatcaaccttcttccttcccactcccgctgagtccaccagccctgccagccccagtgcccacacagggatccacacagctgccatcttcctccagttcttttcctgggcaaaggctcatgggaggtttctgattagttaagcctgagtcacatsagggggctcaggtcacatgaggggcctggccgcaagggatgctgggaaatagagtctggtttcccccttggaactgtgacagacaccatgagggatgtgtgcccataggaagggcgctcacagggaccattagaggccataaaacgcccacgacagcttcacccaaaccctgaactcagagaagatgggcctgaactcggcccatcccaatggccttggtctagaatattctccccccacatctctatgcaggccttagcccaaatatcaccttctcagagagctttcctgaccattccagtcatttcagaatatgatacccaaatccaaggctgcggccctgagaaaactgcccagaagtttccccaatgccccaccccctttcaacacaaaactaaaatgactttcctgggccagcccagcgaggcacggtgacaccagtggatctggcccatggacgctcccaggcatctcccatacagaggcaggggtcctcccagaagaagcgttctggagatcaagctgagtctgtgctgctgtgtccacatgcgcggctccttcagaagtctggtttctttgccagtgccttctctgctggtgtggtcagtgttcttggccccagcattca

SEQ ID NO: 64724 - DNA, 1499 bp, Homo sapiens
aggtctagtggtgagtgagggaccaaagtcaggcaggctcggctccttcttgcagatccagggaaataagaaaggggatgttctggggtgaagtcaccccacccctgcttgtgtgtttgtggttctgtgcgcctgtgtagacggttgtttctgggtttgtgtgtgtgtgcatgtgtgtctaagtttcacctgcaggtgtgtgtgtctgggtcttttcacaggttttgcatgtttgtcttgtcagagatgtgttttctctggatacgtgctggcctgtctcgcccgtctgcagtccagcagcaggatggataaaggatgaacccgatcatctcactccctggtcacatccctcccatggcttctgcatcatcgggttctttgctgtaaccacagaagaccacccgtccagctgcattaagcaggagtagctcattacagatcacacttctctgactcccattatacacaaatccccaggggtcttgataaaatgcagaccccgactcagcaagtctggctgggatatgagatagtgcatttccaacaagacccagaggcagcgaattccttggggccagtgtggacatcaggaaggtcccgacgcttcatgggggcaaagactccatggctacaaatgtccagcccacaacaagggctgctccaaggaaggccactcaacctgaccccacagctcactctgctggccccgggaggggacatcaaccttcttccttcccactcccgctgagtccaccagccctgccagccccagtgcccacacagggatccacacagctgccatcttcctccagttcttttcctgggcaaaggctcatgggaggtttctgattagttaagcctgagtcacatgakggggctcaggtcacatgaggggcctggccgcaagggatgctgggaaatagagtctggtttcccccttggaactgtgacagacaccatgagggatgtgtgcccataggaagggcgctcacagggaccattagaggccataaaacgcccacgacagcttcacccaaaccctgaactcagagaagatgggcctgaactcggcccatcccaatggccttggtctagaatattctccccccacatctctatgcaggccttagcccaaatatcaccttctcagagagctttcctgaccattccagtcatttcagaatatgatacccaaatccaaggctgcggccctgagaaaactgcccagaagtttccccaatgccccaccccctttcaacacaaaactaaaatgactttcctgggccagcccagcgaggcacggtgacaccagtggatctggcccatggacgctcccaggcatctcccatacagaggcaggggtcctcccagaagaagcgttctggagatcaagctgagtctgtgctgctgtgtccacatgcgcggctccttcagaagtctggtttctttgccagtgccttctctgctggtgtggtcagtgttcttggccccagcattca

SEQ ID NO: 64725 - DNA, 1499 bp, Homo sapiens
aggtctagtggtgagtgagggaccaaagtcaggcaggctcggctccttcttgcagatccagggaaataagaaaggggatgttctggggtgaagtcaccccacccctgcttgtgtgtttgtggttctgtgcgcctgtgtagacggttgtttctgggtttgtgtgtgtgtgcatgtgtgtctaagtttcacctgcaggtgtgtgtgtctgggtcttttcacaggttttgcatgtttgtcttgtcagagatgtgttttctctggatacgtgctggcctgtctcgcccgtctgcagtccagcagcaggatggataaaggatgaacccgatcatctcactccctggtcacatccctcccatggcttctgcatcatcgggttctttgctgtaaccacagaagaccacccgtccagctgcattaagcaggagtagctcattacagatcacacttctctgactcccattatacacaaatccccaggggtcttgataaaatgcagaccccgactcagcaagtctggctgggatatgagatagtgcatttccaacaagacccagaggcagcgaattccttggggccagtgtggacatcaggaaggtcccgacgcttcatgggggcaaagactccatggctacaaatgtccagcccacaacaagggctgctccaaggaaggccactcaacctgaccccacagctcactctgctggccccgggaggggacatcaaccttcttccttcccactcccgctgagtccaccagccctgccagccccagtgcccacacagggatccacacagctgccatcttcctccagttcttttcctgggcaaaggctcatgggaggtttctgattagttaagcctgagtcacatgagggggctcaggtcacatgaggggcctggcygcaagggatgctgggaaatagagtctggtttcccccttggaactgtgacagacaccatgagggatgtgtgcccataggaagggcgctcacagggaccattagaggccataaaacgcccacgacagcttcacccaaaccctgaactcagagaagatgggcctgaactcggcccatcccaatggccttggtctagaatattctccccccacatctctatgcaggccttagcccaaatatcaccttctcagagagctttcctgaccattccagtcatttcagaatatgatacccaaatccaaggctgcggccctgagaaaactgcccagaagtttccccaatgccccaccccctttcaacacaaaactaaaatgactttcctgggccagcccagcgaggcacggtgacaccagtggatctggcccatggacgctcccaggcatctcccatacagaggcaggggtcctcccagaagaagcgttctggagatcaagctgagtctgtgctgctgtgtccacatgcgcggctccttcagaagtctggtttctttgccagtgccttctctgctggtgtggtcagtgttcttggccccagcattca

SEQ ID NO: 64726 - DNA, 1499 bp, Homo sapiens
aggtctagtggtgagtgagggaccaaagtcaggcaggctcggctccttcttgcagatccagggaaataagaaaggggatgttctggggtgaagtcaccccacccctgcttgtgtgtttgtggttctgtgcgcctgtgtagacggttgtttctgggtttgtgtgtgtgtgcatgtgtgtctaagtttcacctgcaggtgtgtgtgtctgggtcttttcacaggttttgcatgtttgtcttgtcagagatgtgttttctctggatacgtgctggcctgtctcgcccgtctgcagtccagcagcaggatggataaaggatgaacccgatcatctcactccctggtcacatccctcccatggcttctgcatcatcgggttctttgctgtaaccacagaagaccacccgtccagctgcattaagcaggagtagctcattacagatcacacttctctgactcccattatacacaaatccccaggggtcttgataaaatgcagaccccgactcagcaagtctggctgggatatgagatagtgcatttccaacaagacccagaggcagcgaattccttggggccagtgtggacatcaggaaggtcccgacgcttcatgggggcaaagactccatggctacaaatgtccagcccacaacaagggctgctccaaggaaggccactcaacctgaccccacagctcactctgctggccccgggaggggacatcaaccttcttccttcccactcccgctgagtccaccagccctgccagccccagtgcccacacagggatccacacagctgccatcttcctccagttcttttcctgggcaaaggctcatgggaggtttctgattagttaagcctgagtcacatgagggggctcaggtcacatgaggggcctggccgcaagggatgctgggaaatagagtctggtttcccccttggaactgtgacagacaccatgagggatgtgtgcccataggaagggcgctcacagggaccattagaggccataaaacgcccacgacagcttcacccaaaccctgaactcagagaagatgggcctgaactcggcccatcccaatggccttggtctagaatattctccccccacatctctaygcaggccttagcccaaatatcaccttctcagagagctttcctgaccattccagtcatttcagaatatgatacccaaatccaaggctgcggccctgagaaaactgcccagaagtttccccaatgccccaccccctttcaacacaaaactaaaatgactttcctgggccagcccagcgaggcacggtgacaccagtggatctggcccatggacgctcccaggcatctcccatacagaggcaggggtcctcccagaagaagcgttctggagatcaagctgagtctgtgctgctgtgtccacatgcgcggctccttcagaagtctggtttctttgccagtgccttctctgctggtgtggtcagtgttcttggccccagcattca

SEQ ID NO: 64727 - DNA, 1468 bp, Homo sapiens
ggaaatgtacaattgtttgtcaatgttttcagtatgggtttcgtaactagaagtctactcactttctcttccatcaaccacagccacagtatggtactcaggaatcagagttttagaggtttttgtttgtgtttttcaacaaagcaactaaacctataattccagtacaaaatcctccagtaattatacctagttctctacagttgcttcaactacatttaagacaaaagaattttttttagtatgtctgttaagtaaacctactgctttcaatttaggtttcatagaaataaccctattttgccctcttatctcattgacatatgatgctttattaaagcacctaaattcagtaacacacacaaccggcataagcaaaacttaggaattaggcatgctgactcctggccaaccagtaccctccctggtaggaasagacgtggctgggaatggagagggactgaccccatacatggtcacatgccctgggctgtggtcagcatgtgcagagggaacagaaagtcagtgttggggggttgctatgtgaatatcaaccaaggaaccttccactaagttattattatatggtacacagagggatcctgccacactcatgtgattagtaagtccaaatgtatatacccaaaaacacagagagagagagagagagagaatgtaatttgaactgttcagctaattcaagtcgaggagcccaatcccccaaatggcgaggagctgagggacgagcccaatcccccaagtggagaggagctgtcccctcatctgtctctccagggggtgaacatctcaccattcagaagctggtcttgatgtttaaaacgaagtttttcattcaaaatggccctacaaaaaggaagctacttcatctgatactagacagaaaacaatgcaatctgctccaatgccaggcaatggtgctgtttaaaggccctgagtgtaaacgtaatccctgagtgatatatggttcaactgcattgtccatatttttatagcccccacatattgtgtgtcaccatcccactgtgccacattctgggtattaaggacccaacttggagtggggcacacttgtgtgggaatcctggctctctcctttgccggatgtgtggcctctgccggatgcatggcctttgtcaactctataccctctctgtgccttggtttcctcaagtaaaatgtggatgataacagaacgtacctcactaggcaaggattagatgagataatccatctaaggcctttagcacaaggcctgccacacagtaggtgcacaataaatgctgtggttattaacttcaagttcacaagatggactctgcagtaaaggatgcagaaataattatttaatttgtcatgcttgttccaaggcttttgtgaataaagcactgcatttgaaggcttttatcaaatactttctcatctgtctcattactaggaccctggatgc

SEQ ID NO: 64728 - DNA, 624 bp, Homo sapiens
gggtgccagcagggtgagggctctaccaggttgcagacagcagacttctcaccattcccttgcacggtggaaacttgctgaggtctcttttagaagggcactaaccccattcatgaggattccacctgcatgacctcatcactcccaaaaggcccacctcctaataccatccccgtggtggtggttaggattttaacttatgaatttaaagagacacaaacattcattccactgcagaacctaatttataacactggggcaaagtcaaaataaaataccctcctccccctagtattcagatggtgccgacttcatcctgcaccatcccactgtctctgctccccgagtctctgacatgtgagctgatttgcaggacttgatcttcccactgatgctcatacccagcacccaggggagggcctggccaacaatccacactcaggaaagatcaggtgaaagagtgaatgtcagagaagtggaggacgggcccaggttcccagaaccattcygccatgtccttgtcacagacacagactggtacacaggctccaaatcatcataagaactcaatgtgggctctttccaggaagtcgtcacctgccacaggtcacagacaatgttcta

SEQ ID NO: 64729 - DNA, 1424 bp, Homo sapiens
ggtcttttgaaggcagtcactgcacagcactgctggctgcagttgttagtatacatccttgagttttgctccttgccactaagctcactgagggtaggaacctggcacacattaggactgatatatgacaatgaatttaatccaaggattggaatcctgaaacacaagctgagtttcttcaataaagagaattgtgccagtagaaggcattgttcgttaaaatggaaatgcattcagagaatacttcagattaaagggatgaagatcaaagggcacatttttggccaggagttctgagtcttagagacccaaataaattgtagactttttatttcctgaattgattggaaccataacactggatttggtgctgtaatataaaactttctggaacttttagcctggtgggaaggctctgctgtaagcgttaggattgctcttgtctaaaattaaagcacccacgcctattgctgaaactggctagtacacatggaaggcctgatttagacttccacggttgatcagggaaccatcagagccctaccttagctgaagttacagacataccctgcttcagacttatcaggagagggtgtctatattacatgtggacacacgtccactccggttcgagatcctatggcccacgtcaagaacagaaagcagctgctcatgcagacggtgtgtgaaacattagctgcgttttgcaaacatgtaagaatttcccagtgagaatcttgaccgcagatgtgggcctggcagctcctcctgggccctgtgcctggggctcagccctggggatgctgttcaagctacacttccagcctggctcaacatctgactgtccctctgtacaaaggggctggttttgaggttctgggtcacaaggtggatcaagcccttgccccttatcccagggagggaaactcctaacagctgaagcaaagtctgctttatcacactgacctctgacccttctcaagctttctgaacaaacctcaaccaggttaacctaaaatcaccattctcaaatctgcctgtgcatgacctaagggaatctttcattaattttttttttttttttgaggtagagtcttgctctgtcgcccaggctggagtgcagtggcgcaatctgggctcactgcaacctccgcctcccgtgttcaagcgattctcctgcttcagcctcccgagtagctgggattataggcaaatgccaccatgttcagctaatttttgtatttttagtagagatggggtttcgccatgttggccaggctggtctctaacttctgacctcaggtgatccgcccgtctcgtctcggcctcccaaagtactgggagccaycacacccggcctaagagaatcttttaaaatgcaggttttgatcctttagttcttaaacatgacaattggatgttta

SEQ ID NO: 64730 - DNA, 1610 bp, Homo sapiens
  misc_feature (1)...(1610): n = A,T,C or G
ctctcccttgttagagggcaatctacagattcaaatgttaatctcatccagaaatatcctcacagacatacccagaataatgtttaaccaaatatctgggcacctcatggcccagtcatacatatatttttttctatatctgtatattttacaattaatgtcagcactacccggaatacatgtagaaactttacttgctctgaaagtaagggcttacacgtgaagcagattcatatcactgaatgcctttatgtgttgngatataaagaaatgatgatgcggccgggcgcggtggctcacgcctgtaatcccagcactttgngaggccgaggcggncggatcacgaggtcannnnnnnnnnnnnnnnnnnnnnnnnnnnnnnnnnnnnnnnnnnnnnnnnnnnnnnnnnnnnnnnnnnnnnnnnnnnnnnnnnnnnnnnnnnnnnnnnnnntggaggttcatcaataataacccataataaatacattcattctttcaaaagtgctcatttctatgactcaaaaatgaaaaacagatgataaatattgtgtgcaaacttggaaaaagaaagacatcgatttcaagagtcccaaatctggcaacttttgttttgattagccaaatagtgcctctcaaaactcattttatttcaatgcctggtttccgtgggggaaaaaaggggttacttaaccttaaaatgtcagatcatttggctccaggactctttggattttatgagaaatgagctatctctgggcttggatccactcagcctttctttatacttcacgtctatggcacgaaatactttagttccagtattaacagttagttcctagagactgagaggtcatgggagagagaaaagttcacaaattttgttgagaaaagttctcaaatcttggccgggcacggtggctcatacctgtaatcccagcactttgggaggctgaggcacatggatcacaaggtcaggagatcgagaccatcctggctaacaaggtggaaccccatctctactaaaaaaaaaaaaaaaaaaaaaaaaagaaaacaaaaattagcagggcatggtggcgggagcctgtagtcccagctactcgagaggctgaggcaggagaatggtatgaacccaggagacggagcttgcagtgagctgagattgcaccactgcactccagcctgggcaacagagcgagcctccgtctcaaaaaaaaaaaaaaaaagctatctcaattatggtatctctcaatcatggtatcttttttgggcaaccagtagtattaacagccatcctgacgggcatgcattttaaaatccttctcaactgctgttaataactctggaaaacaagtwtattaaaggacagaaaccctaaaatggccaagacatctcagaaggagtgacagtaaaatgacaacgcaaatacatggtgtccttcaaaataggcaccatggagaggataacctatttcaatgatgctgccattatacaagtgtttggggaccattctgaatctttttgaagccactttaaatgacccacaaccataaaacaatctatttaatcactttcttctcaatcttgctttttgccaccatagaacatttaca

SEQ ID NO: 64731 - DNA, 832 bp, Homo sapiens
aagtaagccaagtaaagctacattttccagcctcccttgcagctaggtatggcatgggatataaacaggattgatatgtgccattcccaaataatttatccaaaagagttgagcatgcactgttctggctctttttgtccctttcttaatgcttggaagatgatgagagctgaaagcacttaccagacctagactttctatctctagacaagtgttttccaagctatctgtgrtgaaggacaatctctcattaactcacacttttgagacatattataaaatggttagaaatcatgaaatagacaaaaaacagatttttttattattttattattagtcagtaatattttattattagtcaaataatattttatcattagtaagattatatttcaataaatataataacaaataatatagaaaaattttttaaattggctacattaaatttaccaaaagacatgcagacttcttcactgaaaagaatagaatattgttgaaaaaaattaaagaagaccttagtaaatggagcaatatagcatgttcgaggatgggaaaactcgatattctcagttcttcccaaattgatttatggagtcaatggaatccccatcaaaattcctgctagtatctttgttgaaattcacaagctaattctaaaatttatgatgggaattcctgcagacgtagaacgcaaaactcatttttaaaaatataaagttggagaggccaggcatggtggcttacacctgtaatcccaacattttggaaggctgaagtgtgtaggattgcttaagctcaggagttcgtgaccagcctgggtaacatagca

SEQ ID NO: 64732 - DNA, 537 bp, Homo sapiens
ggatagctgaatgtcaaatttaacctgagaattttgatcacaactatcaaggtggagaagaagggaaaataggaacaaaggataatactggttgatttcccttcacatctgaataaattcccctttcaggaaggcacccaaagtctgggacgggctccacatcagctcagaaacctgcctgaccctgtcatcttgcccctgcttgttttgttgttgttgttgttgttttatttttttgttttttgagatggcgtctcgctctgtcrcccaagctggagtgcagtggcgcgatcttggctcactgcaagctctgcctcccaggttcacgccattctcctgcctcagcctcccaagtagatgggactacaggagcccaccaccacgcccagttaatgtttttgaattttttagtagagacgggctttcaccgtgttagccaggatggtctcgatctcctgacctcgtgatccacccgcctcagcctcccaaagtgctgggattacaggcatgagccaccgtgcccggacccccctgctt

SEQ ID NO: 64733 - DNA, 973 bp, Homo sapiens
tacaaagaagtcttgtgtgaattattttgtttgattattcctttacttagtcctttattcatctctggaggaaataaaagagtcgggattctgtgactgattcagcaaggggcaaaagagagacagtgtgtggatgttggacatatgatcgacagaatgaactaatgaactcaagacacgtccccttacccccatccatactttttatttactggaatcctgagaaaagcatccactgtttgtcagtcacagaattgggctttgaatggaatttatccaggacttaatatgaacacacctggaatgttcattagagcatctcttctccaaatatgacatcatgggagtgaatgaagcaaatcattttcttggctacttggcttgtaggtcatcttgtctcatacctggagaaaaatgtcagcttcactctatggtgaagtcttaggataacatctcttatgtagaagatgtgagtttgccttccagctaaaataaccttataggaaattgttttgatatttcaataaataagctctttgaataagagccaatacaaataacttttatattaaattctgctggtctatggtagaagtttaatcataggaggtacttccatacactgaatagtcagaaaaaacatcaaaaattctataagaacataataaagctcattcagctcattcatatctagaaggagagcttgaattcatgtaagttggccttttcccaggtcctaggctagtcctcaaatccagcctgcattttctttacgcccacwgctactagaaaaaacatctggcagatttggaatatgaataacatcagagataaccagagaaaatctgctggccataacgagttgaggacaagctataaattgtaagtttgtgtcaattttcatttcctaaaggcagcttttataaaaggcattatttcatcccattaagagcttgggctgacatatgaatgc

SEQ ID NO: 64734 - DNA, 1420 bp, Homo sapiens
tatgaactgcagttcctggcgattctgatttcaatgtgaaagtctaatattctaaaggactctgtggatcactatgtaattttcttaacaagggttgtaaaagtaactttcttagtcacatgactgcaaaccccactgcttcccaaactctgtaatcacgagaagggctgacctagtgaatacccttggatgactggagggaaaaaaaaaaatcgacacaggaaatctctacttcaaactcatgggcttgcatagctcagaaatctcaggggcagactaatagctagtggggttgtatctttatttgagcagaaacagacttttaggaattttccatgggaacttgccctcatctgtgtagggtaaaccttcaatgaaaatacgggctactggccacctcaatgaaaatgagggggtatttttgttttgcttcttatcctcatagcacagtcggtaggaatactctgttctcttgcatgtactaaaatgcttccaaattttctcaacagcatactttaaaatagaacagcagcgtggaaaataagtaaataaatacaaagaacacgtcagagaaaccctctagctctcctgagcacagttgagttatctctgcagattaggctggagaaaattctgcttagcatggtgcatatcaacctacagagaaaacacatcgtggagaagtgaactagcctgacccagcttgggcagatgtgctgatggggatttctcggcaaaatgaaagctgtttatctactactgtgtcttaccgggaccagcggcacctagaacggtggaactcacagacacaggcttctccgctctggatccctaaaatttcagtcggtagaaaacagctgcagaagatgagatcatggaaggttatccccttcctccccaacccagaccacacaggccagtgaattgcagacagggaaaggcaagggaatgtcagcaattattaatgaatcccttcaaagacctcaatcctggatgggtcattcagcagaaatcgcagaaatcgagacctagctcacttttttgtggggggatgaagtctcactctgttgtccaggctggagtgcagtgatggaatcctggcacgctgcagcctccacctcccgggttcaagcgattctcctgcctcagactcccgagtagctggcactgcaggtgcgcaccaccacgccttgctaatttttgtatttttagtagagatggggtttcaccatgttggccaggctgatctcaaattcctgacctcaggtcatccatccatctcgccctcccaaagtgctggggttayaggcatgagccaccacactcggcccatctcacttttcaaaataaaaatggcacattttcaacatgaaactattcatttcagaaagatgttctataaatgatgaatactcacgat

SEQ ID NO: 64735 - DNA, 1420 bp, Homo sapiens
tatgaactgcagttcctggcgattctgatttcaatgtgaaagtctaatattctaaaggactctgtggatcactatgtaattttcttaacaagggttgtaaaagtaactttcttagtcacatgactgcaaaccccactgcttcccaaactctgtaatcacgagaagggctgacctagtgaatacccttggatgactggagggaaaaaaaaaaatcgacacaggaaatctctacttcaaactcatgggcttgcatagctcagaaatctcaggggcagactaatagctagtggggttgtatctttatttgagcagaaacagacttttaggaattttccatgggaacttgccctcatctgtgtagggtaaaccttcaatgaaaatacgggctactggccacctcaatgaaaatgagggggtatttttgttttgcttcttatcctcatagcacagtcggtaggaatactctgttctcttgcatgtactaaaatgcttccaaattttctcaacagcatactttaaaatagaacagcagcgtggaaaataagtaaataaatacaaagaacacgtcagagaaaccctctagctctcctgagcacagttgagttatctctgcagattaggctggagaaaattctgcttagcatggtgcatatcaacctacagagaaaacacatcgtggagaagtgaactagcctgacccagcttgggcagatgtgctgatggggatttctcggcaaaatgaaagctgtttatctactactgtgtcttaccgggaccagcggcacctagaacggtggaactcacagacacaggcttctccgctctggatccctaaaatttcagtcggtagaaaacagctgcagaagatgagatcatggaaggttatccccttcctccccaacccagaccacacaggccagtgaattgcagacagggaaaggcaagggaatgtcagcaattattaatgaatcccttcaaagacctcaatcctggatgggtcattcagcagaaatcgcagaaatcgagacctagctcacttttttgtggggggatgaagtctcactctgttgtccaggctggagtgcagtgatggaatcctggcacgctgcagcctccacctcccgggttcaagcgattctcctgcctcagactcccgagtagctggcactgcaggtgcgcaccaccacgccttgctaatttttgtatttttagtagagatggggtttcaccatgttggccaggctgatctcaaattcctgacctcaggtcatccatccatctcgccctcccaaagtgctggggttataggcrtgagccaccacactcggcccatctcacttttcaaaataaaaatggcacattttcaacatgaaactattcatttcagaaagatgttctataaatgatgaatactcacgat

SEQ ID NO: 64736 - DNA, 540 bp, Homo sapiens
ccttacccccactaagccaccaggtatagtatagacaggtgatcaaaaccaaagtggtaaaacccaggatagccaacacaatattaaaaatgaagaacaaagttgcacgagtgaccctactcatgttcaagacttactataaatccacagtcatcaagatagtgtggtttgatgaaagaaaaggcaaatagatcaatggaacagaatagagaccycagaaatagatccatataaatacagtcagctgatctttgacaaaggaaaaaagacaacataatggaacaaaaatagtgttttcaacaaatagtgctgaaacaactggacatccacatgcaataaaaaaagattaatctagacacagatcatacacttttcacaaaaatttagtcaaaatgaatcatagacctaagtgtaaaacacaaaactataaaactcctgcaagataacataagagaaaatttagataacctagggtttagcaatgacttttagatatgataccgaaggcgcaatccatgaaaaagaatggataaatttgtc

SEQ ID NO: 64737 - DNA, 1307 bp, Homo sapiens
aaagatttgagagattttaaaatgtggaaaaatttgtttattagcatcaaagagaaatgatactaactaaaagtaattaaattaacagctttctataaataaacgactatacctgaaggaaaattatctatgcttgcaatgaagattaactcaatcaccagacagaaatacaccatggtgcaatgtcaatttcagcagcacataaaataccatactgaccttgaaagtgatcttggaaagcatccttactcagacgcttattttgtaccatccccaattttgccatcccctaagagacaattactcccacaaaaatctgtacttgcatttgtttttcctttcactttggaaaccacagttgtgctttataagttttaagggcaaaaaatatcttattgacttctgaatcctagctcagtgcttgtttaatgaatcaccaatgactctttgacatatctgaaacaacagacactaccagcawaagacaatcaagactggtctataaatggtagagtataaggcagggcataaaaccaacagactctcaaacttctcagccccagttttagcatactatcaaggaactgtttgctggtattactggagagttatgaatagcttcatttcataacttactaaattggaagaaatactgtgtctgaaacaaggattaaaatacagctctaaagacacaaagagaaaggaaatacttacagaataataccctgggcaaataatcaaatttgaattggaggctgggactttctctcttaatgatagcatagaggtaaacagatgtggtccacatctgagtgcatttttaaaatgtagcaggtcactgggtaagggcatgtaaaaattaagttattagcactataaagtacttcaatattattgtcaggccatcatataaagaaaagtctccacagaaagaaaaatgcaagagtatgaaatctgtaaggtttcatgtgtatttggagatggggctacatagaggtgaagtcctgagttactgttattacagacaggaatctccaagatgtttcttattgccgttatgggtaacagcagaattacatgttccatttcttttgtgcttacaatgtgccaggtgccgtatactgtgttaagcacttaagatctaatatctcacttaattctcattaccatccttcactccccatttcgaatgttaccaactcttggtaattatagcacctaaatttctctccagccatctgcacctttccatcgccactaccactacactaaactgggccctcctcccctttaacataaaccagtga

SEQ ID NO: 64738 - DNA, 519 bp, Homo sapiens
tctgcctgtttcaatctcacttcttccccaggrccccaggtggcatctgtctttggccttctcgaggctcctccgagcctctgggctggatagtttctcagactcaccttggttttgatttgatgaccttgacagtttcgaggcaggtgaccttgacagtttcgaggcttgctggtcacggagctgcaggatgcgcctgcattgggattggtctgatgtttttctcatgatgagactggggtgacggtttgagagaatttttcaagccaagtgggtgcaggagacccatgaaggcccctcccgctgatcttttgaggaatatgtatttctatctgtgcatttctgcttgtgtgttcctaagctactccctggaaggacacacagacactgggaactgaagatgcttctggggcgggcacgcgggcccctgaagacaaagtcggagagatgcatgctttgcaatgtgtgccccgttggtaccgattgaaaaagttatttaactacacgtatacgagactg

SEQ ID NO: 64739 - DNA, 1260 bp, Homo sapiens
tcctgccttagcctccctagtagccaggactacgagtatggaacaccatgtccagctaatgtttttaaagttttgtagagacagggtctcactatgttgcccaggctagtcttgaacttctgggctcaagcaatcctcytgcctcagcctcccaaaatgctgacattacaagtgtgagatccagccatggccaggatcttgaagttcgtgtgtttgtcctgcactggcccctctagcccattcctggcctcactccgtgcacgcccccaagcccctcaccggcctgctgggagagctggggtcactgttgaacagtcagccccagaagcctagctccctatgtatctgccgaaaggcctgatacagcagtagctcaattttattgatcttgtcaaaagcagtaactcaagaaagctatttaaattcacgggaggaagccacagcaattatccacgtctgcatcagattcttcatcatttttgttattggctgtggagcctggagacattctgtgtgcggctgacgcggcagcgaggggaccgctgagggctgaggttttgtttgcagcccaggaaaacaaataccataatcaagagttcgccgatataaatctatatgcataaaggtttacagggtattcccacggggacgcacgggcacccagtggtttagattcattttgtccctaatcccagccaaatcccgtcagcctattcctgcagctcctgttttagtgcataaaaacattgcgatgtgtgatggagcaggtgatttttttttgcagtctttcccccatagttaaactttaatgaaagattaaatcacagtggaatttgagtgacaagcagatgagatctgtggcaggcaccgtgagtctggctgggtgggctatggcagggactggggaagatgaccccacctgcccaccaccagagtgcctcggacctcagcagatggcagctctctggattggggtcatgattaattcatctcttaatccctggcacctagtaagtgcctggtacacagcaggtgccccagtgaataattgaatgaatgaatgaatgaatgagctggctgagttgcctgctttaaattgttgtttgccaaacagttgctcctggatatcctggtgtcatgatattttctgtctgtgctggacatctttagtgtgtcactccaggcccaatcttcactctgttcatctaggcctgttggcttccagcccttgggtgtccagctagaggttggaagcaggta

SEQ ID NO: 64740 - DNA, 1260 bp, Homo sapiens
tcctgccttagcctccctagtagccaggactacgagtatggaacaccatgtccagctaatgtttttaaagttttgtagagacagggtctcactatgttgcccaggctagtcttgaacttctgggctcaagcaatcctcctgcctcagcctcccaaaatgctgacattacaagtgtgagatccagccatggccaggatcttgaagttcgtgtgtttgtcctgcactggcccctctagcccattcctggcctcactccgtgcacgcccccaagcccctcaccggcctgctgggagagctggggtcactgttgaacagtcagccccagaagcctagctccctatgtatctgccgaaaggcctgatacagcartagctcaattttattgatcttgtcaaaagcagtaactcaagaaagctatttaaattcacgggaggaagccacagcaattatccacgtctgcatcagattcttcatcatttttgttattggctgtggagcctggagacattctgtgtgcggctgacgcggcagcgaggggaccgctgagggctgaggttttgtttgcagcccaggaaaacaaataccataatcaagagttcgccgatataaatctatatgcataaaggtttacagggtattcccacggggacgcacgggcacccagtggtttagattcattttgtccctaatcccagccaaatcccgtcagcctattcctgcagctcctgttttagtgcataaaaacattgcgatgtgtgatggagcaggtgatttttttttgcagtctttcccccatagttaaactttaatgaaagattaaatcacagtggaatttgagtgacaagcagatgagatctgtggcaggcaccgtgagtctggctgggtgggctatggcagggactggggaagatgaccccacctgcccaccaccagagtgcctcggacctcagcagatggcagctctctggattggggtcatgattaattcatctcttaatccctggcacctagtaagtgcctggtacacagcaggtgccccagtgaataattgaatgaatgaatgaatgaatgagctggctgagttgcctgctttaaattgttgtttgccaaacagttgctcctggatatcctggtgtcatgatattttctgtctgtgctggacatctttagtgtgtcactccaggcccaatcttcactctgttcatctaggcctgttggcttccagcccttgggtgtccagctagaggttggaagcaggta

SEQ ID NO: 64741 - DNA, 673 bp, Homo sapiens
atagacatgggtaatgattaaggaagctctggagagagtagtatctagatcctccatttcctcagtggcaaaatggaaataatatttatcataaggttgatggcaatataaagaagataataaatgtaaggtgttaagcaaggttcttgttatataagtgctcaaaatggtagctgttattaatattattatatcctgagattaaatgtgtcagcccccaaatctatgcagaaatattatgattatcatggaatgtggaatatcataggtgtcaataggcccttgcatgtgacttgtgtgaaattcatatcttaatattcaccagatatttattgtattaggcttgtatacctagtgagaaatgggtgggaaagtgcctcayaaattcccttagaaagggaaaatatgtatgcttgatttctgggaaataaaagaacagtctatatcacattgttttaaagatggtgccttcagagtacagaatgctgtggtgccttcttttttggtgacgtgttcgcaggaaaaaaatatatatataatctgaaatatggtgggcaaaaatagtgataggtgcaaacctgtccaaatgtcttgctttgcacagacttgaagggcccaagtttccttccaagctcagagaaaagctcagcctctggaaggggctgccacacat

SEQ ID NO: 64742 - DNA, 673 bp, Homo sapiens
atagacatgggtaatgattaaggaagctctggagagagtagtatctagatcctccatttcctcagtggcaaaatggaaataatatttatcataaggttgatggcaatataaagaagataataaatgtaaggtgttaagcaaggttcttgttatataagtgctcaaaatggtagctgttattaatattattatatcctgagattaaatgtgtcagcccccaaatctatgcagaaatattatgattatcatggaatgtggaatatcataggtgtcaataggcccttgcatgtgacttgtgtgaaattcatatcttaatattcaccagatatttattgtattaggcttgtatacctagtgagaaatgggtgggaaagtgcctcacaaattcccttagaaagggaaaatatgtatgcttgatttctgggaaataaaagaacagtctatatcacattgttttaaagatggtgccttcagagtacagaatgctgtggtgccttcttttttggtgacgtgttcgcaggaaaaaaatatatatataatctgaaatatggtgggcaaaaatagtgataggtgcaaacctgtccaaatgtcttgctttgcacagacttgaagggcccaagtttccttccaagctcagagraaagctcagcctctggaaggggctgccacacat

SEQ ID NO: 64743 - DNA, 515 bp, Homo sapiens
tggaagtgttctttgtggcaaagaaattggagagaggagtgggwggggagggggactggcttaagaaccatgttattattaaaagcagcacataataacagtttgacgtgacatgtaagattttttatcaagtgactttattttgctttatgtgtatcagcctcctgttttatagatttatttgctttttagcctcttatttgcatttttatttcaatattcacagtgattcctccattatttcccacttattcatatacaagataaattctaaagttatttttcatagaaccttcattctaacacttcccttatctgtattctcatatcattgtaatttttgctataaaagctggtaattttgtcaattatgagatattaaattttataatgttgtttttatcctgttcatcccaattagatgataaaaatatctgagaatataatgcttgtaacatcttcctcctttatttgacaaaccacactttgtgctgggcctggacataaatattaaa

SEQ ID NO: 64744 - DNA, 1727 bp, Homo sapiens
tactgccaaatacaagaagccagtttgaaaaggccacatatcgtagccctatgacattctgcagaaggcaaaactatagagacaataaaaaaattagtggttaccaaaagttgggtggggggaggatgaataggtggggcacaggagatttttagggtggtaaaaccattctatatcattctgtaatggtggatatatgacatgatatgacacatttgttaaatctcatagaatcttacaacacagagtaaaccttaatataaactatggactgcattaacaataatgtatcaatagttgttccttaattgcaacaaatgtaccacattgatgcaagatatttaaaaagcagaaacctaggggttaggaggaggcaacaatatgggaactcaacaatatctsctcgatttttctgtaaatataaaacttttcttaaaattaaagtctgctactttaaaaatgaagttaacagcagaaattaaaactctggccctagtgagcacagaacatcaatcagacttcctcctacgatgaacaacaaaaacaagcctgctgctccgctttttattttatttgttaagagacagggtctccctatgttatccaggttggactcaaattcctgggccaagcaatcctccctcctcagcctcctgagtcgctaggactataggcatgcagcctgctgcttcttttggataccatagtgagctctgaaataccagagaatatgcaaaattaacaaataactttaccctcattttgacagtagccttgtgagttgcccatagcttaaaaagaaaatattgatcacctttttattagtttggttgttctattaataaaggtagaagaatgtaagacattaaaaagaccttctacaacaaaaagagatttagttttggcataatagaaataaataacatttccttatacaagcatacagtcaagagtaagcactccttaaatcctaggtatgatcctaagtgctttacatgcattatttaattgaattctaaaaataactgtgcaaaccaagtgcaattattatcctcatttgacagatgagggaatcgtggcctagagaggttaaattaatcgctcaagattgaggacccaaatttccaagtggtatgtgtggattcaaagcctgaattacaatggccatattacttctcaattctgagaaaactagtataagattcattaaaagaagtatatttcaataaaaataaactttgacaagtttagtcaaaacaatgtaaccaagatagagtactaagctatataaaaatgctccagtgttcgtcaatcttgaataagattttgagcaaatatcgttataagcctaagccatctttaatgatatctttgcagaaatgtgtataatgttcatgtatgcaattcacacatgcacaagtgtattctgaaagacacagaaagagggagagagagaggaagagatattctaaactattaaaaataattattgtgttttttattataatgacttgaataggtcatcaaggtactagaacataactgctgactgctataccaaaaggcaatttataaagctacatatctaatctctgccttcgttccagtttactcagtgtggaaaatgatactggccttccaaaaccttcacttatgtttggactctttccatctttgagtcttattctagtgttgctgaccattaaaataaatatttcagtggggct

SEQ ID NO: 64745 - DNA, 1727 bp, Homo sapiens
tactgccaaatacaagaagccagtttgaaaaggccacatatcgtagccctatgacattctgcagaaggcaaaactatagagacaataaaaaaattagtggttaccaaaagttgggtggggggaggatgaataggtggggcacaggagatttttagggtggtaaaaccattctatatcattctgtaatggtggatatatgacatgatatgacacatttgttaaatctcatagaatcttacaacacagagtaaaccttaatataaactatggactgcattaacaataatgtatcaatagttgttccttaattgcaacaaatgtaccacattgatgcaagatatttaaaaagcagaaacctaggggttaggaggaggcaacaatatgggaactcaacaatatctgctcgatttttctgtaaatataaaacttttcttaaaattaaagtctgctactttaaaaatgaagttaacagcagaaattaaaactctggccctagtgagcacagaacatcaatcagacttcctcctacgatgaacaacaaaaacaagcctgctgctccgctttttattttatttgttaagagacagggtctccctatgttayccaggttggactcaaattcctgggccaagcaatcctccctcctcagcctcctgagtcgctaggactataggcatgcagcctgctgcttcttttggataccatagtgagctctgaaataccagagaatatgcaaaattaacaaataactttaccctcattttgacagtagccttgtgagttgcccatagcttaaaaagaaaatattgatcacctttttattagtttggttgttctattaataaaggtagaagaatgtaagacattaaaaagaccttctacaacaaaaagagatttagttttggcataatagaaataaataacatttccttatacaagcatacagtcaagagtaagcactccttaaatcctaggtatgatcctaagtgctttacatgcattatttaattgaattctaaaaataactgtgcaaaccaagtgcaattattatcctcatttgacagatgagggaatcgtggcctagagaggttaaattaatcgctcaagattgaggacccaaatttccaagtggtatgtgtggattcaaagcctgaattacaatggccatattacttctcaattctgagaaaactagtataagattcattaaaagaagtatatttcaataaaaataaactttgacaagtttagtcaaaacaatgtaaccaagatagagtactaagctatataaaaatgctccagtgttcgtcaatcttgaataagattttgagcaaatatcgttataagcctaagccatctttaatgatatctttgcagaaatgtgtataatgttcatgtatgcaattcacacatgcacaagtgtattctgaaagacacagaaagagggagagagagaggaagagatattctaaactattaaaaataattattgtgttttttattataatgacttgaataggtcatcaaggtactagaacataactgctgactgctataccaaaaggcaatttataaagctacatatctaatctctgccttcgttccagtttactcagtgtggaaaatgatactggccttccaaaaccttcacttatgtttggactctttccatctttgagtcttattctagtgttgctgaccattaaaataaatatttcagtggggct

SEQ ID NO: 64746 - DNA, 842 bp, Homo sapiens
gggatcccttaggagctgccatatttaaatgttttgttacttggaaccaaatacttattataatctatcacctattcattcactctctgttctttctgaaggttagatttcctggcacagttcctgcccaaatctctcctataacccaggctggcattgtagaaatctagaaactgttcaaatcagtaatcactacagttatgaaagacactttgggaacacagtagatcctccagtctagttaatcaaaatacacaggttactctaattaaaagtttcataattatacaaaaggtacatattttcaaaagtactacttgrcatactacaataaataatacaatgtatgcctcttctggctgggataaaatgaacctttaatgttatgaattagattttatatattttgacactaaggagcaaaatttctaatgtaactatttctaattataaccacttaacagtatgtaattcatatataaagttttcaaaaaataattttgggggaatttctaggcacatgtatggtaatacatgaatgcaatttcctaaagacattataatactatttgtctttgagaaatactactgcatctatccattctcttattgcaaatataccaattttgtctacttgttaagattaccatttttcaaaatccatatttgtaaatgttactcaatttacaatatgatcttttgaaaagtgctaattttataataaattttattgcttgcttccgattatgtaagtcatacatatttgagatttttaagaatgggaaaatttgtgtatactctaaaatgttccctttgtgttatgtaggtaaaattatttgaaa

SEQ ID NO: 64747 - DNA, 584 bp, Homo sapiens
taggttatatgcaaatactatactgttttatataagggacttgagcatctgtggattttgatatccatggagggtactggaaccgattccccatggatacgcaagaacaacggaacaccatctctatgattagttcaccacctatggccttataacattctgctataacttcaccagtatatatgtagcacaaatccattttctaggcagaaagcactaagacactttgtctttacaatctttctcatgcctgtttaggaaaaatacattttatgattttaacagacatatttctaagtaaaatatgattcttgtttctccaatatcttgaatatttcttttaaatgacttaaatatggcatttctggaaaaggcagcaagatggaaagtgatctttcactaagaaaggatattataggctaggctyagtggcttacactcataatcctagcactttgggaggccgaggcaggtggtccctgaggtcaggtgttcgagaccgcctggccaacatggtgaaaccttctctactaaaatacaaaatatactgggcatggtggccacgcctgtaatcccgctacttg

SEQ ID NO: 64748 - DNA, 946 bp, Homo sapiens
gctaatccattaatgcagttaatccgttcaaggagcactgtaacttgggcctgccaagagactggagggactgttgtaggttagcgcgattcatggggaaaaggtcatagtaacaggaatcaatagaaaaagggggcaattttgggaatcttataggcatctgatctccacttaagttcaggggcagaaaatctgttctggacatagtctaatattttgagtggtaggacatccaaggtccaaaagggcagaccaggtttggagctagagaattagtattagcaagatgttaatcagtttgagaaaacagaagacagggtccagccatagctcaaggactagaggtagagaatccagacttggaggaaccaggtagatgtcattaggagttgctgagtcactggatttagatcttacaaccctgaacccataattaatgacctgggcagccaatctcagaactccacacggaaggcatgtagtatcagtgccctggcccataggaaccgggcaacaggtacagggactctgacacagatctaggttatgggcacagggacatcctcagaagacttcaatgtattttgacccttggtgcaagagttcttatgtatccttgctaagggcctagagtaacgttaataagtgggtgttcctgagtatagactaggatccacagaaacgtgacgagtgcctagtccagcgtctctcatataataggtactgaatagacattgaatcccactctcttatcctcactgttccttgttaaatgtttcctcactttaatccgtttattaattgaatctttttgatgagacaaattccmcaattttagcctgatccttttcagcagctcctccatctggacccatgtcttaagtagcatgatagtatacagttagaaatgtcctttaatacaattctcatataagatgaaaactgg

SEQ ID NO: 64749 - DNA, 1284 bp, Homo sapiens
ttcatttcacagcccacaggtctataaatattattgtgctcttgtttcaagtctttgagttagtaatagcatggtctgatttttatctttggttctattttccctttgagctttattttatttctcctgcttttcttgatttttgggaattaatttttttaacattattaactctatagcttttagtcaccctttgaagaggtcctactgagtaatgatcttctttcaccttctgaacgctggggaagaaatttttataaacattggctggaagggatgcttatctttagctcaggaaagcattatcacctgtatctcttagttcttttacctttctttcctcactctttttacttctttgcattctctttcttcttaccttttcctgtcttttttttctttcctcctcaccatcttcccttctttctccctgtcctctcttcctctcttgaatttaacaggtaaaccgtgtattctcatttaaaattttacaattggttttctgcatttctaaatagtgttgtgcaatgaactcggctttgcagtccaatataaccagctaatactttatctttaccttttgttggctttgtaatcctaggcaaattgaagactcttagacttaatttgccctttttaaaaacggaggtaataataccttttctgtaatacagttacaaatctaatattgcctgagacagagagaaggtacacaattgaaaactctcttcctgttaaagaaaatattttaaaatcagggccaggtgtggtgttaggcattcttttttatgtttgtctccataaattggtatggctcaattttgcaccagattgtaaaatttccattggcagaaactggttctcactcatattttgtcccaattgcccaacccaatatgtgatagatgctcaataagtaggatatgtattaaatggagccaaaagtgaggccagatcaagccaaggatgcagacttcactatcagacagcctgggtgatctcatttcactttcacccacaaagcagcctctgctacaaggaaagcatctgctggtgagaaattctttgcagcatttccctgtaaattggagagtagaagaaaagactgctcaaccagctgtcgtcaacaacttagaaaacttgaatgtttaggcaagtataagtttcccatggtgttctctaatgctcttttcaaggatactatttttttaatcaactgaacaaaagcctcataaaaatagcacagtgcgcaactctagcscacaaagatgcagaagaacatgg

SEQ ID NO: 64750 - DNA, 718 bp, Homo sapiens
tgctgtgacttggttttgagacttaggcaatcggtgtaaataaatccagcactatgtacttaattagaagcttccactggattcattaagatgcagacacatagtttaaatagagagattaaacagcaattgaaatgattattagagcacagaaacaacttcataaactagggasaatttttctaaatgtgcaattgcattttcaacacaattaggtgcttaattgtgtactatccttagttaatacattttaacatataaaacactagattaaaaaaatttttttagtttttttaaaaaagacattcaatttttttaaaaaaactacctttgtctactggctttgaagatttgaaatctaaaaaaatatataaaagtttcttcttactcttcatccattacgttaccacagttttaaatggtttgttcacacaagtataatctgtctttgtaaaacaatgtttaaaatttttctaaaaaatttgtaaggagccatgtgaatgatatatacctcacatgctcagataccaggcacacattttacatcattgtataattaggacttagtattttcatcataattaaataagaaggcccaagcacagtgtcacatgcctgtaatcccagcactttgggaggccgagacaggtggatcgcttgagctcagaagttcaagaccagcttgggcaacatggcaaaagcccgtctctacaaaaaa

SEQ ID NO: 64751 - DNA, 718 bp, Homo sapiens
tgctgtgacttggttttgagacttaggcaatcggtgtaaataaatccagcactatgtacttaattagaagcttccactggattcattaagatgcagacacatagtttaaatagagagattaaacagcaattgaaatgattattagagcacagaaacaacttcataaactagggacaatttttctaaatgtgcaattgcattttcaacacaattaggtgcttaattgtgtactatccttagttaatacattttaacatataaaacactagattaaaaaaatttttttagtttttttaaaaaagacattcaattttttwaaaaaaactacctttgtctactggctttgaagatttgaaatctaaaaaaatatataaaagtttcttcttactcttcatccattacgttaccacagttttaaatggtttgttcacacaagtataatctgtctttgtaaaacaatgtttaaaatttttctaaaaaatttgtaaggagccatgtgaatgatatatacctcacatgctcagataccaggcacacattttacatcattgtataattaggacttagtattttcatcataattaaataagaaggcccaagcacagtgtcacatgcctgtaatcccagcactttgggaggccgagacaggtggatcgcttgagctcagaagttcaagaccagcttgggcaacatggcaaaagcccgtctctacaaaaaa

SEQ ID NO: 64752 - DNA, 640 bp, Homo sapiens
agaagaaaaattaacaccatgtgcctcctgatataatgcaatggaaaggacacaacatcaccaagaatacagtgttcttgtcaaatgtgtaacgtgaatctaattattcaagaaatgaaaattaagaaatgtagaaatcatcagtcattctatcagaaacctaacgctggatgcttaaaaaatgtcaagatcatgaaagacaaaaaaaaagtttttttaaataaatataaagttaaaycatgggagctataccaatttaaagaagactgaagagacctgaaatccaaataaaatatgtgatcctttactagaaattccgaaaattccacaaaggatatttctggagggacaattggagaaagttaagtcagataattatatcattataaactttcttaagtatgatactggtgttgtaattatgctgcagaatgtccttattcttaggatatacatgctagggtatttggggagtgaaatatcataccttcaactcactttcaaggaaggaacgaatggatggaaggagggagggagagaagggaaggagagaggaaaaggagggtggaaggaaaaaaagaaaaagattggctcctgagtaactgtgactaaaaatgctccaaggtagatgataaactgg

SEQ ID NO: 64753 - DNA, 2469 bp, Homo sapiens
  misc_feature (1)...(2469): n = A,T,C or G
cttgaggctgtcagccattgctatgtgccagacactgtgacaagcgctatacatgaaatatcacatttaagcatgcatggcttcttggaggacatggcatctaattttctcaccttagaaataaacagaaggccagagaagacacgctcaaagacatgctcgaagctagctgaaggcagaggctgctcaaaagctcaagccctctcccttgctgccctctctacaaagctaacagtgtctcccaatggtccagatactggcactccagagaaatctacctttaaaacacaaactttaaaaaacagatacagggtatcctctagagtcgacctcaggatnnnnnnnnnnnnnnnnnnnnnnnnnnnnnnnnnnnnnnnnnnnnnnnnnnnnnnnnnnnnnnnnnnnnnnnnnnnnnnnnnnnnnnnnnnnnnnnnnnnnaaaccccacaagctataccaaccccctcatttcagaggttttgtttttctttatgatttattcctgacaaacacctaccacttactagtttaccaaacagctggccaatttatctttttttttttttcacattttggttgataatatgttatctaactttttgtacttcaacaatctgagatttttttaaatggcattacaggataattttagtgagcatttctcctagtaagtgratgagaaaagatgctatatgtctaaggcatcttttcatatgtctctggccatttttccattgggttgatggtcttttattgatttgtatagttctttaatcaggaatttagccccgtgtttttaaaattacacaatctgaagtgaaacatgcattcactttttaaaggaattataattaagtgaaccaggagcaacctgccatccaagttaagaaagagaatattttcagggcctacaggctccctgtttctcccagtggctgcctcatcactaacctgatttttgtgataatcatcctcaatttgcttccctcctgtgcctgcctatagtttcactttgcatgcccttgaactttatacatgtggaattgtactgcatttattctcttgtgccttccttctgttgggggttgacagatgagtccatgctgatggcgtgtaactgcagtggctgcccttcattgctgctgtggtaccttcacactgtggagtaccaagttctgtgtccattctgttgttgatggacataatactgctgtgaacattcttgcacattattctggggcgcgtgtgaaagtgtgtctcctagatggaaagaaatgcacatgtaaacattataaagaaacatcaaattattttccaaagttgctttgccatttttcactcctgtagcaccatgcaagttaccttacatcctcttcagcatttggtaatgtcaagtttatacatttttgccaatctggtgggtatgttatagtatcttgtgttttaactggattttccctagttcctaatgggattaaatatcttttcagatttttttggccattcaagctttttaaacaaaatccttattaaagttactagtccattttttcctgttggtttctttctttcttttttttttttttttttttgagatggagtctcgctctgtcgcccaggctggagtgcagtggcgcgatcttggctcactgcaagctccgcctcccgggttcatgccattctcctgcctcagcctctcgagtagctgggactacaggcacctgccaccatgcccggctaattttttgtatttttttagtagagacagggtttcaccgtgttagccaggatggtctcgatctcctgacctcgtgatctgcctgcctcggcctcccaaagtgctggaattacaggcatgagccactgcgcctggtgggttctttctttttttaaaacattgatttaaaaatatatgtacagtaagtcatcacttaacatcactgacgggttgttggaaactgcagatttaagtgaagtgatgtacagcaggtccttgaataacactgtttcatcaacattgttttattataacattgataaaaatagttgttttgttacacgtcacttcacttagtggcagattccaagaacctttcaacaacgctaagtgaggacctgctatacgtacagacatacacacattttctctctctctctgaatctggccctttgtttttctctgttacagatagcttgcctcagttggtagcttgtcttttctctctcctcatgatgtccataattttaaaatgtctcctatttccagaacgccaatctgaattgccaacgcaaagcaaagcgagcttccccagtattctcagtgacccagacccggattcttctaattctggatttgacagctcagttgcctctcagatcacagaagctttagtcagcggaccaaagccacctattgaaagtaggtacatataaattaatttatactctttgttttattctgtcagcagga

SEQ ID NO: 64754 - DNA, 775 bp, Homo sapiens
tccccctatgctgttctcatgatagtgggtgagttctcatgagatctgatggttttgcaragcagttttccctgctcttgctcactctctctggcctgccgccatgttaagaagtccctgcttccccttccaccatgattgtttcctgaggccttcccacccttgcggaactgagtcaacgaaacctcttttctttataaattacccagtctcaggcatgtctttatagaagtgtgaaaacagaccaatacagtgatgttatctttggtagttggggaagttatgaattttgtgacactggttgtgtgactggggcagtaagcaacttatagaaaaacaaactaagccatggcaggacattgtttatgcctattctttagcaaagtctaagcccctaccataattccaaccttgccttatgaatgcgcctttaagctccaggcaaggagggggatcattttcccttgactccaagtttaactataaactaaatccctctcataggtttcttggcctttgtactagaataagcaaaaagccaaccaaaaaaaaaaaaaatcccctagaaaacataatttagcctgggaggttagaagcaagatggagtcagtcttgttagatttctcttatttatagttctgcaaaggcagttcaagagtcaccagactgttaaaggatttccatactgcaaacaagcttaaggacaccttaaagaagaaagaagaaaactatttttaaaacatttttaaaacaacttccttccatcacaatcatc

SEQ ID NO: 64755 - DNA, 2102 bp, Homo sapiens
ctccagcctgggtcgtagagcgatactccgtctcaaaaaaaaaaaaaaagcccttgttaatttgttaaacacaaagataaacaacaccaataataaatcaaaaattatgcacatgcatacacatggaacaaaattctcatttatctttttttcttagtgtgtgtatatttttctgaactaaggctggatctataagcctgattgtagtgaaacctgtgtgtttgtgtgtgtttctgtgtgaggtgtgatgaattatttaatacttaggttgaggtagcaggcagaaattctttcagattctggaaatgaagtgagagaaatgaataaaaggagttagaatttgggagtgagattagagcattttccctctgaaaggatttggagttgtgattgagaaaatgtaactgaagaaccaattataatcagaaaattgagaaatatatcactatgcttatgggtttggtgcctctgttgattaaatacagaataattttaggggatagtctgaggatgtgtgtaaaatattgggatgcatttatgagttggtgtgcattggtgggtaggagaggtttcctgtggaatgtgggaggaggtcataaagagaaaggtagggtatctgtcctggcagtcatgtgtggagtagaatgggagtgctcgtgggaagaggagaaggtgataaattgtwgttggcccttaaacttaaaaacttaaaataaaatacttaaaataaacttaaaataaaacttaaaataaaacttaaaaaaagttggatccttactagttgccagtctagctagacacacgcaggcatttcttttctgactggttacagaggtgggaagggagagttactcttggggaaagagagagaaattgagactaatccccatgggtctccctgaaaaaggataccactaggttcttcatgcaggatctgatcagtggctttgctgggcgaggaagacctcccaatgtccaaactgtctacagtctgtgtcctggtgtgggacagtaagtgtatgtctgtaggtgtgcaaagagggggtgagatggagggggtctttggtttgttgtgctggtaggtccctgtgctaccagggaccaaatgaagtgggacactaaatttaagacagcttgttgctatttcagtcacactctcacaagatgccaatgattattttttattatcaggcattccctcacaaatacattttaatgagctaataaaattactataaaaattgttctataagcatggaatggaactagaaaagaaattttccatttaaaatttgttcaggtggcagctgtggaatgtgatgagaaatataagcctttgcacaccctgttgctgggctcaaggaggagttagctgtctcctagagatgatccttttgcagttcagatggggaaactgagacccagagggttaagtggatttttccaaggtcatacagctggctagggtcagagctgactcttaaatctctcaccttgggtgtgaccagacttggaagaaaaaagccattcattagctaccttatcccttcccattcaccaagcagctgggaaaggatggcccaacctactaatatcgcccagcatttttgatgaatagctatggctcactggggtcctctttgcaagttgttcttagtctatctatccacaatgaatcctcttttccactagatctcatgtcttgtgttagcaaaggattttaaaagaatggcttagacctccatatacacatcaaacgctggctataatgccggaaagaggacaaatatccagtttttccaaattaatttagatagccattttaataatttgggcccccatgtggtttgtctactttgcctaaagaactataatggtaccaggacaatgagctttgacaattattcatatactaaataattcaagaagaaaaaaattctattgcttttgcgtaatgtatatatagtaataattctttttttaaattttactttaagttctggaatacatgtgcagaatgtgcaggttcgttacatgggtatacatgcgccatggtggtttgctgcacctgtcaacccatcatctaggttttaagccccaca

SEQ ID NO: 64756 - DNA, 1729 bp, Homo sapiens
gggctgaggcaccccccgccatgcggggagtaagagacagtccctcttcccccactggctcttaggacccccatcgcagtggggtgaggcacccccgcaatgcggggagtaagagccagcccctctttccctccctggctcttaggacccacatcgcaggggggtgattcaccccccgcgatgcggggagtacaagccagcccctcaccccccatggctcttaggacacacatcgcaggggggtgaggcaccccccgcgatgcggggagtacaagccagcccctcaccccccatggctcttaggacacccatcgcaggggggtgaggcaccccccgcgatgcggggagggctgagactggggtctgggctgttccggacttcaacactcaccccttgtccccacgcagggctatggtgtgtgctcggcggggctggagcggctggcttacctccttgtggcttacagcctggaygcctcagtcgcctcactactgggcctgctgggcttgtggctgtcacgcccggtttccctcgtggctggagcaggggtgcacctgctgctcaccttcatcctctttttctgggcccctgtgccttgggtccttcaacacagctggatcctctgtgtggcagccgccctttggggtgtgggcagcaccctgaacaaaactggactcagcagtgagtatagctgtgggcactgggagggcagggcagggggctttatggctatctgtgggtggttggctagacatagacatcccagggacagatatggggtcccatggtcacatagcatcctgtggacatgacagagtccagtgggtcttcctgtggacactccaggggtggaagggaagtctcatggacacactgggggcagatgggtagggcgtggacaccctggagacaggtgtgggggttcacgccatggacattccattaataccccatggtgggcacagggccccatcaacactggagcatcagtgtgaaatctcgtggctacagggggcaggtgtggggctctgtggacaccccttagggacggtatgaaaaacacatcagggattcttccttttcataccaggggacagggcttaccctggcatatttttcatgacacttggagcagatgttttggtctctgcctcacagagcatgtggtaggagcaagtggcctgttgtacatccacggcatagatacagacatgggcctttgtatagagaggagcaggcctgcagccccaacccagtctgctcagtaccagagtccaggccccaggtctgggctgctggggaacagggccctgtttgcagaaggcagcgggtgggcccatgttcagctccaggatgctccctgcccacagatgggcacatgcagtgacacacagctagcacacatgggcacagtcctgcagggcatccatgtcagtgtctgttctgatgggccgaaactaagaacagttttgaacgtcatccttgggggtgtggagtggcagaggtcatgcctgctcctggcagggcagagggtggctcggtgtctctgtctgtagcaggggctggagcctcatactgcaccacagtctcttggccgttttgcccaaggatagtcaattctgggcagagtccatcctgggtatcttggacccatgttgtgccctgtctggtcatggcatcccctctgcccagctccatatcccatctcctccggtgaaccctggggga

SEQ ID NO: 64757 - DNA, 1729 bp, Homo sapiens
gggctgaggcaccccccgccatgcggggagtaagagacagtccctcttcccccactggctcttaggacccccatcgcagtggggtgaggcacccccgcaatgcggggagtaagagccagcccctctttccctccctggctcttaggacccacatcgcaggggggtgattcaccccccgcgatgcggggagtacaagccagcccctcaccccccatggctcttaggacacacatcgcaggggggtgaggcaccccccgcgatgcggggagtacaagccagcccctcaccccccatggctcttaggacacccatcgcaggggggtgaggcaccccccgcgatgcggggagggctgagactggggtctgggctgttccggacttcaacactcaccccttgtccccacgcagggctatggtgtgtgctcggcggggctggagcggctggcttacctccttgtggcttacagcctggacgcctcagtcgcctcactactgggcctgctgggcttgtggctgtcacgcccggtttmcctcgtggctggagcaggggtgcacctgctgctcaccttcatcctctttttctgggcccctgtgccttgggtccttcaacacagctggatcctctgtgtggcagccgccctttggggtgtgggcagcaccctgaacaaaactggactcagcagtgagtatagctgtgggcactgggagggcagggcagggggctttatggctatctgtgggtggttggctagacatagacatcccagggacagatatggggtcccatggtcacatagcatcctgtggacatgacagagtccagtgggtcttcctgtggacactccaggggtggaagggaagtctcatggacacactgggggcagatgggtagggcgtggacaccctggagacaggtgtgggggttcacgccatggacattccattaataccccatggtgggcacagggccccatcaacactggagcatcagtgtgaaatctcgtggctacagggggcaggtgtggggctctgtggacaccccttagggacggtatgaaaaacacatcagggattcttccttttcataccaggggacagggcttaccctggcatatttttcatgacacttggagcagatgttttggtctctgcctcacagagcatgtggtaggagcaagtggcctgttgtacatccacggcatagatacagacatgggcctttgtatagagaggagcaggcctgcagccccaacccagtctgctcagtaccagagtccaggccccaggtctgggctgctggggaacagggccctgtttgcagaaggcagcgggtgggcccatgttcagctccaggatgctccctgcccacagatgggcacatgcagtgacacacagctagcacacatgggcacagtcctgcagggcatccatgtcagtgtctgttctgatgggccgaaactaagaacagttttgaacgtcatccttgggggtgtggagtggcagaggtcatgcctgctcctggcagggcagagggtggctcggtgtctctgtctgtagcaggggctggagcctcatactgcaccacagtctcttggccgttttgcccaaggatagtcaattctgggcagagtccatcctgggtatcttggacccatgttgtgccctgtctggtcatggcatcccctctgcccagctccatatcccatctcctccggtgaaccctggggga

SEQ ID NO: 64758 - DNA, 1729 bp, Homo sapiens
gggctgaggcaccccccgccatgcggggagtaagagacagtccctcttcccccactggctcttaggacccccatcgcagtggggtgaggcacccccgcaatgcggggagtaagagccagcccctctttccctccctggctcttaggacccacatcgcaggggggtgattcaccccccgcgatgcggggagtacaagccagcccctcaccccccatggctcttaggacacacatcgcaggggggtgaggcaccccccgcgatgcggggagtacaagccagcccctcaccccccatggctcttaggacacccatcgcaggggggtgaggcaccccccgcgatgcggggagggctgagactggggtctgggctgttccggacttcaacactcaccccttgtccccacgcagggctatggtgtgtgctcggcggggctggagcggctggcttacctccttgtggcttacagcctggacgcctcagtcgcctcactactgggcctgctgggcttgtggctgtcacgcccggtttccctcgtggctggagcaggggtgcacctgctgctcaccttcatcctctttttctgggcccctgtgcctygggtccttcaacacagctggatcctctgtgtggcagccgccctttggggtgtgggcagcaccctgaacaaaactggactcagcagtgagtatagctgtgggcactgggagggcagggcagggggctttatggctatctgtgggtggttggctagacatagacatcccagggacagatatggggtcccatggtcacatagcatcctgtggacatgacagagtccagtgggtcttcctgtggacactccaggggtggaagggaagtctcatggacacactgggggcagatgggtagggcgtggacaccctggagacaggtgtgggggttcacgccatggacattccattaataccccatggtgggcacagggccccatcaacactggagcatcagtgtgaaatctcgtggctacagggggcaggtgtggggctctgtggacaccccttagggacggtatgaaaaacacatcagggattcttccttttcataccaggggacagggcttaccctggcatatttttcatgacacttggagcagatgttttggtctctgcctcacagagcatgtggtaggagcaagtggcctgttgtacatccacggcatagatacagacatgggcctttgtatagagaggagcaggcctgcagccccaacccagtctgctcagtaccagagtccaggccccaggtctgggctgctggggaacagggccctgtttgcagaaggcagcgggtgggcccatgttcagctccaggatgctccctgcccacagatgggcacatgcagtgacacacagctagcacacatgggcacagtcctgcagggcatccatgtcagtgtctgttctgatgggccgaaactaagaacagttttgaacgtcatccttgggggtgtggagtggcagaggtcatgcctgctcctggcagggcagagggtggctcggtgtctctgtctgtagcaggggctggagcctcatactgcaccacagtctcttggccgttttgcccaaggatagtcaattctgggcagagtccatcctgggtatcttggacccatgttgtgccctgtctggtcatggcatcccctctgcccagctccatatcccatctcctccggtgaaccctggggga

SEQ ID NO: 64759 - DNA, 712 bp, Homo sapiens
gatccccaaaagagtcacgtgtgtggcctccagcccatggctgtgtagatgcaggttggggccgccccgggcttggctgctaaaacgggatcaccccacagagcagagaatcctcgttcttttggctcttccgtggacaccagctgatttttcctcctgcactggaggttgggtttttatctatgtaagagcagtcctgtgagatgcagccagtctctgaaaacycaaggctgtctttgaggcagcaggaggggtgaccagggcaggtggtgcgggcctggaggagcaggagagagtgtttggagccgctgcagcgcccagccctgctgccagtacttaaagggacatcatcccccccgaacacggctctgcccttgaatcttgactcacagacgcccgccctgaagttggatctggctgtgactgcaagccccgaccagcaatctagaggaagaacgtgattcctctcggctgcgtctgagctgttgtggtgcaggggttttcctggatgatgtagagtctgcagcatctcagacactgcatctttttttttttaaccaggggatagaaagatgagactggtctgtctccttgagggtctgcacaatttttcctgcagcctctaggatttttagattctttttttatttcccctttacagtaagcctcttccatcccttcccttatgccccatccttaatgacgttcaggg

SEQ ID NO: 64760 - DNA, 1899 bp, Homo sapiens
  misc_feature (1)...(1899): n = A,T,C or G
aactatacttgtagactttgaaatggcaggtatatatactactttttaaaatatccctcacacataaaatcaatttgattttaccttcattctactaacatacagtattatctatacaacatcccaattttcaattatcayttcttataaaaataaaatatgctcagctctgacagatgcctcatccttaaaatactctcttcctcataacaagaatctctgaggggaaaaaaaataaaaaagaaatactttatttccttggattcttaggtaccacaaactctgctgattctgcttacttcacagtttcttttatgccaacttcgctgacttcatcttctctatacagccctcaaaaaccagggttcctggggagctttttttctgggccttttctccatatatctcttttactttaggtgatttctattgtcctgtagctgtcaggagtggtttcaggtggaagttttagaatatagctaaaaattatctttaacactttaacattgtcaaaatactgggattgcaataatattacctgcataggaaatacttaatttcttaatattccctggntggcacattcagggatttaaaggaaagttattttccaaagtcatgttctgatgcaattatcaggtcactgtattagttatctattgcctttatataaactatnnnnnnnnnnnnnnnnnnnnnnnnnnnnnnnnnnnnnnnnnnnnnnnnnnnnnnnnnnnnnnnnnnnnnnnnnnnnnnnnnnnnnnnnnnnnnnnnnnnntaaattgatacagctgggaacaaattattcgtggactactccaaaacaaaagcagagatatttgtacattagttntaaaattcaagttgcctataaaagtagtatgaaactctcttcttgagagtttacctgcttacatagtcattaaaaaataaaggaagaaaagttaattccaatggaaaaaataattgagcctattatatttcatatttaaaagtcagtaaatataagctttgactgtgaatagcattacctttgaaaattgtgaaattataatagaagttctcaaaaccagcagtaaattttttcataaccatgaaatcacccacgaatgaggtaaatttagacatatttcactatttcattattgtaaaaataatgctcattaagtattttattatgtcagccactgtgcaagcactttacatgcattatcttacttcttattaagaggtaaaaagaacttcttattctcattttaatgagaatctgagactttaaattagagttataagtaaaggtaatttggccatgacatcagcaacaagttgtgcttttaaccactattatatactttccttttactaatgataaatccagtattttgaagttggctggggaaatgtcaacatggattaattaaaaactaaaataacttttaaacatgattattcaaacaagattcattcaacattaattggcacctgcaatctgagtactacttcattcattcgctcatttaacaaataattactacgtaaccagaatgtgcccatcagtgctctcgcacagtcccatacaacttcctagaataatagaaatgcactatattagcactgctcaatacagtagctgagcacaagtgttgagcacttgaaatgtggctagtgccactaagaaactgaattttaagttttattacatataaattagtttacatttaaatgttaataaccacatatagactaacagctaccacactagacagggtagctctacatattgagtgcatggttagcaaaacagacagggttcctaccttcatggagcttacaatctagagggaggagagcatgaaataagaaaatgaggcagggcatggtggcccacacctataatcc

SEQ ID NO: 64761 - DNA, 2102 bp, Homo sapiens
cgtaaagctcaaagaaaaaccacaaaacaaatgctggcatgatttccttgtaggtcaagagcactgccatgccagaagggcccctacctttcccccttccaatcactagccctgtcatcctctgaaagggtaaccaactaatttacttccaaaactatagtttacttttgcctatttttgaacctcatatacatacaatcatagtatgtagtcttttattaatgactttatttcactcaacattgttagtgagatttatgttacttacagatatacttcattcattcccacatattatattccacttacgattattgcataacctagtatattcactcagtacaccgttaagggttatctgcattatttccagttgggactattacaaataactctgctacgagcattcattctcatgctttgattgtcccacatcctccaacatctcagaaggcttccttatgctcctgtctaccctggcaaaggaaccactcttctggtttttatcaccataagtatttatttatgaatttataggcagttaaggagtccatctgtctatccatccacccattcatatgaaagaaatcataaatttatgctcttttgtatctggacttttttctcaacattttatctatatgactaagccatggttatgtattgtcacagtacttctttttcattgcaatgttgtcattcattgtacaaatataccacattttatacattttcctgttaatgaaaatttaaattctttccagtctggggatatcataaatattttacgaacattcctaaacatgtttttcgcagattaagtacctcattctcttcagtatatacctatgaatgggtcatagtgtatacatgttttagctttagtagatactgccagttttctaaagcagttttaccaattacatttccaccagcaatatgtgagagttctagctgttctacatttttgccagtacttggtatggtcggtcttttagcttttgcatcctgttttggtgaaatacagtatctcactgtagttttaatttacattttcctgatagctaaaggtattgagcatctttttttatgcatgttagtcatctggatatcccttctttgtgacgtgtcatcctagtcttttgtccattaaaacttttgagtaacctgattcctactgatttgtagttctttatatattcaagatatgaatcgtatgtcagatatatatgtattgcagattgaccttctccagcctgtggtgtcattttcttttgcttaagagtatcccttaataaaaagattttaatttaaataaaatcaattacatcaatcatgtattttatagtaggaactttttgcatcctgcttatctttattatcccaagatcctaaaattttctcccaagttttcatctagaagctttattttttttttttacctatcacacttaggtgtatggttcatttttatctatgttgtgaggttaggctgagtttaatctattgactcactactatttgaaggaacatcctttatcgaaatgcagtggtacctttagtgtaaacctatttctggactctatactgttccatttgcctgtttatccttatgccaataccacactgaattactgtagcttatatttagtgttgatacctggtagttttaagtcctctagytttattgttcttcaagattgctttgggtattctagtcctttgtactttcagatgaattttagaatctactttctaatttctacaaagaaacctgctgagattttgattagaactgcattcaacttatggataaatttgggaagaactgacaccttaatattgaatcttccaagtcatgaacatggtacagttttccctttaggcatttttccatttttcttagcagtatttgtatttcagtgtagaagtcataaacatctttcactagatttgttcctaggtattttaggtatttttatgctattgtaaatggcatttaaatattttctaattgtgtgtgtaaagaaaaataactagtatttgttacttgacttcgtacttagaaattttaaaaattcatattaattttaatagtttga

SEQ ID NO: 64762 - DNA, 696 bp, Homo sapiens
tgggacctgattgaacccctcggtccccagtgcccaagcgtagaagccgtggagccgcatggccctggtgactgggctgcgtgacccctctgtggccccctcctgacctgagaaagtggtgcaaacatccaccgcgtcatctggtcgttaggagcacagagcctgacccacgatagacaccacgggcataataaatgccgctttctgtttgcttcagcaggatgtggacaaaacctttaaatttgtttttatgcattcaatgcgtccagctgktacgactctgaagcaagtgtgattttcagtcttttgtagttgttattcagggcagtcctgttgtgctgggcttgactgaagcggccaacacggtcatgtgtgtgtctccaggcagcaacctgcagtgagcccaagatcatggtccagggctcctcctcccggcagggaggaactgtcctcagcatcctctgagccccaggtgtgcagggggcagggtcaggtagagagaggggaggaagttagctgaggaacaatggctattggtcagatttccctaccccaaccctgacacaagcgcctcgcacatcattggctgagatcagtctctccattttcctaatcgattcttcatgcaaagccacattttggagaaaaggaatggttagaatcatggcaggtatgtttggtcgtgctgtgcactca

SEQ ID NO: 64763 - DNA, 987 bp, Homo sapiens
gcataaaagtgcacactgttcttagagaattctccgtatcacactacattacctaataatatcatattaccacttagcaacattagttcttgttaaaccataaacatacatgattaatggagttttgtgctttggaaacacaatgacatttataacacctgcactatttccagtgtgggacaaacagtgcagaagtgaggtacgaatagcatccttggagaattaacatctaaaacaacagtcacagagattatgccagaggaagcaatggaataattaggttttgtgacctcttgggtctaatggaacaaatcacttcattttttgcttgagactagccagaggctaaactatatttttttaaatgtcataatatttatcacaatctttctgagtatatgaccccaaacactgtataatctcttccaaggttatatgaacataggaattatttactttttaaaagctgaaatagctatttccaaaattctattcaattttgtttgtttggatttatcgtaattaacaaatagttttgtcctatttttatgaaggtagccttcatccctctgtaatgatgttatgcccacatgttctttttgcttcatggttgtcatcaccacaaatagtttccccattacrtcacacaggtatacccatcagcaatctaaaactagagtcatataccataaatactaagatttctttacattaactttgttaaaaagtaattttggtgaagatgccatcagtaatgttaccttcactccaaaatattgaacttaaatctagaaaatatagtagcatgggtcctaaagtcttacataataataatgctagtaccaaaatgttatctattgaattaaactaaagaaaactaactgtaaggcataaaataaatgaatttaaaacatagaaaattccttttgtgaacaagaagtcataaaaggaaaagtataagaactgagggattgataaatattatat

SEQ ID NO: 64764 - DNA, 781 bp, Homo sapiens
gttgcaattttaaatagggttgtcagtgaagcctcattgaaaagatgacatcaaacaggcaagcatattccctaccttgaggtctttacccttgccatccttctggaatgttctcatccctcagtctgaaacatcctcttactgatattcccgttgtgttcttcttcatctctttaaggcctttactaaaaggtcccctcttcatccacccttttctggccacctcttttgaaattacaacttcccccaaactccccttcccctttcccatttgatgtttctctttagcatttatcatcatctcaactgttaccagttttaatcatttatcttatcttttgcttgattttctgcactataatgtcaactccataaaagtgggagttattgattttttttcactgttgtctccccatattcaggctctcaaaattgcaattgggtcaatattgataatgcatactttctaaaaatgtgtgcatttgactaagtcttcagaattattagcataaaattgttcagaatattgttttatatattttgtggtgttttctgtgcctatgtatatttccccaatattgtttctttgaactgcctcactttccttaatcacactttggcattgttgatttgctccacaatgttctaaccttcttttttcatccattttatttctttcttttcttttcttttttttttttttagatagggtctggctctgttgccsaggcgggagtgtagtggtgtggtcatggctcactgcagcctctgcctcccagga

SEQ ID NO: 64765 - DNA, 588 bp, Homo sapiens
tatttcacactccaaccagaaagtttgtcctatttcacactccaagacaccagactgcctgttttcctgtttttttaaacaacggacatgaccattcttttaatatttttgaagtagtattgtattctatttttaattacatagagaggtggattcactgcggaattttaaattaattagaagttgctcctcctcttcctttctcctttcttcctgaaaaaaataattataaggcaaatgacatcaggaaaaataagaaatggaattttcaagatgtgtgaaaaactgtctgtcttcactgttcaggtctcaactggagttttcagagcaatttgagatgacaatgaagagtaataagaaaaccaaaaaatgtaaaatatgttttctttttttttttttttttgagatggagwctcactctgtcacccaggctggagtgcagtggtgcgatctcggctcactgcaagctccgcctcccaggttcatgccattctcctgcctcagcctcccaagtagctgggactacaggcgcccgccaccacgcccggctaatttttttgtattttttagtggagacggggtttcact

SEQ ID NO: 64766 - DNA, 270 bp, Homo sapiens
gatctcttttaaaatgtgagggtgcctcagaattttacctctttttcactatgtttacatataagatgataatcagatgcactcaagtttgcctctggcatcacagcagtttctcttcagtgactaccttcaggacayaggtagctgaaccattttccttattaggaaacaaatgtagatacagtagtaagttttattctggtttttctacatggaatttactgataacaagcttactctggatgtagattctcatattttctaaagttt

SEQ ID NO: 64767 - DNA, 270 bp, Homo sapiens
gatctcttttaaaatgtgagggtgcctcagaattttacctctttttcactatgtttacatataagatgataatcagatgcactcaagtttgcctctggcatcacagcagtttctcttcagtgactaccttcaggacataggtagctgaaccattttccttaytaggaaacaaatgtagatacagtagtaagttttattctggtttttctacatggaatttactgataacaagcttactctggatgtagattctcatattttctaaagttt

SEQ ID NO: 64768 - DNA, 2417 bp, Homo sapiens
atgtgcaagtccagtcaatatcaatgtccatcttgaactagtacaaaggataggattgcaacaattatgtacaatcagaggtcttaagaaataacaaatatatttactaatttataggatgcaagcaaacaagaggcccaagagaagaagacagtaatccagaagaatccacacaactctccagatagtttccacatcacatacatgtcagttgctgaaaatgcaagacgcagtccctagatgaggattacaaagatctaacgggaagaactgtaggttatgaaacacgtttattttttatccatatatttacacaattcatgtaaaattttcccaggaacggtgtcttatactaagttggcgcaaaagtaactgtggttctgctgttactttcaatggcgaaacctgcaattacttttgcaccaaccttaatttataggtactaggttcacttatcatatgcaattctaaactagggacacatgaccaaaagcatcccttgcataatgattcatctctgagccattcgtttgtgtatcagaacttctattattaacatacatgaagatatgactatgtcatctgctttctttcttttttagtgagaaaggaatcacagagcaaattaacttctttgcaaccaactgcacacctaaaacagaagagatacatctatatatctatctatatctatatccatcagcggcagaatgtgtagctaaactctggtatttcagtacattataaaagtagccagctattggaaataaaaagaactttgcacacaatcacatagctaagtctgtaaatttgaacaaatgaagtaagaaagttccaaaatgaaggaaacagaactawacagaatagcaaagaaatgagtatcacaaaagccagagttatggctacttctgaaaaggagagtgtaaaaaatgattagagatgagttcacagaccctcccggggaactggccacattctgtctcttgttgggtgatgctgtaacacattgtggtttagagtcatttttatcctgaacatacatgtttttgcactttctgtaagtatattctcacaagaaaacatagtaagcaaaattccttctgaaaaaggaaaattataagagccaaaagccttccaggatgtttgttccctacttccttcatcaacaatatttcttggagattaacactgttaacaggattgttgcacttccttcaaagcaccttgaaagtttcacaacttcatgaagtttcacaacttaatgctcctcctaagggaactattttattttattttatttttaacttttatttgaaattcagggatgcatgtacaggtttgttatataagtaaacttgtgtcatgggggtttattgtacagattatttcatcacccaggtattaagcctgatacccattagttatatttcctgatcctcttgctcctctcactctccaccctccaacaggtcccagtgtatgttgtttaagggaactatattaaatgataacaaacactacataaatatgtcttctacatttctagtttttaaagtatcattttgtgccttaaataataacagtagcaagcaagctcataatgttaaatggtactagtatctatcaacagtgagaaaactacctcacttacaagaaagggacatgacattattcttaatccaggaacttgtcttcttttattccccctgaaatgtgcctttattcttttttaccattttaataggctgaaattataaatgcagagtgaaatatgtaagtccaagcatatcattaattttgtgaaataatatattcaactataagacatatatcttccttgatcagtaggcttatgactgtttaacaatatgaagttgatcacattcaacattcactcactttctttagtgagagagctttaaaaggtcaaattctaattacattggaaaaaacagctggcccaacacctcacagcattgtgtctattttactttcaaaaatactcatttgaggctacaacctttcccccttgagtgtaaaaaaaaaatctggtgacaaaaaattgtctcacattttgtcacatttctaatggatgaaaaaaagtactatttcagaaataatattgttttctgagaaaaaaatgcttaacatcactaatcatcagcaaaatgtaaatagaaactacaatgagacaccacctcacaccagtcagaacagctccaattaaaaagtcaaaacacaacacatgttggcaaggctgcagagaaaaggggacacttgagacactgctggtgggaatgtaaattagttcagtcactgcggaaagcagtttgaagatttctcagagaacttaaaacacaagtaccattcaacccagcaatctcattactgggcatatacccaaagaaatataaatc

SEQ ID NO: 64769 - DNA, 2417 bp, Homo sapiens
atgtgcaagtccagtcaatatcaatgtccatcttgaactagtacaaaggataggattgcaacaattatgtacaatcagaggtcttaagaaataacaaatatatttactaatttataggatgcaagcaaacaagaggcccaagagaagaagacagtaatccagaagaatccacacaactctccagatagtttccacatcacatacatgtcagttgctgaaaatgcaagacgcagtccctagatgaggattacaaagatctaacgggaagaactgtaggttatgaaacacgtttattttttatccatatatttacacaattcatgtaaaattttcccaggaacggtgtcttatactaagttggcgcaaaagtaactgtggttctgctgttactttcaatggcgaaacctgcaattacttttgcaccaaccttaatttataggtactaggttcacttatcatatgcaattctaaactagggacacatgaccaaaagcatcccttgcataatgattcatctctgagccattcgtttgtgtatcagaacttctattattaacatacatgaagatatgactatgtcatctgctttctttcttttttagtgagaaaggaatcacagagcaaattaacttctttgcaaccaactgcacacctaaaacagaagagatacatctatatatctatctatatctatatccatcagcggcagaatgtgtagctaaactctggtatttcagtacattataaaagtagccagctattggaaataaaaagaactttgcacacaatcacatagctaagtctgtaaatttgaacaaatgaagtaagaaagttccaaaatgaaggaaacagaactaaacagaatagcaaagaaatgagtatcacaaaagccagagttatggctacttctgaaaaggagagtgtaaaaaatgattagagatgagttcacagaccctcccggggaactggccacattctgtctcttgttgggtgatgctgtaacacattgtggtttagagtcatttttatcctgaacatacatgtttttgcactttctgtaagtatattctcacaagaaaacatagtaagcaaaattccttctgaaaaaggaaaattataagagccaaaagccttccaggatgtttgttccctacttccttcatcaacaatatttcttggagattaacactgttaacaggattgttgcacttccttcaaagcaccttgaaagtttcacaacttcatgaagtttcacaacttaatgctcctcctaagggaactattttattttattttatttttaacttttatttgaaattcagggatgcatgtacaggtttgttatataagtaaacttgtgtcatgggggtttattgtacagattatttcatcacccaggtattaagcctgatacccattagttatatttcctgatcctcttgctcctctcactctccaccctccaacaggtcccagtgtatgttgtttaagggaactatattaaatgataacaaacactacataaatatgtcttctacatttctagtttttaaagtatcattttgtgccttaaataataacagtagcaagcaagctcataatgttaaatggtactagtatctatcaacagtgagaaaactacctcacttacaagaaagggacatgacattattcttaatccaggaacttgtcttcttttattccccctgaaatgtgcctttattcttttttaccattttaataggctgaaattataaatgcagagtgaaatatgtaagtccaagcatatcattaattttgtgaaataatatattcaactataagacatatatcttccttgatcagtaggcttatgactgtttaacaatatgaagttgatcacattcaacattcactcactttctttagtgagagagctttaaaaggtcaaattctaattacattggaaaaaacagctggcccaacacctcacagcattgtgtctattttactttcaaaaatactcatttgaggctacaacctttcccccttgagtgtaaaaaaaaaatctggtgacaaaaaattgtctcacattttgtcacatttctaatggatgaaaaaaagtactatttcagaaataatattgttttctgagaaaaaaatgcttaacatcactaatcatcagcaaaatgtaaatagaarctacaatgagacaccacctcacaccagtcagaacagctccaattaaaaagtcaaaacacaacacatgttggcaaggctgcagagaaaaggggacacttgagacactgctggtgggaatgtaaattagttcagtcactgcggaaagcagtttgaagatttctcagagaacttaaaacacaagtaccattcaacccagcaatctcattactgggcatatacccaaagaaatataaatc

SEQ ID NO: 64770 - DNA, 902 bp, Homo sapiens
tggagatctgtcatattcatgatgctcctaggatatctatccatactccaagcggtgtaatgagacccatactcaataggctacagattgtttcctgacatagaagcacacatataagctctaaagatggatgtactgggacttcgtgttcatagcaatggtctgtaacatatcgctatattgaggtacccaactaagactaataaagtggcgcaatagtccctttgtagtgcctgtgttagtttaatctctgtcaaatctctctgtgactctccgcatcccattcccctgtgctcagccaggcaacggagaggacagtgaagatgtttaactccaggataaatcccccatgatgctgtctttctccatcataatggagaaagacacaattgctgtactgtaattgtgtagctgcctctctttccaacctgcaaatgcagattgtctaccttgttcacattgtatctctagaactcaacattgtaccaagtatctagtacagactaagtagaatttcttgaatgattggggaatcaaaactcaatcttagtcttagattctaagacatataagtcttgaaagaagaaggaacttggaggacrtaccaactgagttaagccagtcagtctgggaaagagagtacaggaacactggaactttttctgaagtaacaagatctagggattttcacccagagaagagctacttaggttggcttctggtagctcagagcgagaaaaagtcccttcatgggactaactcagaataccaagcttaagccccaaatcttgctttccagataaatgtagtttttaatttaagtgacaatgtgattttcctggggtccacagccctgaacttttagaagtcatgtttcaggacagtttgattagttatatgca

SEQ ID NO: 64771 - DNA, 902 bp, Homo sapiens
tggagatctgtcatattcatgatgctcctaggatatctatccatactccaagcggtgtaatgagacccatactcaataggctacagattgtttcctgacatagaagcacacatataagctctaaagatggatgtactgggacttcgtgttcatagcaatggtctgtaacatatcgctatattgaggtacccaactaagactaataaagtggcgcaatagtccctttgtagtgcctgtgttagtttaatctctgtcaaatctctctgtgactctccgcatcccattcccctgtgctcagccaggcaacggagaggacagtgaagatgtttaactccaggataaatcccccatgatgctgtctttctccatcataatggagaaagacacaattgctgtactgtaattgtgtagctgcctctctttccaacctgcaaatgcagattgtctaccttgttcacattgtatctctagaactcaacattgtaccaagtatctagtacagactaagtagaatttcttgaatgattggggaatcaaaactcaatcttagtcttagattctaagacatataagtcttgaaagaagaaggaacttggaggacataccaactgagttaagccartcagtctgggaaagagagtacaggaacactggaactttttctgaagtaacaagatctagggattttcacccagagaagagctacttaggttggcttctggtagctcagagcgagaaaaagtcccttcatgggactaactcagaataccaagcttaagccccaaatcttgctttccagataaatgtagtttttaatttaagtgacaatgtgattttcctggggtccacagccctgaacttttagaagtcatgtttcaggacagtttgattagttatatgca

SEQ ID NO: 64772 - DNA, 902 bp, Homo sapiens
tggagatctgtcatattcatgatgctcctaggatatctatccatactccaagcggtgtaatgagacccatactcaataggctacagattgtttcctgacatagaagcacacatataagctctaaagatggatgtactgggacttcgtgttcatagcaatggtctgtaacatatcgctatattgaggtacccaactaagactaataaagtggcgcaatagtccctttgtagtgcctgtgttagtttaatctctgtcaaatctctctgtgactctccgcatcccattcccctgtgctcagccaggcaacggagaggacagtgaagatgtttaactccaggataaatcccccatgatgctgtctttctccatcataatggagaaagacacaattgctgtactgtaattgtgtagctgcctctctttccaacctgcaaatgcagattgtctaccttgttcacattgtatctctagaactcaacattgtaccaagtatctagtacagactaagtagaatttcttgaatgattggggaatcaaaactcaatcttagtcttagattctaagacatataagtcttgaaagaagaaggaacttggaggacataccaactgagttaagccagtcagtctgggaaagagagtacaggaacactggaactttttctgaagtaacaagatctagggattttcacccagagaagagctacttaggttggcttctggtagctcagagcgagaaaaagtcccttcatgggactaactcagaataccaagcttaagccccaaatcttgctttccagataaatgtagtttttaatttaagtgacaatgtgattttcctggggtccacagccctgaacttttaraagtcatgtttcaggacagtttgattagttatatgca

SEQ ID NO: 64773 - DNA, 562 bp, Homo sapiens
gaagcttcggagcacgggataaaagtgagctgtcaaataggagagatatttaggasgtaacatcatcaggattagctacagaatgattgggtgagggagaaggagagcttctgagtggaaaaactggatgtagggtggtttggttcaggaatacaagaaataatggaaggagacctggttagcagatggctttctatatcatgagacatcaagaggagacatcagttacctacctcagagaggctgcttggatcaggggtagaatgttcatagttgttagtgtacaggtggcaattaaaggtttggatgagattgcttaggaggagaatgaagagggaaataagaggaatatatgagtgaaaatgcactcacttttataatttaattcaatcctcctagtcctcccaattttaagatttgccttctcatcgggaatgtggattttccataggtgtgatttcacttttatacattctcactgagaaataaaagattggtttcttcaaagttatgtacaatagcaaattggtttcttcaaaggtatgtacaatagcagattccc

SEQ ID NO: 64774 - DNA, 1296 bp, Homo sapiens
tatagagaaatgtgaagctcttccccttctaaaatctggtggtattatcaactcctattttaagcttgtttatggaactagaataatactgaacatggatatataaaggtgattacagcagttcaagtttgacctttgaaaaatctttccctgtataaacaaagtctggaatgttttaaaacctctaagccagtcaatttctttttttatttatcataaacctgagtcaacaaggaatgcccaatttatttaaaaagtaggaaatgaaaatgccttggttccttaaccataaatgaaggagctatctctggacaccatgagttcctcgcctcgaacctgctgctgcactctcagggtcctgcaaacccggcctcaccctgtagctctacctgattcctcagcattggtggatctgctcccacaattctgcttaggcaatttcttcactgtctcacacccatgctgatctcattcccacttccatatttttatcccaataagattttccatgaaacatccatcctctcctatttcaaccccatccttactcgcaggcccagctgcgcagcttccccagtgcagccatcctagtgagattcatcccacactttatactcttatctggaatttgctggctctgaaagtaaatctggtctggtatcgcatgtccatattttttttttgtcctttagtttgtatctcctctaagccttctggctccttttgataaacatttgttttagctttcatttgtgttttgcacagcaatgtgcacattacattctaaatactcaggaaatgtgtgttcctttatgaatgatttggggagggagtaggatcttatttctgcctatttcttcttagatgttagaatttagaaaaaagttccttaacctctctgaggttccttacaatcctgagaacaaagtggaaacactgaacctagaagtctgtcataaagaaaaaagggattcaatgtgaagagcatggggtataaataagttaaaaaaatgtcatctaccatcagaaggtccaatgagcttacttctctgacttcattaaaggccccagaaaactaaaatatgacccagaatctacaattattataaaattctaacacttgaaaatattttccagcattctcaaaagtaaatacatctattatatgtatatagtatacatwgaatgacatatataactatatagtacatataaaagatggcttgactgttactatggtgcatagcctgctcccaagactggaaataagtttgtttctttgaatattctagactt

SEQ ID NO: 64775 - DNA, 1214 bp, Homo sapiens
ttccttcaatatagaaatcagtctgatgtgtgttttctgttccttgcaaccaaaagtatcctcagtaatgtaattcccttaaaagcaagagttttctttcaagaattattgaactccatgaaatcttgtattagcacttcctaatcatgtaagttaattgctttctaaataacctgtgcttttttaaagggcttagcttcatttactttggttatatcagttaagactgtcaaatgcctgtctcagacactgatgacacccactgctatagaattatggccctgttctccaggtgccatagatgttctatacactcctgagcccaggactctggctctgatgttgctctgatcacctatgtgctgaatactgggaccaccactgccacaaaaatgcctgtgccctggaaccagtgctactgtggttaccagcatgcccttgtgacagactcagcaccaagaggatccctttggctaggactccccacagtgtcataggaggccccaggaaaaagaatagcaggaggaccacagcaatctttgacactaaggccctctaaaactttcatcactactgctgccttcaaatacatctacaaccttggccactgaggacccccacagtcctgtcaaatattgattacagctgatggaactgcacagactatgccaccacatcctgttcacttagcatagcactcacccacaaatgaaagtatttccccacaaatccagcccatcagtcttgaagagatgactgctacctcaaatgcacagatatcattgcaaggtcataaacacatacacaaaggaaaaatgacatcaccaaaggaccactataattttccaatgygaaaccctaaagagttagagatctgtaagcttcctaaacaaggaattaaaaataattattttagagaagctcagcaagatacaagagaactcaataatatcaatcataacaacaatatatgaataaaactggaagtgaagcaaagagattgaaagatcaaaagaaagcaaacataaatcctggagctgaaaaatacagtgaatcaactgaaaaaatgcaatagggaacttcaacagcagactcaaccaagcagaagaaagaatctctgagattgaagataggtcttttgaaattatccagactaaggagaaaaaaattgaaaagagtaaagtaaacctatgggacttaagggacactaataa

SEQ ID NO: 64776 - DNA, 1979 bp, Homo sapiens
ctcttgatccacccacctcagcctcccaaaagttttatgttcttaatctcttcttagttatccttgtaatctggaccaaatgaattgttataattaggtttcagttcattaagtttataaaaatacactgaactgagatttttggtgagcatgctgcagtgagatgaataccacttgtcagtgagaggatttttcatttctaaattacttaaatcatctttctcagtcctccttctgtaataattatgccccttcaacttctttctgaatctttatatcattctaagtaggtaaggatattcctatggcaaggacttaggaaacaagttgatgaagaaaggtaagccaaatagatcccaaaacagcaaataaatggttacatcattgatattcaatgattgatttttgttttgttttgttttgtttttacttgtgtaccacagttcctttagggattttttttttttaagagayagggactcattcggtcctccaggccatcatagctcactgctgcctcaaattcaagggatcctccagcctcagccatgcaagcatctggtactacaggcccataccaccatggctggctaacttttaaagtttttgtagagatgaggcctcaccttgctgcccaggatggtctcaaacttgtgggctcaagaaatcctcccacctcagtctcctaaagtgctgggattacagacatgaaccaccatgcccaggccctttatggattttgactcagggtgtaatgatctggttcttctcttcatcatgtttttaggtcccattgaggcagtgctgtggactgaattgtgtcccccacccaagtttaaaaattagagctctaacccccagtgtgactgtctttggagataggggctttaaggaataattaaggtaaaattgattttggacgtccagcctccagagctaggagaaaagaaatttctgctctttaagccaacaactctgtactctgttaacttcactgttatggcagcccaagcagacaatacaggcagtttcacttttgcctcaagttgataaaatgccacccaacacaattgttttgtatgtaatgctattaataaaatttttccagaaattaagtgcgttcaaaataatataaaatatgcttagagagtttaggcttgtaaaactgaatattataaatgtgaattgaaaccaagtgacttctatacaagtcatattagaataagagtgagtaaaatacttcacaaatctggaaatagcacagagataagagctagtctgacgtggcatgatattttaattcaaaggtatcaattacacatagcctatctggtcatgtgtcttctgcagtgctaaagctcggagatttagaatagatttgcccccaaattatggaattatataatgttacagctgaactaactgctaaagcaatacagtctgaatctctcttgtggcagctaaggaagctgaaaaccaaagtgagcaggtaatttgtccaaagtcacaacttagtgcaagtagttttagtggcccatcgccagacaccaagtctggggagtttttaggttaccttgtttttgcttttaagtggtcagtgttttggtccacacaacatctattctaacctccttatttgacttcctgggccactgatgtcagaaaagctcaaaactgcaattcccagactccctttcagccagaattccatatgtgacctggtgaaagataagaattaacagctggactgtcactcttagttttagggatgcttgaacatagtttgatctgtagttgaacttcttgacatatccactgtggctaaataagccttctaagaccttcctaagtactgtacctagttgtcgagatggttcattgtgtaaactgtaatatatggaccgcagctgcactaaagaatggaagcatggcatacagcctttggaatgctgaggattagctgagacttcaggcttcag

SEQ ID NO: 64777 - DNA, 995 bp, Homo sapiens
tgcatgtattttttaagggatgaatgggtccagtagcttttctgccttcatagtcctgttactcagagtcctcaactctccaaaatccattgttttcttggttcttgtctttctgtgactcttatcacctttccatattcaaatccaattctcttccaacactgttcattattggaatcttaaattgtggcccatatttgtttattgaaccagtcagtctcaatctcaatttttgtatgtcagttatataaggaattttatgccactttggttctagcctgtggggaatttcaatgatttacattataaataaaaatattaatggtacacaaagtgaattattaaataaaggttcaccagctatgtgctaaagtgacagttctgaaatcccactgttttgatgaggaaattactgtgaaacctatttaaaaatgattttggtatgtcttacttggattttaaaaatgtatattgtaaaaaattattataataagatgtttaagaaatatttctagaaacagaagaaaaactggtaaatcaaggctttatcaaagaactgtaagcggtccccttttggggattggttttgtggaagacagtttttctgcaggttgtaggggatggttttgggatgaaatggctccacctcagatcatcaagctcaratcatcaagcattatattctcatgaggtgcacataacctagatactttgcataggcagttcacaatagggttcatgctcctgtaagaatctaatgccactgctgacctgacaggaggtagagctcaggtggcaatgcttgcctgcttcctagcaggctgtggactgcaccactacctgggaagctttgttgagaagaaatttcaaacctgtagttgaaagtgagaagttattgaaatagttttagttgaatgtttctaattttaagttacatatgaatatgtatatgcatgtgtatatatgcatttttttaatttagagaaatctcaacc

SEQ ID NO: 64778 - DNA, 328 bp, Homo sapiens
catcgagctggtgtcttcctgcctgccctgtgtcataacatgagggccccttactgcattatcaagggaaaggcaagactggggcatctagtccacaggaagacctgcaccattgtagccttcacacacaacaaaggagctcyggctaaactgttggaagctatcaggatcaattataacgacagatatgatgagattccccatcactggggaggcaacgtcctgggtcccaagtctggctcacattgccaagctggagacaccaaaggctaaagaacttgccaccaaatggttaaatgtacactgttgagttttctgtacataaaaa

SEQ ID NO: 64779 - DNA, 253 bp, Homo sapiens
caaacacggacatttacagcaacattgtttgatgatatagtaaatgttttacatttgaaagtgtttgttttgactgactcacagaatttaatwgttccaaggagcataaaggtgactccagacttcaggtagtgaatacaaaaacccatatttccagatggcagcctcatcttttatcttctggaccagtcttataaacccaaaggaagctcggccgctacactcttaaactgggaccgcagcagtctgctct

SEQ ID NO: 64780 - DNA, 1152 bp, Homo sapiens
tttgattcacagaatctcatatgtgtttgtggacctgtgtgaggatgtaaaatggtccctggtgaaccagaagtcycatttcctcatcaaacttattagtagttgtattgaccagcatgaaaatagattctgcatatgaaatcaaaagaatgagaaaatatgaagaacatctcatagggaataaatttcaagagaatagtgattttgtaagaataagagctaatacttattaagtgtcattaactgattaagcactgtggtaagtactttctgtgtattaactcatttaattgtcataacaatcctaattattatcattctcattttatagatgaagaagctgagatgcagagaggggaagaaatgttctgtttaactgctcgcaatgggtagagttggtaattgaacccggacagtctggctccagagtttgctctaattgcttctctgattctcaaacttgagagtgtatcagaatccctaggagggttcattagaaaacagatttctgggtcccaatttccgagatcctcatttagtatgtctggggagaggaccaaattttccatttctagggaagtccccaggtaattccgatgctgcggtccaaggaccacactttgggagccactgcattacactatactgcctgttaggaattgcacttgatcaagcctgattgtagacaattttaggttctataaaattttgctctatgattcaaatgtttactttggtcaaagcaaataatagatcaacttgcagaaattgtaggttacaattaagctgaccattagaaaaggcacatcagcacaaatccactcattaaataatcatttaattgccaatcatgggttttgaggcttgaaatacaatgatgggcaatatatattgaccttgctcccaagagcttcactttaggaagacatgtaaataataattcgaatatagtgtcatgagggctgctatggatgggtaaagggggtggagatagaaaggatcagaaaatcttccacagaggagagtttatgaattgtcttaaagtgtgaattgaagttagcactgatatatgtctcatgaacatggcatgggcaaagttatggagatgagaaaaggtacattgagtattggaaattattaagaatttggttg

SEQ ID NO: 64781 - DNA, 1152 bp, Homo sapiens
tttgattcacagaatctcatatgtgtttgtggacctgtgtgaggatgtaaaatggtccctggtgaaccagaagtcccatttcctcatcaaacttattagtagttgtattgaccagcatgaaaatagattctgcatatgaaatcaaaaraatgagaaaatatgaagaacatctcatagggaataaatttcaagagaatagtgattttgtaagaataagagctaatacttattaagtgtcattaactgattaagcactgtggtaagtactttctgtgtattaactcatttaattgtcataacaatcctaattattatcattctcattttatagatgaagaagctgagatgcagagaggggaagaaatgttctgtttaactgctcgcaatgggtagagttggtaattgaacccggacagtctggctccagagtttgctctaattgcttctctgattctcaaacttgagagtgtatcagaatccctaggagggttcattagaaaacagatttctgggtcccaatttccgagatcctcatttagtatgtctggggagaggaccaaattttccatttctagggaagtccccaggtaattccgatgctgcggtccaaggaccacactttgggagccactgcattacactatactgcctgttaggaattgcacttgatcaagcctgattgtagacaattttaggttctataaaattttgctctatgattcaaatgtttactttggtcaaagcaaataatagatcaacttgcagaaattgtaggttacaattaagctgaccattagaaaaggcacatcagcacaaatccactcattaaataatcatttaattgccaatcatgggttttgaggcttgaaatacaatgatgggcaatatatattgaccttgctcccaagagcttcactttaggaagacatgtaaataataattcgaatatagtgtcatgagggctgctatggatgggtaaagggggtggagatagaaaggatcagaaaatcttccacagaggagagtttatgaattgtcttaaagtgtgaattgaagttagcactgatatatgtctcatgaacatggcatgggcaaagttatggagatgagaaaaggtacattgagtattggaaattattaagaatttggttg

SEQ ID NO: 64782 - DNA, 788 bp, Homo sapiens
taagtccaactcgattcctccttccaatgcgttttcaattctactttttcttccctccttttcaatgcttctcatttcttggatttttccaaacagatacagtgaacttcataaaacaataatgaatttctagtgacccaggtagtggtactctgtgtgtgtgtgtgtgtgtgtgtgtgtgtgtgtgtgtgtgtgtggtggataaggaggtgtggctggggagtgggggtagtaattagtcaaattaaaatcacaagaaaagcttttgtaaaacatattttttccaagaagttctcttgtctacctataagctttcatttatttaaaaaaaaaatagtactggtaatcaacccgcattctcctcttttgcccaactgcagtgtcaccccatgttctaaattactgaagttcagaataagtttcacagtctttattctgatatttattccagaaagtaaccatgatgtacccttttaggctaagtatgctttacaacaggggtccctaaccagtaccagttcatggcctgttaggaagcagggcacacagcagtaggtgagcagtgggcgagcaagtgaagtttcatctgtatttatagtcactccctatmactcgcattaccacctgagctccacctcctgtcagatcagtagtgggatcagattgtgaactgctcatgtgagggatctaggttgcatgcttcttatgagaatctaatgcctggtgatctgttactgtctgccatcactcacagatgggatcgtctagttgcaggaaaacaaactcag

SEQ ID NO: 64783 - DNA, 825 bp, Homo sapiens
cactctgcctggaaaccttttctcaacagcctctgagctgctggcagcatcccctggtgccctccccagcctgcagcttccagggagctgggaggagcatgcccttggactgtctctgtcctctggctgacacagccgcttcctttatgtaggacactggcccctcatttgctcagctttgggacctgcaggtggacatttggcccagtcccaggctggaggcctgcggctttcccaggccwgctcatcatgccacctccctgcctctgtttgagaagcctcctttccctaacattcctgcattcctagagagcagagggcctctggaggcagcagtgcataccctggccctggagatgacccgtgcaagatacaggctgggccaactccttgggactccatgtctccagctgtgtaggacaacgacactcccagccccaccatggtgaagagcctgagttggaggtgggcaagaagaccaagggcatgagtgagcctcaggggtgagtgagcccccactagggtgaacgtgaatctgttctgtggacgctggcccagagcccagaaggaagacccactccgagctgctcagggctgggataggaccatctaggtggaaggctcaacccaagaatgagctttctagaaattctaagttggagtgaatttttaaaacaatagcttccataggtgtcatgtgtaattgttacaaagcccctgggaagagggattaatggtggccctttgagatccttgcagaagcccagcagttgggcccttgacaagaacaatcagcttggggggcagctagcactgcccaacccc

SEQ ID NO: 64784 - DNA, 825 bp, Homo sapiens
cactctgcctggaaaccttttctcaacagcctctgagctgctggcagcatcccctggtgccctccccagcctgcagcttccagggagctgggaggagcatgcccttggactgtctctgtcctctggctgacacagccgcttcctttatgtaggacactggcccctcatttgctcagctttgggacctgcaggtggacatttggcccagtcccaggctggaggcctgcggctttcccaggccagctcatcatgccacctccctgcctctgtttgagaagcctcctttccctaacattcctgcattcctagagagcagagggcctctggaggcagcagtgcataccctggccctggagatgacccgtgcaagatacaggctgggccaactccttgggactccatgtctccagctgtgtaggacaaygacactcccagccccaccatggtgaagagcctgagttggaggtgggcaagaagaccaagggcatgagtgagcctcaggggtgagtgagcccccactagggtgaacgtgaatctgttctgtggacgctggcccagagcccagaaggaagacccactccgagctgctcagggctgggataggaccatctaggtggaaggctcaacccaagaatgagctttctagaaattctaagttggagtgaatttttaaaacaatagcttccataggtgtcatgtgtaattgttacaaagcccctgggaagagggattaatggtggccctttgagatccttgcagaagcccagcagttgggcccttgacaagaacaatcagcttggggggcagctagcactgcccaacccc

SEQ ID NO: 64785 - DNA, 475 bp, Homo sapiens
gcaagggcaaactacaaaaatttagttctttactaaattttatagatgtagacctgaaaaggagccttccaatgtttaggaagctactattattaattttaaaagtgagtcccagcaagtcctatccacagcaatcaggcaagaaaaagaaataaaaggcatccaaataggaaaaaaagaagtcaaactatcyttctttgctgatgatgtgattccatatgtagaaaaccctaaagactctaccaaatgatttcttgaactgataaaggacttcagtaaagtttcggaatccatgtacaaaaatcagtagcatttctatacaccaatagctttcaagctgagagccaagtcaagaatgcaatcccatttacaatagctgcaataaaataaaataaaatatgtaggatacagctcaccaaggaggtgaaagatatctacaaggagagactataaaacactgctgaaagaaatcaaa

SEQ ID NO: 64786 - DNA, 547 bp, Homo sapiens
aactcaacttaaatatgctatatactaatttattattgttaaatgtgtgccaccatagcaaatactaagtaatatactgttgaattaattaatgraatatagcataaaataaacatcaaaaggccaatagtgaggtttccagaattttgcttctggcaatgagagattagtaccaaattcccttcagctgtaagcaactagaaactggcacaaaatatatgaatcattgcttttcagatattggatgacagtcaatgaagacagtgatccttgaggaaataaaacagatgaagtgaagcccatggaccactctgcactctgcctagatgcactctctggaagctcattatcttgctgagttaaatagaaatcagccttcagtgaggctgaggagactgcagaaggaggtataaaggactacaaaaattgacacagaggtcttctagactttattggtgaacacaaagaggcattagcacagggtgaacctgcacacagcatggtggaggactcctggaattcattaatggtttatttgagttctgac

SEQ ID NO: 64787 - DNA, 547 bp, Homo sapiens
aactcaacttaaatatgctatatactaatttattattgttaaatgtgtgccaccatagcaaatactaagtaatatactgttgaattaattaatggaatatagcataaaataaacatcaaaaggccaatagtgaggtttccagaattttgcttctggcaatgagagattagtaccaaattcccttcagctgtaagcaactagaaactggcacaaaatatatgaatcattgcttttcagatattggatgacagtcaatgaagacagtgatccttgaggaaataaaacagatgaagtgaagcccatggaccactctgcactctgcctagatgcactctctggaagctcattatcttgctgagttaaatagaaatcagccttcagtgaggctgaggagactgcagaaggaggtataaaggactacaaaaattgacacagaggtcttctagactttattggtgaacacaaagaggcattagcacagggtgaacctgcacacagcatggtggaggactcctggaattcattartggtttatttgagttctgac

SEQ ID NO: 64788 - DNA, 1153 bp, Homo sapiens
cttatttttttttcttcatactatatatacttcttggttaactacttgttmtctcatatggattatttatatattcaggatgttaacctttcatcatgttataatatttcctcaacttttcatttgtcttttacctctgtttatgaactttcttaccacctacatttaaaatttttgttatgactatttaatgacatatgtaaataacctctatctcaagatcataaaacatacttaattttgtttcagtacccctatactttttattacattttttattttttaaatatattatgaatattctagatatataaagaatgagatatttagcacctgtgaacccaccaggtgattcaggaataaactataatctatcctcctaaacttcgtgggtgttcctccccagttgcatttccctccttttgccgcagaggtagcccctctgccaaagtggtgagacagttgtccccatttttaaaatatataacactcttattaaagtctaacttcttacagaaacttggttctgtttctggtccctctagtttgttctgtttagttgtctctacattttggcacccgtaacatgttcttttatttaaggcggggcagctcctcttatattattcttcctttttacaattttcttggctagtttcacttatttacacacacacacacacacacacacacacacgcacacacacacacacacaggttcagtgacctgcgatagaaaataaaaccattctttgtcttccttcttcacatctggctctgatgggaagtaccatatcacctcctctccttgaaaaagaattgttgcttcttccatcacgatatagtgtagtggatgtaacctgtcattagcctgctaaaaaacattttgcaacttaaatgctgtctaggaggacgaggcagataaatgtaggaaaaatctcaacaacactggctttctgtaattcttgcttgaacacctgtaggcttggcttaggtaacccatatatgtatatcatccttccctttgcttccccgctcccacagtccaagtcccttcttacagatcttgctgacctgagttattttgaaaacacacctcagaccttcattcatgtggaaaatctgtagctttggaagtggaaatattaacaag

SEQ ID NO: 64789 - DNA, 550 bp, Homo sapiens
tttgcacccaattttgctgtgaamctaaaactgctctaaaaaagtctatttaaagtaaagcaacaacagaataagattttagtataaataagtctgttataaaatagagaacacccatcaatggataaaagtcaagatttttatgttgatcaatttataagtgaagtgacttacaaaactttttttttgaggtcaggttaaagccatctcagcaacaagtaatggagttgccagtctccgaaataagccacgtgggtagagagcaaaccgttaataacttcagcatttctgtgcacagaaccagggaagtaatgtctttaaatacagctgcatcttgaaatatctgccactaattcaggcacattgaaattgctgcattaaactactgaactataatagaagcctctgcaacctttattctgagtttactggtcctatttatagcagaggatcagaaaaaaaatgtattgctatctggtgtgaccgtgacagtgacgtgtgtctggcgtagtaggtgaccgtgagggtgacgggtgaccgtgacagtgac

SEQ ID NO: 64790 - DNA, 552 bp, Homo sapiens
gaatttcattacacctcggtcactctyccttcccaggctgcatgcatccccacccacgctcagttcactgctgtgtctctctgcacccagcacatgatctgctagaggcctgacattcaagtacctgctggatgggcgagtcttttactttctgtaaatcagaaatatctttctggatttagagtgtcagagatctggaccaagtcacgcaaactttctatgcccaaatgactggttgctcaaaaacagcatcactggttagaaactacatctgtcagtacagattgtattgagcagattactctttaagccctgtccacgtaactgtcagaggcacgttcttcacaggaacaagcatcagcagctaagaaaagaaacttcatggaagcatcacaaatactttgttaatcagacattgttgatgaggcattttaaccaacaaaatattcaactttacctagaaaaaaccccgccttttaacagccgggtgggaggacccattcacctattttaagaaccaccgggaaaaggaccacttcctgggcggggcgg

SEQ ID NO: 64791 - DNA, 820 bp, Homo sapiens
cattttgttttgttttttgaggtggagtctccctctatcacccaggccagagtgcagtggcacaatctcggctcactgcaacctccacctcccgggttcaagtgattctcctgcctcagtctcctgagtagctgggactacaggaacccgccaccatgtctggctaatttttgtatttttagtagagagagggtttcaccatgttggccaggctggtcaagaactcctgacctcaagtgatccgcccatctcggccttccaaagtgctgggattacaggcgtgaggcacggtgcctggcaccaaattgttggctacacatttgatgcagtgaacatttatttttaatttaggttattcgtgacttcttggtttggaggaaagaagagaattatttgagaccgtggacctgcagtcttaggtagcacccacttaaagggatcctcaaaagaagggaacccctttcactcaagatgcacagactttgcattaaaaagggttcagggaaccctgtgtgatttttttgttacggggcaaaaatttaaaacttactctcctaacttaggcattttatgatagtgcccctgacactggagagattatgggttttycacattgtcacctccttgtgctaatacacaatgctgttttcaccgtgttaggaaaaaatggagtgagacggtgtgtgtgttatgcatagacctctgttgatggtccgaatagatttttcttcacaataaagagatttggataaatacaataaaaggaaaataaaatcgcaggacctcacactcactatcccaaagggacagttaagcctgg

SEQ ID NO: 64792 - DNA, 1327 bp, Homo sapiens
agataggagatttctttttgcgattggctcatgtgattagaagctgtcaagtctgaaatctgcaggacaggccaacgggctggaaacccaggctgaggctgaggctaaagtcttggggcagaatgtctccttccttcagctgactgggtgaggcccactcacgctgtggagggcatttgcccttactaaaagtcaggtgacggggcacatccaccatgtccacagaataccttcccgggagcactgagattcatgtgtgtttacataattgggtgccatggcctagccaagctgacacctaaagccaaccaccacagcccacacaaccaccacagcccacacaaccaccacagccctgccaaccaccacagcccacacaagcaccacagccctgccaagcgagcccagccctgtctctttacccctcttccctggtgccagcattgcctgctgtggggagcaaaaccacaaccagcctatgaagggctgagcagggcgctgacagaggaccctggtccggcccctgctaaagcctcagcccacagcagggtgcagcttagaggggagtgaagtggaaagctacactgagagcgcagctcattgcctgggactgcatgggcagaggttcctcatctaaaaatactcacgagccaccccctttcggtgcagggaagggaagtgggtcccactgaaggaggctgaaagggcaaggggagatgtggttatcgccgtgaaagtctcctgggtccaacacaccctcccagttcacgctcattccctttggagggactgagtcacctccccagacaccccaaagatatgggaataaagtggttatatcagaaaaggagatctctccagcgacaggggtatctctcagtgtgacttcttggagtcaaggttttctggaagctgagagtgtgtctgcccctccaggtctgcctccaccccaagaggacctcgtggacgtggtgcctcaggctccaccatccccaggagaagaggtgggtgtttgtcatttcctgctccacccctgcaggccagatctgagggcggctgcacctcctgctccctcggcagcccctcgtgttcctgtgtcctcccctgtcctcggccctactctgtgggcctccggggaccattccctctctggtccccacaggcttgggcgaggcgaccacttcccactttgctggtcccaggatgcatcccatccatgagagtccccttaaccttgacctctggaaagagccccatcacttttctctccattcacccrtgtcaggaatgttgaattcctttgctagcaacacggaaagcctcgatc

SEQ ID NO: 64793 - DNA, 2198 bp, Homo sapiens
  misc_feature (1)...(2198): n = A,T,C or G
ttctatgttcattcttatttacagacactagggtgaaatggccagccaggcccggggcacaggacttcaagccccactccccaggggtcacactgagaggagccttcttttagtcaaccttaatgccaagtagtgcccatgaaaagtcgcgcatttcactgtgtccgcgctacaaattgtaattntatctttagtgtaacccacattaaactataccatattatagctactagngaaaaaactcagaaagtacatgttagaatcatgaaaatattgaaaaatactactataacaatgaagaaaaatcacgtacaatattttcagcaaagctaagaagaaaaaaatagaacatcttgcctaataaacatcttacacaaacatcctgcctaataaaaatagacggtaagagagttctgactgccaaataatggaatgttaacacacgcagcatcccagagctccttacagagtaatttcaggtgtaattttgtggcttttgcataaatgtcagaagactaactggaaaacttctcatctggtaactgcatggtgagcgtaacagatgctcacattaagatatcaatctcttgttttgagatggtctcgctctgtcacccaggctggagtgccgtggtgcgatctagactcactctagcctcgacctccccaggctcaggtgatcctcctgcctcggcctctggcgtagctgggactataggcacgtgtgccaccatgcccaattagtttttggatttttttttttctgtagagacagggtgttgccatgttgaaggaataaatcttaaagattacaaagcaatagtgagacttaaccatgctcgtgattcctttctgctgtatgttaactttttaaaaagccttgggtgactatcaagtctgcagtcacttccataacccaagaataaattcattggggatgacttgccacactctagacacctgggaacagttcacaactgtctaatacaagaattgtgccaaacatttacagagaaatcactgctgtgtccacctgtaacacaccgacagcattgccacttcagggccagtgcaaggatggctcccaatgcagaagaaaaccagggggaaaccacaaagcctgctgaagtttaggaaaggtgacactcacaccttgattctttaaataaactgataccttttatattcagaattctttaagaattaacaggcatgctaactaaatataatacgtaattttccttttaatattaaaggaaatatttttaaataaaatagatgctgcctatagaaaggtcgaaggmtgttcctttcagtcaatgtttttctcagcgttcatccatgccctcgattccatagtaaaatgatgcgttagtgtattttataaagtacctttcagtgttgcaattactctaaaagctaaaactcaggagacaaaacattacaactgagaattaatcttcactgaatttctatgacatttaatgaaggatccactacatgtaaagagctaatggtcttagatcaaaaacaaaagattcaggctgagtacagtggctcatgtctatgtataatcccagcactttgggaggctgagggccaggaattcgagaccagcctgggcaatacagagagttctcgtctctactaaaaataatttttttaaaaattagccgagtgtgctggtgcacgtctgtagtcccagctactcgggaggctgaggtaggaggacagttttagcccaggaggtcgaggctgcagtgagccatgatcacgccactgcattccagcctgggtgacacagctagaccctgtctcaaaaacacttttaaaaacgggataagaaggtgaccttggtttaaaaatgagttaccgcccagcctgtgcttgttctcagtaaacacagtggctgggcactcgaatcagcacacaggcagatgtatcactagatggcattatctgtactgcgtggctggcaagcttttattagttttatgtctattacaattaagcaaatactattattggttaattgcaaaagttaataagtaaattagttgatgagttacttactcccaccctggcagagaggcatgcacactgacgttatccacaccatcatttgccaactgacaagccaataattagagcgattatggcaaccagaaccactgacacagcaataattatccactttt

SEQ ID NO: 64794 - DNA, 2198 bp, Homo sapiens
  misc_feature (1)...(2198): n = A,T,C or G
ttctatgttcattcttatttacagacactagggtgaaatggccagccaggcccggggcacaggacttcaagccccactccccaggggtcacactgagaggagccttcttttagtcaaccttaatgccaagtagtgcccatgaaaagtcgcgcatttcactgtgtccgcgctacaaattgtaattntatctttagtgtaacccacattaaactataccatattatagctactagngaaaaaactcagaaagtacatgttagaatcatgaaaatattgaaaaatactactataacaatgaagaaaaatcacgtacaatattttcagcaaagctaagaagaaaaaaatagaacatcttgcctaataaacatcttacacaaacatcctgcctaataaaaatagacggtaagagagttctgactgccaaataatggaatgttaacacacgcagcatcccagagctccttacagagtaatttcaggtgtaattttgtggcttttgcataaatgtcagaagactaactggaaaacttctcatctggtaactgcatggtgagcgtaacagatgctcacattaagatatcaatctcttgttttgagatggtctcgctctgtcacccaggctggagtgccgtggtgcgatctagactcactctagcctcgacctccccaggctcaggtgatcctcctgcctcggcctctggcgtagctgggactataggcacgtgtgccaccatgcccaattagtttttggatttttttttttctgtagagacagggtgttgccatgttgaaggaataaatcttaaagattacaaagcaatagtgagacttaaccatgctcgtgattcctttctgctgtatgttaactttttaaaaagccttgggtgactatcaagtctgcagtcacttccataacccaagaataaattcattggggatgacttgccacactctagacacctgggaacagttcacaactgtctaatacaagaattgtgccaaacatttacagagaaatcactgctgtgtccacctgtaacacaccgacagcattgccacttcagggccagtgcaaggatggctcccaatgcagaagaaaaccagggggaaaccacaaagcctgctgaagtttaggaaaggtgacactcacaccttgattctttaaataaactgataccttttatattcagaattctttaagaattaacaggcatgctaactaaatataatacgtaattttccttttaatattaaaggaaatatttttaaataaaatagatgctgcctatagaaaggtcgaaggatgttcctttcagtcaatgtttttctcagcgttcatccatgccctcgattccatagtaaaatgatgcgttagtgtattttataaagtacctttcagtgttgcaattactctaaaagctaaaactcaggagacaaaacattacaactgagaattaatcttcactgaatttctatgacatttaatgaaggatccactacatgtaaagagctaatggtcttagatcaaaaacaaaagattcaggctgagtacagtggctcatgtctatgtataatcccagcactttgggaggctgagggccaggaattcgagaccagcctgggcaatacagagagttctcgtctctactaaaaataatttttttaaaaattagccgagtgtgctggtgcaygtctgtagtcccagctactcgggaggctgaggtaggaggacagttttagcccaggaggtcgaggctgcagtgagccatgatcacgccactgcattccagcctgggtgacacagctagaccctgtctcaaaaacacttttaaaaacgggataagaaggtgaccttggtttaaaaatgagttaccgcccagcctgtgcttgttctcagtaaacacagtggctgggcactcgaatcagcacacaggcagatgtatcactagatggcattatctgtactgcgtggctggcaagcttttattagttttatgtctattacaattaagcaaatactattattggttaattgcaaaagttaataagtaaattagttgatgagttacttactcccaccctggcagagaggcatgcacactgacgttatccacaccatcatttgccaactgacaagccaataattagagcgattatggcaaccagaaccactgacacagcaataattatccactttt

SEQ ID NO: 64795 - DNA, 2198 bp, Homo sapiens
  misc_feature (1)...(2198): n = A,T,C or G
ttctatgttcattcttatttacagacactagggtgaaatggccagccaggcccggggcacaggacttcaagccccactccccaggggtcacactgagaggagccttcttttagtcaaccttaatgccaagtagtgcccatgaaaagtcgcgcatttcactgtgtccgcgctacaaattgtaattntatctttagtgtaacccacattaaactataccatattatagctactagngaaaaaactcagaaagtacatgttagaatcatgaaaatattgaaaaatactactataacaatgaagaaaaatcacgtacaatattttcagcaaagctaagaagaaaaaaatagaacatcttgcctaataaacatcttacacaaacatcctgcctaataaaaatagacggtaagagagttctgactgccaaataatggaatgttaacacacgcagcatcccagagctccttacagagtaatttcaggtgtaattttgtggcttttgcataaatgtcagaagactaactggaaaacttctcatctggtaactgcatggtgagcgtaacagatgctcacattaagatatcaatctcttgttttgagatggtctcgctctgtcacccaggctggagtgccgtggtgcgatctagactcactctagcctcgacctccccaggctcaggtgatcctcctgcctcggcctctggcgtagctgggactataggcacgtgtgccaccatgcccaattagtttttggatttttttttttctgtagagacagggtgttgccatgttgaaggaataaatcttaaagattacaaagcaatagtgagacttaaccatgctcgtgattcctttctgctgtatgttaactttttaaaaagccttgggtgactatcaagtctgcagtcacttccataacccaagaataaattcattggggatgacttgccacactctagacacctgggaacagttcacaactgtctaatacaagaattgtgccaaacatttacagagaaatcactgctgtgtccacctgtaacacaccgacagcattgccacttcagggccagtgcaaggatggctcccaatgcagaagaaaaccagggggaaaccacaaagcctgctgaagtttaggaaaggtgacactcacaccttgattctttaaataaactgataccttttatattcagaattctttaagaattaacaggcatgctaactaaatataatacgtaattttccttttaatattaaaggaaatatttttaaataaaatagatgctgcctatagaaaggtcgaaggatgttcctttcagtcaatgtttttctcagcgttcatccatgccctcgattccatagtaaaatgatgcgttagtgtattttataaagtacctttcagtgttgcaattactctaaaagctaaaactcaggagacaaaacattacaactgagaattaatcttcactgaatttctatgacatttaatgaaggatccactacatgtaaagagctaatggtcttagatcaaaaacaaaagattcaggctgagtacagtggctcatgtctatgtataatcccagcactttgggaggctgagggccaggaattcgagaccagcctgggcaatacagagagttctcgtctctactaaaaataatttttttaaaaattagccgagtgtgctggtgcacgtctgtagtcccagctactcgggaggctgaggtaggaggacagttttagcccaggaggtcgaggctgcagtgagccatgatcacgccactgcattccagcctgggtgacacagctagaccctgtctcaaaaacacttttaaaaacgggataagaaggtgaccttggtttaaaaatgagttaccgcccagcctgtgcttgttctcagtaaacacagtggctgggcactcgaatcagcacacaggcagatgtatcactagayggcattatctgtactgcgtggctggcaagcttttattagttttatgtctattacaattaagcaaatactattattggttaattgcaaaagttaataagtaaattagttgatgagttacttactcccaccctggcagagaggcatgcacactgacgttatccacaccatcatttgccaactgacaagccaataattagagcgattatggcaaccagaaccactgacacagcaataattatccactttt

SEQ ID NO: 64796 - DNA, 3040 bp, Homo sapiens
ctgactcctctcccttgcgtacccagcatcctttccatcagcagacccacctgctccacctcagagcctctcctgagctcatctttcccacctcagccattgccaccaccctgggcggttcagcatctggacagtggcagctgcctcctgatcaggaagataaaccatgtgaagcaagagggacccctgacccatcctcctggtgatcctccagccctcctccagcccaggctcttctgcccaggttcaacacacacacagcaaagtgtgtaaagagtgctaatcttcagtgagaagcttgccacgccgtgctgccccctctcaagtctacagtggcctcacctcagcctcacagcggccagtctagcaacagtggcccagccaccccgcagtctcatgctacccacctccagtgggctctcgatgctctgcctcctggctcttcctaaggactcaagcacatggctgccttgtggccgctcactctgcacttgcactcactcccactccctggaattcttttccccaggttgtctcccaacttttccttaacctcgctttggtctctgctcacatctcctcttcagaggggtgctgccattccctgaccacccctcttattgcctgtcttgcttatgccctaatcatggcctttactgtcactacttagcactgtttcaacgtttgtgtgaatctgtcccctgagcatgcattaactcccaccctctagaatgatgctctctgcagatgtgctgcggccgtgctccactcagttattcccaacacctggaaccactctggcacacaacaggtgttcctcaatgtcagttgaataaatattcaacaaactaatgaatttacttgaacgtgtaaaaccacaaaatgtagttctgaacttcgtgagcaataaggccatgcacaaagcccctgttccaagcaattaaggaatctcactgggcaatcatcgtaaacagctcccctccaggccctggaaaaagtcctatgcttagatctgacagccctggttccgcttccaggaggaagcccttttctacggcccactcagactccagggttgacctctggggatcccttggtgttatttatctttatcacctcaaggtgagggggcccagtgacaatgacctggtccagcactgcccagattttgtagccagaacatggagatgcagattgaggcaacaggtagctttagaggcagctgacattgcacttgtgggggtcaggcttattgttttcttgtcagcctcaggcctcaaacctagttggtttctagtttatttgcttctagtcagtttcctgtgctaggaacgcaattgaagaactacccagacagaatttttaaacctggaaacacttatcttgagcttattatctctgggagtgagtcatccctctccttcagtttagtggctgtcccctcaggcaatctgaagcaccaggctcaaagggaaggcagcacaacagcctgatctttgtctctgatctctggatcagagccttggcctgagacaggactggggccctggggctttcgcagaccactcccaccaagggctctggaccagaactacattttgtggatttacttgttcaagtcaattcattaattcgttgattttctgtgttagttttgccgtccatattgaccctaagtctgtatttctgtgcctcaactgaaaaatctttcctcctgtttcaaacacatagaaatgatagaaaaaatataagcatgtaacgttaacatggaatttgggtgggcgaaaccagagaataaaggcggggctatcccttaacttcatactttatgttgcttacgcatgctaaaaattaagggggccactaaaagaacagaatcaggaagaaaattccaaacaaacagaagggggaaaatgaataaaataagtgtgattaatccaatggtgtcaggagggaggaataaagaaataaggaaagagactaccaaaaataatatggtaaactaagtccaaaaatatgagtactcacaacagtgtaaatgcattaagcttgcctattagaaagcagagaccatctaactgaattaaacaaataaaattcagtgctttctatgtccctgtcatctcagcactggcttctgttggtcattttttgctgtgtgtgtcgagattgttctggctctttgtatgagagtcatattgaatcgtaaactatatgttttgaattctatcttatgtaactctacgttttatttaaattctatggagaacgttaattttttgttttagcaggcaatctacttagttaggcttgggcatcagttacaactgttctgttggctgcaggcctgggggacgttcagtctcaaagccccagcagcgccatttatctgttccgcgtctgttccactggcccagtggtttgtcttagatgtggacaccagtctgatagtgcagttgtcacaatttgggtacgctgactaggatcagatccatgcacgtgcagcatagggatgggctcagaagttcataggcaacatgawgggtcactccctgagcttctccctcgctgccatcttgccagcacttttcagttccctgaggtcctcattcctgctgtcagaaatctgtggtcttcgttgcgctgctctgctgggtaccttcatgactgtgccctcatctgagcccaagcaacaggaggggaaagaggaaaaaacaatggggtccttctcatcctcctcagaccacatcatcactgttttgagagaaagagtcctttccctcaaaactacaaccatgatgctcttttttctttctttttttttttttttttttttttggcaggagtagatgtaagggttattgacataggcaaagggcaaatgagatgtcacatttccaagaacagatggtacatggcacaatggatggagatgatgggtagagcaaagtggtaggcacacgttagtctgatacagcagacaagggtggtgagaacactaggacaccatggtgtttggtgaaaaacctggtgtgtcaac

SEQ ID NO: 64797 - DNA, 3040 bp, Homo sapiens
ctgactcctctcccttgcgtacccagcatcctttccatcagcagacccacctgctccacctcagagcctctcctgagctcatctttcccacctcagccattgccaccaccctgggcggttcagcatctggacagtggcagctgcctcctgatcaggaagataaaccatgtgaagcaagagggacccctgacccatcctcctggtgatcctccagccctcctccagcccaggctcttctgcccaggttcaacacacacacagcaaagtgtgtaaagagtgctaatcttcagtgagaagcttgccacgccgtgctgccccctctcaagtctacagtggcctcacctcagcctcacagcggccagtctagcaacagtggcccagccaccccgcagtctcatgctacccacctccagtgggctctcgatgctctgcctcctggctcttcctaaggactcaagcacatggctgccttgtggccgctcactctgcacttgcactcactcccactccctggaattcttttccccaggttgtctcccaacttttccttaacctcgctttggtctctgctcacatctcctcttcagaggggtgctgccattccctgaccacccctcttattgcctgtcttgcttatgccctaatcatggcctttactgtcactacttagcactgtttcaacgtttgtgtgaatctgtcccctgagcatgcattaactcccaccctctagaatgatgctctctgcagatgtgctgcggccgtgctccactcagttattcccaacacctggaaccactctggcacacaacaggtgttcctcaatgtcagttgaataaatattcaacaaactaatgaatttacttgaacgtgtaaaaccacaaaatgtagttctgaacttcgtgagcaataaggccatgcacaaagcccctgttccaagcaattaaggaatctcactgggcaatcatcgtaaacagctcccctccaggccctggaaaaagtcctatgcttagatctgacagccctggttccgcttccaggaggaagcccttttctacggcccactcagactccagggttgacctctggggatcccttggtgttatttatctttatcacctcaaggtgagggggcccagtgacaatgacctggtccagcactgcccagattttgtagccagaacatggagatgcagattgaggcaacaggtagctttagaggcagctgacattgcacttgtgggggtcaggcttattgttttcttgtcagcctcaggcctcaaacctagttggtttctagtttatttgcttctagtcagtttcctgtgctaggaacgcaattgaagaactacccagacagaatttttaaacctggaaacacttatcttgagcttattatctctgggagtgagtcatccctctccttcagtttagtggctgtcccctcaggcaatctgaagcaccaggctcaaagggaaggcagcacaacagcctgatctttgtctctgatctctggatcagagccttggcctgagacaggactggggccctggggctttcgcagaccactcccaccaagggctctggaccagaactacattttgtggatttacttgttcaagtcaattcattaattcgttgattttctgtgttagttttgccgtccatattgaccctaagtctgtatttctgtgcctcaactgaaaaatctttcctcctgtttcaaacacatagaaatgatagaaaaaatataagcatgtaacgttaacatggaatttgggtgggcgaaaccagagaataaaggcggggctatcccttaacttcatactttatgttgcttacgcatgctaaaaattaagggggccactaaaagaacagaatcaggaagaaaattccaaacaaacagaagggggaaaatgaataaaataagtgtgattaatccaatggtgtcaggagggaggaataaagaaataaggaaagagactaccaaaaataatatggtaaactaagtccaaaaatatgagtactcacaacagtgtaaatgcattaagcttgcctattagaaagcagagaccatctaactgaattaaacaaataaaattcagtgctttctatgtccctgtcatctcagcactggcttctgttggtcattttttgctgtgtgtgtcgagattgttctggctctttgtatgagagtcatattgaatcgtaaactatatgttttgaattctatcttatgtaactctacgttttatttaaattctatggagaacgttaattttttgttttagcaggcaatctacttagttaggcttgggcatcagttacaactgttctgttggctgcaggcctgggggacgttcagtctcaaagccccagcagcgccatttatctgttccgcgtctgttccactggcccagtggtttgtcttagatgtggacaccagtctgatagtgcagttgtcacaatttgggtacgctgactaggatcagatccatgcacgtgcagcatagggatgggctcagaagttcataggcaacatgatgggtcactccctgagcttctccctcgctgccatcttgccagcacttttcagttccctgaggtcctcattcctgctgtcagaaatctgtggtcttcgttgcgctgctctgctgggtaccttcatgactgtgccctcatctgagcccaagcaacaggaggggaaagaggaaaaaacaatggggtccttctcatcctcctcagaccacatcatcactgttttgagagaaagagtcctttccctcaaaactacaaccatgatgctctttyttctttctttttttttttttttttttttttggcaggagtagatgtaagggttattgacataggcaaagggcaaatgagatgtcacatttccaagaacagatggtacatggcacaatggatggagatgatgggtagagcaaagtggtaggcacacgttagtctgatacagcagacaagggtggtgagaacactaggacaccatggtgtttggtgaaaaacctggtgtgtcaac

SEQ ID NO: 64798 - DNA, 1023 bp, Homo sapiens
ctatgaattccactaagtgttgattccattctgtggctattgtgaagaatgctgcagtgaacatgggagaacatacatctctttgacatattgatttcattttccttcaatatatacccagaagtgaaatggttgtctcatacggtaattctatttttaattttttgaggaagtttcatgtgatttgccataatgactataccaatttacattcccaccaacagtgyacaagaattctctttcctgtgtgtttttatggccgagactgctagcttctgccctttctctttcttaccagttgtgatcaaatatctcaggtttgaccatctctccagtaatcctttctgtgtggttgttctctgttttttgctccaatagttccatgtatgttgctgcattttcttaaatggacccttgagctctcccaaggctactaactattcatagataactgtctatttgctgttttttgtgaggtgggggtggtgggggagaaatgaggctactccaccattttgctgtttattatcatacctgactttttcatgtttagctttaaaatacacctggaattcattttgttataatataaaatagagtaactcttcacccttcactcctcaccctcattataaatgagtgtcatgcaaactggagaaagcccttgttttcctgatcaatttggaatgatatatcataaatatttacacacacacacacacaatttgtttcctccttcctccataataatgaatcattttctgagtacttggatggtaaagctcattcctgaatgactatgttttatttactataaaattatagagtgctttgatatctgatcaggcaaattccactcactgctatttttaaaaatattggctttctgggggtatttacttattaactaaatttaagaattgcttttcaagtccttttgataaatccctttgatggcaaacatataaattttgaaaggcaaatagcatttaatctatttttgtattttcagttattacaaac

SEQ ID NO: 64799 - DNA, 1023 bp, Homo sapiens
ctatgaattccactaagtgttgattccattctgtggctattgtgaagaatgctgcagtgaacatgggagaacatacatctctttgacatattgatttcattttccttcaatatatacccagaagtgaaatggttgtctcatacggtaattctatttttaattttttgaggaagtttcatgtgatttgccataatgactataccaatttacattcccaccaacagtgtacaagaattctctttcctgtgtgtttttatggccgagactgctagcttctgccctttctctttcttaccagttgtgatcaaatatctcaggtktgaccatctctccagtaatcctttctgtgtggttgttctctgttttttgctccaatagttccatgtatgttgctgcattttcttaaatggacccttgagctctcccaaggctactaactattcatagataactgtctatttgctgttttttgtgaggtgggggtggtgggggagaaatgaggctactccaccattttgctgtttattatcatacctgactttttcatgtttagctttaaaatacacctggaattcattttgttataatataaaatagagtaactcttcacccttcactcctcaccctcattataaatgagtgtcatgcaaactggagaaagcccttgttttcctgatcaatttggaatgatatatcataaatatttacacacacacacacacaatttgtttcctccttcctccataataatgaatcattttctgagtacttggatggtaaagctcattcctgaatgactatgttttatttactataaaattatagagtgctttgatatctgatcaggcaaattccactcactgctatttttaaaaatattggctttctgggggtatttacttattaactaaatttaagaattgcttttcaagtccttttgataaatccctttgatggcaaacatataaattttgaaaggcaaatagcatttaatctatttttgtattttcagttattacaaac

SEQ ID NO: 64800 - DNA, 707 bp, Homo sapiens
ggattgctgggtcaaatggtgtttctggtctaggtctttgaggaataaccacactgtcttccacaatggttgaactgatttacacttccaccaatagtgtaaaagcattcctatctctctgcagctttgctagcatctgttgtttcttgactttttagtaattgccattttgactggcgtgagatggtatctcaccgtggttttgatttgcatttctctaatgatcagtgatacaaatccctttatcttaactcaagctgactccaattcttcaggcagagcttaattctttggaccaattgctaatcaggaaatctttgaatccacctgtgacctggaagcccccacttctagatgtcccacttttccaagtcaaaccaatgtaaaccttaaatatattgatttatgtctttgcctgtaacttctgtctcacaacaatgtatataaccaagtggtagcccaaccaccttgggcacatgttctcaggaactccagaggctgtgtcacgggctatggttcttcaccttggcaaaayaaacctctaaactgattgagatctatctcagatacttggtttacactacctatccattttctctatctaacccctttctcgatcccttttctcccaatcttagaagataaggagttctcctcaggtcaagaccagaccccaacatccccatctgtacttgtacttggatccc

SEQ ID NO: 64801 - DNA, 1311 bp, Homo sapiens
gaggaccagggatttctctctctcttttcctttcttctctagtgaagccagttaaaggcagcaactttggaaagcacattatttctacagactgctggagaaatataatttaaaacaacattccctcccaatccagaaaacctctccacaaagacagaagaggaagaaaacaattttattattaaataagcattaaaccagaatatgacgcacaccacaagcatttgactaagattgcaaagacagaaacattttttgtagccaagtagatagaactcattacaaacatgttctcaaaataaacaatagctattcctcaagtaagagaacttgacagcrtcatttgtcacacagagtttaccctaaattcacttggtaattggggtgaccatctgtgttagccaattggctttttggaagggaaaaataaaattttcatatatttgtgaggaggtagttttgcaacttggcatgaagaacccattctaagttgttaggctcctgggcttacgcttctacttgttaagttaggctcccaagttagactcctaccgttctgcagaaactggaagatagaggtactaactcccttgatgattacattttaaaaagtggtttgtgggtcattgagaaaaatatacactggttatacagcttgcaggaggtttatttagcttttacaaatatttacttatagtttaaagatacagagaaaacttacaataacaagttctaaagcaaatgctctaagaaacaagagaagagaaatttctttctttattttcaactgggagtagtaaatcactttttgaaaatttaaaatttgcattttcacttataaagacctgaaacttggccaggcgcggtggctcatgcctgtaatcccagaacttcgggaggctgaggcgggcagatcacaaggtcaggaatttgagaccagcctgaccaacatggtgaaaccctgtctctactgaaaatacaaaaattagccaggcgtggtggcacgtgcctgtaatcccagctactcaggaggctgaggcaggagaatcgcttgctcgggaggtggaggttgtagtgagccaagattgcaccattgcactccagcctgggtgacagagcgagactctgtctcaaaagaaaaacaaaacaaaacaaaacacgaagctttttcatgtatagctgttccaagcatcacgttaggaatcccattttgtctttccacctatgctacatttttctacttagtcttcaaaaataatgaagttgacatttggctgttccatctgctgtctttgtgcctttgtttctcag

SEQ ID NO: 64802 - DNA, 1311 bp, Homo sapiens
gaggaccagggatttctctctctcttttcctttcttctctagtgaagccagttaaaggcagcaactttggaaagcacattatttctacagactgctggagaaatataatttaaaacaacattccctcccaatccagaaaacctctccacaaagacagaagaggaagaaaacaattttattattaaataagcattaaaccagaatatgacgcacaccacaagcatttgactaagattgcaaagacagaaacattttttgtagccaagtagatagaactcattacaaacatgttctcaaaataaacaatagctattcctcaagtaagagaacttgacagcatcatttgtyacacagagtttaccctaaattcacttggtaattggggtgaccatctgtgttagccaattggctttttggaagggaaaaataaaattttcatatatttgtgaggaggtagttttgcaacttggcatgaagaacccattctaagttgttaggctcctgggcttacgcttctacttgttaagttaggctcccaagttagactcctaccgttctgcagaaactggaagatagaggtactaactcccttgatgattacattttaaaaagtggtttgtgggtcattgagaaaaatatacactggttatacagcttgcaggaggtttatttagcttttacaaatatttacttatagtttaaagatacagagaaaacttacaataacaagttctaaagcaaatgctctaagaaacaagagaagagaaatttctttctttattttcaactgggagtagtaaatcactttttgaaaatttaaaatttgcattttcacttataaagacctgaaacttggccaggcgcggtggctcatgcctgtaatcccagaacttcgggaggctgaggcgggcagatcacaaggtcaggaatttgagaccagcctgaccaacatggtgaaaccctgtctctactgaaaatacaaaaattagccaggcgtggtggcacgtgcctgtaatcccagctactcaggaggctgaggcaggagaatcgcttgctcgggaggtggaggttgtagtgagccaagattgcaccattgcactccagcctgggtgacagagcgagactctgtctcaaaagaaaaacaaaacaaaacaaaacacgaagctttttcatgtatagctgttccaagcatcacgttaggaatcccattttgtctttccacctatgctacatttttctacttagtcttcaaaaataatgaagttgacatttggctgttccatctgctgtctttgtgcctttgtttctcag

SEQ ID NO: 64803 - DNA, 673 bp, Homo sapiens
tgcatttttaaacaagataagtccttagggatggaaaaagaccttaagacctaatgtatatagaaaggagaaaacattrcatagaataaagggtcaagatggataatacaaaacttcaattcagagagaaaaatgagtgtcctacaggttgagtgatggattgctggtaacaaaattagaaatcaatatgctgtatagaaattagtcagtgtaagaccaatagcaaaatacagtaatcatttttagagatgagattgagaataaaaacagtagtatttggatcaaagtggaagtcaccacacatttgtcaagggaaaaaaagcaaagactgtcaaaatatcatagtcttttctttttccttctttctgggaaagtttaaataaacaaaaagcccccaagcagtcaacccttataagtgtgtcagaagaagaaccacactaacagtaacatctgctggtaagcaatagtatttgcacacatcatttgctatttacgtcattgcaataggcatctttttgtaggctgtcttggaacgctagtctgattatcagcatgtgctcaccatgcttactgtgaagctaggaagagtggctgatgaggtctgagccttttaatatagagtctttccaaatacgtgcatgtgagcgaatgcgcacgcgcacaacacacacac

SEQ ID NO: 64804 - DNA, 673 bp, Homo sapiens
tgcatttttaaacaagataagtccttagggatggaaaaagaccttaagacctaatgtatatagaaaggagaaaacattacatagaataaagggtcaagatggataatacaaaacttcaattcagagagaaaaatgagtgtcctacaggttgagtgatggattgctggtaacaaaattagaaatcaatatgctgtatagaaattagtcagtgtaagaccaatagcaaaatacagtaatcatttttagagatgagattgagaataaaaacagwagtatttggatcaaagtggaagtcaccacacatttgtcaagggaaaaaaagcaaagactgtcaaaatatcatagtcttttctttttccttctttctgggaaagtttaaataaacaaaaagcccccaagcagtcaacccttataagtgtgtcagaagaagaaccacactaacagtaacatctgctggtaagcaatagtatttgcacacatcatttgctatttacgtcattgcaataggcatctttttgtaggctgtcttggaacgctagtctgattatcagcatgtgctcaccatgcttactgtgaagctaggaagagtggctgatgaggtctgagccttttaatatagagtctttccaaatacgtgcatgtgagcgaatgcgcacgcgcacaacacacacac

SEQ ID NO: 64805 - DNA, 707 bp, Homo sapiens
tggagcagaacaaggacattaggtaaaaactaaggaaatcagaaataagtatggactttaattaataatgtatcactgagttcattaactatgaaacacttgccaggttaatgtagaatatccaaaataaggtaaactgggtttactagggtatatgggaattctcttatatcacattcacaaatttttgtatgaattttgtgaacctattctaaaataaagtttacttaaaaataatgcttattatattaaaatttttaaaaactgtttttaaagattagtcagtgcatcttcttcttgctgaactgcctgaatgtcacagaagacttcctttactatccagacttcaacatcatctattgtttgttatcagttactcataaaaatgcctaaaatctacttggcagcctctctatgaatattcatttacatattaagaactagacattgttggccgggcgcagtagctcacgcctgtaatcccagcactttgggatgccgagatgggmagatcacgaggtcaggagttcaagatcatcctggctaacacggtgaaaccctgtctctactaaaaatacaaaaaattagccaggcgtggatggcgggcgcctgtagtcccagctactggggaggctgaggcagcagaatggcgtgaacccgagaggcggagcttacagtgagccgagtgcaccactgcactccagcct

SEQ ID NO: 64806 - DNA, 707 bp, Homo sapiens
tggagcagaacaaggacattaggtaaaaactaaggaaatcagaaataagtatggactttaattaataatgtatcactgagttcattaactatgaaacacttgccaggttaatgtagaatatccaaaataaggtaaactgggtttactagggtatatgggaattctcttatatcacattcacaaatttttgtatgaattttgtgaacctattctaaaataaagtttacttaaaaataatgcttattatattaaaatttttaaaaactgtttttaaagattagtcagtgcatcttcttcttgctgaactgcctgaatgtcacagaagacttcctttactatccagacttcaacatcatctattgtttgttatcagttactcataaaaatgcctaaaatctacttggcagcctctctatgaatattcatttacatattaagaactagacattgttggccgggcgcagtagctcacgcctgtaatcccagcactttgggatgccgagatgggaagatcamgaggtcaggagttcaagatcatcctggctaacacggtgaaaccctgtctctactaaaaatacaaaaaattagccaggcgtggatggcgggcgcctgtagtcccagctactggggaggctgaggcagcagaatggcgtgaacccgagaggcggagcttacagtgagccgagtgcaccactgcactccagcct

SEQ ID NO: 64807 - DNA, 828 bp, Homo sapiens
accccaagcaaggatctttgtttgctattgttttgtatgtttattttttgttgttgttttctctcatttataactaaagtatccccaaattaatgccagtcacataagcacatagtagttgctcaataaatatttgtggactgaattttgggttgagttaaaagacacagtaagacctgattttagagaataaagtataatgagagaaaggatttgcattcttgtgagttcctttaacctttttttattcctctaaaagaaagcctaagttaagagaagaaaacccaatgtgtaagtaattacttaagagtcgtgatgttaataattaaggacttcataaggttattgtaacaatgttcacaaaacataaaaacaagggaaagctacatttctgtataaataaagagtaacaaatattaaacactattactttctagttgaataatctttgaaaaygtgtttgtgtgtgtgtgtgtgtgtgtgtgtgtgtgtgtcaccatttgcagggaaagtggatgataatacataactttttttaaaaaacttacatttttctgtaattgctgttctcatatctgaactggaagctttatttttcaaattctgtgccaatgtaaaaacataatccagctgaggatggcgctgttctaagtcagcctttgtaatctgttaagtagaaatgattattcggataggttaataagccatatgagaagaataataagcaaaacagttgtgctgacatcaaagttgtcgttgttttcctcctctatggcatagtgaagcatcagcaacgtggcagaaaatgagtgcatgatttaaagtcaa

SEQ ID NO: 64808 - DNA, 2076 bp, Homo sapiens
cttactaaaatccaagacctgtccttagcaaaattctcactttcgagcggtaacagcgtgactatctctctgtcttaaagttctgtcatgaagtactgttaaaccctaccttcatcaaaccaggtctataaatacaactgtaaatacaaaattaaatagaacagtattttctttataattgtttggcagtatcagtttataatagtagatatttttttcgggagttgttttagagcactgaaaataagagttcaagatttttttttctcaaacaccgtttcagaaatatatcaattgtataggatggcagatgtatattaaaattccttcaaaatgtgtttatcagcttgccttcttctgtttatagacttatttgtgatacatttgatatatgatattttttctttctcctgagggttacatgttgggatttttttttcttttataatgctaccctcagtggaaagggtcaagaaccagtgggatggcacccagcatggcgttgagctaagacagcagcagcttgaggacatgattattgacagtcttcagtgggatgaccatagggaggagactgaagaactgatgagaaaatatgaggctcgactctatattcttcagcaagcccgacgggatccactcaccaaacaaatttctgataaccaagtaagactcatcagatattttttggcagtattgttttgttggatatactttttttctattgttcactgtaattcttaacaataggaccctgccatgttttttcctaagttcttagagtgtctaatgaaatttatatgaagaatttgatctggaagatttttttcgaaaaatttctggaggcataacaagtaagaatatgcatgtctccgagatttatagctcactgactttttgcaagtgaaacacaccctcaaatcagcatctagaaagagaacactttcaagattccaggaaccctcttttgctcccttctgtactgtattagtctgttctcacattgctataaataactacctgagactgagtaatttatgaagaaaggagatttaattgactcacagttcatttgagggctactgtagtgaagcatgactgggargtacgcaggaaacttaaaatcatggtggaaggcaaaggggaagcaggcaccttctttacaaggcagcaagacagagagagatagaagggagaagtgccacacattttatttatttattggagacattgtctcactctgccgcccaggctggaatgcagtggcactatctcagctcattgcaacagccacctcttgggttccagcgattcttgcctcagccttccaagtagctgggatgacaggcgtgcaccaccatgcccagctaatttttgtattttctgtagagacggggttccgccatgttgcccaggcttgtctgcaattcctgagctcaagtaatctgctcactttggcctcccaagtgtcacacactgttaaaccatctgatcttgtgagaactcactatcacaagaacagcacaggggaaattcatccccatgatccagtcacctcccaccaggctcctccttcgattggacatgagatttgggtggggacacaaatccaaaccatattacttacttaccctgaaggttatttttattaataagtttttccaagactttcatttgaggactactatagtgaacaaatcagataagtaagtttagtttcctttaatgactttttaaccaaactgttttatcaatttcgtaatagcagacatcttttttgtcatcagttcagttatagagttgataatattgaacaactatggtatttttaaaagtgcttttaagattctctgtataaaattataaaatattcttgaattggaggttttagttgtgaggttatagtttggtataacatttatttgcccttcagctagcctaagatggaagtgtatatttgtgaagaatttaagaaagtatatgtagaaaacaatcgaaaatgtggaagtatgtttttattctccacaaatgcagactttacttggctacagttttaaaagcaagtggccagttata

SEQ ID NO: 64809 - DNA, 2076 bp, Homo sapiens
cttactaaaatccaagacctgtccttagcaaaattctcactttcgagcggtaacagcgtgactatctctctgtcttaaagttctgtcatgaagtactgttaaaccctaccttcatcaaaccaggtctataaatacaactgtaaatacaaaattaaatagaacagtattttctttataattgtttggcagtatcagtttataatagtagatatttttttcgggagttgttttagagcactgaaaataagagttcaagatttttttttctcaaacaccgtttcagaaatatatcaattgtataggatggcagatgtatattaaaattccttcaaaatgtgtttatcagcttgccttcttctgtttatagacttatttgtgatacatttgatatatgatattttttctttctcctgagggttacatgttgggatttttttttcttttataatgctaccctcagtggaaagggtcaagaaccagtgggatggcacccagcatggcgttgagctaagacagcagcagcttgaggacatgattattgacagtcttcagtgggatgaccatagggaggagactgaagaactgatgagaaaatatgaggctcgactctatattcttcagcaagcccgacgggatccactcaccaaacaaatttctgataaccaagtaagactcatcagatattttttggcagtattgttttgttggatatactttttttctattgttcactgtaattcttaacaataggaccctgccatgttttttcctaagttcttagagtgtctaatgaaatttatatgaagaatttgatctggaagatttttttcgaaaaatttctggaggcataacaagtaagaatatgcatgtctccgagatttatagctcactgactttttgcaagtgaaacacaccctcaaatcagcatctagaaagagaacactttcaagattccaggaaccctcttttgctcccttctgtactgtattagtctgttctcacattgctataaataactacctgagactgagtaatttatgaagaaaggagatttaattgactcacagttcatttgagggctactgtagtgaagcatgactgggaggtacgcaggaaacttaaaatcatggtggaaggcaaaggggaagcaggcaccttctttacaaggcagcaagacagagagagatagaagggagaagtgccacacattttatttatttattggagacattgtctcactctgccgcccaggctggaatgcagtggcactatctcagctcattgcaacagccacctcttgggttccagcgattcttgcctcagccttccaagtagctgggatgacaggcgtgcaccaccatgcccagctaatttttgtattttctgtagagacggggttccgccatgttgcccaggcttgtctgcaattcctgagctcaagtaatctgctcactttggcctcccaagtgtcacacactgttaaaccatctgatcttgtgagaactcactatcacaagaacagcacaggggaaattcatccccatgatccagtcacctcccaccaggctcctccttcgattggacatgagatttgggtggggacacaaatccaaaccatattacttacttaccctgaaggttatttttattaataagtttttccaagactttcatttgaggactactatagtgaacaaatcagataagtaagtttagtttcctttaatgactttttaaccaaactgttttatcaatttcgtaatagcagacatcttttttgtcatcagttcagttatagagttgataatattgaacaactatggtatttttaaaagtgcttttaagattctctgtataaaattataaaatattcttgaattggaggttttagttgtgaggttatagtttggtataacatttatttgcccttcagctagcctaagatggaagtgtatatttgtgaagaatttaagaaagtatatgtagaaaacaatcgaaaatgtggaagtatgtttttattctccacaaatgcagactttacttggytacagttttaaaagcaagtggccagttata

SEQ ID NO: 64810 - DNA, 655 bp, Homo sapiens
gcatgaaaaatttaattttgttaaaaattttgtaccgtgctgttttggatatataactgtcatggaaaataggattaactgagaagtcctatgacctggtacaaaggtgataccattagcctaagatccaaggggtaatgaccaagacattccaaagagagatctgtgttcattagtaattrgaataactttttcaaggcaatagagttttactcaatagcaacagagagctgcagggaagccaacgatatatcgtgagaagtggattcttccataaatatgagactaggctcagataaaatatttgcaaactttagtgatttttttttgtcgtttatttttcatttatttatttattttgagaccgagtttcgctcttgtcacccaggctggagtgcaacgtgcaatctcggctcactgcaacctctgcctcccgcgttcaagtgattctcctgcctcagcctccccagtagctgggattacagatgcctgccaccatgcccggctaatttttgtattttttagcagagatcgggtttcaccatgttggccaggctggtctcgaactcctgacctcaggtgatccaccttcctcagcctcccaaagtgatgggattacaagcacgagtcaccacgcctggcctttccatgctat

SEQ ID NO: 64811 - DNA, 1422 bp, Homo sapiens
gcatgtcattcaagcaacagagctgtacatcatgtaactttataaatgcaaaataagtactgcatattgtttgtgggccaaatttttagttgataaatttacattcactggccactaatcaattttcgttgctcacatagccctgggcacctgttcattaaagatttggttaaaccagacccaaatccaattccagtgctgggaataagcactctcctctctgctgctctgcccccaaacttattgctccagcttcacctcatgaaaaatgtggcacaaagctcctctttgggttccataaaaatacattttttttttycaagcatttggtgagttataacaactttatcaaagttttaagggattcacaaaaagtcactggcagagtgtgcagttttccactggcatcctttttctctcttttcttctcccctcctgaatacattcttcatcttgtctagcatgtatggttttacccaaattgaggcaacctgggtctgtggtcttgccttctattgtaagagagttttcctaaacaaatacagcttccttcttaagaggaactaaggttaatataaatgtctctttcttgtctcatattatttcaggcctttgttttggggtagttgtggcaagcgatagtcctctacatcttttataacatgagagaacctactgatttaccttttaatagtggtcagggcatttccagaggctgttggaaagattggacgctgatggagcttggcatgtctgtgggaagtaataaagctcagatagaaggaggatgttcatcttctccgggaatcaaattatttagcaaatatgttctggctgctgtccctgtcttcatagaatttaaaggaagtccttctgaaccacacaggcttccagattgggctggcttggcctcatcagctcattcagcttatgattctcttagaggagaaatgagttacctattttaggcattaggaacttcatgcttccacaaggagcagcagtgttgacagactaggctagaaagaggaaagggatagagccttagatacactcatgcattcctgccctggcttgctttcatggcaacacagaaagcaatattcaggttgcaaagcatgtacttgaatacagttagattagcagcattgaatggagaataagcttgccgctatctggctagggaactataggattaaactaatggtatgcaaactaatggttataaaactaatggtatgtaggggaattctccctctctcttcctctccaccacaaacacacacacacacacacacacacacccacccacacacacaccgaatcttaattatatgtttactgtgagggaaaaaaggctactcaatgaatgcttaattagcagtgatattcctcttctcttgcggacaccaacttgaaata

SEQ ID NO: 64812 - DNA, 1422 bp, Homo sapiens
gcatgtcattcaagcaacagagctgtacatcatgtaactttataaatgcaaaataagtactgcatattgtttgtgggccaaatttttagttgataaatttacattcactggccactaatcaattttcgttgctcacatagccctgggcacctgttcattaaagatttggttaaaccagacccaaatccaattccagtgctgggaataagcactctcctctctgctgctctgcccccaaacttattgctccagcttcacctcatgaaaaatgtggcacaaagctcctctttgggttccataaaaatacattttttttttccaagcatttggtgagttataacaactttatcaaagttttaagggattcacaaaaagtcactggcagagtgtgcagttttccactggcatcctttttctctcttttcttctcccctcctgaatacattcttcatcttgtctagcatgtatggttttacccaaattgaggcaacctgggtctgtggtcttgccttctattgtaagagagttttcctaaacaaatacagcttccttcttaagaggaactaaggttaatataaatgtctctttcttgtctcatattatttcaggcctttgttttggggtagttgtggcaagcgatagtcctctacatcttttataacatgagagaacctactgatttaccttttaatagtggtcagggcatttccagaggctgttggaaagattggacgctgatggagcttggcatgtctgtgggaagtaataaagctcagatagaaggaggatgttcatcttctccggsaatcaaattatttagcaaatatgttctggctgctgtccctgtcttcatagaatttaaaggaagtccttctgaaccacacaggcttccagattgggctggcttggcctcatcagctcattcagcttatgattctcttagaggagaaatgagttacctattttaggcattaggaacttcatgcttccacaaggagcagcagtgttgacagactaggctagaaagaggaaagggatagagccttagatacactcatgcattcctgccctggcttgctttcatggcaacacagaaagcaatattcaggttgcaaagcatgtacttgaatacagttagattagcagcattgaatggagaataagcttgccgctatctggctagggaactataggattaaactaatggtatgcaaactaatggttataaaactaatggtatgtaggggaattctccctctctcttcctctccaccacaaacacacacacacacacacacacacacccacccacacacacaccgaatcttaattatatgtttactgtgagggaaaaaaggctactcaatgaatgcttaattagcagtgatattcctcttctcttgcggacaccaacttgaaata

SEQ ID NO: 64813 - DNA, 1422 bp, Homo sapiens
gcatgtcattcaagcaacagagctgtacatcatgtaactttataaatgcaaaataagtactgcatattgtttgtgggccaaatttttagttgataaatttacattcactggccactaatcaattttcgttgctcacatagccctgggcacctgttcattaaagatttggttaaaccagacccaaatccaattccagtgctgggaataagcactctcctctctgctgctctgcccccaaacttattgctccagcttcacctcatgaaaaatgtggcacaaagctcctctttgggttccataaaaatacattttttttttccaagcatttggtgagttataacaactttatcaaagttttaagggattcacaaaaagtcactggcagagtgtgcagttttccactggcatcctttttctctcttttcttctcccctcctgaatacattcttcatcttgtctagcatgtatggttttacccaaattgaggcaacctgggtctgtggtcttgccttctattgtaagagagttttcctaaacaaatacagcttccttcttaagaggaactaaggttaatataaatgtctctttcttgtctcatattatttcaggcctttgttttggggtagttgtggcaagcgatagtcctctacatcttttataacatgagagaacctactgatttaccttttaatagtggtcagggcatttccagaggctgttggaaagattggacgctgatggagcttggcatgtctgtgggaagtaataaagctcagatagaaggaggatgttcatcttctccgggaatcaaattatttagcaaatatgttctggctgctgtccctgtcttcatagaatttaaaggaagtccttctgaaccacacaggcttccagattgggctggcttggcctcatcagctcattcagcttatgattctcttagaggagaaatgagttacctattttaggcattaggaacttcatgcttccacaaggagcagcagtgttgacagactaggctagaaagaggaaagggatagagccttagatacactcatgcattcctgccctggcttgctttcatggcaacacagaaagcaatattcaggttgcaaagcatgtacttgaatacagttagattagcagcattgaatggagaataagcttgccgctatctggctagggaactataggattaaactaatggtatgcaaactaatggttataaaactaatggtatgtaggggaattctccctctctcttcctctccaccacaaacacacacacacacacacacacacacccacccacacacacaccgaatcttaattatatgtttactgtgrgggaaaaaaggctactcaatgaatgcttaattagcagtgatattcctcttctcttgcggacaccaacttgaaata

SEQ ID NO: 64814 - DNA, 3483 bp, Homo sapiens
atgcacatatcacgttaaattatccacacaatttcagtgatcatgatcccccgaagtcccagggctcaataaataactctggaatatagagtaataggtgtacctttaagaatattatataaatactgtttattgtaactgagcctttgacacggattgagaaccagccagttggatttaagtgttcctagcattaaataagaatgcagcctgttctatgctgcagattaaacaagtgctttcgtagcctggagaacggtacacacacagacacatttaacaaaacaccatgctaatatttcaaggtttatggggtgcctggatcagatagcctcaacccttgtgcccaagagtctcatgaccgtttgggaacatcacaaacctctagatcctaccagtgcatggccccaggagatgacgatccacgtaagaatgctggtcccttccctcatcattccttcctcatatctcagctgagtccaaaccataatgtgagggatcagggatacacatgtagcccatagcctacgacaacaatgattttaacctggaaaatctaaacaggtgtaactacatgttgatttcaactctaaaatttaaatacagcatatatgtaatattttaagggtgattaatataacttttgggtgtatgtgccaagataattgactgtaaaatatgctttagtaagtggccgagttaacttgttttatagatttattgattataagccacttaaatgtggagctaagtctaacaaaataattactttgggtttagaatagctggtctgtagctcttccttttcagtggtcaagtaacagggcaacttctccattaaagccactcctagttcataacaataaaagccattgttttcaaatataacaatctttatttacttacctaaagaagtagagtgctgccaatttcatccaagagtaatttgctaaggggcataaaatgtctgtttcttcaaagcccatggggaatctggtgtttacgtgttggactttatgttttttggggggtggcggaaaaatctactttgcttctttttttgttgttgttattgatattgttagtgtttttttgttgtttttagacacagggtcttactgtgtcacccaggctggagtgcactgttgtcatcatagttcaatgtatccttaaactcccaaactcaagggatcctcccacctcagcctctcaagtagctaagtactacagtgcacgctaccatgcctggctaatttttacatttttctgtagagacgtgggtcatcatatgttgcccaggcaggtctggaactcttggcctgaagcgatcctcctgcctcagcttcctaaaattctgagattacaggcatgagccatcacatctgagcatttgtttaacaaagaaagaaaaaaggaagccatgtctctcaatacctacatttaaacaaatagaaaataaatattttcagaggctcagttgaagaatcagaataagtaataayactctatgtttaacctaaaattgcatctgctttagactttacccacaaagaggtctgcctgcatttcagctttcatgaagttgtaaagtaattgttctttccttttgggagggaagacaaaacaccgttcgcagtcatgggagaaatgcttcctccatgcatggggcttggaaaatgactggtgaggtgaagtcttcattcacttcggggtttcatttttaaagtaatatgccaactgatgaatgttatacatgattcgggcacagaattgctaaatttttgcaaaattgaagagtatagattcacagttttccaagtttttttttttaagtcatagactactttcttttttcttttctttttttaaacattttatggtatttgctttattgcttatcagtccttttatccatccctctatccatccatcaacccatctttaattttttattttatttcgttttaagttccaggatacatgtgcaggatgtgcaggttggttacataggtaaatgtgtgccacggtggtttgctgcacctatcaacccatcacctaggtattaagcccagcatgcattagctgtttttcccgatgttctcagtacccacacctcccctagaagccctagtcagtgtgtgttgtgcccgcttcatgtgtccatgttttctcatcgttcagctcccacttataagtgagggcatgcagtgtttgctaaggataatggtttccagcttcatctatgtccctgcaaaggacatgatctcattcctttttatgactgcgtagtattccatgatatatatgtgccacattttctttatccagtctgtcattgatgggcatttgggttgattccatgaaagactctttctttgaatgaaagtatgccctgcagcccaagtgaaactgctaagtgtggacccgcccacctcccctaggctctcagcaattgtcccctggtctcttctctcagctgcacagagccttgcttattgttgggcatggagtagctttatcccagcttaataaagcactcatgggaggaccgagaggggctttaggatgctaaccactgacaacaggattttaaggcatgaatgattcacaactgatttgtgaaagaaatagcagtatttcctaaactctttgggttaacatcctgggataaagaggaacattggcattcttcttccttagattatgtgtgtatgcatgtgcacaatgctaatattggtaatcttttttttttttttgagatggagtttcgctcttgttgcccaggtcggagtgcaatggggctatctcagcttactgcaacctccgcctcctgggttcaagcaattctcctgcctcagcttcccaagtacttgggattacaggcatgcgccaccatgcctggctaattttgtattttagtagagacggggtttcaccacgttgatcaggctggtctcaatctcctgacctcaggtgatccatccgcctcagcctcccaaagtgctgggattacaggtgtgagccactgcgcccagccataatgttggtaacctatataagagttactcattctctgctgaaagaagagactcttaaccattcttctctctttaaaggaagattgctctccattttctttgctttctttgggtttgagtcatttttcagttgaattagcagggcacagtctgtttcttcaatgaacaaataacaatgccctcttgattcgagattatataattgactatgactcatgaaatgtttgcaaagtcaaagtgaaactgctgacttacatttagtttaagttttgattaagaggttctctaggaaccaactctgcaaagacattttggggaccacttgggaaatcgttacatcaaaatggggtgtatctgaaagcttattacaagatattttgtgacgtgttctcaaaatgttttcttagaaaaagtttttatagttctctgaaattgagccagagga

SEQ ID NO: 64815 - DNA, 646 bp, Homo sapiens
accagcaatttctatctttaaatttacatttttgctttactgtataaggtatctattgtaagcactgtttgaaatagcaaaaccttggaatgttcatcagtaggggattggttaaattaatcagggtatatatctctattatatagtatctgtaaataaagagtatgtgctgatcttgaaatgtaaaaagcaaggttcagagagcattcaaaaagatctatgtattaagtatttacttttcctcacctgtgccattacatgtttgtattttctttgaaagtgttcaaagtgttcatgaaattgttaacctctcaggtgtagatttgaagaaattaaatatttctatcttttattgcttgaacccaggaggtggaggttgctgtgagccgagatcatgccattgcactcctgcctgggcgacagagcgagacgccgtctcaaaaaaaaaataaawaaataaataaataataaatccatcttttaaacagttctgtggttatctttttgcatcaaatatatattttttaatttgcacaaattattataatagaattactaattacttcaaaagctgatcccccttgggcttttcagagcattttaatagatttgcacttttcctacatatgagctgtttgttagcatt

SEQ ID NO: 64816 - DNA, 599 bp, Homo sapiens
tgccagaaaattacgcaatacataaaccaaacggcagactccggacagcggactgcggtgaaatgccagaaaattacgcaatacataaaccaaacggcagactccggacagcggactgcggtgaaatgccagaaaactacgcaatacgtaaaccaaacggcagactccggacagcggactgcggtgaaatgccagaaaattacgcaatacgtaaaccaaacggcagactccggacagcggactgcggtgaaatgccagaaaattacgcaatacgtaaaccaaatggcagactccggacagcagactgcggtgaaaggcagtgttttgggttaaattgtgcccctcccccmaaaaaaagtactaagccaggcatggtggcacgtacctagtcccagttactaggacatctggggaaggaagatccacttgaacctaggagttcgtgtccagcttgggcaacatagcaagatcccatttctctctaaaagaaaaaaaatgagccaggcatggtggctcatgcctgtaatctcagcactttgggaggctgaggtaggaggattgcttgaggccaggagtttgagaccagcctaggccacaca

SEQ ID NO: 64817 - DNA, 752 bp, Homo sapiens
atttgaccatttgtctggtctctgccacatcccagggccaagaagctgctgcactgtgaggtctggataaatgtttttcaggtaatgagtgaacttccttctctgtggaccttagcaggagatgacttctcctcttctcttgaatggggatgataatctgtctacttacttgacaatgttgaggtgtagctcagtcaagtcatgaggtagacaggctgaatgaagcacaacaatcctcccaatccycgggacaagggggaagcagccagtgccgcctcatgatgctggccgggagggttggcccatgctagggaaagccagaagttctgttgctctgtgtccccttgccccttgccccaacttcccaccatacctgcttcctccaggacacctggtttcgtccacccagaaaacataggttctgtgacaggatgtttcctccctcttgccaggcgtggctgggaatggaagcagtgatgctgaagaatattccaggcccactctgtcttcctccctggagatctgctccctagcattgattgagcaactccatcaattgccgactaattggtaggtgggagtagaatgggggtgtagatactccccaggtaaagtcatctcctgctcctgggaggggtggcctgatatatggagatgtcagttctccctcaattcatccatcacttcactgtagtcccagtaaagattccagttttagaaactcactctgaatcatgcgaggagggataaag

SEQ ID NO: 64818 - DNA, 1420 bp, Homo sapiens
tcccacctgggttgaagagagcagggacagtgtggtgcagcaggagcctattcccatactgtgcactcgctgagagcttgtttcccctgggacatgagagatgcaccaccttcctgcccagctgggcaagaacatcaggagagccaagggttacaggaggcctggaggaagcagtgttttcagtaatgcaatatgcagcattgaccagcactgcagcataccaggtgcaatgctaggggataacagatcatggagaaagggctgcggcacacaagagctcacagtgcagcagagtggccagcagacaagtggctggagaatgatgtgrgaaattccacagtgaagacatttgaaggcagcaagacagggctttgagttctgcctaggggagctcagaagcctttgcagaggtgggggaatttgagttgggctttaaaggatgactaggagttcaccaatttgaggagactagaggggtctggcagcagccaaagcaaagagaaagcaacacacttttcacctagagaggcatcaaagggcagtggtggaaaatgaggctggaaatactccccagatagtgttgagcctttgtatttgtgagggtgcttttggctgtcagtaaacgaattgtccaataaagtgtataaacatacatcatgtcttaccgtgtgatatagtttggatggtccctccaaatctcatgttgagatgtaatcctcttgactgccagagccttgaatgtgaagacacttaggccacagtgggagggagaaccattagggctcagagcccagggtgtctggttgagaaggaggcactgatgtccttggttgctcccagcacctccctttgagtcctcactctgttcctaggaagcagcagcaaagctgtgtctgagctgcagcccttgaggttcaggctgaggatggatcagcgatgcaggcagcagggccagagcaacagcctcatggattctggcctttcctgagtccccagggagaggcccctgcactggcagcactttgcagcagcctggaggagtagagctggccttgtgctctgtggagtgccacgcgcaggccctgagcaggtgtgctgcacagatgacctcatcgaatcctcaaagtgaccacctcctagagtggacactatcactacacccacatcacagacaaggcaactgaggcccagcaaggctccacacacagctgaaattgcaagctgagggaagaaaggcaggacttcagtatgctcctgcccccaccctatgctgcctgggaggctggggctgtggggtgggggctccctccacctctgagaccccttcccttgccagtaagtgctctgggcttcccacagagagataggagtgagaaatcaacttccatggtattcaggtgctgttactcacagcagaaat

SEQ ID NO: 64819 - DNA, 1420 bp, Homo sapiens
tcccacctgggttgaagagagcagggacagtgtggtgcagcaggagcctattcccatactgtgcactcgctgagagcttgtttcccctgggacatgagagatgcaccaccttcctgcccagctgggcaagaacatcaggagagccaagggttacaggaggcctggaggaagcagtgttttcagtaatgcaatatgcagcattgaccagcactgcagcataccaggtgcaatgctaggggataacagatcatggagaaagggctgcggcacacaagagctcacagtgcagcagagtggccagcagacaagtggctggagaatgatgtgagaaattccacagtgaagacatttgaaggcagcaagacagggctttgagttctgcctaggggagctcagaagcctttgcagaggtgggggaatttgagttgggctttaaaggatgactaggagttcaccaatttgaggagactagaggggtctggcagcagccaaagcaaagagaaagcaacacacttttcacctagagaggcatcaaagggcagtggtggaaaatgaggctggaaatactccccagatagtgttgagcctttgtatttgtgagggtgcttttggctgtcagtaaacgaattgtccaataaagtgtataaacatacatcatgtcttaccgtgtgatatagtttggatggtccctccaaatctcatgttgagatgtaatcctcwtgactgccagagccttgaatgtgaagacacttaggccacagtgggagggagaaccattagggctcagagcccagggtgtctggttgagaaggaggcactgatgtccttggttgctcccagcacctccctttgagtcctcactctgttcctaggaagcagcagcaaagctgtgtctgagctgcagcccttgaggttcaggctgaggatggatcagcgatgcaggcagcagggccagagcaacagcctcatggattctggcctttcctgagtccccagggagaggcccctgcactggcagcactttgcagcagcctggaggagtagagctggccttgtgctctgtggagtgccacgcgcaggccctgagcaggtgtgctgcacagatgacctcatcgaatcctcaaagtgaccacctcctagagtggacactatcactacacccacatcacagacaaggcaactgaggcccagcaaggctccacacacagctgaaattgcaagctgagggaagaaaggcaggacttcagtatgctcctgcccccaccctatgctgcctgggaggctggggctgtggggtgggggctccctccacctctgagaccccttcccttgccagtaagtgctctgggcttcccacagagagataggagtgagaaatcaacttccatggtattcaggtgctgttactcacagcagaaat

SEQ ID NO: 64820 - DNA, 1674 bp, Homo sapiens
tgaacaaaatgtggtctatacatgcaataaaatatgattcagccttagaaagggagagaatcctgtgataggctacatcgtggatgaaccttgagggcattatgctaagtggaatagccagtcacaaaaagacagtattccacttacatgtgatacctagaataatcaaattcatagaaacagaaaatagaatgattgccaagggctggggcaaaaacggaatgggaagttagtatctaattggacacagtgtttcagtttcacaaaagtagagttcttgagatggatggtggtaatggttgcacaacaatgtgaaagtatttgataccactaaagtgtacaattaacagtggttaagatgggaaattttatgttctgtgtgctttactacaatttgaaccagatacaaccttatacatacatggtaggcaaaattctcagctgaactccaataggcaagcacttctgtaatcctctcctggtaaatgtgcttctaattaatagattctaacaaaggtgatgatgtgccatatggaaaaggggaaaagaatttgccaatgtaattaaagtccctgatcagttgactttatgttaatgaaaaaggacatcatccagggtgcatctaatcaggtgagccctttaaaaaaggatgtaaaggtatgagactatctctcctgctgacattgaagaagcaagtctccttgagttctacaaccactcggagatgaatactgccagccacctgaggcagcctggaatcagatctttctccagtggagcctctgatgagaatgcagcctggccaacaccgggttacagtctgagcagagcacccagctaagccgagcccagaatcctggcccacagaaaatgggagatgaaaaataaatggtgttttaagccacacaatttgtgttaacttgttctgcagctgtagaaaactaatgcaatcttttaggcaaaactaatctaggaagagacaagtattggagctgggcacagtggcagatgcctgtcatcccagctactcaggaggctgaggtgagaggatcccatgagcccaggagtttggggctgcagtgagctatgatcgcacctgtaagtagccagggcaacaagtgggaccctgcctcaaaaagaaaaaaaaaagaagtcttcatgttgggtggggaagtggggaagttgatgagggcactgcttgtggagtgtagaccagagccaccattgtggagggattttgatcaatagtatgcatcccttacacccctgctattccatttccaggtagagatgtaaaagaaattgacacagattcrtcaaacatgcacaccaagatgttcactgcagagttctttgtggtagtgtggggatgggggctgcgggaggcaccctagggtttctatcctggggagaatggagagacaaaatgggaatggtccacaccatggagaattatgcagccacaaggagagatgaaaggcacacatagccacatggatgggcctgaacacagggctgagtttaaaaaggaagaagcaacatgggaacccaaacattaccatttgcagacattaaaaaacacataaagactgtatctcttttgaaagagcatttttaaagcagcacaggaggtgggggaatctatggggagcatgttgcccatgcaggggaagg

SEQ ID NO: 64821 - DNA, 571 bp, Homo sapiens
tgcctccgaagagtcctttscttcctgtggaatctggagtctggtcctccttctccaaggcagcacctgccaggttcctcactggcagcaagcagccttgctaacagccttgctaatccgctaattacctgcttctagcagaagagctgttaattgaaaactccatcccctcctttaattgcctgcctgcctctggctgtctaggcttccctgggttctctccaggcccacagcccttggttctctgcctttgggctcctgacttcttcctggtcaataagggtgtctgtggctgtctctgcagtgctcattactggggttgccaggtgagaatccggggctacactccctagcctgcagctaacagcctctctcctgcctggcccactgtgggaggaaggaaagcatttaatgcaatttgccccagaaattaagggggagataacaggccagtgggaggattccacagggtagcagattttactgaaaccaaaggctgaactcctccaggtcagagctagccagaggggccggccacccagaggggctgcaccacttcctggaaggctcc

SEQ ID NO: 64822 - DNA, 571 bp, Homo sapiens
tgcctccgaagagtcctttccttcctgtggaatctggagtctggtcctccttctccaaggcagcacctgccaggttcytcactggcagcaagcagccttgctaacagccttgctaatccgctaattacctgcttctagcagaagagctgttaattgaaaactccatcccctcctttaattgcctgcctgcctctggctgtctaggcttccctgggttctctccaggcccacagcccttggttctctgcctttgggctcctgacttcttcctggtcaataagggtgtctgtggctgtctctgcagtgctcattactggggttgccaggtgagaatccggggctacactccctagcctgcagctaacagcctctctcctgcctggcccactgtgggaggaaggaaagcatttaatgcaatttgccccagaaattaagggggagataacaggccagtgggaggattccacagggtagcagattttactgaaaccaaaggctgaactcctccaggtcagagctagccagaggggccggccacccagaggggctgcaccacttcctggaaggctcc

SEQ ID NO: 64823 - DNA, 710 bp, Homo sapiens
ggatccaccccatgacccaaacacctctcattaggccctacctccaaaactgaggatcaaatggaggagtcagataaactacagcagtgagttttataacatttctgatttgatgcaatttctttttgaaataaactctcccatgcgtacctactttttaactcatcttttaaaattctttttcttaaagagtgacccacaagtttaagctttaggtcccataaacctggatctatcatgggggccaaccttggaacttctgcttgacataaaaggccatgcccagcactctcatgttctcagagatggagtctctgtctagagggatgttaggaaaagatgcctggttcagtttcggggaaagaacaatagactagaatgggacttcagttatatttccagattcgccttgttctaattatgtgcccygggaaggaggctgtaatcctcagggaaatgggattctaaaagcctctgctcatctcacaggatgtcctgcattagtattataatataaatgttaaaatctttgtagaaggcagctgacataaaggaaaatgccattgctaccactcattgcatattttccctggctagcagcaaacttcagaggttactggtagcattttcgtaaagttttatcaccttcatatcttgttcacacaccaactttgagacaaattgaaaactgacacgttcctttctaaatt

SEQ ID NO: 64824 - DNA, 845 bp, Homo sapiens
aataaaaccaaggttggtaaatgagaacaataggctaatcatgtctaaagattgtacggttcttcagttttgtcaagaattactgggtacaaactctggcgatattttgagggacatcttaccaaatgtttcatgatacctaacattatttcttatttggggaggaagggaattaaaggaaaaatgtgactttaatgaccttcctattgatttaagtaatatttcccaaggttaaaatttgattaatcttgaattttgttatatggtagcaactactggcatatcataattgtgagggtgtcttagactgaaacacgacagccagctgagtaacttccagaatccatttctctttaggagttctgtgttctttactaaatggtccagtgtggacattggctggctactctatatagtcattgagaactcacaaattctttggaaatttggtactgccatacagtaaaaagagagatcgttttggtttgaaattaaattttggctgagcaacttatttgctctttgacctggggcaagttacttcatctctctgagtatttcgtttgtgtttaatggaacagtaaaccatcagattatgggttttgagaaatatttaaaattatatatatatagtttactacagtgtatgacaattagaaattattaagtaaatggtagctgagtactaggctatctagttaataatatcaaataatytcctccatctataatttatattctcatggaattcaggcattccttctcctgtcttttggttaagctgacccaaagactgaggaaagtctctgtcatcatatctgtgattttactaacttaccattgtt

SEQ ID NO: 64825 - DNA, 553 bp, Homo sapiens
gccctgcacagaagaagtgaactcaatgccaaatgagagtggaaagaggagagcaggtgtattgtattgctcttctaaaaccagaaactatgacatcttaaartatgtcttaaagcaccttgcaaagtcctcagcaaacaacacatcatgaatacaaccagttgattggttcagaaaaagagaaagaaaataggagaagaattagaaaattttatatcaaggaaaaaattttattcattatctgcataaactccttcaagacttcacagagctaaaagtagcatatatgattaaatatttttatatgcttcaactttaaatagttgtcattttttgtaaggacacctcatgtgacactatttgggaattaaaaactctagttttttataagatctacattcagaagcattcttttaagaccaggtaattgttgcatcagtacaaaatgtattcagcaccaattatgtccttgattacactgttggatgcttggactacaaatataaattagataccagccatctagtatcggaaatgtgcagtcatactaata

SEQ ID NO: 64826 - DNA, 553 bp, Homo sapiens
gccctgcacagaagaagtgaactcaatgccaaatgagagtggaaagaggagagcaggtgtattgtattgctcttctaaaaccagaaactatgacatcttaaaatatgtcttaaagcaccttgcaaagtcctcagcaaacaacacatcatgaatacaaccagttgattggttcagaaaaagagaaagaaaataggagaagaattagaaaattttatatcaaggaaaaaattttattcattatctgcataaactccttcaagacttcacagagctaaaagtagcatatatgattaaatatttttatatgcttcaactttaaatagttgtcattttttgtaaggacacctcatgtgacactatttgggaattaaaaactctagttttttataagatctacattcagaagcattcttttaagaccaggtaattgttgcatcagtacaaaatgtattcagcaccaattatgtccttgattacactgktggatgcttggactacaaatataaattagataccagccatctagtatcggaaatgtgcagtcatactaata

SEQ ID NO: 64827 - DNA, 568 bp, Homo sapiens
atttataaaggaaagaggtttaattcactcacagttcggcatgcctggggaggcctcaggaaacttacaatcatggcggaaggggaagcaaacacgtccttcttcacaagacagcagaggtaagaagaatgagtgaaaggaaaaaagcccccgtaaaaccatgacatctcctgagaactcactcagtatcacaagaacagcctggaggtaaccacccccatgattcaattacctcctactgggtccctcccatgatacttggggattgtgggagctataattcaagatgagatttgggtggggacacagccaaaccatatgtcattaggctatgaggaaacaaattgaattagtagagttttcacactctggagggcagaagaagttgatgcagcatgttccaaaatgtggtacatttaccactgattatacaaaatataataactactattactgctactacaaccaagcgttataaagtactcactaraacagtttacattttatcttcacaataacctcactttaaatatgaggaaactaaggcacagagaagttaatttgctca

SEQ ID NO: 64828 - DNA, 665 bp, Homo sapiens
ccaagattctgaattgctatgaaacttccagatactgctgctggtctgtgggccatattgcttacagaacttcatgctccacaagaatatgtgggtgaaaagtaacacttttttttcagttaaattactgtttttcctacctattaaattatgtgatctttttaactcaaatttctttcaattattaaggccacattattttcctgtggatatttgtagttaggatatatggctccttatcaaaggcagcactgacacaatcatatagcccacacgytgtgtataagccctggtgggtggagtactttttcagtactcctggcagagaagttagcttctgtctcttccaccctatcctctcccaggatactaaatggaattaggttaaacaattgctcagggccgaaccaatataaaactcatcatagatttattctggcatacaagagatcagtttaatttaaaaattatttgtatgacacttttttttcacacacttgtgaaatgatagaacaaatttggaaacttccttaacacagcagctctgcagccatgccccccacgcctaactaaactaaggcacaaagatgctgaggtcctttctattttatgtagtacctcttaggtcaattggaaaagttccgattgaatcggtggaggtactt

SEQ ID NO: 64829 - DNA, 2270 bp, Homo sapiens
acctttagaaacattgtttaatatgatggtgtttttaatgtttcttttacttaaaaagacatcagtttttgaatatacactgcttttttaccctgaggccttcctataatgaaatcagtttttccactgcagagctaccatctgaattggaggctcatgtaaaatagaatgcgattatggccatattaaaaaatgcagctagtgtctgtatctgtcattttaatcccacttgataatttactactaatagggagtttcaattgaactacatttaggtacatttaaatatcatattcataaactgattcatgtaaaacatcttttttaatactataatatctaatttgcttaaactctgctctaacattttactataaaatccattatgaattataattagggattattatgagcatttagaatagggaaaagtaataaggtagaaagcatatgtttgaaaacagaagcttcatttctggttttaccactcatatgactttactaaattctttctccttccaggcctctttattatcatcaatttaccaaacatttattgagcactttcttagtttcaagaatagtggacttaaagatgaaactacaaagtctctgtgcatgctctgccctgactttatctcagtgttttcatgaaagacaaatgaaagagctccgtgaactgtagatacacatcaatataaacattttattatttgctgagattgtatcgattaaacataaaaatctgccattaaaagtttgttttataagcttcctaaagatcgcataattaacaaatgtgtagataattattttctaaactttaaaaatttgcctataataagaactggtctacatattgtttgtctctattaagatgggtgcttagaactaattttttcttaagtccaaactagaattatttatcttggcaacgtatctattatgtcactgctaataactgctttcttctagttaaaatttgctactaacttcattcaataatactctgattattttcctctaatacttgttattcattccctataggcttctcatcttgaaatcaaaacaattgaagatggtaaatgaattgtaaagcctattcagatgtattgcagcatgcatgtgggcatgtgttcccgtgtgtgtgttaacacatccatgcctttaagtagtagcttatacatgagaatctcattttcaaatataaaaatgtaattacgcatttccctatacacatgacactaggcatctattacttcttgtcccccttaactaaaattgctctcaccatatgcccctgatgataaaatatctttaggtagttctgttgacatatgtgaccatgtctgaattatgctattataattctgaccctagcaatttggagcagatatggccacccgtacagtagaatctaatctgttcactaatacatgaggctgcatgattccaagactgtgtgttcaaagaaaaataatgrtgatcacccaaccaatctttagaatgcaaaatggagcttagagtgagataggggaaagtcatcaaattggtcataagaacagagtcaaagcacagattttaaaaaaatcagaaagaaggagagagaagctgagtcaccaacatgtgatactatgttagatataaagccaactcctgtgcttgaaggaatttcaagaggttgtgcaaaaactgtaatgaatcttgaccttcaacctgaatgatttttcttttctttctttctttctttttttctttttgtggtaggactaattacactatatttaccatatatcgtatatcattactatactgtaattacttttctcaacaggcctagttgttgagcttttcttgggttctgtgaagcctctacccatggctgaaatatttgtttgtcatatttctacatatatccctgtactataacttccattatttgagttacctgaagtgcttcattgttccttcaaaccgtaagagcacggctaacacagattcttagctctagtaaggaaagaaatgtggtcaaatcttttctcaactggaaactattcctcttgtttttcagattcatgaagaatctcaaagtaaaaatgcctcataaaataaaggatttataattgtgtgaattttatttattccaattcagcagtgatgttccattaccattactcatactttggcagtttcatttctaatgatactaaatgatctctaaatctggactggcttggatgacctacctatctgttttaagaaggaca

SEQ ID NO: 64830 - DNA, 2270 bp, Homo sapiens
acctttagaaacattgtttaatatgatggtgtttttaatgtttcttttacttaaaaagacatcagtttttgaatatacactgcttttttaccctgaggccttcctataatgaaatcagtttttccactgcagagctaccatctgaattggaggctcatgtaaaatagaatgcgattatggccatattaaaaaatgcagctagtgtctgtatctgtcattttaatcccacttgataatttactactaatagggagtttcaattgaactacatttaggtacatttaaatatcatattcataaactgattcatgtaaaacatcttttttaatactataatatctaatttgcttaaactctgctctaacattttactataaaatccattatgaattataattagggattattatgagcatttagaatagggaaaagtaataaggtagaaagcatatgtttgaaaacagaagcttcatttctggttttaccactcatatgactttactaaattctttctccttccaggcctctttattatcatcaatttaccaaacatttattgagcactttcttagtttcaagaatagtggacttaaagatgaaactacaaagtctctgtgcatgctctgccctgactttatctcagtgttttcatgaaagacaaatgaaagagctccgtgaactgtagatacacatcaatataaacattttattatttgctgagattgtatcgattaaacataaaaatctgccattaaaagtttgttttataagcttcctaaagatcgcataattaacaaatgtgtagataattattttctaaactttaaaaatttgcctataataagaactggtctacatattgtttgtctctattaagatgggtgcttagaactaattttttcttaagtccaaactagaattatttatcttggcaacgtatctattatgtcactgctaataactgctttcttctagttaaaatttgctactaacttcattcaataatactctgattattttcctctaatacttgttattcattccctataggcttctcatcttgaaatcaaaacaattgaagatggtaaatgaattgtaaagcctattcagatgtattgcagcatgcatgtgggcatgtgttcccgtgtgtgtgttaacacatccatgcctttaagtagtagcttatacatgagaatctcattttcaaatataaaaatgtaattacgcatttccctatacacatgacactaggcatctattacttcttgtcccccttaactaaaattgctctcaccatatgcccctgatgataaaatatctttaggtagttctgttgacatatgtgaccatgtctgaattatgctattataattctgaccctagcaatttggagcagatatggccacccgtacagtagaatctaatctgttcactaatacatgaggctgcatgattccaagactgtgtgttcaaagaaaaataatggtgatcacccaaccaatctttagaatgcaaaatggagcttagagtgagataggggaaagtcatcaaattggtcataagaacagagtcaaagcacagattttaaaaaaatcagaaagaaggagagagaagctgagtcaccaacatgtgatactatgttagatataaagccaactcctgtgcttgaaggaatttcaagaggttgtgcaaaaactgtaatgaatcttgaccttcaacctgaatgatttttcttttctttctttctttctttttttcttttygtggtaggactaattacactatatttaccatatatcgtatatcattactatactgtaattacttttctcaacaggcctagttgttgagcttttcttgggttctgtgaagcctctacccatggctgaaatatttgtttgtcatatttctacatatatccctgtactataacttccattatttgagttacctgaagtgcttcattgttccttcaaaccgtaagagcacggctaacacagattcttagctctagtaaggaaagaaatgtggtcaaatcttttctcaactggaaactattcctcttgtttttcagattcatgaagaatctcaaagtaaaaatgcctcataaaataaaggatttataattgtgtgaattttatttattccaattcagcagtgatgttccattaccattactcatactttggcagtttcatttctaatgatactaaatgatctctaaatctggactggcttggatgacctacctatctgttttaagaaggaca

SEQ ID NO: 64831 - DNA, 1215 bp, Homo sapiens
taagcataattcttacattcacttccacagtgcttttcctgtaagaaaaattaattgaagaagactttagctaaaaatatcatattgaagtttttgatatggccttagtttgctcctgaataatctgtgacttctgtttattttttattattcttttgagttttgagggctatatgaaatcactatggaaaattctaaaataaggcaaatttgagttttggtgctgtttattgccattttagtggatccttgtctctatcttccattgaggcattttccagtgggaagacagcataatgttaaaaaccttacacaaattaaatttmacacagtttattttagcaaagaacaattcatgaatctggcagcactcagaaccagaagtttagtgagctctacccagaagcatgagcagagaacttttacaagccagccatcaggcagagtagagcaatcacctgattggctaaagctaggcatttgccttatttgggtgtggtgtgatgaggcatttaccttatttggttatgatctgatcagtttgttgtctatgattggatgaagcttacctgtctgtgattgaaaacctagctaatttatatatataatttattatatataaaatttatatatatatatatcctcctaagttaggttttgatgtgtttacataataagttagttacagagcttttattgttggtttgttgttgttgttattttcctatgggaactcaaagcatagagacagccttagcccaattactgcttatttaatttaaaaataagaaatataaatattgcaatttaggggttaaggtgtattggatttgaatcttgagtctgtcactaataacatatcttgatacttaaatgcctagagaaatagatttggaagctgagaccattgttgaggagaaataagcataagagtatgttactctgctcctcccagcctctggaggctgctggactcccttgagaagtccaaagacattagggaatctttgggtacaagacaaatttgaatttttaacaataactttttttttaatagtggaacatccttttttttagctctgtaataggagctttaaagaatgaaaaggaagactattgggaagaaagtgtttttctagattttccaggaactattatgtatctcttcttattgttacccaccatacaacttcattgagttctactcagcgcagg

SEQ ID NO: 64832 - DNA, 1215 bp, Homo sapiens
taagcataattcttacattcacttccacagtgcttttcctgtaagaaaaattaattgaagaagactttagctaaaaatatcatattgaagtttttgatatggccttagtttgctcctgaataatctgtgacttctgtttattttttattattcttttgagttttgagggctatatgaaatcactatggaaaattctaaaataaggcaaatttgagttttggtgctgtttattgccattttagtggatccttgtctctatcttccattgaggcattttccagtgggaagacagcataatgttaaaaaccttacacaaattaaatttcacacagtttattttagcaaaraacaattcatgaatctggcagcactcagaaccagaagtttagtgagctctacccagaagcatgagcagagaacttttacaagccagccatcaggcagagtagagcaatcacctgattggctaaagctaggcatttgccttatttgggtgtggtgtgatgaggcatttaccttatttggttatgatctgatcagtttgttgtctatgattggatgaagcttacctgtctgtgattgaaaacctagctaatttatatatataatttattatatataaaatttatatatatatatatcctcctaagttaggttttgatgtgtttacataataagttagttacagagcttttattgttggtttgttgttgttgttattttcctatgggaactcaaagcatagagacagccttagcccaattactgcttatttaatttaaaaataagaaatataaatattgcaatttaggggttaaggtgtattggatttgaatcttgagtctgtcactaataacatatcttgatacttaaatgcctagagaaatagatttggaagctgagaccattgttgaggagaaataagcataagagtatgttactctgctcctcccagcctctggaggctgctggactcccttgagaagtccaaagacattagggaatctttgggtacaagacaaatttgaatttttaacaataactttttttttaatagtggaacatccttttttttagctctgtaataggagctttaaagaatgaaaaggaagactattgggaagaaagtgtttttctagattttccaggaactattatgtatctcttcttattgttacccaccatacaacttcattgagttctactcagcgcagg

SEQ ID NO: 64833 - DNA, 528 bp, Homo sapiens
ttaatggataatttcctctttgtaaaacatttggctgaatttcagtgtgtaatgggaaccaaatactaacttgattttctatgtttaaggacagtatgtaagttccttacatgagaatttatgctttttcacacttcctacaaaatggaaaacaaattgttttccaaaatgttgtatcaatgacagtttccacagaatatgtgttctagttattccatacccatgtgaacattttaatcttgtcaggtttctaagattttgcgaatctaatraatgtaaaagagcagcatctcattgtggccataatttgtatttctaaagatcattaatgagttgatcttttcatgtcagccatatgtatttgttcttttatataatactttattaatatcttttgtgcatttttctgttatacaacccaatatcctattttcatgtattgaataagtaccactttttctaatgatcttcaatgatttttttgttcataattcctgtttctaggttctctgttcaattcatcaatgt

SEQ ID NO: 64834 - DNA, 966 bp, Homo sapiens
  misc_feature (1)...(966): n = A,T,C or G
gnnnnnnnnnnnnnnnnnnnnnnnnnnnnnnnnnnnnnnnnnnnnnnnnnnnnnnnnnnnnnnnnnnnnnnnnnnnnnnnnnnnnnnnnnnnnnnnnnnnntgaataacctgtgtggtaaactgttcaaaaccagggcatttccttcattacctacttattaggtttcatgcttcccagtatgacaaacccaaacaaactcattgcaattctattaaattgtattgaaactatttttttcctagatcttcaaatatgaaaagccacaactttacatagttttcacatataaaaatacatacacacatacatacaaagaaatttacacaccaagtgaccagagactgagcactgtgtgggaaggttttactcctgagcttagaaccagactctaggctctggggaggaaggtcaggacaggagaagtgaaatagatcttttaaagccaaaatgtcacaaactgctcatattaggaaaacaaagcctcttgatactgatgatgagtggaccatctttgggcttgcagtcagaagggcattggctggcagtagatgctctactgtggttatgtggagcccacctggggtcatggtgatcagaagcctccgctgtgtgtatctgtgccatgtccagtcaaggtggttatcgggaacccgcccccgataattctttgtgggttcttttctattttccctaagtgtcagctggtctgagaaataaagggaaagagtccaaaagagagaaattttaaagctggatatctgggtgagacattacatattggcargttccttgatgccccctaagccacaaaaccaacaagtttttattagtgattttcaaaaggtgagggagtgtacgaatagggtgtgggtcacagagatcacatgcttcacaaggtaataaaatatcacaaggcaaatggaggcaaggtgaaatcacaggaccggggtgaaattaaaattgc

SEQ ID NO: 64835 - DNA, 1545 bp, Homo sapiens
acttattacatgaatccagcagtaactttggctttgatgtgcatagttccctattttgtgatgtgtaagaagtcatcaacatatggatacatgatatttggcctgcaacatttgaaattaaaaaaataaagaataaataaagcaatagatccaagtcagcttccaaaatatctatgcaaaaatgctactgttttaaaacaggcattagctccatctattgttctatgacctaatttgttttaacttaacttgaaagaataatcattgattattgaagtttctcaagattacttaaaacatatatatggctgtagatataaacaaatatgataaattggtcacacaagaaatctaaaatacaaatttcaacaccttataaaacaacttttaaacattcatatgttacacctatgaagggcaaattggagaaatattcataccacagaaaattgtcttaaaaactatggttgtagaaaattagattaataattctacatggatttttaatatattgctttctttgygactttgattttagaattgctctcaaatattgctagatcccatatattttattaaaaatatagcaattatgtgtattctttgtgtgtgtgtgttatttgtatatcagggattttttgtatatatgggaaatcatagtactataaagtaacattcttttactctctaaagcaataagaaatacagatttattaaataattactgggattgtgatctgataatcatttagaatatgtaacagtcagcaccaggaatgtccaagacataccactgaatttcctcagtagcacaaagaaggaaaaacaccaatcaattctgttacttaacctatgcatttgaaaatgcagtcaagtagtcagtcatgccctttgcaaagtacacaggcaaatataatactaacaaataacacttgagactaaattttaggtgatgaaaacattatgattatgaatcttcctgggaaacgtgggtcaatcatgtctatctccttgaaatctggcaccgctaggtttcaggaagccatttatggtgtgtgtaccagttaggcttagatgggacttcatttaacaggaagagcaaaataaaattagttttaagatggtagaagtttatttgtccctaacagaaaaggaattcataagtaggctgtacaggcctcctatgaccacttaactatgttatcatggctcatattttctgctttgtcattcttagcttgggctttccaaattcaagggttgagatgatgactagagttccacctattatgtcaacattcaaggctgtgctcgctactcccttttaagaatttcccatagacacatacatacttctgcttaaatgtgattggccagacttagttacatgaccatagccaactatgaaggtgaggctgggagcttcttagcagaacacattgtccaggattctattactaaagaagaagtaaaactggatattgaaagacaattagcatgaaaagcaagcatctgaaatagtcatgccatagaaattacagggtg

SEQ ID NO: 64836 - DNA, 629 bp, Homo sapiens
gcataaagtccagtaactctgggcaaaagcagagagatgaaaagaggaggcaggaatggagtcaagactgggtggagacctgagatgaggagacaaagttgaaatttgacagggaactgtgatttttgctatgggcaaaagatatgtagtagagtttctaaaatgaaggaggagtgggaaaggagctaagttggaccattccagtgtaggaggcaggtcaaggctgagaagctactaaatagytacatggccctgggcaagttatttaactcctgtgagccttgatttcctcaaccataaaatgagaatcataacactcagcacacagggtaattgtgaggattaaatgtaaatataacgtaagcctcaaaattcaaaaaggatggggggccaggtcaaggctgagaaggaagagacttgagggcaatgtatggtagttagatggatgtctcctactttgacttttggcaaattcttcccatcttttcaatgtctttctcttatttcatcatcatttcaaactttaatttctaccaccaccacccccccactccaagttactctttgtttttctctgtcactttcaaataaatgatattttatagaataggaataacaacaccagtatt

SEQ ID NO: 64837 - DNA, 629 bp, Homo sapiens
gcataaagtccagtaactctgggcaaaagcagagagatgaaaagaggaggcaggaatggagtcaagactgggtggagacctgagatgaggagacaaagttgaaatttgacagggaactgtgatttttgctatgggcaaaagatatgtagtagagtttctaaaatgaaggaggagtgggaaaggagctaagttggaccattccagtgtaggaggcaggtcaaggctgagaagctactaaatagttacatggccctgggcaagttatttaactcctgtgagccttgatttcctcaaccataaaatgagaatcayaacactcagcacacagggtaattgtgaggattaaatgtaaatataacgtaagcctcaaaattcaaaaaggatggggggccaggtcaaggctgagaaggaagagacttgagggcaatgtatggtagttagatggatgtctcctactttgacttttggcaaattcttcccatcttttcaatgtctttctcttatttcatcatcatttcaaactttaatttctaccaccaccacccccccactccaagttactctttgtttttctctgtcactttcaaataaatgatattttatagaataggaataacaacaccagtatt

SEQ ID NO: 64838 - DNA, 629 bp, Homo sapiens
gcataaagtccagtaactctgggcaaaagcagagagatgaaaagaggaggcaggaatggagtcaagactgggtggagacctgagatgaggagacaaagttgaaatttgacagggaactgtgatttttgctatgggcaaaagatatgtagtagagtttctaaaatgaaggaggagtgggaaaggagctaagttggaccattccagtgtaggaggcaggtcaaggctgagaagctactaaatagttacatggccctgggcaagttatttaactcctgtgagccttgatttcctcaaccataaaatgagaatcataacactcagcacacagggtaattgtgaggattaaatgtaaatataaygtaagcctcaaaattcaaaaaggatggggggccaggtcaaggctgagaaggaagagacttgagggcaatgtatggtagttagatggatgtctcctactttgacttttggcaaattcttcccatcttttcaatgtctttctcttatttcatcatcatttcaaactttaatttctaccaccaccacccccccactccaagttactctttgtttttctctgtcactttcaaataaatgatattttatagaataggaataacaacaccagtatt

SEQ ID NO: 64839 - DNA, 717 bp, Homo sapiens
tccataagtcaagaaatagagttagataggaggaataaatgataagtgcttgaggtgatggatttgttaattaacttgattcaataattgcacatggtatacatatatcatggcatcactctgttccccataaatatatacgtgtataatttgtcaatattcaataaaattttaaacatatagattaaaacaccccatwgggatgaacatcattttcatccatacagacaggaaaaaatttaaaggtagctaataaagtgtttgctagggtgtgagaaaagtcacattattcggtgttaaaaaaataaaaagaaaccatatctctaaacacaaaagcaacacatgcttatctgtgaacactaacctcaaaagccaagacaaagtgtgagaaaagagagctgctagaaataattaaaactatcaagaagagaaaatggtacagcaaagataggttgtgggagcagaaacatcacccatagtaatgaactgggggctacttggggacttagtgatttgcaggtagtgtgtgcagtggttacaagtacagcactgactgaggtcacgctgcctgggtctgaaagcaggttctgccaccacctttgggatggttaaaaagcttggtcaagttagtaaaaaacacaatgcttcaaacttcttacctagaaattggcgctatgtaaataggaggtgttgttacagagttgcagtgaagatgca

SEQ ID NO: 64840 - DNA, 717 bp, Homo sapiens
tccataagtcaagaaatagagttagataggaggaataaatgataagtgcttgaggtgatggatttgttaattaacttgattcaataattgcacatggtatacatatatcatggcatcactctgttccccataaatatatacgtgtataatttgtcaatattcaataaaattttaaacatatagattaaaacaccccattgggatgaacatcattttcatccatacagacaggaaaaaatttaaaggtagctaataaagtgtttgctagggtgtgagaaaagtcacattattyggtgttaaaaaaataaaaagaaaccatatctctaaacacaaaagcaacacatgcttatctgtgaacactaacctcaaaagccaagacaaagtgtgagaaaagagagctgctagaaataattaaaactatcaagaagagaaaatggtacagcaaagataggttgtgggagcagaaacatcacccatagtaatgaactgggggctacttggggacttagtgatttgcaggtagtgtgtgcagtggttacaagtacagcactgactgaggtcacgctgcctgggtctgaaagcaggttctgccaccacctttgggatggttaaaaagcttggtcaagttagtaaaaaacacaatgcttcaaacttcttacctagaaattggcgctatgtaaataggaggtgttgttacagagttgcagtgaagatgca

SEQ ID NO: 64841 - DNA, 717 bp, Homo sapiens
tccataagtcaagaaatagagttagataggaggaataaatgataagtgcttgaggtgatggatttgttaattaacttgattcaataattgcacatggtatacatatatcatggcatcactctgttccccataaatatatacgtgtataatttgtcaatattcaataaaattttaaacatatagattaaaacaccccattgggatgaacatcattttcatccatacagacaggaaaaaatttaaaggtagctaataaagtgtttgctagggtgtgagaaaagtcacattattcggtgttaaaaaaataaaaagaaaccatatctctaaacacaaaagcaacacatgcttatctgtgaacactaayctcaaaagccaagacaaagtgtgagaaaagagagctgctagaaataattaaaactatcaagaagagaaaatggtacagcaaagataggttgtgggagcagaaacatcacccatagtaatgaactgggggctacttggggacttagtgatttgcaggtagtgtgtgcagtggttacaagtacagcactgactgaggtcacgctgcctgggtctgaaagcaggttctgccaccacctttgggatggttaaaaagcttggtcaagttagtaaaaaacacaatgcttcaaacttcttacctagaaattggcgctatgtaaataggaggtgttgttacagagttgcagtgaagatgca

SEQ ID NO: 64842 - DNA, 717 bp, Homo sapiens
tccataagtcaagaaatagagttagataggaggaataaatgataagtgcttgaggtgatggatttgttaattaacttgattcaataattgcacatggtatacatatatcatggcatcactctgttccccataaatatatacgtgtataatttgtcaatattcaataaaattttaaacatatagattaaaacaccccattgggatgaacatcattttcatccatacagacaggaaaaaatttaaaggtagctaataaagtgtttgctagggtgtgagaaaagtcacattattcggtgttaaaaaaataaaaagaaaccatatctctaaacacaaaagcaacacatgcttatctgtgaacactaacctcaaaagccaagacaaagtgtgagaaaagagagctgctagaaataattaaaactatcaagaagagaaaatggtacagcaaagataggttgtgggagcagaaacatcacccatagtaatgaactgggggctacttggggacttagtgatttgcaggtagtgtgtgcagtggttacaagtacagcactgactgaggtcacgctgcctgggtctgaaagcaggttctgccaccacctttgggatggttaaaaagcttggtcaagttastaaaaaacacaatgcttcaaacttcttacctagaaattggcgctatgtaaataggaggtgttgttacagagttgcagtgaagatgca

SEQ ID NO: 64843 - DNA, 2306 bp, Homo sapiens
tgcataaaagaaggaaaatctccaatttgcatatcttctatgggtataatgacatattgttacaattgtaaacaacattttggttaaaaaataaattgcctctctaggccccatttctcttccctacagagaacaaaacaaaaagcaaaaactgcgtgacatagagagtagaaaactagaccttcctttctccttctgctcttaaggcatttgttcaaaaatgttgatttacgattacatctgtaactatatctacatgtctttcattacagctataattatatctacatgtcttttataaagtagttttctctttgcatcaagttttaaatagacagacttatacaaccctactcttatagaacagaatataaacactaaaccaccttctggactttgtctttctccctgctaggttagtcctgagatagcttgcaagttctgctcttgccctcttcattagcctacattgcactatagctgcactaaagtcttaattacagaggctgttactcagtagagctaactagtgactaaacttgggctgtcagtcacaaatgggattaggtaactcagaatttgtaagacttatctttcttcttcttttacttaaaaggatagaaataattaagaatcacctaagacacaaacatgtggtcaataatttctaccactaagggatgtattctgtacattgcagcatttcttctaaattcgtgtttttctttttcttttgagatggagtctcgctctctcgcccaggctggagtgcagtggcgggatctcagctcactgcaagctccgcctcccgggttgacgccattctcctgcctcagcctccccagtagctgggactacaggcgcctgccacgacgcctggctaattttttgtatttttagtagagacggggtttcaccgtgttagccaggatgatctcgatctcctgaccttgtgatccgcccgcctcggcctcccaaagtgctgggattacaggcgtgagccaccacgcccggccgtgtttttctaattatattccagctctctgcatctttgattcaatcataatcattccaattatcctttttatatgttagagttctgtgaaacatctaatttgaagaaataatataattctgttgaaaattgaaaatattttttcaaagtaaatgcatgttagctattttcatagccatcatcattcacatcctagagagtgcccatctacaaactgtgcaagcctagaatcttatctatgacaaattaattaaacacattccgagtggtcttcatttcatctgacattaaacattaactactaatatactattattataataacccttcctgctatcaaaaactttttttaattaaagaaaaacaaacacatccaaacactagaactatttatatcatatacaaacaaatgaaaaaaaatttagctaataaataactttgaggataaatgataccatcagcactttagagaacacttattggaggaagtgtaattgagggccatctttataaacagaattttcagtaggtggcagattcactatttttaatacatgtgaagcttatatagaagttgtatgtgtgtgtgtgtgtgtgtgtctgtaaagagagattaaatgtatctgacatttctacaccgcatttttctatgtcaatgggagttttataaaatacatctgtgcctaattatcaatgtaaggtaaacaatttcttttactgtgacaagtctgtattattaataaaacttaaggatgttaataaagaactagaagaaaattcagttcttacctgcataaaagtacctgaagtatttctgtaataaacagagtaatattgtataatcccattaggttttgaaggaggtgtccagaaaagaattattgatgaagaactgaggtttgcataataaacatctttgggaggatcgcttggtgctataaaacaaataattgaacaaattactgtatttgtgtttacaagtaatgtctgaaatggcctgaattttacctacagtttataaattaaagtgataaaaaatgtttttcaawaaagcttgaattagaaatgtcagaaatgaaatccataaaacacattgggtcacccctctaatactttattataggcatattcaagctgaagacagatagatttcttacccataaaatactatctccgttctaaaacctgtccactgctctggatatgagaacaatattataacaggtttccaatacaaaatacataatttgaaattctaatataacttagaatttttatattgaataataaa

SEQ ID NO: 64844 - DNA, 1031 bp, Homo sapiens
gtaaaaatgggggggtataaagctaaaagtaaaaaccggttaaatgatcatgtgcacccccatgttaaataaggagaatgtctctgttttatatttctttaatatgttttacatttgtgagtttaaatttttaaagacaaattttatagtccgttatttgatgtttctttcaatgttatcgaaaagaaagtgtgtttaaattgcctatcattagactttgactaggtctaattagattattagattgtttgactgatttttattttggaagtgagattctttcagttaattaaatagtgttttttgaactaccatgtaggttggtttatgattctgacagtaaagtaaatctatcaattcatgattctggcaagtattttttatagaaaatataactaaaatttgggtcatcctttcaaaataaaacaaacaaacaaaccatgaaacccaaaaaagatgattaagaggaatttagggccattcgaatgatcacggtgccctctcttcttgagagtgaaaaccagcaggtaataattatgccatctctctaaaaatgtgtaataaaaccttcagagaggttttaaaaacagaagtggatggacttttagtagaattctacctgatatgtctctttctaaagcaaaaagtaacttttttcagtctttggcaaatacagcagagcacagtgattaaaggtgacagcattaggctgggtttagggtcaaactgctggattgaatcatggattagccacttgatatctatttgactttgagaaagtttcttaacctctataggcctgaaaaatggagataatactrgttcctatctcaaagttactaactttgaggattaaaagagaatctgaaaaaacccttaagacccctgcctggaaacatgtactattaagaataaaaaatattcactgttagatgaaactgataaattttatctttttgtcaatggattatttatataattgtgatactctttataagtgtttgatttaaattgataaattatttactttg

SEQ ID NO: 64845 - DNA, 873 bp, Homo sapiens
tatgctttagtaaaacttcccatttcagatgctattcccatccccatgccaggttggttaatcttgacttttactccttacctaaggcaggcagacttacgacttctagtctagagaagatatatgaacaatgtcttagtggtgggatcctagagaaattatgttttctctactaatacacattattttattaatgatgtggaatattcaattggtagtagtctcatgaaatttgcatttgacagatattatgaagttggatagtaatgtccaatgctggattcctctaactggaaatcttttcctggggactcccmagtggcctggctgagaatctcagaactacctgaaacctgagcctcttcctactgaatcctgcctttcatcttcccttttacaggtgtcatacctgtgatctgtggcacttactccttccctctgtcccttaattcttcacagataattcccccaaaaaacctcttacacatccagtctcattttagcctttatttctcttagtacccaaactgatacattgagtaagaaatttgcatttgaatctgatgctcaaaaaagagtgaactacagaaccgagtcaaaaaaatgtgattcaaatgttgatagttatctttgataactgtatgacataagctcttttccctatctacaaaataaaaacaatgttgataatcctgtgggattattgagaagctttttaaaaaagattcttaaaaatatggaaattgaaatttggttaagtaacttactgatgctcaagcactacattcacacacacacacacacacacacacacacacacacacacacacagtgagctataagaccaaatgaaacaagcagagcttctataca

SEQ ID NO: 64846 - DNA, 851 bp, Homo sapiens
atatatagagaatatctggagtgcaaacaggatgcatgaagaggagttacaaggaataatgtcagaaatgtgggcatggttagaaatgttttacatgattatatgaaaactgaattattatggtcattgtattagagatttgtttgggatctcgaattgagagctagaaatccagacttggatttgaaagctagatattcgtgactactatattttagcacaatatagtctatccatctttgagtaaaattaagagaatattcttttggaaataatggaaaaaatcccttccttatatcagtatcaattgtagaacagtatggataggagcagcttgagatgaacaaactaaattagcaatagtaattatcatactattgatagtaaccaatacttatgtattgcttactaaaggcagagacctttaaatatatgaacttaatttaatacatttcccaaactaggaaactgaggcacagaaaaattaagtattkcacatgataatataactagtaattgttcaagcaggtatttgaaaccaataaaggcatcatattttctaataaggcaataattcacaaatatccacccaaacccattatagccagttatggtttaaaatatctttaggcggacatcatgaaatgcacatctttattatcccccttgaggggtgagggagctggggtatttatccaccaactctggttagtcattgggtgatggatggttcttggaatatttaccctccgatgcttctagcctggatgcaggagacactcgaggagagtggcaggtccttgtagtaggaaactatttccttgcatgcgaatgttgagtgcccaggcgat

SEQ ID NO: 64847 - DNA, 653 bp, Homo sapiens
gactggattaccatatcttgagctcttagcacccatgaagtgggtgatrtacagctccaggagtagtatctgccctcatgatcttagaggaaaggttgtcccaggatttatataaatcccctgaaataattctgtaaggagcttttctatgaagtagagcccattcctgagctgattactggatctaggtatctggttactctggccagcatggccacatgtgcagctctgcatcaaggagggtagaggcccttgtttgacagccgtaatcaaactgcatgcagcagaggaggatagttcgcaagaggaagggctgttgggcagcgtgtggtaaagcagttcacctccttaagctcagtgggtgtagtagagcataaggatagattcactgtgctactgcacgggaaacctacctggaggttttattgcagagatgtgaagaggatttgaaagaaaacaaagtgctttcaagacctcattaggaagtgagagatccttgccaccattccattttgagctttgaggctcagctggttcacctcattcttgatgattgcccagaatatcagcctctctggacacctgtcctctcccatacactcatgtgcagactgcgctgacctttgcccctgctcataaacctcttccatgat

SEQ ID NO: 64848 - DNA, 570 bp, Homo sapiens
ctagctgcttgaccttagcaagttaacctctttttgcctcctgttgtcatatgtgtttaatacagtgcctagcatgtaatgagtcatgtgttagttattatttttattattgttttatccaattgcatcttttgtcagattagctacaccaaccaatccagtttgtattaacaaggcaattgttcaaatttcagaaggcaaaatacatttctcatctgactttcaaaagcatattcattcatatttcacaacaatattagtctattcaatatagcaagttgaggaactaaaagtatgacctaatttttttttttttttttttttttagacagagtctcggtctgtcgcccaggctggagtgcagtggcacgatcttggctcgctgcaacctctgcctcccaggttcaagtgattcttctttttcttaaaaaacataaagctctaaaatgtaagcaccctggctgactcttcctaccatgcacagaaaggaaaaatttggtgtccagggccttctgaatcagayctggaaaagctcttaattagcttatggattcaggaaactgcggatag

SEQ ID NO: 64849 - DNA, 2059 bp, Homo sapiens
  misc_feature (1)...(2059): n = A,T,C or G
gtggtttgaactggcctctggaacattctgttgctatcaaatgggactgtttgagtttcattaaaagatctcttatttattgaaagaaaaaatatatacaataatcgttaatttgtgcatacctttggaagtaagatgatgctacacatgttcttagcatcctccatacataatccaaaatatttccgctatgcatcctgagggacgtttccaagaaataccattgtgtgcaagaaagaagatgaagaaaacaaccaaacaattaatttgagtaatgtagaaattgttaataggatgaaatctagaagctaagatacaaatgagcatttagcagctcaaagaacagaaaaacccacaggaaaggattagagataaagataaatgattaaaggaaagcttgaggagatgaaaaaaaggcaatggttacctacagcagcnnnnnnnnnnnnnnnnnnnnnnnnnnnnnnnnnnnnnnnnnnnnnnnnnnnnnnnnnnnnnnnnnnnnnnnnnnnnnnnnnnnnnnnnnnnnnnnnnnnntatatgtaagagaaaatgaaaatgactggccaaaatacgatgaaactgaacagggaaagcataaagttttaaatttcatttttttaaggcagcattgaggactcctagtttaacagtttattaactccatttgatagatgcatgctgtcaagagaaagattaccatctcagattctgattagatcatacccagggtgatgcatttatttctgatggccacattttaagacacacattgtaaaactacggcaaatccagaaaaaagtttccgtgaggttcaaaagactcacaatagtgttatgtgaggatctattgaaggattccacattctttcatttatctattttttaaagaccgggtgtcactctgttgcttggttaggggaggtcagcatcggagatgagtctaaaaatgatcagctgtgctgaatggacagctcatgatttgaccacagactttagaaagcactgcctgcaaagcaaaacaaagacctgccattttctaagaagctattattaagtcacagcttacacgtggtctgttatttttttattttttttttttttgagacggagtctcgctctgtcgcccaggctggagtgcagtggcgggatctcggctcactgcaagctccgcctcccgggttcacgccattctcctgcctcagcctcccragtagctgggactacaggcgcccgccactacgcccggctaattaataatattaatatgtgtaatataaattaagagtaatggtataactacgtttcagacataatgtactcatatataattctacgatattatacatgccacggacatcccaaagatctgggataacaggcatgagcctccgctcctgggtaacataattttattatattatatattggagatggagtttcgctcatgatgcccaggatagagtacaatggcatgatctcggctcactgcaaccttctcctcgcgggttcaagcgattctcctgcctcagcctcctgagtagctgggaataagaggcatgtgcctccacgcccggctaattttgtatttttagtagaaatgaggtttctccacgatgttcaggctggtcttgaactcccgacctcaaatgatccgcctgcctcagcctcccaaagtgccgggattacaggtgtgagccactgcacccgacccataactgccagttttatacaaacctttatatccttatattttagatatgtctcttgtttgtacaaagtacatagcaagatatttttgtctgtttgtatttaattcaaactttcttctttgctgaacttttactctgcttctcttatttcttttttatatattttgaataaatatatgacatttttcccagtctggatgggaatccttaaatcccatcttcctgaaactaaataatagcacttttgacatttctagtcaaaatgctgttagatattgcttttattacaattctatttttctcctgaattttaatcagaattatgtacaataattttttaataatgca

SEQ ID NO: 64850 - DNA, 443 bp, Homo sapiens
cctctttagtagctgtatgcagcttgtggctttggacaagttactaaacctccctgagcatagtttccttttatgtatagtggggcccaaaactaccaccctcaatggtcccatgtgagaataaaaagacacagaacaagaaaggggcttagtacaggcacagaatacagtttcaatgcagtctggctaaaaacacgcaaaattccatgattaaaaaaaatcttactacagactagaaatcttgcttgggtgttacagttgttatcttattttgtgctcacagcaaatccacggggaagtgtccattttatgctcatatcacagacaagaggagtgaggttcagatccacagtgagcctcaaagcacacagacactaacagacagaggcaggatataaatttgggtgtccctgacaccaaagctggggytgttccactttccc

SEQ ID NO: 64851 - DNA, 752 bp, Homo sapiens
aaagtaaactaatccatcttcctaggctagaaattaaaccacatttcatctgaaggagcctacttaggcttacttttctcaaactttcagttccctaacaaattaagatggattagactcatatttatggtatttaatatgaaacaattaaatataaaacagtgccctaaccttaatggcctatgtgaagactgaaagatacttttttaatagtttcaaacagaaatgaggtgctgccttaatctttttaggacctggtttttagaaacttttccactgaagtctacaatttttttttttgagtgatttttcataatttgcctttttgaagaacatgcagtgagcattcataaagtgtttccccctgcaccttggccccccgtctcatgcagcacatttatgacattgaaaaccaccagtaatagataacattgagatttgaaatttagttttacttaggtataatgacagaccaagtayaaggctttggttgagagaccagcttttaaatattgaaagacaaatatagtgtaaaaggcgcaatggaatttgtatagtgaaggagattctctagtcccagggttgtaatgtcacttctgtctaattcattacagaattacagaatcaaatcatgttagccctagaagaaactgcagatcattttgttcaatcttctcattatataggaaaggaaatttgagggccagtgcaatggtttgccaaggtcacacaactagttagtggaaggatcc

SEQ ID NO: 64852 - DNA, 1002 bp, Homo sapiens
ttaaaattattctaagtagatatatgttaagacattccacagatacattccaagtaaaagtaattaaagtggtttaaatcaagttcggtattagcagatctattttctttaaccaaacttaatcaatatacttaaaaaggtaaaccctagttattgtacttgcataaatacataggaagagctggctgggcgtggtggctcacgcctgtaatctcagcactctgggaggccgaggcaggcggatcatgaggttaggagttcgagaccagcctggccaacatagtgaaaccccatctctactaaaaatacaaaaaaactagctggttgtggtggcaggcacctgtaattccagcaactcgggaggctgaggcaagagaatcgcttgaacctggggggtggagattgcagtragccaagatcgtgccattgcactccagcctgggtgacaagagtaaaactccgtctcaaaaacaaacaaacaaacaaaaaaaaaacaaaaaaaaacaaaaacataggaagagttttaaggaaaacccacattcttttatacctttcagtgcaattactttgctagctggattcatgatggcgctgtctgctgaaattggtcttcgaattggattacttgggtcattcatatcaatgattaccacctgggcctgctctcctactttttctctaatgcagatgaatttgtcagactccatagtcagggtactgaagccaatgtttgctgggttgatacccaggttctggagctagaaaaaataataagaaaccatgttaccaagtggattccaaagacttgacattcatatatgctcatcaacacaaatcctcacttaacattaatgcttcaaggtcacaataacatctacattatgttaattaaagagagactattaatagccaagtattggaccttctcttcttcaaacaaacatgccattcaactgtttcaaataagaggcagaacaaatacagatgaagttaaaggaaaga

SEQ ID NO: 64853 - DNA, 648 bp, Homo sapiens
ggatccaaagggctgagtcatggactgattcagataataatcatgcagagawagcacctctgcacacacatacacacacacacacacaccagccacatgtttgaaggtgtgtatgctgcacaaatccaaagggcgcctttacatcctaggccatcagtgcctctggtgcctagactttggggctgcctttgaatctcatgagcatcaacaaaggaaggtcacccctggagtcatagtttgtgatttttaactatgtgtgaacggctgacagaaatatggactctcttgcaaggaagatggacatgtgcacctgcacacaaaatttgtacacaactgtgagtcactgacaaaccctctgaaacacattcatggaccagaggttaagaacaccttccttgactcgacaaagctctcttagttcttcatgctgatcctttaaaacagattttaaaggcttttagttccataagtgccctattatccttgctggaatctacaaaagccagagcggacattttaaaacattgtattagatgctaagtcattacttcttattaatcaataacaaacttcaatcatttttacaagattgaagacaaagagactttgcactctaatagaacatctcgagtcttttttttctctccc

SEQ ID NO: 64854 - DNA, 1309 bp, Homo sapiens
tgcattaaggtgattttagcagaataaaataataaagagttttaaattgtttttctactcactgaaaaattatactttttaatgatacaaaaagtatttggaatattcttgcatatgactttgtaaagaaatattagtttctctgcaaaatattttaagtaaaactctgcttggaaagaggttagataaactttggaggacccttcaggttcttgagtcagtgattctgtgatgtaagcaaataagacagtatggatttgaagtggacatgtttcagccaagtccttctacgagccaagccagtcatctggttttaatgaacctcctttggaatgcaaaaattttaatgttttgcttgggcccactatagttttaattacttgtatttgacatgtgttgagcaatagctaagcagtagtgattacccaacacaacattttatgcagtgcttgcttactttaggctgaagtgtaaaatataagcatttttcagatagggtaaagggaaataattataaagataggccatttgtatttctgattgacgcttaagaacattcagaatagtttaaggttaatatgacctattgcccatatttttgtacatattcagttatctccaaaatatatattaaaaaattgtgaatcatgtaactttaaattaggagattatgaatacttgatcataaccagatgttttgaatctctactaactaaagacaaaaagggaagtagattaaattgcattagttaagaacagttactgcattgaaatggagtgaattagtacctaaatttttaagtccaaggacctggtttttaatgtcaaaatgttttgcagatatccacatggtagttatgataatttttgtaagctctgattaggaaattatgtaacaactaaaagtatcatgaggtcagtgacattttaaaataaatttatrtgttttaacttagaaaatatttagtcatttaaaaaatatgtggatatgagaaatactatttactaaatctacaaaaatgtacataatgaattttaggataccttactgtaactaagaaccccctgaagcgtctttcatcttgagtaccaaccttgttattagaaattaatcaaacatatttaatatcaaattattatttaaataaagaagttctcaacatctaacctattttaaaaacatgtataaaaccatataaatataaataagcaaataaattgataactacaaaacaacgcatatactttgaaatatattgaatgcagatcattaaaatattttttctttatctgttgtgaaaagccagca

SEQ ID NO: 64855 - DNA, 951 bp, Homo sapiens
catttcatagattaagagttgatgtttaggaccatgttgttcctttgggtagtttctgtaataaaagggactcatgtcttgttctgtcactgggatatctgtgattcagctaccacaaactatcagctcagctctccttttcctgacccagatggacagcttctgtaccaaagttccatttattcaactctacataatcaaatggaggcaaatgttttttgttttatgtttctttcccttttttttttgagacagagtctcactctgtcgcccagactggagtgcagtggcgtgatctcagctcaccgcaagctccgcctcccgggttcatgccattctcctgcctcagcctcccgagtagctgggactacaggcgcctgccaccacatccagctaattttttgtatttttagtagagacagggtttcatcgtgttagccaggatggtctcaatctcctaacctcgtgatccatccgccttggccttccaaagtgctgggattacaggcatgagccaccgtgcccggcctgtgtttatttcttttgctgaaacttaaaatatttcaagacaaagtccaactgacatagcccagtaaattccgattgcatacagctaaaaacagaataaatcaatattcaagacacaatttgtggagtaacaataacaagayagaaggcaaaattagtttcgaagacataagaattctcaaaatgttaggatgtgggaaattaatatatttagttcaatttcttccaggattgagaacctctttcataattacaatttcctgagttataaggcttcaatgcctcttatatcactatttacaggcttcccacaagggtgatttggacattagaagcaactccggttataaaatgcctaactggaaaaatttaaaaggttaaaaaagattcaaagtatttgacgctatctatcaagggggctct

SEQ ID NO: 64856 - DNA, 562 bp, Homo sapiens
tagggtgtttgattcagagtgtgcttgagattatagtgagtcaagtaagtatttgattggggaacttcaaatctatagtaaactgcctcaagttagttgcaaaccaccctttagtttttcagcaataccagatcgtgatgtagagcaataagcttgtttcagtggggaaaataaaatttctaaattgcccaatgcctgatgttaaaataaagaagagctactttctaatcccatgaaaactaatatttttaaagatacaactctagcatagttccatgaaaactaatatttctaaagatataactgtagcagatggaaagtatctgctttttgaaagtagactggtaaaaatgtttactgctttccaaaatttattttccttggttagtgactgcattatctctgccaacgaaacttaggatcatgaggacagggatttttgtttgttttgttcacttctctatcgttaaggcctrgcaatagttcttgagccattctgttgttgaatagatcttataatgttggtaggatcattcaaattgacctaatttaacctcttaat

SEQ ID NO: 64857 - DNA, 1296 bp, Homo sapiens
ttcctaaattgtctgtctagaacatgttatcttgataatggggaaaaatgagcttttaaaaataaaagacaacgtaataatacaatttaaagataatgatatgtttgtccattaaaacttcgtaagaatgggctccctccatgaaaaattactcataggcctttactgaaagaacctttaaatggtaaggtacrccttttatgtgtttttgggtatgttttcagaatgtttcttaggatcaccagatcagaaggccacaatgaccaaccaccagcttgggcaagaccatgcaaaaccaaacttcagatttcagctaattgtaccccagaaacctcccaaagaaaatgtcaaaagcagctgggcacggtggctcacgcctgtaatcctagcactttaggaggctgaggcaagtggatcacttgaggtcagaagttcgagaccagcctggcccacatgacgaaaccctgtctctactaaaaatacaaaaattagctgggcgtgatggcaggcgcctgtaatcccagctactcaggaggctgaggcaggagaatcgcttgaactggggaggcggaagttgcagtgagccgagatcatgccattgcgctccatcctgggtgacagagcgagactctatctaaaaaaaaaataaattaaaaaaaaaatgtaaaaagcagtcttgatgaggtgttaaatcctaataaggtcttgcaatcaagtttttctcaaagcataacttcaattccattttatacttgaacaataaatatacttcaacaataacattttccttttattataaaaagaaacatgttcttccaactcctcaaaatataagatatctagttatgtagctgcctcttaactttttagcggtgtttttaaaaataggaaactatttgaaaacatgaacctactgattccaaagccctgcaatgatttagtgaagctcagtgtctcatactttgtttgttcacagcgtgaaccattatggagaaagcttattaaaaagttctcatttcacattacaaatccataatctaacgcgctaatcatactcattcaattgctgcacatccataaatgccattgtacacaatcatcattaaaattcactgtggaataataacttttaaaatctcatcttgaacaaaaagctatttgaaattaccatattatctttatttctagattaaatttggttaaatgcctttgcacgctttttaatataagaatctaaatataatgaagaaacaacccctaaaatattccattaccacagaaaatataaactgttaa

SEQ ID NO: 64858 - DNA, 1032 bp, Homo sapiens
ttctgtgtttgtataattttctatattatgggatcataatatactattcttttatatactactgttccaagtttgtctatttatttcagagttatcaatcattaacagcaacttaataccccatttctagtacatgaaaataccataatttgccaggcacggtgactcactcctgttttcccagtattttgggaggctgaggtggctggatcaccagaggtcaggaggtcaagaccagcctggccaacatggtgaaaccctgtctctactaaaaattcaaaaattagccaggcatggtggcatgtgcctgtaatcccagctacttgggaggctgagacaggagaatcacttgaaactgggaggtggaggttgcagtgagccatgccactggactccagcctgggcgacagagtgagactctgtttcaaacagaaaaaaagaaaataccataatttgcttaatcaacatacggtcactggattttttttttgttgttgccagaaaaagaaagcagtaaacaattgtgtgtgtgtgtatgaatatttatgcacatgtacgtatgtatatgtattttgtgtacttgtacaaaacagctttgtaggatagattcctagaagtggagttgctgaaatcaaaagatgtgaataatgtagatatggatagatatttatacattttccttccaaaaggttgttgtaccaatttgtaaagctaccaatagtattcaggtatgccccatgccctggccaatactagatattacagtttaaaacattttgacaatttaggaactgaaaaaatgtgattctgatggccttttgtcaatcaccattgaggctgaacattttttattatgaagagagttgtaattctttcttttctttctttctttyttttttttttttttttgagacggagtgttgctcttgttgcccgggctagagtgcatagagtgcaatggcttgatctcagctcactgcaacctctgcaccctgggttcaagcaattctcatgcctcatcctccctagtag

SEQ ID NO: 64859 - DNA, 780 bp, Homo sapiens
tttccacatagttaagtttatctagaaagttctttctctccttcagattataaaaacattaatccatctttttaatatatataattgtaatttataatttgtttggaatttattctgattttacctgtaaagtagggatctaactttgaatagactaattttccccaatgaggtataatgcaatattttatcaaatactaaaattctatattagtacataggtctctttctagacttttgagtaatccctttggttttgtaccagtattaagtcatttaggctactgtatttgttatttgttgaaataagtctttcttttatcagctatttgtttcacttttaaacacaaatgtaaaggtgttaagcctaaagtaaaagggattcttttactaaagttgtttctatcattgaagtgagaaaaatgtaaccagagggtgatgtggaactttccccatgaaaagcattgtagttgaaatgctaaaagttgtgcttaaagggagtttaagtggctttagttgtcttaaaaaaaaaaaaaaaagacaacagtgaagtatcccacatcagttgacacttcctttcatgaaaaatttctctgtagtgtgtaatgctgtttgataacattttacccacagtagagcttctttcaaaaktggaaccgatcctctcaaattttgctgctgctttatcaactaagtttatgtaatgttctaatttacttctggtcattttaacaatgtttcgtgccatcacaagatggtaacaattcagtcatatcttca

SEQ ID NO: 64860 - DNA, 725 bp, Homo sapiens
tgtttcccttgtcagaaaatttagaggccattgtagggtcattaactgacataatgtcaacattgttgtgtctcaggaaataatgaaactcagggatataaagagatttaaaggaaaggcaagtccgtggagcagtcaaaacccacagaacatttatgtattmagtttgctgtcttctatagacatatttgacagtgtcccaaaacaattaaaacagtagcatcaaagattgctgatcacaaatcaccataagagatataataataatgaaagagttttaaatattgggagaattaccaaaatgtgacacagagacatgaagtgatcacatgctgttggaaaatggtgctaacagacttgctcgaggcggggttgatacaaaccttcaatatgtaaaaacgtgcaatatctgcaaagtgcaacaaagaaaagcacaataacatgagatgtgcctataattgcatatcctgtatcatctgtaactgagctaaatattgttggcaccgggagaaatgtggcctataatatatagtttcctatttgcaaaaaaaaaaaagtatgtttaaacatgaattaatataaagttccaaatagcaaatagtagaagtcttaaagtggaagtagaaatgatttcagtgtttctgcctgcaggtcaaaaacacaaaccaatacatttcccaattgtttttttcaagcttgaatataattattcttattttacctga

SEQ ID NO: 64861 - DNA, 725 bp, Homo sapiens
tgtttcccttgtcagaaaatttagaggccattgtagggtcattaactgacataatgtcaacattgttgtgtctcaggaaataatgaaactcagggatataaagagatttaaaggaaaggcaagtccgtggagcagtcaaaacccacagaacatttatgtattcagtttgctgtcttctatagacatatttgacagtgtcccaaaacaattaaaacagtagcatcaaagattgctgatcacaaatcaccataagagatataataataatgaaagagttttaaatattgggagaattaccaaaatgtgacacagagacatgaagtgatcacatgctgttggaaaatggtgctaacagacttgctcgaggcggggttgatacaaaccttcartatgtaaaaacgtgcaatatctgcaaagtgcaacaaagaaaagcacaataacatgagatgtgcctataattgcatatcctgtatcatctgtaactgagctaaatattgttggcaccgggagaaatgtggcctataatatatagtttcctatttgcaaaaaaaaaaaagtatgtttaaacatgaattaatataaagttccaaatagcaaatagtagaagtcttaaagtggaagtagaaatgatttcagtgtttctgcctgcaggtcaaaaacacaaaccaatacatttcccaattgtttttttcaagcttgaatataattattcttattttacctga

SEQ ID NO: 64862 - DNA, 656 bp, Homo sapiens
taaattttacatagatcgtattgtctgatgaggggcttagtctagtacctcctctctctttcttaaagtaagaggttgaatatattaaggtgttaaagatctatcatctccacgctaaaatttgattaaaaattctatctcaagaaacagtaggtactgttaaaggaaatttaattctccttctgtaaataaacgttccttaaattcagagcacccacaatcatttctggtataatccaacttagtgaattcacactttggaaataatagcatagagattagtgcaagaaagatttacttttatctctagaaaatgtatttttttaaatggtaagtcattgtctagtgtgtttattttcactgttttgctcaaaggattttctgatgtacaaatcaatttgtgttaaaattctgagcaaagggaaaacatgtagctaaagcagaaaaagctgtcaagcatataatgtggaatttcatttcaggttaatgaggaaagatttttgcatcatacaattaaataaaatttaagtatttttaaaattttttattaatcacatactatgtaccaagtgttcttccagattctaaaatagaggataagaamaatttcagaagaaattgggcaaaaaggaaaaactgttaatctttattatttg

SEQ ID NO: 64863 - DNA, 671 bp, Homo sapiens
atagaattaaacctagttcttaagtcccaccaatttaatgttggaaaactttagtcccgttttgtaaataattgtaccatgtttcctaaggaagytagtaaattatagaaataaacaatttcaattatagattttggaattcaatattgtaaatcatggaaatgcacacgaaatatacataagaagaatatacaacaatgatgaaaataaaacaatattcatgatacttagcattgggaagaatttgcagcaactggaattctacactggtgggaatatagattacttcaattacattataaaactatttgtcagtatctgctaaagctaaacatataatgctgtatcacctaggaattctattccaagccatagacttaagagaaatgaaagcatgcatttacatgaagatttgagcatgaatgcttatagcagtccaaatttccattaacagtacactggagcaatacttttgttatcttcatgccatagaatcttacgtggccgtgaaaaaatcaaattatggctttttacaacaattggataactgtcacagatataatgatggatatctgtctatgtgtgatatgtgtatactgtgtatgtgtgtgtgtatccatctaaccactacccacccaccaatgcatcccctcttccccttcacacacaca

SEQ ID NO: 64864 - DNA, 716 bp, Homo sapiens
ccttattttctcttagcaatccagttattggttatkgtttcagattatatttcaggacctccttagattttttccttttgctctatgttaagtgggaaattaaaaagcaaacaaatagatacataaaataaaataaaatcctttcatattgccctttattatctcttagatgacaattacatgcaaatcaagagaggatcttcatgcatgcaaattaatttagtgttttccactttgacaatgtgacagtaggccagacggtgatgattcccgtcctcacctggcagctcagtgtctgcactgctgtgcgtctccgcccttctcaccttggccttttgagagatctggctggttttaggagcactgttactaaattcaacatgcatctagacttgagagttcttgttcacatctgatttgagaaagatgtttgaataaattctgtctgtcctgttgcatggaacgagaaacaggactaatgttttatggaaacctcaatctgcggttgaatgaattttatgataaatgagtgtgagaagactagtattgatattgccttctagtttggggcctaataaaaattttaatccttctcagaaaatatggaattgtcatgtcaataaatcttgtctgatacctaaacaagaagtcaatatttattaaatagacatgagaataggacttggtcttctataagtttactataaaaactaata

SEQ ID NO: 64865 - DNA, 560 bp, Homo sapiens
tcgtgacagcatcccgaatgaaatacaacaaatgagcttcttgtaaacaccagagagttggttattttaaaaatacattctcmtaagctgcccagtcccgtctgttcatctgttagcatttaggttttccactatttgctgtttgttgcctctgtttctcattccttatggtatttcttctttcctgctttctcttgggccactgaaatgtttttgtatttcatttaaatttacctattctgattctgactgcgtctcttcacataagctctgcaaggcctgctcaaagggctgtaacacgcaactcaaccccacatgctctccatggcacccacacatgtgcttccactggagcatagcagctctcttgcccacagccccaccgccgccaggccccacagccgccacagccccaccgccaccacaggccccacggccgccctggaaatggcactgcacaggccccacggccgccctgggaacggcactgcacaggcactgccggacactactcttgtcttcttgcaccatcactggcgtctccacaaacactcagtggg

SEQ ID NO: 64866 - DNA, 1386 bp, Homo sapiens
  misc_feature (1)...(1386): n = A,T,C or G
cctctgggctggggctgccttatctgaccccccagccactgtccctggctcagtaaaggttttcccacagamacctcagctctgctgggcccctcccaccactggacgccctccccgcaacccgaccctgtctcgcattttctgagggcgcctgctccctcggccccgcctaccaaacagctcagacttcacagaccagagaggacagagcagcacagctcagagttcaccaatcacaggacggggcagcacagctgagactccacccaccacaggacggggcggcgcactgagatctccacccaccgcaggacggggcagcgcagtcagactccacccaccgcagacggggcggcgcagctgagactccacccaccgcaggacggggcggcgcactgagactccacccaccgcagacggggcggcgcactgagactccacccaccgcagacggggcggcgcacgtgagactccacccaccgcagggacggggcggcgcacgtgagactccacccaccgcaggacggggcggcgcactngagactccacccaccgcaggactgctgttaaggctggtgaccaaggccacgttccccacaggatggggcagcacagggggcagagctctttttgggagggcaagatgagggcccggatgccaggccgggccagtgggcaggagcctctccacataggggcaggcgcctctccacataggggcaggcagcgcagcgtagagaacccgcacagctggccctcccagcaggtgcagcccaccagtgctggcgaggtcccccgtccctgccgtgggggctgcatccctcacacatgaacacactcctccctcgaggggccctggccagccagggagcgtggcaccacctgctgggctgggctgcaggcagagccaggtctggccttgaggaaggtggaggtgcggctggagcagctgtgggccgggagtgtggccagctggcactctgtgatgtgcggcccctcccctgcccaccgctgggccagacctgggctctcttggggagcagagggaggaaggacagatgcagggccggcggggacgtgcccatcggctggggtggccctcagcgtcatggggtgaggctggtgcctaccaggctccctccccaaactagggccagatggggcagaactgtgccccctgctccggccccagcttcaggaccccacccgggcaggccatggcggggcactggctgctttcctgctgatctggcccaggagcaaggctgtgaggaaggaagctcagagcacgtccagaacccgctctcccctcagcaaggctggctcagtgaccaggaaggaggaactagccagcctgagactggagcccccaccctaggcccctga

SEQ ID NO: 64867 - DNA, 1386 bp, Homo sapiens
  misc_feature (1)...(1386): n = A,T,C or G
cctctgggctggggctgccttatctgaccccccagccactgtccctggctcagtaaaggttttcccacagacacctcagctctgctgggcccctcccaccactggacgccctccccgcaacccgaccctgtctcgcattttctgagggcgcctgctccctcggccccgcctaccaaacagctcagacttcacagaccagagaggacagagcagcacagctcagagttcaccaatcacaggacggggcagcacagctgagactccacccaccrcaggacggggcggcgcactgagatctccacccaccgcaggacggggcagcgcagtcagactccacccaccgcagacggggcggcgcagctgagactccacccaccgcaggacggggcggcgcactgagactccacccaccgcagacggggcggcgcactgagactccacccaccgcagacggggcggcgcacgtgagactccacccaccgcagggacggggcggcgcacgtgagactccacccaccgcaggacggggcggcgcactngagactccacccaccgcaggactgctgttaaggctggtgaccaaggccacgttccccacaggatggggcagcacagggggcagagctctttttgggagggcaagatgagggcccggatgccaggccgggccagtgggcaggagcctctccacataggggcaggcgcctctccacataggggcaggcagcgcagcgtagagaacccgcacagctggccctcccagcaggtgcagcccaccagtgctggcgaggtcccccgtccctgccgtgggggctgcatccctcacacatgaacacactcctccctcgaggggccctggccagccagggagcgtggcaccacctgctgggctgggctgcaggcagagccaggtctggccttgaggaaggtggaggtgcggctggagcagctgtgggccgggagtgtggccagctggcactctgtgatgtgcggcccctcccctgcccaccgctgggccagacctgggctctcttggggagcagagggaggaaggacagatgcagggccggcggggacgtgcccatcggctggggtggccctcagcgtcatggggtgaggctggtgcctaccaggctccctccccaaactagggccagatggggcagaactgtgccccctgctccggccccagcttcaggaccccacccgggcaggccatggcggggcactggctgctttcctgctgatctggcccaggagcaaggctgtgaggaaggaagctcagagcacgtccagaacccgctctcccctcagcaaggctggctcagtgaccaggaaggaggaactagccagcctgagactggagcccccaccctaggcccctga

SEQ ID NO: 64868 - DNA, 1386 bp, Homo sapiens
  misc_feature (1)...(1386): n = A,T,C or G
cctctgggctggggctgccttatctgaccccccagccactgtccctggctcagtaaaggttttcccacagacacctcagctctgctgggcccctcccaccactggacgccctccccgcaacccgaccctgtctcgcattttctgagggcgcctgctccctcggccccgcctaccaaacagctcagacttcacagaccagagaggacagagcagcacagctcagagttcaccaatcacaggacggggcagcacagctgagactccacccaccacaggacggggcggcgcactgagatctccacccaccgcaggacggggcrgcgcagtcagactccacccaccgcagacggggcggcgcagctgagactccacccaccgcaggacggggcggcgcactgagactccacccaccgcagacggggcggcgcactgagactccacccaccgcagacggggcggcgcacgtgagactccacccaccgcagggacggggcggcgcacgtgagactccacccaccgcaggacggggcggcgcactngagactccacccaccgcaggactgctgttaaggctggtgaccaaggccacgttccccacaggatggggcagcacagggggcagagctctttttgggagggcaagatgagggcccggatgccaggccgggccagtgggcaggagcctctccacataggggcaggcgcctctccacataggggcaggcagcgcagcgtagagaacccgcacagctggccctcccagcaggtgcagcccaccagtgctggcgaggtcccccgtccctgccgtgggggctgcatccctcacacatgaacacactcctccctcgaggggccctggccagccagggagcgtggcaccacctgctgggctgggctgcaggcagagccaggtctggccttgaggaaggtggaggtgcggctggagcagctgtgggccgggagtgtggccagctggcactctgtgatgtgcggcccctcccctgcccaccgctgggccagacctgggctctcttggggagcagagggaggaaggacagatgcagggccggcggggacgtgcccatcggctggggtggccctcagcgtcatggggtgaggctggtgcctaccaggctccctccccaaactagggccagatggggcagaactgtgccccctgctccggccccagcttcaggaccccacccgggcaggccatggcggggcactggctgctttcctgctgatctggcccaggagcaaggctgtgaggaaggaagctcagagcacgtccagaacccgctctcccctcagcaaggctggctcagtgaccaggaaggaggaactagccagcctgagactggagcccccaccctaggcccctga

SEQ ID NO: 64869 - DNA, 1386 bp, Homo sapiens
  misc_feature (1)...(1386): n = A,T,C or G
cctctgggctggggctgccttatctgaccccccagccactgtccctggctcagtaaaggttttcccacagacacctcagctctgctgggcccctcccaccactggacgccctccccgcaacccgaccctgtctcgcattttctgagggcgcctgctccctcggccccgcctaccaaacagctcagacttcacagaccagagaggacagagcagcacagctcagagttcaccaatcacaggacggggcagcacagctgagactccacccaccacaggacggggcggcgcactgagatctccacccaccgcaggacggggcagcgcagtcagactccacccaccgcagacggggcggcgcagctgagactccacccaccgcaggacggggcggcgcactgagactccacccaccgcagacggggcggcgcactgagactccacccaccgcagacggggcggygcacgtgagactccacccaccgcagggacggggcggcgcacgtgagactccacccaccgcaggacggggcggcgcactngagactccacccaccgcaggactgctgttaaggctggtgaccaaggccacgttccccacaggatggggcagcacagggggcagagctctttttgggagggcaagatgagggcccggatgccaggccgggccagtgggcaggagcctctccacataggggcaggcgcctctccacataggggcaggcagcgcagcgtagagaacccgcacagctggccctcccagcaggtgcagcccaccagtgctggcgaggtcccccgtccctgccgtgggggctgcatccctcacacatgaacacactcctccctcgaggggccctggccagccagggagcgtggcaccacctgctgggctgggctgcaggcagagccaggtctggccttgaggaaggtggaggtgcggctggagcagctgtgggccgggagtgtggccagctggcactctgtgatgtgcggcccctcccctgcccaccgctgggccagacctgggctctcttggggagcagagggaggaaggacagatgcagggccggcggggacgtgcccatcggctggggtggccctcagcgtcatggggtgaggctggtgcctaccaggctccctccccaaactagggccagatggggcagaactgtgccccctgctccggccccagcttcaggaccccacccgggcaggccatggcggggcactggctgctttcctgctgatctggcccaggagcaaggctgtgaggaaggaagctcagagcacgtccagaacccgctctcccctcagcaaggctggctcagtgaccaggaaggaggaactagccagcctgagactggagcccccaccctaggcccctga

SEQ ID NO: 64870 - DNA, 405 bp, Homo sapiens
atcagaaaggtcctgggctccacctcaaggtcctctgctgccaagcccccaggaaaggccttctgaacacaggcagcarctctgctgacgagctccaggtcgatggcactcccctctcccttgtccggcccagcctagcccagtcagtgctcgggccagggacggacagacggacagacagatgggccgccctgccctgcagttgtgtacgcagctggaggcactcaaagtggctttcctgctggatggccctggagagagaaggggccgaccagcttctgcggtgcctggacggtgctgggctgaggctgctgcagctaggaccacagggcaccagccaacagaaatgccacagcagctcgcatggggcgcacagagcggcacgccccggcttccttctggctg

SEQ ID NO: 64871 - DNA, 1528 bp, Homo sapiens
ctgtacaggaggtgggtcagactgtcgtcccccgccacccacctgccatcccatgggtgggctcaccagtcggctcgttcaccagggccctagctctcaggccaggccgtggcaggctctgagcccagatgtgtccgtcggattagccacctgggaactgaggaccaggactgtgaagccatcctctaggtgggcagaccggccaccacatcctttttcaatctccattttaatttcttcatagaaatgatgtgaggaccgactggtgtaaagtgagactagtgtctgccacatcagaagtcctgccatatttgttttcattttttatataaaccagcagattctggcttagctcgctttgggttctgttacttacaaccaagagagcttggtgtcagaagtgggactgcaggacacagccccttcctgagcagtggggagctggcaggactcttgacacactgtttccttttgggcctccagtcatgggcctgagaaggctgacttctcaccgtgaatgtttagaggagggccaggagtgcgtgtgtcagccgctctcagagaagcaggtgcaggaccacaggtcaggaaggcttccggtccagggccagtagcctgcgaccccacagactgtcctgtgcctcactgaaccgtagcagccaaattcctttcctcagcctgtttcttaaggtaaaatgaacygggaaactgtaatccagggattggaatggatcctgattccctgggcccctcccaagtgccttctcttcagggtaccaacctcctgtgagctcagccacttggcagtccagggtcaaacagaggacggctcagcttccctctgtgtcctgggctctgagcggagccctgagctaactaagcctgactaacatggtgaccccctggctccctccagagagatgggtacaggcacagcttgaagttcagggcagtggctctcacctgggggtgattctgtcccctaccaggagactcatggcaatgtctggggacgttttgtcacaatggaggtgggacagctactagcttctgttgggctgagaccagggatgtggcccccaccccatcatcatctcccccctcagccatgtgcttagcacctgctccaatgatagacagctgggtgcagtccggcgcatctgagtccttcacgtgggagggaagtgtgcgtgggcctcccagggcagctctgtggacgccgcagtctctgcgtggaccctgctgaggcctgctgctggcctcctccaggccgcggtggactcccggccactggcctcacacagcatgggcctggacttgcccttctgctgcggcggcagaggggcagctgggccagggcgtcgtgccagtggagcccacggccctggctgccctctgtggcaggtatggctgggaccatccccgctctagctccaggggctgtgctcagcctgggcccctcactcccaaggctgggtcatggcaccctatccggacccttcccaagtaaggagtgggaagaaggctc

SEQ ID NO: 64872 - DNA, 1109 bp, Homo sapiens
aaacaaaaccatgccccatgtgcacactgaagatgatttaacagatttaaaaagggttaacagattaatcaaggtcgaatagggattatttccaggaagcaagcataatagagacctcccccttttcttatctatattattttagttccataataaataagcagcattttgtgatattaagctatatttttaattaaaggaatgtattcattatctgttgctgagtataaaattagtctaaaacagagtaggttaaaacaatacttatttattatctcataatttctgtagggcaggaatctgrtcatgacttctctgggtcccctggttcatggtctctcacaaggctgtaatcaaagtgtgggaccaggggttgtggtctcatctgcagtctcaactagggaaggaggtgcttcctggtcactcagtggctgttggcagcattcatctctttgtaggctgctggactgatggttttaattctttactagttcttttctaaaggcagctctcggttccttgcttgggggcccctacaacataacatcacgctttatcaaagtgtgcgagccaagaaagcaacagagagcatctgctagcaagaaaaaagtaccaatattttataacctaattatggaagtgacattccctcaatgttgccatgaatagcagaggcaggaatcattggcacctatcatagagactgcctaccacaaggagtccttcttgcccaaattattacatttagatccatctgactctaaaactatacccaagtgcttcagtttacagatgaggaaactgtgactcaagcaattcctttactcacccaaggtcaagtctagagtgagaaccaagatgtcctcagctccattttaattttcattacctatatttcgctgcttctaaatccaagcacagatcctacatcccaacagttttagggtttgcctgtggacaaccctccttctgaagattcaccaatagcatgaagtctctatgttactgacatcgtattgaatcacatagtagctgagtgactgtttaaggttttagagtagctcccttacctccccaaaaatgtacctcccaagtaaaaataatatttc

SEQ ID NO: 64873 - DNA, 899 bp, Homo sapiens
tgtataactaatgcagaagtggtttggcaggagaagacctggaggagttaggcaccctctgccatagctcaccattgctcagttgggtgtatgggacccctcttgctagattgacttctttcttttttttagtagataccagatatatgaaatttcatgttaaacttgcagatctgaagtcttatcaaattgttttcacgaagcatcacgactccagcaaaactcacaagatatggcactcggccctccagtttgtctcaaatcaatgacttggtcatgttttgttaagagatttaaagaatcagggagccagttggtcctcattttcagtaattatcttcgcttgagctgtgggcatacaacactttttctagatttgtagaatagtgttatgtcatggccctttattgaacactgatttgatcactgagtttctgtggctctctgtttcccatttgcaaagaaaaacaatcataaaattacattgctaaaaagggccctaaaatttccaggccaaagtccaaatttgtacatgagaaaaaaaggtgttgaggagtgaagttgctygcttggcttttagaggtcatttccgtccgtccctgcccatgaatccaggtcttcattttctcagtgttgtccttgcctcttccctttcaggcttataataacaaaagtaatcaatagaggcacaaaggaattcaaaagaatgataccagaagactaaagactattgatcattttacccttctgttaaaggatgttttccttttatttaaatgtttatatttttctaaaatatctttgaaattacagagattttttttttttcctttggcttacagaatgctgaggtcatgatatgatggatgcagtttggtgtagcagaaataatattgtaa

SEQ ID NO: 64874 - DNA, 695 bp, Homo sapiens
ccccaataaatgtagatttatttagaaaatacatacagtaatgtcttcttatctatgtagggaccctgcataagatacttctttctctgactgtattcctcatccttaaggcagagataaacagtatcattttcataggggtgttatgagcattaaaagagttaataagcaatatatttagaacagtgcccagagtctaataagttctaaataagtcatctattattattatattgtaaaatatatcccaaacagaaaattttaagtaatgacaaaatatgaagtaaatattttttaaatgtgtgacattattaaaatagggcacaaaagttttgagatcacagaaacattagttattaataaccctagccagagaaatgtgatttaatatgcaatagtacttttgactattttggtttacttggtgataaaggarttcaaggctctgtttttaaattatgtttatcactatagtactaggttgtaatggcttttagagtggaaaaagacattgtaaggaatctatgagaccaaaagaactacatttctgggtgcacttattaagtaatttaatcattgttcagttccatccacgtttttcaggtttttttgttagtttcatttaataaattttcatcttcactgatgtcactaagttgttctaaaaaagaatcagaagatactgaaatttatat

SEQ ID NO: 64875 - DNA, 697 bp, Homo sapiens
tgaagatttttaatgtctaaagagctcaatcatatatgatggagaaatagataaacttcatgtagggtggtttcttattaaacttaccctggaaaaattctttttccgccatcaaaatgactactcaatcagtgattacacttgcaaaatttatttattgcttacagtgggtatatatctctgggttaactttcccttaacggctcatcaaaaaaaaaaaaaaaaaatcagtccctgtggcagtgatatatggtcccaaaaatgttgacattatttccaactagaggtgagttctatgtctccaacctttcaatctggtcgcctcatgatagcttccatctatatagcatggcagaagtgacttccaagactgcatcttaaaattctgtcttctgtctacttgtcttggaataggcattctccagaggctccattttgggatgcttcctcccagctgccatgccatgaaaagctaaactatacaaaaaggccatgtgtaggtgctccattaaccatcccagctgagcccagccttcaccaaggtattagatatatgagtgaagaaacttgcatttgattccagccccgaaccattctggtcacttccaggcattcaattcttccctactgaggccccagagttcatggagyggagacaagccatccccattgcactctgctgaattcctgaccagtg

SEQ ID NO: 64876 - DNA, 719 bp, Homo sapiens
ttattaagtatcatgtgctacacacagatgactaaaacgcagtctctcaaaatttagcgcaaatggacagaaataagcaatttattaattgtaatttgataaattaaatgccacattttaagaaactggtctcagagggtagtgattcattctattcagaggaattattagagggatttacagtggttttcacctttaaaatgggcttagagggttaaataggagtttgtcagcctgatagagaggtgaagcaactttgtctcttaaaaaagaatatgtgaaggtgcagagctatgaaaagttcatgatatgttttgtggttggagtataaagtactgagtggacagtggtgagagatgaaactggaatggtagcctgaggatacatcacattaccaagtctgttccttatcttaatggcaataaggaactactgttgctttttggggagtgataaaataacaagaggcttttagaaatagatttctggtactgaagattaatcgtactatggaatatgagaaagtaggcaaatcttgctctagtatttagtatcacaggattccatcttgaacttaggaagggattgtttatctgtctataaatcactttaagaagcaacacaattattttaattattttaagcatcttgctgagaaatgaagtctccaaaagaagaaacytccctggaaacaggacattttggttgtaatggagctg

SEQ ID NO: 64877 - DNA, 879 bp, Homo sapiens
tgcacgagattaagcattctaatgacactaatgaaacttaaaagaatatagatcatcttctcttgaattaaatgactcactctaaataagaatagttaagacacataatcacggcccacagctgagtctgcagaagattctgctgcagagctgatgattatgtcaggctctcaggaaagcagaatcactgagtaagggacttgtgtgaggcagtagctggaagggatctgttaacacagccagtgtagccggcccaactcctctccagtgtgagagtctatggttataaatcacctaggattcagggccctggaagagttagaggtaaaaagaacaagataaattatttggactctaaaggcaaaatttaagtgtcatttgctccataaaatctttcactatcatcccagtcgacctacacagatctcattcaaattcctagacgttttctcttccattcatttggaacatttaggaagctgatttttaatgctggctatcataccaatttgactgccttatatatttaactagatcaataattcttcctggaagaatatttttcacacacacacacacacattcactcacttactctctctctctttctctctctccctccctccctccctgcttcatttgtagccatccacagaakttaaaacaataccgttcccttttactcattattcagtgattagaaggtaatacttagagccttaagcaagaggttggcaagcatgatcctggcaggtgtgacgtcaaataaattactttgtcttcaaggcttcatttcccttaaagtggacataaaaaatgctataggtttaagaatgatgattccaatgcgtacatagtgatcagtttctgcgcaatata

SEQ ID NO: 64878 - DNA, 879 bp, Homo sapiens
tgcacgagattaagcattctaatgacactaatgaaacttaaaagaatatagatcatcttctcttgaattaaatgactcactctaaataagaatagttaagacacataatcacggcccacagctgagtctgcagaagattctgctgcagagctgatgattatgtcaggctctcaggaaagcagaatcactgagtaagggacttgtgtgaggcagtagctggaagggatctgttaacacagccagtgtagccggcccaactcctctccagtgtgagagtctatggttataaatcacctaggattcagggccctggaagagttagaggtaaaaagaacaagataaattatttggactctaaaggcaaaatttaagtgtcatttgctccataaaatctttcactatcatcccagtcgacctacacagatctcattcaaattcctagacgttttctcttccattcatttggaacatttaggaagctgatttttaatgctggctatcataccaatttgactgccttatatatttaactagatcaataattcttcctggaagaatatttttcacacacacacacacacattcactcacttactctctctctctttctctctctccctccctccctccctgcttcatttgtagccatccacagaagttaaaacaataccgttcccttttactcattattcagtgattagaaggtaatacttagagccttaagcaagaggttggcaagcatgatcctggcaggtgtgaygtcaaataaattactttgtcttcaaggcttcatttcccttaaagtggacataaaaaatgctataggtttaagaatgatgattccaatgcgtacatagtgatcagtttctgcgcaatata

SEQ ID NO: 64879 - DNA, 651 bp, Homo sapiens
accctcctcggcctctcaaagtgctggattacaggtgtgagccactgtgcccagcctggacatttcttaacttatatactaagccatgtccttcctttgactaacgccctttcttcctggctcttaccaaatttttaaattatgcaatttgtagatttgcttggtttttgtctgtttcctccrcgtgcctgtaagctctgtgggggcaagaaccgtctttgtgtggctcactgaatccccggcctctacatggcacttggagtacatagatgctcccagacctttgttgaatgaatagattaaaagtgcagctgttcttattttccttcctgttataacccttgctctagccccctttttgccttgcttctgtttctgatttctcctccttcattttttttttttttttttttttgagacaggctcttactctcacccagcaggctggcgtgcagtggtgagatcacagctcactgtacccttgacctcctaggctcaaatgacccgcccacttcagcctcccaagtagctgggactataggcacacactaatttttgtatttttcgtagagatggggtctcaccatgttgcccaggctggtctcgaactcctgggggcaagagatccactcatcttggcctcccaaagtg

SEQ ID NO: 64880 - DNA, 651 bp, Homo sapiens
accctcctcggcctctcaaagtgctggattacaggtgtgagccactgtgcccagcctggacatttcttaacttatatactaagccatgtccttcctttgactaacgccctttcttcctggctcttaccaaatttttaaattatgcaatttgtagatttgcttggtttttgtctgtttcctccgcgtgcctgtaagctctgtgggggcaagaaccgtctytgtgtggctcactgaatccccggcctctacatggcacttggagtacatagatgctcccagacctttgttgaatgaatagattaaaagtgcagctgttcttattttccttcctgttataacccttgctctagccccctttttgccttgcttctgtttctgatttctcctccttcattttttttttttttttttttttgagacaggctcttactctcacccagcaggctggcgtgcagtggtgagatcacagctcactgtacccttgacctcctaggctcaaatgacccgcccacttcagcctcccaagtagctgggactataggcacacactaatttttgtatttttcgtagagatggggtctcaccatgttgcccaggctggtctcgaactcctgggggcaagagatccactcatcttggcctcccaaagtg

SEQ ID NO: 64881 - DNA, 651 bp, Homo sapiens
accctcctcggcctctcaaagtgctggattacaggtgtgagccactgtgcccagcctggacatttcttaacttatatactaagccatgtccttcctttgactaacgccctttcttcctggctcttaccaaatttttaaattatgcaatttgtagatttgcttggtttttgtctgtttcctccgcgtgcctgtaagctctgtgggggcaagaaccgtctttgtgtggctcactgaatccccggcctctacatggcacttggagtacatagatgctcccagacctttgttgaatgaatagattaaaagtgcagctgttcttattttccttcctgttataacccttgctctagccccctttttgccttgcttctgtttctgatttctcctccttcattttttttttttttttttttttgagacaggctcttactctcacccagcaggctggcgtgcagtggtgagatcacagstcactgtacccttgacctcctaggctcaaatgacccgcccacttcagcctcccaagtagctgggactataggcacacactaatttttgtatttttcgtagagatggggtctcaccatgttgcccaggctggtctcgaactcctgggggcaagagatccactcatcttggcctcccaaagtg

SEQ ID NO: 64882 - DNA, 651 bp, Homo sapiens
accctcctcggcctctcaaagtgctggattacaggtgtgagccactgtgcccagcctggacatttcttaacttatatactaagccatgtccttcctttgactaacgccctttcttcctggctcttaccaaatttttaaattatgcaatttgtagatttgcttggtttttgtctgtttcctccgcgtgcctgtaagctctgtgggggcaagaaccgtctttgtgtggctcactgaatccccggcctctacatggcacttggagtacatagatgctcccagacctttgttgaatgaatagattaaaagtgcagctgttcttattttccttcctgttataacccttgctctagccccctttttgccttgcttctgtttctgatttctcctccttcattttttttttttttttttttttgagacaggctcttactctcacccagcaggctggcgtgcagtggtgagatcacagctcactgtacccttgacctcctaggctcaaatgaccygcccacttcagcctcccaagtagctgggactataggcacacactaatttttgtatttttcgtagagatggggtctcaccatgttgcccaggctggtctcgaactcctgggggcaagagatccactcatcttggcctcccaaagtg

SEQ ID NO: 64883 - DNA, 1463 bp, Homo sapiens
tgggtgtagtttagcaggcttctcgtagagcagtggagtccctgtgttctacaaccttccctccggggcttttgtattcacccattctcacaccatttctggttgcaattgtgtgcaatgtttccccaaattcactgtgtatcagagtcactggagaaacaaaacaaaacaaaaaattgatccccagagcttgctctagactactgaatcagaatttcctgggccaagaatctgtatttttacaaagctctccagatgattctgataagcagccaggtttgacaatcactggtgtggtggaaagaattctgtttgcatctaagctcaaccaccaactacctaagcaactttagagatggcaactcttgggctatcaggaaacagagaaaatgatgcctatgtcacagggttattgaagaattaaaggaaattacatatgtgatctatcccaatgcaaatttagtaggctgcgttagttaatactctgctgatgacctagaagcttaaaagagtttttttctctaaaaaagtgtttagcttcctcttctgtgtttgattccttatgaaacttggtttcccctttcatcagtcaccaaggatcaggccatatgtagatgaatcataataccattatgccatgtgttctaagagccttccaagtgcattgctgcaagaaaagctcaacatttaatgtatattgtttttcgatatctctttccaaattgccagtacaatttccattcctgggaaattacatagacatgtctggatccagttcttttatctttgcatttccaactgctctgttttccttctttcttcccatcaaattcttatattttgacagttttaagaccagctcttccttgatcctttccttcctataatatattgaattgaagtgagcccatttcccttagtgagccttctctccaaacacaaaatactctgaagttcagattctccttctgtgagtgggttaacatcacacaaagtttgtggtttcatccatcataaacaagagtgttttacatgaactctgtttcttgtctcccaagaatcacagaaaggttggggcaaagtgaaataaattttcagaaagaaaagttacttattaaaaatagcagtgataaaaatatgtagattgatttagtaggaagaattcgtaaattgttttaacttaaaaggaaacactcttgcaggcattcacaatgaatcaggaggaaaacactttggcttcttcaaaaagctatttactctctttggtgttcacaaaacatatccaacaaaagcttttctcttaygatgcgagggaagaagcaaattgcatttgggagcatctgatcatacgtcactcgggatgctatgggttttgggtgtgtgcccagctgactgagccaattagcaacatagtaataggatagccgccgacagtgtttggtaccaaaccctccctttgcaaa

SEQ ID NO: 64884 - DNA, 602 bp, Homo sapiens
  misc_feature (1)...(602): n = A,T,C or G
tnnnnnnnnnnnnnnnnnnnnnnnnnnnnnnnnnnnnnnnnnnnnnnnnnnnnnnnnnnnnnnnnnnnnnnnnnnnnnnnnnnnnnnnnnnnnnnnnnnnngcaaccctagatccttcacatgacagtcaacaatagggtttgcactcctatgagattctaaatgctgccactgatctgacaggaggcggagctcaagccgtaatgttcactcgaccggggctcacttcctcctgaatgccccagttcctaacagaccacagaccagtattggttggtggctcaggggttggaacccctgatgtagctgatacctgactcctcaggagacaggcttttggaagcaaactgaacaccaaatagatgcactcccacagatgttgaagttggaagagaaagaaaaacatctatttttctgctgctgtttctgctatgagagatggtagctgcaggcagactcaccattcttgtgtcaagacaatgactttgggagtatcacacatcattggtagtgatgtggtggtggcagtgacaccaaccactatttcctgacctctggattccagctatgtgcgtgaccttgaactggttaaacygaactgt

SEQ ID NO: 64885 - DNA, 964 bp, Homo sapiens
tgcatcttagaattgtatagcatttgtgtcattttgctcatatcattttatgtgtttcttgtagatgaacaagaaaatgtttataaggctcttattccaacttttacattgaatttttaccagaacctattacagaaatcatactagaattgtattttcactgcataaagtcctttactttagattcattcttataagcccgatatgtatgattattacttatcttccagaaattgttaagttgttgatgaacaaggactccattgttcatttgtagcacatattttttcatgcctgcttagatcacattctctactgaaagaatgagtataggttgtcagatttataccacaaacagtttttcctgtccattgccaattgagctgtagatgagtattggacccaaagaaatccacccaactataggtcaaagggataaggtttcttttgcaaacatcttcaattggttgataatggtcttgggagttgaatggttatgaacattggtggattggagctcctctgacgaaggaaaaccagggctaagctgagttatggagatagacacgatgaataatctgagaaaactaatctgttgacaggcaaaaaatatcagaaataaaaaatccatgtagcccaaaaagggaagatggaagtgtgtgtcattgattcccatactttctttgtaagacttcaagcaatcraagctaatgttttcttgtttattttttttttaatcaactggctgtacctcttgcagtttgacttcaattttttatcttttaaaaagctaacttttatatttctgttctgtgtgggttcacttctttgtaaagaaaaagctttgccattaagtatctgtagtgagcagcaactctacaggatctatatgtatactgcacacagtgtaactacttgttgtaacaatttgggcttatagaaaaataaaatcattgaaaagatc

SEQ ID NO: 64886 - DNA, 2444 bp, Homo sapiens
gcccacaaaaagttctgctcttgccagttgccctgaagctctcatcctggcctctgcacccactcacctatgtgctcccctccctcaaggggttgaaagctgtgagctgagtaaatgagccaaccttttgcaagtccctgaaggggtcaagggaactatatcccatttcaatatgaggcaagttatccaatcattgcatactaattgcaaagagatctctcatatgaatttcttctgattatcaatctttcaaaatatattgagatttaagggataatcacatcaaaagaaacgacaagtcatagtcctgcctcaaaaaaatttctttactagaggagaaacagaaaaatgcaattaaatgcatgttaacgtctttatataaaaatcacacacaatcaaatgacatttattcacatcacagctaaagctggggtgattcagataatgggacccaaatgaggttagtgatcaagttttattagtggtgattcttcaataagtttgcttgtagaagttaaacacacgatgtttactgactcagaattcccacgcagcaaatctgattatatttattaagcattatctatgaaacaaaacttttttatgcactaggttaaaaaaatagtaagaaaatttgtttgtatttttaaaggaaaacaaacatttttttttgtgatctgtaagggaaagaaaagtatttacatgttaaggaagtaaattaaatgggatgttattgccgtgaagaattgctggacagttcaagtcaattgagattaatagtaatatttgtatttgtataattatttacatataacaattatctttcttagagttgtccttaaatagttttgggggttaaatttttactatctccattttattgatcatgaaagtgagactcagaatattcaaaggatactggaaaatggaagagtctgaattcaggtttcctgaatcctgattttgctctatttctgcatatatgccctggccgtgagaagagcctggaaatacatctaatttgatccagcaattaaatgaactcttaaaaaccagagggcccaatggaaatctattagtgcatataattagtcaagcagccaaatagctttcttctcccttggggatccctcatgctgtctgattgtttcaaattctgctgatatgtcattgtatgccattttatatggtccttttgtttcttcgttttttgttagatgattgaaactcactgacaaaattagacataaccaagtgggtcatactgtgagtttttaccttaaaaagtatcccttttctgttaatggaaaaaacaaagccctggttttcaaaatattttcttgctgcaatggaaatgcaaagttgatttagtatgcccatgagtttctatgtgacatcctgatactctgatgagaaaaaaaaaaatctaaaactattcatcactacagcagtagtgtggaattcttttcctaccaccatccattgtcaaaggagttaactgacctaagctcaccatgtctaagtgcattttattttggcatcagccaaaacactggcatattctccttgaaaaagactatgcattgtatctgggaggaatcaggaaacagtaatgagttattgctggttatctcttttttttttttaatttagtcccatgttaaaagagaactttaactgctatttatgagcttcatgccctagattacaagactttggcagaaggtggaattataacatcaaagtctaccgaacctattctggtttattttcatgtgtttatttgtaattcatacctcattacaaaataagcaattcaggacaaatgctgcagaagtgaacataacaggtgttcactggattgtaccaggcaaaccagaaggtatgtttcattctgaccacgtaccacactatcacagcacccttggtaagcggcaatacctcagaaaaacatagttgcatagtgtgcctaaggagactgggtgctagggttcctatcttgtcatataatcctgggaacaatactgggcctattatttgtttaataataggttaggaagcctaactcatttaataatgagttagggagcctatttacttatttaatgtatttatttgtagcagcttaaagaaaaacatattttattaattagtagaaaactataaaatttaaatgatgacmccaggtgcagtggctcacacgatcccagcactttgggaggccaaggtgggaggatcacttgaggccaggagttcaagaccaccctgggaaacagtacctcgtctctacaaaaataaaaattaaaagattagccaggtgtggtggcacgcacttgtatcctagctactcaggaggctgaggtgggaggatggcctgagcccaggagttcagggttgcagtgagctatgatcatgccactgcactccagcctgagtaacagagc

SEQ ID NO: 64887 - DNA, 637 bp, Homo sapiens
caatatatagctcttgacatgggcagttatgtgggacccgtttcccaccacccttgccaggaccccaagtttgtaaatggctaggattcctctcccattgtgtaagatgctctcctcccccaatttctacccagcttcccccactgcaatacaatctccaagcctcggctccttggccagggccttagaactgatgacccagtactttaacaactggaactgrgtctatgacaacataatagatcaggatgaaagcgaattgagtaaattaaagggaggcacacattcctatagtggcaaatgggggcaacaagctaacgtccttccaccgtgttcccaaaatccatctaccaaaagagagagagggaaagagagaaaagggaaagagagagagaggaaaagagagaaagagagatacacaagtagttaaagaaaaaacagtatataccctattcctttaaaagccagggtaaatttaaaacctacaattgataattgaagatcttctccgtgactctataacactccaatactaccttgttgtcagtgtaaacaagggcgtagcctgaaaacactgagaccactgacaacacatacctagccttcctatcaaaaattcttaatccactaacctgcg

SEQ ID NO: 64888 - DNA, 580 bp, Homo sapiens
aaaaaaatatttttttcctgaagtatttggaagaattcatcaggaaagcattctgaggctgcagtcayatttgtttttttgtgtgtgtggaaagattttcaattacagattcattctcattaatagatacaagattttgggatttcttctgtcagttttaagctgtatttttctgtatcatctaacttagcagatttattggaacaaattaagcttaagaacaggcaaaactaaccgagtgttagaatagtaatttcttctaggggtactgattgagaagaacatgatctggagtaacacagattttctccatctcgacctaggtcattatgtgagtgttaatataatttaaaaatccattaagtgtacttaatttaactttaatgtaaacatattacaatttaaaaattacatggaaaataaacttaacatatgattttgatgcttattcaagactgaaaattttgagttcaagtgtggcctgagagccgatttgagcacttactggagatctaaattttcaaagtgaatggttcctatgctaggatattttatttataccatttcctcctagcaagca

SEQ ID NO: 64889 - DNA, 766 bp, Homo sapiens
aataagaacataacaagagactaacaaatttcacattgtatgtttgcttctttcagtttgggacatgttgatgtattttaaaatttcacactagaaggaatagtcctcctaatttgtttatggacctctgcatcactagctgacctgaaactggtagatcaaacttcctgtggcccattgaccttagaaaaaaattatttagtaaatatttattaaccaactactctctcacatgcactattaaataaataagtgctggaaatgatttatatcaccagtagaaatttagaaaccactaattcgttttctgactcttagccattagacattcttcctcaaagccttctctactcaatgagatgaaaagkagtaatatgtaagtattaaaagttattaacataatgcttttaatttactcatatttcatgaattctattttcaaacacaaaacctaagaatatatatataacactgctaaacttcaaaacagtaatgtgccaattaatacatgttccaaaagttcttttagtataccaaattctaatacacctgcatgttcagcagcatgatgatatacactgggtgctctctagttgtaccgaaaatcttctggtacaaatatggctgtaagctgagtttccccagtcctccccaacctgtgaatacaaacggaatcacactaataataagaacccaaattctattggctcttgtcgccacctagcagaacctcagcaccttataaaagaatttctcaagtgcttct

SEQ ID NO: 64890 - DNA, 2842 bp, Homo sapiens
aacattcatacaagtctttgcgtggacctgtgttttccatgtagatggatcttaatctttaaaattcaaaattcccaggaatttgagaaaataagagaatgaaggaccaagcactgagatattctatttagagtttggatagaagagaagtctccaaggcagacttggaaagaaaggccagagaagtagaagcaaaccagttaagcatgatgtctctgaagccaagaaagaaaaggatttcaaatgtaggacttgacagctctgacaatgctgctgtgaagcaagataggaggtgaactgaagagtgtcaattatatttgataatgtccaagtgactgacaaccttagcaagatgaatttaggtgaagaagggtggtgaaaaccaaattggagttagcccaaaagcaaataaaaggtgaggaagtgaaataaatgtgtatacaagagttcttagaaaattgactgtgaaagaggtgattgaggggaaggtagagttaggaagaactgttttaaataagagatacaaaagcatgttggaatgatgatgggaaaaattcaatttgggcacagacacagggaaagtgccctatattaatccaatatgggcattttattatagaatgcatatgacaagggaactgagggtatctgcaagaaagatatttaaatgaacatgaaatgtaagtgaattgggaagaaaataaagataggagatgaagaggttgatggatggatgctcttaatgaagtaatgctgtagtggaagtggggaagaatagaagtagtggctgaataatggcaagtttgaggaagtgacttcagagcaaggcagtctctggcaatgacaattctagagtgtgaccatggaagtgaatggccaagtcaaagtgcaggaaaagtcatcatcactgtggaggtcaggcaactaagagacaaggtgcctactgtacaggttgtccacataggcattgaagttgccaagggctaagacaagagtgaggctagaaaacaacactgacaacaagcatactcatttctaggaaaaggtcagaccccctggtcaagatgaactcaacatgggaaggaagcattctaggggattggagtccatagcaaacaaatacaagctgtggggccactgcaggaggttttggagtctggcctcagattcaaaagttgtgaacatccatggggtgggggtggagggatgggggcacatgtctggcttttgtgggagctcttaattgcgtaaagctattttgtggcttaaggaaagaattctagagaaaaatctgtttctgctatttccagcagaagttgttcatatagtcaaagtgccagtcctatgagatacggccaccattattttatatttattactgtacttaatcttctaagaaaacaggattaactttcagattaaacaccatgtaaatgttgcactgtactttaattaaaatgaataagctaattaaaccagaaaaaaaagttcaaataagcccacgagagtaaagcattaaagcatataccctttgttaatgctttgtgatgtgagtaaagattatagcatattagagataaatattagttggcttttgttatattaaaggttcctggatcatatatcatactattaatggctagcttatattaattatgtctgcaaaccaaagcaatatttgacaatttatgatatatggtatatcataacatgactcaattctgaataggattgttagtatggattttaactctcattttgaatttagacttctgaaaggtggcaaatctttgtgtttatttaatgccattagaaataagcctttaatagaaaaaagactttgtaagactaaaagcagagatgcattcatttcatcccgcttgttacactaagatcctaagtgtataagggttcctctggagctattataccragtaaggggaagtgcctggtagctctcaatgagattcagtctacaactcattgctactgaagtcaggccatgctctgctgcgtaaatgtgcactctgggccgctttaacatggagattatgggttcaataggccattgctgctcttttgggcataaacacattcttgggggatttaaatatgtatactattgcccaagtccagtgtaatttggggtattgctcttatctgttatgtcatatatctttagtagggacactctcagtttgcaaatgagtaatttctccattactgttggtgtactgttcaaaccaatttcccagtttatccttcatgttgattgacacttagtatcccctcacttagcgtagattcttgacagttcctgtaacacagccctttttatttcaattgactctaagataatgggcagatggatgaatcacggatggatggatggatggatggatggatggatgataaataagtgatagatgatagatagatggatagatagatagatagatagatagatagatagatagggttggggtggaggtggaggtgggtaccaatctctgtctggtggtctcagagtcctcttctctatgtagaaccattcattattgagagaaagctggcaaagtgtcttaaagtgtcttcctccaaaaaaccaactacgtaaattatgcagaagccacacaccaggaactggtaggacatctatccaaatgcctcttagtcactttccagtagtctcagtaacacataacccacatccttaccattgtctgcctttataacacccactcttaaaacagttgtcccaatagtttgtatgtgtagtattagactcagccagtacatcactcacagttgaaaacactttttatctatttatctaataaac

SEQ ID NO: 64891 - DNA, 2842 bp, Homo sapiens
aacattcatacaagtctttgcgtggacctgtgttttccatgtagatggatcttaatctttaaaattcaaaattcccaggaatttgagaaaataagagaatgaaggaccaagcactgagatattctatttagagtttggatagaagagaagtctccaaggcagacttggaaagaaaggccagagaagtagaagcaaaccagttaagcatgatgtctctgaagccaagaaagaaaaggatttcaaatgtaggacttgacagctctgacaatgctgctgtgaagcaagataggaggtgaactgaagagtgtcaattatatttgataatgtccaagtgactgacaaccttagcaagatgaatttaggtgaagaagggtggtgaaaaccaaattggagttagcccaaaagcaaataaaaggtgaggaagtgaaataaatgtgtatacaagagttcttagaaaattgactgtgaaagaggtgattgaggggaaggtagagttaggaagaactgttttaaataagagatacaaaagcatgttggaatgatgatgggaaaaattcaatttgggcacagacacagggaaagtgccctatattaatccaatatgggcattttattatagaatgcatatgacaagggaactgagggtatctgcaagaaagatatttaaatgaacatgaaatgtaagtgaattgggaagaaaataaagataggagatgaagaggttgatggatggatgctcttaatgaagtaatgctgtagtggaagtggggaagaatagaagtagtggctgaataatggcaagtttgaggaagtgacttcagagcaaggcagtctctggcaatgacaattctagagtgtgaccatggaagtgaatggccaagtcaaagtgcaggaaaagtcatcatcactgtggaggtcaggcaactaagagacaaggtgcctactgtacaggttgtccacataggcattgaagttgccaagggctaagacaagagtgaggctagaaaacaacactgacaacaagcatactcatttctaggaaaaggtcagaccccctggtcaagatgaactcaacatgggaaggaagcattctaggggattggagtccatagcaaacaaatacaagctgtggggccactgcaggaggttttggagtctggcctcagattcaaaagttgtgaacatccatggggtgggggtggagggatgggggcacatgtctggcttttgtgggagctcttaattgcgtaaagctattttgtggcttaaggaaagaattctagagaaaaatctgtttctgctatttccagcagaagttgttcatatagtcaaagtgccagtcctatgagatacggccaccattattttatatttattactgtacttaatcttctaagaaaacaggattaactttcagattaaacaccatgtaaatgttgcactgtactttaattaaaatgaataagctaattaaaccagaaaaaaaagttcaaataagcccacgagagtaaagcattaaagcatataccctttgttaatgctttgtgatgtgagtaaagattatagcatattagagataaatattagttggcttttgttatattaaaggttcctggatcatatatcatactattaatggctagcttatattaattatgtctgcaaaccaaagcaatatttgacaatttatgatatatggtatatcataacatgactcaattctgaataggattgttagtatggattttaactctcattttgaatttagacttctgaaaggtggcaaatctttgtgtttatttaatgccattagaaataagcctttaatagaaaaaagactttgtaagactaaaagcagagatgcattcatttcatcccgcttgttacactaagatcctaagtgtataagggttcctctggagctattataccaagtaaggggaagtgcctggtagctctcaatgagattcagtctacaactcattgctactgaagtcaggccatgctctgctgcgtaaatgtgcactctgggcckctttaacatggagattatgggttcaataggccattgctgctcttttgggcataaacacattcttgggggatttaaatatgtatactattgcccaagtccagtgtaatttggggtattgctcttatctgttatgtcatatatctttagtagggacactctcagtttgcaaatgagtaatttctccattactgttggtgtactgttcaaaccaatttcccagtttatccttcatgttgattgacacttagtatcccctcacttagcgtagattcttgacagttcctgtaacacagccctttttatttcaattgactctaagataatgggcagatggatgaatcacggatggatggatggatggatggatggatggatgataaataagtgatagatgatagatagatggatagatagatagatagatagatagatagatagatagggttggggtggaggtggaggtgggtaccaatctctgtctggtggtctcagagtcctcttctctatgtagaaccattcattattgagagaaagctggcaaagtgtcttaaagtgtcttcctccaaaaaaccaactacgtaaattatgcagaagccacacaccaggaactggtaggacatctatccaaatgcctcttagtcactttccagtagtctcagtaacacataacccacatccttaccattgtctgcctttataacacccactcttaaaacagttgtcccaatagtttgtatgtgtagtattagactcagccagtacatcactcacagttgaaaacactttttatctatttatctaataaac

SEQ ID NO: 64892 - DNA, 863 bp, Homo sapiens
tgttttaattattcccaacacagtaaagaaactattatccctactttgtagagcaggaactgaacaccaaaaaaagattaaagaaaatgaaatgtaaagaatctccccaaccctatagcttcacaatagctttctgtcgttataagcagatttcacaaatcctagaaggaagcaagcactggctgaaggaagaagagtatcaaaaacactctttcacaatctaagtttgcagacaacttgaaagcaatgtccctgcactattaatagactgtaacctccccaaagtaagagaccatgtccctggcgtgtctgtactccacagaggakattcacggtgattgtttagttgaactaaggcagcgctggcccatgaactttctatgtaactcttcagagcatcccaggcatttctttgccagtagaggacactcaaagtttctagcaagttgatttccaaagtcataaactttctggacaatgctgtattcattaatcattgaaatgggatccatctttatctaatccctttctcctctcctaccaagtttcttggcagtttaaagcagatctggtaagtactgtacccaccacaaccactggattacatcccccatctggctttttactaagatttgtcatggtcaaatatgtggtattctattgagtgcgttagaaaattaagataaatgacaatagatttactctaacatcttttatactacaaacattatttgtaaaattctgcactagtctctagctaaattttctccagtcttccttatctagtgttaattctaagaaaccatttttcaataaatatttataagcacctactatgagatctgtactattctaagtacaag

SEQ ID NO: 64893 - DNA, 1254 bp, Homo sapiens
tgcagctactcagaaactgaggcagcaggatcacttgagcccaggaggtcaagcctgcaatgagccataatcgcacccccgcactccagtctgggtgacagagtgagaccctgtttcaaaataaataaataaataaataaacaaaatgtaaccattttctttccttcccccccctctttttttttttgaaacagagtcctcactctgtcacctaggctgcagtgcagtgatataatcatagctcaccrcagccttgaactcctgggcttaagcgatcctcccacctcagcttcccgagtagttgggactacaggtgaataccaccaggcccagctgattttttatttttatttttttgtagagatgaggtctcactatgttgcccaggctggtctagaattcctggcctcaagccatcctcctgcctcagcctcccaaagtactgggattacaggtatgagccaccatgcctggccaccattttcaaattaagtcagttatcaggcaaaatcatgtcatctaacaggatcacaatttttgaaccagaaggtgcattagaagacatgcctagctcaactccttcatattctggataaagaaatcccaaaaggacttgtgacattgccaggatcacatagagagaagtgtacctacaatcattgctctcactaaacacaaaaagcaaagaataaattatctatacttagtaaaattaaaaaagaagagagttacatgaacagaaagttattctgaaccatttttcatggttcacgctgctgctaaattgatctttttttaatccatcaaatgaacttttctttccatcatcatatgccccaaatgaagaccaagaaagtcaatttcatacaacgttttgaattggtggaggcaactgtgggcttcagtaatcaaggccaactcttgtaagctacagaaacccagctggactttgaaagatggtagcagttgaacttacatagcagagtgcttttagatgatcagaacaaagccatggatgaaattggtatttgctctgagctttaaaaatctagaaagcagtttcataaacccttcctccattatatcatacaaacctgtaaatatttttaaaaaacaaatatatatgtgactgtttttcagctaaaaataaatacttgtaaaagtgcaaacaacacagaggtatatagagtagaaagtaaaggttttccttaatcttcttcatgaatttcatatactttcaggtgttttataatg

SEQ ID NO: 64894 - DNA, 701 bp, Homo sapiens
ctttctttctttctttctttctttctttctttctttctttctttctttctttctttctytctctctctctttctttctctttctctctttctccctttctctctttctccctttctctctctctcttctttctttctctctctctctttcacagggtctttcttgctctgttgcccagactggagtgcagtggtgagatctcagccttctgcaacctctccctcttgggctcaagcgatcctcccacctcagcctcccaagtagctgggactacaggcacacaccaattatgctcggctaatttttttctttattttttgcagagatggggttttgctatgttgcccaggctactggatggttctttctaccacaccaggacacttcctccatttccttcttcctttgtggtaaagtcaggattatggtttcttcacagatattgctgagatgtgttaaatctacaacagaaaaatctgaaaggtctgtctgggtttaggctccaatttcctgaagaattaaaagaagcaggatgacctttttggcttatgaattggagtgggggtaggagagaccaaaaaggagacccggaagtttaggacagctttcctatgttttcaagagcctcagagtgagaaccccaaaacatcttcctatggctgccgtatggccaacatgaaaactaagtaaggaaaaaagga

SEQ ID NO: 64895 - DNA, 701 bp, Homo sapiens
ctttctttctttctttctttctttctttctttctttctttctttctttctttctttctttctctctctctttctttctctttctctctttctccctttctctctttctccctttctctctctctcttctttctttctctctctctctttcacagggtctttcttgctctgttgcccagactggagtgcagtggtgagatctcagccttctgcaacctctccctcttgggctcaagcgatcctcccacctcagcctcccaagtagctgggactacaggcacacaccaattatgctcggctaatttttttctttattttttgcagagatggggttttgctatgttgcccaggctrctggatggttctttctaccacaccaggacacttcctccatttccttcttcctttgtggtaaagtcaggattatggtttcttcacagatattgctgagatgtgttaaatctacaacagaaaaatctgaaaggtctgtctgggtttaggctccaatttcctgaagaattaaaagaagcaggatgacctttttggcttatgaattggagtgggggtaggagagaccaaaaaggagacccggaagtttaggacagctttcctatgttttcaagagcctcagagtgagaaccccaaaacatcttcctatggctgccgtatggccaacatgaaaactaagtaaggaaaaaagga

SEQ ID NO: 64896 - DNA, 528 bp, Homo sapiens
acccaggtaggaatcagatcttagttttgagctctggctcttttccgtttcacctggctgaccctggacaaaccatgttatgcccctctggwtctcactcctcagtatagatgagcaagctcaattaggatacctttaacatctttcctaggcctggaagtaggagtcactaacatggcaggttgacgttattgtaatagagccaccgtttccgatctgctagagatatgattttcagcccaagcatttgccatctgcctcttttgagtcttggctggtaatccatcaactgtgctagatataagatcttatccaatgaattaagtgatatttcttccatttttccatttagaagaggcacaaaagtacatataccatcctaataaaacagacttccattttttaaaaaatgtgactagcagcacaatactttcctagcacaccacctgccattatctctccaggtgtttactgtgggcagcaggctaacaaggcctaagcttcctcttctactttagagctcactga

SEQ ID NO: 64897 - DNA, 528 bp, Homo sapiens
acccaggtaggaatcagatcttagttttgagctctggctcttttccgtttcacctggctgaccctggacaaaccatgttatgcccctctggatctcactcctcagtatagatgagcaagctcrattaggatacctttaacatctttcctaggcctggaagtaggagtcactaacatggcaggttgacgttattgtaatagagccaccgtttccgatctgctagagatatgattttcagcccaagcatttgccatctgcctcttttgagtcttggctggtaatccatcaactgtgctagatataagatcttatccaatgaattaagtgatatttcttccatttttccatttagaagaggcacaaaagtacatataccatcctaataaaacagacttccattttttaaaaaatgtgactagcagcacaatactttcctagcacaccacctgccattatctctccaggtgtttactgtgggcagcaggctaacaaggcctaagcttcctcttctactttagagctcactga

SEQ ID NO: 64898 - DNA, 570 bp, Homo sapiens
tcaaagactatacgaagacggtttaaaaagtcccttcatatggagggagaaaaggtgttgaaaagcccacgagtatgtatttttaaagaaaacaacttggctaatcagattatcatcactatgatatatacctacattttagtttctcactgaccagacttaatatttaggaaatttgtgagaagtrattttttttctcttagaagactagacatccaagaaagccccatcattcagaagtagttttactgattgataagaataaaacagaattcagtgaaaaacttgttttgttcataaaagttgtaggattgatataaaataagaaactaagccctttcataaattcaggttcagcttgaagttttgtttattcaatttctaaatttaattcttctattacaatcatatattaccacttgtgacattattttactatcttgagcaatttgttgctatttatttctcaaccataactatttaccctcatcttttactctccatttccaaattcctatagattattcaactggagtatcagcctgggctaggggttgcagaccattgtta

SEQ ID NO: 64899 - DNA, 554 bp, Homo sapiens
aaaagactatatattgcatgtttccaactaaatgacattctggaaaaggaaaagtatgaagatcctaaaatattcattggttgtcaggagttccagggtagggatgggcagttggaacacaatgcatatttagatcaaactattctctataaaactctaatgaggatacttgtcattcttcatttgtctacacaaagaatgaaccctaatgtaaactatggacattagtcaataatgcattgatactggctcatcaatcataacaagtacaccaaattaataccagatgttattattagaaaaatagtgaggagagttagggggtatgtggaaattatacattctgttcaacttctccttaagccttattaagtaaaataaatgcatttggatgacattttactgtgaagtgaaatgtattcactaacaaatgtgcaattaagtttaaaaacaattaaatgtgaatttatattaataaaaatcctatggcygggcacagtggttcttgcctgtaatcccagcactttgggaggctgaggcggcagatcaccacg

SEQ ID NO: 64900 - DNA, 1018 bp, Homo sapiens
tcttatgaaatggttaaatttatgaagactaataaaacacatttctataatttctgtttattatccttaatttactaaatataattatttatttctagaaaacaaaaagtcaaatcatggcctacctttaatctcttttattttaggaaataagtgccaggaatgaaaccatttgtcagatcatacacctcttgtggactgaattgtgtcctcccaaaaaattcatatgctgaagtcctaattgtcaatgtgattgtattaggacatggagcttatagaggtataaggatgaatccccaaactaataagactgctgtccttttaagacaaagaagagacacataggatgcacacatagagaagaaagaccatgtgaagacactgcaagaaggcaaacttttgtaagccaatgggagctgcctttaggagaaatcaaatctaacactttagtcttggacttctaacytccagaaatgtgagaaacaatttactgttttttaagcaacccagtctgcagtattttgttatggcagtcctagcagactaatacagcaccttacaaaggaaaaaaaaattatatcaagttgccaaaattatttagttaaacatgtaagtatgtagcacatatatgacttatatatatagaatacataagcaatattttatcaccaacttgataggtcagtgagcacaagtgactttttatttagaagccatgaggaaagaatcagtgtagaatttttcaaagaaaatttaaaaattttaaaatatatacagtttctattaattgaatctgtgctttatacacacacacacacacacacacacacacacacacaaacacccccaacatgaccaaatcaataccacttaaaactaatgattacaaggaaataactcttatctatagggctaaaaacttgacctctattcttggtactgcctgttgccttataatggtaaatgtgatttttagcctatcaaaacttcttctggcctatcaactcttcagtttttt

SEQ ID NO: 64901 - DNA, 572 bp, Homo sapiens
cttttgatagactggattaagaaaatgtggcacatatacaccatggaatactatacagccataaaaaatggtgagttcatgtcctttgtagggacatggatgaaattggaaatcatyattctcagtaaactatcgcaaggacaaaaaaccaaacaccgcatgttctcactcataggtgggaattgaacaatgagaacacatggacacaggaaggggaacatcacactctggggactgttgtggggtggggtcacgggggagggatagcattaggagatatacctaatgctaaatgatgagttaatgggtgcagcacaccagcatggcacatgtatacatatgtaactaacctgcacattgtgcacatgtaccctaaaacttaaagtataataataataaaataaaaaaaagaagatgagtgtccaaaaattataacctactagagtcctcaaaaataagtttacctttgcctttatccaaaatgttaaaggattaggtgacaaaatactcaaagagtgggcttttgatgaagatcaaaatcaacaccaaaactttacattaatatcttgaaa

SEQ ID NO: 64902 - DNA, 590 bp, Homo sapiens
tgaaacagtttgctatttttagggtttttccaactccagcatttcaggagttcaatacaactcagcagattacagaaaacctaaatggtttcaatgcttcacacaatgtgctatgtcatgtcttgggtcaggactatagatctttgagtagattaagaattttgccctcatcatggacatagctagaagtcaacaggatcatatggaatcttttttatttttttgagacatggtcttactacgttgcccaggctggagtgcagtggctattcacaggtgcaattttagtttactatagtctcaaactcctgatttcaagtgatcctcctgcctcagtctcttgagtagctgggactacatgtgcataccaccgcatctggcttatactgacttttgaggtagaagtctctggaataygtttccttggaggtggacagtgtttatgtgtttagaagtaaagttttgccaagtctgggaggatggagatggagatcaggaagtcctaaattcctttggcatgtcaatgtttaggtctgaggggtacagagttaaaaaaattacccttactgccatacctgtttatcattatg

SEQ ID NO: 64903 - DNA, 514 bp, Homo sapiens
agaacagggcaggggtgcttctaggtgctggtaaagttttatttcttgctgtgagtagtgggtaagcaggtccactcaaaaactctgtgaaagattatttggagatggggcgtttggaaggtgattaggtcatgaggatggaaccctcatgaatagaaatagtgtccttataaaagaggcctcagagagccccttcccttcccatgtgargttacacaggaacaaaaatcaaaaacaaaaaagaccatctggaaagcaggccctcaaaacacatcaaatctgttgatgccttggatcttggacttctcagcccccaacaatgtgagaaacaaatgtttggtgtttataaccacccagtctaggatatttgttgtagcagtgtgaatagattaagacagatatacacatatgatttgtatacttttgagtttgtaagatggctctattagtcctcccatttccaggactaatctaatgctttctgactccaaggatcttcaaacactcagctaaa

SEQ ID NO: 64904 - DNA, 913 bp, Homo sapiens
tttctccctgaatctgttagcatttttatcacagataagttaaagataataatccaacctctgagccattcctgggccgccttctgttgacacttttctaccttgaccatgggccacagtgttatgcttatttttgtgtctcatagtgtttgattatatagagaacattttgcataaaaggatactagacactaaagttaatatttacctcctaaaaaaagcatgctgcttttcttgtcaactgctagaggagcacctaagttagtgtggttatctgttgttgttgagctgttcactcattcgttcattaattaattaattcatttgcctttcatttgactcagttcaccactggcttcaacacttttgaaagtgggatcaggactttcctttcaatagtgtttgggattatacattggaaaatttccagaaatttcttggtgctttacaggtgaaccaccagctttcctaactatgggtgatctctctctcctctatattctgactgccagctttttgggatgctggggcattctttttgtaccaggtgaaggactattggaaaatgttggcgtgtgggtgtagatacactctgactggggcttctttgaattctagtgtgtaatgccatatggtggttaaaagtttgttaaaagttctgttcattcctccttcaacccatctgtggtacatttgtcctcattcctgtcattatgcctgaaacataagcagctgtggtctttttttctcctatgaaaggcttggctcattcatttattgaattaatttagatttcttcstatcttcagattcctaattggcttaaaaactatgatgttgcaacttacttgatttgtttttgttattagggtgagagttatggtctcttttgactttctatatcctaatcaaa

SEQ ID NO: 64905 - DNA, 913 bp, Homo sapiens
tttctccctgaatctgttagcatttttatcacagataagttaaagataataatccaacctctgagccattcctgggccgccttctgttgacacttttctaccttgaccatgggccacagtgttatgcttatttttgtgtctcatagtgtttgattatatagagaacattttgcataaaaggatactagacactaaagttaatatttacctcctaaaaaaagcatgctgcttttcttgtcaactgctagaggagcacctaagttagtgtggttatctgttgttgttgagctgttcactcattcgttcattaattaattaattcatttgcctttcatttgactcagttcaccactggcttcaacacttttgaaagtgggatcaggactttcctttcaatagtgtttgggattatacattggaaaatttccagaaatttcttggtgctttacaggtgaaccaccagctttcctaactatgggtgatctctctctcctctatattctgactgccagctttttgggatgctggggcattctttttgtaccaggtgaaggactattggaaaatgttggcgtgtgggtgtagatacactctgactggggcttctttgaattctagtgtgtaatgccatatggtggttaaaagtttgttaaaagttctgttcattcctccttcaacccatctgtggtacatttgtcctcattcctgtcattatgcctgaaacataagcagctgtggtctttttttctcctatgaaaggcttggctcattcatttattgaattaatttagatttcttcgtatcttcagattcctaattggcttaaaaactatgatgttgcaacttacttgatttgttttkgttattagggtgagagttatggtctcttttgactttctatatcctaatcaaa

SEQ ID NO: 64906 - DNA, 632 bp, Homo sapiens
ttttagcgatttaaagagatcaattttgacactgtaaaatatttgttttgctttaaaagtcaattcaaattatggccactttggtctcatatattgtgaggctggtttgttattaggggcataaagagttaggattgttatgttttgttgattaactgaaccttttactattgtgacatgacatttgttatttattgctggaatttttttttttttttttgctatgaaatckactttgttattaatgcagccactcctgctcagctgcctttggaactgttaacatgtatctttttccatccttacaaccaatttgtgtctttacatttaaagtgcatttcttataggcagcctgcagttgggtcttgctttcttgctgagcctgacagtctgtattatagttgaggttcttagacaagtgtcatgtataatgtgactattgatacagttatgtttgtctagtagctgtttgattgctactagtcccaactgttctttgttccccttcttttcctgctttcttttagattagtcaactgttttttactattcaattttatatatatttttgggtttattagcgataactgttttgctatcttagtgtttaggatttttagtatataatttta

SEQ ID NO: 64907 - DNA, 632 bp, Homo sapiens
ttttagcgatttaaagagatcaattttgacactgtaaaatatttgttttgctttaaaagtcaattcaaattatggccactttggtctcatatattgtgaggctggtttgttattaggggcataaagagttaggattgttatgttttgttgattaactgaaccttttactattgtgacatgacatttgttatttattgctggaatttttttttttttttttgctatgaaatcgactttgttattaatgcagccactcctgctcagctgcctttggaactgttarcatgtatctttttccatccttacaaccaatttgtgtctttacatttaaagtgcatttcttataggcagcctgcagttgggtcttgctttcttgctgagcctgacagtctgtattatagttgaggttcttagacaagtgtcatgtataatgtgactattgatacagttatgtttgtctagtagctgtttgattgctactagtcccaactgttctttgttccccttcttttcctgctttcttttagattagtcaactgttttttactattcaattttatatatatttttgggtttattagcgataactgttttgctatcttagtgtttaggatttttagtatataatttta

SEQ ID NO: 64908 - DNA, 632 bp, Homo sapiens
ttttagcgatttaaagagatcaattttgacactgtaaaatatttgttttgctttaaaagtcaattcaaattatggccactttggtctcatatattgtgaggctggtttgttattaggggcataaagagttaggattgttatgttttgttgattaactgaaccttttactattgtgacatgacatttgttatttattgctggaatttttttttttttttttgctatgaaatcgactttgttattaatgcagccactcctgctcagctgcctttggaactgttaacatgtatctttttccatccttacaaccaatttgtgtctttacatttaaagtgcatttcttataggcagcctgcagttgggtcttgctttcttgctgagcctgacagtctgtattatagttgaggttcttagacaagtgtcatktataatgtgactattgatacagttatgtttgtctagtagctgtttgattgctactagtcccaactgttctttgttccccttcttttcctgctttcttttagattagtcaactgttttttactattcaattttatatatatttttgggtttattagcgataactgttttgctatcttagtgtttaggatttttagtatataatttta

SEQ ID NO: 64909 - DNA, 632 bp, Homo sapiens
ttttagcgatttaaagagatcaattttgacactgtaaaatatttgttttgctttaaaagtcaattcaaattatggccactttggtctcatatattgtgaggctggtttgttattaggggcataaagagttaggattgttatgttttgttgattaactgaaccttttactattgtgacatgacatttgttatttattgctggaatttttttttttttttttgctatgaaatcgactttgttattaatgcagccactcctgctcagctgcctttggaactgttaacatgtatctttttccatccttacaaccaatttgtgtctttacatttaaagtgcatttcttataggcagcctgcagttgggtcttgctttcttgctgagcctgacagtctgtattatagttgaggttcttagacaagtgtcatgtayaatgtgactattgatacagttatgtttgtctagtagctgtttgattgctactagtcccaactgttctttgttccccttcttttcctgctttcttttagattagtcaactgttttttactattcaattttatatatatttttgggtttattagcgataactgttttgctatcttagtgtttaggatttttagtatataatttta

SEQ ID NO: 64910 - DNA, 632 bp, Homo sapiens
ttttagcgatttaaagagatcaattttgacactgtaaaatatttgttttgctttaaaagtcaattcaaattatggccactttggtctcatatattgtgaggctggtttgttattaggggcataaagagttaggattgttatgttttgttgattaactgaaccttttactattgtgacatgacatttgttatttattgctggaatttttttttttttttttgctatgaaatcgactttgttattaatgcagccactcctgctcagctgcctttggaactgttaacatgtatctttttccatccttacaaccaatttgtgtctttacatttaaagtgcatttcttataggcagcctgcagttgggtcttgctttcttgctgagcctgacagtctgtattatagttgaggttcttagacaagtgtcatgtataatgtgactattgatacagttatgtttgtctagtagctgtttgattgctactagtcccaactgttctttgttccccttcttttyctgctttcttttagattagtcaactgttttttactattcaattttatatatatttttgggtttattagcgataactgttttgctatcttagtgtttaggatttttagtatataatttta

SEQ ID NO: 64911 - DNA, 632 bp, Homo sapiens
ttttagcgatttaaagagatcaattttgacactgtaaaatatttgttttgctttaaaagtcaattcaaattatggccactttggtctcatatattgtgaggctggtttgttattaggggcataaagagttaggattgttatgttttgttgattaactgaaccttttactattgtgacatgacatttgttatttattgctggaatttttttttttttttttgctatgaaatcgactttgttattaatgcagccactcctgctcagctgcctttggaactgttaacatgtatctttttccatccttacaaccaatttgtgtctttacatttaaagtgcatttcttataggcagcctgcagttgggtcttgctttcttgctgagcctgacagtctgtattatagttgaggttcttagacaagtgtcatgtataatgtgactattgatacagttatgtttgtctagtagctgtttgattgctactagtcccaactgttctttgttccccttcttttcctgctttcttttagattagtcaactgttttttackattcaattttatatatatttttgggtttattagcgataactgttttgctatcttagtgtttaggatttttagtatataatttta

SEQ ID NO: 64912 - DNA, 930 bp, Homo sapiens
gtttttgttttcttttaagaaacgaacgtgctcatttttgtcatatctttttgctctgtaggtgtcgctacctactggatagtgttgcacagcctgtgacaaaggataagtttgctttggaatctgaagtagagtactgtctcgtgaaattaattttctcwttctgaatctcattttttgtattattttcttctaaaacttaccgattgtctatctatcattgttttatgttagtattaaaacttttattagagataaccattttaaagaaataggaggggttaattttaattttttttttcactttgcaaataagaaatagttgataaatacgttgaggggtgtgatctgaaaaaaaaaatacatagtgacagaaaaatgttgtttgggaacgctttcccagaagagaggagatacaaattttgatctaggcttatctcagtaagtgtttttactttgagttgtatatcatatgagtatgactaataatacctctgtttaactgaatgtttgttacatcagatgacttattatgggaatcatgaaatcaccctgttacacacagcatatagtttctttttatttcttgtacacctattttaacatcataccatacttttgcagagagctatttctttatttttattcttggttctatataattagactaaaataatattagaaattgtggaaatttaactagacatggtatcatgtgcctgtagtcccacctattcaagagatcaagccaggagaacttcttgatcccaggagtttaagaccaagcttggcaatatagcaagagcttatctctaattttaaaaaattgtggaatattagaaatttaaattctgttctcacacctgtattagagagggtttaccctgtgttttccaagtcttttttattaagagtatactgtaaactctt

SEQ ID NO: 64913 - DNA, 930 bp, Homo sapiens
gtttttgttttcttttaagaaacgaacgtgctcatttttgtcatatctttttgctctgtaggtgtcgctacctactggatagtgttgcacagcctgtgacaaaggataagtttgctttggaatctgaagtagagtactgtctcgtgaaattaattttctctttctgaatctcattttttgtattattttcttctaaaacttascgattgtctatctatcattgttttatgttagtattaaaacttttattagagataaccattttaaagaaataggaggggttaattttaattttttttttcactttgcaaataagaaatagttgataaatacgttgaggggtgtgatctgaaaaaaaaaatacatagtgacagaaaaatgttgtttgggaacgctttcccagaagagaggagatacaaattttgatctaggcttatctcagtaagtgtttttactttgagttgtatatcatatgagtatgactaataatacctctgtttaactgaatgtttgttacatcagatgacttattatgggaatcatgaaatcaccctgttacacacagcatatagtttctttttatttcttgtacacctattttaacatcataccatacttttgcagagagctatttctttatttttattcttggttctatataattagactaaaataatattagaaattgtggaaatttaactagacatggtatcatgtgcctgtagtcccacctattcaagagatcaagccaggagaacttcttgatcccaggagtttaagaccaagcttggcaatatagcaagagcttatctctaattttaaaaaattgtggaatattagaaatttaaattctgttctcacacctgtattagagagggtttaccctgtgttttccaagtcttttttattaagagtatactgtaaactctt

SEQ ID NO: 64914 - DNA, 930 bp, Homo sapiens
gtttttgttttcttttaagaaacgaacgtgctcatttttgtcatatctttttgctctgtaggtgtcgctacctactggatagtgttgcacagcctgtgacaaaggataagtttgctttggaatctgaagtagagtactgtctcgtgaaattaattttctctttctgaatctcattttttgtattattttcttctaaaacttaccgattgtctayctatcattgttttatgttagtattaaaacttttattagagataaccattttaaagaaataggaggggttaattttaattttttttttcactttgcaaataagaaatagttgataaatacgttgaggggtgtgatctgaaaaaaaaaatacatagtgacagaaaaatgttgtttgggaacgctttcccagaagagaggagatacaaattttgatctaggcttatctcagtaagtgtttttactttgagttgtatatcatatgagtatgactaataatacctctgtttaactgaatgtttgttacatcagatgacttattatgggaatcatgaaatcaccctgttacacacagcatatagtttctttttatttcttgtacacctattttaacatcataccatacttttgcagagagctatttctttatttttattcttggttctatataattagactaaaataatattagaaattgtggaaatttaactagacatggtatcatgtgcctgtagtcccacctattcaagagatcaagccaggagaacttcttgatcccaggagtttaagaccaagcttggcaatatagcaagagcttatctctaattttaaaaaattgtggaatattagaaatttaaattctgttctcacacctgtattagagagggtttaccctgtgttttccaagtcttttttattaagagtatactgtaaactctt

SEQ ID NO: 64915 - DNA, 930 bp, Homo sapiens
gtttttgttttcttttaagaaacgaacgtgctcatttttgtcatatctttttgctctgtaggtgtcgctacctactggatagtgttgcacagcctgtgacaaaggataagtttgctttggaatctgaagtagagtactgtctcgtgaaattaattttctctttctgaatctcattttttgtattattttcttctaaaacttaccgattgtctatctatcattgttttatgttagtattaaaacttttattagagataaccattttaaagaaataggagggsttaattttaattttttttttcactttgcaaataagaaatagttgataaatacgttgaggggtgtgatctgaaaaaaaaaatacatagtgacagaaaaatgttgtttgggaacgctttcccagaagagaggagatacaaattttgatctaggcttatctcagtaagtgtttttactttgagttgtatatcatatgagtatgactaataatacctctgtttaactgaatgtttgttacatcagatgacttattatgggaatcatgaaatcaccctgttacacacagcatatagtttctttttatttcttgtacacctattttaacatcataccatacttttgcagagagctatttctttatttttattcttggttctatataattagactaaaataatattagaaattgtggaaatttaactagacatggtatcatgtgcctgtagtcccacctattcaagagatcaagccaggagaacttcttgatcccaggagtttaagaccaagcttggcaatatagcaagagcttatctctaattttaaaaaattgtggaatattagaaatttaaattctgttctcacacctgtattagagagggtttaccctgtgttttccaagtcttttttattaagagtatactgtaaactctt

SEQ ID NO: 64916 - DNA, 930 bp, Homo sapiens
gtttttgttttcttttaagaaacgaacgtgctcatttttgtcatatctttttgctctgtaggtgtcgctacctactggatagtgttgcacagcctgtgacaaaggataagtttgctttggaatctgaagtagagtactgtctcgtgaaattaattttctctttctgaatctcattttttgtattattttcttctaaaacttaccgattgtctatctatcattgttttatgttagtattaaaacttttattagagataaccattttaaagaaataggaggggttaattttaattttttttttcactttgcaaataagaaatagttgataaatacgttgagrggtgtgatctgaaaaaaaaaatacatagtgacagaaaaatgttgtttgggaacgctttcccagaagagaggagatacaaattttgatctaggcttatctcagtaagtgtttttactttgagttgtatatcatatgagtatgactaataatacctctgtttaactgaatgtttgttacatcagatgacttattatgggaatcatgaaatcaccctgttacacacagcatatagtttctttttatttcttgtacacctattttaacatcataccatacttttgcagagagctatttctttatttttattcttggttctatataattagactaaaataatattagaaattgtggaaatttaactagacatggtatcatgtgcctgtagtcccacctattcaagagatcaagccaggagaacttcttgatcccaggagtttaagaccaagcttggcaatatagcaagagcttatctctaattttaaaaaattgtggaatattagaaatttaaattctgttctcacacctgtattagagagggtttaccctgtgttttccaagtcttttttattaagagtatactgtaaactctt

SEQ ID NO: 64917 - DNA, 761 bp, Homo sapiens
ttacgaacagaaggactatttctcaacaatctgcagaaaagtgtaagctatttgaaacctgactattgtattatctactgattcttttttttttttctttcttatttttttgtagacagagtgttactcactgttgccctggctggagtgcagtggcatgatcttggctcactgcaacttccacctcctgggttcaagtgattctcctgcctcagcctcctgagtagctgggattacaggtgtgcaccaccacacctggctatttttgtatttttggtagagatggaatttcaccatgttggccaggctggtcttgaacacctgacctcttgtatgatctgcctgcatgggcccacaaaagtgctgggattaaagttgtgagcccccacacccggttcttatttattgattcttaattacacgcatttcatctactcttgactttttttttactgtagtagatgctgcatgtggcattgaaaaaacaaaatatggaacctttttttgaagaccaaaatgttgataaggtaaatgaagatgtggttaaaagccaacatagaataatcagagtcgagtcctgttcaccaactcactcttatctgttaatgatctctagttttacaatrgtaaattgttttatttggaaaatatttttcccatgctttattcacttgccatctccctgtctttataacgatgacaaggatcctataaaggaatggaagttctccaggtaataatagaaaagaagtgtaacaaca

SEQ ID NO: 64918 - DNA, 700 bp, Homo sapiens
tgtggtcttcacggtttctgtttcacggccttctacaagggccttgctgaaagcatttcccacactccatcgcccatgcaaccgttaatctcacaacacttgacatcccactaaattaacactatgcagaatatattgtgcaaaactgctctacgttataattaatgggagaggacagtttttaataggagtcttccaactgggaattttgatgtttgttcttgttaaagaggtcggcacagagcagcgaagtccgacgcctgggggtgtatcttgcccttgtctgtagcagccgtgttaacttgggtcaatgtcttgaaactttctcagcctcartttcgtccctaaaaaatgggacctcataggtggttgtgaggattaagtaaactatataatacacagcttagtgcccggaatatataagtgctcaggaaagattagtgaactattattacaaagacaggttaccgttgtatattgagggtgacatgtcctggcccccacctcacatcaccacacacatgtgtgaaagttgtcagaatcaaaatgaagtcactaatgttaaaaaaaaaaaaaaaagaaagccctgagaaatggagctggggaaggccatgaataaatgcctgatcaaaagaactatcacagagactctgcaaaaagcacaacattgcccaaacaccattgcaaccttacacaaaaa

SEQ ID NO: 64919 - DNA, 742 bp, Homo sapiens
gggatccaatatgttccagttaatgagacttctacttgcaccatagatacaaggcctggggaaagtcagttaaakgttgtctatctgcctttactttatggacaattaaagggcttttgttaaatccccaggacttagcaccatacctaccacgcaatatgtgtgctgcaaattttcactgaattgacttgtgagcattggtgcattagaggccaagattattgtagctcagaatctttatgtttggatctctgtaatggtgggagatacatggataatgagaggtaggcaaaataaataagccactttttttctccgtgattattcattgcccttttcatcctctctattccttttattttctcctgtgagtttgaaagggatgctatagcaaaggcccatgattctaacatacaagatgaccttgcagtaagtttgagagagacattaagatatttgtcctgaattcttatttaaaaaattcttttctaaaaaattcttttccttgaaataagcatgtagaattattcagattgttgtttaaatcatatctctgccccttactagtttaaagcttattgtttaatggtggggtttgaagaatttctcacttccctttccaagtttaaaaccaattgggagtaaatgatgtagctgatgttgaagaacattgtttcacagattggtgatgatttgactcctaatattgcatccttgaaataggtgtatttatctagttgct

SEQ ID NO: 64920 - DNA, 609 bp, Homo sapiens
gagcaggcaaattgcttcttcttcctttggctcaaatattttggaaaaatggagaaccctacagagctcaatggaaaagtacccatagaaytgtgcaattttctcatttttagttttcttttttttaatggatgtttcaagactaagatttgttgtggacttaagtttaaggagaaagaatttcaaagaaagtcaaaacacatgtgaaatgataaatgtgatgtttgtatcttgttagtgagctccttgaaagtgcttgctgctttgaggtagagtaaagaatattgggtaaataataattcctgcagagtgaaagttgttcatagagagaaatcttgcagagatgcttagaaaatctacatcacaagaaatccttttcagcagaagagtcttcctctgaacttgcacataggtcagaaagacttaaaatgcttctttattgataatggcagaagtttaaataagtttcaggtgatgtctatacaaatctataaattgaatcataattcaaagctccaatttgatctagtaatcctacttagagaacagacaacacttctgatgtgataaattaaaatagaatacaaagttgacacagttttctggtga

SEQ ID NO: 64921 - DNA, 636 bp, Homo sapiens
aaaaatactttattttctcacataagtatatttcggtagtaaaaagggatgttcataacagacatctctttcatctctttttcttttattttaatatgtttattttctcatacaggctttctcaagtgatataaaacctggctgcttgaagtagcacttacttatacatccttagatccacctgctttgaggatgcaatttaaaatattataaagaaagacttctgctttggtatgtctcaaattaactgataggatctaccactgggcccaaaggtgatgaatattatgattaaatcatgaaatataaggcccttttgatgcaagaccaaagagaaagatggaaaaggttgttgaagagtaattagccagttagctatatatattatgtgcctactacaaacattataaaaaataactagatcaaatcataactataggtaatatcacacactatagcacgaaaattataaattctttaaaaacaaactggggaagaaatttgcaggatctatataaagmgaattttttaatttactaaaaagtataatagaaattaggaaaaaagtaacattgatgtatttatttcactttagatttagaggaaatatgaagaaataataaaagagacaaaaaa

SEQ ID NO: 64922 - DNA, 2086 bp, Homo sapiens
agtgtaatagctcaattcaacaccagaaaaagctctcacaatcagagtgccaggagctatttgtgctccacgagtgatagagggtgacggcatggggatgacttaatcaggcagtgagtaatccaactttaaaataccaaattactgtttactcttttggaccatccctaggtcttgacatcaaagagcttacatatttgaaaaaggtattgtcttgaaaacagtattttgtaggaatcaattattttacaaaaacatttttgcctctgatgattgtcctttcctggccactaaaataggtgattagcctggaaattctgaagttagagataatggaatctgcatggcaccaaggctaagtcttttttttttatcattatactttaagttttagggtacatgtgcacaacgtgcagttttgttacatatgtatacatgtgccatgttgatgtgctgcacccattaacgcttcatttaacatgagtctttcagagtatctctcccctgctgatgttctcaagggaaaaacatacttcaaaggagagttttattcttctatttgtttcttcactctgtttacctcaaagatgatcagcaatgcaatcattttatggtttaaaatgtagacatcgttgagaaaactctgaagattgccggtagagacattctatgtcctaattgaaatttaaaaaaaaaaagcattttgaaagtgtattagatgttttggcttagtcacaactttaaaacaccagctgatctttgctacattttacagaaggcctttaaaaacaggtttcaggattttattttcttcatcttgcatgtgggtaattgaattgccgcttgctaactgagacatcactagttggtttcatgtgttctgttttaacattttaaaggaatattgggtttctttggccactgaagaatgggatattaaagtagaaaatttccagaaagtatgtttgtagactgacaaattattacagcttctgtggttagaattaagcctatgaaaatctttaatctctaaataactttttttctattacttctctgaagtcttgatgaggtggttgagaacattgtttctttaatggtaatatagcaataataataatttattgaacacataccatgccctaagcattatttagcatattatatgcattatcacatttcatctgcttttacactagaagaaactaaagcttagacagtttgtgtactggacccatgatgattcaggtgaggaggggtggtgctgggtagtaagcccaggtcagtgtggttgtaaatcagtgctgttaaccagtatgctaaaatagtccgcataacactactgcctttttaaattatcagcttctagcacagatctggcactgagagaatgctcaataatgtttgaaaaaaatgttcattgaattaagtgaaattgtagttctgrggaatggttattaaacataatcatatgaaaataattacttggccacactgggcatattttaaagagctcttcctccatttacctcaaaacttgtttctttaagtttttgttttcctaatattaattgagatatatttaacatataatcagctgaacaaattacatagcatcatttgataagttttgatatatatgtactcccatgaaactatgactacaatcaagaagtgaacagctccatcaccaggaaagtttactaggaccattttctaatccctccttcctactcccttcctattcccagacagccactaatctgctgtcacttttgattagtttttatatctagaacttttataaattgtgtaatataacatgtatcttttttctggatgctgttacttggcataataatttggagctagatccatgttgctgcatatataaatagtttatttatttgtattgctgatagtgaattgtattattcactattaacgaatatgaatatgccacaattgctttatcagatttatctgttaatgaacagatgattgtttctagtgttggctattacaaattaagctgctgtggacataagtgtacatgtatttgcatggatatttgctttatttttct

SEQ ID NO: 64923 - DNA, 2086 bp, Homo sapiens
agtgtaatagctcaattcaacaccagaaaaagctctcacaatcagagtgccaggagctatttgtgctccacgagtgatagagggtgacggcatggggatgacttaatcaggcagtgagtaatccaactttaaaataccaaattactgtttactcttttggaccatccctaggtcttgacatcaaagagcttacatatttgaaaaaggtattgtcttgaaaacagtattttgtaggaatcaattattttacaaaaacatttttgcctctgatgattgtcctttcctggccactaaaataggtgattagcctggaaattctgaagttagagataatggaatctgcatggcaccaaggctaagtcttttttttttatcattatactttaagttttagggtacatgtgcacaacgtgcagttttgttacatatgtatacatgtgccatgttgatgtgctgcacccattaacgcttcatttaacatgagtctttcagagtatctctcccctgctgatgttctcaagggaaaaacatacttcaaaggagagttttattcttctatttgtttcttcactctgtttacctcaaagatgatcagcaatgcaatcattttatggtttaaaatgtagacatcgttgagaaaactctgaagattgccggtagagacattctatgtcctaattgaaatttaaaaaaaaaaagcattttgaaagtgtattagatgttttggcttagtcacaactttaaaacaccagctgatctttgctacattttacagaaggcctttaaaaacaggtttcaggattttattttcttcatcttgcatgtgggtaattgaattgccgcttgctaactgagacatcactagttggtttcatgtgttctgttttaacattttaaaggaatattgggtttctttggccactgaagaatgggatattaaagtagaaaatttccagaaagtatgtttgtagactgacaaattattacagcttctgtggttagaattaagcctatgaaaatctttaatctctaaataactttttttctattacttctctgaagtcttgatgaggtggttgagaacattgtttctttaatggtaatatagcaataataataatttattgaacacataccatgccctaagcattatttagcatattatatgcattatcacatttcatctgcttttacactagaagaaactaaagcttagacagtttgtgtactggacccatgatgattcaggtgaggaggggtggtgctgggtagtaagcccaggtcagtgtggttgtaaatcagtgctgttaaccagtatgctaaaatagtccgcataacactactgcctttttaaattatcagcttctagcacagatctggcactgagagaatgctcaataatgtttgaaaaaaatgttcattgaattaagtgaaattgtagttctgaggaatggttattaaacataatcatatgaaaataattacttggccacactgggcatattttaaagagctcttcctccatttacctcaaaacttgtttctttaagtttttgttttcctaatattaattgagatatatttaacatataatcagctgaacaaattacatagcatcatttgataagttttgatatatatgtactcccatgaaactatgactacaatcaagaagtgaacagctccatcaccaggaaagtttactaggaccattttctaatccctccttcctactcccttcctattcccagacagccactaatctgctgtcacttttgattagtttttatatctagaacttttataaattgtgtaatrtaacatgtatcttttttctggatgctgttacttggcataataatttggagctagatccatgttgctgcatatataaatagtttatttatttgtattgctgatagtgaattgtattattcactattaacgaatatgaatatgccacaattgctttatcagatttatctgttaatgaacagatgattgtttctagtgttggctattacaaattaagctgctgtggacataagtgtacatgtatttgcatggatatttgctttatttttct

SEQ ID NO: 64924 - DNA, 739 bp, Homo sapiens
aagattatgactcacagaaagattacgtgattagaatttttagcaataaagtatttttaattaaagtacgtacactgtctgttagatataatgctattttttcttaatagactacaagatggtgtaaacataacatatacactgggaaaccaaacaggtgtgtgactcaattcattgtgatattcactttattgtggtggtctggactcaaatctgctatatctctgagatatgcctaatttgtagtcatttgcatctttttctaacctaatattctccctgttagattcactatgttgtgcatgcaacatttttttttacagctgagtaacatcacactgtatgaatatgccacatatatttaacttgcatctgatcatttttgattgacttttatattgcttataaaatttcaaagtaatttcgaggctgatatgatgttagcttcttgcaaataggatttacatgtgctttaaatggtatctggtggcaaattactttaacctaaataagttttaagatgcttttaaacgaggatttcaggaccagtgtatttctaattaactcttatttcctggttgtagctcttttgggaaaccaagctaaagtattggtgatgagccagacacccccattctcagcagatggggagcaccattttttatttactaatccctgtagttygccaaaagatctgctctgctcttaattcctccacttccttttctgtacctcaaga

SEQ ID NO: 64925 - DNA, 680 bp, Homo sapiens
cctgcaagacctattgtacctacaagagctgggagaatatgcctgagaatagattctaagagtgttttttcaaggagtccatgacaaaaaaaagaaaaaaagtgaatatggaagagctagagatgtggaagcactctgctggatataggatttttaacaagcaaagaccttaggagatgattcctcataacatggaaaaagtgaagagaaggcttacgttaagtgaagtttaattgtcatgacagatggtgaaagagaaaatttaaaggctcagatattgggcactcttgaataaatatgctataaatgttcagaacattcaccagacgattttgttctgtaggaaaacacagagccacatagratgatgctgggtaagaggcataaaagagttaactagttattcttctctgtagaccagagctgaaggtaagagagtccattacagaacttggcttgctgagagtagtatggaggtcataagacacttagcattcaataagagtactactaagcttgtacaagaatgaacaactgtgagagagaaagttggtcatgccaataagaagtcttgagacattgtccagttcacagccctacatcattttgtagacctggaatcctttgcttgactgaaatcttttcatacctggaacgcttcgcttccttcaaactagaag

SEQ ID NO: 64926 - DNA, 766 bp, Homo sapiens
agttttgagactcagaactgtaactgtcgtcctagcttttggactttgaatccagtgcatttcatagcttaggttttatgttgagagcttgcctgatcctgacctccagctctggcccagcccgctccttgtcctgatctctctgacaggctgtctttctgccaaataaaatgcaggccagccagatgctctgccagtccactcttggtcagtttggccccagtggaaataatggggtacatataggccatggctaatggggggactgactgccagtttgtcctcagggtcctttagccacacaccatgaggctacctttttgcttccatcctagaaggggcaggcagtgtatgtgtacgtggcagcagagaagggacagaaaaagtagggctcgtccgggatttgaacccgggacctctcgcaccctaagcgagaatcatacccctagaccaacgagccactggtagttatctcttgccagatgtgctctccctgccacatcagcagcagccacagcagcagtctgtagttcttagaacgggcctctctcctcccccttccaggctggcttccagcccaggccactgtgctccagcaggcattgctcctgagttctctcctsctcctccgtagctcattgcggagccacacggatgctcctctgcctgggcctccaggcagggtctattcttccccgtgacctgccagttaccccgccaggactcccaagcagagttcacggaggagctgctggggaagaggcca

SEQ ID NO: 64927 - DNA, 1001 bp, Homo sapiens
gaataaagaaaagttaaaaatgagttgactgtataaggtgatattttaatttacttatgttgccatctgtaatgcctatttaaaatcaacttacctaatatttcttaagtatataaaatatttagaccctctcaatgtaatcatatcatacaattacacaatatatttgtgtaactaaagtatataaccagaaaacttatttgttaatttataatgagaaatattgtcaatctggccaaatagaccatatttttcaggttgaccagcaaactttttcttaatgggaaaattaaattatcagaatatttcttagcataaattcagcaccatagacattagttctgtaattccaaggtacctgatacatcttcctgcacaayagatatctacatgctaggttactcaaaaacaaggtagcctgatctctcacctcttctccagcatagtgttcatttcttacagctggtgttagacttcaagactctacctctggctgaattgttcttcaaatttgttttgccttcaagcagggttactgtttcattttattgctctgatagtcacctttaagatgactttggatgtgggcttatttaacaggttagccctcagaagttgttttcttttaatcaaatggattatctggtgcagaatgaactttaaattttgaagcaggagaagtttccaatgagaatatggcatgtggttttcccgcattctgatgtggaaattgagtgggcccttttactcttgtactcaagtagctttccattattcttgaagacactcctgaatataagggaatagtcccaccagagccctgaccttaatgtaaatttgatttattagccaggctgaacctccacagagttagacatagtttatcttaaatctgaattcaggctacttgctactgaaaattactattttgttcttggaagttgtgtttataatttttgtttaaccatttgcttccaggagataggagatgagattatgcc

SEQ ID NO: 64928 - DNA, 737 bp, Homo sapiens
gcagatagtacatgtgaaactaaagatagcaattattattttgtcctgcactgactcacagttcaactttaaacaaagtgctaaatccctctgtgtctgcttttgcagtttcaaaacagagatatcatctgacattttcagataaaaggttgcaaaatagaatttaaatatgcctgtatagtactttggatccccctaagattagttctatcatcttagaattgcaattctaaaaattgccctaccacacaggccatgtgtgtacatgggagaagaaggttgggcttacaggttctggcatgactcagtgtttctgcagcccatttttctttctcarcctcttaaaaccttccttctctctagtccagtcattttaaacctattaaaacctgaaaatgtgaaagtattcttcacagttcttagctattatcttcaatgagagcagatccaaaggagcgcacttgaagaacttctctgtgcagtttctctaaactctaaccctgatagagccataaaacaagccagagaacccattttacctcctacccttccagaagacctgcttcacgactgttcaatctacctctttcacaagcactaaaaccatcaggcatgcttataaatctcagtgctaatacggaaacacacgacactgctatttttcatgtttctctggattgtttctatttattttctctttaagttgaagcaatgacatatttttggaggaaagcaga

SEQ ID NO: 64929 - DNA, 737 bp, Homo sapiens
gcagatagtacatgtgaaactaaagatagcaattattattttgtcctgcactgactcacagttcaactttaaacaaagtgctaaatccctctgtgtctgcttttgcagtttcaaaacagagatatcatctgacattttcagataaaaggttgcaaaatagaatttaaatatgcctgtatagtactttggatccccctaagattagttctatcatcttagaattgcaattctaaaaattgccctaccacacaggccatgtgtgtacatgggagaagaaggttgggcttacaggttctggcatgactcagtgtttctgcagcccatttttctttctcagcytcttaaaaccttccttctctctagtccagtcattttaaacctattaaaacctgaaaatgtgaaagtattcttcacagttcttagctattatcttcaatgagagcagatccaaaggagcgcacttgaagaacttctctgtgcagtttctctaaactctaaccctgatagagccataaaacaagccagagaacccattttacctcctacccttccagaagacctgcttcacgactgttcaatctacctctttcacaagcactaaaaccatcaggcatgcttataaatctcagtgctaatacggaaacacacgacactgctatttttcatgtttctctggattgtttctatttattttctctttaagttgaagcaatgacatatttttggaggaaagcaga

SEQ ID NO: 64930 - DNA, 1190 bp, Homo sapiens
tgataagactgttttgtcctagtcaaacaaggtttgtttcacattacaatgtctattaatacaattcactacattaatgatttaaaatgataatacaattaaaaattatatcatcagttcaatagacttagaaaaagccatgtatagtttctaggaatctaagcaaaacataaaattttctttaagacaaaattgtaaatcccactattacctgtttaacttaaactattacttgtttaactttttaaacctccttcatacttaagaatgagatataaagcatcttagatgaaaaacttagagatacagtagaacyattaggactaagaggctctgcctacacctggtagacccaacctcaggtacttttagtgactgctaaggatcttatgatttcatttgtttgtagaagtgagttgagaatttaaggaaatgaaaatatgcttttctactttaaaaatattctttctccccatatttatttagcttaaaacagttacaaaatttctttaaaagccaattattttaaaattagcaaaactggtaaaatgtgctgtgttactttttaaaaataaattcaagaggattacacacatcatcaacagtgcctttataaaatgacaggcaggtcctaggaaacagttttcagtactgtgatggttaacattaggtgtcaacttgattggattgaaggatgcctagatggctggtgaagtattgttcctaggtgtgtctgtgagggtgttactggaagagactgacatttgagttggtggactgggagaggaagacccaccctcaatgtgaatgggcaccataccttgggttgccaaccaggctagaacaaagcatgcagaagaagatgggataactttgcttaatgaatcttctggcttccttctttttcccgtgctggatgcttcctcccactcctctggcccttggacatcagactccaggttcttcagcctttggactcttggacttacaccaatggtttcccagggtctctggggcattcggccacagactgaaggctgccctgtcactccctggttttgaggctctcagacgcggaatgagctactactggcttctctcttccccagcttgcagatggcctatcatgggacttcgccttgtgatcatgtgaaccaattctccctaataaactccctttcatgtatgca

SEQ ID NO: 64931 - DNA, 1190 bp, Homo sapiens
tgataagactgttttgtcctagtcaaacaaggtttgtttcacattacaatgtctattaatacaattcactacattaatgatttaaaatgataatacaattaaaaattatatcatcagttcaatagacttagaaaaagccatgtatagtttctaggaatctaagcaaaacataaaattttctttaagacaaaattgtaaatcccactattacctgtttaacttaaactattacttgtttaactttttaaacctccttcatacttaagaatgagatataaagcatcttagatgaaaaacttagagatacagtagaactattaggactaagaggctctgcctacacctggtagacccaacctcaggtacttttagtgactgctaaggatcttatgatttcatttgtttgtagaagtgagttgagaatttaaggaaatgaaaatatgcttttctactttaaaaatattctttctccccatatttatttagcttaaaacagttacaaaatttctttaaaagccaattattttaaaattagcaaaactggtaaaatgtgctgtgttactttttaaaaataaattcaagaggattacacacatcatcaacagtgcctttataaaatgacaggcaggtcctaggaaacagttttcagtactgtgatggttaacattaggtgtcaacttgattggattgaaggatgcctagatggctggtgaagtattgttcctaggtgtgtctgtgagggtgttactggaagagactgacatttgagttggtggactgggagaggaagacccaccctcaatgtgaatgggcaccataccttgggttgccaaccaggctagaacaaagcrtgcagaagaagatgggataactttgcttaatgaatcttctggcttccttctttttcccgtgctggatgcttcctcccactcctctggcccttggacatcagactccaggttcttcagcctttggactcttggacttacaccaatggtttcccagggtctctggggcattcggccacagactgaaggctgccctgtcactccctggttttgaggctctcagacgcggaatgagctactactggcttctctcttccccagcttgcagatggcctatcatgggacttcgccttgtgatcatgtgaaccaattctccctaataaactccctttcatgtatgca

SEQ ID NO: 64932 - DNA, 1190 bp, Homo sapiens
tgataagactgttttgtcctagtcaaacaaggtttgtttcacattacaatgtctattaatacaattcactacattaatgatttaaaatgataatacaattaaaaattatatcatcagttcaatagacttagaaaaagccatgtatagtttctaggaatctaagcaaaacataaaattttctttaagacaaaattgtaaatcccactattacctgtttaacttaaactattacttgtttaactttttaaacctccttcatacttaagaatgagatataaagcatcttagatgaaaaacttagagatacagtagaactattaggactaagaggctctgcctacacctggtagacccaacctcaggtacttttagtgactgctaaggatcttatgatttcatttgtttgtagaagtgagttgagaatttaaggaaatgaaaatatgcttttctactttaaaaatattctttctccccatatttatttagcttaaaacagttacaaaatttctttaaaagccaattattttaaaattagcaaaactggtaaaatgtgctgtgttactttttaaaaataaattcaagaggattacacacatcatcaacagtgcctttataaaatgacaggcaggtcctaggaaacagttttcagtactgtgatggttaacattaggtgtcaacttgattggattgaaggatgcctagatggctggtgaagtattgttcctaggtgtgtctgtgagggtgttactggaagagactgacatttgagttggtggactgggagaggaagacccaccctcaatgtgaatgggcaccataccttgggttgccaaccaggctagaacaaagcatgcagaagaagatgggataactttgcttaatgaatcttctggcttccttctttttcccgtgctggatgcttcctcccactcctctggcccttggacatcagactccaggttcttcagcctttggactcttggacttacaccaatggtttcccagggtctctggggcattcggccacagactgaaggctgccctgtcactccctggttttgaggctctcagacgcggaatgagctactactggcttctctcttccccagcttgcagatggcctatcrtgggacttcgccttgtgatcatgtgaaccaattctccctaataaactccctttcatgtatgca

SEQ ID NO: 64933 - DNA, 1152 bp, Homo sapiens
atctgcagactacccttagcaacgtttatttttccaagcctcatttgcttcatctttaaaatggatgtaagactaatagtacttatcccatatgcctgtaaagaggtttaaaagggatacagattcaccgctgggaaaacacaggcagaaaaataggaggagtggaggacctcccctcagaccatcaggctggtcccacactggtgggaccccctcttgattttagctctgaactcttccccaggtgacctcccactggaacatccaggtatgtgttgtcatagaaacctttcagggacggtgcactcgagagcttgactgattttttttctccccaaaataacccaccctgtcagtcaagtaacacttaggcgaagtggttaggcaagtgagactgttttaccatcattaactgttgagcaggacgcctacttggggaatttccattctcccaagacacacagttaatagaaatgcaacagagattaataataatagggagatgatgatgatgatggcttggctaccatttttttttttttttttttgagacggagttttgctcttgtcacccaggctggagtgcagtggtgcaatcttggctcactgtaacctctgcctcccgggttcaagtgattctcctacctcagcctcccaagtagctgattataggcgcctgccatcatgcccggctaatttttgtatttttagtagagacggggtttcaccatgttggccaggctggtcttgaactcctgacctcaggtgatccacccgcttcagcctcccaaagtgctggggttacaggtgtgagccaccacgcctggtgatggctaccattgcttgagcttttcttccttgccctgttatatgttaggtgcttgacagacattaccaagtccaactttgagaagtmagtactagtagtgtgcgcattttacagaccaggattctgaggctcagagaggtgagtgttcgggctggtttgagttcagatgccaggtgccatgttctaaccatcaagctttattgcctctgaggaacctccagtggaaaggggtgctgggggaaggctctgttccttttgtccctgtctccaggacccaaaccatcagcttcatgctctttcttggtgagctctgaagctggaaa

SEQ ID NO: 64934 - DNA, 3633 bp, Homo sapiens
tccttacatgttgttttagttttagttttctttctcttaacgtattttatttttatcatattagtgaatattctttgcaaagaagatttttttttttttttgagacagagtcttgctctgtcacccaggctggagtgcagtggcgtgatctcggctcactgtaagctccacctcccgggttcacaccattctcctgcctcatcctcccgagtagcttggactataggtgcccaccaccacgcccggctaattttttgtatttttagtagagatggggttcaccatgttagccaggatggtcatgatctcctgacctcgtgatccgtccgcctcggcctcccaaagtgctgggattacaggcgtgcagctgcgcctggcgcaaagaagatttttaatggctgtataatattctctcattaggcatcagttactcacctcccttgcagaggcacgttgggtggtttaaggggttttgctatcataactaatgctgtggtgaacattcttgcacgattctttgcccccatccctgatccttttcgtcagcggttttctagaaatggaaattagcagtccagccatgtaaaccttcaaacaacctatcagttcttgaaacttcaggtgcagagcaatccaaatactagccttacactttgcattttcagtgatagacatttagaaagctggggttttttcctttcctaatgaagtttgatgtttttgccggcgtccagggaagtgatcctgagctgaggctgtcagtaaaaaagccatttctcagccaggccctgaggcttagcagcctcttccagcagcacagcctccaggagcgagagtctggtgttacataaagggtgccatctgcttggagcaactcgagagcagagtgaggaagtgtggcgttggcgttgcttttcaaaatatttgccatcttcagaaaccctgtcattcttcccatcagccacaaaagccagtgtttcttaaaatctggctctgagttcagcatggaggccctgggcctggcatggagtaccttggtttgttgcagagagagagagacggcaagggcagagagcacacaccacacatggctctgcatggctttccagaaaccaccctggctggatcaccctcagccactctgaattcgcaggcaagagaacctgtacttacccatgctttctgtaaaagtcatcttggctttaaggcagttgcaacatgaaaacattctaacacttcatgaatatcaagcagctggtttggtttttgacttgacgcttccattttgggtaatttggctatcagtgcactcaagcatgtgtgaaagactcacgcagagggttcagggttggggacagccccgctgctcctcaggaggctggccacatgacagtggtctgtctctgcactgggatgccatgtagctgtaaaaagagtccatgtggacccatctctagggctttttgttaggtgatcaaagcaaagtgcaggacaatataagtaatgtgctggctacatttttgtctaaagagggcaaaggaatttctctttttgttagcttataaatgcataaaaggagtctgaatggatgaaatttacagaggttactgtgggggtggggaggacaggagagagaattgccacctaggtcttaactctttcttaatatgtttgaactatatgaatgtgctatctattgaaaaataaaatttttaaatcaacttgagaaaaggatctgagtaatccctgtaatcctggctactagggaggctgaagtgggaggattacttgagcctaggagttcaagattatagtgagccacgattgcgccactgcactccagcctaggcaacagagcgagacctcgtctcttaaaaaaaaaaaaaacaataaaaattaaaaatttttaaaaattgaaaaaagggaggaaatgtaaatcttccagcacttcctcagtgtcagaccctgagctggacacttatgttgtacatgctcccaggggagacagcagcatcctccctcttacagaggaagcacagtgggaagtccagggtctcagctagtcagagactaagctgggatctgaaagcctcgcctctgtcattctcctacatcgcttctaacatgctacctgccttccttttaagtaaattgtgcaacattttattctccagaaatgttaataaggaagatctgcctttaaaattagcttaaaaatacaaaaattagctgggcgtggtggcgcatgcctggatcccagctactcaggaggctgaggcaggagaagcgcttgaacccgggaggcggaggttgcagtgagctgagattgtgccattgcactccaggctgggcaacagagtgaaattctgtctcaataaacaaataaagaaaaacaaaattagcttaaaagaggtttgtatcagtgtggaccatgttgacccagatctggccccaccattcaccagtgaccttgtgacagtgaggacagtgacagtgacctcgtcagcccagtgaggacacagttcttctttttttttttttttttcctgagacaaggtctcactctgtcacccagactggagtgcagtggcgcaatcttggttcactgtaatcttgaactcctgggctcaagtgatcctcccacttcagcctcctgagtagctgggattaccggtgcccaccaccacgcctggctaatttttgtatttttagtagagacggggtttcaccatcttggccaggctggtcttgaactcctaacctcaagtgatccgcccaccttggcctcccaaagtgctggaattacaggcgtgagccaccactcccgaccacagttgctcttctgaaggagtcatatgagaatgaagtgaaggcatctgaggaaagtgggtgacgcagggcctgactcaggaaaggcagctgggacatgcatctttggcctggtccacaaccagcgtctgcttccttcactttctaagaaagttattcaaaggctcatctgttattgagattttcctaagagattggagcctgccaagtccctcagtgaagggccatccttgtgagtgagcaccttcctacacaccttccaacagttcattagagcgtgaattagtgaaccatgtcctcctgtcctcaggttccaagttaggctttggatggcagttggcctttgcgatcctggacttaaccatgcctagcatctgtagctctttcaggactcaaggctaaggagggcacagaatggattctgtggatagatctgtcttactacttattgctgggaccacatgatttgagacccaggtcttcttgtgtggctggtggcagacttagcttcttaacatgtgagtccctcactcctggagggaccctgagtgaattgccgctcccacagtcagcttccagaactgactggcagaaattgatgagaggttctcagcctggtggagatgtcccacccgctcctgtgtgggaggccaggaagcagggtgtcatgcatgggagccacgagcttcagatgttcctgctagcccaccttcctcctgagtgccagactccacagagtccatggccctgggtgttggtcccargaataggactgtggctaacaaccagcccacagagtgagca

SEQ ID NO: 64935 - DNA, 3633 bp, Homo sapiens
tccttacatgttgttttagttttagttttctttctcttaacgtattttatttttatcatattagtgaatattctttgcaaagaagatttttttttttttttgagacagagtcttgctctgtcacccaggctggagtgcagtggcgtgatctcggctcactgtaagctccacctcccgggttcacaccattctcctgcctcatcctcccgagtagcttggactataggtgcccaccaccacgcccggctaattttttgtatttttagtagagatggggttcaccatgttagccaggatggtcatgatctcctgacctcgtgatccgtccgcctcggcctcccaaagtgctgggattacaggcgtgcagctgcgcctggcgcaaagaagatttttaatggctgtataatattctctcattaggcatcagttactcacctcccttgcagaggcacgttgggtggtttaaggggttttgctatcataactaatgctgtggtgaacattcttgcacgattctttgcccccatccctgatccttttcgtcagcggttttctagaaatggaaattagcagtccagccatgtaaaccttcaaacaacctatcagttcttgaaacttcaggtgcagagcaatccaaatactagccttacactttgcattttcagtgatagacatttagaaagctggggttttttcctttcctaatgaagtttgatgtttttgccggcgtccagggaagtgatcctgagctgaggctgtcagtaaaaaagccatttctcagccaggccctgaggcttagcagcctcttccagcagcacagcctccaggagcgagagtctggtgttacataaagggtgccatctgcttggagcaactcgagagcagagtgaggaagtgtggcgttggcgttgcttttcaaaatatttgccatcttcagaaaccctgtcattcttcccatcagccacaaaagccagtgtttcttaaaatctggctctgagttcagcatggaggccctgggcctggcatggagtaccttggtttgttgcagagagagagagacggcaagggcagagagcacacaccacacatggctctgcatggctttccagaaaccaccctggctggatcaccctcagccactctgaattcgcaggcaagagaacctgtacttacccatgctttctgtaaaagtcatcttggctttaaggcagttgcaacatgaaaacattctaacacttcatgaatatcaagcagctggtttggtttttgacttgacgcttccattttgggtaatttggctatcagtgcactcaagcatgtgtgaaagactcacgcagagggttcagggttggggacagccccgctgctcctcaggaggctggccacatgacagtggtctgtctctgcactgggatgccatgtagctgtaaaaagagtccatgtggacccatctctagggctttttgttaggtgatcaaagcaaagtgcaggacaatataagtaatgtgctggctacatttttgtctaaagagggcaaaggaatttctctttttgttagcttataaatgcataaaaggagtctgaatggatgaaatttacagaggttactgtgggggtggggaggacaggagagagaattgccacctaggtcttaactctttcttaatatgtttgaactatatgaatgtgctatctattgaaaaataaaatttttaaatcaacttgagaaaaggatctgagtaatccctgtaatcctggctactagggaggctgaagtgggaggattacttgagcctaggagttcaagattatagtgagccacgattgcgccactgcactccagcctaggcaacagagcgagacctcgtctcttaaaaaaaaaaaaaacaataaaaattaaaaatttttaaaaattgaaaaaagggaggaaatgtaaatcttccagcacttcctcagtgtcagaccctgagctggacacttatgttgtacatgctcccaggggagacagcagcatcctccctcttacagaggaagcacagtgggaagtccagggtctcagctagtcagagactaagctgggatctgaaagcctcgcctctgtcattctcctacatcgcttctaacatgctacctgccttccttttaagtaaattgtgcaacattttattctccagaaatgttaataaggaagatctgcctttaaaattagcttaaaaatacaaaaattagctgggcgtggtggcgcatgcctggatcccagctactcaggaggctgaggcaggagaagcgcttgaacccgggaggcggaggttgcagtgagctgagattgtgccattgcactccaggctgggcaacagagtgaaattctgtctcaataaacaaataaagaaaaacaaaattagcttaaaagaggtttgtatcagtgtggaccatgttgacccagatctggccccaccattcaccagtgaccttgtgacagtgaggacagtgacagtgacctcgtcagcccagtgaggacacagttcttctttttttttttttttttcctgagacaaggtctcactctgtcacccagactggagtgcagtggcgcaatcttggttcactgtaatcttgaactcctgggctcaagtgatcctcccacttcagcctcctgagtagctgggattaccggtgcccaccaccacgcctggctaatttttgtatttttagtagagacggggtttcaccatcttggccaggctggtcttgaactcctaacctcaagtgatccgcccaccttggcctcccaaagtgctggaattacaggcgtgagccaccactcccgaccacagttgctcttctgaaggagtcatatgagaatgaagtgaaggcatctgaggaaagtgggtgacgcagggcctgactcaggaaaggcagctgggacatgcatctttggcctggtccacaaccagcgtctgcttccttcactttctaagaaagttattcaaaggctcatctgttattgagattttcctaagagattggagcctgccaagtccctcagtgaagggccatccttgtgagtgagcaccttcctacacaccttccaacagttcattagagcgtgaattagtgaaccatgtcctcctgtcctcaggttccaagttaggctttggatggcagttggcctttgcgatcctggacttaaccatgcctagcatctgtagctctttcaggactcaaggctaaggagggcacagaatggattctgtggatagatctgtcttactacttattgctgggaccacatgatttgagacccaggtcttcttgtgtggctggtggcagacttagcttcttaacatgtgagtccctcactcctggagggaccctgagtgaattgccgctcccacagtcagcttccagaactgactggcagaaattgatgagaggttctcagcctggtggagatgtcccacccgctcctgtgtgggaggccaggaagcagggtgtcatgcatgggagccacgagcttcagatgttcctgctagcccaccttcctcctgagtgccagactccacagagtccatggccctgggtgttggtcccaggaatasgactgtggctaacaaccagcccacagagtgagca

SEQ ID NO: 64936 - DNA, 681 bp, Homo sapiens
aggacctggtgcaagttctgtaatagcccctcatctgtaaaatgggtttgaaaccacatcaaagggttattgtggggttcccagagagggtactcatagtacacagtatattaccaagcactaagtagataataaacagaggaggtgtggctgtagcatcaagctatgtgccaatatgggcaagtgtggtttgacgaagggagagcttaactgaaatctgtattctatttttcagggtttttttttttcccccaacacactgccaatacttattctaaaaattctaaaacaacattatttcccccargctctaaaacctccctgaagcagtgttaactcctggcttcttcatacattcatttgcaaacaaattcccaccttgaaaacccacagagaacacagcggccacctacattcatgaaaacaacatcaatcctgtccgctatgtttggctctcctgtcctggaacaaggggcagacccatttaatgagattttgggtgctggtgtatattcaacttcctccccacaattctatagaaacccagcagatatttaccttgatgaaaaccttcttaattactccacttggtgcagaaagaaccaaaaccccatgttggctgccaaatttaaaaggcactgccgagaatgagatgagggtcttagatctggataaatcatc

SEQ ID NO: 64937 - DNA, 681 bp, Homo sapiens
aggacctggtgcaagttctgtaatagcccctcatctgtaaaatgggtttgaaaccacatcaaagggttattgtggggttcccagagagggtactcatagtacacagtatattaccaagcactaagtagataataaacagaggaggtgtggctgtagcatcaagctatgtgccaatatgggcaagtgtggtttgacgaagggagagcttaactgaaatctgtattctatttttcagggtttttttttttcccccaacacactgccaatacttattctaaaaattctaaaacaacattatttcccccaagctctaaaacctccctgaagcagtgttaactcctggcttcttcatacattcatttgcaaacaaattcccaccttgaaaacccacaragaacacagcggccacctacattcatgaaaacaacatcaatcctgtccgctatgtttggctctcctgtcctggaacaaggggcagacccatttaatgagattttgggtgctggtgtatattcaacttcctccccacaattctatagaaacccagcagatatttaccttgatgaaaaccttcttaattactccacttggtgcagaaagaaccaaaaccccatgttggctgccaaatttaaaaggcactgccgagaatgagatgagggtcttagatctggataaatcatc

SEQ ID NO: 64938 - DNA, 637 bp, Homo sapiens
acttggatgaccaatgacacagccagatgaccctcccatacaacaaccctgaacagggacactgaaggctcatttgcatccttgctctaacattcactacacgactgactttgggtggctcatttaacctctctgaatctcacttttcgtgtccttttatgtggatatagtgacccccatctcactgtggaagatgcaacagttgaaagaaatggagcctgtgaaagcactttgtgaaccccagaggtactactttataaaatgaatatgtgtgtttaagagatagaaatgtaaagccctttcttctcacaaacatgagaccagggctggaataggagtcctgctggacttcccagcatgctggagttggtaaaagagagctagaactcgtgtcatctcccactgtttggtcaacaaatatggggaagatgagttattttctaaatatcttctctgtgcttaaaaatttgcagccacaacagggctctcaagtctgaactttgcaaagtctaaaaatgtattctctctctgacttggtaaaagcattgtctatccataagtcctcctggcccaaattttactccwccctgcctctgaaaggcagagagtacggcactaatatttatcaaactataca

SEQ ID NO: 64939 - DNA, 1293 bp, Homo sapiens
ataagaacaaagtgataggggctgggaacagtaaatagattcaaaataaagctattttaaaatgaaagccctattagacgaggctgaataaaaatagcttctagaacttgggactactttaattgacaataatgcctttaagatcaagttatggggcttggggagaggcagggaacaatcttgtatagttctaggtatcaggactaaaggaatgacaatgaccttttttgaagcaggaactcatcagcattatccctagggctgtcattgtcctgactagatactgtcatggtgccaccatcccacatgactggctgcattgttcccacgtggtgaactctctctgactctcagctggtccagtgctagttcttggaacactcctaaggcctttctgcctctgctttttgcctgatcctgtgacccaacattgaacctttygaactgattttgaactcagttcttcttttttttgagatggagtctcgctctgtcgccaggctggagtgcaatggcgtgatctcggctcatggctacctctgcctcctgggttcaagcgtttctcctgcctcagcctcctgagtagctgggatgacaggcatgtgctgccacacccggctaatttttgtatgtttagtagagatggggtttcaccatattggtcaggctggtctcgaactcctgacctcatgatctgcctgcctcggcctcccaaagtgctgggattataggcatgagccaccgttcctggccccagttcttctgttaatggggctgaccgtggtctctccattcatctctgttgaagccaggctggcttgaccactgtggttcttagctatcttcttctattctgtttttttgttttattttattttattttatttttcagagatggagtcttgctctgtccagcccaggctggagtgcagtggcacgatctaggctcactgcaacctctgcctcctaggttcaagtgattctcttgcctcagcctccccagtagctgggattacaggtgcgcaccaccaagcctggctaattttgtgtttttagtagagatggggtttcactatgttggccaggctcatctcaaactattgaccccaagtgattgggattacaggcgtgagccactgcgcccagcctatcctcttctattctgatgagcatggttttattttctatccttggcttccccttatttattttctcaacctttacacattgattggcataggcctaaatttaatgccattcaaggcatacatactaattgcctcattcattttt

SEQ ID NO: 64940 - DNA, 573 bp, Homo sapiens
tcccacctcagcctcccagtaagctcgaccacaggcatgtgcaccatgccagctaattttgtatttttactttttgtagagacaggatctcactatgttcaactacatttttaaagggccctgggtgctgtgtccctctgtctgatcttgaagaatgtttgtctatcaccgttatactcgaaggacagcttggcaaagtgcaaagttctcagaccaggctcacaggcaagttcttcctggtatactaacagcaccactttctgaatcgaatccgcagaggcagagggcaaacccttagcagagatggaaactatggcaactggccaggtgcggtggctcatgcttgtaatcccagcactttgggaggctgaggcaagtggatsgtctgaggtcaggagttggagaccagcctggccaacatagtgaaaccccgtctctactaaaagtacaaaaattagctgggtgtggtagcaggcgcctgtaatcccagctacttgggaggctgaggcaggagaatctcttgaacccaggaggcggaggttgcagtgagctgagatcccaccattgcactcc

SEQ ID NO: 64941 - DNA, 734 bp, Homo sapiens
gaatctaggattttgggagctcagtgaaagaccaagaaagagcctcagggaggaaatgatgttgcataaaggggggaggtaagattgagggagactggagcctttggggacaggggtgcagttaggtgagcatatggaattgggaactggtgtggccgaggtgatgaggaagatgttttacgtcacgtgactctcttggacagcaaggggctgtaggagattttgtacatttgctttgaaaaagagctgtgagtatatttctgctaaagacattttgatagtcaatttgacttttttttttttagttttaagaaagtatgtaattgcatcacaattaaytcttcaattccaaattgattatattcgacaaagcgtgatatttttctttagtttatcatcaaatcatagttagtctgttcactgccatctcaaaatagttgagacagaaactgataatttcatatactcagtttccgaatttcttggtaataaagtaatttatatgcaatatgctaatatatttggataaagaggtgtactatggacaaccaatgaaaacacttaacatctataagctattctttttgaaaataattttattctcaaagtgaattctctttatggaacttttgatattataaagatacacgaaattggacaatctatataaatccttcataataaattttatttctccaatgtgtataataagacatcaaacagaattccccttt

SEQ ID NO: 64942 - DNA, 734 bp, Homo sapiens
gaatctaggattttgggagctcagtgaaagaccaagaaagagcctcagggaggaaatgatgttgcataaaggggggaggtaagattgagggagactggagcctttggggacaggggtgcagttaggtgagcatatggaattgggaactggtgtggccgaggtgatgaggaagatgttttacgtcacgtgactctcttggacagcaaggggctgtaggagattttgtacatttgctttgaaaaagagctgtgagtatatttctgctaaagacattttgatagtcaatttgacttttttttttttagttttaagaaagtatgtaattgcatcacaattaattcttcaattccaaattgattatattcgacaaagcgtgatatttttctttagtttatcatcaaatcatagttagtctgttcactgccatctcaaaatagttgagacagaaactgataatttcatatactcagtttccgaatttcttggtaataaagtaatttatatgcaatatgctaatatatttggataaagaggtgtactatggacaaccaatgaaaacacttaacatmtataagctattctttttgaaaataattttattctcaaagtgaattctctttatggaacttttgatattataaagatacacgaaattggacaatctatataaatccttcataataaattttatttctccaatgtgtataataagacatcaaacagaattccccttt

SEQ ID NO: 64943 - DNA, 734 bp, Homo sapiens
gaatctaggattttgggagctcagtgaaagaccaagaaagagcctcagggaggaaatgatgttgcataaaggggggaggtaagattgagggagactggagcctttggggacaggggtgcagttaggtgagcatatggaattgggaactggtgtggccgaggtgatgaggaagatgttttacgtcacgtgactctcttggacagcaaggggctgtaggagattttgtacatttgctttgaaaaagagctgtgagtatatttctgctaaagacattttgatagtcaatttgacttttttttttttagttttaagaaagtatgtaattgcatcacaattaattcttcaattccaaattgattatattcgacaaagcgtgatatttttctttagtttatcatcaaatcatagttagtctgttcactgccatctcaaaatagttgagacagaaactgataatttcatatactcagtttccgaatttcttggtaataaagtaatttatatgcaatatgctaatatatttggataaagaggtgtactatggacaaccaatgaaaacacttaacatcwataagctattctttttgaaaataattttattctcaaagtgaattctctttatggaacttttgatattataaagatacacgaaattggacaatctatataaatccttcataataaattttatttctccaatgtgtataataagacatcaaacagaattccccttt

SEQ ID NO: 64944 - DNA, 1087 bp, Homo sapiens
tatttggtgtgtcatatgtgttttatactgtagtctcacaatagagtaagctagagaaaagagtgttctaagaaaatcataaggaagagaaaatatatttattatttattaagcggaagcagatcatcataaaggtcttcatcctcattatcttcacattacataggctgagaaggaggaggaggaggggttggttgcgttgtctcaagggtggcagaggccgaagaaaatccttgtatatgtggcatgcacagctcaaacccatattgttcaggggtcaactgttagctgtgcagtgattttctctcagcttctcggctcagtgagacctcggttggggaccagcggaggggagggctcttcagcttctcgccctgtgctgcagcccagacttcgcctccaggaagtaagccaaggcaatcatagggcttatctggtttgtttctcttctctcaggawttgcttcctttgcttccttgcactgcctgttgctcagtctctgaaaatagcactcatttattttgtttaagtttttatggcaggaagatagttcctgtagcagattatcttccatgggtggaggctgacattctggataattttttaattgttactttgatattgttctccccatttaaaaagttcttgccaaaaagaaatcttaagtccatttatagttaagtagtgtgtagtgtccggaatgttttcaaatacattcaaggtcagagtaaaaacattaatgatcatacttgtgtggacccagaaaatctgagacaggtctcagttaatttagaaagttttattttgccaaggtcgagaatgtgcgcctgtgatacagcctcaggaagtcctgatgacgtacctaaggtggttggggcacagcttgattttatacattttagggagatgtgagacatcgatatatataagaagtagattggttcggtctggaaatgtggacaactgcaagcgaaggcaggaggactggaaggaagcggggagggcgcttccaggtcacagatagacaaaacagttgcattcttttgagtgtctgattagcctttccaaaggaggcaatcagatatgc

SEQ ID NO: 64945 - DNA, 867 bp, Homo sapiens
ggctgaacccaggcagagctgaactcctggctcccagacccagtgaggggctgatgtgcactcttctcctgtaaggcctggcaggagacaggaatcctattcagctcagagctcaataagaacggaagttcagtggaagatggccccagctcatcgcaccatctttgagtcttagagcatctatgtctgtacctttccatattctttccaaaatatggagccaaagatgggtaactaggatgcagtggacatttttgtggattattctacagggttctaagagccttgttggccccagtgctgcttctactttctgggcgtgaaagcctgaaaaagcacagtggttccctggcctccctcccmtcccagggtccctggtggctcagaggcctctctaaggaggaagggactcaagaagtgggaccactgccaactgcctggccctgctgggagccttcccttttctcggtgattcttcctcttccaggaggccatttgcccagagacagagagcaggagcagctggccaagcgaggcactgcatatgcacagaaggaagctgtcctcaatccacaagagccctgccagctgctccccgtgatgactttcctgaaggtggggtggcttaagccctggggcagtttacagagtatgggacaagggggaggttctgcatcaacaggggccagggcagtaggtgctccaatcatctccagagataacttatctcccatctctgggttttctgccacctgagaagtgacgtcttggtcactggccttgcctccattcccctagatgctgggtgggtctgctgggagcacttccctctggcatttggccttgggcagaaagagagagaaggag

SEQ ID NO: 64946 - DNA, 744 bp, Homo sapiens
cctgcaggaccattaggccttgaggaagccagggtgccaccctagccatcggccagtccctcagcccttctcttctcctcaggctgcctcaatggactggggcttttctagagggactgagaattttctcaggttcttctctgagaagacaggaggagcagggctcggggcccagagactgtcctcccaacctgcctttttcccagctccaggagtggctgcaggaaagaagggtgcttgcatttctgctcttgcaatcctctctctcctcaactcgccctcaattcagccarcgctgcctgggctggaggctcctgttacacagaaggctggttgaatgctcattccctcccagtttccacaacttgtcctgggctgaatctcaccttccaaccacctagaacacactcccaccccccacaaacacacacccttgctgtggatgggtccttggcaaaccttccctggtcttggtttcctcacctgtaaaatgggtagagcagtggggggaggctgggagtgaccatgtgcactctaagactcctggccccacaggcagtgctagcctgagctgtccctgctccccccacctcccaatcctttagggacaattatctgagcctttatccctgttatgaagaggccctgcccttcccccagggcagcctggaagagcctagaggcacacaataaaggactccaaaatcactcctgagattttaattaaaatttgtgcattgcatt

SEQ ID NO: 64947 - DNA, 719 bp, Homo sapiens
caggtcctcctgtcttgtcgctttatccttcattcccaaggtcacctcattatcccagacgaccacaccttctctttatagatggtcccagaagttgtctgtgcctcttctgcttacacttcatcggccagaacatggtcacatgggcacatctagcagcaacggaggctggcaaatgtagtgattgttttgggtgatcctctgcccatgaaagattggcgctttattgcaasaaaggcagttaggggtagttaagagcatagacttcccattaagtgagactgcctgggtttaatcctgtctccatcacttaccaatggttaccctgggtagttcattcgttatttattcaacaacagccattgagtgtctactctgtcccaggcattgttctgggcacttgggatatagcagtgagcaaaaagacaaagatgtctgcccttgtggaatttatattcaagtggagggaaataaacgagctaataacacgtagtgtgttggggagtattctgtgatgggagaaggacaaagctgggaagacataggaagtgcatgttttcacaggggctgggtgatgccctaggaggagccgacacttgaataaagacctagaggatctctgggtgagagtgtcccgaggagggggagcctccgtgcgaaggccctgaggcaggattgtgtctggcttgactgagcaaggaggcagagtgagggcgggc

SEQ ID NO: 64948 - DNA, 643 bp, Homo sapiens
tttattttctgaatcattgctgtgttgatgattgtttgcccactttattacttcactgaaaaacaaatgggatcaaaaaaaatgttgctactcttctctttggaagcctcgagtcattctggatcatatagtatattctgtattctgattgatgttttaacaatgtagtgttgctatattaatactatattctttaaattgtaatatttgttataatatttttgtttactttgaaactacagagtctacactttttatcaatataacattttgtgaattataacaaaaatatataaatattgtttactaaagaaaacatagtcaagctttggaaggattaaagttagygttattcagaagtcttactgaagactatagactgaagcctgtagctgtagggcagttctgccagactgctcctgcttagtgtttcagccactgcttatatacaagtggtgggggttcagtatgtgcaaaatcacatcagacttgctcaggagttacattaaagcagaatcacatcaagctttgggtgtaagggtacatttggttatagattacagaagcataatcactacccctgtcagaagttatcttatatgcagggaaaggcaaggactagggtcctttatcttttaagaaa

SEQ ID NO: 64949 - DNA, 619 bp, Homo sapiens
ctggaagcattgtccttagcaaactaacacaggaatagaaaaccaaataccacatgttctcacttataaataggagcaaaatgatgagaacacatggacacatagaggggaacaacacacaatggggcctataagagggcagagggtgggaggagggagagaattgagaaaaataactaatggtaatagkcttaatacctggatgacaaaagaatctgtatagcaaaccctcatgacacaagtttacctgtaaaacaaactggcacatgtacccctgaacttaaaataaaagttaaaacaaacaaaaacaaacaaagcctctttacactgagcttataaaactcttctccttttaatatggttagcgttaatatttttgtttttgtttcttacaataaggttttaaaactatctgtaatttatttttgtgacataacaatattcacttaaatttcttttagttaggggttggtaaactatggcccatttgccaattctagtctgctgctcatttttctaaaaaatgttttattggaacacaattatgcccagttgtttacatatcatccttggctcttttcctctcataatatttactgtctgtatgtttataggaaaa

SEQ ID NO: 64950 - DNA, 619 bp, Homo sapiens
ctggaagcattgtccttagcaaactaacacaggaatagaaaaccaaataccacatgttctcacttataaataggagcaaaatgatgagaacacatggacacatagaggggaacaacacacaatggggcctataagagggcagagggtgggaggagggagagaattgagaaaaataactaatggtaataggcttaatacctggatgacaaaagaatctgtatagcaaaccctcatgacacaagtttacctgtaaaacaaactggcacatgtacccctgaacttaaaataaaagttaaaacaaacaaaaacaaacaaagcctctttacactgagcttataaaactcttctccttttaatatggttagcgttaatatttttgtttttgtttcttacaataaggttttaaaactatctgtaatttatttttgtgacataacaatattcacttaaatttcttttagttaggggttggtaaactatggcccatttgccaattctagtctgctgctcatttttctaaaaaatgttttattggaacacaattatgcccarttgtttacatatcatccttggctcttttcctctcataatatttactgtctgtatgtttataggaaaa

SEQ ID NO: 64951 - DNA, 766 bp, Homo sapiens
tttgtaccctttgaccaacagctatttcttcaccaagttctggacaaggattttgtaaacatggtggcctcggggaggctcccatatcctttttgtattgatgagccattatgtagagtaatcatgttggtatgatcctagcctttggtctgttttctaattggtaaggaacaacaacaaacatataaccatgataaatttccaacaatcagataaaccttatttaaatagccgtacttgtcaaaagcattttaaacaatctaaaaattaagacatctggttcatttcaatagcaatttgggcacatgttcaatttattttttctatcactttttgggacaactggctaaccttttgcaataaaatacaatataaaataatgtgagagttctaaagcatacctaacacaaaaatttattttagatatatggaaagtttaaaaaccgtaaaagtactagaataaaatatatgaatgtggattatattcttttatggcaaagactcaacacatatcccatawtccctgtgagaaaagctctttctgtacatgcccccctcaagataagccccttgtatcttgtgacttccatactccctggccacagctcatttgttgggagatgggcggagacaggaacttgacctctggacgagccaatctactagatgaactgtgtgaatcagcttctgttttccacaaattgaaattggggcacagagatactagtccacttgtcagtggttttggaactgaggtggctacatc

SEQ ID NO: 64952 - DNA, 984 bp, Homo sapiens
  misc_feature (1)...(984): n = A,T,C or G
cattgaaatatcatgttgtaccccataaatttgtacaattattatgtgtcaatcataaaaagggtgattatgatggtatctacataaaagggtgtgaaagaggattaaatgtatagactatgtaaagggttcagtgcttagaacgcaataacaactactaaatggtagttcggatgatgatgatgatttattgctaaataccctaatctgctcaaattatttggctatcattcattcatttaatcactcaatcaacaaatatttactgagctcctggtaagtactaagcattgagttaggtgctaggaatacaacaataaataggaccctgcagttctcaggcttacattttagtgggggagacagcaacaaggaagcaatcaagtaaataagaaaatatcaggtagtgataaatgctgtgctgaaagtaaaaactgagtgatgtgacagaaagagtgtcttgggggttggtggagggcattgattattagagccccgagttcaccagtagtgaaaaagtatctgaaaattcacagttcaactaaaatatctcaaaattcatactcatatagtgtagataaccgtatattatgtatttccctattaaaccataaactaaaaagttgtttaatatttaactatacatagactttytttgttaataattctcgatttccttcttattatatattttaattaaaaatattgatattaaacagaaaaatatattttaattttatagcaagtcttagaatttttcaaaatacagaagagtataaagaagaaactagaaatgtcccataattactctgacatcatacaatcattgacatcaatcatgaatatagttggaaaattaaaattctgtaatagagaaggatatgatactagaagtaaaagtcttttctcactgcccctgtctctactagtccctgttttcaaaggtaattatcaagtttcctgtgtttccttanaaattttatg

SEQ ID NO: 64953 - DNA, 984 bp, Homo sapiens
  misc_feature (1)...(984): n = A,T,C or G
cattgaaatatcatgttgtaccccataaatttgtacaattattatgtgtcaatcataaaaagggtgattatgatggtatctacataaaagggtgtgaaagaggattaaatgtatagactatgtaaagggttcagtgcttagaacgcaataacaactactaaatggtagttcggatgatgatgatgatttattgctaaataccctaatctgctcaaattatttggctatcattcattcatttaatcactcaatcaacaaatatttactgagctcctggtaagtactaagcattgagttaggtgctaggaatacaacaataaataggaccctgcagttctcaggcttacattttagtgggggagacagcaacaaggaagcaatcaagtaaataagaaaatatcaggtagtgataaatgctgtgctgaaagtaaaaactgagtgatgtgacagaaagagtgtcttgggggttggtggagggcattgattattagagccccgagttcaccagtagtgaaaaagtatctgaaaattcacagttcaactaaaatatctcaaaattcatactcatatagtgtagataaccgtatattatgtatttccctattaaaccataaactaaaaagttgtttaatatttaactatacatagactttctttgttaataattctcgatttccttcttattatatattttaattaaaaatattgatattaaacagaaaaatatattttaattttatagcaagtcttagaatttttcaaaatacagaaragtataaagaagaaactagaaatgtcccataattactctgacatcatacaatcattgacatcaatcatgaatatagttggaaaattaaaattctgtaatagagaaggatatgatactagaagtaaaagtcttttctcactgcccctgtctctactagtccctgttttcaaaggtaattatcaagtttcctgtgtttccttanaaattttatg

SEQ ID NO: 64954 - DNA, 700 bp, Homo sapiens
tgtcagaaaactccagagcccgtaatcaaagcgaaggatctatcagcccagcaagtgccagcytcactaaacaaaacctccctgaaagaaatctcaggggaaaggctgagctcgatccccgaagcatctgtaagtggttcccgtgtggtttacagatgccggcaatacatcctgctgtgttccgttctgttccacccatgtttttagcagtatctctttttcatcatttgggtgatgagtgttgtattttctttcctgttctgatgtgttttagtttggtaatagcagctgttaaagagtctactgcacatcccaaggataatagaatacctcatgtttttaatgagaaagataattatgtaattttcatcataacagttattttattttctagttacttcccataatttgtagttatcactgcctgcaaattataaatgatgatcttatttttgagccaaaagcttgccagtaaaattgacagattttcaataacaatctacattaggagccataaaaacaccattattctattcactttctacagcagttccccaaataataaatgatatgagtgaaggttaacattaaaacagtgtcatcgaataaatccctcggctagtttggtggctgtattcgtgtccatcagattgattttttccttcctgtattagtacttttcttccttcaattcccctat

SEQ ID NO: 64955 - DNA, 700 bp, Homo sapiens
tgtcagaaaactccagagcccgtaatcaaagcgaaggatctatcagcccagcaagtgccagcttcactaaacaaaacctccctgaaagaaatctcaggggaaaggctgagctcgatccccgaagcatctgtaagtggttcccgtgtggtttacagatgccggcaatwcatcctgctgtgttccgttctgttccacccatgtttttagcagtatctctttttcatcatttgggtgatgagtgttgtattttctttcctgttctgatgtgttttagtttggtaatagcagctgttaaagagtctactgcacatcccaaggataatagaatacctcatgtttttaatgagaaagataattatgtaattttcatcataacagttattttattttctagttacttcccataatttgtagttatcactgcctgcaaattataaatgatgatcttatttttgagccaaaagcttgccagtaaaattgacagattttcaataacaatctacattaggagccataaaaacaccattattctattcactttctacagcagttccccaaataataaatgatatgagtgaaggttaacattaaaacagtgtcatcgaataaatccctcggctagtttggtggctgtattcgtgtccatcagattgattttttccttcctgtattagtacttttcttccttcaattcccctat

SEQ ID NO: 64956 - DNA, 620 bp, Homo sapiens
ccgggtgattttcttgactgtatgactctcacttgaaggatgacagaaattctcaattaaaaaaaccaaaaggaagctgtgtcagacagcaacaaaacaacaaaaaatcctgcaagagtcatcactgttggaaatatacttttcctgtggattaatacactctccctgacaacctgtcatgtgatttcatccaaactgtagtcgcatcaaatccaagagaaagagacagcaggaagggttggacagtatttgcttttggagtagttaacccatgaaggctttcttcgggcctgatcctttaagcccaagtatgtccctggtggtgtcgtttaaggcagtgatcgggctaagtgaggcatgataaatggcccccagcctgcacccgcctcgacagaggcctgtttggccctggccacggaaacagaaaggtcattcattacccaatgtgaacaaacagagtgcacgtttgtgataaataacggtcattattgaactacaacrctgtctgggaattcctcaacacttccttgacattaatgtactatttgtggagggctcagcgaggctctctcaatattatttagtgcttcatgttttatgtgggacaccacagagacatt

SEQ ID NO: 64957 - DNA, 456 bp, Homo sapiens
  misc_feature (1)...(456): n = A,T,C or G
tcttcctgtagaatctttagttctagacactggaatgcctcacttgttagagctcccctttttgcttgggttgctgtgacctcagagtgtaggagtttttaggggagcacggaagatgagagatctgtaatcttgtagttggtgtagtgtcaccaaaggggactctggcaggcacatgactttatgtctttacttctttcttgaggcggggagttgggggtgggggaaggaccagttcttattctgtcacccaggctgagtgcagtggtgccatcacaactaaaaaacagccttgacctcctgggcttaagtgatcctcccacctcagctccacaggcacccacccccstcacccctccgtagctgggactgcaggtgtgcgccaccatgcccagctaatatttttaagttttttagagatagggactcacaatgttgnccaggctggtgtcaaaa

SEQ ID NO: 64958 - DNA, 1238 bp, Homo sapiens
gtagtgaataatcccagaggactttcaggtttaggggctcagacagtagagtagatggtagggccattccctggaaagggtcacagttgaggaagagyaggtttaggggagcaaaagaccacaggtttgagttgacgtgttgcatgtgtggtgtatagcgcatttgagtgtagttgaggagggaggcctaggctgcagcaggagagatcagaattgcttgaggtcccagaaagacaacaagtggtcttgagtgtggacctaatggcccaggagggaggccagacaggtgggaagaaaagcactggcatatggagccctgaaaaccgaaggactagagtgtttctagaaggagacagtggacaatgatgtgaaatgctttcaagaagccaaggaagatgacagccaaagtgaactcattgtatggagccatcagggggtcatcggtgacctcggcaaggggtggtttcagttccatggtgactgaagaagccagactagaatgagcagtgggatgcctggaaggtaacaagtggagacagtgcatatgatggaggcaacactttccaggagttgagaaagtttagcggcaaaagacaagatgctaaggggggattgttttgttttttaacattcaggtcattccaatccaaccactatttagtgatcttctaatatgccaggaagcacgctaagtgctgaggagccagcaaacaaagcagacaaggtctctgttggtctctatcttctaagagtgaagggcaggtcagagtagaataggggctggaggatgttttctgaaatgctctggagccacctcctccttgggacttcctcttggtctagcgagcaccctggagtgttagtgtgatggccttggtttatcactgaatcagtgaactggatcatatctcagccctctcttcccgcctctgtccagcttttccatctgtaaaatgggggcatactgggaatagtaaccacttcatagatgggaacacctgtcattagcttcctgtctgaaaaaaaaacccatgcagcttctcagggctgtgcttcccaccttgggccttcttcctcctctccaacatctttctccagcttggaggggcagctgctgcttgtgttttgagcaggtcattttctgaggttttgtaccacattttctacctcttccttcggcctctgattctcctgatttttacatacacatcacaattcagtcattgggcacagaaaca

SEQ ID NO: 64959 - DNA, 1238 bp, Homo sapiens
gtagtgaataatcccagaggactttcaggtttaggggctcagacagtagagtagatggtagggccattccctggaaagggtcacagttgaggaagagtaggtttaggggagcaaaagaccacaggtttgagttgacgtgttgcatgtgtggtgtatagcgcatttgagtgtagttgaggagggaggcctaggctgcagcaggagagatcagaattgcttgaggtcccagaaagacaacaagtggtcttgagtgtggacctaatggcccaggagggaggccagacaggtgggaagaaaagcactggcatatggagccctgaaaaccgaaggactagagtgtttctagaaggagacagyggacaatgatgtgaaatgctttcaagaagccaaggaagatgacagccaaagtgaactcattgtatggagccatcagggggtcatcggtgacctcggcaaggggtggtttcagttccatggtgactgaagaagccagactagaatgagcagtgggatgcctggaaggtaacaagtggagacagtgcatatgatggaggcaacactttccaggagttgagaaagtttagcggcaaaagacaagatgctaaggggggattgttttgttttttaacattcaggtcattccaatccaaccactatttagtgatcttctaatatgccaggaagcacgctaagtgctgaggagccagcaaacaaagcagacaaggtctctgttggtctctatcttctaagagtgaagggcaggtcagagtagaataggggctggaggatgttttctgaaatgctctggagccacctcctccttgggacttcctcttggtctagcgagcaccctggagtgttagtgtgatggccttggtttatcactgaatcagtgaactggatcatatctcagccctctcttcccgcctctgtccagcttttccatctgtaaaatgggggcatactgggaatagtaaccacttcatagatgggaacacctgtcattagcttcctgtctgaaaaaaaaacccatgcagcttctcagggctgtgcttcccaccttgggccttcttcctcctctccaacatctttctccagcttggaggggcagctgctgcttgtgttttgagcaggtcattttctgaggttttgtaccacattttctacctcttccttcggcctctgattctcctgatttttacatacacatcacaattcagtcattgggcacagaaaca

SEQ ID NO: 64960 - DNA, 1238 bp, Homo sapiens
gtagtgaataatcccagaggactttcaggtttaggggctcagacagtagagtagatggtagggccattccctggaaagggtcacagttgaggaagagtaggtttaggggagcaaaagaccacaggtttgagttgacgtgttgcatgtgtggtgtatagcgcatttgagtgtagttgaggagggaggcctaggctgcagcaggagagatcagaattgcttgaggtcccagaaagacaacaagtggtcttgagtgtggacctaatggcccaggagggaggccagacaggtgggaagaaaagcactggcatatggagccctgaaaaccgaaggactagagtgtttctagaaggagacagtggacaatgatgtgaaatgctttcaagaagccaaggaagatgacagccaaagtgaactcattgtatggagccatcagggggtcatcggtgacctcggcaaggggtggtttcagttccatggtgactgaagaagccagactagaatgagcagtgggatgcctggaaggtaacaagtggagacagtgcatatgatggaggcaacactttccaggagttgagaaagtttagcggcaaaagacaagatgctaaggggggattgttttgttttttaacattcaggtcattccaatccaaccactatttagtgatcttctaatatgccaggaagcacgctaagtgctgaggagccagcaaacaaagcagacaaggtctctgttggtctctatcttctaagagtgaagggcaggtcagagtagaataggggctggaggatgttttctgaaatkctctggagccacctcctccttgggacttcctcttggtctagcgagcaccctggagtgttagtgtgatggccttggtttatcactgaatcagtgaactggatcatatctcagccctctcttcccgcctctgtccagcttttccatctgtaaaatgggggcatactgggaatagtaaccacttcatagatgggaacacctgtcattagcttcctgtctgaaaaaaaaacccatgcagcttctcagggctgtgcttcccaccttgggccttcttcctcctctccaacatctttctccagcttggaggggcagctgctgcttgtgttttgagcaggtcattttctgaggttttgtaccacattttctacctcttccttcggcctctgattctcctgatttttacatacacatcacaattcagtcattgggcacagaaaca

SEQ ID NO: 64961 - DNA, 1238 bp, Homo sapiens
gtagtgaataatcccagaggactttcaggtttaggggctcagacagtagagtagatggtagggccattccctggaaagggtcacagttgaggaagagtaggtttaggggagcaaaagaccacaggtttgagttgacgtgttgcatgtgtggtgtatagcgcatttgagtgtagttgaggagggaggcctaggctgcagcaggagagatcagaattgcttgaggtcccagaaagacaacaagtggtcttgagtgtggacctaatggcccaggagggaggccagacaggtgggaagaaaagcactggcatatggagccctgaaaaccgaaggactagagtgtttctagaaggagacagtggacaatgatgtgaaatgctttcaagaagccaaggaagatgacagccaaagtgaactcattgtatggagccatcagggggtcatcggtgacctcggcaaggggtggtttcagttccatggtgactgaagaagccagactagaatgagcagtgggatgcctggaaggtaacaagtggagacagtgcatatgatggaggcaacactttccaggagttgagaaagtttagcggcaaaagacaagatgctaaggggggattgttttgttttttaacattcaggtcattccaatccaaccactatttagtgatcttctaatatgccaggaagcacgctaagtgctgaggagccagcaaacaaagcagacaaggtctctgttggtctctatcttctaagagtgaagggcaggtcagagtagaataggggctggaggatgttttctgaaatgctctggagccacctcctccttgggacttcctcttggtctagcgagcaccctggagtgttagtgtgatggccttggtttatcactgaatcagtgaactggatcatatctcagccctctcttcccgcctctgtccagcttttccatctgtaaaatgggggcatactgggaatagtaaccacttcatagatgggaacacctgtcattagcttcctgtctgaaaaaaaaacccatgcagcttctcagggctgtgcttcccaccttgggccttcttcctcctctccaacatctttctccagcttggaggggcagctgctgcttgtgttttgagcaggtcattttctgaggttttgtaccacattttctacctcttccttcggcctctgattctcctgatttttacawacacatcacaattcagtcattgggcacagaaaca

SEQ ID NO: 64962 - DNA, 1798 bp, Homo sapiens
ccaagttacgtcatcctacacaggataggatgatttctctttgcggcttatccatcctttttacccttttctctcttgctagttatgagcatttcacacattttttatagcttgtctctacaaagtcttactttattttcacaattttgttatttatttaacgagtatacagtatttcccatgcaattcgccaaataaccttttgcttagtttagcctcttttctggccgggggtagagtggagtgcgggtggcatacccttgtgctcagaatttttttttttttggtctcatgctgtcacccggggttggagtgaaatggtgtgatcatatctcattgcagccttgaagtcctgggctcaagcagtaaccctccttcagccttctgaatagctgggaccacaggtggcaccaccatgcccagctaatttttaaatattttattaatttgtagagacggggtcttgctatgttgcccaggctggtcttgaactcctgggctcaagcgatcctcccacctctgcctcccaaagtgctgggattataggtgtgagccactgcgcccggccatcagaactgatcagtacttttcttggcattcctttttgcccatgaacttgagtgcttctgaaaggagtgaaatatgcaatttaattcaccagtagtacattgaacgccatgttgccactcatcttccctggtatgacctgacatccatctgacatggtccctggcatgctggtccaactggctgtcagttcctggtctcacaggttccagccaaccctgactcggttttcagtttaaatgttagcagtgcatcttgaatggcttcttggaaatagctggtgaggttacactaggtgctatagatgtttgacacccagagagctcctggtcactcctggctgccctgcaggtatcaagtggccaagtgagagctgtgccggaagcacaggttccatagatgaccttggctggggtttccagggacactgagtatttaacacaagattggtgcagaagtgaggaggactggtttgggattctgccacctggcttggggacagtgcaggctggctgtgaggttggcccagtggtcagctggatcccttaaatgtccacaacactggggacaacagggtggagtggaagagtagcccagatccaatgttgctttcacagtagcatgtatggggaagaagagcttgtttgccagccgcttcctgaatgctttgctaaatatcatttcatttaattctcacttgtagcattcaaatggggtaggctgtattttctttgccttttttttttttttttttagacgaagtctcgcttttgttgcccaggctggagtgcaatggcatgatcttggctcaytgcaacctctgcctcccgggttcaagtgattctcctgcctcagcctcccgagtagctgggattataggtgcataccaccacgcccggctaattttttgtattttaagtagagacggggtttcaccatgttggccaggctggtctcgaactcctgacctcaggtgatccgcccgcctcggcctcgcaaagtgttgggattacgggcgtgagccactgcgcccagccccagtgggtaggctgtattttcattacaatttttttttttttttgagatagagtctcactctgtcacccaggctggagtacaatggtgtgatctcggctcactacctcctgggttcaagcgattctcctgtctcagcctcctgagtagctgggattacaggcgcatgccatcacgcccagctaatttttgcatt

SEQ ID NO: 64963 - DNA, 1798 bp, Homo sapiens
ccaagttacgtcatcctacacaggataggatgatttctctttgcggcttatccatcctttttacccttttctctcttgctagttatgagcatttcacacattttttatagcttgtctctacaaagtcttactttattttcacaattttgttatttatttaacgagtatacagtatttcccatgcaattcgccaaataaccttttgcttagtttagcctcttttctggccgggggtagagtggagtgcgggtggcatacccttgtgctcagaatttttttttttttggtctcatgctgtcacccggggttggagtgaaatggtgtgatcatatctcattgcagccttgaagtcctgggctcaagcagtaaccctccttcagccttctgaatagctgggaccacaggtggcaccaccatgcccagctaatttttaaatattttattaatttgtagagacggggtcttgctatgttgcccaggctggtcttgaactcctgggctcaagcgatcctcccacctctgcctcccaaagtgctgggattataggtgtgagccactgcgcccggccatcagaactgatcagtacttttcttggcattcctttttgcccatgaacttgagtgcttctgaaaggagtgaaatatgcaatttaattcaccagtagtacattgaacgccatgttgccactcatcttccctggtatgacctgacatccatctgacatggtccctggcatgctggtccaactggctgtcagttcctggtctcacaggttccagccaaccctgactcggttttcagtttaaatgttagcagtgcatcttgaatggcttcttggaaatagctggtgaggttacactaggtgctatagatgtttgacacccagagagctcctggtcactcctggctgccctgcaggtatcaagtggccaagtgagagctgtgccggaagcacaggttccatagatgaccttggctggggtttccagggacactgagtatttaacacaagattggtgcagaagtgaggaggactggtttgggattctgccacctggcttggggacagtgcaggctggctgtgaggttggcccagtggtcagctggatcccttaaatgtccacaacactggggacaacagggtggagtggaagagtagcccagatccaatgttgctttcacagtagcatgtatggggaagaagagcttgtttgccagccgcttcctgaatgctttgctaaatatcatttcatttaattctcacttgtagcattcaaatggggtaggctgtattttctttgccttttttttttttttttttagacgaagtctcgcttttgttgcccaggctggagtgcaatggcatgatcttggctcattgcaacctctgcctcccgggttcaagtgattctcctgcctcagcctcccgagtagctgggattataggtgcataccaccacgcccggctaattttttgtattttaagtagagacggggtttcaccatgttggccaggctggtctcgaactcctgacctcaggtgatccgcccgcctcggcctcscaaagtgttgggattacgggcgtgagccactgcgcccagccccagtgggtaggctgtattttcattacaatttttttttttttttgagatagagtctcactctgtcacccaggctggagtacaatggtgtgatctcggctcactacctcctgggttcaagcgattctcctgtctcagcctcctgagtagctgggattacaggcgcatgccatcacgcccagctaatttttgcatt

SEQ ID NO: 64964 - DNA, 551 bp, Homo sapiens
gaaaggcagcctcatgcctgggattatatcccaagagaagcttactgaaatacaaaaggagatacataaaagaatgtttactgaagtgatgctgtggggagcaaggagtggagtatctacaatgtccatcattaggtacgtgaagtagtacacaacagtcagaaataaggaattaattttacatgcagcaaaaggtagctctcataaacataatgttgcataaaaggggcaagaaagatatgcatttaaaacrttatgcaatttttaaattaaacacgtgcaatactctgatttttcaaagacacacatgcctctaaatattcacatattagttggattgaacggacactccctaaatattcatgggtgggcccaagaaaaggaagtgtagaaggaacgggaaatgaaatggaaaacaataaaagaaaataaagcaaaaagaggtcttccaccattcaatgatgttggtgtgccttgaacagtggagtctgatcaatttagttttgtacatctgaggccctaaaggagaaaataaggccacgcagaatctg

SEQ ID NO: 64965 - DNA, 647 bp, Homo sapiens
gggatcctaacattatagttacataatttcctagagtttggtttgaatagtaatttaaaaagaaaacattaattgtcatttagcagattctgtttcagaaaaccccattacctattagaaaaaaaaatagtttttatgtgggagtcttaatttttattaccaagtaggtagtgaatgggggaaggaggaggtgttgacttaagcagaataaagtgagtattccatgccctttgaaaggatatacaaacatttgctttgtgttacaacatttaactaattcctcatgccctccttcgaatagagctttattcctcctttcaaattttccaaagatacttaggaagttctcttttctttttaatttctctaccctcctccaggatcttcctccttttctctatggcttttaaatactccttctgatcttccctggttgttttttatgtgattttttgggggcgatctgtaggacaaagaygtctttaaagtggttccctaaactccactgaggtgttaagatacagcacaggcctaacaaaagagttacatagcatcagatcccattctgaaccctctttacattcaggaacaccagccaattggttcagaatttacaagccctaaacaaatgtcagacaccctttcat

SEQ ID NO: 64966 - DNA, 1428 bp, Homo sapiens
aatgtgaaagtgcatgaaaatattaaattttccatagaaacttttctgtcatattcctttttgcataatatttaaagttagatatgtatagaaatagaccacttagagaactaagtggaaataaacatgccttctttttaaatcaggtcacttagggaacagtcatttactctatctgtcagcctccttgctctcattagaaaataacatgctataatggtcgctatgaaatgttttctgattgtccactaatacatgcattttttccttttttacatttatttaagacatttttcagtaatggaaagaactttcatctgactaccttaatcaagggttacttccatattgaagttcatcttttcctctcagtcataaaccatatgttatcccacagtactacagagtgaagtggaaaatttaggaggayctgactcattcattcattaaacaaatatttaagacccactatgtactaagcatataaatgggtgcattttggtcctgagtgggtggcctagtgaggtgatcagcttaatttttttcgtggggtttataacctgatgtcccttgaaagggcttcaatggatccatgaatctcctaaaattatgtaacaaattacttgtgtttgtgtgtgtgctgctgtgcctttgtgcattttttctagggagataaccaaagtttttcatcatattcttaaattgctgctaaatatgcaccttagactataagaatacagcaaaagggttattttcatttataagacattaaaatgaaacgaagttttaatttaatgaagcctcatctatagaataggctgccaaaaatcgaaatggttccaatatcattccattttaaacttctcatagaaattggatagaaaatcttgtgacggtgccattgtaaagtcaggtttgagggtttagctcaaagatgcaagagactaaggagcccgtttcgaaacctttcctggcattagaattgcccaagagagagactcaggctaataaaagcaaatgtaaacggaagacctttaagcagataaaactgtcatatttttcctcataaatagaaaattcaaggctggagataatttcttttatctcatccatttcctctcttgttctctattgcaaacagcacgccagtgactttcctcttaatgtgtttcaaaacataatcctagactgcgagcaactacttttctagcttttgtgtcttttgctgattgttagggtttagtgagtggatgttaattacaaccccgagattagatgtaataaaaactctgggagtgccccaccctaacctctttttctattctacttagtcgacagactcactcatatttttttaaaatgcagatttacttgcaaacgctttaaagccaagtatttcaactctacttttaccttgggatcgctact

SEQ ID NO: 64967 - DNA, 571 bp, Homo sapiens
tgaccaaaaaggacagagaccaagggagaaacgtggaaggagaatgccagggtgggaagacaggaggggaggaggccagtgggaagatgatgacacttacaagacagatgggaacagggcaggaggcccccacaagcagcaggagggcatggggtctggttacctggagactgaggagtgcgaagtctctttctgagctaagggtgaagtccacctttggggagcaggggacattattacgagatgggtttctcaggaacactgatcctttcactacctgtcctcggggcacatcctggagctgcacccccaccgatagggggacccccagatgaaccacagaaggagagaacaagagcaacctggggagarcagacaggatcagcagtcagacttcgctctgacacctccacccctgctctccctcactcctgaatcgggtcccgatgccagccctgccccaatccaagcacccagcatcccgcctccaggacctgggcttctgcagagataaggtgaagaagctggatgcccagatcagcccccagagcagcctcatggctggaggatc

SEQ ID NO: 64968 - DNA, 571 bp, Homo sapiens
tgaccaaaaaggacagagaccaagggagaaacgtggaaggagaatgccagggtgggaagacaggaggggaggaggccagtgggaagatgatgacacttacaagacagatgggaacagggcaggaggcccccacaagcagcaggagggcatggggtctggttacctggagactgaggagtgcgaagtctctttctgagctaagggtgaagtccacctttggggagcaggggacattattacgagatgggtttctcaggaacactgatcctttcactacctgtcctcggggcacatcctggagctgcacccccaccgatagggggacccccagatgaaccacagaaggagagaacaagagcaacctggggagaamagacaggatcagcagtcagacttcgctctgacacctccacccctgctctccctcactcctgaatcgggtcccgatgccagccctgccccaatccaagcacccagcatcccgcctccaggacctgggcttctgcagagataaggtgaagaagctggatgcccagatcagcccccagagcagcctcatggctggaggatc

SEQ ID NO: 64969 - DNA, 571 bp, Homo sapiens
tgaccaaaaaggacagagaccaagggagaaacgtggaaggagaatgccagggtgggaagacaggaggggaggaggccagtgggaagatgatgacacttacaagacagatgggaacagggcaggaggcccccacaagcagcaggagggcatggggtctggttacctggagactgaggagtgcgaagtctctttctgagctaagggtgaagtccacctttggggagcaggggacattattacgagatgggtttctcaggaacactgatcctttcactacctgtcctcggggcacatcctggagctgcacccccaccgatagggggacccccagatgaaccacagaaggagagaacaagagcaacctggggagaacrgacaggatcagcagtcagacttcgctctgacacctccacccctgctctccctcactcctgaatcgggtcccgatgccagccctgccccaatccaagcacccagcatcccgcctccaggacctgggcttctgcagagataaggtgaagaagctggatgcccagatcagcccccagagcagcctcatggctggaggatc

SEQ ID NO: 64970 - DNA, 1052 bp, Homo sapiens
gctcctatttgtctgtaataaagctgtatggctgggtccatttatttcaatattagttattttatagtatccattggaatgatgataattaatatataaaggcaacttttccaaattcatttgtgtctcctctgggcatttctttgggatgtgtttgtatgcacgtttttgcttctgattttaaaataattttcctttgttgtaggatgagcaattcttaggttttggctcagatgaagaagtcagagtgcgaagtcccacaaggtctccttcaggtacggccaattaagtgcatggtgccttttaagttttgtttgttaggagattgtggcttcctcttgccttctttacatgtaaaggatgctctaccatacttgggttaggaaatggctgatgagctagacttctttttatttatttatttattkattattgttatactttaagttttaggtacatgtgcacaatgtgcaagttagtaacatatgtatacatgtgccatgatggtgcgctgcacccactaactggtcatctagcattaggtatatctcccaatgctatccctcccccctccccccagctagacttctttatgggactcttatctatcaggccacattgggtttattctttctctctgggaactacttggggcatgggaagtaggtttccacagaattactgggaaatctggtaggcaaagtgaaggtaacctagtaagagtatcctcagatttacacattttgtgttatgtggtagtgtatatgtctttgggaataatttggccattattttttttggatgaaatttggtccactattgtcaaagaaccaaaaacaaaatattggcattatgtgaaacatttttacctgattcttgaaaggctgtattaaaataaaaaaatggaaaattagcaatatttgtcattattctcaccaacaaaatatctagaatatcttgaaattctagacttacaagcagtttcctaagagaagaccctcaatggaaataacatttaatggcttgcctaattcagttctgtataggagaaa

SEQ ID NO: 64971 - DNA, 1052 bp, Homo sapiens
gctcctatttgtctgtaataaagctgtatggctgggtccatttatttcaatattagttattttatagtatccattggaatgatgataattaatatataaaggcaacttttccaaattcatttgtgtctcctctgggcatttctttgggatgtgtttgtatgcacgtttttgcttctgattttaaaataattttcctttgttgtaggatgagcaattcttaggttttggctcagatgaagaagtcagagtgcgaagtcccacaaggtctccttcaggtacggccaattaagtgcatggtgccttttaagttttgtttgttaggagattgtggcttcctcttgccttctttacatgtaaaggatgctctaccatacttgggttaggaaatggctgatgagctagacttctttttatttatttatttattgattattgttatactttaagttttaggtacatgtgcacaatgtgcaagttagtwacatatgtatacatgtgccatgatggtgcgctgcacccactaactggtcatctagcattaggtatatctcccaatgctatccctcccccctccccccagctagacttctttatgggactcttatctatcaggccacattgggtttattctttctctctgggaactacttggggcatgggaagtaggtttccacagaattactgggaaatctggtaggcaaagtgaaggtaacctagtaagagtatcctcagatttacacattttgtgttatgtggtagtgtatatgtctttgggaataatttggccattattttttttggatgaaatttggtccactattgtcaaagaaccaaaaacaaaatattggcattatgtgaaacatttttacctgattcttgaaaggctgtattaaaataaaaaaatggaaaattagcaatatttgtcattattctcaccaacaaaatatctagaatatcttgaaattctagacttacaagcagtttcctaagagaagaccctcaatggaaataacatttaatggcttgcctaattcagttctgtataggagaaa

SEQ ID NO: 64972 - DNA, 1052 bp, Homo sapiens
gctcctatttgtctgtaataaagctgtatggctgggtccatttatttcaatattagttattttatagtatccattggaatgatgataattaatatataaaggcaacttttccaaattcatttgtgtctcctctgggcatttctttgggatgtgtttgtatgcacgtttttgcttctgattttaaaataattttcctttgttgtaggatgagcaattcttaggttttggctcagatgaagaagtcagagtgcgaagtcccacaaggtctccttcaggtacggccaattaagtgcatggtgccttttaagttttgtttgttaggagattgtggcttcctcttgccttctttacatgtaaaggatgctctaccatacttgggttaggaaatggctgatgagctagacttctttttatttatttatttattgattattgttatactttaagttttaggtacatgtgcacaatgtgcaagttagtaacatatgtatacatgtgccatgmtggtgcgctgcacccactaactggtcatctagcattaggtatatctcccaatgctatccctcccccctccccccagctagacttctttatgggactcttatctatcaggccacattgggtttattctttctctctgggaactacttggggcatgggaagtaggtttccacagaattactgggaaatctggtaggcaaagtgaaggtaacctagtaagagtatcctcagatttacacattttgtgttatgtggtagtgtatatgtctttgggaataatttggccattattttttttggatgaaatttggtccactattgtcaaagaaccaaaaacaaaatattggcattatgtgaaacatttttacctgattcttgaaaggctgtattaaaataaaaaaatggaaaattagcaatatttgtcattattctcaccaacaaaatatctagaatatcttgaaattctagacttacaagcagtttcctaagagaagaccctcaatggaaataacatttaatggcttgcctaattcagttctgtataggagaaa

SEQ ID NO: 64973 - DNA, 1052 bp, Homo sapiens
gctcctatttgtctgtaataaagctgtatggctgggtccatttatttcaatattagttattttatagtatccattggaatgatgataattaatatataaaggcaacttttccaaattcatttgtgtctcctctgggcatttctttgggatgtgtttgtatgcacgtttttgcttctgattttaaaataattttcctttgttgtaggatgagcaattcttaggttttggctcagatgaagaagtcagagtgcgaagtcccacaaggtctccttcaggtacggccaattaagtgcatggtgccttttaagttttgtttgttaggagattgtggcttcctcttgccttctttacatgtaaaggatgctctaccatacttgggttaggaaatggctgatgagctagacttctttttatttatttatttattgattattgttatactttaagttttaggtacatgtgcacaatgtgcaagttagtaacatatgtatacatgtgccatgatggtgcgctgcacccactaactsgtcatctagcattaggtatatctcccaatgctatccctcccccctccccccagctagacttctttatgggactcttatctatcaggccacattgggtttattctttctctctgggaactacttggggcatgggaagtaggtttccacagaattactgggaaatctggtaggcaaagtgaaggtaacctagtaagagtatcctcagatttacacattttgtgttatgtggtagtgtatatgtctttgggaataatttggccattattttttttggatgaaatttggtccactattgtcaaagaaccaaaaacaaaatattggcattatgtgaaacatttttacctgattcttgaaaggctgtattaaaataaaaaaatggaaaattagcaatatttgtcattattctcaccaacaaaatatctagaatatcttgaaattctagacttacaagcagtttcctaagagaagaccctcaatggaaataacatttaatggcttgcctaattcagttctgtataggagaaa

SEQ ID NO: 64974 - DNA, 983 bp, Homo sapiens
gggttacagtctgctccgagggcttggccaagatttaataatgtaatcctccacaacaacctgatcagctggctatgatttttttcttattttattgctggagaaactgaggcaacagagtgtaaaccacctgcccaaggacacgcagctggaaagttctggagccagcactggctcccaagtagcctggtttcacactcctacgcagctattacacaagctctgacttaggagtgatctgctctaccattttatcagtggggacagcaaacaggagcagagattttattttactttacttaatttttatttttattttattatactttaagttctagggtacatgtgcacaaygtgcaggtttgttacatatgtatacatgtgccatgttggtgtgctgcacccgttaactcgtcatttacattaggtatatctcctaatgctattcctccccgttctccccatcccacaacaggccccggtgtgtgatgttccccttcctgtgtgcaagtgttctcattgttcaattcccacctatgagtgagaacatgcggtgtttggttttttgtccaaaacagagatatagaccaatggcacagaaaggagcagagattttctaaacaccatgttacttgcccagtgacagagctgtccagagctcagcctcccaaccctcctctctttgtggcagttttagttcattacatcacttaaatgtcaatggaatgagaatgtgtctgtgcataaatacggtgaatgtggacacttcattcttcagtgcttagactcagaacagatgatgtcacattttaaaatacgtgttctgaagaagatgggtgtacattaccttcatactgaatcaaattttaaattcactaataactattgaaagcaatccagaagcaaacccgtaaaactaaagaaaacttttaggaaataatcatattttaatctatcatatataaattctaattttcctaatt

SEQ ID NO: 64975 - DNA, 983 bp, Homo sapiens
gggttacagtctgctccgagggcttggccaagatttaataatgtaatcctccacaacaacctgatcagctggctatgatttttttcttattttattgctggagaaactgaggcaacagagtgtaaaccacctgcccaaggacacgcagctggaaagttctggagccagcactggctcccaagtagcctggtttcacactcctacgcagctattacacaagctctgacttaggagtgatctgctctaccattttatcagtggggacagcaaacaggagcagagattttattttactttacttaatttttatttttattttattatactttaagttctagggtacatgtgcacaatgtgcaggtttgttacatatgtatacatgtgccatgttggtgtgctgcacccgttaactcgtcatttacattaggtatatctcctaatgctattcctccccgytctccccatcccacaacaggccccggtgtgtgatgttccccttcctgtgtgcaagtgttctcattgttcaattcccacctatgagtgagaacatgcggtgtttggttttttgtccaaaacagagatatagaccaatggcacagaaaggagcagagattttctaaacaccatgttacttgcccagtgacagagctgtccagagctcagcctcccaaccctcctctctttgtggcagttttagttcattacatcacttaaatgtcaatggaatgagaatgtgtctgtgcataaatacggtgaatgtggacacttcattcttcagtgcttagactcagaacagatgatgtcacattttaaaatacgtgttctgaagaagatgggtgtacattaccttcatactgaatcaaattttaaattcactaataactattgaaagcaatccagaagcaaacccgtaaaactaaagaaaacttttaggaaataatcatattttaatctatcatatataaattctaattttcctaatt

SEQ ID NO: 64976 - DNA, 983 bp, Homo sapiens
gggttacagtctgctccgagggcttggccaagatttaataatgtaatcctccacaacaacctgatcagctggctatgatttttttcttattttattgctggagaaactgaggcaacagagtgtaaaccacctgcccaaggacacgcagctggaaagttctggagccagcactggctcccaagtagcctggtttcacactcctacgcagctattacacaagctctgacttaggagtgatctgctctaccattttatcagtggggacagcaaacaggagcagagattttattttactttacttaatttttatttttattttattatactttaagttctagggtacatgtgcacaatgtgcaggtttgttacatatgtatacatgtgccatgttggtgtgctgcacccgttaactcgtcatttacattaggtatatctcctaatgctattcctccccgttctccccatcccacaacaggccccggtgtgtgatgttccccttcctgtgtgcaagtgttctcattgttcaattcccacctatgagtgagaacatgcggtgtttggttttttgtccaaaacagagatatagaccaatggcacagaaaggagcagagattttctaaacaccatgttacttgcccagtgacagagctgtccagagctcagcctcccaaccctcctctctttgtggcagttttagttcattacatcacttaaatgtcaatggaatgagaatgtgtctgtgcataaatacggtgaatgtggacacttcattcttcagtgcttagactcagaacagatgatgtcacattttaaaatacgtgttctgaagaagatgggtgtacattaccttcatactgaatcaaattttaaattcactaataactattgaaagcaatccagaagcaaaccygtaaaactaaagaaaacttttaggaaataatcatattttaatctatcatatataaattctaattttcctaatt

SEQ ID NO: 64977 - DNA, 997 bp, Homo sapiens
caattctttgggtggatatgtttctttttttctttttttgctgatagaacttcatgtaccctgaatgattcccctgggttgtttttcctaaaaatataatgtgagtaaaatatgtatcccygaagcccagggtagaggcaggtcacaggaggcttcttggtctccgtctagctccagatcttcgtaagcatatcagggcattatgacttagttgccctatgtctgcaatgatagcagaccttgttaataaaaatcactatcactatcagctcttcctcgtttgtatgaaactagcctcttcagaaatgcaatagtattaggagtaatttatttgcctgtgtaattaaagaatctactacactacatgcaagaaacaaaaattagcagagcaaatgtttatattattctatgaaaatagtgatacattacaatggagttatccaccttcagccctactgaggcattgggatatggtcagggggccagatggtgaccataaaatacaaagatgagactcaaaacagacagtggtttcatatcagttaaccgtatggtccagagtaaccatctgtactagcctctacaagaaacacattttgccttatgaagtaggaaaacacaagagaggaagctgtcaggttttcaaaatatggaggcatttattttctttcgctgtatgtttaatttgaagaatgttacataaaggccgataattaagactaagagagctgctacttcggtctgtgtagggctctttctgagctctttaatcaccctgtcccccttcagcaagagagctcagctgaaataatggaaaacagaatttagttctcaaggaccattcggaagaaagaaaatggcaccacacccatgagggccaaacactgccttccattcaaaatgtatcttctccaccccttaggatcacctgattcgacacttcttcaactgtattcatctgcaagcaaatttggcctcactcccaaggacattgcag

SEQ ID NO: 64978 - DNA, 718 bp, Homo sapiens
ttcagagcagattatatagaaagcaggctgatgtactattttgcccttcacaaacccaagagttaactctgcttataagaaaacgcttgggaaacagatactaggttggctcccttttttatttatctttcaaaatttgggaaaaaatcaagtatcccaattcttccactccaaagtgcaaggtggaaatgagaaaaatgtcatgaggmtgctaagtttgtgtctaattgaatatatattttctaaattattcacctggaaattttttttttcagaaatacaaagttagtttcttcctatgacttctaagtctgtgtcacttccttttgctggcaggtagataaaaagtgcatttcttcccagctggcaaggaagaagaggtatcaaggggacaaggagtaaggaatgaagaaggacatgagaatctcctgctcaagaaagagctatctccactctctgggaaattacagaaatcctccccctcctaacaaccactctgggaccacaatctggggaattttaaaatgcaaataatcattgttaatataaatctttaacttcagacagttacttttgcaatgtggatgaatattgtaatggtagattaatgtatagtactcttggagaatcataaacatcacagaatgtctgtgtttgatatacattagagaacactagcagcttatttcatagatgaagagtgtgagccttaatggga

SEQ ID NO: 64979 - DNA, 590 bp, Homo sapiens
cccggggtctgaggcccaygtggacagacggacggacggacagacggcaaaggcaggaaggtgtgctgcttcccaggctgccgcaacaaatctcaccgactggcggctgaagcaatgcaaatgcgtcctctcgcggctctggaggccgtctgaagccaagggtgacaggcccgcaccctctctgaaggctccagcgcagggtccttcagcctcttccagctctgagcagcccccgtggctggtggcggcatcactgcagcctctgcctccaccttcacatggctcctccctgcgtctgtgactcacaaggacggacgtcactgggctaaacccactgcaatccagtatgacctcctcttacctccatcacgtctgcaaaggccctacttgcaaataaggtagcaaagtctgagcttccagggggacatgaagctggggacgccgctcaccccagtatagaagagaatgacgaagaatgggccatgcagatctgcagtgggctccacggcttccagaaccccagagaggcctgtggctcctttgcttcagatctgaaggcagaagagtggactgtgatgaccctgctagcc

SEQ ID NO: 64980 - DNA, 551 bp, Homo sapiens
cacaggattacagtttgcagggaagaatgtagaagtagaagctgaatggccagcttctactgggagtgtcttggaggggatatacacactgagggtgttttgactttataaattctgtgatctcttccacctctttaattctataattttgtgactgtgcctactctggtagttttgtgataagtagtatgcatttgcaaaattgatttctagaaaggattatagactgtggccttgagcaaaaatgattttcctggttattaactggcacacttgggataattttgaagtccttggcctcattaaattcatctaaccacctgaattacaaaagctagaaaatactgttacaaatattttaatttacattaattatattttcactcttcaaagatagagaatcccctcatatataaagaaaaaacgatataaaaatgagagtcrgattttatagtttttatgtagttacctaaagtcatcaggcttctgccattgataccaattttttcatcaattttaaactccacttttcatattttatctctgatatg

SEQ ID NO: 64981 - DNA, 1076 bp, Homo sapiens
ttatttggctaaaagtagttatatgtctttacctagatgcaaagaggctggggagcattggagagcaaatagaatatttaatgragattactatctctgtcacaacatggtaagcaaactagcaactaattcttacctgcagttgctgcatgtagcttctagaagtgttgtcagaccctttggtacaaatgtccgtgtatataacaagaagttcattccctaaaatgactataagcctgaccgctacgtacatcatgcactagggtatcctgaacattcacagttgtgtcacattgtttaaagtgataatttagagtgctctttgttttgtaaatttttaattttcatgggtacatagtaggtatgtttatttatggggtacatgagatgttttgatacaagcatgaaatgtgaagtaatctagaaggctttttgaattattttgattaatagtaccacatggacaaatggtctctgacacaggtagtagatcctgtgggaggctaagaggatgggtctcaaaagtgggcccagaagtaaattctgatatattatccctcttttgttcaagaagtttcttctttctgccctgaaataagttctttggaagtaggctgtatataagttatttctagttatgaatcactgtattggttctgccaagaatgccagggttaccctccacattgaagttactactataacttatgaacaaagtaagtgagaggaggcaaagatcttccttctatgtgttttgcaggaaaggcttctcagaggagatgtcatctgagctaacttttgaaaatagatactttttatttgtgagcagataatattccagtgcagaaaggagcactgtgaggtataaggggagaaacctgactaaagtcaagaaggcatgaaagtacatgacatttctgggaacaaaggagaacaccaatgggttaaaacatgaggttcttgtgagggaagtggtataaaataaatagagaggtgtgtggttgctctaatgatggtatccaaagaatcacacctaccagtattgactaagcttgactgtgtgatgtaagttgaag

SEQ ID NO: 64982 - DNA, 1076 bp, Homo sapiens
ttatttggctaaaagtagttatatgtctttacctagatgcaaagaggctggggagcattggagagcaaatagaatatttaatgaagattactatctctgtcacaacatggtaagcaaactagcaactaattcttacctgcagttgctgcatgtagcttctagaagtgttgtcagaccctttggtacaaatgtycgtgtatataacaagaagttcattccctaaaatgactataagcctgaccgctacgtacatcatgcactagggtatcctgaacattcacagttgtgtcacattgtttaaagtgataatttagagtgctctttgttttgtaaatttttaattttcatgggtacatagtaggtatgtttatttatggggtacatgagatgttttgatacaagcatgaaatgtgaagtaatctagaaggctttttgaattattttgattaatagtaccacatggacaaatggtctctgacacaggtagtagatcctgtgggaggctaagaggatgggtctcaaaagtgggcccagaagtaaattctgatatattatccctcttttgttcaagaagtttcttctttctgccctgaaataagttctttggaagtaggctgtatataagttatttctagttatgaatcactgtattggttctgccaagaatgccagggttaccctccacattgaagttactactataacttatgaacaaagtaagtgagaggaggcaaagatcttccttctatgtgttttgcaggaaaggcttctcagaggagatgtcatctgagctaacttttgaaaatagatactttttatttgtgagcagataatattccagtgcagaaaggagcactgtgaggtataaggggagaaacctgactaaagtcaagaaggcatgaaagtacatgacatttctgggaacaaaggagaacaccaatgggttaaaacatgaggttcttgtgagggaagtggtataaaataaatagagaggtgtgtggttgctctaatgatggtatccaaagaatcacacctaccagtattgactaagcttgactgtgtgatgtaagttgaag

SEQ ID NO: 64983 - DNA, 1076 bp, Homo sapiens
ttatttggctaaaagtagttatatgtctttacctagatgcaaagaggctggggagcattggagagcaaatagaatatttaatgaagattactatctctgtcacaacatggtaagcaaactagcaactaattcttacctgcagttgctgcatgtagcttctagaagtgttgtcagaccctttggtacaaatgtccgtgtatataacaagaagttcattccctaaaatgactataagcctgaccgctacgtacatcatgcactagggtatcctgaacattcacagttgtgtcacattgtttaaagtgataatttagagtgctctttgttttgtaaatttttaattttcatgggtacrtagtaggtatgtttatttatggggtacatgagatgttttgatacaagcatgaaatgtgaagtaatctagaaggctttttgaattattttgattaatagtaccacatggacaaatggtctctgacacaggtagtagatcctgtgggaggctaagaggatgggtctcaaaagtgggcccagaagtaaattctgatatattatccctcttttgttcaagaagtttcttctttctgccctgaaataagttctttggaagtaggctgtatataagttatttctagttatgaatcactgtattggttctgccaagaatgccagggttaccctccacattgaagttactactataacttatgaacaaagtaagtgagaggaggcaaagatcttccttctatgtgttttgcaggaaaggcttctcagaggagatgtcatctgagctaacttttgaaaatagatactttttatttgtgagcagataatattccagtgcagaaaggagcactgtgaggtataaggggagaaacctgactaaagtcaagaaggcatgaaagtacatgacatttctgggaacaaaggagaacaccaatgggttaaaacatgaggttcttgtgagggaagtggtataaaataaatagagaggtgtgtggttgctctaatgatggtatccaaagaatcacacctaccagtattgactaagcttgactgtgtgatgtaagttgaag

SEQ ID NO: 64984 - DNA, 571 bp, Homo sapiens
  misc_feature (1)...(571): n = A,T,C or G
gaggggaagagggcagngcaggggcggnaggcggkgcaggggaaagttgcccacagttgtcacgaggcttcatgtctttctgccagacagcagattgacagctagagtgggcaggggagggctgggctccaccctctccccccctcagcacttcaggggcaaagaaatgggaggagtaggacccgacacgacacgggaacacaaggtggaagggggtggcccaggctctgactctctccagagaggtcctgacgatggtctcttgctcttgacgacaggatggaaaggaagcctccagttttcactcctctttgcctttccctaggtttctgtctgtgnctgtgccgctctgtagagtgccttttaatcaaaggatcattcatttgcctttacagcaggtagagtctgcacccttgtcccctgccctgccctttcctagagcacagcccaggatcaccacctaagggccaggcacagtggggcactttgcatatgtcgtcttagatgggaatggaaatcacacagtcacaaaggagcagacccagaggtaactgcaagtcttcaaggcttc

SEQ ID NO: 64985 - DNA, 571 bp, Homo sapiens
  misc_feature (1)...(571): n = A,T,C or G
gaggggaagagggcagngcaggggcggnaggcggtgcaggggaaagttgcccacagttgtcacgaggcttcatgtctttctgccagacagcagattgacagctagagtgggcaggggagggctgggctccaccctctccccccctcagcacttcaggggcaaagaaatgggaggagtaggacccgacacgacacgggaacacaaggtggaagggggtggcccaggctctgactctctccagagaggtcctgacgatggtctcttgctcttgacgacaggatggaaaggaagcctccagttttcactcctctttgcctttccctaggtttctgtctgtgnctgtgccgctctgtagagtgccttttaatcaaaggatcattcatttgcctttacagcaggtagagtctgcacccttgtcccctgccctgccctttcctagagcacagcccaggatcaccacctaagggccaggcacagtggggcactttgcatatgtcrtcttagatgggaatggaaatcacacagtcacaaaggagcagacccagaggtaactgcaagtcttcaaggcttc

SEQ ID NO: 64986 - DNA, 827 bp, Homo sapiens
gctggggactaaaacaggattaagataggagtctagttctcaaggagggaaggcctgtcattgctcactgtagtttgaggtgtcatgacacaggcgcacggactgcattgggggaattgatccccaaactgagattcagattcagggcccaaatcacgctgtacttagctgccatgtttgtcattatcagcaccatgtctccctctgtgccattgctaatgcagtagttctgcaaagaacaactaaccctggattttctgcaagtttcaatttggtgcttaccaggatgggtcaagggaaaatttctcatggactgtggtactcgtttctatcactaagtgatgcttagcaagtttgctgatgaaaacatctagcggaaagaagcagacggtggcatggctttggaaactccctacattccccacaaaaacaccagagcacaaaactaaaaacccacatacaccaactgagccagagtagggacaggtctgagcccacccccacctacatgtttctccatacatgcctgctgaccatcggacctcctggcatcaccccagctggctcatacccgctgaccagaccttgcaagctgtctaaaaaaactaagctaagaagyatttcaccataaattccactcaggagagttaagtctattgcccacatgtgcacaagaccaggagaatgaccaatccttactctgagcctcattgtaataccttcgcccagggaggggcttagctgccattttctaatcatgcaaaatatgtgttagcatgatttcttactgcatctgcacaccctgcactccaccctgcacgtgaaat

SEQ ID NO: 64987 - DNA, 1121 bp, Homo sapiens
ttgcatttgactttttttagtagttactggttgcaatggttgattttatatgtcaacttggctaggccgtggtgaccagttgttaggtcaaacaccagtctagacgttactgtgaagatawgttttagatgggattaacatttaagtcaacaggctttgagtaaagcaaattaccctccataatgagagtgggcctcattcaatccattgaaggtcataagagaaaagatggaggtccctggaggaagacggaattctgccaggcaatcatcttcagacatcaactcttccctggctctccagccaatgggcctgccctgaagatttcagacttgccagctctcataattgcatgatccaattcgttaaaagagagagagagagaaaggagagagatatcctatttgttctgtttctctggaacaccctaatatgctggtagacatatgggctccccaaatggattgtaagtcatgcagaggccgaaactgagtttcctccacttccacgaccccagcagtgcctagcccatagccagccacagaatggaccctcagtaaacgcatgctgagtggacagcacatggtctaggccgggaaggggtgaggtgtaggaagcagggaagtgcagaggtgcacaccctgaatgtgagggcctccttgagtttgcagcccaggtcccgggccctgcccgtgtggtctgcagggagaagtcattggtctacatgcaatgaccctgccggcctctgggactcacactccgcaagctcaagggcctggttggcaccacggaaaaatcttgaagcgctcacttggcgtgaacaaggtctggggttcatgagaatcagaaccttccagaaccctgggctgtgcactgttatgctgaaaggctggtgctcattttggaccgtcaagcgcagccatgagcagaaggaatccctccgagcatcgtgcccagatggcggctcagcctttcccttgtaacgcgtggcccagaggaaggggccggcgttgttctgccacagggctgttctgccacagggctgctcccccaggaagccctaaatgtgcagactgtgtgggaggaaacagcccccttggattactgggctataaaacttc

SEQ ID NO: 64988 - DNA, 1121 bp, Homo sapiens
ttgcatttgactttttttagtagttactggttgcaatggttgattttatatgtcaacttggctaggccgtggtgaccagttgttaggtcaaacaccagtctagacgttactgtgaagatatgttttagatgggattaacatttaagtcaacaggctttgagtaaagcaaattaccctccataatgagagtgggcctcattcaatccattgaaggtcataagagaaaagatggaggtccctggaggaagacggaattctgccaggcaatcatcttcagacatcaactcttccctggctctccagccaatgggcctgccctgaagatttcagacttgccagctctcataattgcatgatccaattcgttaaaagagagagagagagaaaggagagagatatcctatttgttctgtttctctggaacaccctaatatgctggtagacatatgggctccccaaatggattgtaagtcatgcagaggccgaaactgagtttcctccacttccacgaccccagcagtgcctagcccatagccagccacagaatggaccctcagtaaacgcatgctgagtggacagcacatggtctaggccgggaaggggtgaggtgtaggaagcagggaagtgcagaggtgcacaccctgaatgtgagggcctccttgagtttgcagcccaggtcccgggccctgcccgtgtggtctgcagggagaagtcattggtctacatgcaatgaccctgccggcctctgggactcacactccgcaagctcaagggcctggttggcaccacggaaaaatcttgaagcgctcacttggcgtgaacaaggtctggggttcatgagaatcagaaccttccagaaccctgggctgtgcactgttatgctgaaaggctggtgctcattttggaccgtcaagcgcagccatgagcagaaggaatccctccgagcatcgtgcccagatggcggctcagcctttcccttgtaacgcgtggcccagaggaaggggccggcgtygttctgccacagggctgttctgccacagggctgctcccccaggaagccctaaatgtgcagactgtgtgggaggaaacagcccccttggattactgggctataaaacttc

SEQ ID NO: 64989 - DNA, 1168 bp, Homo sapiens
acaaatgtatgaacacacataggccatacacaccagacacacacaccacactgacacacacacacacacacacacaygcatttgtcaggaaagagcctttcaccacccgctgagacccctcccgcagcatttctgagcccaggtgcagggcagggctcagctggccaaccaggccagcatcaggtcacaatgaactcgcagcatggataggaaaggcccaagtcctctaagcctcagaattcagtgccacctagaggctcctctgttgcatgatttctcaattctgagtgaaaagacaggcccagccactggcctcatgaaacaggaggtggtcccatgagcctgtaatgtccaaagaaggcactcatatttcttatgaggacttgagagattggggctgcctgtccgagctgctggccaggtccccaagacctggaagtgctcagtatcccctcgcaattttgccactctactcagagtgcaaactggtcaatcacttctggaaactatctggcaatatctatttgagttgagcatgtgcagcccctcggcacagcagtcacactcctgatctatacccaacatatatgtgcatataaaactcctgcccaccccagctcactgaaataaggcccctgaaaatcccagcccctcagctgggccattcccccttgcagggaaagggctggaggaagctgggagctcatgttgctcccaggcccagcagcatcgcaagtgtggatggctccctccatcctgccccctctcggtccccaccctctgaagcagcggttcttagccagggatgattttgtcccctggggacatttggcaatatctggagacatttttgcttggcatacccggggaagaggatgtactggcagctggtgggtagaggccaggggttctgtgcagcatcctacggtgcattgggcagccccacgtgaaggagcatccggctccaaacggcaatagcaatgaagccaagatattgtgccttaagttctcaatggcggaagagtgggtgtaaattattacttattttaaataattgggcatttcagctaaagatttagaattaaaaaattctattacaggagaattcagttctaaggcagatgcatttatcttgcattttaaaagaacaaagctgcctaatgaaaac

SEQ ID NO: 64990 - DNA, 728 bp, Homo sapiens
taggcttctgttggcttttgccgcctttctgggagtaataaagttgctttgccttacttgtgtaagtgttctatctccctggacttatactcggacagctgggtttgtgcaaaatctcctagcaaatgcaggaatcttagcagaaattaacsaggtgtttagagccctcccttgggattggtaatcagtgtgtgatgtttctctctcagtgattgacactggtgtatggtattctgcttaacagagggagagaaagaacatgaaggagcaaatgaagtaaaatgaactaggttaatctaaattaaggatttttttttttttttttgaaacaaggtcttgctatgttgcctaggttggtcttaaactcctggcctcaagcgatcctctcaccttagcttcccaaagtgcttggattataggtgtgaaccaccagctctgcctacattgaatgttcttgacaccatttttattttttgcaacttttctttctttctttccattttgggacaaagtcttgctctgtcacccaggctggagtgcagtggtgcaatcacaacttattgcagccttgagctcctgggctcaagcaatcctcccacctcagcttcccaagtagctgggactacaggtgtgcaccaccatgcctggctaattaagaaaaaagaatattttttagagacagggtctctctctctatgctgctcagtctgatctcaaactcctgggct

SEQ ID NO: 64991 - DNA, 728 bp, Homo sapiens
taggcttctgttggcttttgccgcctttctgggagtaataaagttgctttgccttacttgtgtaagtgttctatctccctggacttatactcggacagctgggtttgtgcaaaatctcctagcaaatgcaggaatcttagcagaaattaacgaggtgtttagagccctcccttgggattggtaatcagtgtgtgatgtttctctctcagtgattgacactggtgtatggtattctgcttaacagagggagagaaagaacatgaaggagcaaatgaagtaaaatgaactaggttaatctaarttaaggatttttttttttttttttgaaacaaggtcttgctatgttgcctaggttggtcttaaactcctggcctcaagcgatcctctcaccttagcttcccaaagtgcttggattataggtgtgaaccaccagctctgcctacattgaatgttcttgacaccatttttattttttgcaacttttctttctttctttccattttgggacaaagtcttgctctgtcacccaggctggagtgcagtggtgcaatcacaacttattgcagccttgagctcctgggctcaagcaatcctcccacctcagcttcccaagtagctgggactacaggtgtgcaccaccatgcctggctaattaagaaaaaagaatattttttagagacagggtctctctctctatgctgctcagtctgatctcaaactcctgggct

SEQ ID NO: 64992 - DNA, 728 bp, Homo sapiens
taggcttctgttggcttttgccgcctttctgggagtaataaagttgctttgccttacttgtgtaagtgttctatctccctggacttatactcggacagctgggtttgtgcaaaatctcctagcaaatgcaggaatcttagcagaaattaacgaggtgtttagagccctcccttgggattggtaatcagtgtgtgatgtttctctctcagtgattgacactggtgtatggtattctgcttaacagagggagagaaagaacatgaaggagcaaatgaagtaaaatgaactaggttaatctaaattaaggatttttttttttttttttgaaacaaggtcttgctatgttgcctaggttggtcttraactcctggcctcaagcgatcctctcaccttagcttcccaaagtgcttggattataggtgtgaaccaccagctctgcctacattgaatgttcttgacaccatttttattttttgcaacttttctttctttctttccattttgggacaaagtcttgctctgtcacccaggctggagtgcagtggtgcaatcacaacttattgcagccttgagctcctgggctcaagcaatcctcccacctcagcttcccaagtagctgggactacaggtgtgcaccaccatgcctggctaattaagaaaaaagaatattttttagagacagggtctctctctctatgctgctcagtctgatctcaaactcctgggct

SEQ ID NO: 64993 - DNA, 1004 bp, Homo sapiens
attaaaattttaacaattaggaaaattagaatttatatatgatagattaaaatatgattatttcctaaaagttttctttagttttacrggtttgcttctggattgctttcaatagttattagtgaatttaaaatttgattcagtatgaaggtaatgtacacccatcttcttcagaacacgtattttaaaatgtgacatcatctgttctgagtctaagcactgaagaatgaagtgtccacattcaccgtatttatgcacagacacattctcattccattgacatttaagtgatgtaatgaactaaaactgccacaaagagaggagggttgggaggctgagctctggacagctctgtcactgggcaagtaacatggtgtttagaaaatctctgctcctttctgtgccattggtctatatctctgttttggacaaaaaaccaaacaccgcatgttctcactcataggtgggaattgaacaatgagaacacttgcacacaggaaggggaacatcacacaccggggcctgttgtgggatggggagaacggggaggaatagcattaggagatatacctaatgtaaatgacgagttaacgggtgcagcacaccaacatggcacatgtatacatatgtaacaaacctgcacattgtgcacatgtaccctagaacttaaagtataataaaataaaaataaaaattaagtaaagtaaaataaaatctctgctcctgtttgctgtccccactgataaaatggtagagcagatcactcctaagtcagagcttgtgtaatagctgcgtaggagtgtgaaaccaggctacttgggagccagtgctggctccagaactttccagctgcgtgtccttgggcaggtggtttacactctgttgcctcagtttctccagcaataaaataagaaaaaaatcatagccagctgatcaggttgttgtggaggattacattattaaatcttggccaagccctcggagcagactgtaaccctagtact

SEQ ID NO: 64994 - DNA, 1004 bp, Homo sapiens
attaaaattttaacaattaggaaaattagaatttatatatgatagattaaaatatgattatttcctaaaagttttctttagttttacgggtttgcttctggattgctttcaatagttattagtgaatttaaaatttgattcagtatgaaggtaatgtacacccatcttcttcagaacacgtattttaaaatgtgacatcatctgttctgagtctaagcactgaagaatgaagtgtccacattcaccgtatttatgcacagacacattctcattccattgacatttaagtgatgtaatgaactaaaactgccacaaagagaggagggttgggaggctgagctctggacagctctgtcactgggcaagtaacatggtgtttagaaaatctctgctcctttctgtgccattggtctatatctctgttttggacaaaaaaccaaacaccgcatgttctcactcataggtgggaattgaacaatgagaacacttgcacacaggaaggggaacatcacacaccggggcctgttgtgggatggggagarcggggaggaatagcattaggagatatacctaatgtaaatgacgagttaacgggtgcagcacaccaacatggcacatgtatacatatgtaacaaacctgcacattgtgcacatgtaccctagaacttaaagtataataaaataaaaataaaaattaagtaaagtaaaataaaatctctgctcctgtttgctgtccccactgataaaatggtagagcagatcactcctaagtcagagcttgtgtaatagctgcgtaggagtgtgaaaccaggctacttgggagccagtgctggctccagaactttccagctgcgtgtccttgggcaggtggtttacactctgttgcctcagtttctccagcaataaaataagaaaaaaatcatagccagctgatcaggttgttgtggaggattacattattaaatcttggccaagccctcggagcagactgtaaccctagtact

SEQ ID NO: 64995 - DNA, 1004 bp, Homo sapiens
attaaaattttaacaattaggaaaattagaatttatatatgatagattaaaatatgattatttcctaaaagttttctttagttttacgggtttgcttctggattgctttcaatagttattagtgaatttaaaatttgattcagtatgaaggtaatgtacacccatcttcttcagaacacgtattttaaaatgtgacatcatctgttctgagtctaagcactgaagaatgaagtgtccacattcaccgtatttatgcacagacacattctcattccattgacatttaagtgatgtaatgaactaaaactgccacaaagagaggagggttgggaggctgagctctggacagctctgtcactgggcaagtaacatggtgtttagaaaatctctgctcctttctgtgccattggtctatatctctgttttggacaaaaaaccaaacaccgcatgttctcactcataggtgggaattgaacaatgagaacacttgcacacaggaaggggaacatcacacaccggggcctgttgtgggatggggagaacggggaggaatagcattaggagatatacctaatgtaaatgacgagttaacgggtgcagcacaccaacatggcacatgtatacatatgtaacaaacctgcacrttgtgcacatgtaccctagaacttaaagtataataaaataaaaataaaaattaagtaaagtaaaataaaatctctgctcctgtttgctgtccccactgataaaatggtagagcagatcactcctaagtcagagcttgtgtaatagctgcgtaggagtgtgaaaccaggctacttgggagccagtgctggctccagaactttccagctgcgtgtccttgggcaggtggtttacactctgttgcctcagtttctccagcaataaaataagaaaaaaatcatagccagctgatcaggttgttgtggaggattacattattaaatcttggccaagccctcggagcagactgtaaccctagtact

SEQ ID NO: 64996 - DNA, 1168 bp, Homo sapiens
ttaattatgcaaacctcttttgattcaatgtgcaaacagtgcattaaggttttaaccttgaggagaatggttttcatgaggcctgacagctgaatcccaggacttggaaaaggagacgactgtgtttggcttttgaagaattagctttcacgtccctccgggtgataggtttgggtgcagagtggcttctgggctgatttgattataagccaccattttgtgtttccctcagtcaccagaattaagatctttctaacagcaggcgtgtaagaagcaagaaaggaaggccgtggtgtgggagtgtggagaaaaatggattctagaaaggttagcaggctgtcttccttgctgctattgtgtctacaccgggggacagtggggtcatgtctgcctctgggctgtcttccccaggatagacagggttggggacagagaggacggtgaggattccccatgaccaaggttgggctgctcttggctctgtcttagttgctctgcttgatgttaygaggggatttggatggggttgacatgggcctcaagaagaaatgcttctcagcccccttgcccccaataactggggggtatcagcctttagaaaggatcctccaggctcccaccccagccccagcccctggagcaaaaccacattctcactaggcctctcctgaaaaggggaagtgtaagacgtgacttcccttagaaagacctgagcttctctttttctatgggttttggggtgaggccagcagtgacttaatcccaataaatattaaatgagacataaatccaactttagcaaatgtcacccacagatttttgctaaatcaaacttatttgtattttatttttttaaatggatgaacttcatctcgaaggaatataaaaaaactgacaaaccaaaggccactgaggtccatgcatggactagggaggaaaaccccatgtatttactgccagatccatgccaggagctgtgcttgggcgaagccatagctggtggcataggtattgtcaccccctactcctcacatggaaactgaggtggctcagaaaagtctacatgatttgcctaaggtcaaaaggcagggaagtggctgttatttgaatccagatctgtcagacccaaagcccatgatctgttggccactttgccgtttgctttggg

SEQ ID NO: 64997 - DNA, 855 bp, Homo sapiens
ccatgcataactttaacaaatgcaatgcaaagggtggtggtctgcatggattatttctatcaaaaatgaatttatgcattcaccattagaagcagatgcaagactatagcttaaaagcaaattagaattcaagctggatttgcaaacattccagtttaacatttggatagcaaaggaactcagagtttataaaatttaaatataagatagacagtcacaattctgtgcaagcagtcagggttaattcagatcgtttcctckgctcttgcattccctgatttcaagcacggcgaggctggggctgtaattacggaatgggtagtactcactgttcaccagttgtgtgtaagctttaaactaataactcagcaattacgagaaaaatgagcggtaattacacccattttactcgcggctagacagatgggacattttctcctcgttattggcaaactgtcaccacatttatttcatttttactgtttactatttgttgtgctttgattaagagtaattataggctaggaaaatatgaaaaacatgaatgttgggtatttttaaaaatagaaggaggcccttctccctgttttatattgatagaattctcattttagatcctattaaaatgatatcaacattctcaagatatttccaggcaggcttcagttctgtgacagcttttcagcaggggattcccatgtttgctcattatttgggtcgtcatagacccataaatatcctgcattttttttttttttacagcagcctctgtgtccctcacactcgtccattttggtccattttggtccattttgtgtctgatgataaagcacaggagaaatccacccgtcgctg

SEQ ID NO: 64998 - DNA, 542 bp, Homo sapiens
tgaacacccgtgtgagtctgtgtgtgcctgtgtgaatagcaaatgagctgtcaccagaataccttcatcccagtaggtgtgtccctaatgacaggaacaggatgtgaggatgaatccactggaaactgctggggaaaagcacctgaggccaggggtcaaggaggcagctctgggtagcagagcagaggctgtgagcatcctctggagggcatgttagcacacgggggtaggcccgacctgtggagctgactcagtgggtctaggggggactccagaggctgyacattctacatgttcctgaggtacaatggtacagctgggtaggtggtggaggagggcacacattgagacccagtgagaggaatgggtgcctccagcatcaaccatatttcctgggccatttccacatagctatttggatgtgttatatcaagtaagttaaaactctgcttttattttttaaaaatcccaataatgtggtagtaaacatttctaatccttgcttttcctgggatttgccaaaaaaaaaaaaaaatgttcaa

SEQ ID NO: 64999 - DNA, 682 bp, Homo sapiens
tgtggttcatacacaacttacccatgtaaaaaacctgtacgtgtaccctctgagcctaaaataacagttggaaaggaaaaaaatcataaaagcaagactcaactaaaaaaaaacaaaaagaaaaaattgtgatatatataccatgaaatgcaacccagccataaaaaaaaatataatgacttttatagcaacttggatgaaactgggggccgttattctaagtgaagtaactcaggaattaaaaaccaggtactcatgctctcacttataagtgggagctaagctataggtatgccaaggcattcagagtggtgtaatggacattggagactcagaagtggggagggaggtgaggaatgaaaaactagcagttgggtaaatgtayactatttgggtgatgcgtgcactaaaatcctagacttcaccactacacgattcatccacgtaaccaaaaaccacttgtaccattaaaactaatgaaagaaaaaaattaactaattaatttaaaaaccacactggggagtccctgcatgctaagtaggtagaacaaatcaatcataaatgactgccattttgtctacattctgtataaaaaaggtgaaactgctccttttcttctcctttaaaaaaaaaaaaaaacaactttggtatttgtgctcaagactactatgggaaggaccca

SEQ ID NO: 65000 - DNA, 682 bp, Homo sapiens
tgtggttcatacacaacttacccatgtaaaaaacctgtacgtgtaccctctgagcctaaaataacagttggaaaggaaaaaaatcataaaagcaagactcaactaaaaaaaaacaaaaagaaaaaattgtgatatatataccatgaaatgcaacccagccataaaaaaaaatataatgacttttatagcaacttggatgaaactgggggccgttattctaagtgaagtaactcaggaattaaaaaccaggtactcatgctctcacttataagtgggagctaagctataggtatgccaaggcattcagagtggtgtaatggacattggagactcagaagtggggagggaggtgaggaatgaaaaactagcagttgggtaaatgtatactatttgggtgatgsgtgcactaaaatcctagacttcaccactacacgattcatccacgtaaccaaaaaccacttgtaccattaaaactaatgaaagaaaaaaattaactaattaatttaaaaaccacactggggagtccctgcatgctaagtaggtagaacaaatcaatcataaatgactgccattttgtctacattctgtataaaaaaggtgaaactgctccttttcttctcctttaaaaaaaaaaaaaaacaactttggtatttgtgctcaagactactatgggaaggaccca

SEQ ID NO: 65001 - DNA, 682 bp, Homo sapiens
tgtggttcatacacaacttacccatgtaaaaaacctgtacgtgtaccctctgagcctaaaataacagttggaaaggaaaaaaatcataaaagcaagactcaactaaaaaaaaacaaaaagaaaaaattgtgatatatataccatgaaatgcaacccagccataaaaaaaaatataatgacttttatagcaacttggatgaaactgggggccgttattctaagtgaagtaactcaggaattaaaaaccaggtactcatgctctcacttataagtgggagctaagctataggtatgccaaggcattcagagtggtgtaatggacattggagactcagaagtggggagggaggtgaggaatgaaaaactagcagttgggtaaatgtatactatttgggtgatgcgtgcactaaaatcctagacttcaccactacacgattcatccacgtaaccaaaaaccacttgtaccattaaaactaatgaaagaaaaaaattaactaattaatttaaaaaccacactggggagtccctgcatgctaagtaggtagaacaaatcaatcataaatgactgccattttgtctacatkctgtataaaaaaggtgaaactgctccttttcttctcctttaaaaaaaaaaaaaaacaactttggtatttgtgctcaagactactatgggaaggaccca

SEQ ID NO: 65002 - DNA, 2851 bp, Homo sapiens
cagctgtcttcactcatccacgcatggactgcagctgtgcctatgcagcagaattgagcagttaagaccgagactgcagggcctacaaagctgaaaatatctgctctctggcccattagagaaacagtttgcagactcgtacaggacagtgctgtggacagaaccagcatgtgaggtagaactyactgggtgtgctgcaggtccaaggcagggtgggaaggagagaggggagaaaggttgacaggagaggcactactaagaaaggagcattggagaaaggcctgggctctgcccagtgttggttagagttcgttactctccttttatccatgctccaatggatagttctaacttgtgttctatcagaagacaaggaatagtaatgtctgcagtaacaatggagctccagtcctggattcaatatctgccctctatagctcagtagggattaagaggaggatggcattctttctctagagctaggctttgtctctctttccttttcttttttcttttttttttttttcctgagacagtctcgccttgtcacccaggctggagtgcattgatgccatctcagctgactgcagcctcgacctcccaggctcaagtgattctcccacttcagcctcctgagcagctgggaccacaggcacacaccaccacacccagctattttttttcttttgatagagatgaggtctcactatgttgcccaggctggtcttaaacccgtgggctcaagcaatcctcccaattcagcctttgaaagtgctaggattataggtgtgagccaccatgcctagcctcttatctatttttgggtaatgaaaagctttagccttgactaaagagaattttagacatcaacatgcatgaataggtatttgcgaggagaatattgaaaaagttgtctgggcaaggcacagtggctcatgcctgtaatcacagcacattaggaggccgaggcaggaggaccgctgcaggtcaggaatttgagaccagcctgggcaacatagtgagaccttgtctctacaaaaatcaaaaagttaactgggcatggtgatggtggtatgcacttgtagtcccagctactcaggaggctgaggtaggaggatcacatgagcctggaaggtcaaggctgcagtgagccaggatggtgccactacactgcattcagcctgggtggtagagtgagaccctgtctcaaaacaaaaacaaaaacaaaaaaacaaaagaaaagaaaaaaagaaaagaaacagttgtccaataggctactgtatgttccctgttaggaatgtgctagaagcattcagaccaagggcccctgtgaacactctggcttatgttgaggggaaatactccacaagtccagatgcaacacgtgccacagattccacacgggcccacgggagcaacacaggcactccctgaatcacactctccttcagtgggaagtcttgtttcctaaattcactaaggatctgccacctaaattcttctgttatttacagaaaaacaaaccctgtttccaacttcaaattgttactggcaggcaaaacaagaaggtaaaatggttttatttcttatacatctataattactcaaagcacaaagtacttttatttttggtctcaacttaaatttttcaaaagaacaggaagagtttattacaggaattgaaagaatttgaagtagctttcagcatttttaatacaatgaagagtttggctttaaaaatgttatgggctatcttgaaatagtttgttacatcttagtgcattaacttaaatgtatttgaactagtgaaatacgtttgaaggcacacattgtgtttttctgtcttgcttcatgctaccttgaaaatagtctggaaaatagctgtgccctcctggctggggttcttcctgtgatggaccctaaccaacttcgtccagccgagttgccataataataacaataaaactaatgtcatgtttcttcccttgccttaggagaggggtccatgacatagcagatgccatttgatgatgtctatgtaattcttgattggatatatgttttcctttttcattctaacatctgtgccctgtttactaacttatgtatctcacttgatttctctgaaaagatgggaaatgtcatcagcgagatggcttaaggactgctgtctgaggaaatacagcacattaaacagtgtatatccacctatgcactccctgtacggatggcatccatgcattcataatgctcaatgccatattaactttagcttgattttccaatttgttctctgtgaaaagcagagttaggattatatgagaactgataaaactgtctaagatggtcttctgaatacttttattaaattactacctacccatctatttttaaaaattaattaattaaatttttgagacgagtcttgctctgccactcaggctagagtacagttgagcaatcttggctcactgcagcctctgtctcctagcgttcaaggaattattctgcctcaacctcatgagtagctgcgactataggcatgatccatcatgcctggctaatttttgtatttttaatagagatagggtttcaccatgttggccaggctggtctcgaactcgtgatgttaagtgatctgcccgccttggcttcccaaaatgctgggattacaggcatgtgccactgtgcccgaccctatccatctattattaggttactgaaaataaacttctattttttgttgggaaaatttcaccacatttacatttattgggagatatttgccatcagaaatggcagtgctgtccagagccattggtggggtgggcggaatcagcatctaggatag

SEQ ID NO: 65003 - DNA, 2851 bp, Homo sapiens
cagctgtcttcactcatccacgcatggactgcagctgtgcctatgcagcagaattgagcagttaagaccgagactgcagggcctacaaagctgaaaatatctgctctctggcccattagagaaacagtttgcagactcgtacaggacagtgctgtggacagaaccagcatgtgaggtagaacttactgggtgtgctgcaggtccaaggcagggtgggaaggagagaggggagaaaggttgacaggagaggcactacyaagaaaggagcattggagaaaggcctgggctctgcccagtgttggttagagttcgttactctccttttatccatgctccaatggatagttctaacttgtgttctatcagaagacaaggaatagtaatgtctgcagtaacaatggagctccagtcctggattcaatatctgccctctatagctcagtagggattaagaggaggatggcattctttctctagagctaggctttgtctctctttccttttcttttttcttttttttttttttcctgagacagtctcgccttgtcacccaggctggagtgcattgatgccatctcagctgactgcagcctcgacctcccaggctcaagtgattctcccacttcagcctcctgagcagctgggaccacaggcacacaccaccacacccagctattttttttcttttgatagagatgaggtctcactatgttgcccaggctggtcttaaacccgtgggctcaagcaatcctcccaattcagcctttgaaagtgctaggattataggtgtgagccaccatgcctagcctcttatctatttttgggtaatgaaaagctttagccttgactaaagagaattttagacatcaacatgcatgaataggtatttgcgaggagaatattgaaaaagttgtctgggcaaggcacagtggctcatgcctgtaatcacagcacattaggaggccgaggcaggaggaccgctgcaggtcaggaatttgagaccagcctgggcaacatagtgagaccttgtctctacaaaaatcaaaaagttaactgggcatggtgatggtggtatgcacttgtagtcccagctactcaggaggctgaggtaggaggatcacatgagcctggaaggtcaaggctgcagtgagccaggatggtgccactacactgcattcagcctgggtggtagagtgagaccctgtctcaaaacaaaaacaaaaacaaaaaaacaaaagaaaagaaaaaaagaaaagaaacagttgtccaataggctactgtatgttccctgttaggaatgtgctagaagcattcagaccaagggcccctgtgaacactctggcttatgttgaggggaaatactccacaagtccagatgcaacacgtgccacagattccacacgggcccacgggagcaacacaggcactccctgaatcacactctccttcagtgggaagtcttgtttcctaaattcactaaggatctgccacctaaattcttctgttatttacagaaaaacaaaccctgtttccaacttcaaattgttactggcaggcaaaacaagaaggtaaaatggttttatttcttatacatctataattactcaaagcacaaagtacttttatttttggtctcaacttaaatttttcaaaagaacaggaagagtttattacaggaattgaaagaatttgaagtagctttcagcatttttaatacaatgaagagtttggctttaaaaatgttatgggctatcttgaaatagtttgttacatcttagtgcattaacttaaatgtatttgaactagtgaaatacgtttgaaggcacacattgtgtttttctgtcttgcttcatgctaccttgaaaatagtctggaaaatagctgtgccctcctggctggggttcttcctgtgatggaccctaaccaacttcgtccagccgagttgccataataataacaataaaactaatgtcatgtttcttcccttgccttaggagaggggtccatgacatagcagatgccatttgatgatgtctatgtaattcttgattggatatatgttttcctttttcattctaacatctgtgccctgtttactaacttatgtatctcacttgatttctctgaaaagatgggaaatgtcatcagcgagatggcttaaggactgctgtctgaggaaatacagcacattaaacagtgtatatccacctatgcactccctgtacggatggcatccatgcattcataatgctcaatgccatattaactttagcttgattttccaatttgttctctgtgaaaagcagagttaggattatatgagaactgataaaactgtctaagatggtcttctgaatacttttattaaattactacctacccatctatttttaaaaattaattaattaaatttttgagacgagtcttgctctgccactcaggctagagtacagttgagcaatcttggctcactgcagcctctgtctcctagcgttcaaggaattattctgcctcaacctcatgagtagctgcgactataggcatgatccatcatgcctggctaatttttgtatttttaatagagatagggtttcaccatgttggccaggctggtctcgaactcgtgatgttaagtgatctgcccgccttggcttcccaaaatgctgggattacaggcatgtgccactgtgcccgaccctatccatctattattaggttactgaaaataaacttctattttttgttgggaaaatttcaccacatttacatttattgggagatatttgccatcagaaatggcagtgctgtccagagccattggtggggtgggcggaatcagcatctaggatag

SEQ ID NO: 65004 - DNA, 809 bp, Homo sapiens
ttcctagtaattaactggttgactgctcagaaacccaggaggcagaaccaggcagcctgggtggaagtcctcaatctgacagtcaccagccttcagaacttgggtaagttcctttgacttcaggatctccctctgcacaaaactgggtgttcccagctcacagatcaaatgagataatgcatgcagaagtttagcattgtgcctggyggggagcaaatatctctaaggacagctgtcccagttggccaggaaatactagtgctggaaggtgcctccaagactgccttttccaaggtaccttgcacttccctggggtagagggattttagtgcagaaggcaagtggagcctgcagtttattaaacgatgactacggaggtcactggaaataaggcagttttgtttttaaatgacagactgagtcattttcctgttgtaagagctcaactctgaaacttaataggttgtaatgatgcctcaattagctggaattattgggtatagtggagatgtgatattctggttaaaaatattcttcagattactgaaatttaattaaatctctgaatattcaacttagtattttacagaaatcatacctctctttcttaattctaaatgagaattttgcttattctcagtaaaattttcacgcagatagtacaatactgagggccaaatggtaaaattattctcaggatttttattgcaagtaatcactttgataattgttctcagcacagaaatatttaagcaattgaccatttcatattttggggacagcctgtggttctgcaaagatttcttatt

SEQ ID NO: 65005 - DNA, 557 bp, Homo sapiens
ctataatatgtaaaaatacccctcggacagataagagaagaaggtggatagaaattcaggcttttggcccttttcaccacttcccaaccctcttccctttttctctcttctcttgtctcctgccagagcttgaccactctctggttctaactgcacttttattacttctctgtcccacttgaaagatggcttctttttattttgttatgacctttgggtctttatattgtcagttgctataaatgaataaaggctttttccttcttagtgtgttggtgaagaactrggagtattgcactcactgatcaggagggaacaggtctagggagtgcatagaagctttccaagaggagtggacaggaagcctgtcctccccctcgccctccacccccatcccgccccacctcctgcgaaggcaggaggaccatgaacctgcaatttggctgatggcagttaaggggtaatcaaaagtccaggcataggaactggttccttagtgtccatccaaagcctcaagaggctgacctggaaggatgcaggtgtgagaagccatgtgt

SEQ ID NO: 65006 - DNA, 557 bp, Homo sapiens
ctataatatgtaaaaatacccctcggacagataagagaagaaggtggatagaaattcaggcttttggcccttttcaccacttcccaaccctcttccctttttctctcttctcttgtctcctgccagagcttgaccactctctggttctaactgcacttttattacttctctgtcccacttgaaagatggcttctttttattttgttatgacctttgggtctttatattgtcagttgctataaatgaataaaggctttttccttcttagtgtgttggtgaagaactaggagtattgcactcactgatcaggagggaacaggtctagggagtgcatagaagctttccaagaggagtggacaggaagcctgtcctccccctcgccctccrcccccatcccgccccacctcctgcgaaggcaggaggaccatgaacctgcaatttggctgatggcagttaaggggtaatcaaaagtccaggcataggaactggttccttagtgtccatccaaagcctcaagaggctgacctggaaggatgcaggtgtgagaagccatgtgt

SEQ ID NO: 65007 - DNA, 597 bp, Homo sapiens
aggctcaagcggaaccacctggacctcattattcttaagtggtccagtctgaaagtttgggaagaggggaggaaaaaactgccaatccccaggcctggggagccccaccccctcttcaagccagcactgaagcccygggggtttcagccacaatggagagctaaaccgggcccaccccagggcccaggaggggcatctgtagagggttcagccccaggaggacttggaggtcaggcaagccaacgggagttcagagcttaggaggggtgagaggtcagactctggtcctttctcatcacctggggtccgtctgtccttccaggtcacctgggctgtctacagtcaaggccagtctgacaggtgggatggtgcttcccagcaaccccaccctgaggagaaccctgctgcctctccctgctctccacccccagcacaggccccgggaagcctccagctgatgacgacaccaggatggtgctgagtggaccctggggccagcatcacaaggcacccaggaccccagaccacccagccacaccccaggctacgaggagggggcgctccggcgaggctggggtgccttcaaggtgcatccta

SEQ ID NO: 65008 - DNA, 597 bp, Homo sapiens
aggctcaagcggaaccacctggacctcattattcttaagtggtccagtctgaaagtttgggaagaggggaggaaaaaactgccaatccccaggcctggggagccccaccccctcttcaagccagcactgaagccctgggggyttcagccacaatggagagctaaaccgggcccaccccagggcccaggaggggcatctgtagagggttcagccccaggaggacttggaggtcaggcaagccaacgggagttcagagcttaggaggggtgagaggtcagactctggtcctttctcatcacctggggtccgtctgtccttccaggtcacctgggctgtctacagtcaaggccagtctgacaggtgggatggtgcttcccagcaaccccaccctgaggagaaccctgctgcctctccctgctctccacccccagcacaggccccgggaagcctccagctgatgacgacaccaggatggtgctgagtggaccctggggccagcatcacaaggcacccaggaccccagaccacccagccacaccccaggctacgaggagggggcgctccggcgaggctggggtgccttcaaggtgcatccta

SEQ ID NO: 65009 - DNA, 444 bp, Homo sapiens
aggtatgggaggtgggagggcaggcgggccaggtggggagcagggcatcttgccatgggaagggctggaggaaacaccgcatccagggatggccagagctcgcctggagcccctgaaggtcttgcttttagagccgggtggggctgctgtgtggccaagccgggcgagtggccccatcccgggtcctgggctcctggcgtctgccctggagcccaccatgttgcagtactgtgtggccgtccattgctgctctcttcactgtatgaccgggggttccctctgtgccyctcaaagccccaacttgcctggactttgggtctgcagctggcgcatgggaatcttcccacatggcagcgtagggtgactatggagccgaccaaggctgccaaggtcttacttgagtagaagacttccatcctgagcgatcctgttggccggtcctcc

SEQ ID NO: 65010 - DNA, 598 bp, Homo sapiens
agcaccctatattgggatttgtggtaacagcagcttgacaacctgaagtggatgatgcaacagcacttttgaaaggtctctccgtactatcttgatttcatcatctaaagttggtgttggcaaagagaagataagtgtttagggtrttggatatcccagttaccctgatttgatcattacacattttaggcaggtatcaaaatgtcacatgtaccccaaaagtatgtacagctattacatatcagttttttaaagaagaaaaggttggtatggttagcttttctatttcaagtgtatcattcatctttcacatctgggatttctcctatgctctggttggttaataacttttattctgaaatcggtgagattcttatgacatgaaatagtctataaccagttaagtttttatttctctgttctgttcacatcctggggactgggctgccattacataactgagcagccattggtggttcacaccagcgccacacccaattattttctttcagtatttgaattcctgcacaaaagatctgctgtatctgcaaatcactagaggcacaaaagaagtgattacctctactaagggttggga

SEQ ID NO: 65011 - DNA, 729 bp, Homo sapiens
agaggtctgctggggagagatcatttcctccttctgataaaatgtgccagagtgccctggactggtgatacctggaactgggctctgatgtcactttattttaccaaatgtgcccaagtttcccctttttgcaggtgaatggcccttcaaacattcaacmaaaaaggggtattacgattgtaatactaatctttaaaataacactttcttttcttaaggggagtgtggagccacagctggcacagccttgggcccaggctgtccctgctctgtttttgtggttccaggtgcttgtggtgcaggttgtgtggttgaacagtgcttgtgttggccacacacattgttattggaagaggatctttttttcattaccttctgtaatggggaatagtttatattattttccccaatgaccaaaagcaagaaactttgaaaactgaaattttaagaccttaaaacaatgtcattttttttttaaaaaggaaaccctggcatttaaatggcctaccttggaagctgttggagaaggtggattggctctacctgggaaagagaaggctctcccgctgcctaccaacactagtctcgccttttacctcttttccctcctttccaaataactggtttcttctcccttctcttcctcctctcctcccacccgcccctgatttgagcagattatagtattgcctgttaggtaagcagaaacccccaagcctggtcagtaag

SEQ ID NO: 65012 - DNA, 729 bp, Homo sapiens
agaggtctgctggggagagatcatttcctccttctgataaaatgtgccagagtgccctggactggtgatacctggaactgggctctgatgtcactttattttaccaaatgtgcccaagtttcccctttttgcaggtgaatggcccttcaaacattcaaccaaaaaggggtattacgattgtaatactaatctttaaaataacactttcttttcttaaggggagtgtggagccacagctggcacagccttgggcccaggctgtccctgctctgtttttgtggttccaggtgcttgtggtgcaggttgtgtggttgaacagtgcttgtgttggccacacacattgttattggaagaggatctttttttcattaccttctgtaatggggaatagtttatattattttccccaatgaccaaaagcaagaaactttgaaaactgaaattttaagaccttaaaacaatgtcattttttttttaaaaaggaaaccctggcatttaaatggcctaccttggaagctgttggagaaggtggatkggctctacctgggaaagagaaggctctcccgctgcctaccaacactagtctcgccttttacctcttttccctcctttccaaataactggtttcttctcccttctcttcctcctctcctcccacccgcccctgatttgagcagattatagtattgcctgttaggtaagcagaaacccccaagcctggtcagtaag

SEQ ID NO: 65013 - DNA, 729 bp, Homo sapiens
agaggtctgctggggagagatcatttcctccttctgataaaatgtgccagagtgccctggactggtgatacctggaactgggctctgatgtcactttattttaccaaatgtgcccaagtttcccctttttgcaggtgaatggcccttcaaacattcaaccaaaaaggggtattacgattgtaatactaatctttaaaataacactttcttttcttaaggggagtgtggagccacagctggcacagccttgggcccaggctgtccctgctctgtttttgtggttccaggtgcttgtggtgcaggttgtgtggttgaacagtgcttgtgttggccacacacattgttattggaagaggatctttttttcattaccttctgtaatggggaatagtttatattattttccccaatgaccaaaagcaagaaactttgaaaactgaaattttaagaccttaaaacaatgtcattttttttttaaaaaggaaaccctggcatttaaatggcctaccttggaagctgttggagaaggtggattkgctctacctgggaaagagaaggctctcccgctgcctaccaacactagtctcgccttttacctcttttccctcctttccaaataactggtttcttctcccttctcttcctcctctcctcccacccgcccctgatttgagcagattatagtattgcctgttaggtaagcagaaacccccaagcctggtcagtaag

SEQ ID NO: 65014 - DNA, 729 bp, Homo sapiens
agaggtctgctggggagagatcatttcctccttctgataaaatgtgccagagtgccctggactggtgatacctggaactgggctctgatgtcactttattttaccaaatgtgcccaagtttcccctttttgcaggtgaatggcccttcaaacattcaaccaaaaaggggtattacgattgtaatactaatctttaaaataacactttcttttcttaaggggagtgtggagccacagctggcacagccttgggcccaggctgtccctgctctgtttttgtggttccaggtgcttgtggtgcaggttgtgtggttgaacagtgcttgtgttggccacacacattgttattggaagaggatctttttttcattaccttctgtaatggggaatagtttatattattttccccaatgaccaaaagcaagaaactttgaaaactgaaattttaagaccttaaaacaatgtcattttttttttaaaaaggaaaccctggcatttaaatggcctaccttggaagctgttggagaaggtggattggctctacctgggaaagagaaggctctcccgctgcctaccmacactagtctcgccttttacctcttttccctcctttccaaataactggtttcttctcccttctcttcctcctctcctcccacccgcccctgatttgagcagattatagtattgcctgttaggtaagcagaaacccccaagcctggtcagtaag

SEQ ID NO: 65015 - DNA, 757 bp, Homo sapiens
cctgccaataattgcatccagaatattctggaccagttagaccttcctgtgtccacagaaaaagactcattttatgcaacaactgtatctaataaaaataataattaataaaagcatttaatattatattaaagattttgaaaatccttcttaccaatgggttgggctttagaattagatgctttagggaacttgttccttcactttcattttgtaggtagagaatatatatggccatttttttcacctggtttatagtgcttacaatattatgtaatttatccatgttttccattatgaatgttaaaataccttactctcattttccttagcaaacttgtactcaaaaatactcgtggatgcaatctttttaacaagtctaatgcaaatggaatattatattttctggacttacagcagtgctcataattttatgagaaagaayaagaaaaaggattatattgttcatctttgctgtacaaagaatgcatttgcttcccaaagcaagggcgtgagacagcattagaaagaatctccagtttaattgatcattgaaagtaaatatttttatgagctaaagcttatctaagttttcccatgagaaagccatactaaatgtaacctctgacttccctgaaaagtacgcatttagaaagagactgtatgtttctagccatggtgtttaatcctgataaaaaataaatccatatgtagcctagaattgacctatcaaaattcaataccctgggagggtttg

SEQ ID NO: 65016 - DNA, 757 bp, Homo sapiens
cctgccaataattgcatccagaatattctggaccagttagaccttcctgtgtccacagaaaaagactcattttatgcaacaactgtatctaataaaaataataattaataaaagcatttaatattatattaaagattttgaaaatccttcttaccaatgggttgggctttagaattagatgctttagggaacttgttccttcactttcattttgtaggtagagaatatatatggccatttttttcacctggtttatagtgcttacaatattatgtaatttatccatgttttccattatgaatgttaaaataccttactctcattttccttagcaaacttgtactcaaaaatactcgtggatgcaatctttttaacaagtctaatgcaaatggaatattatattttctggacttacagcagtgctcataattttatgagaaagaacaagaaaaaggattatattgttcatctttgctgtacaaagaatgcatttgcttcccaaagcaagggcgtgagacagcattagaaagaatctccagtttaattgatcattgaaagtaaatatttttatgagctaaagcttatctaagttttcccwtgagaaagccatactaaatgtaacctctgacttccctgaaaagtacgcatttagaaagagactgtatgtttctagccatggtgtttaatcctgataaaaaataaatccatatgtagcctagaattgacctatcaaaattcaataccctgggagggtttg

SEQ ID NO: 65017 - DNA, 1517 bp, Homo sapiens
tggctgtctctgctgtgtccctgcctctgtacctgagtgtttctaatgacttgcaggtggagctggagacctggtctctctagggcctaccctgagctcaccatctgaaggagagtgccatcatccttaggaactccttctccagacatgcttcctgaggctggctcyctgtggctactgaagctgctccgggacatccagttggcccagttttactggcccatcctagaggagcttaatgtcactcggccagagcacttcgactttgtaaagcctgaggacctggacggcataggcatgggccggcctggtgaggggaccctgccccgaggccctggtctctctgtccacagcctatcagttgccttcccccaccacaaccctcttccagcccttttcttccctgtaagtctctccgcactcttccccacacccacctccactccagccctgattctggcctcccacagcccagcgcagactgtccgaagctctgaaaaggctacgttctgggcctaagtctaagaactgggtctacaaggtgtgtgttgtaggtgggcagcttgggcctgggaatgaggtggcttgaggggcagggaggggggcgcagggctctgcataccggatttcccatccctgtttcagatccttggaggttttgcccctgagcacaaggagcccaccctgccctcggacagcccacggcacctccctgagccagaggggggcctcaagtgtctgatcccagagggtgctgtttgcaaaggggagctgctgggttcaggctgcttcggtgtggtgcaccgagggctgtggacgctgcccagtggcaagagtgtgagtgtccagggagcccgcttcatccaggccagctgccccctctgttcttcatgcccgcaatgcctaaaggcgcttccccccacctccaggtcccagtggctgtcaagtccctccgggtaggtcccgaaggcccgatgggcacagaactgggggacttcctgcgagaggtatcggtcatgatgaacttggagcacccacacgtgctgcgtctgcacggccttgtactgggccagcctctgcagatggtgagcagatccagccgctggttcccgggacagccgtgcggcaggagcgtgggcggccagggtccaatgggtccggctcacgcggcgcggtgttccctcctgcaggtgatggagctggcgccactgggctccctgcacgcgcgcctaacggccccggccccgacacccccgctgctcgtggccctgctctgcctcttcctgcggcagctggcgggagccatggcgtacctgggggcccgcgggctggtgcaccgagacctcgctacgcgcaacctactgctggcgtcgccgcgcaccatcaaggtggctgacttcgggctggtgcggcctctgggcggtgcccggggccgctacgtcatgggcgggccccgccctatcccctacgcctggtgagagcgggtccgcgggcggtcgggctctgagccgggcgga

SEQ ID NO: 65018 - DNA, 1517 bp, Homo sapiens
tggctgtctctgctgtgtccctgcctctgtacctgagtgtttctaatgacttgcaggtggagctggagacctggtctctctagggcctaccctgagctcaccatctgaaggagagtgccatcatccttaggaactccttctccagacatgcttcctgaggctggctccctgtggctactgaagctgctccgggacatccagttggcccagttttactggcccatcctwgaggagcttaatgtcactcggccagagcacttcgactttgtaaagcctgaggacctggacggcataggcatgggccggcctggtgaggggaccctgccccgaggccctggtctctctgtccacagcctatcagttgccttcccccaccacaaccctcttccagcccttttcttccctgtaagtctctccgcactcttccccacacccacctccactccagccctgattctggcctcccacagcccagcgcagactgtccgaagctctgaaaaggctacgttctgggcctaagtctaagaactgggtctacaaggtgtgtgttgtaggtgggcagcttgggcctgggaatgaggtggcttgaggggcagggaggggggcgcagggctctgcataccggatttcccatccctgtttcagatccttggaggttttgcccctgagcacaaggagcccaccctgccctcggacagcccacggcacctccctgagccagaggggggcctcaagtgtctgatcccagagggtgctgtttgcaaaggggagctgctgggttcaggctgcttcggtgtggtgcaccgagggctgtggacgctgcccagtggcaagagtgtgagtgtccagggagcccgcttcatccaggccagctgccccctctgttcttcatgcccgcaatgcctaaaggcgcttccccccacctccaggtcccagtggctgtcaagtccctccgggtaggtcccgaaggcccgatgggcacagaactgggggacttcctgcgagaggtatcggtcatgatgaacttggagcacccacacgtgctgcgtctgcacggccttgtactgggccagcctctgcagatggtgagcagatccagccgctggttcccgggacagccgtgcggcaggagcgtgggcggccagggtccaatgggtccggctcacgcggcgcggtgttccctcctgcaggtgatggagctggcgccactgggctccctgcacgcgcgcctaacggccccggccccgacacccccgctgctcgtggccctgctctgcctcttcctgcggcagctggcgggagccatggcgtacctgggggcccgcgggctggtgcaccgagacctcgctacgcgcaacctactgctggcgtcgccgcgcaccatcaaggtggctgacttcgggctggtgcggcctctgggcggtgcccggggccgctacgtcatgggcgggccccgccctatcccctacgcctggtgagagcgggtccgcgggcggtcgggctctgagccgggcgga

SEQ ID NO: 65019 - DNA, 1517 bp, Homo sapiens
tggctgtctctgctgtgtccctgcctctgtacctgagtgtttctaatgacttgcaggtggagctggagacctggtctctctagggcctaccctgagctcaccatctgaaggagagtgccatcatccttaggaactccttctccagacatgcttcctgaggctggctccctgtggctactgaagctgctccgggacatccagttggcccagttttactggcccatcctagaggagcttaatgtcactcggccagagcacttcgactttgtaaagcctgaggacctggacggcatwggcatgggccggcctggtgaggggaccctgccccgaggccctggtctctctgtccacagcctatcagttgccttcccccaccacaaccctcttccagcccttttcttccctgtaagtctctccgcactcttccccacacccacctccactccagccctgattctggcctcccacagcccagcgcagactgtccgaagctctgaaaaggctacgttctgggcctaagtctaagaactgggtctacaaggtgtgtgttgtaggtgggcagcttgggcctgggaatgaggtggcttgaggggcagggaggggggcgcagggctctgcataccggatttcccatccctgtttcagatccttggaggttttgcccctgagcacaaggagcccaccctgccctcggacagcccacggcacctccctgagccagaggggggcctcaagtgtctgatcccagagggtgctgtttgcaaaggggagctgctgggttcaggctgcttcggtgtggtgcaccgagggctgtggacgctgcccagtggcaagagtgtgagtgtccagggagcccgcttcatccaggccagctgccccctctgttcttcatgcccgcaatgcctaaaggcgcttccccccacctccaggtcccagtggctgtcaagtccctccgggtaggtcccgaaggcccgatgggcacagaactgggggacttcctgcgagaggtatcggtcatgatgaacttggagcacccacacgtgctgcgtctgcacggccttgtactgggccagcctctgcagatggtgagcagatccagccgctggttcccgggacagccgtgcggcaggagcgtgggcggccagggtccaatgggtccggctcacgcggcgcggtgttccctcctgcaggtgatggagctggcgccactgggctccctgcacgcgcgcctaacggccccggccccgacacccccgctgctcgtggccctgctctgcctcttcctgcggcagctggcgggagccatggcgtacctgggggcccgcgggctggtgcaccgagacctcgctacgcgcaacctactgctggcgtcgccgcgcaccatcaaggtggctgacttcgggctggtgcggcctctgggcggtgcccggggccgctacgtcatgggcgggccccgccctatcccctacgcctggtgagagcgggtccgcgggcggtcgggctctgagccgggcgga

SEQ ID NO: 65020 - DNA, 1517 bp, Homo sapiens
tggctgtctctgctgtgtccctgcctctgtacctgagtgtttctaatgacttgcaggtggagctggagacctggtctctctagggcctaccctgagctcaccatctgaaggagagtgccatcatccttaggaactccttctccagacatgcttcctgaggctggctccctgtggctactgaagctgctccgggacatccagttggcccagttttactggcccatcctagaggagcttaatgtcactcggccagagcacttcgactttgtaaagcctgaggacctggacggcataggcatgggccggcctggtgagggraccctgccccgaggccctggtctctctgtccacagcctatcagttgccttcccccaccacaaccctcttccagcccttttcttccctgtaagtctctccgcactcttccccacacccacctccactccagccctgattctggcctcccacagcccagcgcagactgtccgaagctctgaaaaggctacgttctgggcctaagtctaagaactgggtctacaaggtgtgtgttgtaggtgggcagcttgggcctgggaatgaggtggcttgaggggcagggaggggggcgcagggctctgcataccggatttcccatccctgtttcagatccttggaggttttgcccctgagcacaaggagcccaccctgccctcggacagcccacggcacctccctgagccagaggggggcctcaagtgtctgatcccagagggtgctgtttgcaaaggggagctgctgggttcaggctgcttcggtgtggtgcaccgagggctgtggacgctgcccagtggcaagagtgtgagtgtccagggagcccgcttcatccaggccagctgccccctctgttcttcatgcccgcaatgcctaaaggcgcttccccccacctccaggtcccagtggctgtcaagtccctccgggtaggtcccgaaggcccgatgggcacagaactgggggacttcctgcgagaggtatcggtcatgatgaacttggagcacccacacgtgctgcgtctgcacggccttgtactgggccagcctctgcagatggtgagcagatccagccgctggttcccgggacagccgtgcggcaggagcgtgggcggccagggtccaatgggtccggctcacgcggcgcggtgttccctcctgcaggtgatggagctggcgccactgggctccctgcacgcgcgcctaacggccccggccccgacacccccgctgctcgtggccctgctctgcctcttcctgcggcagctggcgggagccatggcgtacctgggggcccgcgggctggtgcaccgagacctcgctacgcgcaacctactgctggcgtcgccgcgcaccatcaaggtggctgacttcgggctggtgcggcctctgggcggtgcccggggccgctacgtcatgggcgggccccgccctatcccctacgcctggtgagagcgggtccgcgggcggtcgggctctgagccgggcgga

SEQ ID NO: 65021 - DNA, 1517 bp, Homo sapiens
tggctgtctctgctgtgtccctgcctctgtacctgagtgtttctaatgacttgcaggtggagctggagacctggtctctctagggcctaccctgagctcaccatctgaaggagagtgccatcatccttaggaactccttctccagacatgcttcctgaggctggctccctgtggctactgaagctgctccgggacatccagttggcccagttttactggcccatcctagaggagcttaatgtcactcggccagagcacttcgactttgtaaagcctgaggacctggacggcataggcatgggccggcctggtgaggggmccctgccccgaggccctggtctctctgtccacagcctatcagttgccttcccccaccacaaccctcttccagcccttttcttccctgtaagtctctccgcactcttccccacacccacctccactccagccctgattctggcctcccacagcccagcgcagactgtccgaagctctgaaaaggctacgttctgggcctaagtctaagaactgggtctacaaggtgtgtgttgtaggtgggcagcttgggcctgggaatgaggtggcttgaggggcagggaggggggcgcagggctctgcataccggatttcccatccctgtttcagatccttggaggttttgcccctgagcacaaggagcccaccctgccctcggacagcccacggcacctccctgagccagaggggggcctcaagtgtctgatcccagagggtgctgtttgcaaaggggagctgctgggttcaggctgcttcggtgtggtgcaccgagggctgtggacgctgcccagtggcaagagtgtgagtgtccagggagcccgcttcatccaggccagctgccccctctgttcttcatgcccgcaatgcctaaaggcgcttccccccacctccaggtcccagtggctgtcaagtccctccgggtaggtcccgaaggcccgatgggcacagaactgggggacttcctgcgagaggtatcggtcatgatgaacttggagcacccacacgtgctgcgtctgcacggccttgtactgggccagcctctgcagatggtgagcagatccagccgctggttcccgggacagccgtgcggcaggagcgtgggcggccagggtccaatgggtccggctcacgcggcgcggtgttccctcctgcaggtgatggagctggcgccactgggctccctgcacgcgcgcctaacggccccggccccgacacccccgctgctcgtggccctgctctgcctcttcctgcggcagctggcgggagccatggcgtacctgggggcccgcgggctggtgcaccgagacctcgctacgcgcaacctactgctggcgtcgccgcgcaccatcaaggtggctgacttcgggctggtgcggcctctgggcggtgcccggggccgctacgtcatgggcgggccccgccctatcccctacgcctggtgagagcgggtccgcgggcggtcgggctctgagccgggcgga

SEQ ID NO: 65022 - DNA, 1888 bp, Homo sapiens
tgcatggctaatttttttttttaatttttagtagagacagtgtttcaccatgttggcccggctggcctcgaactcctgacctcaagcgatttgcccaccttggcctcccaaagtgctaggattacaggcatgagccaccgcgcccagtctggttatgcagttagttgataccagagaggagtagcttgaatgtgtggacttgccttcgctrtaataaaacatagcctctatccccattataaaatggggaaagaagttagaaaaccaacctgattttaagatgatgaggtgaagaaaaagcagctgcttagaagttgctgtatgtatcatttagttgtttggtgttggttagaagaatcactcttattttaatatctaatgaactgaaaagtgagagtgaggtattttccttccctttttatttatttgtaatttgattcccagggaaattaagacttgtgacaagcccaaatgaagatattttggaatttgacaggagagttttttaacttatgcctaagcttcaaattatattaggcaataaattattgatagtttttaatcagatactggaatatggaattttcaaaatcacaactcagaaaaatgaccgctcacaggccttctgttttatatttattcttcctttttagtattctccaaaattaatcatcatcgtacatgtgtacatttattcttattattaccacaagagccttctgatgatcgagaggagagagaccctcagttcacctctggaagggaagttgttgtacatgagcacagggaggaatcagtctcaagagccagacctcctgaaaacctgcagcgttgctgagagaatcagcagctttactggctgaacagcagctcgggttagcccatcccgtggccaggtcatttgctggctcctccgcagccagcttccattgttgtctaggctgacagctccgccctactcatgacgtgactctctctatgggattgtttctctccttttttttttttacattcagttttcagaagacagaatggaatacttctcattcattcctccagcaaagtgcccctggtgggcagagctctctctcccaggccttaactggcctaaataaagtgggtggcagctgccttccagacagatgccagcctggtactagggtagtatgattgtgtgatacaaagctgccaatgtatgcatgtctgaccattttttcagatgggattgtagctaggcaggtacagcatagccttttcatgtccagcatagggtcttaaaatataaaaccacatgcaataaaataacaaggtataaagggaaagtcagggccaaaaaacaagataattccaagttttcaaatatcagcctaaataaacttattgtcgttgaggtgaaatttggttctaagattcctaataggcagggcaaacagggaaacatgataaattggagtatatagttctcacaatcaaaaaggaagaaatactccagggaaagtcaagatatttcctagtattggttctaaaggaagtattttacatactttatatacaagacacctaataaagtagtagtcaactgctaatgaactattaaaaaatagtcaatagtagcttctcagtcaacaggccaatagagtgctgtgtttcatatgcctactccttggcatgaactgtgcaaagataaaatattatagtacacgtcaatgaagacagttttgtgaggggacaaaaggaatatagtctaagtttccttgtggtcttcgtaatccaagggtaagataatggttatttagaggattgggtgaattgcatgtgtcttaggcaatcctaaatataacttctctcaattgattgcttgataagaactagttgtgctcttaggcaa

SEQ ID NO: 65023 - DNA, 589 bp, Homo sapiens
tttttttgagatatagtcttgctctgttgcccaagctggagtgcagtggcacaatctcggctcaccacaagctccgccttctggattcacgccattctcctgcctcagcctcccgagtagctaggactacaggcrcctgccaccacgccaggctaattttttttttttttgtatttttagtagagacggggtttcaccgtgttcgccaggattgtctcgatctcctgacctcatgatcctcccgcctcggcctcccaaagtgctgggattacaggcatgagccactgcgtgtggccataactggctatttttaaaaaggttcatctatttacctttaccaggcatctcaccagtggcatatgtgccttactttgggaaacaataaacaaaaacctggcggaggggtctaaagaggagaggtcagtgacaagagacctgtttgagggcaggcagataggatgtggtaacagattggctgttggaagtgggagagaaggagagtctggagttgagcccgcttgtagctgaaaagactgaatggataatgacatttttgagactgagaatttaagagtcttagcagttggtg

SEQ ID NO: 65024 - DNA, 563 bp, Homo sapiens
tgtcccatcttttcagtatttctcactgtcaagctcttgatacttctataactccagtttttctaacttcatctttagccacttctttatattctggtgtactatgaccagagaacatcagataatggaactgtatcacacacatatttaactttatacattcagctattcagagagaaattgattgtaatttcaayaaagtggctgattccaattgattttacacttaggataagatgggagaaatatcactccagtcagtcagtttcagttcccgtgggactttcttatagcaagggcatcccactgcactcttattctcacgcttaaagatacatattttaggccaggtgcagtggcttatatctatagtccccgcactttgggaggccaaggcaggcagaccgtgtgaacccaggggtttgagagcagcctgggtgacatggcaaaactctgtctccacaaaaaatacaaaaattagccagacctggtaccacacgcctgtagtcccagccacttgggaggctaagataggaggatcacctgagcccaggaagttgagg

SEQ ID NO: 65025 - DNA, 563 bp, Homo sapiens
tgtcccatcttttcagtatttctcactgtcaagctcttgatacttctataactccagtttttctaacttcatctttagccacttctttatattctggtgtactatgaccagagaacatcagataatggaactgtatcacacacatatttaactttatacattcagctattcagagagaaattgattgtaatttcaacaaagtggctgattccaattgattttacacttaggataagatgggagaaatatcactccagtcagtcagtttcagttcccgtgggactttcttatagcaagggcatcccactgcactcttattctcacgcttaaagatacatattttaggccaggtgcagtggcttatatctrtagtccccgcactttgggaggccaaggcaggcagaccgtgtgaacccaggggtttgagagcagcctgggtgacatggcaaaactctgtctccacaaaaaatacaaaaattagccagacctggtaccacacgcctgtagtcccagccacttgggaggctaagataggaggatcacctgagcccaggaagttgagg

SEQ ID NO: 65026 - DNA, 563 bp, Homo sapiens
tgtcccatcttttcagtatttctcactgtcaagctcttgatacttctataactccagtttttctaacttcatctttagccacttctttatattctggtgtactatgaccagagaacatcagataatggaactgtatcacacacatatttaactttatacattcagctattcagagagaaattgattgtaatttcaacaaagtggctgattccaattgattttacacttaggataagatgggagaaatatcactccagtcagtcagtttcagttcccgtgggactttcttatagcaagggcatcccactgcactcttattctcacgcttaaagatacatattttaggccaggtgcagtggcttatatctatagtccccgcactttgggaggccaaggcaggcagaccrtgtgaacccaggggtttgagagcagcctgggtgacatggcaaaactctgtctccacaaaaaatacaaaaattagccagacctggtaccacacgcctgtagtcccagccacttgggaggctaagataggaggatcacctgagcccaggaagttgagg

SEQ ID NO: 65027 - DNA, 1207 bp, Homo sapiens
tactgcctcctccaactcctggcctcaagcaatcctcccacctcagcctcccaaagtgctggaattacaggctgacagccaccatgcctgaaagctttgcaatttacatcgagggtaataagaatgctcatgccctgtgactcacagtaatctcacttctggaaatttcacctttggatataattcaacctaaacaaaaggtcatatgcacaaacacagtgaaaatctgsgagtaatttttttctctttttttaaaaaaatatggaatgcttcacaaatttgcatgtcattctttcacagaggccgtgccaatctctctattgttccaacttaagtatgtgtgctactgaggcaagcatgagtaatttaagatagagtggttaagtgaaataaggaagaattatggagaatttaaaaatctatgctatttataggcacctagtaacagctcagtaaatattagctgctactattattatttttatggtaatttcactcaattaaaaactgtcgttaaaaattaccattgtcatggaacataatgtctcctactgtataattgtagaaacagatacaatttgtcccttggtatatggggggattagttccagctctcccatttctgtgtataccaaaatccacgcatactcaagttttcgaagtcagtcctgtggaatccacatataacacaaatgggaaaattagtgaggtgtggtgacaagcacctgtagtcccagctacttgtgaggctgaggcaggaggattgcttgagcccaggaggttgaggctgcagtgagccataattgcaccactgcactccagtctgggcaacagagtgagacagaaggttgactttttaatagaatttttctgttcacttgaagatatggtcaggattgtggcatatgaaaattcttcataaaataactatctaatccaattaatgctggaattgggaacagcagaagtgtcatctcagagctactcacaatgaaaggtgatgtctggggctcaggtgtgttgaggtccccatgcctggactatgggtgctgagtgggatttacttgtccatccattttctatattccagcactgggaaactagggacagtacttgttctcaagggaatcttcagcttaggtggctctgtaaaagagaaattacatcattgaaaaatcgtcgcaggtcaggtgaggtggctcatacc

SEQ ID NO: 65028 - DNA, 1207 bp, Homo sapiens
tactgcctcctccaactcctggcctcaagcaatcctcccacctcagcctcccaaagtgctggaattacaggctgacagccaccatgcctgaaagctttgcaatttacatcgagggtaataagaatgctcatgccctgtgactcacagtaatctcacttctggaaatttcacctttggatataattcaacctaaacaaaaggtcatatgcacaaacacagtgaaaatctgggagtaatttttttctctttttttaaaaaaatatggaatgcttcacaaatttgcatgtcattctttcacagaggccgtgccaatctctctattgttccaactwaagtatgtgtgctactgaggcaagcatgagtaatttaagatagagtggttaagtgaaataaggaagaattatggagaatttaaaaatctatgctatttataggcacctagtaacagctcagtaaatattagctgctactattattatttttatggtaatttcactcaattaaaaactgtcgttaaaaattaccattgtcatggaacataatgtctcctactgtataattgtagaaacagatacaatttgtcccttggtatatggggggattagttccagctctcccatttctgtgtataccaaaatccacgcatactcaagttttcgaagtcagtcctgtggaatccacatataacacaaatgggaaaattagtgaggtgtggtgacaagcacctgtagtcccagctacttgtgaggctgaggcaggaggattgcttgagcccaggaggttgaggctgcagtgagccataattgcaccactgcactccagtctgggcaacagagtgagacagaaggttgactttttaatagaatttttctgttcacttgaagatatggtcaggattgtggcatatgaaaattcttcataaaataactatctaatccaattaatgctggaattgggaacagcagaagtgtcatctcagagctactcacaatgaaaggtgatgtctggggctcaggtgtgttgaggtccccatgcctggactatgggtgctgagtgggatttacttgtccatccattttctatattccagcactgggaaactagggacagtacttgttctcaagggaatcttcagcttaggtggctctgtaaaagagaaattacatcattgaaaaatcgtcgcaggtcaggtgaggtggctcatacc

SEQ ID NO: 65029 - DNA, 1207 bp, Homo sapiens
tactgcctcctccaactcctggcctcaagcaatcctcccacctcagcctcccaaagtgctggaattacaggctgacagccaccatgcctgaaagctttgcaatttacatcgagggtaataagaatgctcatgccctgtgactcacagtaatctcacttctggaaatttcacctttggatataattcaacctaaacaaaaggtcatatgcacaaacacagtgaaaatctgggagtaatttttttctctttttttaaaaaaatatggaatgcttcacaaatttgcatgtcattctttcacagaggccgtgccaatctctctattgttccaacttaagtatgtgtgctactgaggcaagcatgagtaatttaagatagagtggttaagtgamataaggaagaattatggagaatttaaaaatctatgctatttataggcacctagtaacagctcagtaaatattagctgctactattattatttttatggtaatttcactcaattaaaaactgtcgttaaaaattaccattgtcatggaacataatgtctcctactgtataattgtagaaacagatacaatttgtcccttggtatatggggggattagttccagctctcccatttctgtgtataccaaaatccacgcatactcaagttttcgaagtcagtcctgtggaatccacatataacacaaatgggaaaattagtgaggtgtggtgacaagcacctgtagtcccagctacttgtgaggctgaggcaggaggattgcttgagcccaggaggttgaggctgcagtgagccataattgcaccactgcactccagtctgggcaacagagtgagacagaaggttgactttttaatagaatttttctgttcacttgaagatatggtcaggattgtggcatatgaaaattcttcataaaataactatctaatccaattaatgctggaattgggaacagcagaagtgtcatctcagagctactcacaatgaaaggtgatgtctggggctcaggtgtgttgaggtccccatgcctggactatgggtgctgagtgggatttacttgtccatccattttctatattccagcactgggaaactagggacagtacttgttctcaagggaatcttcagcttaggtggctctgtaaaagagaaattacatcattgaaaaatcgtcgcaggtcaggtgaggtggctcatacc

SEQ ID NO: 65030 - DNA, 1207 bp, Homo sapiens
tactgcctcctccaactcctggcctcaagcaatcctcccacctcagcctcccaaagtgctggaattacaggctgacagccaccatgcctgaaagctttgcaatttacatcgagggtaataagaatgctcatgccctgtgactcacagtaatctcacttctggaaatttcacctttggatataattcaacctaaacaaaaggtcatatgcacaaacacagtgaaaatctgggagtaatttttttctctttttttaaaaaaatatggaatgcttcacaaatttgcatgtcattctttcacagaggccgtgccaatctctctattgttccaacttaagtatgtgtgctactgaggcaagcatgagtaatttaagatagagtggttaagtgaaataaggaagaattatggagaatttaaaaatctatgctatttataggcacctagtaacagctcagtaaatattagctgctactattattatttttatggtaatttcactcaattaaaaactgtcrttaaaaattaccattgtcatggaacataatgtctcctactgtataattgtagaaacagatacaatttgtcccttggtatatggggggattagttccagctctcccatttctgtgtataccaaaatccacgcatactcaagttttcgaagtcagtcctgtggaatccacatataacacaaatgggaaaattagtgaggtgtggtgacaagcacctgtagtcccagctacttgtgaggctgaggcaggaggattgcttgagcccaggaggttgaggctgcagtgagccataattgcaccactgcactccagtctgggcaacagagtgagacagaaggttgactttttaatagaatttttctgttcacttgaagatatggtcaggattgtggcatatgaaaattcttcataaaataactatctaatccaattaatgctggaattgggaacagcagaagtgtcatctcagagctactcacaatgaaaggtgatgtctggggctcaggtgtgttgaggtccccatgcctggactatgggtgctgagtgggatttacttgtccatccattttctatattccagcactgggaaactagggacagtacttgttctcaagggaatcttcagcttaggtggctctgtaaaagagaaattacatcattgaaaaatcgtcgcaggtcaggtgaggtggctcatacc

SEQ ID NO: 65031 - DNA, 549 bp, Homo sapiens
ggatcctacatttcaaatgcataaaaatctagatatgggctgggcgcagtagctcatgcctgtaatcccagcactttgggaggctgaggcaggcagatcatgaggtcaggagatcgagtccatcctggctaacatggtgaaaccccgtctctactaaaaatacaraaagccgggcatggcagcgggcgcctgtaatcccagctactcggaaagctgaggcaggagaatcgcttgaacccacgagtcagaggttgcagtgagcagatatcacgccactgcactccaacctgggcgacagagcgagactccacctcaaaacaaaataaaccaaatactagatctggaagagatcttagggattattaaattcagacaacctcattttttatagatggggaaacaagcacagactccaagggtctcatccaagatcacacagttgcagatgctggctacaagtctcctgcctcaaccacctgtattaccccattcagggtctcaagaagggtctataagacactatccattgtgtttcgggctgagtccata

SEQ ID NO: 65032 - DNA, 549 bp, Homo sapiens
ggatcctacatttcaaatgcataaaaatctagatatgggctgggcgcagtagctcatgcctgtaatcccagcactttgggaggctgaggcaggcagatcatgaggtcaggagatcgagtccatcctggctaacatggtgaaaccccgtctctactaaaaatacagaaagccgggcatggcagcgggcgcctgtaatcccagctactcggaaagctgaggcaggagaatcgcttgaacccasgagtcagaggttgcagtgagcagatatcacgccactgcactccaacctgggcgacagagcgagactccacctcaaaacaaaataaaccaaatactagatctggaagagatcttagggattattaaattcagacaacctcattttttatagatggggaaacaagcacagactccaagggtctcatccaagatcacacagttgcagatgctggctacaagtctcctgcctcaaccacctgtattaccccattcagggtctcaagaagggtctataagacactatccattgtgtttcgggctgagtccata

SEQ ID NO: 65033 - DNA, 549 bp, Homo sapiens
ggatcctacatttcaaatgcataaaaatctagatatgggctgggcgcagtagctcatgcctgtaatcccagcactttgggaggctgaggcaggcagatcatgaggtcaggagatcgagtccatcctggctaacatggtgaaaccccgtctctactaaaaatacagaaagccgggcatggcagcgggcgcctgtaatcccagctactcggaaagctgaggcaggagaatcgcttgaacccacgagtcagaggttgcagtgagcagakatcacgccactgcactccaacctgggcgacagagcgagactccacctcaaaacaaaataaaccaaatactagatctggaagagatcttagggattattaaattcagacaacctcattttttatagatggggaaacaagcacagactccaagggtctcatccaagatcacacagttgcagatgctggctacaagtctcctgcctcaaccacctgtattaccccattcagggtctcaagaagggtctataagacactatccattgtgtttcgggctgagtccata

SEQ ID NO: 65034 - DNA, 549 bp, Homo sapiens
ggatcctacatttcaaatgcataaaaatctagatatgggctgggcgcagtagctcatgcctgtaatcccagcactttgggaggctgaggcaggcagatcatgaggtcaggagatcgagtccatcctggctaacatggtgaaaccccgtctctactaaaaatacagaaagccgggcatggcagcgggcgcctgtaatcccagctactcggaaagctgaggcaggagaatcgcttgaacccacgagtcagaggttgcagtgagcagatatcacgccactgcactccaacctgggcracagagcgagactccacctcaaaacaaaataaaccaaatactagatctggaagagatcttagggattattaaattcagacaacctcattttttatagatggggaaacaagcacagactccaagggtctcatccaagatcacacagttgcagatgctggctacaagtctcctgcctcaaccacctgtattaccccattcagggtctcaagaagggtctataagacactatccattgtgtttcgggctgagtccata

SEQ ID NO: 65035 - DNA, 549 bp, Homo sapiens
ggatcctacatttcaaatgcataaaaatctagatatgggctgggcgcagtagctcatgcctgtaatcccagcactttgggaggctgaggcaggcagatcatgaggtcaggagatcgagtccatcctggctaacatggtgaaaccccgtctctactaaaaatacagaaagccgggcatggcagcgggcgcctgtaatcccagctactcggaaagctgaggcaggagaatcgcttgaacccacgagtcagaggttgcagtgagcagatatcacgccactgcactccaacctgggcgacagagcgagactccacctcaaaacaaaataaacmaaatactagatctggaagagatcttagggattattaaattcagacaacctcattttttatagatggggaaacaagcacagactccaagggtctcatccaagatcacacagttgcagatgctggctacaagtctcctgcctcaaccacctgtattaccccattcagggtctcaagaagggtctataagacactatccattgtgtttcgggctgagtccata

SEQ ID NO: 65036 - DNA, 1698 bp, Homo sapiens
agagttcttatctgctaataaatttaacaccacattctcaattagctgtgcatatgcaggaagaggaaggcacagcagcccagatcatcaagaaatggtctccatttgattttgaaatgcattttatttatttttacttttattttttaattttttaaattttttgagacggagtcttgctcagttgcccaggctggagtgcagtggtgtgatcttggcttactgcaacctctgcttcctgggttcaagtgattctcttgcctcagcctcccgagtagctgggactacagacggccgccaccacacctggctaatttttgtatttttagtagagatggggtttcgctatgttgtccaggctggtctcgaactcctgacctcaagcgatcacccaccttagactcccaaagtgctgggattacaggcgtgagccaccgcacccagcacattttattattttaaaggtagatctctctcattgctaacatttaattatggcataagtccatatataccagttccactgaggggaaatgagtgatataatgcatgtttagttgcagaagtagtttagaactacaaatatgccatatataatctgttcacagaaccaaaaatatgtgtaacatgtaaaatctaagaataaggcaaagtgtaactgtactcagaaggtatgcttgcaaaacattttatttatttatttatttatttatttatttattttgagtcagggactcactctgtcacccaggctggagtggtgtgatctcagctcactgcaatctccgcctgccaggctmaagtgatcctcctgtctcagcacctcaagtagctgggactataggcataagccaccatgcctgggtaatttttgtattttattttatttttttgtagagacagggtttcaccatgttgcccaagctggtcttgaactcctgggctcaagtgatccacccgtcttggcctcccaaaatggtaggattacaggtttaagccaccaggcccggcctacaaaatttaaatataaataacaaactaattcttaccaaaagcagcacattcatctatcaagagtaacctcttcctagcaatgccttatgatggcctactttcatttaaattactattttgaacttagaaatgcaaggactctgtgcacacagactggatgatctggatatacacccatttagaagcggggggtccatgtggaaatgtgttctaacagtaggtcatcaaattttcttttttaaaaaagaagcagtctttcctttgctcatcttttaaaatgatcaatggtcactttctttgaacagctctaaagtggggggagaaggcagcagataacactttaaactcttgtcacactttccagatcagtaaattatatactcatcacaagcatctagatgggatgcatcatgaatatatctaagaatatctaggccaggtgcagtggctcaagactgtaatcccagtgctttgggaggccaaggcgggtggatcacctgaggtcaggagttccacaccagcctggccaacatggagaaaccccgtctctactaaaaatacaaagagtagccaggcatagtggcacgcgcctgtagtcccagctactcaggaggctgaggcatgagaatggtttgaacctgggaagcggaggttgcagtgagccaagattgtgccactgcactc

SEQ ID NO: 65037 - DNA, 1698 bp, Homo sapiens
agagttcttatctgctaataaatttaacaccacattctcaattagctgtgcatatgcaggaagaggaaggcacagcagcccagatcatcaagaaatggtctccatttgattttgaaatgcattttatttatttttacttttattttttaattttttaaattttttgagacggagtcttgctcagttgcccaggctggagtgcagtggtgtgatcttggcttactgcaacctctgcttcctgggttcaagtgattctcttgcctcagcctcccgagtagctgggactacagacggccgccaccacacctggctaatttttgtatttttagtagagatggggtttcgctatgttgtccaggctggtctcgaactcctgacctcaagcgatcacccaccttagactcccaaagtgctgggattacaggcgtgagccaccgcacccagcacattttattattttaaaggtagatctctctcattgctaacatttaattatggcataagtccatatataccagttccactgaggggaaatgagtgatataatgcatgtttagttgcagaagtagtttagaactacaaatatgccatatataatctgttcacagaaccaaaaatatgtgtaacatgtaaaatctaagaataaggcaaagtgtaactgtactcagaaggtatgcttgcaaaacattttatttatttatttatttatttatttatttattttgagtcagggactcactctgtcacccaggctggagtggtgtgatctcagctcactgcaatctccgcctgccaggctcaagtgatcctcctgtctcagcacctcaagtagctgggactataggcataagccaccatgcctgggtaatttttgtattttattttatttttttgtagagacagggtttcaccatgttgcccaagctggtcttgaactcctgggctcaagtgatccacccgtcttggcctcccaaaatggtaggattacaggtttragccaccaggcccggcctacaaaatttaaatataaataacaaactaattcttaccaaaagcagcacattcatctatcaagagtaacctcttcctagcaatgccttatgatggcctactttcatttaaattactattttgaacttagaaatgcaaggactctgtgcacacagactggatgatctggatatacacccatttagaagcggggggtccatgtggaaatgtgttctaacagtaggtcatcaaattttcttttttaaaaaagaagcagtctttcctttgctcatcttttaaaatgatcaatggtcactttctttgaacagctctaaagtggggggagaaggcagcagataacactttaaactcttgtcacactttccagatcagtaaattatatactcatcacaagcatctagatgggatgcatcatgaatatatctaagaatatctaggccaggtgcagtggctcaagactgtaatcccagtgctttgggaggccaaggcgggtggatcacctgaggtcaggagttccacaccagcctggccaacatggagaaaccccgtctctactaaaaatacaaagagtagccaggcatagtggcacgcgcctgtagtcccagctactcaggaggctgaggcatgagaatggtttgaacctgggaagcggaggttgcagtgagccaagattgtgccactgcactc

SEQ ID NO: 65038 - DNA, 1698 bp, Homo sapiens
agagttcttatctgctaataaatttaacaccacattctcaattagctgtgcatatgcaggaagaggaaggcacagcagcccagatcatcaagaaatggtctccatttgattttgaaatgcattttatttatttttacttttattttttaattttttaaattttttgagacggagtcttgctcagttgcccaggctggagtgcagtggtgtgatcttggcttactgcaacctctgcttcctgggttcaagtgattctcttgcctcagcctcccgagtagctgggactacagacggccgccaccacacctggctaatttttgtatttttagtagagatggggtttcgctatgttgtccaggctggtctcgaactcctgacctcaagcgatcacccaccttagactcccaaagtgctgggattacaggcgtgagccaccgcacccagcacattttattattttaaaggtagatctctctcattgctaacatttaattatggcataagtccatatataccagttccactgaggggaaatgagtgatataatgcatgtttagttgcagaagtagtttagaactacaaatatgccatatataatctgttcacagaaccaaaaatatgtgtaacatgtaaaatctaagaataaggcaaagtgtaactgtactcagaaggtatgcttgcaaaacattttatttatttatttatttatttatttatttattttgagtcagggactcactctgtcacccaggctggagtggtgtgatctcagctcactgcaatctccgcctgccaggctcaagtgatcctcctgtctcagcacctcaagtagctgggactataggcataagccaccatgcctgggtaatttttgtattttattttatttttttgtagagacagggtttcaccatgttgcccaagctggtcttgaactcctgggctcaagtgatccacccgtcttggcctcccaaaatggtaggattacaggtttaagccaccaggcccggcctacaaaatttaaatataaataacaaactaattcttaccaaaagcagcacattcatctatcaagagtaacctcttcctagcaatgccttatgatggcctactttcatttaaattactattttgaacttagaaatgcaaggactctgtgcacacagactggatgatctggatatacacccatttagaagcrgggggtccatgtggaaatgtgttctaacagtaggtcatcaaattttcttttttaaaaaagaagcagtctttcctttgctcatcttttaaaatgatcaatggtcactttctttgaacagctctaaagtggggggagaaggcagcagataacactttaaactcttgtcacactttccagatcagtaaattatatactcatcacaagcatctagatgggatgcatcatgaatatatctaagaatatctaggccaggtgcagtggctcaagactgtaatcccagtgctttgggaggccaaggcgggtggatcacctgaggtcaggagttccacaccagcctggccaacatggagaaaccccgtctctactaaaaatacaaagagtagccaggcatagtggcacgcgcctgtagtcccagctactcaggaggctgaggcatgagaatggtttgaacctgggaagcggaggttgcagtgagccaagattgtgccactgcactc

SEQ ID NO: 65039 - DNA, 530 bp, Homo sapiens
gaacttgggaggcagaggttacagtgagccgagattgtgccactgcactttagcctgggtgayagagagagactctgtctcaaaaaaaaaaaaaaaaaaaaattttggccttgtctccaaggaaccttctatcacatggagactgtgttaattgaggttctttggttgcagataacataagccaattttaaaaaacttattcaagaaaggtaaatttattggaactctcctgaagacagggaagtgttggcactcaggaaaatcctaaacctcagcagcagaaaattatagaccttccttcctcctaaccaaaccacttctggtgcttagctctcaacaacctacaactttcatattcatgaggtcaaacttctacactctcaggaaaaagaaatctgattggcctagcttatggtgaggatgggtaaatctgaccaatcgcaatggccagagcacaaggtcaaactgctggaggggaggaatcagttatagacaaggaagaatcatagcagagaagggaggaacaaccc

SEQ ID NO: 65040 - DNA, 599 bp, Homo sapiens
tccactccaagccgagagaagcaggaagtaacagatccygaaggctctaacagaattctaaagaattccaaattatagctgcaaagaaagatacttctatctggatgtccctaggaagaagattggaaagctcattagaacacaggttaatgtgttaactttaacacaacctccttttcctgaaattcttatgcacactaaagtttatgtgcataaactgagacccttagtagacaatgtatccaaggttacactgcctgttggtgataggactcgaacccacaacccctaatttcccccaaaatggtctttcctcaacactgaggcaatgggtctcccagagatgatattcacaaattaatgcacactaacgtttatgtgcatgagaatatcagggaaaggagggagtgttcaaagtgcagacatatgcccttcccctctcactctagggacacaagaatctgccttttatagcatcccatgtaacgcagctaatccacagaccacatgtatgtggcctctgagtgagggggagctctcatgttcaagaagattcatctttgggggcttcctttctgggtgaaaatcacagagctact

SEQ ID NO: 65041 - DNA, 652 bp, Homo sapiens
aggaaggtagacaaggaggagcagggagcagttcagagccagaagcggttctgcacagctctgcacagctcggcgggaagagctggctcgaacagggctctggctaggtagacagagggtctgagtctatgcagctgtgaacagtccaggattgaarggggaagggacacagaagggaggagagcacaagctccaggccccatggctcagagactatcaggcatttgccctgggccagcctgaaggtataggggacagcaggttttgttgcacttggaaacgaagctcagtagcaaggaaacatgggaatatacacatgtacactcatgtacgcacataggtacacacacaggtacacacctgtttggaggatgaggatggaatcacaggattctgtcaaaaacttcagagctcacctggcccagcgccctcattctataggtaaagaaactcagacccataaaggacaatgtatccaatgttacaccgcctgttggtgataggactcgaacccagagcccctaattgcccccaaaatggtctttcctcaacactgaggcaatgggtctggccagaggtgatattcacaaattttaacaacctgcacagcaacacagccccagcaatcagaatggacattccaactgcgtta

SEQ ID NO: 65042 - DNA, 684 bp, Homo sapiens
ctcacacctgtaatcccagcactttgggaggccaaggctggcggattatgaggtccggagatcgacaccatcctggctaacacaatgaaaccctgtctctactaaaaatacaaaaaattagctgggcgtggtagcgcatgcctgtagtcccagctacttaggaggctgaggcaggagaatggcgtgaacccgggaggcggagcttgcagtgagctgagattgcgccactgcactccagcctgggcgacagagtgagactccatctcaaaaaaagaaaaaaaaagaattaaaaaaaattatggtccttaaacatttttattttttccagaattgactattatgcaaaaaatattgctgtcaaccattctaaagaaaatatctgatgatgtcactctcctgttcaaaaatcttcattgtctccctattgccttttaattgcattcggatctctccctgaagctgccctggccctggtggcctccccttctgctactcgtcttcacagcctgcactcctatgcggggagctgctgccttccttcatcctgacctcctggaaatgccttttccccagactctacttgtccagagcccaagcaagttccccaatatgaagaaacctcaccctcccctgaacgcccagcgcatttccccaaagacccwtctcagtttccctgctgctgtt

SEQ ID NO: 65043 - DNA, 755 bp, Homo sapiens
ggatcccttgaggccaggagtttgaaactartctgatcaatatagcaagaccctatctgcacacacacacacacacacacacacacacacacacagaaaaagaaaagccaaatgtgatcaagccactgcactccagcctggtgacaaagtgagaccatgtctgaaaaagaaaggaaacaaaaagaaaagccaacagcacagaatccagttatactagaggaaacattgctttctaaactgtgaagataagcacttaagcatcagaccacaatagcaaagttagaacaggagttgatgaaaagattgaaggagagagttataatcccagccaaacaaaaagatacaccttttcaagggaaaaggaacagaaggcaatgatacatggctgcagatcacatggcaaaagttgaacttctgatatgtaaatttgagaagtttaagaaaagaaacagataagaatcaaaacctcttataattttactaagagcaaatcaagactttaagaaaactttgttctaatacagggaaccaatttttagttttgtagtagtgtatttttaatatcaaaactcaaaccttagaaagattgttataaataattattcaaaattatagctaacttaatcacatacaaaattccttttataaaattttcttttcatgaaccttatcacaatttacacaggccatttaagttatgtgtggactttttgctttgtcctataatcagtcattttcctttaggacaaaaactt

SEQ ID NO: 65044 - DNA, 610 bp, Homo sapiens
ggcctgcctctaccctaccccagcactggttggaggctgggtctgttccagggytagggggtataggaggcctattagtccaccttctctggcagctttgacaaatagtcacttctataccttggaatggaggaagaaggcccaagtggtggtgagccagggcagggtaaagaatttgcttgtttctgccaggcacggtggtcacacctgtaatcccagcactttgggaggtcaaggcgggtggatcacctgaggccaggagttcgagaccagcctggccaacatggcgaaaccccgtctctactaaaaatacaaaaataaattagccaggggtgatggcgggcgcctgtaatcccagctactcaggaggctgaggcaggagaatctcttgaacccgggaggcggaggttgcagtgagctgagattgtgccactgcaggccagcctgtgcaaaagagtgagacgctgtctcaaaaaaaaaaagaaaaaaagaagttacttgtttctactgcggcttcatgccccagggcagctccctcctcattcctgtctttcaggtgccaatctgccctgtgccctggccctgccctgttctgtccatccgtcactct

SEQ ID NO: 65045 - DNA, 510 bp, Homo sapiens
tttgagaccagcctggccaacatggtgaaaccccatctgtactaaaaatacaaaagttagctgggcgtggtggtagatgcctgtagtcccagctacttgggaggctgaggcatgagaatcgcttgagcccagccagggcaatacagcaagaccccgtctctacaaataaaatacaaaaaattagttggatgtggtggtgcatgcctgtagtcctagctgctagggaggctgagatggaaggattgcttgagcctgggaggtcaaggctgcagtgagccgagatggcgccactgcactccagcctgggcaacagagtgagaccctgtctcagaaaraaaaaaaaaaaaaaaggagaggagagagactcaagcacgcccctcacaggactgctgaggccctgcaggtgtctgcagcatgtgccccaggccggggactctgtaagccactgctggagaccactcccatcctttctcccatttctctagacctgctgcctatacagtcactttt

SEQ ID NO: 65046 - DNA, 1442 bp, Homo sapiens
gcctgaatgtctcctctaaagctagaatagtgcccaacgcttactagatgctcagtaagtagcttttaatggactcatgcataaatgtcaggtacttttaatactatcagtaacaagcactgttgagtgacatcctgtgaatattaactaaaagaacctaatagtgtcattaggtagatacttttgttgccattttaattataaagaatctaaagaggttaagtaacttcctgaccagcacaaagtgacagaatggttgagcaggtatttgaactctggtttgtcttcatttccacattctggtgggcttgttgcacgtcactgtgacagctgctacatgatgtcacgtagagagctatggaaacgcagagagagttactgctcactttgtcaggtagaattagagcagacttcacagaggaattgtgatttaaatagcaaggtatgttctgcacagtggaggacggggggccattcctgtcagcacatgcaaaggcatagcatggccaaggagaggcaggactgtgcagctgggacatggggaagagattcaaagtcaggcaggtaacagggtggaggaagatgaattcagggaggttgtctggagccagagtgtagaggagacaggattctatctgatcagggcagcttccagaaaattctgtcataagctagtgatatggtttgactgtatcctcacccaaatctcatcttgaattgtggctcccataattcccacgtgtcgtgggagggacctggtgggaggtaattgaatcatgggggcgggtttttcccatgctgttctcgtgatagtgaataagtctcacgatatctgatggttctataaaggggagttcccctgcacaagccctcttgcctgctgccgtgtaagacatgttttcttccccttctgccatgactgcaagtttgctgaggcctccccagcccggcagaactgagtcaattaaacttctttcctttataaattatccagtcttgggtatgtctttatcagcagcatgagaacagactaatacagctagtttcagggctggaaacattcctttgtcttcccagaatttggcagtggtgaaaatctccctgggaagcattctactggaaaggagaccttcacccctttgccaagagtgaagcacatgtgtggcttctaacagtgcatgttatagaggaaagttttarttaatttcccttaaggaactttaaaaaatgtaaccaactggaccctagtaaagtctttggattttctgctataaaaattccacctttgatgttctcttgttagtagcaatggctgatctgtgtaatttaatggaccgttctctcatttctgcagattaagggaatactatgaagggactctttgggatgcaaagtcataaacttgacattctttgtaacagaactgtatttatggcatgttg

SEQ ID NO: 65047 - DNA, 750 bp, Homo sapiens
ccacaggtttactgaatcaacatattttggggatggtgtcctgagacctgcatttagaaattacgtaagaatccactcaaactaatttagtggattctcatcagctctctaaagcttatttagtggattcttatgcaaattcaggttagcaaactacttcagaatatgtgtgcagctcttttctattaaatagacctggactatctcatagttgttatgtctgtaagtcttacttaactggtaaaacaataaccatgatagagtatcttggtttctgataagttaatcagaaatacaatctcataaatcattggtggataagctgataatatatagactgattaaataatgtttgcaaggacagagagatgaaaatttgaacattatcaacttgaaaagcatcctcagatggtactatggactaaatgtttatgttccccctaaattcatatgctgaaaccctaatccataatgtgataatattttgaagtgagtcttttgggagtgaytaagttatgagggtacagccctcataaatggcattagtgccttcataagaagagagaggagaaagatattctgtttgtctactacatgaggatatagccagaagctggctgtctgcaaaccaagaagacagtactcaccagaaaccaaatgcggcagcacctggatcttcagaagtgtgagaataagtctataatttaagccactcagtctatggtattttggtatagcagtccaaactgg

SEQ ID NO: 65048 - DNA, 750 bp, Homo sapiens
ccacaggtttactgaatcaacatattttggggatggtgtcctgagacctgcatttagaaattacgtaagaatccactcaaactaatttagtggattctcatcagctctctaaagcttatttagtggattcttatgcaaattcaggttagcaaactacttcagaatatgtgtgcagctcttttctattaaatagacctggactatctcatagttgttatgtctgtaagtcttacttaactggtaaaacaataaccatgatagagtatcttggtttctgataagttaatcagaaatacaatctcataaatcattggtggataagctgataatatatagactgattaaataatgtttgcaaggacagagagatgaaaatttgaacattatcaacttgaaaagcatcctcagatggtactatggactaaatgtttatgttccccctaaattcatatgctgaaaccctaatccataatgtgataatattttgaagtgagtcttttgggagtgactaagttatgagggtacagccctcataaatggcattagtgccttcataagaagagagaggagaaagatattctgtttgtctactacatgaggatatagccagaagstggctgtctgcaaaccaagaagacagtactcaccagaaaccaaatgcggcagcacctggatcttcagaagtgtgagaataagtctataatttaagccactcagtctatggtattttggtatagcagtccaaactgg

SEQ ID NO: 65049 - DNA, 696 bp, Homo sapiens
taaaatttcaaatgattgagtcttaagcagatgggagtacgggcaggtaaattcaaaacaggaaattccatgtgaatacaatactgttacattgtttggtatatgaaataaccagggaactcccaaaagagggtagaattaacaaaatttcatctctattttttatatcagttttgtcctgaactgagtagttcatccagtcaaggttcagtgtcttagtattccctggcatctctcaggtcataccttgtgccacaaacagattaagttatatgcaacaaagtgtaaaacaggctgggtgcggtggctcatgcctgtaatcccaacactttgggaggccgaggcaggtggatcaccgagaccagcctggtcaacatgacgaaaccccgcctctactaaaaatataaaaactcgctgggcatggtggctcatgactgcaatcctggctacgtgggaggctgaggcacgagaattgcttgaacctgggaggcagaggtttgcagkgagccgatatcgcaccactgtactgcagcttgggtgacacagcgagactttctctcaaaaaaaaaaaaaagtacatatcaatgcatgaccttccctttgtccttctctcattcctatttgccactccatctttcagttcataattttataaatgaagattatcttgttttcctgtctcttttgatatgagta

SEQ ID NO: 65050 - DNA, 690 bp, Homo sapiens
ccacccagtattggtggaaggcatgagaactacagtgttacagcaccttttgcacccactgttcagtgggtcctgggttcttgtctcatgtccaaggagaatgagattatgtggacaaccagagagtgagcaaggcagaggagggttttcttgagcaacagaacagctcttgatacaagatgggacctgaagtgcatagtccctacccaaaggtgggtagtctcaatgtgtcactgagtctggggtttttatgggctcagaagggggaagtgtgtgttgattggtccatggcctggaaaaagcaccattcagttggctaaaaggcattaaggaagctctcactccagttgtggactctggcagctcagtttttaggctttaagctgtctttggctwgaaggtctggtttcaccagggacctgccctgtctgcctagaaatttgtctgcctcctgatgctatcaatttccagttccagaaaaaaaaaaaaaaactttcaaaatcagcaaattctaattttcaagccattagattccttctcactttttctgttaaattacttgatatgtttcaggaattgaactttaattagtcattaaagtgattactgttcttcagccctggctgactcaattatggcaacctatttcttagtgacctttttctgcctaaattaagcaaaacataaaca

SEQ ID NO: 65051 - DNA, 690 bp, Homo sapiens
ccacccagtattggtggaaggcatgagaactacagtgttacagcaccttttgcacccactgttcagtgggtcctgggttcttgtctcatgtccaaggagaatgagattatgtggacaaccagagagtgagcaaggcagaggagggttttcttgagcaacagaacagctcttgatacaagatgggacctgaagtgcatagtccctacccaaaggtgggtagtctcaatgtgtcactgagtctggggtttttatgggctcagaagggggaagtgtgtgttgattggtccatggcctggaaaaagcaccattcagttggctaaaaggcattaaggaagctctcactccagttgtggactctggcagctcagtttttaggctttaagctgtctttggctagaaggtctggtttcaccagggacctgccctgtctgcctagaaatttgtctgcctcctgatgctatcaatttccagttccagaaaaaaaaaaaaaaactttcaaaatcagcaaattctaattttcaagccattagattccttctcacttttyctgttaaattacttgatatgtttcaggaattgaactttaattagtcattaaagtgattactgttcttcagccctggctgactcaattatggcaacctatttcttagtgacctttttctgcctaaattaagcaaaacataaaca

SEQ ID NO: 65052 - DNA, 2008 bp, Homo sapiens
ggatccatgaaacactaacaggctaacttgttagtagcagcaggataaaagcaaatcccagaccttgcagcctctcctggcctcttccatgctattttctgcttatgcccctacctacctgaagcctccagtgggttctctgcacacccacaatgcaatccaaggctctcaccaaggcctgcaagatcctacatgaactggtccctgcctactctctgattccattttccacgacttttccttgctcactccagctcagcctccatgctgtccctcaagcaggccaagcacaggacctacacacagcctatctgctctgmccagaatgctcttcccacaggtagtaaggtcattcctttactcaattcagggtgctgggtcacatggcaaatccttgcagcaactgtccctgaaccatgatgtgtatcggcctctgcgtttttcctctattctttttttttttttttttttttttgagacagagtctcgctctgtcacccaggctggagtgcagtggcacgaccttggctcactgcaaccttcacctcctgggttcaagcaattttcctgcttcagcctcctgagtagctgggactacaggtgtgtgccaccacgcccagctaattttttgtgtttttagtagagatggggtttcactatattagccaggatggtctccatctcctgacctggtgatccgcctgcctcagcctcccaaagtgctgggattacaggcatgagccaccgtgcccagcctcctctattcttttccacacacatgactaactggcattgcatacttaatacatagctgaaaggattccccgtgcaactaagtttcttgaactcaagggctttcttagttcactactgtgttcccagacgagtgaccctacactctctttcacagtcacctggaaagtaggcattatccccatcttatagaagaggaaactgaggctgagaagttcagccattgcaatttacccaatttcgcacttaatttcgcacttaaattgttagacgtaggattcaaatccagacatgtgcaatgctaatgcattgtttggagacacttctccatgagtttcttgcattcctacacatcttgctgggtagacaaagaatgcaaggctctgactgctctgtacctgggttgggtttgcagcaaccaatcctgagacatgaggtaatgtttctctctgagacaaaaagctggcttgcttgctgtctgccacaagatggtggataccccaagctcggtgttcctgtcctatatcgtaacccatagcatgtgtggcatctatatgggcgttctgcctgctcgtcatgacacttagtgggtgaaggggagcagacacaaaagctcatgctgcttttgaactgcgaataataaagtcaagaactttctggagtttaaccaaatagagaaagtggtcaggttgcgcctgaactgctgtggagggcacacgctgtgtcttatttagtcttagtaatctcggtatgtgcccctggccccaggccctcataagcacttgtttaattgacagacggacagatggataacccagtagtgctgaatgatgatgggcttgctggtcaaccactgagctgcctgctccttggagggaggctacagggctgggctccgagtcacacagcgcaggagttttttgagcctttcttaagagaacccttcaggagcttacaggccagaaatcagataaaattgcatcctgagtattatttttccagctgagtaagatgcagttaatggaaggcttaatacatacttctgagccctgcggaaagagagacattctgctgcttctggaaatgagtttctggttctgcagccacaggtctcaggtgaaggagaggtgagaatgggctgaagctccagtctatatgtgcaagacaggatcaccaaggtactgcccttccttcctaggacatctctttgctaagagccagaggtctacaaaatcaaaggggagctgacagaagc

SEQ ID NO: 65053 - DNA, 2008 bp, Homo sapiens
ggatccatgaaacactaacaggctaacttgttagtagcagcaggataaaagcaaatcccagaccttgcagcctctcctggcctcttccatgctattttctgcttatgcccctacctacctgaagcctccagtgggttctctgcacacccacaatgcaatccaaggctctcaccaaggcctgcaagatcctacatgaactggtccctgcctactctctgattccattttccacgacttttccttgctcactccagctcagcctccatgctgtccctcaagcaggccaagcacaggacctacacacagcctatctgctctgcccagaatgctcttcccacaggtagtaaggtcattcctttactcaattcagggtgctgggtcacatggcaaatccttgcagcaactgtccctgaaccatgatgtgtatcggcctctgcgtttttcctctattctttttttttttttttttttttttgagacagagtctcgctctgtcacccaggctggagtgcagtggcacgaccttggctcactgcaaccttcacctcctgggttcaagcaattttcctgcttcagcctcctgagtagctgggactacaggtgtgtgccaccacgcccagctaattttttgtgtttttagtagagatggggtttcactatattagccaggatggtctccatctcctgacctggtgatccgcctgcctcagcctcccaaagtgctgggattacaggcatgagccaccgtgcccagcctcctctattcttttccacacacatgactaactggcattgcatacttaatacatagctgaaaggattccccgtgcaactaagtttcttgaactcaagggctttcttagttcactactgtgttcccagacgagtgaccctacactctctttcacagtcacctggaaagtaggcattatccccatcttatagaagaggaaactgaggctgagaagttcagccattgcaatttacccaatttcgcacttaatttcgcacttaaattgttagacgtaggattcaaatccagacatgtgcaatgctaatgcattgtttggagacacttctccatgagtttcttgcattcctacacatcttgctgggtagacaaagaatgcaaggctctgactgctctgtacctgggttgggtttgcagcaaccaatcctgagacatgaggtaatrtttctctctgagacaaaaagctggcttgcttgctgtctgccacaagatggtggataccccaagctcggtgttcctgtcctatatcgtaacccatagcatgtgtggcatctatatgggcgttctgcctgctcgtcatgacacttagtgggtgaaggggagcagacacaaaagctcatgctgcttttgaactgcgaataataaagtcaagaactttctggagtttaaccaaatagagaaagtggtcaggttgcgcctgaactgctgtggagggcacacgctgtgtcttatttagtcttagtaatctcggtatgtgcccctggccccaggccctcataagcacttgtttaattgacagacggacagatggataacccagtagtgctgaatgatgatgggcttgctggtcaaccactgagctgcctgctccttggagggaggctacagggctgggctccgagtcacacagcgcaggagttttttgagcctttcttaagagaacccttcaggagcttacaggccagaaatcagataaaattgcatcctgagtattatttttccagctgagtaagatgcagttaatggaaggcttaatacatacttctgagccctgcggaaagagagacattctgctgcttctggaaatgagtttctggttctgcagccacaggtctcaggtgaaggagaggtgagaatgggctgaagctccagtctatatgtgcaagacaggatcaccaaggtactgcccttccttcctaggacatctctttgctaagagccagaggtctacaaaatcaaaggggagctgacagaagc

SEQ ID NO: 65054 - DNA, 2008 bp, Homo sapiens
ggatccatgaaacactaacaggctaacttgttagtagcagcaggataaaagcaaatcccagaccttgcagcctctcctggcctcttccatgctattttctgcttatgcccctacctacctgaagcctccagtgggttctctgcacacccacaatgcaatccaaggctctcaccaaggcctgcaagatcctacatgaactggtccctgcctactctctgattccattttccacgacttttccttgctcactccagctcagcctccatgctgtccctcaagcaggccaagcacaggacctacacacagcctatctgctctgcccagaatgctcttcccacaggtagtaaggtcattcctttactcaattcagggtgctgggtcacatggcaaatccttgcagcaactgtccctgaaccatgatgtgtatcggcctctgcgtttttcctctattctttttttttttttttttttttttgagacagagtctcgctctgtcacccaggctggagtgcagtggcacgaccttggctcactgcaaccttcacctcctgggttcaagcaattttcctgcttcagcctcctgagtagctgggactacaggtgtgtgccaccacgcccagctaattttttgtgtttttagtagagatggggtttcactatattagccaggatggtctccatctcctgacctggtgatccgcctgcctcagcctcccaaagtgctgggattacaggcatgagccaccgtgcccagcctcctctattcttttccacacacatgactaactggcattgcatacttaatacatagctgaaaggattccccgtgcaactaagtttcttgaactcaagggctttcttagttcactactgtgttcccagacgagtgaccctacactctctttcacagtcacctggaaagtaggcattatccccatcttatagaagaggaaactgaggctgagaagttcagccattgcaatttacccaatttcgcacttaatttcgcacttaaattgttagacgtaggattcaaatccagacatgtgcaatgctaatgcattgtttggagacacttctccatgagtttcttgcattcctacacatcttgctgggtagacaaagaatgcaaggctctgactgctctgtacctgggttgggtttgcagcaaccaatcctgagacatgaggtaatgtttcyctctgagacaaaaagctggcttgcttgctgtctgccacaagatggtggataccccaagctcggtgttcctgtcctatatcgtaacccatagcatgtgtggcatctatatgggcgttctgcctgctcgtcatgacacttagtgggtgaaggggagcagacacaaaagctcatgctgcttttgaactgcgaataataaagtcaagaactttctggagtttaaccaaatagagaaagtggtcaggttgcgcctgaactgctgtggagggcacacgctgtgtcttatttagtcttagtaatctcggtatgtgcccctggccccaggccctcataagcacttgtttaattgacagacggacagatggataacccagtagtgctgaatgatgatgggcttgctggtcaaccactgagctgcctgctccttggagggaggctacagggctgggctccgagtcacacagcgcaggagttttttgagcctttcttaagagaacccttcaggagcttacaggccagaaatcagataaaattgcatcctgagtattatttttccagctgagtaagatgcagttaatggaaggcttaatacatacttctgagccctgcggaaagagagacattctgctgcttctggaaatgagtttctggttctgcagccacaggtctcaggtgaaggagaggtgagaatgggctgaagctccagtctatatgtgcaagacaggatcaccaaggtactgcccttccttcctaggacatctctttgctaagagccagaggtctacaaaatcaaaggggagctgacagaagc

SEQ ID NO: 65055 - DNA, 971 bp, Homo sapiens
ccttatctcagtcacagaacttaygataatacattgtaattttttacctatctcccccaccaccacccccttatcaaactgcaaaatataagcttctcaaagactatatctatttatcatctctggatcccctatgcaccaaaaagctggtatatggcagacatacatacacacacagagaggttttagaaatgaataaatggcccactgtctaccttgttcatcacactagattgtaatttttaattaactctcaaattttagagtaatgatcatgtccataaagaaaagcaggtgctatcacatcaggccagcctggtaagtgagaggcaagagataactaagattttcaaaagctgaaaaccttttaagaccaaattattatatcccagactaaaagcagattgaagattgcaacaatacagaaataaaggtagttttgttttagactgtaaagaaacagttggggaattgcagtttttttcaagacaaagacattactgttttgtttactatactgtggaaagtgctgcacatacctctttcagagatatcaatattcaaacacaaattccaaaacaatttaaaggtcaaattctggactattcctacactgaataatctgagtcactactctctttgcagctgaccacatttgaacataatgaaaactcatttgtaagtgctaaatattcttgcaagaaccaagataatacttgaaatgttctacttacagaagagtctatcatagtttgtacctcatttcataactactttttcatcactcagcaaatagaaatactgtcaccaaaaagataggatgaaaattatttcatttatttcaatgcagaatgtgcctatatatagacaatttctaacacttaaaaaaatttacaaggacacacaacttagtatttatattaggagtgaattaaccatttaaataaatgtttacatttaaaatcaaagtt

SEQ ID NO: 65056 - DNA, 971 bp, Homo sapiens
ccttatctcagtcacagaacttacgataatacattgtaattttttacctatctcccccaccaccacccccttatcaaactgcaaaatataagcttctcaaagactatatctatttatcatctctggatcccctatgcaccaaaaagctggtatatggcagacatacatacacacacagagaggttttagaaatgaataaatggcccactgtctaccttgttcatcacactagattgtaatttttaattaactctcaaattttagagtaatgatcatgtccataaagaaaagcaggtgctatcacatcaggccagcctggtaagtgagaggcaagagataactaagattttcaaaagctgaaaaccttttaagacmaaattattatatcccagactaaaagcagattgaagattgcaacaatacagaaataaaggtagttttgttttagactgtaaagaaacagttggggaattgcagtttttttcaagacaaagacattactgttttgtttactatactgtggaaagtgctgcacatacctctttcagagatatcaatattcaaacacaaattccaaaacaatttaaaggtcaaattctggactattcctacactgaataatctgagtcactactctctttgcagctgaccacatttgaacataatgaaaactcatttgtaagtgctaaatattcttgcaagaaccaagataatacttgaaatgttctacttacagaagagtctatcatagtttgtacctcatttcataactactttttcatcactcagcaaatagaaatactgtcaccaaaaagataggatgaaaattatttcatttatttcaatgcagaatgtgcctatatatagacaatttctaacacttaaaaaaatttacaaggacacacaacttagtatttatattaggagtgaattaaccatttaaataaatgtttacatttaaaatcaaagtt

SEQ ID NO: 65057 - DNA, 765 bp, Homo sapiens
ccattcctgcagaagcagggctttttttttttttaacaacaacaaaaaaaatctttagtatttaactgcaaagtttcatatacaagccctttaatccaataaatagtctcaggtttgacctcatataaaacagtggtactttttcttatggagagtgtatatttgagaagaatctcacgagtgctttgattctatttattgcaattagcgkgattcataaaaggtcggaaatgattttcaagcaccgcaagtactatagtgatagcagtttgtatgtatcattatatatacacatatgtatatatatgcacacatgtacatatatgtacgcatatctttaaagtgttatgattttgtaagaacttttggatgcgtgcattttttagtttattttttgatagtttatattcttttagttaccaataatgccttttttggttatttctgtccttaattagtgaagaatattttgtcgaacttatgatatccatgatccaaaggtaagaaatttactctttaaagatttttctgtgtcacaaagtattttcaatcaaaattcagcttttatttagttttaataatttccattgccatcacttcctattgatgcctacaaacaactgtagtttttattttgaaatatgattaattttattacagataaggaaaacttttttgtgcgtgacagggtctcactctcttgcccaagctagagtgcagtgatgcagtcatagctcactgcagcctccacctcttgggctcgag

SEQ ID NO: 65058 - DNA, 765 bp, Homo sapiens
ccattcctgcagaagcagggctttttttttttttaacaacaacaaaaaaaatctttagtatttaactgcaaagtttcatatacaagccctttaatccaataaatagtctcaggtttgacctcatataaaacagtggtactttttcttatggagagtgtatatttgagaagaatctcacgagtgctttgattctatttattgcaattagcgtgattcataaaaggtmggaaatgattttcaagcaccgcaagtactatagtgatagcagtttgtatgtatcattatatatacacatatgtatatatatgcacacatgtacatatatgtacgcatatctttaaagtgttatgattttgtaagaacttttggatgcgtgcattttttagtttattttttgatagtttatattcttttagttaccaataatgccttttttggttatttctgtccttaattagtgaagaatattttgtcgaacttatgatatccatgatccaaaggtaagaaatttactctttaaagatttttctgtgtcacaaagtattttcaatcaaaattcagcttttatttagttttaataatttccattgccatcacttcctattgatgcctacaaacaactgtagtttttattttgaaatatgattaattttattacagataaggaaaacttttttgtgcgtgacagggtctcactctcttgcccaagctagagtgcagtgatgcagtcatagctcactgcagcctccacctcttgggctcgag

SEQ ID NO: 65059 - DNA, 765 bp, Homo sapiens
ccattcctgcagaagcagggctttttttttttttaacaacaacaaaaaaaatctttagtatttaactgcaaagtttcatatacaagccctttaatccaataaatagtctcaggtttgacctcatataaaacagtggtactttttcttatggagagtgtatatttgagaagaatctcacgagtgctttgattctatttattgcaattagcgtgattcataaaaggtcggaaatgattttcaagcaccgcaagtactatagtgatagcagtttgtatgtatsattatatatacacatatgtatatatatgcacacatgtacatatatgtacgcatatctttaaagtgttatgattttgtaagaacttttggatgcgtgcattttttagtttattttttgatagtttatattcttttagttaccaataatgccttttttggttatttctgtccttaattagtgaagaatattttgtcgaacttatgatatccatgatccaaaggtaagaaatttactctttaaagatttttctgtgtcacaaagtattttcaatcaaaattcagcttttatttagttttaataatttccattgccatcacttcctattgatgcctacaaacaactgtagtttttattttgaaatatgattaattttattacagataaggaaaacttttttgtgcgtgacagggtctcactctcttgcccaagctagagtgcagtgatgcagtcatagctcactgcagcctccacctcttgggctcgag

SEQ ID NO: 65060 - DNA, 756 bp, Homo sapiens
tatgttatacataccaaatgatttatttataaccctatctttccataaaggacttgaaggagcttcaaacaaaggatatgtgaacaatagggttaatcaataataagtagaaaatctggacatagaataaaaagaggagagaaagacaccgagaatgagcgttaayacagtgctttccatttttctggtgttttgagtagcgtggcttttggagaaagccaaaactcaaattcactccttatcaactgtgtgccttgggctccatttctctgagagtctacttagctccaatgtaaaataagaatagaactatgactttgtaaggttgctctaaggattgaaaatcatgtattatgttcaatacggggacactgtccttatgggtgagtactcccctaagactttattaagagggcactaggagaagcactgggaggtcttctcagtaacaacactaaagtaattgctatttttccagcctgtggaaccacagaagtgactgtaactaaaattagacatttctttctgattcattctctactcacgggattgtcagaccccagtcttcttctggactctataaactttttagaaatcatcagcaggctcctggagaagcttaaatgaactcacacaatatgtgacagtgaactccctgggagagtgaaaaccaaagtctaagccagtgtctccatttacttgtgtgattgtgggcaagtcattcaagtgctttgaggctcaggtcttaattcatga

SEQ ID NO: 65061 - DNA, 1564 bp, Homo sapiens
aggccataaaattccgaataataattcatcaggtcctgagaattctcctaagtacatttagatcaagcgcatgacatttcgcccctaatagcagcattggcaaatggcctaacggaatttagatggctccaccaagccgcacaactatattttgtgtgttcaaatgaggggcagccgtagaggttgatgggtggacataaaatagcagtttaggctagtggtcaagatcacacaccacgacactgggcaaattagaacctacgcatctcaatttactcatctttgacgtaggatattaatatggaaccactcaatctagtgtgaggactacatgaaataaatgcttagctgatgcaggaaattaaagatgatggcatgtttttctgttggagtttattttaaaccaatgaagcagtgaggaagaggcctctacttcccagaatgttggctactgacttttccagttaagaacacccttctatgacatcggaaattcacaaaggtccacatttttagtaatcatcaattagtaaatatgtaatgatcaggttagtatggattcaataacgctttaaaatggatttctactttacacatcccaatagcatttacccatatttgaaaattatttgcacctatatctaagacctattatttaccctacctagtataaaatacttgcagcatatacaggtttgaagtggccatacagtagttgttcctgggttgcaaagggatccatagtccaaaggggtgaatgactgctcttgaggactagaggttcagggtccctatgggtatcacaggaggagcatattcagagrggttaaaagaggacatgatcttgaggtggaataacatgggtgccaaaaattgaggagtggggttgactacagggagtcctggttgcttgggcctaggccctaggagagtctccaaatggggaaggggatgcctttgagcacaaatgtctgtggggaaagatgggacatttgaactggttgactttaattctggagtgaacatggaaaaagaaaaaggagaaccagtctccaaagcagttaaactgtccgatgaaatgaaaacgttctgtaaccgtgctgtccaatgtgttaggtacatgtagctactgagcacttgaaatgaggctagttaatgaaaccgaagaagtgatttttacaaatgttatacaactttaattcatttcagtttaaatagccacatgtggctaatggctaccgtatcagacaaacaagcagctctacagtttggtcaggccactttggagaagccccaattatgtaacagtacgttgtttcttctttctgagaatcagctgatgcccattacaggctggcgcccttcaatctaagagaatatttctttccataagccataaaatgctcctagatgaaattgactggcttcatcccatggcactccacatttgccacatttgaatcaggttttagccactgtcgttaattagaatccatgtagaagcaaaaacatttaaaataaacccgggcccttgatgttatagctgtcatttttttacatggcc

SEQ ID NO: 65062 - DNA, 1564 bp, Homo sapiens
aggccataaaattccgaataataattcatcaggtcctgagaattctcctaagtacatttagatcaagcgcatgacatttcgcccctaatagcagcattggcaaatggcctaacggaatttagatggctccaccaagccgcacaactatattttgtgtgttcaaatgaggggcagccgtagaggttgatgggtggacataaaatagcagtttaggctagtggtcaagatcacacaccacgacactgggcaaattagaacctacgcatctcaatttactcatctttgacgtaggatattaatatggaaccactcaatctagtgtgaggactacatgaaataaatgcttagctgatgcaggaaattaaagatgatggcatgtttttctgttggagtttattttaaaccaatgaagcagtgaggaagaggcctctacttcccagaatgttggctactgacttttccagttaagaacacccttctatgacatcggaaattcacaaaggtccacatttttagtaatcatcaattagtaaatatgtaatgatcaggttagtatggattcaataacgctttaaaatggatttctactttacacatcccaatagcatttacccatatttgaaaattatttgcacctatatctaagacctattatttaccctacctagtataaaatacttgcagcatatacaggtttgaagtggccatacagtagttgttcctgggttgcaaagggatccatagtccaaaggggtgaatgactgctcttgaggactagaggttcagggtccctatgggtatcacaggaggagcatattcagagaggttaaaagaggacatgatcttgaggtggaataacatgggtgccaaaaattgaggagtggggttgactacagggagtcctggttgcttgggcctaggccctaggagagtctccaaatggggaaggggatgcctttgagcacaaatgtctgtggggaaagatgggacatttgaactggttgactttaattctggagtgaacatggaaaaagaaaaaggagaaccagtctccaaagcagttaaactgtccgatgaaatgaaaacgttctgtaaccgtgctgtccaatgtgttaggtacatgtagctactgagcacttgaaatgaggctagttaatgaaaccgaagaagtgatttttacaaatgttatacaactttaattcatttcagtttaaatagccacatgtggctaatggctaccgtatcagacaaacaagcagctctacagtttggtcaggccactttggagaagccccaattatgtaacagtacgttgtttcttytttctgagaatcagctgatgcccattacaggctggcgcccttcaatctaagagaatatttctttccataagccataaaatgctcctagatgaaattgactggcttcatcccatggcactccacatttgccacatttgaatcaggttttagccactgtcgttaattagaatccatgtagaagcaaaaacatttaaaataaacccgggcccttgatgttatagctgtcatttttttacatggcc

SEQ ID NO: 65063 - DNA, 1478 bp, Homo sapiens
gggtgggtctgacagcctaaaaaatagaatgcaggaaaacctagggctatgtaacttctatggaaggccataaaaggcaatgcagcatctgcttggttctttctcttgggacgctcacccttggaacccagccgccatattgtgaggaagctcagggtacatggagacaatgtgtaggtgttccagccaatagaccctccagcaagggtcccacccaccagtcagcatcawtcctcagactcatgagtgaacaaccttcagatgatctcagaccctggctttcaagctgcttcagctgatgctggagcagagacaagctgttcctgagagccctgctgaaactacagattcctgaacaaaataaatgttgttgttttaagccactaaatttgggggtggtttgttatgcaacaattgttactggaatatagtcaaactttaatgaaactctaaagaatagggaaatgcttcaattccctcatcaatgatatccaaatggccagaaaatgggttctcatgaaagaaatcctgagaggaaaaagttcaaggtcttggttgtagaaaaacaccaagaatttggaagccttattatatcagggaattaagtgaaacatttgaaagaaaagaaaacagacagcctaatgaatataccacaaagtttagatttatgggattatatatttattgctttgactgctaagatctatctagagcctcaagtggctttggattaattcattatttggctttgaaagatttcttgtcttaagaggatcctccacttctgtctcgagattatagggtggcattgggtgttattccctaatgttcaaaagatgagaaaaatgttgctggcatgctagaaagaagacccaacaaggcagaaaaaaactcttaatctttctatattcgcagatcttggcactgtccttgacagtttggagaggaactgaaaacagaaacaaaaacaaaacaaaaactggatatctatggagatatagccgtataaagagttaaaggaagttggcaaagagtgacagtgacttatttttgacactcccatgtttcacccaaataagaagctgtttaagtcttaacagtgattaatctaaaaatccaaagtagatcccactcttctgcatctaccttcaagatgcctcaaatctatgctgtaggccgggagcgtcagctcacgcctgtaatcccagcactttgggaggctgaggcgggcggatcacgatgtcaggagatcgagaccatcctgcataacactgtgaaaccctgactctacgaaaaacatgaaaaatacaaacaatacaaaaaaaaaaattagccaggcgaggtggcgggtgcctgtagtcccagctactccggaggctgagacaggagaatggcatgaacccgggaggcggagcttgcagtgagccgagatcctgagatggcgccactgcactcgagcctgggcgacagggtgagac

SEQ ID NO: 65064 - DNA, 1478 bp, Homo sapiens
gggtgggtctgacagcctaaaaaatagaatgcaggaaaacctagggctatgtaacttctatggaaggccataaaaggcaatgcagcatctgcttggttctttctcttgggacgctcacccttggaacccagccgccatattgtgaggaagctcagggtacatggagacaatgtgtaggtgttccagccaatagaccctccagcaagggtcccacccaccagtcagcatcattcctcagactcatgagtgaacaaccttcagatgatctcagaccctggctttcaagctgcttcagctgatgctggagcagagacaagctgttcctsagagccctgctgaaactacagattcctgaacaaaataaatgttgttgttttaagccactaaatttgggggtggtttgttatgcaacaattgttactggaatatagtcaaactttaatgaaactctaaagaatagggaaatgcttcaattccctcatcaatgatatccaaatggccagaaaatgggttctcatgaaagaaatcctgagaggaaaaagttcaaggtcttggttgtagaaaaacaccaagaatttggaagccttattatatcagggaattaagtgaaacatttgaaagaaaagaaaacagacagcctaatgaatataccacaaagtttagatttatgggattatatatttattgctttgactgctaagatctatctagagcctcaagtggctttggattaattcattatttggctttgaaagatttcttgtcttaagaggatcctccacttctgtctcgagattatagggtggcattgggtgttattccctaatgttcaaaagatgagaaaaatgttgctggcatgctagaaagaagacccaacaaggcagaaaaaaactcttaatctttctatattcgcagatcttggcactgtccttgacagtttggagaggaactgaaaacagaaacaaaaacaaaacaaaaactggatatctatggagatatagccgtataaagagttaaaggaagttggcaaagagtgacagtgacttatttttgacactcccatgtttcacccaaataagaagctgtttaagtcttaacagtgattaatctaaaaatccaaagtagatcccactcttctgcatctaccttcaagatgcctcaaatctatgctgtaggccgggagcgtcagctcacgcctgtaatcccagcactttgggaggctgaggcgggcggatcacgatgtcaggagatcgagaccatcctgcataacactgtgaaaccctgactctacgaaaaacatgaaaaatacaaacaatacaaaaaaaaaaattagccaggcgaggtggcgggtgcctgtagtcccagctactccggaggctgagacaggagaatggcatgaacccgggaggcggagcttgcagtgagccgagatcctgagatggcgccactgcactcgagcctgggcgacagggtgagac

SEQ ID NO: 65065 - DNA, 1478 bp, Homo sapiens
gggtgggtctgacagcctaaaaaatagaatgcaggaaaacctagggctatgtaacttctatggaaggccataaaaggcaatgcagcatctgcttggttctttctcttgggacgctcacccttggaacccagccgccatattgtgaggaagctcagggtacatggagacaatgtgtaggtgttccagccaatagaccctccagcaagggtcccacccaccagtcagcatcattcctcagactcatgagtgaacaaccttcagatgatctcagaccctggctttcaagctgcttcagctgatgctggagcagagacaagctgttcctgagagccctgctgaaactacagattcctgaacaaaataaatgttgttgttttaagccactaaatttgggggtggtttgttatgcaacaattgttactggaatatagtcaaactttaatgaaactctaaagaatagggaaatgcttcaattccctcatcaatgatatccaaatggccagaaaatgggttctcatgaaagaaatcctgagaggmaaaagttcaaggtcttggttgtagaaaaacaccaagaatttggaagccttattatatcagggaattaagtgaaacatttgaaagaaaagaaaacagacagcctaatgaatataccacaaagtttagatttatgggattatatatttattgctttgactgctaagatctatctagagcctcaagtggctttggattaattcattatttggctttgaaagatttcttgtcttaagaggatcctccacttctgtctcgagattatagggtggcattgggtgttattccctaatgttcaaaagatgagaaaaatgttgctggcatgctagaaagaagacccaacaaggcagaaaaaaactcttaatctttctatattcgcagatcttggcactgtccttgacagtttggagaggaactgaaaacagaaacaaaaacaaaacaaaaactggatatctatggagatatagccgtataaagagttaaaggaagttggcaaagagtgacagtgacttatttttgacactcccatgtttcacccaaataagaagctgtttaagtcttaacagtgattaatctaaaaatccaaagtagatcccactcttctgcatctaccttcaagatgcctcaaatctatgctgtaggccgggagcgtcagctcacgcctgtaatcccagcactttgggaggctgaggcgggcggatcacgatgtcaggagatcgagaccatcctgcataacactgtgaaaccctgactctacgaaaaacatgaaaaatacaaacaatacaaaaaaaaaaattagccaggcgaggtggcgggtgcctgtagtcccagctactccggaggctgagacaggagaatggcatgaacccgggaggcggagcttgcagtgagccgagatcctgagatggcgccactgcactcgagcctgggcgacagggtgagac

SEQ ID NO: 65066 - DNA, 1568 bp, Homo sapiens
ggaacttctcgttaatataatctgggctctggtttccattgtgtgggatgaagaagcggcttctatgttctagagaacaacctccactctccctgtttctctcttctgctgcacttgaccttccatctctcatattttgctgccaacctctgactctgaaaaaagaaaaaacttcttcgcaaaagcccatctactgctgggccccctatgctaagagattctgtttcatctcagtcccgtgattaggaatccaaaccacaggggcttttggtgtatagaataattaaagagatcagaaattaggtcagaaatcctggggtccagcctcatctctgccacttaccatctgcctgatattaagtgagctgctacagtatttctgcatgtcattttctacaccccgcaaatggcctaatgccagccacctcaaggatggtagcaagaattaaatgaggtactgtattggcaaggcctggtgcagtgcaggaactgaggaatgctcattctctttcctcccaaacaacatagatgacttactaaacatggcaaggggcagaagtgtctgaaaataccaatgtgagatcctactagaagagtggatgccacccttcaggtgggtccacagtagtatgtccttgcgggaataagtttcaggagacctcaatcccagggaaaccactgccgaaatcacagagagggcctcctatctctgctggggccactggctttgcaaatggagcataaggttttacctccttgtgtggtcctgccagttgtccctccctaggccacagcagtacaacttgccaaggagccgtccctggatcctacctcagtgtgctattagtctgtgcaaaggaagagtaaatctaactgttaaaaaaaaaaaatgcatgttaaccactgctgttatacccttacaaagaagaggccaggcagtatatatagatctctaaattctcatgtgtgcatacaaggtcactttctcaacgaaatcaatagaacaatgtgaatacacaattttcatgtcactatgtattttggagttgaaatacattgaagggaacaagaataacgaggctttgaagaagtggcagcttaggtagtaacataattttatatttccttgttgttagtctcaaatatatctgaggatacaactcagagctctgtttacgtaaaaagtcagaaacaaaaaaataaatatgttraattcagatttgaatttttcctcttttcctaccaaaagaagttgaagacatttttctagatgtctgctagcaattttttggcaatacattttttgttgttgttgttttcgtttctccctggagcctagtttgctcaatttcttcacgaggtcagattagcacagggtgagtttcagaactgctgtgtgttcttaggcaagtcacgtcgcatctctgtttcctactctataaaacacattcataataactgatctagccaataggactgctataaggtctgatatcaatatgtttgtgaacaactgtgtgaacattcttaagtgctgattgtgtgattttacggggtattcagtatca

SEQ ID NO: 65067 - DNA, 1568 bp, Homo sapiens
ggaacttctcgttaatataatctgggctctggtttccattgtgtgggatgaagaagcggcttctatgttctagagaacaacctccactctccctgtttctctcttctgctgcacttgaccttccatctctcatattttgctgccaacctctgactctgaaaaaagaaaaaacttcttcgcaaaagcccatctactgctgggccccctatgctaagagattctgtttcatctcagtcccgtgattaggaatccaaaccacaggggcttttggtgtatagaataattaaagagatcagaaattaggtcagaaatcctggggtccagcctcatctctgccacttaccatctgcctgatattaagtgagctgctacagtatttctgcatgtcattttctacaccccgcaaatggcctaatgccagccacctcaaggatggtagcaagaattaaatgaggtactgtattggcaaggcctggtgcagtgcaggaactgaggaatgctcattctctttcctcccaaacaacatagatgacttactaaacatggcaaggggcagaagtgtctgaaaataccaatgtgagatcctactagaagagtggatgccacccttcaggtgggtccacagtagtatgtccttgcgggaataagtttcaggagacctcaatcccagggaaaccactgccgaaatcacagagagggcctcctatctctgctggggccactggctttgcaaatggagcataaggttttacctccttgtgtggtcctgccagttgtccctccctaggccacagcagtacaacttgccaaggagccgtccctggatcctacctcagtgtgctattagtctgtgcaaaggaagagtaaatctaactgttaaaaaaaaaaaatgcatgttaaccactgctgttatacccttacaaagaagaggccaggcagtatatatagatctctaaattctcatgtgtgcatacaaggtcactttctcaacgaaatcaatagaacaatgtgaatacacaattttcatgtcactatgtattttggagttgaaatacattgaagggaacaagaataacgaggctttgaagaagtggcagcttaggtagtaacataattttatatttccttgttgttagtctcaaatatatctgaggatacaactcagagctctgtttacgtaaaaagtcagaaacaaaaaaataaatatgttgaattcagatttgaatttttcctcttttcctaccaaaagaagttgaagacatttttctagatgtctgctagcaattttttggcaatacattttttgttgttrttgttttcgtttctccctggagcctagtttgctcaatttcttcacgaggtcagattagcacagggtgagtttcagaactgctgtgtgttcttaggcaagtcacgtcgcatctctgtttcctactctataaaacacattcataataactgatctagccaataggactgctataaggtctgatatcaatatgtttgtgaacaactgtgtgaacattcttaagtgctgattgtgtgattttacggggtattcagtatca

SEQ ID NO: 65068 - DNA, 1442 bp, Homo sapiens
tcataataatgtcattacgaacaatcatgaaaaactaaagcttcatatttatatattgcataatttttttggttctgggtaaactaatgtaatgatttgacatacgcaacatcctgaagttagcctttctctttgtctgtatcccctttgtacctgtatctataaattatctctgcaatatacaaaatctttattctgttaagaagtcagtggaatgttcaagaaagatcaagaattcctggaaccctgtcttcatctgcaacaaactacgctgtactttctgatcatcggcaatggggattctacattgcagaccctggtcctttctgccagccttcagaccttgtttacagacctcctgaggatacacttttctcacttactatgtttctttggatggcaacctatacacctctcaataaattttggtttacttaggagctgaggggcacagaaacctagaaacctagattcaatttgtgccgatttatgagacacacgcacgacaatcctggaaactttcccgtagctcactttataaattaaccccttatttaaatattctgcagactcagcacagagcagtgttcaatggggacatggtcccagatcagccttttgggcctctccatgtttgctatcagaacacacgggccctgttcrgcacaaacaatgcaaatttacaagatttatgagaagaagggaatgttcctatcctgttgttattcaggccacagcatcactggtcttaacaggctccatactgctcagttccagacgttcgacagctggacttgggatgcatgtgtgagcagtgttctgatttgactgatggcttcactcattcactcattcagtcattcagctgaaatgttccaaatgcttaataaacgcaagacaatgaggctgaagccaaagggatgcaacacagagtaagacacagtccttggcctcaaagaacttatattccactgggagacaaagtgcctgtatggtaccatagagaaggcatgaaacgcatgagccagcaaaccttggctggaagcctgcacttgcttgtgagctgtgtgactctgggtaatttatcggatcctcttatgcctcagtttcctcatcagcaaaatgggtgtagtcatacccagtttcacagaggatgctgaggtaacagcattcaatcaactgctgtgaaatctctaagcaccatatagatattcaagattcttaaacacatcagtaatgcacaagagaaaggaacatatgtgcagtaaattaacaagcgaaagactatgaaaaatcagatacaagcaccataagcctactggggttatgataaaagagtgtcctcactgcacgttgtaggtattgtaacccaattttctgaactcgcagaagaggacaatgatgaggaaggagaatagaaagcaggaggaggaggaggagga

SEQ ID NO: 65069 - DNA, 1442 bp, Homo sapiens
tcataataatgtcattacgaacaatcatgaaaaactaaagcttcatatttatatattgcataatttttttggttctgggtaaactaatgtaatgatttgacatacgcaacatcctgaagttagcctttctctttgtctgtatcccctttgtacctgtatctataaattatctctgcaatatacaaaatctttattctgttaagaagtcagtggaatgttcaagaaagatcaagaattcctggaaccctgtcttcatctgcaacaaactacgctgtactttctgatcatcggcaatggggattctacattgcagaccctggtcctttctgccagccttcagaccttgtttacagacctcctgaggatacacttttctcacttactatgtttctttggatggcaacctatacacctctcaataaattttggtttacttaggagctgaggggcacagaaacctagaaacctagattcaatttgtgccgatttatgagacacacgcacgacaatcctggaaactttcccgtagctcactttataaattaaccccttatttaaatattctgcagactcagcacagagcagtgttcaatggggacatggtcccagatcagccttttgggcctctccatgtttgctatcagaacacacgggccctgttcggcacaaacaatgcaaatttacaagatttatgagaagaagggaatgttcctatcctgttgttattcaggccacagcatcactggtcttaacaggctccatactgctcagttccagacgttcgacagctggacttgggatgcatgtgtgagcagtgttctgatttgactgatggcttcactcattcactcattcastcattcagctgaaatgttccaaatgcttaataaacgcaagacaatgaggctgaagccaaagggatgcaacacagagtaagacacagtccttggcctcaaagaacttatattccactgggagacaaagtgcctgtatggtaccatagagaaggcatgaaacgcatgagccagcaaaccttggctggaagcctgcacttgcttgtgagctgtgtgactctgggtaatttatcggatcctcttatgcctcagtttcctcatcagcaaaatgggtgtagtcatacccagtttcacagaggatgctgaggtaacagcattcaatcaactgctgtgaaatctctaagcaccatatagatattcaagattcttaaacacatcagtaatgcacaagagaaaggaacatatgtgcagtaaattaacaagcgaaagactatgaaaaatcagatacaagcaccataagcctactggggttatgataaaagagtgtcctcactgcacgttgtaggtattgtaacccaattttctgaactcgcagaagaggacaatgatgaggaaggagaatagaaagcaggaggaggaggaggagga

SEQ ID NO: 65070 - DNA, 1442 bp, Homo sapiens
tcataataatgtcattacgaacaatcatgaaaaactaaagcttcatatttatatattgcataatttttttggttctgggtaaactaatgtaatgatttgacatacgcaacatcctgaagttagcctttctctttgtctgtatcccctttgtacctgtatctataaattatctctgcaatatacaaaatctttattctgttaagaagtcagtggaatgttcaagaaagatcaagaattcctggaaccctgtcttcatctgcaacaaactacgctgtactttctgatcatcggcaatggggattctacattgcagaccctggtcctttctgccagccttcagaccttgtttacagacctcctgaggatacacttttctcacttactatgtttctttggatggcaacctatacacctctcaataaattttggtttacttaggagctgaggggcacagaaacctagaaacctagattcaatttgtgccgatttatgagacacacgcacgacaatcctggaaactttcccgtagctcactttataaattaaccccttatttaaatattctgcagactcagcacagagcagtgttcaatggggacatggtcccagatcagccttttgggcctctccatgtttgctatcagaacacacgggccctgttcggcacaaacaatgcaaatttacaagatttatgagaagaagggaatgttcctatcctgttgttattcaggccacagcatcactggtcttaacaggctccatactgctcagttccagacgttcgacagctggacttgggatgcatgtgtgagcagtgttctgatttgactgatggcttcactcattcactcattcagtcattcagctgaaatgttccaaatgcttaataaacgcaagacaatgaggctgaagccaaagggatgcaacacagartaagacacagtccttggcctcaaagaacttatattccactgggagacaaagtgcctgtatggtaccatagagaaggcatgaaacgcatgagccagcaaaccttggctggaagcctgcacttgcttgtgagctgtgtgactctgggtaatttatcggatcctcttatgcctcagtttcctcatcagcaaaatgggtgtagtcatacccagtttcacagaggatgctgaggtaacagcattcaatcaactgctgtgaaatctctaagcaccatatagatattcaagattcttaaacacatcagtaatgcacaagagaaaggaacatatgtgcagtaaattaacaagcgaaagactatgaaaaatcagatacaagcaccataagcctactggggttatgataaaagagtgtcctcactgcacgttgtaggtattgtaacccaattttctgaactcgcagaagaggacaatgatgaggaaggagaatagaaagcaggaggaggaggaggagga

SEQ ID NO: 65071 - DNA, 1431 bp, Homo sapiens
  misc_feature (1)...(1431): n = A,T,C or G
aggtaatttactaattttaaatgtgctttccttgttccttcttattttttattttgaagacagggtctcactctatcacccaggctggagtgcagttgctccatctcggctcactgcaaccttcacctcctgggctcaagtgatcctcctgcataagcctcccgagtagctgggattatgggcgtgcaccaccatgcccggctaatttttatagttttagtagagacagggtctcaccatgttgtccttgctggtctygaactctttacctcaagtaatccacccgccttggcctcccaaagtgctgggattacaggtgtgagccaccacacctggccttggatttcatgatttgactgacatcttttacacaaattattgccatttttttattgggtaccaattattagtattgttttctttattcgttaaataagaagtaaaagaacttttttttaaaaaaagaacttttttcctagtaaaaagcttattttcaatttttttattgcttaaattttgcaggttaattaaggctgtgcttccttttcctactttctgtttaaatgtttggcattttttgagggttttctttctatggatttttgtgggggatcccatcttgttggacacttggttcctggagattgccaaattattgaaaagtttcctcatacccaaacattggcagtagactgaataaataacatctctgacactatttttcaattatatagagaatgctatttgtaaaatactgatttatttaaagatattacagtcagtagttttttgcaatctttttaaaatcagtggatgtcaaaaacagctattgttctttgtacagcatttttcaacattgtgaagagttcttatactcaaaaagtttgggagacacagtttgatattgtttaacctgagttgaacttgtcattttgtattcttgtttagagcagggattttattttgtctctttatctaactttgtattcctannnntttctttctttctctttggttctttgtttctttgttcattcttctctctctcccttttttatctatcatataaatatgtaaatatatattatatatccattagggaagaggaagctgtctaaagatatctagtatataggagctttgttctgcagaaaagaggatatgaagtcaattatattggaaattaatgcttaatacttttttttaaagcatttatctcccaatgataatgaaaacgatacgtcctatgtaattgagagtgatgaagatttagaaatggagatgcttaaggtatgtttacaattataaaaacattacttcaagttctttccaaaggacatttaattaagtaaaatattaactaattctaaaccaggttccaccacaatgaaattgctactaattatgtaacattagatttcacattttcca

SEQ ID NO: 65072 - DNA, 702 bp, Homo sapiens
taggtggtattcttctggtaagacatgaagattatcctagatgagtagtaaagcatcttctagaaatgtccagaccagagagagaccttagaaacaaagggagtcactatcactctccattgttttggccttgaattcaacttctctatcaccaaaaatgattggactcgaggccctatttcagggactgagtttagtcagaatgttttctcaattagcaaaaaatgcagtgtctgacagctagtcccttgcagactacacacctcaacagcgtgatttaaaggcaaaagaaagttccaaccaccaaaagtmttcctcactggttctgccatgatccttgaaaacactgacaagaagaagttttgctgaaataaggcaagagacgaggcaacacataaagtcaatattgttcatgatctcactagaacagattggcttagcagttcagatggctgtcacctggaagaagactctgtgggtataagaccagagctggatatgttttgttgtggagagagacaatggcaggtccagaacagcattgttactagagaaggctggcttgtgtgggaggaggactgtagagagaagtgggcggcagtgcagtcggaaggaaaggcaatgagggactgaaggaaaggcaacatttggtatgtggtatgtgtgtgtgagacaggcgtgaacatatgtttcctcccacca

SEQ ID NO: 65073 - DNA, 702 bp, Homo sapiens
taggtggtattcttctggtaagacatgaagattatcctagatgagtagtaaagcatcttctagaaatgtccagaccagagagagaccttagaaacaaagggagtcactatcactctccattgttttggccttgaattcaacttctctatcaccaaaaatgattggactcgaggccctatttcagggactgagtttagtcagaatgttttctcaattagcaaaaaatgcagtgtctgacagctagtcccttgcagactacacacctcaacagcgtgatttaaaggcaaaagaaagttccaaccaccaaaagtattcctcactggttctgccatgatccttgaaaacactgacaagaagaagttttgctgaaataaggcaagagacgaggcaacacataaagtcaatattgttcatgatctcactagaacagattggcttagcagttcagatggctgtcacctggaagaagactctgtgggtataagrccagagctggatatgttttgttgtggagagagacaatggcaggtccagaacagcattgttactagagaaggctggcttgtgtgggaggaggactgtagagagaagtgggcggcagtgcagtcggaaggaaaggcaatgagggactgaaggaaaggcaacatttggtatgtggtatgtgtgtgtgagacaggcgtgaacatatgtttcctcccacca

SEQ ID NO: 65074 - DNA, 702 bp, Homo sapiens
taggtggtattcttctggtaagacatgaagattatcctagatgagtagtaaagcatcttctagaaatgtccagaccagagagagaccttagaaacaaagggagtcactatcactctccattgttttggccttgaattcaacttctctatcaccaaaaatgattggactcgaggccctatttcagggactgagtttagtcagaatgttttctcaattagcaaaaaatgcagtgtctgacagctagtcccttgcagactacacacctcaacagcgtgatttaaaggcaaaagaaagttccaaccaccaaaagtattcctcactggttctgccatgatccttgaaaacactgacaagaagaagttttgctgaaataaggcaagagacgaggcaacacataaagtcaatattgttcatgatctcactagaacagattggcttagcagttcagatggctgtcacctggaagaagactctgtgggtataagaccagagctggatatgttttgttgtggagagagacaatggcaggtccagracagcattgttactagagaaggctggcttgtgtgggaggaggactgtagagagaagtgggcggcagtgcagtcggaaggaaaggcaatgagggactgaaggaaaggcaacatttggtatgtggtatgtgtgtgtgagacaggcgtgaacatatgtttcctcccacca

SEQ ID NO: 65075 - DNA, 1179 bp, Homo sapiens
aggctaggaaacacagcgctgaccttgagctttaggagaggaattcagaggcccctggcaacctgaaggggaccttgaagaggaccctgtaggaagacagaacacttccctgtagaggaggccaaaggaggaaggacatggtgttccgggcactctgactatagggattttatatgctgtggtgagaaataaaatggattatatttttgtagagtgtgtaaaacggggcttggcacacagtaagccttgtgtgattactatgtctttttttttttttttttttgagaccgaggtttgctcttgtcgcccagggtggagtgcagtggtgcaatctcaggtcactgcaacctctgcctcccaggttcaagcgattctcctgcctcagcctcccgagtaggggattacaggtgcacgtcaccatgcccagctaatttttgtatttttaatagagacaggatttcaccatgtaggccaggctggtctcaaactcctgacctcatgtaatccacccaccttggcctcccaaagtgctaggattacagacgtgagccactgcacccagtcctttgtgtgatgactatgtcttgatcatcattttataaagcaggctttgtaacttcacctccaagagtctgcaggatccagaccctgccttgccctcccacttatctctcactcactcttgggttctgactacgctggccttcctgttattgaagacagccatccctgctcgtccttgaatttgcaaggatggagctccgagtctgcaaagcaggatctggggagtgaatctaagctggcagggaagaatagaataatgggaggaataggtggagtttatttctaacagactatcaaaatgatgcagatgtggccaaagcagtgcttagaggaaatctatagttctaaatgcacagatcagaaaagtagaaargttgaaaatcaatgacctgagcttccctatcaagaaactgggaaaagaatggcaagtggaacctaagaaagtagaaggaaggaaattataacagcagaaactggtgaaatagaaagcaaagatacaataaagccaacaatgttaaaagttgattctttgaacagattaataaaatactagcaatgtctattttctctcgagaaattaagaaaatatatggattgccaatatcaggaatataa

SEQ ID NO: 65076 - DNA, 661 bp, Homo sapiens
caagacacttaaaaatccttgcccttatagatatggcatcaggctagatagtgataaaggctacgtgttaaaggcaggtgaaggaatagggtgacaggtccaggaaagccttcttgagagtaggtgacatctggacaaaaacctgaagatatccagaggcagagggactagccagtgcaaagaccatggccacaaatcagctgccaccacagcaaccctcagtatatccagggcctggagcaagagtacaggtaggcctctacactacataactaaatatgtaaacgttcagacattacgaatcaagctttacaaagtaaatgaaatacaccctatcctactttggcaaatacactttattagtgacctggatacccaggctccaatttctcagccttctcagagttccctgccagaatgtgcctgtctgccaaagagtgtgcctgtactggggcctcccgaccctcagtgccctctccctttctctccgctctctccttttctcttccccacatcaggaggtgttcatgtgtgcytgcgacatcccagccagcacctcaagctctactcacgtgccccacaaagccaccccttggccctcaggaggatggtcccttggaagatgatggtgcaggccctgaaagtggcctcaaagcctggg

SEQ ID NO: 65077 - DNA, 708 bp, Homo sapiens
atccaagtaagtgacaggcactatcgtagaactcaccagatatgatttggatatttgtcctccccaaatctcatgttgaaatgtaatcaccaaggttggaggtggggccggctgggaggtgctcaggtcatgggggcagatccatcatgtcttggtgtcgactttgtgataatgagtaagttcttacgagatctggttatttaaaattgtagggcacctccccgcaccttgctcccmctctcgccatgtgatgtgcttgcaaagctccctgaggcccctgagaagcccagccaagatgctggtgccatgcttgtacagcctgcagaaccaagagccaattaaacctcttttctttataaatgacccagtctcgggtatttatagcaacacaaaaatggcctaacacaccacctctcctaagtacaaacacagtatctctgaattttttagactaagagattaagacccagaagaacaggaaaatttctttttcccacccatgttagtcgagttcgaagaggggaatttcttcttccaaccattgttagtccagttcccagctaagaatctcctcttctccgagtggctgacctcagggattagcactcccttgaccagagatgatgtctacccacaggggtgtggcctcccagtctctacaaagtctcacaataaaactgactaaccacctttactcacacagaagac

SEQ ID NO: 65078 - DNA, 802 bp, Homo sapiens
ttttccagaaaacagctgacgtgtacacactaagcttggcaaaattcctggctaatttcgcaagaatgtttattccaaactgagatcatctttttaaaaaaagaaaaaagacacagacaaagagggtaaggagggagggggagatgaaagtggagaggcagaaaaggaagggtaggagmcagaaaggaaggaagggtcgaagggagggaggaagaaaacaaataaggaagggttcttcataaatcaagagaagatgttagattttaaagtcgtcttttctctatctgaccagatatctacctaatcctgcaacgaaattttattaattacagaagaggtcaaatatttcatctttaccagagattcattaatttaaaatgttctaacctcaaattcacattacaaaatcatagcattaggtctttttcagattttaataatttccctaattaacacaaatgattttaaaggaaattaatcaagaaaaactttatttcagagaggttcatggaagaggaaaatatagagtgaacatttacaaataaaaacaaacattatagaaatgcagagtcatgactgatgcattccaaccttgtgcatgtctggaatacatctgcaaatcatctgctcagccttcagaatagtctgtacacacacacagatacagccacacatacacccagagaaacccaggcattgtcaagcctggaggaagccaatgttgacatgtcagtcctttatctggtaagaaagaagcatgaactgctctatcacacttagtttgtttctgatttctggatcc

SEQ ID NO: 65079 - DNA, 802 bp, Homo sapiens
ttttccagaaaacagctgacgtgtacacactaagcttggcaaaattcctggctaatttcgcaagaatgtttattccaaactgagatcatctttttaaaaaaagaaaaaagacacagacaaagagggtaaggagggagggggagatgaaagtggagaggcagaaaaggaagggtaggagacagaaaggaaggaagggtcgaagggagggaggaagaaaacaaataaggaagggttcttcataaatcaagagaagatgttagattttaaagtcrtcttttctctatctgaccagatatctacctaatcctgcaacgaaattttattaattacagaagaggtcaaatatttcatctttaccagagattcattaatttaaaatgttctaacctcaaattcacattacaaaatcatagcattaggtctttttcagattttaataatttccctaattaacacaaatgattttaaaggaaattaatcaagaaaaactttatttcagagaggttcatggaagaggaaaatatagagtgaacatttacaaataaaaacaaacattatagaaatgcagagtcatgactgatgcattccaaccttgtgcatgtctggaatacatctgcaaatcatctgctcagccttcagaatagtctgtacacacacacagatacagccacacatacacccagagaaacccaggcattgtcaagcctggaggaagccaatgttgacatgtcagtcctttatctggtaagaaagaagcatgaactgctctatcacacttagtttgtttctgatttctggatcc

SEQ ID NO: 65080 - DNA, 802 bp, Homo sapiens
ttttccagaaaacagctgacgtgtacacactaagcttggcaaaattcctggctaatttcgcaagaatgtttattccaaactgagatcatctttttaaaaaaagaaaaaagacacagacaaagagggtaaggagggagggggagatgaaagtggagaggcagaaaaggaagggtaggagacagaaaggaaggaagggtcgaagggagggaggaagaaaacaaataaggaagggttcttcataaatcaagagaagatgttagattttaaagtcgtcttttctctatctgaccagatatctacctaatcctgcaacgaaattttattaattacagaagaggtcaaatatttcatctttaccagagattcattaatttaaaatgttctaacctcaaattcacattacaaaatcatagcattaggtctttttcagattttaataatttccctaattaacacaaatgattttaaaggaaattaatcaagaaaaactttatttcagagaggttcatggaagaggaaaatatagagtgaacatttacaaataaaracaaacattatagaaatgcagagtcatgactgatgcattccaaccttgtgcatgtctggaatacatctgcaaatcatctgctcagccttcagaatagtctgtacacacacacagatacagccacacatacacccagagaaacccaggcattgtcaagcctggaggaagccaatgttgacatgtcagtcctttatctggtaagaaagaagcatgaactgctctatcacacttagtttgtttctgatttctggatcc

SEQ ID NO: 65081 - DNA, 999 bp, Homo sapiens
actttttaacatgagttattttgtgtgaccaagcaaaagggtcaataattttttaattcagcatcttcaggatctttttgatggataatcaaatatttcactagttttaacaacactggggacttaagaaactgttgtagagtggatttgggtgtgtactgctctgtggtctctctggagctaactttcagccttcatacccattggaataaatataacgcttcttgaaatttaccatctcttcctctttgagtgctttctatttccctttaagatgtttaaaaataccattagaatcagtggtctttctgtggctagtggtgggaccaaatcaatcttttctcctctggtttctcttcctttaaatacagataaagaagaagtgcagaggaaacgtcagaagctcatgcccaatttttcggatagtttcggcggtggtagtggtgcyggagctggaggcggaggcatgtttggtagtggcggtggaggagggggcactggaagtacaggtccaggtacaaaaatacttattcttcctaaaactttttcatattggagagggtagaattttcttttctttggtttctgagcatgtctgtgagttgagtggctatgatattattgagtatattaattaaaatttcctgacaaatgtaaatttatttttcaaagaaatccatgttcattttacaatatgtaggtaatctcaaaagtcattaagaagaaaaaaaagtaccccaaagccagttatttaatgaataccttcctaaagattttggtatatttctcttttacattttttgacatagttgtcttgtttttgtttggaaacattgaaaagattgtatattatcatactacaatatagctatatattaaacatctctatatactacattgtagaaactttgaaaatacataaaatctgccatcaaaggttaactactactatttttatgtatatgttatagtatatatttgtaaattttaccctgaata

SEQ ID NO: 65082 - DNA, 2099 bp, Homo sapiens
ggggatcttattaaaatgcagattctgattcagtacttctggggtagagcctgagattcagtaaatctcacaagctccttggtgatgccaatgctgctgacccctgaaccacactttgaccagcaaaaacacatttgcttattgtaaaggttatatccactgttaagtttaaacaccatttcataaattaatgtgaagaagagttaggaattaattgttcattcaatcaacatcattgagcttactatatgctaggccttatggcgggtactaaacattcaacagtaactaaagcaaaaagtacacttgggaggctgaggtaagcagatcgcttgagctaaggagttcgagtccagcctggacaacatggtaaaaccccatatctacaaaaaaatacaaaaattagccaggcatggtgccatgctcccgtggtcccagctactcaagaggctgaggtgggaggatcactggagcccagaaggtggaggttgcagtgagctgagattgcgccactgcactccagcctggatgacagagtgagaccctgtcttaaaaaaaaaaaaaaaaaaaaaaaaaaaaaaaactacccttgatcaatctactttcgactgttctttcaagcaagtaataagcacagggcttacaagaacttttgtcattcacaattcaaaatgtatcaatcatgcttctcgtgttaagtttttcttgatgtaacatttttaagaatgcctcaattcagattgtttacacttttttttttttagatgaaatctcactctactgcccaggctggagtgtagtggtgtaatctcggctcactgcaacctccaccgcccaggttcaagtaattctcctgcttcagcctcccaagtagctgggattacaggcacctgccaccgcgcccggctaatttttgtatttttagtagagacagggtttcgccatcttggccaggctggtcttgaactcctgacctcgtgatccacctgccttggcctcccaaagtgctgggattacaggcgtgagccaccgcgcctggcctgtttacactttaaaaataattggcaatttaatccagtgaattagcattgctctattttatatgaactagtaataaaattttaaaggttttcatatgcatggcatagtttaccagcagctagctaccttattgcaaatgttactgggtcatttcaattaaaattaaagcaaataggaaagtggcaagaaatgtttcatttaattttggcttagtgtggccaagttctccaggtgaatgtcatggcttctgcctcaaatttgtatgtatagtacagatagtagaaaaacttatactcatcaaagagttcatctttttttttcctcatgagcatgaactaccgccctgctgcatattaaatggcaaaacagaatcaccagaaagtttcaaaatcctaacaggttagacatactaagagaacagatgacctactcaagattattttgcttccccaaaaatggataactctcagcaagaagggagaataagtacatgaagggccatgtatattcacaaagagcatctgaaccaagtctttgcttaccagattttacctttttaaaagatgccaggaggtggcagcatttgttgcagctgtgtgagtttactcattaaagcacaggttctcagaaagtctggtgtatcagatttggaggagaagggttggtgacaagcataaggtggcaggagtctgttcggattaaaaaggcattgggacaatattataacacaatattatacttgaaagcaaaataaatctggtgtcattggtgttctattaaatcttaaaatcttgggtagccatatacaaaaattaactcaaggtggatttaaagacttaaaaaacctaaaactacaaaaaccctggaagataacctaggaaatactattcyggatataggatccggcaaagatttcatgatgaagacgccaaagcaattgcaacaaaaacaaaaattgacaaatgggacctaattaaaataaagtgcttctgaacagcaaaagaaactatcaacagaataaacagacaacctacggaatgggataaaatatttgcaaa

SEQ ID NO: 65083 - DNA, 799 bp, Homo sapiens
cataaaaaggaaaaggcttatgaataatggagaggagaaattcaggtcacactatgcccagaagccatactttttttctatctcaagtaaggagatctctaaacatatattcttcatagatacagaaaacatctttctttctttttcttttttcttttttctttttctttcgagacagaatcttactctgttgcccaggctggagtgcagtggcacaatcctggctcactgcaacctccgcctcccaggttcaagcaattcttgtgcctcagcctctccagtagctkggatcacaggcatacaccaccatgctcagctaatttttgtatttttagtgaagacagggtttcaccgtgtttgccaggctggtgttaaacttctggcctcctgtgatctgcccgcctcaccctccctaagtgctgggattacaggtgcgaaccactgtgtccagacacaaaacatttcttgtagtggtcttttataggagacatttgcagataatgttccagaacatatttctccataggagctttgcatttcctgatatttcagaatttgcatggatctatgtagtaatgagttaggagcacaatgagctacaccaatagatgtgtagttaacgaagcatgtggttgaaatagaaagtgtaatttaaaatggaattactagcaccagaggaatttgaatgctttgttgttggtctgttgtgttaggcctgattcaagaatcaacatatcaccaggtgtggtggctcaaggctgtactcccagcactttgaaaggccaaggcgggtggatcc

SEQ ID NO: 65084 - DNA, 737 bp, Homo sapiens
cagagagttttgttgtacacacaggttaaaaaacaaaaaaaagtatggactttacacaaacctcctctccctgactgcacaaacacaagcacagttccccccaattatttgcatcttgcattagtgtggtatatctgttacaactgatgaaccaatattgatacactattactaactaaagttcacagtttatatgagggttcaccctctgttcagttaattttcaaaatgtcatttcttttttttttgagacggagtcttgctcttgttgcccaggctggaggtgcaatggcatgatctcagctcactgccatatccgcctctgaagctcaaacaatgctcctgcctcaacctcccgagtagatgggattacaggtgcataccaccacactcgctaatttttttattttcagtaaagatggggtttcatcctgttggccatgctggtcccaaactcctgacctcaggtgatctgcctgcctcagcctcccaaagtggtgggattacatcgcacccagcctaaaatgtcattatttcttccttgacatatgaattgtttagaagcatgttttaaattttgtaaatgtatggggactttaaaattttatttttgttattaatttataacctamacactttatagtcagagaagattagctatatcatattgattctttgaattttacagggacttacttttggtctaatacgtaattatgtttgtaaacatcccatgg

SEQ ID NO: 65085 - DNA, 737 bp, Homo sapiens
cagagagttttgttgtacacacaggttaaaaaacaaaaaaaagtatggactttacacaaacctcctctccctgactgcacaaacacaagcacagttccccccaattatttgcatcttgcattagtgtggtatatctgttacaactgatgaaccaatattgatacactattactaactaaagttcacagtttatatgagggttcaccctctgttcagttaattttcaaaatgtcatttcttttttttttgagacggagtcttgctcttgttgcccaggctggaggtgcaatggcatgatctcagctcactgccatatccgcctctgaagctcaaacaatgctcctgcctcaacctcccgagtagatgggattacaggtgcataccaccacactcgctaatttttttattttcagtaaagatggggtttcatcctgttggccatgctggtcccaaactcctgacctcaggtgatctgcctgcctcagcctcccaaagtggtgggattacatcgcacccagcctaaaatgtcattatttcttccttgacatatgaattgtttagaagcatgttttaaattttgtaaatgtatggggactttaaaattttatttttgttattaatttataacctacacactttatagtcagagaagattagctatatcatattgattctttgaattttacagggacttacttttggtctaataygtaattatgtttgtaaacatcccatgg

SEQ ID NO: 65086 - DNA, 735 bp, Homo sapiens
catatgcagggacttgggtgtgatgaaatgctgcagggttttgctgttgcagtgaagatgggagcaacgaaggcagactttgacaacacagtcgccattcaccctacctcttcagaagagctggtcacacttcgttgagaaccaggagacacgtgtggcgggcagtgggacccatagatcttctgaaatgaaacaaataatcacattgacttactgtttgagttttatgtatttctttattttaatcaggatcttctgatagtggaaatttttagtacataatagaacttatttatggagttasaaatttgtagtgttatccaggattgattttcatttgatcacatctcacagtaattaatattttcaagttttttttttattaacagctctgtgctagtttttttttttctgttttagcctcatcccaaatataaagctttgtgaagtacaattaacttaatgtacttgaatgaatagaacttgctactttttttttttttttttttgagacagagttttgctctcattgcccaggctggagtgcggtggtgctatttcagctcaccacaacctctgccgcctgggttcaagcgattctcctgccttagcctcccgaatagctggaattacaggcacgcaccaccatgcctgactaattttgtatttttagtagacatggggtttctccatgttggtcaggctggtctcaaactcccaccttcaggtgatccg

SEQ ID NO: 65087 - DNA, 638 bp, Homo sapiens
gggatcacaggcacgcgccaccacacccagctaatttttgtatttttagtagagatgggtttcaccatgttggccaggatggtcttgatctgttgacctcgtgatctgcccgccttggcctcccaaagtgctgggattacaggcgtgagccactgcactggacccactgaattctttactgtgtgttctgttaagcttttactgactgtctttctggttagtgatggccagttactgaactgacttttttttttttttttgaaaccaagcctggctctgttgcctaggctggagtacagtggcacgatctcggctcactgcagcctctgcctcccggggtcaagcgattctcctgcctcagcctcctgagtagctgagactacaggtgcacaccaccacacctggctaattcttgtacttttagtagagatgggttttcaccrtgttggccaggctggtcttgaactcctgaccttagaagtaatctgcccacctcggcctcccaaagtgctgagattacaggcgtgagccaccacatccggcctgcactgacttcttaagtaggcccaatgtcaatgaaagaaaaatattgtattagcaaggaagttatatgtattgtggtgggacaagaaaatagg

SEQ ID NO: 65088 - DNA, 638 bp, Homo sapiens
gggatcacaggcacgcgccaccacacccagctaatttttgtatttttagtagagatgggtttcaccatgttggccaggatggtcttgatctgttgacctcgtgatctgcccgccttggcctcccaaagtgctgggattacaggcgtgagccactgcactggacccactgaattctttactgtgtgttctgttaagcttttactgactgtctttctggttagtgatggccagttactgaactgacttttttttttttttttgaaaccaagcctggctctgttgcctaggctggagtacagtggcacgatctcggctcactgcagcctctgcctcccggggtcaagcgattctcctgcctcagcctcctgagtagctgagactacaggtgcacaccaccacacctggctaattcttgtacttttagtagagatgggttttcaccgtgttggccaggctggtcttgaactcctgaccttagaagtaatctgcccacctcggcctcccaaagtgctgagattacaggcgtgagccaccacatcyggcctgcactgacttcttaagtaggcccaatgtcaatgaaagaaaaatattgtattagcaaggaagttatatgtattgtggtgggacaagaaaatagg

SEQ ID NO: 65089 - DNA, 1527 bp, Homo sapiens
aacatgaggatttcacagatttaaggtgcgaaaagtcactgggttctctaagaagtctgggattcttctgcaggaaaaataagtttgttgagaaaaaatgagttggaggaggctgttattgaagtgaagcagaattgtttttaccaatctgcttattacccactctgtagtgtggaaacaaattattcatgcacaaggtcctyttactgttcctggaatgcagtggaaagagaacagattagtttttctccctcagaacacaaccactagaaacatcctacctcagatgagatattgcctacttattttcaaaagacagtgaaaaaatgatggatgtaaatgtttgctacaaaataaatacatgctagaaacagaagcatttgggtcacagctatattagagctacctgtgttcccttgtcactgagattaaaacaaaaatgtccaatacaatcattcacagcatgggagaggggaagttgaaggatggaaaggccagtcataaaaggatttcagaatttcagtccataaggaagtggctttgtgcattgtctgttgctgtgtgcaagataagtctggagaaagaaaatatgcagtaacaagggctcctttgtccatctcacctctctagataccaagtttcagacatgttgcattttaattgaaaggttgatataattttttaaaaaagaaaacttgtggtgtttgaagtgacaaaggctgctgggacaaaaaagcagggaaagggaatttttttaaaaaaagcaaacaacaacaaaaacccacaaaaaacaaacaaaaaacagaggaagaagtcgaaacaccctgggttgtgactacttccaggaaggggctacaagaggcagttggaaattctatttgctttgcaactgtgagtttcccagcctgctccctttttacagtatattactttggttttggttcatgaagttatccctttctgttttctggaacagctatgtattttctttatctatcatctatctatctacctgcctatcatctatctatttactagtattttttctacctttctctatcaagaccttgggtgaagcaggatagaattccagtgtatgttcactctaccatttaaaacaagagctcttgtaggcattctctaacacatcataaacctgagctttctaaaacagggtgtggtaaactaccatgcatgggccatgtctgacacagtctgcgtttgtaagtaaagttgtaatgtgacacagccacatacatgtgttaatataatgtctctggctactttcatggtataatggaagagctgagcattgaagagggaccacatggcttggaaaacttaaaatatttaacatttagccctttgcagaaaatatttgctgactctgttttaaaagatctctgtttagaatgctacctattgccttctgcatagaatcacaactctaccacaatcgacacagcttcagccctgcttctatatccagcatcatctattatttctgctcctcctccttattttcct

SEQ ID NO: 65090 - DNA, 544 bp, Homo sapiens
atgctcctcatccatcaagtttcagtttcatctcctccatgagtaacacttccctaaggacattgtgtcctttacaatttttttatagctttattgaggtacatttattgacatacaatacatggcacacatttaaactgtacaatttggtaagttttgacatatgtttacattatgaaaccatcaccacaatcaatatagtgaacatattcatcacccctgaaagtgtcctcatgcccttttgtcatccctccttctgggycctccctgccaccacctcctcagaaaatcagagatctgctatctgtcagtataggtattttgcattttctataatttatataaatggaatcatatagtatgcattcttttttgtctttttttactcatattactgtaagattcatccaaattgttgcgtgtttcaataggtcatttattttcattgctgagtagtattttattgtgtagatataacacaatttatctatttaactattgatgaacatttgggttgtttccagctgtgggctattacaaataa

SEQ ID NO: 65091 - DNA, 1100 bp, Homo sapiens
aatgggggagggggagctgttagtatttagctgggatggtcagggaaggtttttctgaggaggggacatttcaactgagacctgaaaaagttatccacatggaatgggtggaagaaagaatttcagacaagaaaggatagcatgtgcaaagatagacaaacatgcattcatttgcacacttctgaatataatcctcttaagccattatggaaaccggaagaggtgcttccaagagttagaaagcaccatgccttatgtttgcctttatgattaaagaagtcrgagatagtgaaagctggggcaattggttgtctctttaaattccaaaaggcactattgagttttggaattctagatgtaaaaatcatattctactgaacatggtgggaccacatcttgaaaaagggaaggagacgcgatattgaaaagaaaataatatatatttaagaaaacatgtataataaaattacctaaataagatttaaattcttcctcctttagggttatgagccggatgctagtgtaaccaagttggcagagcagtatgccaaagaggtatgctctttacatgtaaagctattattgccttttactgtcccatgaagttatttaaccagcgtgtttatgtatgctagaatggtaccaagctgttgctgacaaatgatccattggaagcagcgcatggaggcaatgtattaattacagacacttggataagcatgggacaagaagaggagaagaaaaagcggctccaggctttccaaggttaccaggttacaatgaaggtacaaattgatgcctctctgaaggttcattaattccattcatgaaggccagaaccatctaatcacttattcactttagggggagcagactgtcctttcattccctataaaaggactcactgactgtatcccctagggacttctctccttccaaagattagctgtgtcctttggaaaggcatttttgtgctggatgaaggaatttgaaacccactgagaagagaggagcaggcttttccctctcacaagaatcgaggcattgcagtgttttactctttgtgtgtttagagaaattaggttacttctgatgcatgc

SEQ ID NO: 65092 - DNA, 1100 bp, Homo sapiens
aatgggggagggggagctgttagtatttagctgggatggtcagggaaggtttttctgaggaggggacatttcaactgagacctgaaaaagttatccacatggaatgggtggaagaaagaatttcagacaagaaaggatagcatgtgcaaagatagacaaacatgcattcatttgcacacttctgaatataatcctcttaagccattatggaaaccggaagaggtgcttccaagagttagaaagcaccatgccttatgtttgcctttatgattaaagaagtcggagatagtgaaagctggggcaattggttgtctctttaaattccaaaaggcactattgagttttggaattctagatgtaaaaatcatattctactgaacatggkgggaccacatcttgaaaaagggaaggagacgcgatattgaaaagaaaataatatatatttaagaaaacatgtataataaaattacctaaataagatttaaattcttcctcctttagggttatgagccggatgctagtgtaaccaagttggcagagcagtatgccaaagaggtatgctctttacatgtaaagctattattgccttttactgtcccatgaagttatttaaccagcgtgtttatgtatgctagaatggtaccaagctgttgctgacaaatgatccattggaagcagcgcatggaggcaatgtattaattacagacacttggataagcatgggacaagaagaggagaagaaaaagcggctccaggctttccaaggttaccaggttacaatgaaggtacaaattgatgcctctctgaaggttcattaattccattcatgaaggccagaaccatctaatcacttattcactttagggggagcagactgtcctttcattccctataaaaggactcactgactgtatcccctagggacttctctccttccaaagattagctgtgtcctttggaaaggcatttttgtgctggatgaaggaatttgaaacccactgagaagagaggagcaggcttttccctctcacaagaatcgaggcattgcagtgttttactctttgtgtgtttagagaaattaggttacttctgatgcatgc

SEQ ID NO: 65093 - DNA, 1169 bp, Homo sapiens
tgcattaaagtctaaggcacttccacctagcctaccttcatttcatctctcctccaccgggggtcagaatctccttctcagtctgatggcactcctagcctaccctaagaatcggatggcactcctaaccacctctctctcaccattttccgtcacaggtctttccctcaatgactctcttgcacagttaatcccatctcagaggacctggatcaacacagctttcatcagatattcaaaaggtttatgacctaaaaaaggttgtatacaacccatttgccagatgctgagtttgcattcctgccttagaaaaaccagaaacacratatggagccattcttgacccagatcaatgctttctttcttgcagtatccttgatctaggtaagtaagattgtgctgaagcatctgagaaaataaatcaatgatggcagtaagtttaggccaaaaagcgatttatcttccctctggccaggcaggcaggtcacccttccaacagagtcagccttattatataaactaggaagactcagtggaatttcacaaaggcaattaagttggagaaatagtctgccttaaatttacttattaaaataatacattaacaatactaaatgtcctacctgaatcatccaagaatgcagtgctattagtcactccaagaacttgaagtgtaccacaaacacaaaggcatgagctttctctatcctgaaaaatgcagtgacaagggaagatgattgcaaaccatttctggagaaaattaaatacatacatttcaggttttagacagttaggctttttaaaaataaaatgtgtgcttcctaatcatccttgagcttttcccatgatattaatcgtgttctgccagcagggagagggacgatatctacctaatagatctgttgcccatggggaagtatttcagagcctggcaacttccccttctctgattagtgacaggactgattcagagtgctcctccttgacccatttattcatgggtatgccatcaagaatagttccaagctttctatttcatggcataataaaaaataaactcaagcaaaattcatactctgtcctctttctgtcccatttttgtcctggtaatatttcctgggtcttttcccctcaaaacatactgtatagaataaaaattttatttataa

SEQ ID NO: 65094 - DNA, 670 bp, Homo sapiens
caagtccccagaggaccctggctcaactccagcttagtgttggaactctagcaggtaaggataagcaggtagaaaaaaagggggaaaaggctcactctggtcttgagtgatccaactctgggttaacagagcttcagaagcactcagtggtgacaattcaggatcagctctctcttcagaaagcctgggcttttacttcaggaaagggctttccagtttcactcaagaaaagatctcaatcccctaactagcaccaaaactatctaagtcttccaggtccaacataagaaagattattttatttaagaaccctttcctcattcttctgcttgatcacatctcatttattcatcagtaccaagctcaatgtcacattctcctggaattccccagatagaaagaggaattctcttctcttctcttttcccagagcaccaaaatcttatcacaagccaccctcctgttataggacggatcatgttatattgtgattatttccttttagttttgtatgtwaagatttttgtttcatttcaagagtccaaaagcaaaacaaagctactggcttaaaccaaaatgagaatttatgggtttgcggcactgaaaatttcaccttcagttgcagcttgattcagctgcccaacagcatctccaagatctatctgggtga

SEQ ID NO: 65095 - DNA, 670 bp, Homo sapiens
caagtccccagaggaccctggctcaactccagcttagtgttggaactctagcaggtaaggataagcaggtagaaaaaaagggggaaaaggctcactctggtcttgagtgatccaactctgggttaacagagcttcagaagcactcagtggtgacaattcaggatcagctctctcttcagaaagcctgggcttttacttcaggaaagggctttccagtttcactcaagaaaagatctcaatcccctaactagcaccaaaactatctaagtcttccaggtccaacataagaaagattattttatttaagaaccctttcctcattcttctgcttgatcacatctcatttattcatcagtaccaagctcaatgtcacattctcctggaattccccagatagaaagaggaattctcttctcttctcttttcccagagcaccaaaatcttatcacaagccaccctcctgttataggacggatcatgttatattgtgattatttccttttagttttgtatgtaaagatttttgtttcatttcaagagtccaaaagcaaaacaaagctactggcttaaaccaaratgagaatttatgggtttgcggcactgaaaatttcaccttcagttgcagcttgattcagctgcccaacagcatctccaagatctatctgggtga

SEQ ID NO: 65096 - DNA, 695 bp, Homo sapiens
agtacatgcttaattaccagccttttttcctagttattttaatgttttattaatcctgttcctcaaaatatcttctttcatttacaaccactgacagaaaaaaaaatgtgacaatttgttttcctttgtgcttggtagatggcattctctaacactatgggtcaacatgaccttaacttgagttttattatgtgatacctacaatggtgtcttatccgtgcctcctactcttttgtgtttatataatttttttaaattactgtggatcagtggaccttaacccttagaagtcaaaaatcaaattttgagtggttagcagttatttgcttacatttcttctgaactgaaattacaaaaaaaaatcacttttttggggggagagagggataaaaagtgaaggaattaattggtaactagtggtgttcatatgaattcacttaccatctcaacttcaaataactaaaaccttgttaaggaaataaattggatgtattaaggtgaggctaaagtattggaggatatttacaaagaagactaatctactttggagatatttttaatatagatgagttttacttyagtggttctcaaaatggagtccccatactggcaacagcaaccgaacctgggaacttgttgggcatgtaaattctctggttccacccacaactactgaagcagagtttgtggaaatg

SEQ ID NO: 65097 - DNA, 979 bp, Homo sapiens
ttaattattgtctatctccaagaccaaaataaaaaaagcttaaaacttttagactgttaaaaatctactatactaggatattaaagtattttaaagaaaatgagatttatgcttaataaaaaaattcccattaaacagcaaactattagaagagaaaatcattctgaatctctacacttctcaatccaaatacaatgccatgagctataattcagtaaaaagctctatattttggatcctgaagcttgactcataattgaaaggaaaccytcctaattcatgattgcttgtctcacgtacattacagagtaacctttactgtagtttcaaagtttaagattttatttacagtagtttttgcgaggtcgtcaattgacacaatgtagttgctatttgtgaaagacaacaatttgaactgcaacttgaaatcaattggaaaccagtccagtctctagaggacacttgcaatatgcttcacggggctaaccccattaagcatcaaatgcagctacaaactcagcacactaaatgaagcttttctattgcacaagagaataacttcacatgaatgacaatttctgtaatgcttaggcttgacaaaatctttaaccttaagtgtaatactaatcaaaataattccaggaaatattgtttacacattatcatctggaactagctggtaaggattgagaagtttgtcaataattaggtgctctgacttttatataacttataagtagagttgtcaactctaaaatctggggagtttggtagctctgttaagttggggaaaatgtagatccccagcctcagtattctcatctctaatatgggaattctggaacaaatgatcctgtatcgatacactattgctgtacaacaaattaagcttaatggatgaagataaccacttattattttgtttcaactcagggactggctcagcagctctgctgctctgggccatgctcacctgctc

SEQ ID NO: 65098 - DNA, 872 bp, Homo sapiens
gcatgaatctgaagtagagaaaagatgtcaaagccagagatgggaatttaggattttgagtggatgtgtcaagtcctggggctgagtgagatcccctggagagagaaggaagcttatgtttgagccctagttcagcccaacatttagaagaacccctttgggaagaggagaagaaygagcaaaggctaaatgtgactccctgttttagaagaacctccttcagaagaagaatcaataaagcaaaggctgaactcaactttgtcttcttttctcccccagacataatttatgttcttttattgggagtttgtttcccactcaacctttcaggttagagctctgaagtcacgtttgatttttccctcaacatcaaagagacacaacagtttgcttctgtggtgactgttttttgtttgtttttgtatttttgtttttttgtttttgtgtgtgtgtttgtgttattttaatttgtttgtttgtttgagacaatgtctcactctgtcacctgggctggagtgcagtggcacaatctcagctcactgcaacctccacctcctgggcttaagtgatcctcccacctcagctcccctagtagctaggactacaggcacacaccaccactcctggctattttttctatttttaatagagatgggggtctcatcatgttgcccaggctggtcttgaactccagagctcaagtgatctgcctgtcttgacctctcaaagtgctgggattacaggtgtgagccatggtgcccagcctcactggtgactttgaatgccttctcacttcttccttcccactccatgctccaggttcaaagactccattaccaccatccatcccatgccagaatctccaggcttcc

SEQ ID NO: 65099 - DNA, 872 bp, Homo sapiens
gcatgaatctgaagtagagaaaagatgtcaaagccagagatgggaatttaggattttgagtggatgtgtcaagtcctggggctgagtgagatcccctggagagagaaggaagcttatgtttgagccctagttcagcccaacatttagaagaacccctttgggaagaggagaagaacgagcaaaggctaaatgtgactccctgttttagaagaacctccttcagaagaagaatcaataaagcaaaggctgaactcaactttgtcttcttttctcccccagacataatttatgttcttttattgggagtttgtttcccactcaacctttcaggttagagctctgaagtcacktttgatttttccctcaacatcaaagagacacaacagtttgcttctgtggtgactgttttttgtttgtttttgtatttttgtttttttgtttttgtgtgtgtgtttgtgttattttaatttgtttgtttgtttgagacaatgtctcactctgtcacctgggctggagtgcagtggcacaatctcagctcactgcaacctccacctcctgggcttaagtgatcctcccacctcagctcccctagtagctaggactacaggcacacaccaccactcctggctattttttctatttttaatagagatgggggtctcatcatgttgcccaggctggtcttgaactccagagctcaagtgatctgcctgtcttgacctctcaaagtgctgggattacaggtgtgagccatggtgcccagcctcactggtgactttgaatgccttctcacttcttccttcccactccatgctccaggttcaaagactccattaccaccatccatcccatgccagaatctccaggcttcc

SEQ ID NO: 65100 - DNA, 872 bp, Homo sapiens
gcatgaatctgaagtagagaaaagatgtcaaagccagagatgggaatttaggattttgagtggatgtgtcaagtcctggggctgagtgagatcccctggagagagaaggaagcttatgtttgagccctagttcagcccaacatttagaagaacccctttgggaagaggagaagaacgagcaaaggctaaatgtgactccctgttttagaagaacctccttcagaagaagaatcaataaagcaaaggctgaactcaactttgtcttcttttctcccccagacataatttatgttcttttattgggagtttgtttcccactcaacctttcaggttagagctctgaagtcacgtttgatttttccctcaacaycaaagagacacaacagtttgcttctgtggtgactgttttttgtttgtttttgtatttttgtttttttgtttttgtgtgtgtgtttgtgttattttaatttgtttgtttgtttgagacaatgtctcactctgtcacctgggctggagtgcagtggcacaatctcagctcactgcaacctccacctcctgggcttaagtgatcctcccacctcagctcccctagtagctaggactacaggcacacaccaccactcctggctattttttctatttttaatagagatgggggtctcatcatgttgcccaggctggtcttgaactccagagctcaagtgatctgcctgtcttgacctctcaaagtgctgggattacaggtgtgagccatggtgcccagcctcactggtgactttgaatgccttctcacttcttccttcccactccatgctccaggttcaaagactccattaccaccatccatcccatgccagaatctccaggcttcc

SEQ ID NO: 65101 - DNA, 872 bp, Homo sapiens
gcatgaatctgaagtagagaaaagatgtcaaagccagagatgggaatttaggattttgagtggatgtgtcaagtcctggggctgagtgagatcccctggagagagaaggaagcttatgtttgagccctagttcagcccaacatttagaagaacccctttgggaagaggagaagaacgagcaaaggctaaatgtgactccctgttttagaagaacctccttcagaagaagaatcaataaagcaaaggctgaactcaactttgtcttcttttctcccccagacataatttatgttcttttattgggagtttgtttcccactcaacctttcaggttagagctctgaagtcacgtttgatttttccctcaacatcaaagagacacaacagtttgcttctgtggtgactgttttttgtttgtttttgtatttttgtttttttgtttttgtgtgtgtgtttgtgttattttaatttgtttgtttgtttgagacaatgtctcactctgtcacctgggctggagtgcagtggcacaatctcagctcactgcaacctccacctcctgggcttaagtgatcctcccacctcagctcccctagtagctaggactacaggcacacaccaccactcctggctattttttctatttttaatagagatgggggtctcatcatgttgcccaggctggtcttgaactccagagctcaagtgatctgcctgtcttgacctctcaaagtgctgggattacaggtgtgagccatggtgcccagcctcactggtgactttgaatgccttctcacttcttccttcccactccatgctccaggttcaaagactccattaccaccatccatcccatgccagartctccaggcttcc

SEQ ID NO: 65102 - DNA, 632 bp, Homo sapiens
cacttggctgacgtcaccttcctgtactcagggagtttccccagccagctgtcccgagtctggactttccctctgcccctccccactctcaggctggtggggtggggaaagcagcccattcctgggctcagagactcccaccccagctcagagggagcaggggcccagccagggacggaccctcattcctcccagggaccccagacctctgtctctctcgggtaagtctccatctctgtctgtctctgtctctgtctctgtctctgtctgtttttcacgcactcagcaaggcctcctgccctgagagaggctccgcccactaccccccactttccccataaaaccagctgagtmtttgtgccaggaagactgcgtgcagaaggtgactgtctcagtggagctgggtcatctcaggtggggagttggggtccccgaaggtgaggaccctctggggaggagggtgcttctctgagacactttcttttcctcacacctgttcctcgccagcaggccttggctccttgaacttttggccgccatgtgcttcccgaaggtgagtgagaggctgcgtgtgcttttgtgggcatgtctgaaaacagaccgtaagggtgcgggtgccctcagtatttccc

SEQ ID NO: 65103 - DNA, 565 bp, Homo sapiens
ggcccatgctggccctgctcttgtgaggaggggtcacctaggcccacgcaggccctgctcttgtgaggaggggtcacctaggcccacgcaggccctgctcttgtgaggaggggtcacctaggcccacgcwggccctgctcttgtgaggaggggtcacctaggcccacgctggccctgctcttgggcctgcccagctgagccggctcctgagagaagcgctttctgagtcgtttcgaggacagccctggccggtctttccaggctgtgaggggctcctgggactgctgtctcctcttatcctgtacctctgccatgtgtctctgtgtgtgtgtgtgtgtgtgtgtgtgtgtgtgtgtgtgtgtataaattatcctggaggaaaggttaaggtgacacatggagacagagtgtcaccgttatttccgcaggtcctctctgatgacatgaagaagctgaaggcccgaatggtaatgctcctccctacttctgctcaggggttgggggcctgggtctcagcgtgtgacactgaggacactgtgggacacctgggaccctggagggacaa

SEQ ID NO: 65104 - DNA, 565 bp, Homo sapiens
ggcccatgctggccctgctcttgtgaggaggggtcacctaggcccacgcaggccctgctcttgtgaggaggggtcacctaggcccacgcaggccctgctcttgtgaggaggggtcacctaggcccacgcaggccctgctcttgtgaggaggggtcacctaggcccacgctggccctgctcttgggcctgcccagctgagccggctcctgagagaagcgctttctgagtcgtttcgaggacagccctggccggtctttccaggctgtgaggggctcctgggactgctgtctcctcttatcctgtacctctgccatgtgtctctgtgtgtgtgtgtgtgtgtgtgtgtgtgtgtgtgtgtgtgtataaattatcctggaggaaaggttaaggtgacacatggagacwgagtgtcaccgttatttccgcaggtcctctctgatgacatgaagaagctgaaggcccgaatggtaatgctcctccctacttctgctcaggggttgggggcctgggtctcagcgtgtgacactgaggacactgtgggacacctgggaccctggagggacaa

SEQ ID NO: 65105 - DNA, 519 bp, Homo sapiens
tcgggaatccaactgaggacggccactccccacagcaggcggccaggctccttctcgctgccctgacatcagcaaatgtgagggaagccacctccgagtactttctggtttcaaactgtcctatctgagcggcagtaggtggtactattttattttttaattcatgccatacttgaagctactcaacaatggcacaatcggggtgtcttgttgcctgaaaatgcattttgagttgaggcaaaaagctgatgtcaagagactgggagccaacttyggggcagctcagtctgagccgaaaagtggggcacccctctgccggcctgcactgctgggataaagtcgtttgtgagtgaagcaatgaggcagggccctccggctcactctgaaagtcaagtctggggcgtcctggtaccctttcaccccatgctgagctgctgccctcaggaagcactgtacatcacacgcctgttctctccacttctcctttccttccctggctgggagagggacaactgtccc

SEQ ID NO: 65106 - DNA, 519 bp, Homo sapiens
tcgggaatccaactgaggacggccactccccacagcaggcggccaggctccttctcgctgccctgacatcagcaaatgtgagggaagccacctccgagtactttctggtttcaaactgtcctatctgagcggcagtaggtggtactattttattttttaattcatgccatacttgaagctactcaacaatggcacaatcggggtgtcttgttgcctgaaaatgcattttgagttgaggcaaaaagctgatgtcaagagactgggagccaacttcggggcagctcagtctgagccgaaaagtggggcayccctctgccggcctgcactgctgggataaagtcgtttgtgagtgaagcaatgaggcagggccctccggctcactctgaaagtcaagtctggggcgtcctggtaccctttcaccccatgctgagctgctgccctcaggaagcactgtacatcacacgcctgttctctccacttctcctttccttccctggctgggagagggacaactgtccc

SEQ ID NO: 65107 - DNA, 632 bp, Homo sapiens
attgcttctttacaaagtttaggaaccctatgtattaccccaaaacctgaagcctaaaagattaataaattcaactacataataatgagttctaggttacaaaacacaccacaaactgatttaaaaggcaaactacggggctgggcgcagtggctcacgcctgtaatcccagcactttgggaggctgaggtgggcagatcatgaggtcaggagatcgagaccatcctggctaacacagtgaaaccccgtctctactaaaaaatacaagaaattagccrgacgtggtggcgggcacctgtagtcccagctactcaggaggctgaggcaggagaatggcgtgaacctgggaggcggagcttgcagtgagccaagatagtgccattgcactccagcccgtctcaaaaataaataaataaataaataaaggcaaactagaaaacaacttgaatctcacaagagctgatttccttaatttaaaaacgcctccaaaatcaaatatacaaagatacgcacacaaaaaaagagggctgtctacgcaagcagggattcttaagctgggaaaactggagattctaggggaattcacaggtgagtttcaggggtgacacatgaacaaaacatactgagcagag

SEQ ID NO: 65108 - DNA, 545 bp, Homo sapiens
agaacctcatagacgctcttgtctgagccccttgaacgtcaggtgtgaggccgcagtggtgtggagacaacaccatcacacccgtgtgtgtgtgtgtaagagcccagagctgggcccagcccatgccacagcagtacacaacgaggcccgaaagcggtctgtgagccaggcactgagcgtgacaggggacagcctagcacgcaggcagatggcacaggaaggggtgaaagaactgctgttcgggtcaggcacggtggctcacgcctgtaatcccagcactttgggaggccaggagggcrgatcacctgaggtcagaagttcgggatcagcctgaccaacatggagaaaccccatctttgttaaaaatacaaaataagccgggcgtggtggcacatgcctgtaatcccagctactccagaggctgaggcaggagaatcgcttgagcccaggaggcgcaggttgcggtgagccgagatcgcaccattgcactccagcctgggcaacaagagtgaaactccgtctcaaaaggaaaaaaaaaagaactg

SEQ ID NO: 65109 - DNA, 660 bp, Homo sapiens
tggtgggatcaggcagcagctcaaagcggagcagggtcagggccctggccaccttcagctggttcatggcaaattgtttcccgatgcagttcctgggccaggcggagacaatgaattgagacgtgtcctcaggccccattctgatctgagcaggttttggcccctgaccccagccctgagstggacattcagtgcccaacctcatgtgtccagcccctgcacacttacagcccacggacacttctaccccatcctggcttcacactgtcccaaaccttggacagagccgtcttcctgggctaactcctaactcctaccttctacctctgctctcagcagcctgaaaccctctatcaagacagggccagggctctaaggcacagagtctaatcacatgaataaataaagagttaatcaatggtttgttcactcctccacaaacatttcttgttctccagtgcggaggtcagttcaggtcctgtagggtgagggtgggccacactctcaggtgcttcccacgtagtgggacacacagggacctgaatcctcatagggggtccccgatgggtgtattaagggagtcagaagggcagtgggaggcttcctggaggagaactgggtgggtgatcctcagtgttgccccacctgcctcccacccca

SEQ ID NO: 65110 - DNA, 1534 bp, Homo sapiens
ccccaagtccccagaatcccagttcagatcatctaactttactcccgccacaaagggggactagaaaccactatgagaagggaatttagatgtcaacgggcagtgaattaaccaccacaaaggtccaactcacaggcggctgcatgagagaagggtcgtaggggttgcaatttcccatcgatgcccctagattcttccaagaggattggaggtgtccaatggaggggggaggggtgcagtgatgggaatagtcagaagagaatacaagataggaatcataatgagatgggatggagggagggtcggtcagtggagagagggaggttgagaaagtagagagagaaaagcccttcagctctcagtaagtaccacagcagtcctctccactgcccaaactgcgcaagcctctgagcgtgtgagtcacccttgattccttgaattcttcgcccccacttccaggcatcaagccctgttactgttacttcctaaagatcattcgaattcatccgctttctccatctttactgtcactgccctgattcaggccacagcacccccagcccaaatcccaaaacataatctctcagatggtctctgcttcaacactcacctgcccaacacctttctccagatcaagcttcagaaatctgacagatctcaccctgtcatgcccctgttcaaagcctcacagtggcttctgttgccctggatagatgcaggcctctccacatggcttaccaggtcacctgtctttctctctcttccacctcccatgaacttcagccagaccaagctactctgggttcttggaatgtgtccttctcttttgcctctgagcttctgagtgtgctgtttcctctctcttgtccctgcctcccctggataattctgactcatcccctgaaggatggtcacttctaacagctccttctctgtccacagcctagggtggggacacccattcctgtctctgcagctccctcagtttcccctacttttactcattgcactgcctgaacacccctgtctctttggcaagaagaaaggttccttgagacggggtctgtcttgtacactgatacatctttagtgctctgcacagtgcctggctctctgagagatggcaactgggaataatagagaagcctgataagatcgggtggtaacaatagagaaggttttttgtttgtcttttgttcagttcttttgtttgtttgtttgtttttttaaggaacaacagaaaatagaagccaaccaaaagataggtgagaaggcttttaggtgaatggtaggtgatgaggttaaaactatatgctgggcaaccaacaggaagaagagaggacctacaggtgatggagaattagaatcaaccaatggtcagagaggaggctgagtcctgaaaagaggaaccagttagtggggagagcaggtgtgacagccaataggagagggaggaagagagasccagtggggagggaggaagagagagccaatggggagggaggaagagagccaatggggagggaggaagaga

SEQ ID NO: 65111 - DNA, 757 bp, Homo sapiens
ggtatgtaatcaaagggccatcccacccagcacagtgccatggctgcaggtgctggaatctggcccacctgggtttcagtcctgtctgagatctaccatttagtgtcaatatgaccttaagtgtttgaccaaacatctccaagcttttttcttcatctgtaaaatggacataatattagaacccatttcatggggcttttgttaaggttaaattgataacatccgttcagggatatgccagttcctattacacagaaagcactcaatcaatggaaactgctacattgttatcataagtatttgcatagcatcattcatatcttggtaaaacatcttcctccaggtctccagttattttctcagcttcctgataagaatttcttaagaaatgagtcaatagaaatctccatgttctaaacacttctcctgaaacaagggatgcagggctcctctactagaagaaaagccagaaataaattaatcacactgtttataaayaattgtttaagcaacatgagacaagacttgtttcctgggtacatcataccctgtgctgaacagttggggctgttattttgaatatgccttctggattttaaattacctgtaggcatttctttgacccaacataaaatatactagccatgtcaaacaagttgagcacattccgtgtgtgtttgttttcccccttttgctccgtaggtgcacccactgtcagggtgtcgaggttctgtgtaccagccctcagagatcagcg

SEQ ID NO: 65112 - DNA, 757 bp, Homo sapiens
ggtatgtaatcaaagggccatcccacccagcacagtgccatggctgcaggtgctggaatctggcccacctgggtttcagtcctgtctgagatctaccatttagtgtcaatatgaccttaagtgtttgaccaaacatctccaagcttttttcttcatctgtaaaatggacataatattagaacccatttcatggggcttttgttaaggttaaattgataacatccgttcagggatatgccagttcctattacacagaaagcactcaatcaatggaaactgctacattgttatcataagtatttgcatagcatcattcatatcttggtaaaacatcttcctccaggtctccagttattttctcagcttcctgataagaatttcttaagaaatgagtcaatagaaatctccatgttctaaacacttctcctgaaacaagggatgcagggctcctctactagaagaaaagccagaaataaattaatcacactgtttataaacaattgtttaagcaacatgagacaagacttgtttcctgggtacatcataccctgtgctgaacagttggggctgttattttgaatatgccttctggattttaaattacctgtaggcatttctttgacccaacataaaatatactagccatgtcaaacaagtygagcacattccgtgtgtgtttgttttcccccttttgctccgtaggtgcacccactgtcagggtgtcgaggttctgtgtaccagccctcagagatcagcg

SEQ ID NO: 65113 - DNA, 575 bp, Homo sapiens
gtattctcttataccacttgaatttttaaagtaacaaaaggagagtcgtatacatctatatatgctcatgaatgagttaatactctggaaggatagacttgaaaccattagcaatttcctcgtggttgggaagagaatgaatgattttactttacattttatctgtttctgggatatttccttctattaaaaaagcatctttttctcttatagcaagaaagaaacatcttaaaatttttaattaacaaacaataataatagtatacattatacatttatggggtacaatatgatgttttaatttttttaaaaaaaattgacaatatcaagtgctgggcaactgggtctgtcatacattactaggggaataaaaaatggtrcatccactctgcaaaatggtttggtagtttcctacaaagttaaacatagacttaccatgtgactcagcaattccattcctgagtttctgtcctagagaaatgaaaacttatgtctgaacaccaatgcttatacctgcactattcataattgccccaaactagaaagaatccaaatgtccttcaataagtgaatac

SEQ ID NO: 65114 - DNA, 578 bp, Homo sapiens
tgctgttctcatgatagtgaagaagtctcacagtatctggtggttttataaaggggagttcccccgcacaagctttgttctcttgtctgcttccatgtgaggcgtgcctttcaccttccaccatgattgtgaagcctcccaagccacgtggaactgtaagtccaataaacctctttctttcgtaaattgctcartcttggatatgtccttatcagcagtgtgaaaatggactaatacaccaaatatctaccatgtgacagataataatattatgaggtaagtatttattgttgttatcattatctgaatttaagcgtggtactgaaggcttggagaggttaagtaatacccccaaagccacacagctgtgacaaaggcaagattcaaaccctggtttatttgattatcagagtctcttctctttttaccacatcattattatctccagtcattagaacctatattgtcattgcccacatgttactagctcttcataagttttgaagtactctgatacattatctcattgaatcctattacaatggtctgggaatgtgaggcttagagagaagtccctt

SEQ ID NO: 65115 - DNA, 625 bp, Homo sapiens
tatgtccacagatccaaggcgggataggctgtgctgggcagtgatgtcagccaggctccccagcgggactgggggtgtcaggggcagctctgtcccaggtggcagacactggtttcccctcctgctctcacaaccggcctgttaccaggtgttgtctgagctgtggtgaggcttccctggtgacattcaggagcagggagcctgygagtaagggtgtatgcatctgccctgactgcctggccctgtggtcaaggatgggggaaggcagctctgcctgcagctccaccccatttataaagcactgtggtgccttctgctggggcatgtgctgagtggtgcctcgcaggcactgccctcgggaagttcacaggcttatgtggaagctggtgggaatgggccaagaagagaggtgtcaggagccaggtattgggcaggtcccaggtctctgagcctcagtttcttcatctgtaggagggtggtgaccctgccctgctcagcttaccaggtacagatgtaagttttcagtgcagaggaaaagcagagaacttcccctcagatggccatacccccttgtcgctgtacccaactctccggtcctactttgtagctctcaggtgtcacatgt

SEQ ID NO: 65116 - DNA, 625 bp, Homo sapiens
tatgtccacagatccaaggcgggataggctgtgctgggcagtgatgtcagccaggctccccagcgggactgggggtgtcaggggcagctctgtcccaggtggcagacactggtttcccctcctgctctcacaaccggcctgttaccaggtgttgtctgagctgtggtgaggcttccctggtgacattcaggagcagggagcctgtgagtaagggtgtatgcatctgccctgactgcctggccctgtggtcaaggatgggggaaggcagctctgcctgcagctccaccccatttataaagcactgtggtgccttctgctggggcatgtgctgagtggtgcctcgcaggcacygccctcgggaagttcacaggcttatgtggaagctggtgggaatgggccaagaagagaggtgtcaggagccaggtattgggcaggtcccaggtctctgagcctcagtttcttcatctgtaggagggtggtgaccctgccctgctcagcttaccaggtacagatgtaagttttcagtgcagaggaaaagcagagaacttcccctcagatggccatacccccttgtcgctgtacccaactctccggtcctactttgtagctctcaggtgtcacatgt

SEQ ID NO: 65117 - DNA, 683 bp, Homo sapiens
tagtttacatttggattaagtgtcaagatttctggatttgggttcaagtgtggggatggttttgtarcagtgaaacagcaaaaaaactaacataactaattctatttttgtttaagggacatttacccattcctgcacataggctaggataattttagagcactgagataatatggaaaaacagcaatcacgtagcttttaaaactaactctgagattaaagaaaaaagcatgtaaacaactaactgtgttttgttaaaagacttataggagcattgtgacctgaccaaggacaaagaatttcccaacctcctcgggccctcactggcgcccagatgtctgaagttgttggtcacttctagatcccaactccttcctctacctcttgcctttaacattaaaagaacctaaaatttatagtgacttaagatgatactttaggatgctagcatgtcattttctaggtttgctggctttcttaataaacctgcttttcctctcacctcctgtctcttgagttttgtctttcaagtagcaagcagctgaacctgggttcagttacaatttcaggatacaggctcaattctggtttaggacttacggtgggtgttaccactagggttagggtgaaattgatgttgagtttcactttgggataatattgagttttgattatggtttcag

SEQ ID NO: 65118 - DNA, 623 bp, Homo sapiens
agaggcagccttgggcactgatgcatcttctgctttggggctgacctgcctatcccctagccattgctttcagctctgcctttgacctgaatctggaaactgagggtctctctagaggcaggtctagtcacatgtgccacaagatctacaaaggagtatatccttcgacctagcaatttccatttcaaagaattgtctctttacctaagtctcagtttatttatctgtaaaacgggaatcatgatgctaacataataggcttgatgagagaatcaaccagagatgagccatgcaaatcattagcacaggcttggcacagagtaagcactcagcaaatggtagctgcttgtattagtagtaatagtaatattatttgtgttatcattacctgaaggaagtaaataggaaacagagcagagatttatttacaaggatatrcatcacataattgtttataatagcaaaatgggatgggcagacaagctaacttttccaaaattaacttaaaattatactggagattaatatttactggcatggaaaaaagtgcatgatatattactaaatgaaaaaatgagctagaaattatattggtgtcattaagaatattaacatggatacat

SEQ ID NO: 65119 - DNA, 1377 bp, Homo sapiens
aatctgaggccttgggggtggagctcaacaacacatgctttaacaagctctcctgattctcacgttcaagcttgaaaaacctggctttaggttaaatgcggtatttttctttttgcttcttacattggtcatttcattgcttaacagatttttatattatatacttttataacaggagtgagaaaatatgcatctctctatcagtaatcaatgatttctgtattttgcgtatgaaacttcattttaaacaaagagagctcacaaacttgaaatttgccaccatgcatcttaaaatttaagtatcttaactagtttcatgacttttcttgtttttacatttatttttatatttttacttgactgaattgtatggaacaattcacattttacctgcagagtgcctggaattcttaacaaaaattgcatcttctctacctcctacccaagagtttctattctgattagaaccatttagagggcattacaactaaaaacagagtaaaaatgctctttattagaatatgggccagatttaatcctaaacatgttatatataatacataataattagggaagaaacccagacttttttttttacataatgcttacctatagactgacaaaaatgttaccttagccaatattcataagcttagttcatatgaaaatgacaagaacaagggttaaatgtcttaatgtgatttcttcagagaagtcattaaaaattatggtggtgatttttccagaatgtattaaagtgcaaatataaactcgtgactatcatgagagtggtatgtgctgtttgtcattaatgtatttttaatattacttaaaatgggtagctaagttaaggaacagtctatcctatttttgttaataaccttagaagggtgacagtttaacattcctaccgctgatgattttattccagtcaaaagagtacaccaaaggaccaaaggactctaaatcctttgggacatgttaaacatccaaaatttttgacttttgggctccagagaataggaggttaatgactccatttttcacagaaggaaaaatgtaaaagaaaaaaaaattgatggttgttggaatgtcacctttaagatttcaaatcacaacaagttttatgtgtaatgagattttcttagtttgaggaaaggatggctagtttcttgaatactctaagatattagctggggagtatttatacagagactgtaaaygaaataaacaagtttctaatctcattttgcacagaacaacttgtactgtacttttaaggaataaagttagtgtaaatattatatgttttatataaaggtaataattgttgatgtgcttagaaattcatttggaataatacatatatttttatct

SEQ ID NO: 65120 - DNA, 1377 bp, Homo sapiens
aatctgaggccttgggggtggagctcaacaacacatgctttaacaagctctcctgattctcacgttcaagcttgaaaaacctggctttaggttaaatgcggtatttttctttttgcttcttacattggtcatttcattgcttaacagatttttatattatatacttttataacaggagtgagaaaatatgcatctctctatcagtaatcaatgatttctgtattttgcgtatgaaacttcattttaaacaaagagagctcacaaacttgaaatttgccaccatgcatcttaaaatttaagtatcttaactagtttcatgacttttcttgtttttacatttatttttatatttttacttgactgaattgtatggaacaattcacattttacctgcagagtgcctggaattcttaacaaaaattgcatcttctctacctcctacccaagagtttctattctgattagaaccatttagagggcattacaactaaaaacagagtaaaaatgctctttattagaatatgggccagatttaatcctaaacatgttatatataatacataataattagggaagaaacccagacttttttttttacataatgcttacctatagactgacaaaaatgttaccttagccaatattcataagcttagttcatatgaaaatgacaagaacaagggttaaatgtcttaatgtgatttcttcagagaagtcattaaaaattatggtggtgatttttccagaatgtattaaagtgcaaatataaactcgtgactatcatgagagtggtatgtgctgtttgtcattaatgtatttttaatattacttaaaatgggtagctaagttaaggaacagtctatcctatttttgttaataaccttagaagggtgacagtttaacattcctaccgctgatgattttattccagtcaaaagagtacaccaaaggaccaaaggactctaaatcctttgggacatgttaaacatccaaaatttttgacttttgggctccagagaataggaggttaatgactccatttttcacagaaggaaaaatgtaaaagaaaaaaaaattgatggttgttggaatgtcacctttaagatttcaaatcacaacaagttttatgtgtaatgagattttcttagtttgaggaaaggatggctagtttcttgaatactctaagatattagctggggagtatttatacagagactgtaaatgaaataaacaagtttctaatctcattttgcacagaacaacttgtactgtacttttaaggrataaagttagtgtaaatattatatgttttatataaaggtaataattgttgatgtgcttagaaattcatttggaataatacatatatttttatct

SEQ ID NO: 65121 - DNA, 1045 bp, Homo sapiens
atcatccgccgggcctgttgtggggctctgcctccagtgacacttgatcaaccagctgtggatcaaatccctgctttcaacgttgactcactcagttcctttacctataaaacaggcatcaaaacacttaccttgctggttctcatctttccctgcttccaactgaacatgtgatatgaagttgtatcccactataagccttggactcctcgtttcaaagccaggtggtgagtatattaaatgatytgaagatccccttccagccccaaagtcctacacttctctctccacaaaggtataaaaaagctctgctgatctcctaaggcagtgaccagccagagaggacttacacaaacttagaggctgctaagttacaaggaacggtaaaataaacagtaaacacaagagctacaacaactataattacagatgtgctgcagtgtgccaggagcttcccagaattctctcaataaccttgagcactagctgtcattctccccattttcctgatggaggaacggacgtgccgtatgttcaatcagcttggcctcttacacttagaggccagacatgtgtagacaggtaccctgatgggaccttggagtcagggagaaaaaaataacactaaaaaagggaatagaaaaatatgtgaatgttggaaacaaaagtctacctggggtgatgctgtctgcatcactcgtcttcagagcccctactaccccagggcgccaggcaactgtgcaaggctacctcagagatgctgagccagggagagggggaaaaatagagcccagggaaaaaattaaaaaaaaaaaaaaaaaaggtgtgtgtggagggtttgcaacagagagggttctgcaaagacgtctgaagataaatctataaagatattttctttcaaaggcgttagaagcgtctggtacataaaatctatggctaagaaacagcaaaagcctacttgaattgtttttccttacccagcaagaggtacgtaatcagcagtctcctggtcagaatgcccactttattcggacgattaccagga

SEQ ID NO: 65122 - DNA, 1002 bp, Homo sapiens
ggatctagattttccaacttgcactcattccaagatggcagcaggacaaccttttaactaatagaagacaaaggattcaatgtgattaaatttgtgcctaaaattttgatctcaggctatggtattttaaacataatgctttacaccaggagtcccccctccccsccattgtgaaatgtacatgtgaagaatctaggttgcacgctccttatgagaatctaatgcctgatgatctgtcactgttgcccatcactcccaatgagaccatctagttgcaggaaaacaagctcacagctcccactgactctacattatggtgagctgtataattattccattatatattacaaagtacaaataatagaaataaggtgcacaataaatgtaatgcgcttgaatcatcctgaaaccatctccctgctccagtctgtggagaaactgtctcccacgaaaccagtccctgatgccaaaaaggttgggggctgctgctttccactgtaattttctaaaattttcccaaatcaggagggaggatagtaagtaatcatttcatgttgtgcaaaatattccctggtccagcaactttctaaaatggttctctctctctctttctctttctctgtccctgtccctgtccctgtccctgtctctggctctgtctctatctctgtgtctgtctctctctctctgtcattataggtcatggatgtttatatgagaatatttcaaataccaaaaagcatttttcaaaaagtaaaatccccctaacctcacctcccatagatgctccatcatatatttcacttgggagcgttgtgggcactgtggagttccagggctaggactgggctgcagaaccaacttcctgggttccagcttgttgaccctgcacctgctggctcaaccttagtgtgcctcagtttcttcatctgagcaatgagaatagtaaatgtcttattcttgtacatttatttatttatacacctcatagtgtttttgtga

SEQ ID NO: 65123 - DNA, 1002 bp, Homo sapiens
ggatctagattttccaacttgcactcattccaagatggcagcaggacaaccttttaactaatagaagacaaaggattcaatgtgattaaatttgtgcctaaaattttgatctcaggctatggtattttaaacataatgctttacaccaggagtcccccctccccgccattgtgaaatgtacatgtgaagaatctaggttgcacrctccttatgagaatctaatgcctgatgatctgtcactgttgcccatcactcccaatgagaccatctagttgcaggaaaacaagctcacagctcccactgactctacattatggtgagctgtataattattccattatatattacaaagtacaaataatagaaataaggtgcacaataaatgtaatgcgcttgaatcatcctgaaaccatctccctgctccagtctgtggagaaactgtctcccacgaaaccagtccctgatgccaaaaaggttgggggctgctgctttccactgtaattttctaaaattttcccaaatcaggagggaggatagtaagtaatcatttcatgttgtgcaaaatattccctggtccagcaactttctaaaatggttctctctctctctttctctttctctgtccctgtccctgtccctgtccctgtctctggctctgtctctatctctgtgtctgtctctctctctctgtcattataggtcatggatgtttatatgagaatatttcaaataccaaaaagcatttttcaaaaagtaaaatccccctaacctcacctcccatagatgctccatcatatatttcacttgggagcgttgtgggcactgtggagttccagggctaggactgggctgcagaaccaacttcctgggttccagcttgttgaccctgcacctgctggctcaaccttagtgtgcctcagtttcttcatctgagcaatgagaatagtaaatgtcttattcttgtacatttatttatttatacacctcatagtgtttttgtga

SEQ ID NO: 65124 - DNA, 1002 bp, Homo sapiens
ggatctagattttccaacttgcactcattccaagatggcagcaggacaaccttttaactaatagaagacaaaggattcaatgtgattaaatttgtgcctaaaattttgatctcaggctatggtattttaaacataatgctttacaccaggagtcccccctccccgccattgtgaaatgtacatgtgaagaatctaggttgcacgctccttatgagaatctaatgcctgatgatctgtcactgttgcccatcactcccaatgagaccatctagttgcaggaaaacaagctcacagctcccactgactctacattatggtgagctgtataattattccattatatattacaawgtacaaataatagaaataaggtgcacaataaatgtaatgcgcttgaatcatcctgaaaccatctccctgctccagtctgtggagaaactgtctcccacgaaaccagtccctgatgccaaaaaggttgggggctgctgctttccactgtaattttctaaaattttcccaaatcaggagggaggatagtaagtaatcatttcatgttgtgcaaaatattccctggtccagcaactttctaaaatggttctctctctctctttctctttctctgtccctgtccctgtccctgtccctgtctctggctctgtctctatctctgtgtctgtctctctctctctgtcattataggtcatggatgtttatatgagaatatttcaaataccaaaaagcatttttcaaaaagtaaaatccccctaacctcacctcccatagatgctccatcatatatttcacttgggagcgttgtgggcactgtggagttccagggctaggactgggctgcagaaccaacttcctgggttccagcttgttgaccctgcacctgctggctcaaccttagtgtgcctcagtttcttcatctgagcaatgagaatagtaaatgtcttattcttgtacatttatttatttatacacctcatagtgtttttgtga

SEQ ID NO: 65125 - DNA, 1002 bp, Homo sapiens
ggatctagattttccaacttgcactcattccaagatggcagcaggacaaccttttaactaatagaagacaaaggattcaatgtgattaaatttgtgcctaaaattttgatctcaggctatggtattttaaacataatgctttacaccaggagtcccccctccccgccattgtgaaatgtacatgtgaagaatctaggttgcacgctccttatgagaatctaatgcctgatgatctgtcactgttgcccatcactcccaatgagaccatctagttgcaggaaaacaagctcacagctcccactgactctacattatggtgagctgtataattattccattatatattacaaagtacaaataatagaaataaggtgcacaataaatgtaatgcrcttgaatcatcctgaaaccatctccctgctccagtctgtggagaaactgtctcccacgaaaccagtccctgatgccaaaaaggttgggggctgctgctttccactgtaattttctaaaattttcccaaatcaggagggaggatagtaagtaatcatttcatgttgtgcaaaatattccctggtccagcaactttctaaaatggttctctctctctctttctctttctctgtccctgtccctgtccctgtccctgtctctggctctgtctctatctctgtgtctgtctctctctctctgtcattataggtcatggatgtttatatgagaatatttcaaataccaaaaagcatttttcaaaaagtaaaatccccctaacctcacctcccatagatgctccatcatatatttcacttgggagcgttgtgggcactgtggagttccagggctaggactgggctgcagaaccaacttcctgggttccagcttgttgaccctgcacctgctggctcaaccttagtgtgcctcagtttcttcatctgagcaatgagaatagtaaatgtcttattcttgtacatttatttatttatacacctcatagtgtttttgtga

SEQ ID NO: 65126 - DNA, 1002 bp, Homo sapiens
ggatctagattttccaacttgcactcattccaagatggcagcaggacaaccttttaactaatagaagacaaaggattcaatgtgattaaatttgtgcctaaaattttgatctcaggctatggtattttaaacataatgctttacaccaggagtcccccctccccgccattgtgaaatgtacatgtgaagaatctaggttgcacgctccttatgagaatctaatgcctgatgatctgtcactgttgcccatcactcccaatgagaccatctagttgcaggaaaacaagctcacagctcccactgactctacattatggtgagctgtataattattccattatatattacaaagtacaaataatagaaataaggtgcacaataaatgtaatgcgcttgaatcatcctgaaaccatctccctgctccagtctgtggagaaactgtctcccacgaaaccagtccctgatgccaaaaaggttgggggctgctgctttccactgtaattttctaaaattttcccaaatcaggagggaggatartaagtaatcatttcatgttgtgcaaaatattccctggtccagcaactttctaaaatggttctctctctctctttctctttctctgtccctgtccctgtccctgtccctgtctctggctctgtctctatctctgtgtctgtctctctctctctgtcattataggtcatggatgtttatatgagaatatttcaaataccaaaaagcatttttcaaaaagtaaaatccccctaacctcacctcccatagatgctccatcatatatttcacttgggagcgttgtgggcactgtggagttccagggctaggactgggctgcagaaccaacttcctgggttccagcttgttgaccctgcacctgctggctcaaccttagtgtgcctcagtttcttcatctgagcaatgagaatagtaaatgtcttattcttgtacatttatttatttatacacctcatagtgtttttgtga

SEQ ID NO: 65127 - DNA, 1002 bp, Homo sapiens
ggatctagattttccaacttgcactcattccaagatggcagcaggacaaccttttaactaatagaagacaaaggattcaatgtgattaaatttgtgcctaaaattttgatctcaggctatggtattttaaacataatgctttacaccaggagtcccccctccccgccattgtgaaatgtacatgtgaagaatctaggttgcacgctccttatgagaatctaatgcctgatgatctgtcactgttgcccatcactcccaatgagaccatctagttgcaggaaaacaagctcacagctcccactgactctacattatggtgagctgtataattattccattatatattacaaagtacaaataatagaaataaggtgcacaataaatgtaatgcgcttgaatcatcctgaaaccatctccctgctccagtctgtggagaaactgtctcccacgaaaccagtccctgatgccaaaaaggttgggggctgctgctttccactgtaattttctaaaattttcccaaatcaggagggaggatagtaagtaatcatttcatgttgtgcaaaatattccctggtccagcaactttctaaaatggttctctctctctctttctctttctctgtccctgtccctgtccctgtccctgtctctggctctgtctctatctctgtgtctgtctctctctctctgtcattataggtcatggatgtttatatgagaatatttcaaataccaaaaagcatttttcaaaaagtaaaatccccctaacctcacctcccatagatgctccatcatatatttcacttgggagcrttgtgggcactgtggagttccagggctaggactgggctgcagaaccaacttcctgggttccagcttgttgaccctgcacctgctggctcaaccttagtgtgcctcagtttcttcatctgagcaatgagaatagtaaatgtcttattcttgtacatttatttatttatacacctcatagtgtttttgtga

SEQ ID NO: 65128 - DNA, 1112 bp, Homo sapiens
gtgtaagaaggggagaggagtttagagaataaacagctttgatctatttaaagtatttgaataaaggcctgccagttgttttcagatacttgaaatgtggcttctcaaggtgagttcttgatattgagtcactaccaagcttccattaaataaatcatggcacctctgtgttgttgcctgtggctctgcagagacagccaagtgtggaatccccttccaggtcttatttgggggcatttttgaggaatcatcttaaaactgaccccaaatgccccattagaggctccttcaggtttagaatatgcagagcataagtttcctaagtagttgtggttttatggtaagcaactaagcagacctttcactcagcatgttctgtttcttcttgtaataaagtttaagctcatttaacagttcttgagactgccaggtagaacaaaggccatttgaattctgtgcataggcacttgataactagcctcaccagtcttattatcctgaaaatacaagactaactrtagcagacgaaagcttgaataatcatgccttaaaataaactggattaataaaagtgggaaattgcttttgctgatgacgttgctcttcttacatagaaacatccgttggcctgtgggtgttcaggcccccaggggcccacctcattgaaaacacattaaactgtacttttggtagccgctgctaagtggaatccagttttctctctgataattgttttgtcatctcctttatgatcttcgattagactgataatctgggatttaggaagaacgagagacagaaaaaagtattcttgaaacccaaataaattgtttcacttaaaatagatggcaggtttatttcagcacttgccttgtttccctttaaatttctgtctcttctctgtccttttattctacacatagaaagaaaggggagaaaagaactccagatagatggtctttctttatctcttaccttacatttgtaaacctagcttgatttcgtgatgttaaagtattgcctttgaccatgctgtgtgaatcccgacgagaaagggaatggattgtaccaaagggagtgaacgatgcccacactctgctgggagagactgg

SEQ ID NO: 65129 - DNA, 1112 bp, Homo sapiens
gtgtaagaaggggagaggagtttagagaataaacagctttgatctatttaaagtatttgaataaaggcctgccagttgttttcagatacttgaaatgtggcttctcaaggtgagttcttgatattgagtcactaccaagcttccattaaataaatcatggcacctctgtgttgttgcctgtggctctgcagagacagccaagtgtggaatccccttccaggtcttatttgggggcatttttgaggaatcatcttaaaactgaccccaaatgccccattagaggctccttcaggtttagaatatgcagagcataagtttcctaagtagttgtggttttatggtaagcaactaagcagacctttcactcagcatgttctgtttcttcttgtaataaagtttaagctcatttaacagttcttgagactgccaggtagaacaaaggccatttgaattctgtgcataggcacttgataactagcctcaccagtcttattatcctgaaaatacaagactaactatagcagacgaaagcttgaataatcatgccttaaaataaaytggattaataaaagtgggaaattgcttttgctgatgacgttgctcttcttacatagaaacatccgttggcctgtgggtgttcaggcccccaggggcccacctcattgaaaacacattaaactgtacttttggtagccgctgctaagtggaatccagttttctctctgataattgttttgtcatctcctttatgatcttcgattagactgataatctgggatttaggaagaacgagagacagaaaaaagtattcttgaaacccaaataaattgtttcacttaaaatagatggcaggtttatttcagcacttgccttgtttccctttaaatttctgtctcttctctgtccttttattctacacatagaaagaaaggggagaaaagaactccagatagatggtctttctttatctcttaccttacatttgtaaacctagcttgatttcgtgatgttaaagtattgcctttgaccatgctgtgtgaatcccgacgagaaagggaatggattgtaccaaagggagtgaacgatgcccacactctgctgggagagactgg

SEQ ID NO: 65130 - DNA, 1112 bp, Homo sapiens
gtgtaagaaggggagaggagtttagagaataaacagctttgatctatttaaagtatttgaataaaggcctgccagttgttttcagatacttgaaatgtggcttctcaaggtgagttcttgatattgagtcactaccaagcttccattaaataaatcatggcacctctgtgttgttgcctgtggctctgcagagacagccaagtgtggaatccccttccaggtcttatttgggggcatttttgaggaatcatcttaaaactgaccccaaatgccccattagaggctccttcaggtttagaatatgcagagcataagtttcctaagtagttgtggttttatggtaagcaactaagcagacctttcactcagcatgttctgtttcttcttgtaataaagtttaagctcatttaacagttcttgagactgccaggtagaacaaaggccatttgaattctgtgcataggcacttgataactagcctcaccagtcttattatcctgaaaatacaagactaactatagcagacgaaagcttgaataatcatgccttaaaataaactggattaataaaagtgggaaattgcttttgctgatgacgttgctcttcttacatagaaacatccgttggcctgtgggtgttcakgcccccaggggcccacctcattgaaaacacattaaactgtacttttggtagccgctgctaagtggaatccagttttctctctgataattgttttgtcatctcctttatgatcttcgattagactgataatctgggatttaggaagaacgagagacagaaaaaagtattcttgaaacccaaataaattgtttcacttaaaatagatggcaggtttatttcagcacttgccttgtttccctttaaatttctgtctcttctctgtccttttattctacacatagaaagaaaggggagaaaagaactccagatagatggtctttctttatctcttaccttacatttgtaaacctagcttgatttcgtgatgttaaagtattgcctttgaccatgctgtgtgaatcccgacgagaaagggaatggattgtaccaaagggagtgaacgatgcccacactctgctgggagagactgg

SEQ ID NO: 65131 - DNA, 544 bp, Homo sapiens
caggactgcgtgttacaaagctctctggttcctggctgtgcagctccgagagagtggggcaccctgggcagtcgtcgccacactgtgggcatgtaagagggaaagctctccccttaacgtagagggcagagctcatgaggagcgagagatgcttttatttcaatcacctgggtcctggcctcatccggcaagagggcaatgtccgagatcaaaagcccagtcctactgcaagtctacccacttgctttgtctccttcttcactctcggcctccatcctcccctctttttctccctcccttcctcccacaaacccttattggtcctgttttggacactggtgattcatagatgaatgggacatggttcttgccccsaaatgtgcccatgctatggaatcttcagcaggaagaggtgagaagtgaagacgctgacagaggctggaattaaagtgacagctctagctggggagggtgctgccccagccttccagggaagtctttgaccagttttgaatcttaggtgatgcaaagaatcaaatggatg

SEQ ID NO: 65132 - DNA, 657 bp, Homo sapiens
ggtctggggagtaaaacaggatgcgtccttagggttccagagataggagcaggagcaacggagaaggtaaaagagccacactaggaattgacaagtcttcatttaatgctccaagccccacaggtgaatgtctatgccaggagttaaaatacaaaggtgaattccatccagtgtctgcccccaaggtacccactgtccyatgggaatgccaacaggtggatcataagatcacacggagacatatgtgtgcctccatcatgggggtgtggccaagcaggccgcaggttgctcatatagcatctttgtgcaaactagagtaggcctcctctgggacaactcactcccttacgtgaacatgggctggattttagctacactcatgggtcttggctgggggcccttgtgtattctccgacttgcaaactctgcatctctatgagatgggagcgtagaggaaggagcatcttaaaggcagaggccaaggtggtcaggaaaggacttccaccagccacagccatccaggaaaggggcagtgttcctcatgaggtggcagtgagtgcaccgtcgctagagacctgatagtgacctcaggaagctggcaagcgaagccctcctcccagcccagcggcatcctcacagctggagagcgctgggcta

SEQ ID NO: 65133 - DNA, 1727 bp, Homo sapiens
ttctccaatgattcttccactccccaccaaaaaaactatgataggagctgaaaccagaatacagagcagttggggtgttgttttctggagtgcagaggcagtccagaaggcagagccatggggaggccatgagatagggaggctgcgccaggggcttccgtgccaggccaaggccctagatgtgagagctgaggtgatctggagagagtggcattcctggcttcaagcagaagcggaagagggtctcctctggagtaaagtatttccagtttaggctggcaggagttaccctgattaayatcaagcaaaaggctcatagtcaaagatcaccaaatctctgtgagtgagaatgagcagaggcaataaacaatagctttagagccccagggactaccgattaccgaattatgtgactgaaatatttaaagaaataaagaatgtaaccataaagataaacaagcaaaaaagaatgagatggcaaattttcagatgtgtaaaagaaagaaggtatgaacgcatctatgtgtgtgcgtgtgtgtgtgtgtatacacacatatatattattcaatgggtgagttggtaaaaagtccaaatttatcaataattctgataccataaacatagatggattccatgcatgagttaaaagactgtcagggccgggcacagcggctcatgcctgtaaccccagcactttgggaggtagaggctggcagatcacgaggtcaggagtttgagaccagcctggccaatatggtgaaatgccgtctctactaaaaacactaaaaaattagccgggcgtggtggtgcacacctgtaatcccagctactcaggaggctgaggcaggggaatcgcttgaactcgggaggcggaggttacagtgagccgagatcgcaccactgcactccaacctaagcgagagagtgagactccgtcaaaaaaaaaaaaaaaaagactgtcagattgaatttttaaaaatctaaatctatgtaagtgtcatatgtacaagagacacacataaggtaaaacgtcatggaaacattgaaattaaaaaaaaagtatgaaaaaagatattcctggaaaccactaaccagaagacagctgggacgtctatacagattcacaatctacttttgtgtaaacttggtactcaaactcacttggtagcactccttgaccctgagctgaatagttaacgcttaccagccatatgtgtctctgctattcccttattttttgatgcttttggggggatgaattttgattttatgtacagctcaagtaagaacccgtcaaaatcagaagtgaaaagcttttgctgataatgaagctgatgaaaattgcatgggtggatttgttaagtaacggtatctgatgaaaaccttggctctgatcaattggcagtgggcttcagtctgctctgcagaatggctgatgaggacccaccaattgcttacaccctgttgactgttcttggcgtaccatgtgctacaggaacacaccagatacatttgacagtaactggaaaaagcctacatccaccatctttgtaggatgtatccaatttaccgtctgtcagtacacatactagacaccatgagtaaccagagaaatattttctgactgattaataacatttttataccagcggtacaaactcattgcagggattctagcttggaaaaaacaattgttagatgttatcattcctaggaaactgctatgc

SEQ ID NO: 65134 - DNA, 1727 bp, Homo sapiens
ttctccaatgattcttccactccccaccaaaaaaactatgataggagctgaaaccagaatacagagcagttggggtgttgttttctggagtgcagaggcagtccagaaggcagagccatggggaggccatgagatagggaggctgcgccaggggcttccgtgccaggccaaggccctagatgtgagagctgaggtgatctggagagagtggcattcctggcttcaagcagaagcggaagagggtctcctctggagtaaagtatttccagtttaggctggcaggagttaccctgattaatatcaagcaaaaggctcatagtcaaagatcaccaaatctctgtgagtgagaatgagcagaggcaataaacaatagctttagagccccagggactaccgattaccgaattatgtgactgaaatatttaaagaaataaagaatgtaaccataaagataaacaagcaaaaaagaatgagatggcaaattttcagatgtgtaaaagaaagaaggtatgaacgcatctatgtgtgtgcgtgtgtgtgtgtgtatacacacatatatattattcaatgggtgagttggtaaaaagtccaaatttatcaataattctgataccataaacatagatggattccatgcatgagttaaaagactgtcagggccgggcacagcggctcatgcctgtaaccccagcactttgggaggtagaggctggcagatcacgaggtcaggagtttgagaccagcctggccaatatggtgaaatgccgtctctactaaaaacactaaaaaattagccgggcgtggtggtgcacacctgtaatcccagctactcaggaggctgaggcaggggaatcgcttgaactcgggaggcggaggttacagtgagccgagatcgcaccactgcactccaacctaagcgagagagtgagactccgtcaaaaaaaaaaaaaaaaagactgtcagattgaatttttaaaaatctaaatctatgtaagtgtcatatgtacaagagacacacataaggtaaaacgtcatggaaacattgaaattwaaaaaaaagtatgaaaaaagatattcctggaaaccactaaccagaagacagctgggacgtctatacagattcacaatctacttttgtgtaaacttggtactcaaactcacttggtagcactccttgaccctgagctgaatagttaacgcttaccagccatatgtgtctctgctattcccttattttttgatgcttttggggggatgaattttgattttatgtacagctcaagtaagaacccgtcaaaatcagaagtgaaaagcttttgctgataatgaagctgatgaaaattgcatgggtggatttgttaagtaacggtatctgatgaaaaccttggctctgatcaattggcagtgggcttcagtctgctctgcagaatggctgatgaggacccaccaattgcttacaccctgttgactgttcttggcgtaccatgtgctacaggaacacaccagatacatttgacagtaactggaaaaagcctacatccaccatctttgtaggatgtatccaatttaccgtctgtcagtacacatactagacaccatgagtaaccagagaaatattttctgactgattaataacatttttataccagcggtacaaactcattgcagggattctagcttggaaaaaacaattgttagatgttatcattcctaggaaactgctatgc

SEQ ID NO: 65135 - DNA, 623 bp, Homo sapiens
aaattttttccatgtggataatcaggtgtctcagcacagtttatggaaaacttaatcatttcttcaatgatcaggtatgttgcctcttcatataccaaaatgctttcataaatgtgtgtgtgctcttgcacgctctcctctttccaactaattgcacggccctgagcaaatgctcagcaatagtttactgtaggttttcactagttactatttatgagagtttttatcatgaatgagcacgtaattttgtcaaataactttccttcatctgtttatatgatyatttggtatttctcctttaatctattaacatgctgaatgacacgtggatttttcaatgctaaatcactcttgtctttcctggaacaaacccaacttggcaatgatatattatctattttatacatggctagatttggtttgctaaatattttgcttaagatttttgcatctatattcatgagtgagactggcttgcaatcttcctgtctttgtgacgtgactttgcttctctttcgtcttccgccatgattgtgaggcctccccagccctgtggaactgtgagtcaattacacctctttcctttataaattacctagtttcagtctcgagtatgtctttat

SEQ ID NO: 65136 - DNA, 1343 bp, Homo sapiens
tgcatgcagctattgccatggttatcatgtttcaggaatcaggcgtgagggtaaaggcagacacagccacatcatactcttggaggatggaaggtggccttttcccagcatggggctgggagaggtggtcagagagatttgccagagggcctggcattacccatcctgggcatttcagcctctacagctaacacaggatgcagatttttcaaatagggatggatacataacaagtagtgattgcctaaaatgtgagaggctccacacaaacacatcagcgcagccacacagtcactccttcagtccctgttggttttgttccattgaggctgaatggcctcagggccccacagctccaccgtggaggagctgagattccaacccttcctgcacaccaaggggaggctgtgtccttccaggcccttgctgggctgtctcgggcagcacggcttccaggttggagggacaccccaccccggcctcctgtaagggaaggctgcacaaaggtcagagcacatccatccttggagtgagcccagcagtgctgtgagtgagagcagccctccccatggcaggtggcagcatggtcccgggccttggacacagagccctgcrgtatcccacatgaaagaaaggttgttgttgactggttttatggtctaaaccactaatacaaaatcaagcaatggcggcaccttgtaccgagctcacacagcacacagtgacttgagttccacaaagagcctccatcagggcaggtgccatcagtcaccatcaaccacccaggaaaacttgatgtccatggaagcagggccttgctaaggtccccgccagagcttcctgggctccctgacatccttctcttggctcttccagcagcataaaccaagatggaatcattaactcaggaactctcctgctcccactcagcccccaaggctgtgctgggtcctggtgagatgggcataccaagaacactcccctgccctcagctcagatggggcagtttggggggagttacattcggggaaagtgattacaaccccacagcagtgctgggacagagtgacttggggtctcctgggctgtgcagcttggaggtgggaagagctttgggggcatcagctgggccgcaggatgggccttcaggaaggtgttcagcgcctatactcattgcagaagactatttgaggagcccccatgggggcagcacgagggaacagaggggatggctgaagcattgcaggcccgtcaggccacatggtcccaccctgtgtgaagggtgctccctccggaggctactcatagctggagcttttacacttcacccgcaactccatgca

SEQ ID NO: 65137 - DNA, 2124 bp, Homo sapiens
cgaggtattatggccattactgggggtaagtgagaacttaagctttcctcattcctcccacactacccaagaaatcctccctctagtctcagcatagccctgggttacagagtacaatttcatgtactctttctcagtctcctccctatcacttcattaatcaccgtttgaattctgctctccttgaaagcagctggtcatcttggcaatcaaaaatcctgccagctggacacagttcaagttcaattgcatctccctgaccaggtagaacccatccgtgttgaaatacttggctgttaacagccaaggggatgaagccaacacaggaaaatggattgctcacagattggttttctctgcctccagctcaggataatatatgggcagtgacgtaaaacaaatggagccttggctgggttacttcacgtccttcttgggggcctcgctgcttctaccatggggccttggagctgttacttcataacctgcaggccaaaacctgtaaactgtgtattcgcaaattcctaaaatattgcccaatggtcttgaaaaaattaatgtcctgtgacatgttagcataattttcatgattgaggtgttgaatataaattctgtatatatttatttatacagaaaccaacccagactggggcataatatttttaatttttcatgtttctggcaaaacagtgactgagttgcttttatttatttcacagagttagaaatttcttttcactggagagataaatggtaagttataagggacaagaggaggacaatcttataaaatactctctgtacttgaataatctctgctttcatttcctttctttttgtatctggtgataattttaagagtccaagtgtttgagattgggtcctaagaccatcacccaggcccccttttcagaactcctgtagtatattcagtctggaccccttaaagtttaagacttaaataaacagttacattctatgaggcagggagggacggtgaaaactcattcagctcaagtcctggaacgtgagtttccactgagagtggagaggattttaaagtagttctgtggctgtaaacactttttggggttcctagtctcttgagaatttgctagatggtatatgtacaccctctccagaaaagtggacatacaatataaaaatggatccacaatatacagtatataattttatgtatatcaatcagctattgctgtgattatgccacataacaaatcatccctgaactcaatgggtgacaacaacaagcatttatttttcttgctcatgcatgtataaatttttcaggtgtttctgttccagattgtgaactggccatgcctggctctaggctttgggacagttcaactctgttccacatgtctgattctggatcccatgctgaagaggcagctgctgtataaggcatgttctttttgtgatgatggcagaagtttgagagacaagtcacactatgcaaacatggctcaagattctatcatacaacatctgctcrcattcaactggccaaagtcagtcaaggtcagtggggcagaaaagaatatactgcccgaaaaggaaggaaaaagtgagtgaacatgtgttgaacaatactccaatttattatcggtaggtcaaggaatctttgcagcctgagtctcgtatggtgattctcaaacctcagcaaacatagatatcatctggggaatctggttcaaaatgcagacctgagactattctcctgcagaatatctgagtcagtggatttgggtggggcccaggaatctgcactttaaacagccactccctggggttattctgatactgatggtccagggtccacactttgagaatcactggtttaatggttctgagcatgtgctgagggctcagagatgcaagttcaaatcccagctccaccctagctttgaccttggtaagtagctttgcttttcagagcctcagttttctcctctaaaaaactgagttggccgggcgctgtggctcatgcctgtaatcccagcactttgggaggctgaggtgggcggatcatctgaggttgtgagtttgagaccagcctgaccaacatggagaaaccctgtctctactaaaaatacaaaa

SEQ ID NO: 65138 - DNA, 2124 bp, Homo sapiens
cgaggtattatggccattactgggggtaagtgagaacttaagctttcctcattcctcccacactacccaagaaatcctccctctagtctcagcatagccctgggttacagagtacaatttcatgtactctttctcagtctcctccctatcacttcattaatcaccgtttgaattctgctctccttgaaagcagctggtcatcttggcaatcaaaaatcctgccagctggacacagttcaagttcaattgcatctccctgaccaggtagaacccatccgtgttgaaatacttggctgttaacagccaaggggatgaagccaacacaggaaaatggattgctcacagattggttttctctgcctccagctcaggataatatatgggcagtgacgtaaaacaaatggagccttggctgggttacttcacgtccttcttgggggcctcgctgcttctaccatggggccttggagctgttacttcataacctgcaggccaaaacctgtaaactgtgtattcgcaaattcctaaaatattgcccaatggtcttgaaaaaattaatgtcctgtgacatgttagcataattttcatgattgaggtgttgaatataaattctgtatatatttatttatacagaaaccaacccagactggggcataatatttttaatttttcatgtttctggcaaaacagtgactgagttgcttttatttatttcacagagttagaaatttcttttcactggagagataaatggtaagttataagggacaagaggaggacaatcttataaaatactctctgtacttgaataatctctgctttcatttcctttctttttgtatctggtgataattttaagagtccaagtgtttgagattgggtcctaagaccatcacccaggcccccttttcagaactcctgtagtatattcagtctggaccccttaaagtttaagacttaaataaacagttacattctatgaggcagggagggacggtgaaaactcattcagctcaagtcctggaacgtgagtttccactgagagtggagaggattttaaagtagttctgtggctgtaaacactttttggggttcctagtctcttgagaatttgctagatggtatatgtacaccctctccagaaaagtggacatacaatataaaaatggatccacaatatacagtatataattttatgtatatcaatcagctattgctgtgattatgccacataacaaatcatccctgaactcaatgggtgacaacaacaagcatttatttttcttgctcatgcatgtataaatttttcaggtgtttctgttccagattgtgaactggccatgcctggctctaggctttgggacagttcaactctgttccacatgtctgattctggatcccatgctgaagaggcagctgctgtataaggcatgttctttttgtgatgatggcagaagtttgagagacaagtcacactatgcaaacatggctcaagattctatcatacaacatctgctcacattcaactggccaaagtcagtcaaggtcagtggggcagaaaagaatatactgcccsaaaaggaaggaaaaagtgagtgaacatgtgttgaacaatactccaatttattatcggtaggtcaaggaatctttgcagcctgagtctcgtatggtgattctcaaacctcagcaaacatagatatcatctggggaatctggttcaaaatgcagacctgagactattctcctgcagaatatctgagtcagtggatttgggtggggcccaggaatctgcactttaaacagccactccctggggttattctgatactgatggtccagggtccacactttgagaatcactggtttaatggttctgagcatgtgctgagggctcagagatgcaagttcaaatcccagctccaccctagctttgaccttggtaagtagctttgcttttcagagcctcagttttctcctctaaaaaactgagttggccgggcgctgtggctcatgcctgtaatcccagcactttgggaggctgaggtgggcggatcatctgaggttgtgagtttgagaccagcctgaccaacatggagaaaccctgtctctactaaaaatacaaaa

SEQ ID NO: 65139 - DNA, 2124 bp, Homo sapiens
cgaggtattatggccattactgggggtaagtgagaacttaagctttcctcattcctcccacactacccaagaaatcctccctctagtctcagcatagccctgggttacagagtacaatttcatgtactctttctcagtctcctccctatcacttcattaatcaccgtttgaattctgctctccttgaaagcagctggtcatcttggcaatcaaaaatcctgccagctggacacagttcaagttcaattgcatctccctgaccaggtagaacccatccgtgttgaaatacttggctgttaacagccaaggggatgaagccaacacaggaaaatggattgctcacagattggttttctctgcctccagctcaggataatatatgggcagtgacgtaaaacaaatggagccttggctgggttacttcacgtccttcttgggggcctcgctgcttctaccatggggccttggagctgttacttcataacctgcaggccaaaacctgtaaactgtgtattcgcaaattcctaaaatattgcccaatggtcttgaaaaaattaatgtcctgtgacatgttagcataattttcatgattgaggtgttgaatataaattctgtatatatttatttatacagaaaccaacccagactggggcataatatttttaatttttcatgtttctggcaaaacagtgactgagttgcttttatttatttcacagagttagaaatttcttttcactggagagataaatggtaagttataagggacaagaggaggacaatcttataaaatactctctgtacttgaataatctctgctttcatttcctttctttttgtatctggtgataattttaagagtccaagtgtttgagattgggtcctaagaccatcacccaggcccccttttcagaactcctgtagtatattcagtctggaccccttaaagtttaagacttaaataaacagttacattctatgaggcagggagggacggtgaaaactcattcagctcaagtcctggaacgtgagtttccactgagagtggagaggattttaaagtagttctgtggctgtaaacactttttggggttcctagtctcttgagaatttgctagatggtatatgtacaccctctccagaaaagtggacatacaatataaaaatggatccacaatatacagtatataattttatgtatatcaatcagctattgctgtgattatgccacataacaaatcatccctgaactcaatgggtgacaacaacaagcatttatttttcttgctcatgcatgtataaatttttcaggtgtttctgttccagattgtgaactggccatgcctggctctaggctttgggacagttcaactctgttccacatgtctgattctggatcccatgctgaagaggcagctgctgtataaggcatgttctttttgtgatgatggcagaagtttgagagacaagtcacactatgcaaacatggctcaagattctatcatacaacatctgctcacattcaactggccaaagtcagtcaaggtcagtggggcagaaaagaatatactgcccgaaaaggaaggaaaaagtgagtgaacatgtgttgaacartactccaatttattatcggtaggtcaaggaatctttgcagcctgagtctcgtatggtgattctcaaacctcagcaaacatagatatcatctggggaatctggttcaaaatgcagacctgagactattctcctgcagaatatctgagtcagtggatttgggtggggcccaggaatctgcactttaaacagccactccctggggttattctgatactgatggtccagggtccacactttgagaatcactggtttaatggttctgagcatgtgctgagggctcagagatgcaagttcaaatcccagctccaccctagctttgaccttggtaagtagctttgcttttcagagcctcagttttctcctctaaaaaactgagttggccgggcgctgtggctcatgcctgtaatcccagcactttgggaggctgaggtgggcggatcatctgaggttgtgagtttgagaccagcctgaccaacatggagaaaccctgtctctactaaaaatacaaaa

SEQ ID NO: 65140 - DNA, 2124 bp, Homo sapiens
cgaggtattatggccattactgggggtaagtgagaacttaagctttcctcattcctcccacactacccaagaaatcctccctctagtctcagcatagccctgggttacagagtacaatttcatgtactctttctcagtctcctccctatcacttcattaatcaccgtttgaattctgctctccttgaaagcagctggtcatcttggcaatcaaaaatcctgccagctggacacagttcaagttcaattgcatctccctgaccaggtagaacccatccgtgttgaaatacttggctgttaacagccaaggggatgaagccaacacaggaaaatggattgctcacagattggttttctctgcctccagctcaggataatatatgggcagtgacgtaaaacaaatggagccttggctgggttacttcacgtccttcttgggggcctcgctgcttctaccatggggccttggagctgttacttcataacctgcaggccaaaacctgtaaactgtgtattcgcaaattcctaaaatattgcccaatggtcttgaaaaaattaatgtcctgtgacatgttagcataattttcatgattgaggtgttgaatataaattctgtatatatttatttatacagaaaccaacccagactggggcataatatttttaatttttcatgtttctggcaaaacagtgactgagttgcttttatttatttcacagagttagaaatttcttttcactggagagataaatggtaagttataagggacaagaggaggacaatcttataaaatactctctgtacttgaataatctctgctttcatttcctttctttttgtatctggtgataattttaagagtccaagtgtttgagattgggtcctaagaccatcacccaggcccccttttcagaactcctgtagtatattcagtctggaccccttaaagtttaagacttaaataaacagttacattctatgaggcagggagggacggtgaaaactcattcagctcaagtcctggaacgtgagtttccactgagagtggagaggattttaaagtagttctgtggctgtaaacactttttggggttcctagtctcttgagaatttgctagatggtatatgtacaccctctccagaaaagtggacatacaatataaaaatggatccacaatatacagtatataattttatgtatatcaatcagctattgctgtgattatgccacataacaaatcatccctgaactcaatgggtgacaacaacaagcatttatttttcttgctcatgcatgtataaatttttcaggtgtttctgttccagattgtgaactggccatgcctggctctaggctttgggacagttcaactctgttccacatgtctgattctggatcccatgctgaagaggcagctgctgtataaggcatgttctttttgtgatgatggcagaagtttgagagacaagtcacactatgcaaacatggctcaagattctatcatacaacatctgctcacattcaactggccaaagtcagtcaaggtcagtggggcagaaaagaatatactgcccgaaaaggaaggaaaaagtgagtgaacatgtgttgaacaatactccaatttattatcggtaggtcaaggaakctttgcagcctgagtctcgtatggtgattctcaaacctcagcaaacatagatatcatctggggaatctggttcaaaatgcagacctgagactattctcctgcagaatatctgagtcagtggatttgggtggggcccaggaatctgcactttaaacagccactccctggggttattctgatactgatggtccagggtccacactttgagaatcactggtttaatggttctgagcatgtgctgagggctcagagatgcaagttcaaatcccagctccaccctagctttgaccttggtaagtagctttgcttttcagagcctcagttttctcctctaaaaaactgagttggccgggcgctgtggctcatgcctgtaatcccagcactttgggaggctgaggtgggcggatcatctgaggttgtgagtttgagaccagcctgaccaacatggagaaaccctgtctctactaaaaatacaaaa

SEQ ID NO: 65141 - DNA, 769 bp, Homo sapiens
tgctctccaatcctcaccttcctatcccatttccrttagtcttcacttctggccccttaatatttcatccatccctactagatctgcatccctggtgccttcctgtcatttcccttgtttctttcccaccacaccacagagaataattaaaggtccttggctaggagtgatgaagcttgggggaggaggagggtggagaatcagaggcacaagactctttgaccattatgcagtgagtggtataaaagagaaagtggaatccacttctgcatataaacccaaaagaattgaaagcagggtctcaaagaggcattcgtacacccatattgatagcagcattattcacaatagctaaatggggaaacaacgcaagggtccatccagcgatgcatggataaacaaaatgtcatctatccatacagtggaatactcttcagccttaaaacagaaggaaattatgacacatgctacaacatggatgaaccttgaagatattatgctaaatgaaatcagccagtcacaaaaagacaaatactgtgtgattctatttcaatgaagtgcccagaataggcaaattcatagacaggaaatagaatggtagttgccaaaggctacagggaaaggggagatgggacttattgtttacttggtagagagtttcagttttgcaagacgaagacttctggagatggatggtggttatggttatacaataacacgagtaaatgaatgccactgaattgtacacttaaaaatggttgagatggta

SEQ ID NO: 65142 - DNA, 654 bp, Homo sapiens
agggtgactggtttccaactctgaggcagcactcagacggcctttgttgaattcattaattacgaatttctctcattcatccccccaagtcataacccccatttctaggcatctaagaggaaaaacacacacacaggcatgggctcacctcttctgctggaagctcctctgtcctccagctgcttccactgggcgctcaggtcttgtggggaaggggcacacgagggccttttattggtgagattcccacctcccactgggtcacgcccttccacaccctctaacctgatgaggctttgatttaattataacagggaattaggtttttactggtgatayatctccagttaattataacttcagtaaatccttcatcctgacagtgtatttttctttcatatgaaggtaagattaaattgcctttatattaaattaggcttaatgtactaacttcaaaagcttattttagagatgtttccatcagttgtcagtaaagataattcctgtaatatgttgtaggcttcaagctttgcttggaatcctaaagtattaagtgtgattggatttgcaattttacaaaatggtttaaattcatatacatcagactcaaaggtaataagggcaggcattccattgaggaaattctaggtactt

SEQ ID NO: 65143 - DNA, 1847 bp, Homo sapiens
ctccccaagctcccctccctcttacccttcccagcctccaccaaagcccatttctcccatctagctgtaattctgtatccaataaccaacctctccccaagctcccctgccccttaccctcccagcctctatacccacaattctatgctctgcttctgtgagctcagcatttttcttttacctcccatataggagtgagaacatgcggtatttatctttctggwcctgatttattttgcttaacataatgtcctccaggctgagactcaggtcttgacccagagaagtgatgaatctgcaggtatcgtggaaatggccaggttagtgattaatttgtacttaattcataaaataacagctttgttttcaaatttcaaataacttgaatataatctatttccctctcctaaagtgtatcacatattaaatgaagatttttttctttgtatatatatttttaaaagacctacatttagttctattaaaaaatgatttacagtgggatgagatcactcctcgggattcagtgtctgagcaagaaaacaaggcttgggagacagtgtgtagggagccaggttaactttacgtgattagaatgaattggatccggtcataaagcaatcatttggggtttgctctttgctggattctgggtcactccacatccacatgtaaagacagagtccagtcctggtttatcctctgtgtgagaaaaactttctgccaaaaccaggctggatacaatgtaaagagtgtgagaatgacttatgaaaagaaccaaattcacaagatgatcctttcagctgctccagggaagaaggaacagacagcaagatagatttgcagaagagatgtgatgtcaatgagacagcagcatagtgcagggtgaggcagccagggcacagagagccagcaaaagccactcggacaggtgtgggagggacacggagccacagtccgtaaaacccaaaggacaactgtaacactactttttagtatttaaaaggcaatttcttattaatctgcttaattgacattcatggtttgagatgttccatatttttctgctgtaactttgttccattatcttgtaccaagcagaaaagtttctagcattgggcataaagtaactgtctaaatagttttgtggctaaaagtttatttgccctgctcaggagaaactataggtttgtcaatgcccagattaatcacaggacagatactcaggaagatttggtcattgataattgaatctgcaaaagcaaaaaatgggcacagtggctctgcagcagaaatcttagtgaatgtaaagatatgagtcccatcattaatgttataaaaggaaatcattctcatacacatatccaggaaaatgcctaccctgcatagcccgggactgacccagagggtggttaaaggcacagtgctggctgcaaagagcttttctttcctcacacccacagtccagaagccaagttcttttttttttctttttttttacttcatttttttttattattatactttaaattctggggtgcatgcgcacaacatgtaggtttgttacatacgtatacatgtgccatatgctgcgcccgttaactcgtcgtttacattaggtatatctcctaatgctatccctcccctgtccccccatcccacgacaggccctggtgtgtgatgttccccaccctgtgtccaagtgttctcattgttcaaatcccacctacgagtgagaacatgcagtgtttggttttctgtccttgcgttggtttgctcagaatgatggtttctaacttcatccatgtccctacaaaggacatgaactcatccttttttatggctgc

SEQ ID NO: 65144 - DNA, 784 bp, Homo sapiens
ctgggtggaccactccctcccgcctcaccagtgactcacttggtgactcagtgcttgtcacgcagagatccactgggcccatgtgcagctcaccttcctccgcctaccttgaggaaaactagggactcattagacaaagtgttcaaactgttttctgttcctccaggcataagttatatgtatacaaggcattatcatctcccacacattaaggagcagtggaaatcggaagtggggaataggaggctgggggcattggaggggcaatcttactttcacaaagatgttaattgaatgttaccagcaaagcaaagacctagaaatttcataaaatagaaaagattctgattattgttttcattatcaaaatttctaatttcttgaggactttaaaaaaaagaaggcggccaggggcagtgcctcacacctgtaaacccagcactttgggaggccamggagggaggattgcttgagcccaggagtttgcgaccagcttggccaacatggcgaaaccccatctctactaaaaatgcaaaaattagccgggcgtggtggcatgtgcctgtaaacacagctactcgggagactgaggcaggagaattgcttgaacccaggaggtggaggttgcagtgagccaagatcgtgccactgcactccagcctgggcaacagagagagactctatctcaaaaaaaaaaaaaaaaaaaaaaaaaaaaaaatttaaccatacgcagtggtgcatgcctgtagtcccagtacggaggaggctgaggcagaaggatccc

SEQ ID NO: 65145 - DNA, 589 bp, Homo sapiens
aaaggaaataagtattccagagtcctataggagascactgtgccaaataaaccatggctcatgcctttaattccaacactttcagaggccaaggtgggaggatggcttgagcccaggggttcatgaccagcctgggcaacatagtaagaacctgtttctacaaaagaattttttttaattagccaaacatggtggtgtgtaactgtagtcccagctactcagggtggctgagatgggaaggccacttgagcctgggaggtagaggttgcagtgagccctgattgcacgaacacattccagcctgggtaacagagcaagaccctgtattttctacagcataattagagcatgttaacaaatgtcaattaggacacttctacttttggccacaaagtaacagcttttatcgaaacatcagcttaattctccaaccctactgccatgaacaactctaaaagccaaagaggatgcatacacagaaacaatgacaacataaagcaagcttttgaaggcacccaagggcagctgagttaggtaggaactgagggaccaaaagccacaaaagaagagaagtagactcaggtgagca

SEQ ID NO: 65146 - DNA, 589 bp, Homo sapiens
aaaggaaataagtattccagagtcctataggagaccactgtgccaaataaaccatggctcatgcctttaattccaacactttcagaggccaaggtgggaggatggcttgagcccaggggttcatgaccagcctgggcaacatagtaagamcctgtttctacaaaagaattttttttaattagccaaacatggtggtgtgtaactgtagtcccagctactcagggtggctgagatgggaaggccacttgagcctgggaggtagaggttgcagtgagccctgattgcacgaacacattccagcctgggtaacagagcaagaccctgtattttctacagcataattagagcatgttaacaaatgtcaattaggacacttctacttttggccacaaagtaacagcttttatcgaaacatcagcttaattctccaaccctactgccatgaacaactctaaaagccaaagaggatgcatacacagaaacaatgacaacataaagcaagcttttgaaggcacccaagggcagctgagttaggtaggaactgagggaccaaaagccacaaaagaagagaagtagactcaggtgagca

SEQ ID NO: 65147 - DNA, 1317 bp, Homo sapiens
agcaacaaataagacttccctctctcttggcacttcttactcctccctttcccccacgcatccatatccctgctgccttctccttcccacaaagctcatttttggcaaagtggtttttataaaccacacattttaatgaattaagtgtagtcccacgatcacacttacattctcctacagtcccctgacttccacactcctccagctatgggaattttccctcacacctccagaaaggaaaaaaatgaattgaaaattttgtctataagtagaaaagttatgcacagaatgtgatggctctcccacttttctttttttctttttctttttttttttaatgcaagaaggaagatgattttcaaacattgcacgtcctctgagaaactaaaatattcagtgctgtttttcttttggcagtagcataattggttgtgatcataaacccacatagttccttttatcctttttagtggcagcttcatggattgtcttctaccctgtcaaagaagagagttggggtgtttgacagcaaagaaatttaggagaatttcagagcagaaaaggactttgtacatcatagtttccaaacttcttattttaccgctgtggatactgaggttcacaggtggtttaacttgccgaaagtcatggggttagccaatagcttctgcgaaattaagctatacccaacttttacagtttgtatcacatgaagtttcaatcacacaatcttcttggatccttgcaacagctgcatgatggtactagaaccaccctctgctagtgaagtgacataagaatgctcatcagagtgctaggacttagaattgcatccctggccaggtgcggtggctcacgcctgtaatcccggcactttgggaggctgaggcsggtggatcacgaggtcagcagatcgagaccatcctggctaacatggtgaaaccccgtctctactaaaaaatacaaaaaattagccaggcgtggtggcacatgcctgtagtcccagctacttgggaggctgaggcaggagaatggcgtgaacccgggaggcggagcttgcagtgagctgagatcgtgccactgcactccagcctgggtgaaagagcaagacttcgtctcaaaaaaaaaaaaaaaaaaaaaaaagaattgcatccctgaccactgagtccatattctcaagtccacctagcctttttttttttttttttttttttatgtttttgtggtgtcaccaacaaagcattagacgcttggccagggtctggagttacctagacaaagggcataatctatgctctctaagagcacacagtttag

SEQ ID NO: 65148 - DNA, 1317 bp, Homo sapiens
agcaacaaataagacttccctctctcttggcacttcttactcctccctttcccccacgcatccatatccctgctgccttctccttcccacaaagctcatttttggcaaagtggtttttataaaccacacattttaatgaattaagtgtagtcccacgatcacacttacattctcctacagtcccctgacttccacactcctccagctatgggaattttccctcacacctccagaaaggaaaaaaatgaattgaaaattttgtctataagtagaaaagttatgcacagaatgtgatggctctcccacttttctttttttctttttctttttttttttaatgcaagaaggaagatgattttcaaacattgcacgtcctctgagaaactaaaatattcagtgctgtttttcttttggcagtagcataattggttgtgatcataaacccacatagttccttttatcctttttagtggcagcttcatggattgtcttctaccctgtcaaagaagagagttggggtgtttgacagcaaagaaatttaggagaatttcagagcagaaaaggactttgtacatcatagtttccaaacttcttattttaccgctgtggatactgaggttcacaggtggtttaacttgccgaaagtcatggggttagccaatagcttctgcgaaattaagctatacccaacttttacagtttgtatcacatgaagtttcaatcacacaatcttcttggatccttgcaacagctgcatgatggtactagaaccaccctctgctagtgaagtgacataagaatgctcatcagagtgctaggacttagaattgcatccctggccaggtgcggtggctcacgcctgtaatcccggcactttgggaggctgaggccggtggatcacgaggtcagcagatcgagaccatcctggctaacatggtgaaaccccgtctctactaaaaaatacaaaaaattagccaggcgtggtggcacatgcctgtagtcccagctacttgggaggctgaggcaggagaayggcgtgaacccgggaggcggagcttgcagtgagctgagatcgtgccactgcactccagcctgggtgaaagagcaagacttcgtctcaaaaaaaaaaaaaaaaaaaaaaaagaattgcatccctgaccactgagtccatattctcaagtccacctagcctttttttttttttttttttttttatgtttttgtggtgtcaccaacaaagcattagacgcttggccagggtctggagttacctagacaaagggcataatctatgctctctaagagcacacagtttag

SEQ ID NO: 65149 - DNA, 1317 bp, Homo sapiens
agcaacaaataagacttccctctctcttggcacttcttactcctccctttcccccacgcatccatatccctgctgccttctccttcccacaaagctcatttttggcaaagtggtttttataaaccacacattttaatgaattaagtgtagtcccacgatcacacttacattctcctacagtcccctgacttccacactcctccagctatgggaattttccctcacacctccagaaaggaaaaaaatgaattgaaaattttgtctataagtagaaaagttatgcacagaatgtgatggctctcccacttttctttttttctttttctttttttttttaatgcaagaaggaagatgattttcaaacattgcacgtcctctgagaaactaaaatattcagtgctgtttttcttttggcagtagcataattggttgtgatcataaacccacatagttccttttatcctttttagtggcagcttcatggattgtcttctaccctgtcaaagaagagagttggggtgtttgacagcaaagaaatttaggagaatttcagagcagaaaaggactttgtacatcatagtttccaaacttcttattttaccgctgtggatactgaggttcacaggtggtttaacttgccgaaagtcatggggttagccaatagcttctgcgaaattaagctatacccaacttttacagtttgtatcacatgaagtttcaatcacacaatcttcttggatccttgcaacagctgcatgatggtactagaaccaccctctgctagtgaagtgacataagaatgctcatcagagtgctaggacttagaattgcatccctggccaggtgcggtggctcacgcctgtaatcccggcactttgggaggctgaggccggtggatcacgaggtcagcagatcgagaccatcctggctaacatggtgaaaccccgtctctactaaaaaatacaaaaaattagccaggcgtggtggcacatgcctgtagtcccagctacttgggaggctgaggcaggagaatggcgtgaacccgggaggcggagcttgcagtgagctgagatcgtgccactgcactccagcctgggtgaaagagcaagacttcgtctcaaaaaaaaaaaaaaaaaaaaaaaagaattgcatccctgaccactgagtccatattctcaagtccacctagcctttttttttttttttttttttttatgtttttgkggtgtcaccaacaaagcattagacgcttggccagggtctggagttacctagacaaagggcataatctatgctctctaagagcacacagtttag

SEQ ID NO: 65150 - DNA, 684 bp, Homo sapiens
aaaccacttttgaggtgtgtgtatattggaggtagtgaaggagcagttagttaaaaggaaagaaagggcaggagaatggggaaagcgtcccaaaggaaaacagagctaagtcttaaaagatgtcttgaaaagacacaatgtcttgaaagaaataatgagaagggagaaataatttcagagagaaacatgtggaggctcagagacttgaaaatgtcctggggaaggtgcaaatgatcaaggtgactgcagggaaggactggtaggtaggaggatggtaagcgatgaggttggaggggaggcgagggagagatcatgaaggactctgtatgttctgtgaatgcgtttgggttctatcctgaagacaatgggaaattactgaaagatttttaagcagaaaagtaacataatctggttggaatttcaaaagattcctctggtatgtagtgtgggagaaagcaggactagaagcagggagattgtttggcatgttccttcaatgatcaacacaagartcagtgacaatatgaaatttggcagtggtggtggggcagcaggaagtatatgtgagaactattgaggaatttggtgaggaattgggtccggtagtaagtctgagatgatgcccagatgtttgggttgggccagttaaaagatggtggaatcattcacaaacagacgggatcc

SEQ ID NO: 65151 - DNA, 855 bp, Homo sapiens
gatcaggacaaatacaaagtaaagattgctgcctgagaatgctttaagaaagctgtcatactagtaatctaaaagggaaattgtattcctaatattttcaacgttgcacctgtcttgtatttgccattatgattagatgtaagacaactagtatcttctttttctttgagacagtctcactctgtctcccaggctggagtgcagtggcgcgatctcggctcactgcaaccttcgcctcccaggttcaagcgattcttctgcctcaggctcccaagtagctgggactacaggcgtgcgccagtaagcccggctaatttttctgcatttttagtagagacggggtttcaccgtgttggtcaggctggtctccaaccccygacctcaaatgatccgcccgtttcggcctccccaagtgcggggattgcagaagtgagccaccgcgcccggccttcaaatgtacatatttcttgatgtacatttccacaagtgtgcgcgcgctgtaaaagccacagcgatagcactcacaactttctatcctagtgaactaatgaaagctaactgatgaaagtagcaaattggaaatctaaccagaaaatggcgacgctgtgagcaggatttgaacctgcgcggggaacccccattggatttcgagtccaacaccttaaccactcggccatcacagctccgaggacactttttgtttcagaggaagtcgtgttaggctctttgactctctcgctttttaatgttcccacggcaggttaatgcttccgtgtttgtatttgtcactttttatatatttgtctctctctttcaataagaagttcctgggaaacataatagtgtcttaatctt

SEQ ID NO: 65152 - DNA, 753 bp, Homo sapiens
ggatcccgaaggcttcgagaagagccgacctgtctggaagggtctccaagaacagagaggactctgcaaccatcactcgggagccgcgtcctttcatccttgagacagctccgtggtccaacggttccccgatccgctggccgagatctcaagcttggatgcaacttcggattcgccccaggcaggaggaaggaagccccgattggaaacgttgacttgaatcttctcggatcagaattagcaggttaagaaaaactgtttccccgtaagaagcagggttctttggtgttcaatgtggagctccgccactcccagcccgggtgaaggaaaactgggaaacagaatgaatgtgattatctattcgaagataaatttccacaaagcatgccgtttgatagtagcttataatgtggaagtaaggcatcctgtcatccggccggttagctcagttggttagagcgkggtgctaataacgccaaggtcgcgggttcgatccccgtactggccaagtattctctgtggcttttatcaccagaatggatagtaacccagacatcgatctaaacgtgtacctgtgtgtttctccaggcttaactttgccccgagaaaacggatctgtgaatttggtgcgccctcgcttactcgacagcggttaatttgaacggggacgtttctttccgctgcctccaaggcatacccacatcctacccgtaaaacaaaggggctataggcaccttacagtgacagaggtac

SEQ ID NO: 65153 - DNA, 1636 bp, Homo sapiens
ccttggccctgggtctgcagcgggtcctgccgagcttccttccctcaggcagcctctctctccctggccactctcgggggtgaggggggttaccggttcccagtgatttttattccctttgctctctcacgcctcatgttccccattctcctgcctcagttgtgtaatcttgagcaaatttctcaacctccctaactctgtttttgcaagcacatcttacaggtgcagtgacaccatacatcttcctcgtgagtgaggattaaatgagacgatgagcatgaaatacttagctcaatgcttggcacatagttctcaagaaagtaggaattgctatgatcagacttactggtttgaaatgttccttccctgcctcccacactgaccatcagtagagccaccacagggcaagtcatgacagaaaaggagaaaaacgcatgagctgcctgcaaaatgtgttcccaaatactgacggtcatctgagagttatcttacctgtgacatctgtgggatccctccttgccccactttggcagaaattggctgaatgtgagagtgtcacaccataaaaatcggactgctgatcycctcctaacactttgaaagtcaccatctaaccaagtaatctccttgtttacatgtggtactctgtttaacattgcagtgtgacatttaactgggccatatttcatttaactaaatgctactcactagtctacgttttggacattctgtaggcagagacattacttcctctgaaagtgacatatttagtttcccagcacagtaattagctcactatttcaggcttttatgccagtaacataagagtctttactgagctaaaagagtctcaacattagttttgccagcccacagttaaacaaagtcaaccacttcagaattctgctactgaaggctatgctcaactttactcaggcgtttaaaaaattcatggctgggaacagtggctcacacctgtaatctcagcacttagggaggctgaggcaggaggatcgcttgagcccaagagttcaagatgacctggacaagatgcccagaccctgtctctacaaaaaatacaaaaattagctgggtgtggtggcatgtgcctgtggttctaactacttgggaggctgggatgggaggattgcttgagcctgggaggtcgaggttgcagtcagccatgtttgcacctgtgcactccagcctgagcaacaaaactagactgtctcaaaaaaaaaaaaaaaaagaattcatgttactgcatgcatttttgtgtggtataaaatcatcgtagtaagctaagtcaaattatatagttaaccagatatacatactatctaagctagccaaaggtgtaatactcttttggtataattttcatttgctttataacatgtatcatattgctttatccattgtagccctgtaatctttcaaatgcaacaaaagctttttctattccataaaaccatctcaaactaaatcagagatgaccccgacaagacagcaacactttagcagtattaataatattaataatatgtttcatccatcctaagcagtattaataatctgtttcatcacatcctaagcatctcattctaaaccaagaaataggccgggtgcagtggct

SEQ ID NO: 65154 - DNA, 1288 bp, Homo sapiens
agaaaaaaattaaaaatttagataattttttgaaaaaagaaattgcctgcaaactctcacctagagatgaaggtgagtgttgttaaattatacatttagttttgacaagtgagtaaaagtgatccccattttaaatatcaaaaagtatagaaattaagtttcaagttaattaattttttcattgatacatattagttttacatattttggggatacatgtgatattttgatacctgtatacaatgtgtagtgatcaaatcaaagtaattggggtagccatcacctcaaaaatgtatcttttctttgtgttgggagtattacacatcttttcttccagttattttgaaatatgcaataaattattgttaactgtaattttcctactgtactacctaatactagaacttattccttctaactgtattttttgtactgttaaccaacttgatttataaacacacacacacaaccaaataggatctcattcgacatgctattttaaattttattttacattgaaataacttcagacttacaaaaagttgtaagaaccttgtagagttactgtgtgtccttcatccaccttcccccatcttttataacaatggttcatgatcacaaccaggaaactagcatcctgcatatgaatttattagctgacttttctactcaccactttcccattagagcctagcccttagtttcagactttagtgattaaatcctggttctttctactcaggggatcttggcctagagactttggtttcccatctgcaaaatgggttggtaagcaaatgctcatcttgtatcaggcttgctgtgaaaattaaatgatataatgcagaatgcgggacccacatgaagtactgagaagataatatctgtccctgtatagttttatccttgtattatcacttcaaatcccagagatctggggagatgcgtaaggagtactgggtggctagtgtggaaaggggctaagaggcaggatctttgtttccctacctaaccgtaactaaggcaactgtttcatttttttctaaaaayctactccatgtatttaaattttatagacaaaatctggtttgaagaaaagagaatttcagggttttataaacaggtgaatcccaagatttttaaaaaggtttttctgatctcaaatggctgcatagaatttcattgcatggaagccccgttctttacttggtcagttcctttttgttagacatgtagttgtttctaatttttattaatgcaaaaaactctaaaatgaacataattatgc

SEQ ID NO: 65155 - DNA, 536 bp, Homo sapiens
tgatggtttgcaaagtcctgggacatggacctgagaggagtatgttcatgctctagatacattctgaggagtcttcccatcccatgacacccattttctgaaaactgccctcccttcctctggaggtgggcccctgcagccttgtttgttctagccagagtcgacagacacctggttcaagctaaaccaatcagattctctctcccacctgacccaagctggaccaatcagattctctctccaaggactttggaattgggctctggaaagctagttgactgactgaaatgctaaagctgggatgtccttcctgccacatgcagagagaaaagaacagagcagatgtgtagaaagacatgaacaagccccacaccgccacagcaaggcagaagaggaagagtggtgctggtttctggcaaytttccagatgctacctcttcagaggcaacctccacacattatgtctttggtgaaattccatgaaatacccctgaatccacccaacgaagttcctttaagcaagtttgagaagattt

SEQ ID NO: 65156 - DNA, 621 bp, Homo sapiens
taaacctttttaagagcccccccccacccaattgggtcagcaaatttcttaacttcccctctcttcactttccacacacctctgtgtagaaaacagtggtaatttcattgckctattgtctgtccctttctgctatggaagggcaggccacctggacttgattattcttagccctgctgaagtagctccagctccatctgaaagaccaggaaaggaaccagagggccggcaaactaagtcctgtattgcaacaggacactgtgctcagtattctttgattctttgcttgccttcttgtcacctccctagacatttggggacctgcacttccaagatgctgctttccattttggaaatgaccaagtgggattcccccaatagttgctttcctaatgaatcattggtgaatatttatggagtccctccgcataaaacagtggctcctgctttcaagaatctcacaatttggggagacaagattaacacaggaaacaagagttcgataatgtgtggcactgattaacaggacaagggggctcagagccaaagagagtcgcaaaacggttgaaaaggacactgactgggaattgagagccctgggttcatcatgctagccctgac

SEQ ID NO: 65157 - DNA, 621 bp, Homo sapiens
taaacctttttaagagcccccccccacccaattgggtcagcaaatttcttaacttcccctctcttcactttccacacacctctgtgtagaaaacagtggtaatttcattgctctattgtctgtccctttctgctatggaagggcaggccacctggacttgattattcttagccctgctgaagtagctccagctccatctgaaagaccaggaaaggaaccagagggccggcaaactaagtcctgtattgcaacaggacactgtgctcagtattctttgattctttgcttgccttcttgtcacctccctagacatttggggacctgcacttccaagatgctgctttccattttggaaatgaccaagtgggattcccccaatagytgctttcctaatgaatcattggtgaatatttatggagtccctccgcataaaacagtggctcctgctttcaagaatctcacaatttggggagacaagattaacacaggaaacaagagttcgataatgtgtggcactgattaacaggacaagggggctcagagccaaagagagtcgcaaaacggttgaaaaggacactgactgggaattgagagccctgggttcatcatgctagccctgac

SEQ ID NO: 65158 - DNA, 521 bp, Homo sapiens
ctgtaagggttgctgtacaatcatccccattttatagatgagaatactgaggcacagtttaagtaatttgctcagctcactcagctagaaagtggcaaagctggaattcaaatccaggcagtctgactccagagttttccttaaccattaccctatcctgccacttaaatgtccggagtttggaattagaatagggtagaaatgataagcctggatttaagagcatttttatagacacacacttgctttttcttcccatgtgaatcacaatgattatctgagaaaaatcggtcctgtaacatcaagtcggggaggttcatgagaaaggtccctttctcaatgaggttgatgttgcaagaccacatctcagctgcagcatcttaaaccacgaggggacttttgtaatcgagtgacttccaagtcatatagcaagttagtggycaatccagtaattctggaacctgaattttagagtcttaggttcctctggaggaggaccagttatcatgagcctcaggatc

SEQ ID NO: 65159 - DNA, 2399 bp, Homo sapiens
tattagacataattgatactgagttatttatcattatcatattttttaagattctagagttgttttgaagaaaatcaatgactgaaaacatgtgaagaatgcttttattcttattgtgacttggatgttaggtgaaaatttcagagttatgactagttctctgaaactggcagaataaagatgatatgtgctgcacatattaaccataattctcattaaatgaatacttctttgcataaaacattcaaatatttggtgattgtggtgtttctttgtctccgatactttagtatcagaaaatatgtagtatgttttctggatacatatttccaaaccaagatctctcggcatggagatatgtaaaattattgattatcattaaataatattgatcaaaagaaaacagacacatccaagactggaaagtggaaaaaggtaaagacaataaaaattctaaaaatataaattcatgagccccattaaataccataaaagtgggcccaggaatctatatttttatgagctttccaggtaatgctgaagcatgaccaggttttggaagcataggcaagaacccagctctttgtctagaattaatttcagcatctgccaggatcctttacagcaccaggtatgggttctaaacgacgtccctggccagcaacaagggagaagggagcaggtgtttccctcttccttccctcatatgatgataaatgagtctgcagtaggtaagcattagccggctgtaccacctagcttgccccacttggaaatgtcagctggcagctggtgggaaacatggaaattcttttaatgtaatttattatttcagagttgaggaaatatttatagagatattaagttacttggcaaggtcacacagatagttctggtaagatttggaaatagaactcaggtctcctgagaccttatccagtgcttttctcattaaaaaaaaaaaggctctttgcaatcaaactttaccctaattttccagcctcatttcctatcacttaactctgaatacattgttaacttttcctcagaacgccgggcacttcattatatagttgtaatggcagcccacagccccttctttcttttggtaaaaggctttgacttttccttatgaagccatttatcttggtttgagtgagagtcaccccagtccctgacctgatgaacaaggcatgacccaaaccaggatgtgtgaagactgaatgaatagttcagggaggccatggactcatctaggccagtgagtcagtcaaggcattttgttggaaccactgggatagaggcatttttttttttttttttccatcatggtccttgtgggcagaaggtaacctgttcttgctggaggccagatttggcagcagttggggagaacatatcagagattaaagccattacagaagaaaaagtcatgttgagaagagacactgatttctgttgtcaccactagagtatctgaatccagttacaccgttttcggaactattcctgaatttttcagttaatgcacgcaataaattgacttacagcttaagccaatttgattgaatttttattatttgcagatgaaagagatctttagtaaaatgcttgattctgtcactttgcagcctctctaccattgcatgataataccaattctctatttttcctcctaggaagctatctgctagaaaaacaataaaagagttacttgacttgttatgtttattattcatgaaaaccaattgcttggttatgaatagacctttcctgaggaccattaagttaagcatgtgggaaattgatttttaactgctataacactggcataggctcctgaaatgtcactgaacaaacaagaatttttgcctttgtggagtttaactttttatgctgaaggagatcattgaaaaaacaccatgaaataggccaggcgcggtggctaaagcctgtaatctcagcactttgggaagacaaggtggggggatcacttgaggtcaggagtttgagaccagcctgtccaacatggggaaaccccgtatctactaaaattacaaaaattagccaggtatggtggcatgcacctgtaatcccagctccttggaaggctgaggcaggagaattgcttgaacctggaaggcagagctgagatctcaccactgtggtcaagcctgggagacagagtgagacttcatctaaaaaaaaaaagaaagagaaataaaaaaacccatgagtaactaagcattgaatttattctgtgggttagaagatgaaatgagctatgttaaacaaaacaaaacwtaacaaaacaaaaacaaaacaggcaggtttcaggctccaggctggtccccacagtcctaggttgcagtgaacccagagtccaaacctgctttagt

SEQ ID NO: 65160 - DNA, 2399 bp, Homo sapiens
tattagacataattgatactgagttatttatcattatcatattttttaagattctagagttgttttgaagaaaatcaatgactgaaaacatgtgaagaatgcttttattcttattgtgacttggatgttaggtgaaaatttcagagttatgactagttctctgaaactggcagaataaagatgatatgtgctgcacatattaaccataattctcattaaatgaatacttctttgcataaaacattcaaatatttggtgattgtggtgtttctttgtctccgatactttagtatcagaaaatatgtagtatgttttctggatacatatttccaaaccaagatctctcggcatggagatatgtaaaattattgattatcattaaataatattgatcaaaagaaaacagacacatccaagactggaaagtggaaaaaggtaaagacaataaaaattctaaaaatataaattcatgagccccattaaataccataaaagtgggcccaggaatctatatttttatgagctttccaggtaatgctgaagcatgaccaggttttggaagcataggcaagaacccagctctttgtctagaattaatttcagcatctgccaggatcctttacagcaccaggtatgggttctaaacgacgtccctggccagcaacaagggagaagggagcaggtgtttccctcttccttccctcatatgatgataaatgagtctgcagtaggtaagcattagccggctgtaccacctagcttgccccacttggaaatgtcagctggcagctggtgggaaacatggaaattcttttaatgtaatttattatttcagagttgaggaaatatttatagagatattaagttacttggcaaggtcacacagatagttctggtaagatttggaaatagaactcaggtctcctgagaccttatccagtgcttttctcattaaaaaaaaaaaggctctttgcaatcaaactttaccctaattttccagcctcatttcctatcacttaactctgaatacattgttaacttttcctcagaacgccgggcacttcattatatagttgtaatggcagcccacagccccttctttcttttggtaaaaggctttgacttttccttatgaagccatttatcttggtttgagtgagagtcaccccagtccctgacctgatgaacaaggcatgacccaaaccaggatgtgtgaagactgaatgaatagttcagggaggccatggactcatctaggccagtgagtcagtcaaggcattttgttggaaccactgggatagaggcatttttttttttttttttccatcatggtccttgtgggcagaaggtaacctgttcttgctggaggccagatttggcagcagttggggagaacatatcagagattaaagccattacagaagaaaaagtcatgttgagaagagacactgatttctgttgtcaccactagagtatctgaatccagttacaccgttttcggaactattcctgaatttttcagttaatgcacgcaataaattgacttacagcttaagccaatttgattgaatttttattatttgcagatgaaagagatctttagtaaaatgcttgattctgtcactttgcagcctctctaccattgcatgataataccaattctctatttttcctcctaggaagctatctgctagaaaaacaataaaagagttacttgacttgttatgtttattattcatgaaaaccaattgcttggttatgaatagacctttcctgaggaccattaagttaagcatgtgggaaattgatttttaactgctataacactggcataggctcctgaaatgtcactgaacaaacaagaatttttgcctttgtggagtttaactttttatgctgaaggagatcattgaaaaaacaccatgaaataggccaggcgcggtggctaaagcctgtaatctcagcactttgggaagacaaggtggggggatcacttgaggtcaggagtttgagaccagcctgtccaacatggggaaaccccgtatctactaaaattacaaaaattagccaggtatggtggcatgcacctgtaatcccagctccttggaaggctgaggcaggagaattgcttgaacctggaaggcagagctgagatctcaccactgtggtcaagcctgggagacagagtgagacttcatctaaaaaaaaaaagaaagagaaataaaaaaacccatgagtaactaagcattgaatttattctgtgggttagaagatgaaatgagctatgttaaacaaaacaaaacawaacaaaacaaaaacaaaacaggcaggtttcaggctccaggctggtccccacagtcctaggttgcagtgaacccagagtccaaacctgctttagt

SEQ ID NO: 65161 - DNA, 2399 bp, Homo sapiens
tattagacataattgatactgagttatttatcattatcatattttttaagattctagagttgttttgaagaaaatcaatgactgaaaacatgtgaagaatgcttttattcttattgtgacttggatgttaggtgaaaatttcagagttatgactagttctctgaaactggcagaataaagatgatatgtgctgcacatattaaccataattctcattaaatgaatacttctttgcataaaacattcaaatatttggtgattgtggtgtttctttgtctccgatactttagtatcagaaaatatgtagtatgttttctggatacatatttccaaaccaagatctctcggcatggagatatgtaaaattattgattatcattaaataatattgatcaaaagaaaacagacacatccaagactggaaagtggaaaaaggtaaagacaataaaaattctaaaaatataaattcatgagccccattaaataccataaaagtgggcccaggaatctatatttttatgagctttccaggtaatgctgaagcatgaccaggttttggaagcataggcaagaacccagctctttgtctagaattaatttcagcatctgccaggatcctttacagcaccaggtatgggttctaaacgacgtccctggccagcaacaagggagaagggagcaggtgtttccctcttccttccctcatatgatgataaatgagtctgcagtaggtaagcattagccggctgtaccacctagcttgccccacttggaaatgtcagctggcagctggtgggaaacatggaaattcttttaatgtaatttattatttcagagttgaggaaatatttatagagatattaagttacttggcaaggtcacacagatagttctggtaagatttggaaatagaactcaggtctcctgagaccttatccagtgcttttctcattaaaaaaaaaaaggctctttgcaatcaaactttaccctaattttccagcctcatttcctatcacttaactctgaatacattgttaacttttcctcagaacgccgggcacttcattatatagttgtaatggcagcccacagccccttctttcttttggtaaaaggctttgacttttccttatgaagccatttatcttggtttgagtgagagtcaccccagtccctgacctgatgaacaaggcatgacccaaaccaggatgtgtgaagactgaatgaatagttcagggaggccatggactcatctaggccagtgagtcagtcaaggcattttgttggaaccactgggatagaggcatttttttttttttttttccatcatggtccttgtgggcagaaggtaacctgttcttgctggaggccagatttggcagcagttggggagaacatatcagagattaaagccattacagaagaaaaagtcatgttgagaagagacactgatttctgttgtcaccactagagtatctgaatccagttacaccgttttcggaactattcctgaatttttcagttaatgcacgcaataaattgacttacagcttaagccaatttgattgaatttttattatttgcagatgaaagagatctttagtaaaatgcttgattctgtcactttgcagcctctctaccattgcatgataataccaattctctatttttcctcctaggaagctatctgctagaaaaacaataaaagagttacttgacttgttatgtttattattcatgaaaaccaattgcttggttatgaatagacctttcctgaggaccattaagttaagcatgtgggaaattgatttttaactgctataacactggcataggctcctgaaatgtcactgaacaaacaagaatttttgcctttgtggagtttaactttttatgctgaaggagatcattgaaaaaacaccatgaaataggccaggcgcggtggctaaagcctgtaatctcagcactttgggaagacaaggtggggggatcacttgaggtcaggagtttgagaccagcctgtccaacatggggaaaccccgtatctactaaaattacaaaaattagccaggtatggtggcatgcacctgtaatcccagctccttggaaggctgaggcaggagaattgcttgaacctggaaggcagagctgagatctcaccactgtggtcaagcctgggagacagagtgagacttcatctaaaaaaaaaaagaaagagaaataaaaaaacccatgagtaactaagcattgaatttattctgtgggttagaagatgaaatgagctatgttaaacaaaacaaaacataacaaaacaaaaacaaaacaggcaggtttcaggctccaggctggtccccacwgtcctaggttgcagtgaacccagagtccaaacctgctttagt

SEQ ID NO: 65162 - DNA, 943 bp, Homo sapiens
tttttctttgcccattcttggctaccttgcagctcaagatcagtttttttttttttttcccagcagtgacaatcctaccctggaaagggtaaagggtcagtggtgtccacttctgagagctagctgtgtgtaactccctgaaggaaggaactctgcattctgggcttcttagctgcaatggccagcagctttagaggtgaagattactgagcctactgttcttcttcctccgtggctgtctatgaaacccccgagatctctaggtgctaccagttagatttccaaagcctatttggcccttccccttgagagtttctagggactactcttgtttctaatttttgcccccagacagttggtggctaagttctaggtactcctcaagatcagagaaagaaagtcttgagcctgaccacttttcaccaggattccaatagacttcacagccttgttccatcatctggatcatgtcttctggcttcagcaatgtatctgrcaaagaatgagggttgatgataacattgtattgcagctgcgagtagagagccaggtaggtatgtgaaagtcattccccagatttctgctattccccaatgtaccccatgtatatacaggaaaacttatgttttttaaaattgaacaaatattcttgctttgtttctttgcttacacctggagtactttactcttcatcactcccccggtttataaatattacctattcttctaagttcactttaaataatatctactctttggaacctttcaacttttttggttttctactattatttacatataagtttcatatacggtatttaacacaaaatgtccccagtttatacaatttggcatagagcaaaaaaaagcgttaaatattctaaaataataataccatgtgtactgaaaaccttaattttaaatgtgtacaagattcagacag

SEQ ID NO: 65163 - DNA, 943 bp, Homo sapiens
tttttctttgcccattcttggctaccttgcagctcaagatcagtttttttttttttttcccagcagtgacaatcctaccctggaaagggtaaagggtcagtggtgtccacttctgagagctagctgtgtgtaactccctgaaggaaggaactctgcattctgggcttcttagctgcaatggccagcagctttagaggtgaagattactgagcctactgttcttcttcctccgtggctgtctatgaaacccccgagatctctaggtgctaccagttagatttccaaagcctatttggcccttccccttgagagtttctagggactactcttgtttctaatttttgcccccagacagttggtggctaagttctaggtactcctcaagatcagagaaagaaagtcttgagcctgaccacttttcaccaggattccaatagacttcacagccttgttccatcatctggatcatgtcttctggcttcagcaatgtatctggcaaagaatgagggttgatgataacattgtattgcagctgcgagtagagagccaggtaggtatgtgaaagtcattccccagatttctgctattccccaatgtaccccatgtatatrcaggaaaacttatgttttttaaaattgaacaaatattcttgctttgtttctttgcttacacctggagtactttactcttcatcactcccccggtttataaatattacctattcttctaagttcactttaaataatatctactctttggaacctttcaacttttttggttttctactattatttacatataagtttcatatacggtatttaacacaaaatgtccccagtttatacaatttggcatagagcaaaaaaaagcgttaaatattctaaaataataataccatgtgtactgaaaaccttaattttaaatgtgtacaagattcagacag

SEQ ID NO: 65164 - DNA, 943 bp, Homo sapiens
tttttctttgcccattcttggctaccttgcagctcaagatcagtttttttttttttttcccagcagtgacaatcctaccctggaaagggtaaagggtcagtggtgtccacttctgagagctagctgtgtgtaactccctgaaggaaggaactctgcattctgggcttcttagctgcaatggccagcagctttagaggtgaagattactgagcctactgttcttcttcctccgtggctgtctatgaaacccccgagatctctaggtgctaccagttagatttccaaagcctatttggcccttccccttgagagtttctagggactactcttgtttctaatttttgcccccagacagttggtggctaagttctaggtactcctcaagatcagagaaagaaagtcttgagcctgaccacttttcaccaggattccaatagacttcacagccttgttccatcatctggatcatgtcttctggcttcagcaatgtatctggcaaagaatgagggttgatgataacattgtattgcagctgcgagtagagagccaggtaggtatgtgaaagtcattccccagatttctgctattccccaatgtaccccatgtatatacaggaaaacttatgttttttaaaattgaacaaatattcttgctttgtttctttgcttacacctggagtactttactcttcatcactcccccggtttataaatattacctattcttctaagttcactttaaataatatctactctttggaacctttcaacttttttggttttctactattatttacatataagtttcatatacggtatttaacacaaaatgtccccagtttatacaatttggcatagagcaaaaaraagcgttaaatattctaaaataataataccatgtgtactgaaaaccttaattttaaatgtgtacaagattcagacag

SEQ ID NO: 65165 - DNA, 689 bp, Homo sapiens
ctactggatccttttgacatttatttcatcatgtagttttccatatttaataaatttacagatttaatttatataacttgaacctatgaaggaacagatatttctactgtttaatgtcctgtgatgtagaactcttgaaaaaattttttattttatataatcaagctttaagtaaaaaatgaagaaataaagttaaacgtgttattattttttaattaattaattaattatttttttttggcagagtcttgctctgtcsccaggctggagtgcagtggcgccatctcggctcactgcaacttccgcctcataggttcaagtcattctcctgcctcagcctcctgagtagctgggactacaggtgagtgccaccatgcccagctaatttttgcattttagtagagacggggtttcaccgtgttggtcttgaactcctgaccttgtgatctgcctgcctcggcctcccaaagtgctggaataaaagaagttctagtgatctgttgcatagcatggtgacgatagtcaataataatgtagtgtatatttcgaaattgctaaaataatagattttcaatgttttcttcacacagaaaaaatgatgcctgtaaagtaatggatatgttatttagcttcattcaatcattccacaatgcaaacatacatcaaaacttcacattgtacctaagaaa

SEQ ID NO: 65166 - DNA, 1317 bp, Homo sapiens
cctcgggccatctgtcaggagaagctgccacatctggcagtatctctcctagggtgaaacgtgcgcagattaaattgaagtaataacgagctcacgtggagtctgagacgagacaggaaatttgtatgcacggcatgtgccttcggtgcccgggctatggaggaaagaacacagacagtcttcctgaggtggggcagacaaaaccggtgaaagtgaaggagaattaaggcgctacacggtggtcattcaaaaagcctcagaattcccctcctaagaagatggaacaggcgtgcgttttcctccgtcccgcaggtgcaaccggaaacctcgggcagtgcccatcagacaaacgcaggaagacgagaggcggagagaggaagcccgggggagccgggggaccctgagaacgacagggtggggcgttcctggstttttttttttttgactcttccaccccaaactgggtgctcacaaggacgcggaggaagacagccaccgctgctgtctccagccagagcactgggagaggcgcggctccaggaaacatttcaaggaccctgggaaatgggtggagatctccgaatctaaaaaaccttcaggagactggaagtgttttgaagttgagggttgtggttctttctcatttggtttcaaaacabcctcgggccatctgtcaggagaagctgccacatctggcagtatctctcctagggtgaaacgtgcgcagattaaattgaagtaataacgagctcacgtggagtctgagacgagacaggaaatttgtatgcacggcatgtgccttcggtgcccgggctatggaggaaagaacacagacagtcttcctgaggtggggcagacaaaaccggtgaaagtgaaggagaattaaggcgctacacggtggtcattcaaaaagcctcagaattcccctcctaagaagatggaacaggcgtgcgttttcctccgtcccgcaggtgcaaccggaaacctcgggcagtgcccatcagacaaacgcaggaagacgagaggcggagagaggaagcccgggggagccgggggaccctgagaacgacagggtggggcgttcctgggbttttttttttttgactcttccaccccaaactgggtgctcacaaggacgcggaggaagacagccaccgctgctgtctccagccagagcactgggagaggcgcggctccaggaaacatttcaaggaccctgggaaatgggtggagatctccgaatctaaaaaaccttcaggagactggaagtgttttgaagttgagggttgtggttctttctcatttggtttcaaaaca

SEQ ID NO: 65167 - DNA, 658 bp, Homo sapiens
cctcgggccatctgtcaggagaagctgccacatctggcagtatctctcctagggtgaaacgtgcgcagattaaattgaagtaataacgagctcacgtggagtctgagacgagacaggaaatttgtatgcacggcatgtgccttcggtgcccgggctatggaggaaagaacacagacagtcttcctgaggtggggcagacaaaaccggtgaaagtgaaggagaattaaggcgctacacggtggtcattcaaaaagcctcagaattcccctcctaagaagatggaacaggcgtgcgttttcctccgtcccgcaggtgcaaccggaaacctcgggcagtgcccatcagacaaacgcaggaagacgagaggcggagagaggaagcccgggggagccgggggaccctgagaacgacagggtggggcgttcctgggtktttttttttttgactcttccaccccaaactgggtgctcacaaggacgcggaggaagacagccaccgctgctgtctccagccagagcactgggagaggcgcggctccaggaaacatttcaaggaccctgggaaatgggtggagatctccgaatctaaaaaaccttcaggagactggaagtgttttgaagttgagggttgtggttctttctcatttggtttcaaaaca

SEQ ID NO: 65168 - DNA, 658 bp, Homo sapiens
cctcgggccatctgtcaggagaagctgccacatctggcagtatctctcctagggtgaaacgtgcgcagattaaattgaagtaataacgagctcacgtggagtctgagacgagacaggaaatttgtatgcacggcatgtgccttcggtgcccgggctatggaggaaagaacacagacagtcttcctgaggtggggcagacaaaaccggtgaaagtgaaggagaattaaggcgctacacggtggtcattcaaaaagcctcagaattcccctcctaagaagatggaacaggcgtgcgttttcctccgtcccgcaggtgcaaccggaaacctcgggcagtgcccatcagacaaacgcaggaagacgagaggcggagagaggaagcccgggggagccgggggaccctgagaacgacagggtggggcgttcctgggtttttttttttttgactcttccaccccaaactgggtgctcacaaggacgcggaggaagacagccmccgctgctgtctccagccagagcactgggagaggcgcggctccaggaaacatttcaaggaccctgggaaatgggtggagatctccgaatctaaaaaaccttcaggagactggaagtgttttgaagttgagggttgtggttctttctcatttggtttcaaaaca

SEQ ID NO: 65169 - DNA, 629 bp, Homo sapiens
gtcctggtcctcagctcccctggctgggcgagggttccagtaacacaggggactctaactgcaatgcagatggtgagtctcgtgggcacctaggcagatgtcaccaatggaccgaaagctgcacctcgcccaccattaggaggtgggtatggccagggcaggtcacagggatgggaggccaccctgctccctggtgagatggaccacagagactgagctctgagggctttggcctgcaccccaggccccgggaacacagccatggagcatctcttccagggaccctggttgtgccaggacatgctgctgatgatggctgcaagtccttcttcccggtagctgcagagtcttacatggcatgccgccrctgaggcccgagccggtcactaggtctttttaaccggggctgtccctcggcctccctcgtgctcctcgcctccctcgtgctcctcgcctccctcgtgatcctcggcctccctcgtgctcctcgcctccctcgtgctcctcgcctccctcgtgaacctcgcctccctcgtgatcctcgcctgcctcgtgctcctcgcctgcctcgtgctcctcgcctccctcgtgctcctcgcctccctcgtgatcctcgcctgcctcgtgct

SEQ ID NO: 65170 - DNA, 629 bp, Homo sapiens
gtcctggtcctcagctcccctggctgggcgagggttccagtaacacaggggactctaactgcaatgcagatggtgagtctcgtgggcacctaggcagatgtcaccaatggaccgaaagctgcacctcgcccaccattaggaggtgggtatggccagggcaggtcacagggatgggaggccaccctgctccctggtgagatggaccacagagactgagctctgagggctttggcctgcaccccaggccccgggaacacagccatggagcatctcttccagggaccctggttgtgccaggacatgctgctgatgatggctgcaagtccttcttcccggtagctgcagagtcttacatggcatgccgccgctgaggcccgagccggtcactaggtctttttaaccggggctgtccctcggcctccctcgtgctcctcgcctccctcgtgctcctcgcctccctcgtgatcctcggcctccctcgtgctcctcgcctccctcgtgctcctcgcctscctcgtgaacctcgcctccctcgtgatcctcgcctgcctcgtgctcctcgcctgcctcgtgctcctcgcctccctcgtgctcctcgcctccctcgtgatcctcgcctgcctcgtgct

SEQ ID NO: 65171 - DNA, 629 bp, Homo sapiens
gtcctggtcctcagctcccctggctgggcgagggttccagtaacacaggggactctaactgcaatgcagatggtgagtctcgtgggcacctaggcagatgtcaccaatggaccgaaagctgcacctcgcccaccattaggaggtgggtatggccagggcaggtcacagggatgggaggccaccctgctccctggtgagatggaccacagagactgagctctgagggctttggcctgcaccccaggccccgggaacacagccatggagcatctcttccagggaccctggttgtgccaggacatgctgctgatgatggctgcaagtccttcttcccggtagctgcagagtcttacatggcatgccgccgctgaggcccgagccggtcactaggtctttttaaccggggctgtccctcggcctccctcgtgctcctcgcctccctcgtgctcctcgcctccctcgtgatcctcggcctccctcgtgctcctcgcctccctcgtgctcctcgcctccctcgtgmacctcgcctccctcgtgatcctcgcctgcctcgtgctcctcgcctgcctcgtgctcctcgcctccctcgtgctcctcgcctccctcgtgatcctcgcctgcctcgtgct

SEQ ID NO: 65172 - DNA, 629 bp, Homo sapiens
gtcctggtcctcagctcccctggctgggcgagggttccagtaacacaggggactctaactgcaatgcagatggtgagtctcgtgggcacctaggcagatgtcaccaatggaccgaaagctgcacctcgcccaccattaggaggtgggtatggccagggcaggtcacagggatgggaggccaccctgctccctggtgagatggaccacagagactgagctctgagggctttggcctgcaccccaggccccgggaacacagccatggagcatctcttccagggaccctggttgtgccaggacatgctgctgatgatggctgcaagtccttcttcccggtagctgcagagtcttacatggcatgccgccgctgaggcccgagccggtcactaggtctttttaaccggggctgtccctcggcctccctcgtgctcctcgcctccctcgtgctcctcgcctccctcgtgatcctcggcctccctcgtgctcctcgcctccctcgtgctcctcgcctccctcgtgawcctcgcctccctcgtgatcctcgcctgcctcgtgctcctcgcctgcctcgtgctcctcgcctccctcgtgctcctcgcctccctcgtgatcctcgcctgcctcgtgct

SEQ ID NO: 65173 - DNA, 629 bp, Homo sapiens
gtcctggtcctcagctcccctggctgggcgagggttccagtaacacaggggactctaactgcaatgcagatggtgagtctcgtgggcacctaggcagatgtcaccaatggaccgaaagctgcacctcgcccaccattaggaggtgggtatggccagggcaggtcacagggatgggaggccaccctgctccctggtgagatggaccacagagactgagctctgagggctttggcctgcaccccaggccccgggaacacagccatggagcatctcttccagggaccctggttgtgccaggacatgctgctgatgatggctgcaagtccttcttcccggtagctgcagagtcttacatggcatgccgccgctgaggcccgagccggtcactaggtctttttaaccggggctgtccctcggcctccctcgtgctcctcgcctccctcgtgctcctcgcctccctcgtgatcctcggcctccctcgtgctcctcgcctccctcgtgctcctcgcctccctcgtgaacctcgcctccctcgtgatcctcgcctgcctcgtgctcctcgcctgcctcgtgctcctcgcctccctcgtgctcctcgcctccctcgtgmtcctcgcctgcctcgtgct

SEQ ID NO: 65174 - DNA, 1795 bp, Homo sapiens
ttattgctsttggtgtcagcaacaatgaaacagaaactggggttacagctcagtctgcatatcacggccagtgaagtggaggaacaggcatttctttcgaagacctttctgcaggtgagttagttctccaagtcagcacaggacacagaatctggggctggagggatttggagggcgtcgtgtgcttctccaccttcttgtaccttctcttatcagctgcacatctcacccacctagaagattttgtgaagctgtctgttatataatttgtgttattaaaataataaaaacactgaatattctttctcccaccacatctttctcctttccccagagattctgacaggacttctgactgagagtcattgctaattcaaattgtatttttctaagagatcacagaactaacgttagttttcaaaaacagaaaagttatgaaatcacctgcccaaagtcattgagttggtaacagatgaatctgaaagagaatccagcattcctggcacccaatctcatgtacttttttctttttgactaattttgaaaacttgaaaaattttaattatgtcagaaaagcagtaaaacaagtaaccagcacttttccaagttcattcttccctgaatctttgcagaacacgaataggattttccacctcccaaagtgtcttaaatcgagtctagggacatgtgcctagactcgatctaaatctattttgagacactgggtctttccacgtgacctgtagtgatgcctccccccaggtgtccaatgtcctttccactgtcactttgatttctcaagaacctacatcttgtcacatttgccgtcatctcatgtctcctgtccactctgacttcatagagacccttccagaagagcagctcacgtcctgtggggccagtgactgcctgatggccaccacaaccaccaacagcacccagaggccctcccagcagctggtctacaccctcctgggcatctacactggtacgagctccatcggcccagggcagggtccctagcaaagcagagccaagcctccttcctgggctgacaaagactgtctctcccaatgtaaaagtaatctctcttcttctgaaatatccttgcaaaatgtattggtctggattatatgcaggcggtgttcttatgaatcaaatgcagtacacccgtgctgtctaacagaggatcctggggtgatgagattgttatacatctccagagcccaacacagcagccattaagcactgtggttgtttacatcttaactgattaaagtttcagttcctaagtctcccagccacactgcaagtgctcagcagtacgggggctggcggctaccattacagacagcttggtggctggctagggcactgggattgactgtttgtgtttcagctgtggccaaggggccctgaacatccataattgctataagccacttttttttttttttctgagaaatgtgctgagtaccttctgtggaaaggctagaggggcgagtgctcccaagtgcttgttgcaccttagctggagacgttgcaagctcatggtgaaagggctgcccaaaggaagttaattgtcatgacgaggctcattcttagaagttcattttaatagagaatgttatgtaatagtttcatatgtgacttcagtgttatagtcaaaggtttattacaactttgaaggggatacatttagagagttttaaaaaccattttgtaaataatttaaatatttttttttttggctgggcatggtggctcacacctgtaatctcagcactttgggagg

SEQ ID NO: 65175 - DNA, 1795 bp, Homo sapiens
ttattgctgttggtgtcagcaacaatgaaacagaaactggggttacagctcagtctgcatatcacggccagtgaagtggaggaacaggcatttctttcgaagacctttctgcaggtgagttagttctccaagtcagcacaggacacagaatctggggctggagggatttggagggcgtcgtgtgcttctccaccttcttgtaccttctcttatcagctgcacatctcacccacctagaagattttgtgaagctgtctgttatataatttgtgttattaaaataataaaaacactgaatattctttctcccaccacatctttctcctttccccagagattctgacaggacttctgactgagagtcattgctaattcaaattgtatttttctaagagatcacagaactaacgttagttttcaaaaacagaaaagttatgaaatcacctgcccaaagtcattgagttggtaacagatgaatctgaaagagaatccagcattcctggcacccaatctcatgtacttttttctttttgactaattttgaaaacttgaaaaattttaattatgtcagaaaagcagtaaaacaagtaaccagcacttttccaagttcattcttccctgaatctttgcagaacacgaataggattttccacctcccaaagtgtcttaaatygagtctagggacatgtgcctagactcgatctaaatctattttgagacactgggtctttccacgtgacctgtagtgatgcctccccccaggtgtccaatgtcctttccactgtcactttgatttctcaagaacctacatcttgtcacatttgccgtcatctcatgtctcctgtccactctgacttcatagagacccttccagaagagcagctcacgtcctgtggggccagtgactgcctgatggccaccacaaccaccaacagcacccagaggccctcccagcagctggtctacaccctcctgggcatctacactggtacgagctccatcggcccagggcagggtccctagcaaagcagagccaagcctccttcctgggctgacaaagactgtctctcccaatgtaaaagtaatctctcttcttctgaaatatccttgcaaaatgtattggtctggattatatgcaggcggtgttcttatgaatcaaatgcagtacacccgtgctgtctaacagaggatcctggggtgatgagattgttatacatctccagagcccaacacagcagccattaagcactgtggttgtttacatcttaactgattaaagtttcagttcctaagtctcccagccacactgcaagtgctcagcagtacgggggctggcggctaccattacagacagcttggtggctggctagggcactgggattgactgtttgtgtttcagctgtggccaaggggccctgaacatccataattgctataagccacttttttttttttttctgagaaatgtgctgagtaccttctgtggaaaggctagaggggcgagtgctcccaagtgcttgttgcaccttagctggagacgttgcaagctcatggtgaaagggctgcccaaaggaagttaattgtcatgacgaggctcattcttagaagttcattttaatagagaatgttatgtaatagtttcatatgtgacttcagtgttatagtcaaaggtttattacaactttgaaggggatacatttagagagttttaaaaaccattttgtaaataatttaaatatttttttttttggctgggcatggtggctcacacctgtaatctcagcactttgggagg

SEQ ID NO: 65176 - DNA, 1795 bp, Homo sapiens
ttattgctgttggtgtcagcaacaatgaaacagaaactggggttacagctcagtctgcatatcacggccagtgaagtggaggaacaggcatttctttcgaagacctttctgcaggtgagttagttctccaagtcagcacaggacacagaatctggggctggagggatttggagggcgtcgtgtgcttctccaccttcttgtaccttctcttatcagctgcacatctcacccacctagaagattttgtgaagctgtctgttatataatttgtgttattaaaataataaaaacactgaatattctttctcccaccacatctttctcctttccccagagattctgacaggacttctgactgagagtcattgctaattcaaattgtatttttctaagagatcacagaactaacgttagttttcaaaaacagaaaagttatgaaatcacctgcccaaagtcattgagttggtaacagatgaatctgaaagagaatccagcattcctggcacccaatctcatgtacttttttctttttgactaattttgaaaacttgaaaaattttaattatgtcagaaaagcagtaaaacaagtaaccagcacttttccaagttcattcttccctgaatctttgcagaacacgaataggattttccacctcccaaagtgtcttaaatcgagtctagggacatgtgcctagactcgatctaaatctattttgagacactgggtctttccacgtgacctgtagtgatgcctccccccaggtgtccaatgtcctttccactgtcactttgatttctcaagaacctacatcttgtcacatttgccgtcatctcatgtctcctgtccrctctgacttcatagagacccttccagaagagcagctcacgtcctgtggggccagtgactgcctgatggccaccacaaccaccaacagcacccagaggccctcccagcagctggtctacaccctcctgggcatctacactggtacgagctccatcggcccagggcagggtccctagcaaagcagagccaagcctccttcctgggctgacaaagactgtctctcccaatgtaaaagtaatctctcttcttctgaaatatccttgcaaaatgtattggtctggattatatgcaggcggtgttcttatgaatcaaatgcagtacacccgtgctgtctaacagaggatcctggggtgatgagattgttatacatctccagagcccaacacagcagccattaagcactgtggttgtttacatcttaactgattaaagtttcagttcctaagtctcccagccacactgcaagtgctcagcagtacgggggctggcggctaccattacagacagcttggtggctggctagggcactgggattgactgtttgtgtttcagctgtggccaaggggccctgaacatccataattgctataagccacttttttttttttttctgagaaatgtgctgagtaccttctgtggaaaggctagaggggcgagtgctcccaagtgcttgttgcaccttagctggagacgttgcaagctcatggtgaaagggctgcccaaaggaagttaattgtcatgacgaggctcattcttagaagttcattttaatagagaatgttatgtaatagtttcatatgtgacttcagtgttatagtcaaaggtttattacaactttgaaggggatacatttagagagttttaaaaaccattttgtaaataatttaaatatttttttttttggctgggcatggtggctcacacctgtaatctcagcactttgggagg

SEQ ID NO: 65177 - DNA, 1795 bp, Homo sapiens
ttattgctgttggtgtcagcaacaatgaaacagaaactggggttacagctcagtctgcatatcacggccagtgaagtggaggaacaggcatttctttcgaagacctttctgcaggtgagttagttctccaagtcagcacaggacacagaatctggggctggagggatttggagggcgtcgtgtgcttctccaccttcttgtaccttctcttatcagctgcacatctcacccacctagaagattttgtgaagctgtctgttatataatttgtgttattaaaataataaaaacactgaatattctttctcccaccacatctttctcctttccccagagattctgacaggacttctgactgagagtcattgctaattcaaattgtatttttctaagagatcacagaactaacgttagttttcaaaaacagaaaagttatgaaatcacctgcccaaagtcattgagttggtaacagatgaatctgaaagagaatccagcattcctggcacccaatctcatgtacttttttctttttgactaattttgaaaacttgaaaaattttaattatgtcagaaaagcagtaaaacaagtaaccagcacttttccaagttcattcttccctgaatctttgcagaacacgaataggattttccacctcccaaagtgtcttaaatcgagtctagggacatgtgcctagactcgatctaaatctattttgagacactgggtctttccacgtgacctgtagtgatgcctccccccaggtgtccaatgtcctttccactgtcactttgatttctcaagaacctacatcttgtcacatttgccgtcatctcatgtctcctgtccactctgacttcatagagacccttccagaagagcagctcacgtcctgtggggccagtgactgcctgatggccaccacaaccaccaacagcacccagaggccctcccagcagctggtctacaccctcctsggcatctacactggtacgagctccatcggcccagggcagggtccctagcaaagcagagccaagcctccttcctgggctgacaaagactgtctctcccaatgtaaaagtaatctctcttcttctgaaatatccttgcaaaatgtattggtctggattatatgcaggcggtgttcttatgaatcaaatgcagtacacccgtgctgtctaacagaggatcctggggtgatgagattgttatacatctccagagcccaacacagcagccattaagcactgtggttgtttacatcttaactgattaaagtttcagttcctaagtctcccagccacactgcaagtgctcagcagtacgggggctggcggctaccattacagacagcttggtggctggctagggcactgggattgactgtttgtgtttcagctgtggccaaggggccctgaacatccataattgctataagccacttttttttttttttctgagaaatgtgctgagtaccttctgtggaaaggctagaggggcgagtgctcccaagtgcttgttgcaccttagctggagacgttgcaagctcatggtgaaagggctgcccaaaggaagttaattgtcatgacgaggctcattcttagaagttcattttaatagagaatgttatgtaatagtttcatatgtgacttcagtgttatagtcaaaggtttattacaactttgaaggggatacatttagagagttttaaaaaccattttgtaaataatttaaatatttttttttttggctgggcatggtggctcacacctgtaatctcagcactttgggagg

SEQ ID NO: 65178 - DNA, 811 bp, Homo sapiens
cattgttcatttttctggactttctgattttttgtaatgattattatctttacagaaaagaartatattaagtgatttcgaaatcagagagccttcaaggtcctgcttctgattatgatggagacgatcaaaagtaaccaacacttccatcataaaaaggaaaaataattatatttttaacccattgggagactgaggacacagaaatttaggtgagactaaatctcacagagggataaatgcttcgtatatgaactaggatagaggcagctttaatgccaggaaacaggtgaggaagcagaacagtcactgggtagactactttgcaggggaaagagaaactggctgaacttttaacaatcatgggctctatggaatattgaaaacatacaagcttcagacaaagagcaagttctcactattcaccaattctcaaccttgggacttttaacaagtgctcagcagcatgtgggcaattgagtctagatagggagcaaaaagagattttcagtggcacagaaatcccgggacagtgctggagagcagagcggaatgtcagttacatggtgcatggataagcaagcccagatgaaaggagggaccttttacagcttaaagcttttgaaactggtagtaaattaaaactaactaaagctataaacccaaccccaacttagctcaattcctgatttgatcagagagatcagcccttgtggaggagaaatattttccactccagtctctgtaattggcttatatacaatatctggcatataatacacaactgtgagacattcatagaaggaggcaa

SEQ ID NO: 65179 - DNA, 811 bp, Homo sapiens
cattgttcatttttctggactttctgattttttgtaatgattattatctttacagaaaagaagtatattaagtgatttcraaatcagagagccttcaaggtcctgcttctgattatgatggagacgatcaaaagtaaccaacacttccatcataaaaaggaaaaataattatatttttaacccattgggagactgaggacacagaaatttaggtgagactaaatctcacagagggataaatgcttcgtatatgaactaggatagaggcagctttaatgccaggaaacaggtgaggaagcagaacagtcactgggtagactactttgcaggggaaagagaaactggctgaacttttaacaatcatgggctctatggaatattgaaaacatacaagcttcagacaaagagcaagttctcactattcaccaattctcaaccttgggacttttaacaagtgctcagcagcatgtgggcaattgagtctagatagggagcaaaaagagattttcagtggcacagaaatcccgggacagtgctggagagcagagcggaatgtcagttacatggtgcatggataagcaagcccagatgaaaggagggaccttttacagcttaaagcttttgaaactggtagtaaattaaaactaactaaagctataaacccaaccccaacttagctcaattcctgatttgatcagagagatcagcccttgtggaggagaaatattttccactccagtctctgtaattggcttatatacaatatctggcatataatacacaactgtgagacattcatagaaggaggcaa

SEQ ID NO: 65180 - DNA, 811 bp, Homo sapiens
cattgttcatttttctggactttctgattttttgtaatgattattatctttacagaaaagaagtatattaagtgatttcgaaatcagagagccttcaaggtcctgcttctgattatgatggagacgatcaaaagtaaccaacacttccatcataaaaaggaaaaataattatatttttaacccattgggagactgaggacacagaaatttaggtgagactaaatctcacagagggataaatgcttcgtatatgaactaggatagaggcagctttaatgccaggaaacaggtgaggaagcagaacagtcactgggtagactactttgcaggggaaagagaaactggctgaacttttaacaatcatgggctctatggaatattgaaaacatacaagcttcagacaaagagcaagttctcactattcaccaattctcaaccttgggacttttaacaagtgctcagcagcatgtgggcaattgagtctagatmgggagcaaaaagagattttcagtggcacagaaatcccgggacagtgctggagagcagagcggaatgtcagttacatggtgcatggataagcaagcccagatgaaaggagggaccttttacagcttaaagcttttgaaactggtagtaaattaaaactaactaaagctataaacccaaccccaacttagctcaattcctgatttgatcagagagatcagcccttgtggaggagaaatattttccactccagtctctgtaattggcttatatacaatatctggcatataatacacaactgtgagacattcatagaaggaggcaa

SEQ ID NO: 65181 - DNA, 811 bp, Homo sapiens
cattgttcatttttctggactttctgattttttgtaatgattattatctttacagaaaagaagtatattaagtgatttcgaaatcagagagccttcaaggtcctgcttctgattatgatggagacgatcaaaagtaaccaacacttccatcataaaaaggaaaaataattatatttttaacccattgggagactgaggacacagaaatttaggtgagactaaatctcacagagggataaatgcttcgtatatgaactaggatagaggcagctttaatgccaggaaacaggtgaggaagcagaacagtcactgggtagactactttgcaggggaaagagaaactggctgaacttttaacaatcatgggctctatggaatattgaaaacatacaagcttcagacaaagagcaagttctcactattcaccaattctcaaccttgggacttttaacaagtgctcagcagcatgtgggcaattgagtctagatagggagcaaaaagagattttcagtggcacagaaatcccgggacagygctggagagcagagcggaatgtcagttacatggtgcatggataagcaagcccagatgaaaggagggaccttttacagcttaaagcttttgaaactggtagtaaattaaaactaactaaagctataaacccaaccccaacttagctcaattcctgatttgatcagagagatcagcccttgtggaggagaaatattttccactccagtctctgtaattggcttatatacaatatctggcatataatacacaactgtgagacattcatagaaggaggcaa

SEQ ID NO: 65182 - DNA, 3803 bp, Homo sapiens
aatcttccctctgctctttgcctaagctagttccttctatcattcagatctcacctagaggcgtcccttcagagaaatgtctcctactccctccatctagaagagcaggtccataaccccagagctatcccatctttgtaaaatatgttgttgtgttttttatccaccctcatcccaactatgattctctgtacctgaggtgaatgtctgtcttgttcagtgttgaatacctagcacctaggaaagtatctggctaaatcagtgctcaaatggttgtagaatgaaatgtgagagttgtttttagagtaagctatgtgtttccttaatattaatatagatgccactagatgatttactcctgaaatattgcttgatttgctcctttttcagtagggaaatttcttacacttgtatatactaacataaaattatctatatatatgacaatccattcaaaactaaaaccaactgtggaaaaagctgttatggtttggcctaatctacctcaccaagtattatacagtttgccgtcaaggccaaagctatcccctgtggtattttgcraggcagccaaagactccacaggttttgttttccacataatatataatagcaattccttcataaactataattcaataaacagttattcctctgtctcatcaataacttaaaaggaagaaagaatggtaaatgatgttcaataccatattttgtaaagagaaaaatagtcattgtggcttagtgtaaaagctggaaaagaggcgttctgtaacccactcaaatctggctacttaattcccagtatactaaaaaccagctgaaacatatgtaggtcacaaaatcagaaatactgcatgggctaagcatggccatgagtaatctgggtaattggaagtaaatgtgaagtaaaacataggcttttttgagacccacaggctattaacttaaaacctcctgttttattagtaacaccttgtcttaaaaaattgagttacgttagagaagccggggatttccagccagtcagaggctcgactgattgccatttcttctctaagatataattctgcaggtcttcgaagattcctgggccacgataacggcggaatatcccatcctttgcactataaattatgaaaacaagtagaaagcaaatgcattaaaataacgatgttacagataataaaaattaaaatagctactggtgatacatctgaacgccatctgaactttaaattgactcaattgaaaaatatacatagagataaatcagaaagagttaataagctttactataagtgagaaattcaaacctaaaagcgttaacattctatgttatcaccgtacaaagtgtgactaaaagcagagttcttggcagtgtttaatatgccaagttactttttattatttttgctaccaattactttttctcttacaatagcaaaacagccattgttatcaagtttaaaacattgtatccacattttcaaatttatgtcgttcaaggccctctcctcaaacatcaacaaaaaacgtcataccccccttcaacctggcctccctctcacctacttgcagcaatcagggcccccagggaagagtctaggcttgctgttttctcctctttatgtctcattcactacttggtgcaactgggggttctgctcccaggactcccttgaaaccactcatactgggggtctccaatgacccctaagtgccgtatccatttctgtttccttcacctgttactggcattgttcattcactgctgaataccacttctttcttccttgtgcttggcttttatgacaggagctctctggacttcttcctactgctctgagcattacttctccatttccttcactcactgtcttccttgcagatgtcctaatgttggccaatcccaggttccatccttgacctgcttcccttccccaccatacatgttctctctagatatatttcaacttttacctcaatgctgaggaattctcaatatgtatctccagtctagatctttcttctgaactctggatcctgacatcaaactgtacctagacttctccatttggaactgggaagggcaagtcacacttatcttttgcatttttgtctctatcttccaaacctcctcttattttaatggctcctaatcatgaaggcaggcaatagcttttactagttagttacacatggcctgttggtagtcatcatagactcttccttcccacagctaatcagtcaccaagtcccactgatcctacctcctaagtatctctggaattcactactttctttatctttcccctgcctgtacctgagtctctctggcctcatcactcagcatgatccagctatacctgtggtccagccataaagaactagttcaaagttctcaaaaggtagctcattctctcttgggcttttttatgctatctcctttaactggaaagactttctctaccttgttggcttaatgcattcctacttagatattaagaattaccccacctctgatatcaccagagaaatctctgacttctcctgcccacctacgcctgacattaggacctctgtctctgcagcactccaggaaagcttctcttgtcacagctctcactcagagcacaccagccttgtttccctcacatgttaagctgaatgagtggcagtcatggaagacaacttagaattcctggtacacatctattgatttctaatatttgcaagattagaagattatttaaacttactgaaaaaatgctgggagagtggtgacaaagaagcggccactcaaacctacaagaagcataaacagaacaaaagttacacttaagtcctccaaaaaaagcattcttgagcttactttcataatcacattattaaaatcactgcaattgttgactcacatttactattttttttgacttacagaaatttcatttctacctatttttattacctaacactttctagtaactgacatacaacttgcatcacttggattgtaaggaggctgaaaggataggatttagagtcatgcaaactggggttttgcaaagttaaataccgacttacccatttattaactttataactttagattatttaacctttcttagtctcagtcaccttttttctataaaatgggtatataaaagcctaacttaatggttctaaagttagattagggcaagtgttattaggcttagcatggtgctgggtacatagtgaaggactcaacaaactataggtatgattacatcagttatcagtttaaaaagaataagtaatatgaaatgattaagatcatgtataatgtttgtacatttataaaatctgtaagtaccgtaaagggaatatatgtatgtgaaaaatattttttccaatttgttttagcaaacctttactgaacactaagtacatatcaaatgctatgttatgtgcatgtaaagacaaagataaataaaacccttagtacctcaacaaatatttaccaagcaccttctttgttccagagactgtggttaccactcaagacacatggatgaataaaaacatgtacaacctttattctcacagagcttatagtctagtagcagaaggaaataacttattcaaataatcacaatcacaaccacaaacagagaatgaaaatatttaaaaaaagggtaggtatgcaaaaaaatgctgaatgagactaggagtaaagaacagatccttgccctttaaatgttacaaataaataatatttgcatgggcaccaagaataagtaaagagaatgaaagcttaa

SEQ ID NO: 65183 - DNA, 1251 bp, Homo sapiens
aaagctagaaacaaccaatttgtgtttcacagtgggaaattggttaaataagctggaatattatagaatctttaaaaataataatatagaatatttagtaaaaattaatataaagcaaaaaaaggttaaaactaagtacagtgtgtgtgtatatatataaataatttatataatcactcgaattatatgcaacaaaatgtgggattttattggttatcattttattttccaatcttagtgcacatgtattgttttatatgcaaagaaactttttttaaaaaaaaaatggaacttgataactaagcaaatttgatggtcttggaatataagaatactgtagtgaattattatgcaatggatttttaaagtattaatattagttaaatgtaagattgtcatgcacctataatcatatggcttttttgttgttgctgtttcaacctgagaaaattcatttactgaattccccatacagcaaataccatcctactcactgaaacacatttcagtcactttcactcctacttcccaacacttttaccatgtgctaactgcaactggaatatcctcctttgtttttcttactcctacctctttcaagcttctcatggccggcctagcacatacatagttttagtttattattatttgccttcatcagctccattcaacactcatctcttctttttttgaatttctgtagtgtatattctcatggtgtttagtacgtattggtactgtgatgttcagtaacaagttctttgagggtaggatccatacgttagagttttagaacttcacagaagctaggtaaaagtagagatttagtagatgctcagtgaattttcattgacscaggaagagtgttgtaatattaactgcataagggaggatgctttagtaacattgactgaaagtgagttctgtaataacaagagcataaggaaggcatgcactttatttggtttgcaagatgagtcttagaactgtttggttcaacccacaaatatataaccacatctacctttcactatatatttatatatttaaatatatatacttatatatatatttatatatttaaatatatatacttatatatatatttaaaatgaattaaatcaaaatttacagtgattactcaaatcaaagttgatgctatccagcaatcttttatttctttaaatagacaactaaggtacagaaatggtatggtccgaatgtttgcatccatacaaaattcatatgttg

SEQ ID NO: 65184 - DNA, 528 bp, Homo sapiens
attccaatacaaggaacactttccagggtaacgggaacatatccaagagacatctaactaggatatgagacttgaactctgctctattgtgtcaatagtaggcagcgaagtggagaaggccattgcaggcaaaggaaataacatgagatatattctttaagagtccctgagttttgagtgccttatgtagctactggcaattgtagtagggatttatagtggaagaaagttttgtgcatgactaagtagtagtacttgggtcactgagacagcaattaaagggctgatactcctatttataaatgataccagtgcctagatctatgtctgaatgatagaatgtggatttagcttctccctagaatccaraccatattatctgaatgcatgtttgtgcctcctgcagagtgccagtgcagcacaaatgatataccagagacgtgatctctatcctcaaggagggcaaaatctgaaatgcgccactttgataggaagcagaagagtggtgggatcgaggctgcaaaattt

SEQ ID NO: 65185 - DNA, 528 bp, Homo sapiens
attccaatacaaggaacactttccagggtaacgggaacatatccaagagacatctaactaggatatgagacttgaactctgctctattgtgtcaatagtaggcagcgaagtggagaaggccattgcaggcaaaggaaataacatgagatatattctttaagagtccctgagttttgagtgccttatgtagctactggcaattgtagtagggatttatagtggaagaaagttttgtgcatgactaagtagtagtacttgggtcactgagacagcaattaaagggctgatactcctatttataaatgataccagtgcctagatctatgtctgaatgatagaatgtggatttagcttctccctagaatccaaaccatattatctgaatgcatgtttgtgcctcctgcagagtgccagtgcagcacaaatgatataccagagacgtgatctctatcctcaaggagggcaaaatctgaaatgcgccactttgataggaagcagaagagtggtgggatcgaggcwgcaaaattt

SEQ ID NO: 65186 - DNA, 624 bp, Homo sapiens
gctgctcatggactctgaggactcaacgctcccggagggctagcagggagctytgcacacatacaaccagttctcaccaagcaactggggattaatagtgcaaggggttaaatgggttcaaactgttcctcttaagctccccaagatggtgaaccgcacttcaaagctgcttgaaaattcttacttggtgagcatgctgttctgtgtcccttttgggcagaggattgggaaggcagccaccaaggccgcctgccgagtgaacagggggagggggcactccaggtgacgtgtgtgcagagacccgctcatgcctgacccacagttagtgcacgctcacagtggttccagtcttgtcccagcgacccgactggcctgctttgttattggaactagagctgatgattcactttaaatagatccttaacctcacaatttgtttttcttgaaacggtcctgagaggtgctttccaagaaacaaggaaaaaactgactgcacagtggtgactttgagtctgtctgcagaaagcagtgtgagtggatggttcattcccatggcaaagcctttccctgtcacccggtgtcagggacagtgaaaaaaacgggccgtagcttgggaaacagggg

SEQ ID NO: 65187 - DNA, 624 bp, Homo sapiens
gctgctcatggactctgaggactcaacgctcccggagggctagcagggagctttgcacacatacaaccagttctcaccaagcaactggggattaatagtgcaaggggttaaatgggttcaaactgttcctcttmagctccccaagatggtgaaccgcacttcaaagctgcttgaaaattcttacttggtgagcatgctgttctgtgtcccttttgggcagaggattgggaaggcagccaccaaggccgcctgccgagtgaacagggggagggggcactccaggtgacgtgtgtgcagagacccgctcatgcctgacccacagttagtgcacgctcacagtggttccagtcttgtcccagcgacccgactggcctgctttgttattggaactagagctgatgattcactttaaatagatccttaacctcacaatttgtttttcttgaaacggtcctgagaggtgctttccaagaaacaaggaaaaaactgactgcacagtggtgactttgagtctgtctgcagaaagcagtgtgagtggatggttcattcccatggcaaagcctttccctgtcacccggtgtcagggacagtgaaaaaaacgggccgtagcttgggaaacagggg

SEQ ID NO: 65188 - DNA, 624 bp, Homo sapiens
gctgctcatggactctgaggactcaacgctcccggagggctagcagggagctttgcacacatacaaccagttctcaccaagcaactggggattaatagtgcaaggggttaaatgggttcaaactgttcctcttaagctccccaagatggtgaaccgcacttcaaagctgcttgaaaattcttacttggtgagcatgcwgttctgtgtcccttttgggcagaggattgggaaggcagccaccaaggccgcctgccgagtgaacagggggagggggcactccaggtgacgtgtgtgcagagacccgctcatgcctgacccacagttagtgcacgctcacagtggttccagtcttgtcccagcgacccgactggcctgctttgttattggaactagagctgatgattcactttaaatagatccttaacctcacaatttgtttttcttgaaacggtcctgagaggtgctttccaagaaacaaggaaaaaactgactgcacagtggtgactttgagtctgtctgcagaaagcagtgtgagtggatggttcattcccatggcaaagcctttccctgtcacccggtgtcagggacagtgaaaaaaacgggccgtagcttgggaaacagggg

SEQ ID NO: 65189 - DNA, 624 bp, Homo sapiens
gctgctcatggactctgaggactcaacgctcccggagggctagcagggagctttgcacacatacaaccagttctcaccaagcaactggggattaatagtgcaaggggttaaatgggttcaaactgttcctcttaagctccccaagatggtgaaccgcacttcaaagctgcttgaaaattcttacttggtgagcatgctgttctgtgtcccttttgggcagaggattgggaaggcagccaccaagkccgcctgccgagtgaacagggggagggggcactccaggtgacgtgtgtgcagagacccgctcatgcctgacccacagttagtgcacgctcacagtggttccagtcttgtcccagcgacccgactggcctgctttgttattggaactagagctgatgattcactttaaatagatccttaacctcacaatttgtttttcttgaaacggtcctgagaggtgctttccaagaaacaaggaaaaaactgactgcacagtggtgactttgagtctgtctgcagaaagcagtgtgagtggatggttcattcccatggcaaagcctttccctgtcacccggtgtcagggacagtgaaaaaaacgggccgtagcttgggaaacagggg

SEQ ID NO: 65190 - DNA, 1145 bp, Homo sapiens
cgaagccygggtgtgggtccccgtggtcttcgtgttgggggtaggtgcggaacgctaagcctgggcctactgggagccatagtcttcttgatggctggtgcttattgggcttttttcagtcgaatttcaaaatgcagttgaatttcttactttggaaacgataatagaaatggctgacctcagattttcatgattatgttttgccttttccagtgtatgtgcagtttctgtagtatagtggttatcatgtttgcctcacatgtgaaagacccttggctcgagactggagggaaacatggttttttggtttttctttttgtccctaaatttagtgagtttaatcgaggttgggaaacaaacagaaaagtagttgaacctgtggctacactttagacctcctcaatctagacagattgttgaccaggctacagtttccactggtctgccagcaagaggcctgcttaatgttagctttggttccagaaattccttaagattctcttcattctcttctgtcgcctgaattttcataggctgacactgaaagtggatgacatcttaatgcatttcctaagtgtcccgctgggcttcgctttactctgataagttgcagatctggctgatttgcgagacaaaaacaaaatatttttttaaaagattctaaatctgcatctggaacttgtagagtcaataatctgaaaccacacgaattatctacatacaaaagattttgaatgcataccccttccccaaataatcctcagaaaaccggttaagttttagcatctatgactctgagatgcatatgaggcctttgtaaatttagaagttgagagtagaaagtacaggtttgtattttagaaggagatttgggaataaatatagctctggtggatatagatcatatgttaaggtttgttggccagagctggtgtgtgtcttgggtgttgggcaaagaacagagaacagccaaagctctgcgaggtcaatgtgaagggtgatttccttggtgggctcaagtttatgacgcagcctggacctagcttggcttctcagctagagaagaagcatgattccatgtcacagctcctgtctttgaaaaagtcataatgactcccagacccaacatgtggggaaaactctgg

SEQ ID NO: 65191 - DNA, 1145 bp, Homo sapiens
cgaagcccgggtgtgggtccccgtggtcttcgtgttgggggtaggtgcggaacgctaagcctgggcctactgggagccatagtcttcttgatggctggtgcttattgggcttttttcartcgaatttcaaaatgcagttgaatttcttactttggaaacgataatagaaatggctgacctcagattttcatgattatgttttgccttttccagtgtatgtgcagtttctgtagtatagtggttatcatgtttgcctcacatgtgaaagacccttggctcgagactggagggaaacatggttttttggtttttctttttgtccctaaatttagtgagtttaatcgaggttgggaaacaaacagaaaagtagttgaacctgtggctacactttagacctcctcaatctagacagattgttgaccaggctacagtttccactggtctgccagcaagaggcctgcttaatgttagctttggttccagaaattccttaagattctcttcattctcttctgtcgcctgaattttcataggctgacactgaaagtggatgacatcttaatgcatttcctaagtgtcccgctgggcttcgctttactctgataagttgcagatctggctgatttgcgagacaaaaacaaaatatttttttaaaagattctaaatctgcatctggaacttgtagagtcaataatctgaaaccacacgaattatctacatacaaaagattttgaatgcataccccttccccaaataatcctcagaaaaccggttaagttttagcatctatgactctgagatgcatatgaggcctttgtaaatttagaagttgagagtagaaagtacaggtttgtattttagaaggagatttgggaataaatatagctctggtggatatagatcatatgttaaggtttgttggccagagctggtgtgtgtcttgggtgttgggcaaagaacagagaacagccaaagctctgcgaggtcaatgtgaagggtgatttccttggtgggctcaagtttatgacgcagcctggacctagcttggcttctcagctagagaagaagcatgattccatgtcacagctcctgtctttgaaaaagtcataatgactcccagacccaacatgtggggaaaactctgg

SEQ ID NO: 65192 - DNA, 1145 bp, Homo sapiens
cgaagcccgggtgtgggtccccgtggtcttcgtgttgggggtaggtgcggaacgctaagcctgggcctactgggagccatagtcttcttgatggctggtgcttattgggcttttttcagtcgaatttcaaaatgcagttgaatttcttactttggaaacgataatagaaatggctgacctcagattttcatgattatgttttgccttttccagtgtatgtgcagtttctgtagtatastggttatcatgtttgcctcacatgtgaaagacccttggctcgagactggagggaaacatggttttttggtttttctttttgtccctaaatttagtgagtttaatcgaggttgggaaacaaacagaaaagtagttgaacctgtggctacactttagacctcctcaatctagacagattgttgaccaggctacagtttccactggtctgccagcaagaggcctgcttaatgttagctttggttccagaaattccttaagattctcttcattctcttctgtcgcctgaattttcataggctgacactgaaagtggatgacatcttaatgcatttcctaagtgtcccgctgggcttcgctttactctgataagttgcagatctggctgatttgcgagacaaaaacaaaatatttttttaaaagattctaaatctgcatctggaacttgtagagtcaataatctgaaaccacacgaattatctacatacaaaagattttgaatgcataccccttccccaaataatcctcagaaaaccggttaagttttagcatctatgactctgagatgcatatgaggcctttgtaaatttagaagttgagagtagaaagtacaggtttgtattttagaaggagatttgggaataaatatagctctggtggatatagatcatatgttaaggtttgttggccagagctggtgtgtgtcttgggtgttgggcaaagaacagagaacagccaaagctctgcgaggtcaatgtgaagggtgatttccttggtgggctcaagtttatgacgcagcctggacctagcttggcttctcagctagagaagaagcatgattccatgtcacagctcctgtctttgaaaaagtcataatgactcccagacccaacatgtggggaaaactctgg

SEQ ID NO: 65193 - DNA, 1145 bp, Homo sapiens
cgaagcccgggtgtgggtccccgtggtcttcgtgttgggggtaggtgcggaacgctaagcctgggcctactgggagccatagtcttcttgatggctggtgcttattgggcttttttcagtcgaatttcaaaatgcagttgaatttcttactttggaaacgataatagaaatggctgacctcagattttcatgattatgttttgccttttccagtgtatgtgcagtttctgtagtatagtggttatcatgtttgcctcacatgtgaaagacccttggctsgagactggagggaaacatggttttttggtttttctttttgtccctaaatttagtgagtttaatcgaggttgggaaacaaacagaaaagtagttgaacctgtggctacactttagacctcctcaatctagacagattgttgaccaggctacagtttccactggtctgccagcaagaggcctgcttaatgttagctttggttccagaaattccttaagattctcttcattctcttctgtcgcctgaattttcataggctgacactgaaagtggatgacatcttaatgcatttcctaagtgtcccgctgggcttcgctttactctgataagttgcagatctggctgatttgcgagacaaaaacaaaatatttttttaaaagattctaaatctgcatctggaacttgtagagtcaataatctgaaaccacacgaattatctacatacaaaagattttgaatgcataccccttccccaaataatcctcagaaaaccggttaagttttagcatctatgactctgagatgcatatgaggcctttgtaaatttagaagttgagagtagaaagtacaggtttgtattttagaaggagatttgggaataaatatagctctggtggatatagatcatatgttaaggtttgttggccagagctggtgtgtgtcttgggtgttgggcaaagaacagagaacagccaaagctctgcgaggtcaatgtgaagggtgatttccttggtgggctcaagtttatgacgcagcctggacctagcttggcttctcagctagagaagaagcatgattccatgtcacagctcctgtctttgaaaaagtcataatgactcccagacccaacatgtggggaaaactctgg

SEQ ID NO: 65194 - DNA, 771 bp, Homo sapiens
cctgggagatgagatttttttaaaattatgtagcagaatggggagagaaacggagaagcgcatgaaagagagaaaagcacgaaaatcggcggcgtccaagaataaagcagataaaatagtgtgagtgtttttacattcaaaaaatagaagaagtgcaatgcttgtcagcaggctttgtggtcgtgtagtggttaatacttgtagttgtggttgccacaacctgggttctaatctgagtcacagtagtgttttctagcctgcgattgtggctaatagacctgtcgtttgctttgcctttaatcctagcagcctccagagagcagagtaaacctctggccccgaagggcgccagcttctggagtttagcccacagcgcagaaactagggggcggcctggccgataggaaaacttggacatgctctttgtctcacaattgagcaggaaaaattcccgtaggtgaagatgccgcctctcaagggccctttgtctgtagcttccactggtgaaataatgcggttatagtctttttcggtagagaaaacggctgtatcagtggaattttttaaaaacacaaaacgagaacgagtttttaatgagytgacaataaaatctaaactagttgtcatggtctgcacaggcttgcctccattccccatctgctaatttttatgagaacagtaaattattactattatcattatttttgagacgtagtcttgttctgtcacccaggctggagtgccgtggctcaatctcggctcactgcaacc

SEQ ID NO: 65195 - DNA, 934 bp, Homo sapiens
agccaagcagaaacacacacacacacaaagaataaaagcaaaagtcaacacaaaaatccttgccattgacagcacaaaataagaaggtagcatcctgaactctgcctttcacatctgtgtgtcactgggcaaacgacttaattaatgacatcacctctctgaccctgatttcctcatcggtaaactgragagaatagcacgttttgttaaagggttataatagcacgttccatttaagagctatcatgaggatcgaattcagcaggcaccacacaagggcgggttgctagcactattactatgtgagtctgcaccagctacagccctaagtgcatcccatatgccatctcacataaccctcccaacagccccatgaggcagggccactgtcatcttcactttgctgaagattttgctgattaggaaaccgaggcttctaggtgagaggcttgccgaggtcacgcagctggggaatggctgagcctggacacagctggagtcttctgatcctgaagccacctgttgaccctatgaccttgaccagttgaagtcacctctctgggcctcagtttcctcatctgtgtcttatggtgcacagggcagtcacgaggctgggcagagatgaggtgtgcgagccgtcggcagtgttcccagcacagggcgtccagtcaatgagcggtggctcctgctattatcatgacccatgctggctggtgttcactgctctcacctctgttgcacaggcaaggagcccgaggcttagggaagcgacgagctggtgtcaccttgctgatctgcactgacttgtaggcttcatgccccggctggggtgtgagctgtgggaaggggcttgtctgtctggtttcactgatttatacccagggctgggccctgggaatgaatgaatgaatgaatgaatgaatgaatgaatgaa

SEQ ID NO: 65196 - DNA, 934 bp, Homo sapiens
agccaagcagaaacacacacacacacaaagaataaaagcaaaagtcaacacaaaaatccttgccattgacagcacaaaataagaaggtagcatcctgaactctgcctttcacatctgtgtgtcactgggcaaacgacttaattaatgacatcacctctctgaccctgatttcctcatcggtaaactggagagaatagcacgttttgttaaagggttataatagcacgttccatttaagagctatcatgaggatcgaattcagcaggcaccacacaagggcgggttgctagcactattactatgtgagtctgcaccagctacagccctaagtgcatcccatatgccatctcacataaccctcccaacagccccatgaggcagggccactgtcatcttcactttgctgaagattttgctgattaggaaaccgaggcttctaggtgagaggcttgccgaggtcacgcagctggggaatggctgagcctggacacagctggagtcttctgatcctgaagccacctgttgaccctatgaccttgaccagttgaagtcacctctctgggcctcagtttcctcatctgtgtcttatggtgcacagggcagtcacgaggctgggcagagatgaggtgtgcgagccgtcggcagtgttcccagcacagggcgtccagtcaatgagcggtggctcctgctattatcatgacccatgctggctggtgttcactgctctcacctctgttgcacaggcaaggagcccgaggcttagggaagcgacgagctggtgtcaccttgctgatctgcactgacttgtaggcttcatgccccggctggggtgtgagctgtgggaaggggcttgtctgtctggtttcactgatttatacccagggctgggccctgggaatgaatgaatgaatgaatgaatgaatgaatraatgaa

SEQ ID NO: 65197 - DNA, 646 bp, Homo sapiens
agagtagatgactggtgtctgggtactttctagaatgtacttgctttagaaattgtgtctgcctcttttcagtgttttcattgaaaatctcaacctaaataaacacagagagattctgcaaatataatgagtttaattgggagtgagcactgcagtgtggaatatgtgtggcattataaactatgggcctattcagagaggcaaagggtaaaaagggcttttaaaagaaaaatkgggagggttacataagctgttttgaaacaattatccttggttatgaggattaataacgagagtggcccaggcagttgctaagcagatgtcccggcagaagtattgtttgggtaaggttgcagtgacctttgtgcaaggttctgatttttacagtcttttgtgatacatctttgttatcagacaatcgtgcataaggaccctccctttatagattttcccagttctgttttgttacggtttgaccaaacgacttcattttgattctgacaacttttgcaaatagaaaatttttaatggtgtcttcaaggagataagataggtgttacgaaatattaacaatggcctgaagcagtccgagaaaggaacagaacccgtccctccccatcttggtctgcaagatggggactcagaa

SEQ ID NO: 65198 - DNA, 975 bp, Homo sapiens
cattccttcaacaacagaaatttattcatacttacagacactgtttttggtacttgcaatacagatgattcagaaatgactcctgcctgcagttcctagagatccagatgaggaatcagattgtattagttatctcttgacttgtgatatgtcaccccaaaacttaactgcttaaaagaacccatattgatgacttatggcttctgtgggtcaggaatccagtcattccttaaccaggttttttggctcagggttgcatagaggctgtaatcagagcattagccagggttgtggtcatagttgaaggctcgactggggaaggacctggttctaagctcatgtggttgttggccggatctaatttcccactggactgagggcctcagggcctcccttccttgctgctgttggccagagggtgtcctcagttctttgctctgtggacctctgcaacatgacagtttgcttcatgagagcataaaagctaaaaataataatatggagagcaagacagctgtcagtcttttgtaagctaatttcataagtgatatgatacccattgttattgtcacactctattcatgagaagcaagtcactagatccagcccacactcaaggggtggggattacaaaagaccatgagtacaggaggccggggtcactgggagcatgccagaagctgcctgccacacagataattacaaacagtgtggaggtwggtgctccactgtgtggtctcagcaagttacgagcctcagtctcctcatctgtacagtagagagtaatgatctctgtctcacagggtggtggtaagaattaagtgagatgatgcagtaatggacaaggagaaagcctggcacctattatgcactcagaacatgttcacctctcagcttgaggggcagaattaagggaggaattccttctgcctggaaaagatttcaccaaagagatgaagtctgagctttgaagga

SEQ ID NO: 65199 - DNA, 975 bp, Homo sapiens
cattccttcaacaacagaaatttattcatacttacagacactgtttttggtacttgcaatacagatgattcagaaatgactcctgcctgcagttcctagagatccagatgaggaatcagattgtattagttatctcttgacttgtgatatgtcaccccaaaacttaactgcttaaaagaacccatattgatgacttatggcttctgtgggtcaggaatccagtcattccttaaccaggttttttggctcagggttgcatagaggctgtaatcagagcattagccagggttgtggtcatagttgaaggctcgactggggaaggacctggttctaagctcatgtggttgttggccggatctaatttcccactggactgagggcctcagggcctcccttccttgctgctgttggccagagggtgtcctcagttctttgctctgtggacctctgcaacatgacagtttgcttcatgagagcataaaagctaaaaataataatatggagagcaagacagctgtcagtcttttgtaagctaatttcataagtgatatgatacccattgttattgtcacactctattcatgagaagcaagtcactagatccagcccacactcaaggggtggggattacaaaagaccatgagtacaggaggccggggtcactgggagcatgccagaagctgcctgccacacagataattacaaacagtgtggaggtaggtgctccactgtgtggtctcagcaagttacgagcctcagtctcctcatctgtacagtagagagtaatgatctctgtctcacagggtggtggtaagaattaagtgagatgatgcagtaatggacaaggagaaagcctggcacctattatgcactcagaacatgttcacctctmagcttgaggggcagaattaagggaggaattccttctgcctggaaaagatttcaccaaagagatgaagtctgagctttgaagga

SEQ ID NO: 65200 - DNA, 745 bp, Homo sapiens
gggatcccacagattcatgcttgagcagagccttcattagctgaaattggctactttgtgaccctggggctggtgtcaatagtgccatcttgcaacagagcagttcttgcccctggtcaacacctgaaacctagaaatcatttgttcttattttcatgttttcatcaaacacttccatagaactacctaggtgsctggcactatttccaagagcattataaatgttaactcatttaacgcagaaaacaacaatcttataagggaggtattattattatacccattttactgatagggaaattaaggcacagccagtttaaatagctaatcagtggcaatgctaggatgggagctcaggtagaatgatgccagagcacacgttcttatcattactctatgctccttcatatatacatttgtgcttttatgaaaatccattggaaactggtgcaaaattctcagagaatattaataccttttattatctgaaaaggggattacaatctctagtttatggagtttgggggacccaaacaacatcacagtacgtgaaatcacctaacatggcctggcatacgatatgtatgcaggtttccttccagacatttatagttattataaaattacagttttcaagttactttctcatgtgcagctcagaatttcccacatcctttataaagaatgaagctaagagactcgcactgactttccactgttacaggccttgggtgcaacagaccca

SEQ ID NO: 65201 - DNA, 745 bp, Homo sapiens
gggatcccacagattcatgcttgagcagagccttcattagctgaaattggctactttgtgaccctggggctggtgtcaatagtgccatcttgcaacagagcagttcttgcccctggtcaacacctgaaacctagaaatcatttgttcttattttcatgttttcatcaaacacttccatagaactacctaggtggctggcactatttccaagagcattataaatgttaactcatttaacgcagaaaacaacaatcttataagggaggtattattattatacccattttactgatagggaaattaaggcacagccagtttaaatagctaatcagtggcaatgctaggatgggagctcaggtagaatgatgccagagcacacgttcttatcattactctatgctccttcatatatacatttgtgcttttatgaaaatccattggaaactggtgcaaaattctcagagaatattaataccttttattatctgaaaaggggattacaatctctagtttatggagtttgggggacccaaacaacatcacagtaygtgaaatcacctaacatggcctggcatacgatatgtatgcaggtttccttccagacatttatagttattataaaattacagttttcaagttactttctcatgtgcagctcagaatttcccacatcctttataaagaatgaagctaagagactcgcactgactttccactgttacaggccttgggtgcaacagaccca

SEQ ID NO: 65202 - DNA, 1497 bp, Homo sapiens
tgggtacagacagcgctggtggcaaaggggcagggcctcccacctccaggagcccggccagggatgggaaggtgctggctgggttctctcgcctcctgcgcygccccttgctgtgtggcctgggcccacccccctgcagccagcctggcacacacctgtgtagcccgtgtttctgcttggcatgtgcagctgctatggccacgttgttgaacacacagaacccgttggcagccgccctctggccatggtgcccgggaggcctacggcgtgagagtaggatttgggtcacgtcagggtcgccctggcccctcacagggccacccacggaggagcagccaggggaaggggcagctctcacctcaccagggcaagcccattttgcacagctccagtgagcacagcgtccaccagctgcagtccagcccctgcggccagccgcgcgcagtgaaaggtactctgtgggcgcaggggcgcagatgagccccctgccttccctgctgccctttgcaggccatacccacacttgtgccaggctgcaagacaccagctgctgagcagaacaggccagccccaggctctggcagtgccagcaggcaggtgtgcagggcaatgtcatgtgtatggaccaggggacactggctggggttggcggccgtggctgtgaacgctcaaaggcacgtgcatgtgtgtctgcacaggtgagtgtgtccggggacacgcaccgggtggaagtagatggcgtcgaactgtccggacagcgcctgcagctcctccttgcctaggacctgggtctccctgaccagggatacatactctgggctgcatgcagatgggcaggcaggagaggcagggtcaccagcaggagcaggggggcgggaggcggggacctgggattcatggtgggagtggccaccctgtcacttcctcaagcctgtgagcccacccgaggtgcatagggagaggctctgtattcgaggctggcaggctcggggtaggcccaggttcttaggtttctagctgggctgcccgccccgccccccatcgtggggcctgcccccgtcctgacctgtgcaccaggcccagctcctcttccgaggcctcgcgggctgacaaccgcagacacctctgttccaggccgcgctgccgcaggcgatccagggctgcggtcaggcgctcaggacgctcgatctcgcactcggggctggggcagatgaggagctcagttcagaggtccctccccgcaccccacctcggccaggtcccacttactcgtcccagagcagccgggtggccgtcatgtcctcatggtacacaagcgcggtccccatggctgcgccgtggtcaccctgggttcccaaacgccctcgctagtggtgcctgccactgcctgtccccaccttcggccgggagcagccggaggcctgggacctgcctggggcgcaggcgggcggcgggcaccggcctgggcgggagcgcacagaacctaggcaggctccg

SEQ ID NO: 65203 - DNA, 1497 bp, Homo sapiens
tgggtacagacagcgctggtggcaaaggggcagggcctcccacctccaggagcccggccagggatgggaaggtgctggctgggttctctcgcctcctgcgctgccccttgctgtgtggcctgggcccacccccctgcagccagcctggcacacacctgtgtagcccgtgtttctgcttggcatgtgcagctgctatggccacgttgttgaacacrcagaacccgttggcagccgccctctggccatggtgcccgggaggcctacggcgtgagagtaggatttgggtcacgtcagggtcgccctggcccctcacagggccacccacggaggagcagccaggggaaggggcagctctcacctcaccagggcaagcccattttgcacagctccagtgagcacagcgtccaccagctgcagtccagcccctgcggccagccgcgcgcagtgaaaggtactctgtgggcgcaggggcgcagatgagccccctgccttccctgctgccctttgcaggccatacccacacttgtgccaggctgcaagacaccagctgctgagcagaacaggccagccccaggctctggcagtgccagcaggcaggtgtgcagggcaatgtcatgtgtatggaccaggggacactggctggggttggcggccgtggctgtgaacgctcaaaggcacgtgcatgtgtgtctgcacaggtgagtgtgtccggggacacgcaccgggtggaagtagatggcgtcgaactgtccggacagcgcctgcagctcctccttgcctaggacctgggtctccctgaccagggatacatactctgggctgcatgcagatgggcaggcaggagaggcagggtcaccagcaggagcaggggggcgggaggcggggacctgggattcatggtgggagtggccaccctgtcacttcctcaagcctgtgagcccacccgaggtgcatagggagaggctctgtattcgaggctggcaggctcggggtaggcccaggttcttaggtttctagctgggctgcccgccccgccccccatcgtggggcctgcccccgtcctgacctgtgcaccaggcccagctcctcttccgaggcctcgcgggctgacaaccgcagacacctctgttccaggccgcgctgccgcaggcgatccagggctgcggtcaggcgctcaggacgctcgatctcgcactcggggctggggcagatgaggagctcagttcagaggtccctccccgcaccccacctcggccaggtcccacttactcgtcccagagcagccgggtggccgtcatgtcctcatggtacacaagcgcggtccccatggctgcgccgtggtcaccctgggttcccaaacgccctcgctagtggtgcctgccactgcctgtccccaccttcggccgggagcagccggaggcctgggacctgcctggggcgcaggcgggcggcgggcaccggcctgggcgggagcgcacagaacctaggcaggctccg

SEQ ID NO: 65204 - DNA, 2262 bp, Homo sapiens
ccttggtctagcggtgacgccagcgtctgggaagacgcccgttaccaggcgggccgtggtccagccgtagcaaaaggtgtcaaggaacaacacccactacttagcagaccgggaaagaggggggggggtctccctttccccaggggagtttagagaagactctgctcctccacctcttgtggagggcctgacatcagtcaggcttgcccgcagttatccagaggcctaaacgtctccctgtgatgctgtgcttcagcggtcacactcctagtccactttcatgttccatcctgtacacctggctctgccttctagatagcagtagtaaattagtgacaatactaatagtccctgatatgcagaaataatggcgtaagctgtctttctctctgtctcctctctctctctgcctcggctgccaggcagggaagggactcctgtccagtggacacatgacccacgtgaccttacctatcattggagatgactcacattctttaccctgccccttctgccttgtatccaataaataacagcgcagcccgacattcggggccactaccggtctccatgcattggtagtagtggtctcctgggcccagctgccttttctcttatctctttgtcttctgtctttatttctacactctctcgtcgccgcacacggagagacccactgaccctgtggggctggtccctacagagctgccccagtccaaaggggactcgatcaatggaggccttgcccatcaagagaccccagccatgacgtgcccaggtggggagacaggctggggctgcctgagaatggatcctcgtgagtgggttagcagtccagaccagcagaacctcaggatgtgtgcctggatccagccacatttgaagctgggccttcactttgtgtctggagcaccgaatgccctctgcctgggctgtctgtattcttggcacacaggggaggctctgagccctgccsgtcctggttgctgctgttcctagcgctcaggacagtgcatgcgtggtgtgcagcgggcatttggtaagaatgtgttgcacgaaagaagccaccagatggcaccagaagcagtcccacctcccaccccccccacctcccctcagcacctctcccagccccctccacctccccccagcacccctcccagccccctccacctcccccagtacccctcccagccccttccacctcccccagcacccctcccagccccctccacttccccccagcacccctcccagccccctccacctccccccagcacccctcccagccccctccacctcccccagtacccctcccagccccttccacctcccccagcacccctcccagccccctccacctccccacagctcccctcccagcaggacccacagagcccagggaaggggtggtggacaggggcactgcagccccaggaggaacactcagccaacccgcagagtgaaaaagacgctgtatttgatttacaatgaacaagatttacaaaaaggggtggggtggtcttggaactgctcccagtccccccggactgggtggggctctagggcagcctgtctgacagaccaggaccccaggatgtctgggccccgacgtaggacttgacctacgtctcacttgacctttgacgtggggcccagcagccgtgagtccacccagagtgccggcacccttggggaggccggtgaggtcaggaaggcatcgtaccgctttttctcctcctcccatctcgtggtggacagacagacataggatctgggaacttgccctgggggccacaggccctcagatcccccaggggcccaacctagggcatggaggcggctgctggtgcgtgggcggaggcggaggccagctgcccccagcgtggcagcgtaaggcacattttcaaatcactggagactcgacagtgaacacccgatgctggttctgcggccggagggagctggggctggggctggtgctggtgcggtgcccggcggtattgctcagaggaagatgctacagtctagacgctgggcgggttccggctgcacccactccggcttggggcgcgttccaggggagggtgggggcctcagccacagccactcggcctcctcccctgaggggctctcaggtacctcaggtacctatgtcccaaggcagcactggagattgtaggtcagaggtcagtgaccttgttctccagtgcagcggcaatctgctgcaggcggaaggccagctgcatcttctgggcggca

SEQ ID NO: 65205 - DNA, 2262 bp, Homo sapiens
ccttggtctagcggtgacgccagcgtctgggaagacgcccgttaccaggcgggccgtggtccagccgtagcaaaaggtgtcaaggaacaacacccactacttagcagaccgggaaagaggggggggggtctccctttccccaggggagtttagagaagactctgctcctccacctcttgtggagggcctgacatcagtcaggcttgcccgcagttatccagaggcctaaacgtctccctgtgatgctgtgcttcagcggtcacactcctagtccactttcatgttccatcctgtacacctggctctgccttctagatagcagtagtaaattagtgacaatactaatagtccctgatatgcagaaataatggcgtaagctgtctttctctctgtctcctctctctctctgcctcggctgccaggcagggaagggactcctgtccagtggacacatgacccacgtgaccttacctatcattggagatgactcacattctttaccctgccccttctgccttgtatccaataaataacagcgcagcccgacattcggggccactaccggtctccatgcattggtagtagtggtctcctgggcccagctgccttttctcttatctctttgtcttctgtctttatttctacactctctcgtcgccgcacacggagagacccactgaccctgtggggctggtccctacagagctgccccagtccaaaggggactcgatcaatggaggccttgcccatcaagagaccccagccatgacgtgcccaggtggggagacaggctggggctgcctgagaatggatcctcgtgagtgggttagcagtccagaccagcagaacctcaggatgtgtgcctggatccagccacatttgaagctgggccttcactttgtgtctggagcaccgaatgccctctgcctgggctgtctgtattcttggcacacaggggaggctctgagccctgcccgtcctggttgctgctgttcctagcgctcaggacagtgcatgcgtggtgtgcagcgggcatttggtaagaatgtgttgcacgaaagaagccaccagatggcaccagaagcagtcccacctcccaccccccccacctcccctcagcacctctcccagccccctccacctccccccagcacccctcccagccccctccacctcccccagtacccctcccagccccttccacctcccccagcacccctcccagccccctccacttccccccagcacccctcccagccccctccacctccccccagcacccctcccagccccctccacctcccccagtacccctcccagccccttccacctcccccagcacccctcccagccccctccacctccccacagctcccctcccagcaggacccacagagcccagggaaggggtggtggacaggggcactgcagccccaggaggaacactcagccaacccgcagagtgaaaaagacgctgtatttgatttacaatgaacaagatttacaaaaaggggtggggtggtcttggaactgctcccagtccccccggactgggtggggctctagggcagcctgtctgacagaccaggaccccaggatgtctgggccccgacgtaggacttgacctacgtctcacttgacctttgacgtggggcccagcagccgtgagtccacccagagtgccggcacccttggggaggccggtgaggtcaggaaggcatcgtaccgctttttctcctcctcccatctcgtggtggacagacagacataggatctgggaacttgccctgggggccacaggccctcagatcccccaggggcccaacctagggcatggaggcggctgctggtgcgtgggcggaggcggaggccagctgcccccagcgtggcagcgtaaggcacattttcaaatcactsgagactcgacagtgaacacccgatgctggttctgcggccggagggagctggggctggggctggtgctggtgcggtgcccggcggtattgctcagaggaagatgctacagtctagacgctgggcgggttccggctgcacccactccggcttggggcgcgttccaggggagggtgggggcctcagccacagccactcggcctcctcccctgaggggctctcaggtacctcaggtacctatgtcccaaggcagcactggagattgtaggtcagaggtcagtgaccttgttctccagtgcagcggcaatctgctgcaggcggaaggccagctgcatcttctgggcggca

SEQ ID NO: 65206 - DNA, 530 bp, Homo sapiens
taccttcatagtgggagttagggctctaacctgtgggttttgggggacacagttcagtctgtagcagtgggacctgagcaggcaggtgggatgcgctgtctgaggctcccactggatgtcaggtcctgggacagaagccctgcgggacatttcggatgyagacagccgtctctgacgccaaaggactgtagatgccgctctgattttgtgtcctagggccgcacacctcaggcagagccctaacggatgggcttttgcgcacaacagatgtcctcctggggctgttgggaattctcagaggcttcgtctgcacagaggatcatggtttccaaagccagatatccctttttacagatgagggacagtgcttggagaacaagtgtcttcagaggcagtgtctagggtctcctgaaatcgggctgctaagtcttttcttgccctgtgggtctccaccccgttctctgccttcgggacagactgtgctgcggcagagaagctcgaggccgaggctgaccgctaaagcagcatct

SEQ ID NO: 65207 - DNA, 682 bp, Homo sapiens
tcatatgccataggtcatgatgaagttgtgttcaggagcccaaggttagatgaaaagaggagtttaggtgagggccacaaagctgctagtgatggaagccagttgcacaggctacagtcttctaaattgtttccataaaagaaacttgtgaattttggtactggaaaccaacaaactgggggaacatgagtggagggagataggaggactgagcctagtttcctgaccagccctcttgcttgatttatgtagagctgtgtgataactaaggcccagattggaatacattttattatttcaaattccagcatgaaagcaaaagtcagtgcattccttcaacccattgcaaatcttcatagcaacagaaataggtgggcctcccaggtatgaatgataaagagccattgagggcattaagacactacccagctgccacgacttttctcagaaaaaccttctgttcctgccctcagtgaggaactccacagtaaactgttctgaacacaagraaaatggaaattcatctcctcaagatttttattttatgacctaaacagagaaccccaggctacttccaagaatgcgtctagatgggtagccaagagctttctagtgatgaattctcagagtagtgctaagagaaacgcaggtgtttctattaatgatgatgggcacatgggca

SEQ ID NO: 65208 - DNA, 1004 bp, Homo sapiens
gtgctttccatatatgaactcacgtggtcctcctaagcactcccataaagtaggtactattactatctctatgtctgttttttatacactctcagcagaaagaaaagccagagcagrggcgttcaggtagaaagaaacaaatcacaaacaccataggatgcagggcctatgaatgggagtatcgtaatatagctaacaaggaggttaggaccagcatatagaagtttggggaaaaggagctatcaaaggcttttgtggggaggaaaacgtttgaagcggtacatcagtaagatgattctggaaataccttaagaatgagatcgatgaaacagacatgacagaatacaagatagtactggcgtcaaataggatagtgacagtggggcaggtaggggaaggagtgtaagaagaggtgtaatcattggaaatggtggctgattaggtgactgacttgagtggaggcaggtggtggtagaaggaagtggagacagtaaaaagggagtgaatatgattctaggattttaagcttggacgtgactggaaggagaggctgttaaccaagacatctaccagagtacccagtgccacgagagaggtgttagttgtgtaagggatgaactataagtgcaggtagggcagggaccacgttacatccagcttttacctccctggtgcttcatgtgcagtgaggttctaaaacagtgtttgttagtagagaagcagagacaggggtgaatggtggtatggtggtggagtagggtgggtgggaaatgggggtgtacagttaaaatattagatagaagaccaatacatgggatttatgtatttaatttgtaagagacattgggaaggagctgcagcagactcaaaatggattaagacttgagtgcctcaactagaaattttccctggtagttaaaacatttaaagggataaaaatagcacaaaaagaaatgaagaaaatcattttcaccaggaaacaaattgcattctagatgactatt

SEQ ID NO: 65209 - DNA, 625 bp, Homo sapiens
cctgcctgtctacccactcatcagaaccagaacctggagtgatcagagactccttctgctctctctccctgctctagacctgccaactcggctgtacactgtagtcactggggagtttttaaaaagacagatgcctggtcccatccccagagattctcctttgattggtttggggagcagcttggacattgggtttcttattttttaattgtcctggtgattgtaatgtacagccaagtttgtacaaaacatgttaaggctacacattcatttccaccaggccttcccttgcttggacttaacaataacctcggggcctacttgagggtggaggctgggaggaggagaggagcagaaaaaataactatcgggtactagtcttagtacctgggtgatgaaataatctgtataataaacgcctgtgacacaagttcacccacataacaaacctgcatctgtaccctgaacctaaaataaaamaccaccacaaaactcttagctgttttctgatgggtttttttgttgttgttgttattgttttttgagacagtctcactctgtcgcctaggctggagtgcagtggcgcaatcatggctcactgcagcctttatctcccgtgctcaag

SEQ ID NO: 65210 - DNA, 1026 bp, Homo sapiens
aggtgggagctgcaagcatatgcggggctgctgctgaaacacaggaggccacgggggtgggcataacaccaggggaaaaacgtgcggccatgccttcgaagtcccagtttttctggtttaaaaaatgcaagaccctacagcactcctggctcaccactatagctcaggttctagcagaggktactgggggcatccccaaaattgagacctcagtgttgtgacacagggaaacgatttcaggtcatatattatgttaaagagttgacaagaaataaaaatcataacacataaaccaaccttatgatctcataaacaagcaaccccctgaagaacacagcaaaccaaagcatcctgtctacctggcaatacgaatttgcttacttcccatttttgataccttctcggccatacattttgtacattctaacatctataaaatggatgtcataacttaattggtagtgttatttttcttagtggtatataaaataatgatgcttcttactaattatggtgttttagatttgatggaacacaccattcctgatattttcaacttaaaatattcaattcatttgctggccaattgaagaccaaaacaattccctatcaccaaagtttagaaaagcttcaactttaacattttctccagaggaaaaaaacagaaatgtaaagaaattacaatgactactgattaaatgtaataaaactgccccctcaaagaggcctagagaattgctgttatttaaaatgactgatgattaatgataagacacatattaaatgaagaggataataagcaagattcaccgatggcttcctaagatattagttaaattttaccaaaggcaatattcattttagatttcctgagagaagtcattcctcatggacagtttttaaagatagctaactttctaacaaagagtgctagagaatgagagtgtaattaaagaatttgcttgttcttatcccctgaattccctcccactccttgaggaataataactcttacaattagacaga

SEQ ID NO: 65211 - DNA, 1382 bp, Homo sapiens
agacgtgtcatttggagttaaagcaatgagagctgaaaaccaatggccagaagcagcttgatgttttcctccccttgggttatgattttctaatagacggaagaagcaagtttgagcagctggggattttttttaaaaaagaaaaaagtgttatataagaatacatttgttttaattaattttggtaagtgctagttttctatttttaaaatttcctgcctataaaaatttcacattaaaaaaaaaaaaacaagacaaaggaacgtagaagagaaacaggtcttctcattaatttagcatgtcactcactaagcttccttcaggcctggatggctgtttstcaacacagtcctgtgtaaacatcttagtggatgtcggggagagcaggcccgaatttatcagcaggaaaggatcaacctacttctggaaataacataatatggtatttttatgtccaactgctctaaaggtgaggtgtactgtagtcagtcaaatattacgctcttctctgaaggagtaatttattcttttcttcataagaataggtcccataaaaggatttctaatatctaaaaaagagaaaaagcaagtagcaaaagaatcaagacaaagaagaattaaaatactcaatatctcccttttaaaatttttgttgacttcatctgaatttctctctttgaaacaatcccccaatgatgctagtgacactacacatagctagctagactagatatagatagatggatggctgttatagaaatcaagggatgataaatactctgtgtacagacaggaaaccctgccatctggcctcaatagtaacaagatcagttcatattatcagtgaccaggaccggatactgcctttcagccacaactgaggagcaggggcaactgctaaaagagaacaagcagaacaaccattaaaagcagaggcaggtccagcgtggtgtttcacacctgtaatcccagaacattgggaggccggggagggcggatcacctgaggtcaggagtttgagatcagcctggccaacatggtgaaaactcatctctactaaagatacaaaagttaccctggtgtaggggcgggcacctgtaatcccagctacttgggaggctgatgcaggagaatcgcttgaacctggcaggtggagggagctgagactgcaccactgcacactaccctgggcgacaaagtaagactccgtctccaaaaaagaaaaaaaaaaaaaggtaaggggcaaaaagatagatcagatacagagcacatatgtattcacaaaattcaagtaagtaaacacctactaggtgcaagacactgtgtactggcttagtaaatatgactaagacatggttactacccgcaaaagctttggatcc

SEQ ID NO: 65212 - DNA, 999 bp, Homo sapiens
gttttttttaaacaaagtgcaggagatttcactacttaagaacacaatgacaacaggaatttattcattttctgatttccaaaatttaaaaacctgaaaatcctcattaactagaagataggattgtatatacccttataaaagttctcatggaaaaaaaaattaaaatgactaggtgactttccagtattatttatttgaatctctcttctttcatttaaaaaaaaaaaaaaaagaaaattaagccatatactacgatgctcagtaagtctttgctagccttatgaaatctttattgattatcctgctagcttgaaagctgtattccattagtgtcacatgtgagtgttgaggtaaagacaagaggaaggatacaaacaagcaccctggtggtctgggactctctttccaacatactctaaaacaaaatatagaggcatcagacatttggagccttcatctagtgaaaattctgcagctccagtaagtgctgcaatgtgcctgtgcaatccacatcgtctgccactcactgattccttccaacgtcttcccacaaaggccttggtgttctcatggctttgtttctacttctggctgtatggtccaatacagtcttctctcaactgttcagaataactggtccaacaaatgacctgtcaatttagtcaaaatacttgctctgagacacgtctgactataacctttgcaccatcctgagtttaaatctcactgaataatatggggacttgacatccacaaggataatgtatttcagtcactctttttaataaaatctggaatgtgggctgtgaaacagcaaaagcttaaactcagttcccagctctgtatagtcccttatccatggaggaatactaggttcccaagaccctccgtggatgcctgaatttgtgggtagtccctgaccatayatacgctatgttttttggatctactgagacagctcctatgtgactgacaggtgtgcagcgactacagtgt

SEQ ID NO: 65213 - DNA, 959 bp, Homo sapiens
gtggagggaaaaaagagggtcagaaaaatatggaaagaccttctggggacatggcctccatttyttagtaagtacaggtttattacatgacagggaacctggttgataagaaataacatttggctaaaaattatcaggtaaagtattaaataatagaagtaggaggtctccccaagagaatattttatagggttatagtttcaaaggatgtgtcatcatggaccttagaatcagaatatctagcgggagggggacttcaaggtcccccaatccagtgatgctgagatatgctggcagagttcagggccaagtgccgtggggcttggggagcctgtatcattctcccgggtgttctgagcactggacactaagccaagcagaaagtgatgacggaaccacagacaggctcagaatggggccaataagggggggcatcgccctccccaaggcagctgtcacgacttgcgttaggacaagcagccagtgtcatcccggggccttaggatttgcagtgacatcaaaatcaattcagtcccagttttaatcatcatggacatgtgaggactgtcatttttgtcactgagcaagtttaaatcgattccacatatatttattgagcatccactatgtagcaggcattgaggctgggccctggcagtgagcaagacagatgcagccccgcccccggggagccatgttgtaggctgatacagcaccagcaagaggaaatacagcactctgggggcccagagcgagggaaggtgagcctggctgagaatgtgagggagaagctttcctgagaacagtaaagtctaagtcagtttttctcaaccagggtctatcttgccccaggggacacttgccaatgtttggaggcatttctagttgggacaatgggagggtgcgggggagagcacccccagcatctagtggggacaggccagggatgctgctatgca

SEQ ID NO: 65214 - DNA, 959 bp, Homo sapiens
gtggagggaaaaaagagggtcagaaaaatatggaaagaccttctggggacatggcctccattttttagtaagtacaggtttattacatgacagggaacctggttgataagaaataacatttggctaaaaattatcaggtaaagtattaaataatagaagtaggaggtctccccaagagaatattttatagggttatagtttcaaaggatgtgtcatcatggaccttagaatcagaatatctagcgggagggggacttcarggtcccccaatccagtgatgctgagatatgctggcagagttcagggccaagtgccgtggggcttggggagcctgtatcattctcccgggtgttctgagcactggacactaagccaagcagaaagtgatgacggaaccacagacaggctcagaatggggccaataagggggggcatcgccctccccaaggcagctgtcacgacttgcgttaggacaagcagccagtgtcatcccggggccttaggatttgcagtgacatcaaaatcaattcagtcccagttttaatcatcatggacatgtgaggactgtcatttttgtcactgagcaagtttaaatcgattccacatatatttattgagcatccactatgtagcaggcattgaggctgggccctggcagtgagcaagacagatgcagccccgcccccggggagccatgttgtaggctgatacagcaccagcaagaggaaatacagcactctgggggcccagagcgagggaaggtgagcctggctgagaatgtgagggagaagctttcctgagaacagtaaagtctaagtcagtttttctcaaccagggtctatcttgccccaggggacacttgccaatgtttggaggcatttctagttgggacaatgggagggtgcgggggagagcacccccagcatctagtggggacaggccagggatgctgctatgca

SEQ ID NO: 65215 - DNA, 959 bp, Homo sapiens
gtggagggaaaaaagagggtcagaaaaatatggaaagaccttctggggacatggcctccattttttagtaagtacaggtttattacatgacagggaacctggttgataagaaataacatttggctaaaaattatcaggtaaagtattaaataatagaagtaggaggtctccccaagagaatattttatagggttatagtttcaaaggatgtgtcatcatggaccttagaatcagaatatctagcgggagggggacttcaaggtcccccaatccagtgatgctgagatatgctggcagagttcagggccaagtgccgtggggcttggggagcctgtatcattctcccgggtgttctgagcactggacactaagccaagcagaaagtgatgayggaaccacagacaggctcagaatggggccaataagggggggcatcgccctccccaaggcagctgtcacgacttgcgttaggacaagcagccagtgtcatcccggggccttaggatttgcagtgacatcaaaatcaattcagtcccagttttaatcatcatggacatgtgaggactgtcatttttgtcactgagcaagtttaaatcgattccacatatatttattgagcatccactatgtagcaggcattgaggctgggccctggcagtgagcaagacagatgcagccccgcccccggggagccatgttgtaggctgatacagcaccagcaagaggaaatacagcactctgggggcccagagcgagggaaggtgagcctggctgagaatgtgagggagaagctttcctgagaacagtaaagtctaagtcagtttttctcaaccagggtctatcttgccccaggggacacttgccaatgtttggaggcatttctagttgggacaatgggagggtgcgggggagagcacccccagcatctagtggggacaggccagggatgctgctatgca

SEQ ID NO: 65216 - DNA, 1031 bp, Homo sapiens
tgtaacacttgagtatgtacagcccttgccatttgaacaccatgtactcctagagactctaggagagtgaaatgccccactatggactctgaataacataagtcatgatagtaaagctataacattacatacaagcaaagccatggtaagccttcataacttttgagatagaaaagcttgcccaggtcagagatgcataacaatataactgcagtttcagccttgctttgaattctgactgctatcttgggaaagtcaacccctttgacccacatggtaaaaggaggacagtgacagtcacttcacaggtttaggatgagaattgcaggatatgagtgatgctccatgcaacartggacaattacactgagagcaacatgggtgccaagagagattttggtgatcagcacttacctcccataagcaggagagcatcaaaaaatagttaggaaacaaatggaactagccaaactcattatttcattaatgagtaaagtatgcctcaaaggcttcacaatgctagttcttgccagacccagaactcatttctaggtttcttttcttttttttaaagatggggtctgggcttggcgcagtggctcatgcctgtaatcccaacaccttgggaggctgaggcgggtggatcagttgaggtcaagagctcgattccagcctgggcaatatggagaaaccccatctctaccaaaaatacaaaaaaaaaaaaaaaaaaatagccagtcatggtagcgcatacctgcagtcccagctactaggaaggctgagtcaagaggctctcttgcacccgggagacggaggttgcagtgagccgagatcacactactgcattccagcctgggcaacagagcgagactccaactgaaaaaaaaaaaaaaagaaaaaaagatggggtctggctctgtcattcaggcaggagtgcagtggcgtgatcacagcacaggctcgaactcctggactcaattgatcctctcacctctgcctcccaagtagaagtagctgggactatagacacc

SEQ ID NO: 65217 - DNA, 1031 bp, Homo sapiens
tgtaacacttgagtatgtacagcccttgccatttgaacaccatgtactcctagagactctaggagagtgaaatgccccactatggactctgaataacataagtcatgatagtaaagctataacattacatacaagcaaagccatggtaagccttcataacttttgagatagaaaagcttgcccaggtcagagatgcataacaatataactgcagtttcagccttgctttgaattctgactgctatcttgggaaagtcaacccctttgacccacatggtaaaaggaggacagtgacagtcacttcacaggtttaggatgagaattgcaggatatgagtgatgctccatgcaacaatggacaattacactgagagcaacatgggtgccaagagagattttggtgatcagcacttacctcccataagcaggagagcatcaaaaaatagttaggaaacaaatggaactagccaaactcattatttcattaatgagtaaagtatgcctcaaaggcttcacaatgctagttcttgccagacccagaactcatttctaggtttcttttcttttttttaaagatggggtctgggcttggcgcagtggctcatgcctgtaatcccaacaccttgggaggctgaggcgggtggatcagttgaggtcaagagctcgattccagcctgggcaatatggagaaaccccatctctaccaaaaatmcaaaaaaaaaaaaaaaaaaatagccagtcatggtagcgcatacctgcagtcccagctactaggaaggctgagtcaagaggctctcttgcacccgggagacggaggttgcagtgagccgagatcacactactgcattccagcctgggcaacagagcgagactccaactgaaaaaaaaaaaaaaagaaaaaaagatggggtctggctctgtcattcaggcaggagtgcagtggcgtgatcacagcacaggctcgaactcctggactcaattgatcctctcacctctgcctcccaagtagaagtagctgggactatagacacc

SEQ ID NO: 65218 - DNA, 1031 bp, Homo sapiens
tgtaacacttgagtatgtacagcccttgccatttgaacaccatgtactcctagagactctaggagagtgaaatgccccactatggactctgaataacataagtcatgatagtaaagctataacattacatacaagcaaagccatggtaagccttcataacttttgagatagaaaagcttgcccaggtcagagatgcataacaatataactgcagtttcagccttgctttgaattctgactgctatcttgggaaagtcaacccctttgacccacatggtaaaaggaggacagtgacagtcacttcacaggtttaggatgagaattgcaggatatgagtgatgctccatgcaacaatggacaattacactgagagcaacatgggtgccaagagagattttggtgatcagcacttacctcccataagcaggagagcatcaaaaaatagttaggaaacaaatggaactagccaaactcattatttcattaatgagtaaagtatgcctcaaaggcttcacaatgctagttcttgccagacccagaactcatttctaggtttcttttcttttttttaaagatggggtctgggcttggcgcagtggctcatgcctgtaatcccaacaccttgggaggctgaggcgggtggatcagttgaggtcaagagctcgattccagcctgggcaatatggagaaaccccatctctaccaaaaatacaaaaaaaaaaaaaaaaaaatagccagtcatggtagcgcatacctgcagtcccagctactaggaaggctgagtcaagaggctctcttgcacccgggagacggaggttgcagtgagccgagatcacactactgcattccagcctgggcaacagagcgagactccaactgaaaaaaaaaaaaaaaraaaaaaagatggggtctggctctgtcattcaggcaggagtgcagtggcgtgatcacagcacaggctcgaactcctggactcaattgatcctctcacctctgcctcccaagtagaagtagctgggactatagacacc

SEQ ID NO: 65219 - DNA, 934 bp, Homo sapiens
cataaaaatgtcctaaaatgcccgtgtcagtgtgtgcatgtctcaatataccaaagggttacaagagacggcggtagctccccggggtgtggagaggcctccaagctctttgtagattaggtggcactgttgttatagcaaccaaggaccagcactttctgctgatgtgtaagtgtgtgtggcctcaagcacctgcccaactgtgtctttcatgttccacactcattaaaagccgtgatgtggctaaagtcgctgaaattggaagtgtgcttgggtttgggattgttcttcggcctggttgctgggcgttctgtgggcatgttcacgagggcagtgttctccagcccttcctgggggaatggcaccagggtcctggcctgtgctgggcaccatgagtttgaagtcccgcagtgtgagttttcatagcccatcctcaaaaggagagtgagctgtgaagtttcctttgtgaaccgtgttttggtgacagtttgyaagtttaatgctggctggtgggggccacggagctggcctcggctccagggtcttgggccagttgctagagagatatgcagaaatcaagtacataagtgctagtttgtgtatgtgttgcagcaggccattcttgtcctcttttgttaccagagtgtctttggggaagtgcgctagctgctttcataccagtattctagctctgtgacaaatgtcttgggaagaattctgctctctggtaggtggatgattttgcgttatttcagcgccattagtcagagcaacttgtgcctccataatgggaacgctcccgttctatggggtctgtttgtgtgtctggcttctcagtgttttgcaggcacggacgggacacagagtgctccattcacctgttaacaaaataatgaaaaatccctgctagcttggaactaagagttaatgaaat

SEQ ID NO: 65220 - DNA, 934 bp, Homo sapiens
cataaaaatgtcctaaaatgcccgtgtcagtgtgtgcatgtctcaatataccaaagggttacaagagacggcggtagctccccggggtgtggagaggcctccaagctctttgtagattaggtggcactgttgttatagcaaccaaggaccagcactttctgctgatgtgtaagtgtgtgtggcctcaagcacctgcccaactgtgtctttcatgttccacactcattaaaagccgtgatgtggctaaagtcgctgaaattggaagtgtgcttgggtttgggattgttcttcggcctggttgctgggcgttctgtgggcatgttcacgagggcagtgttctccagcccttcctgggggaatggcaccagggtcctggcctgtgctgggcaccatgagtttgaagtcccgcagtgtgagttttcatagcccatcctcaaaaggagagtgagctgtgaagtttcctttgtgaaccgtgttttggtgacagtttgcaagtttaatgctggctggtgggggccacggagctggcctcggctccagggtcttgggccagttgctagagagatatgcagaaatcaagtacataagtgctagtttgtgtrtgtgttgcagcaggccattcttgtcctcttttgttaccagagtgtctttggggaagtgcgctagctgctttcataccagtattctagctctgtgacaaatgtcttgggaagaattctgctctctggtaggtggatgattttgcgttatttcagcgccattagtcagagcaacttgtgcctccataatgggaacgctcccgttctatggggtctgtttgtgtgtctggcttctcagtgttttgcaggcacggacgggacacagagtgctccattcacctgttaacaaaataatgaaaaatccctgctagcttggaactaagagttaatgaaat

SEQ ID NO: 65221 - DNA, 835 bp, Homo sapiens
acactgaccttgggtcaccttggctacatactgcatgctatcaacacctcacagattgctgtttcattttaaaatctcttataagcatgaaaagtatttaaaatcactgtgatttaggatattgttgaacttgtcctaatttggrggggagaattgttcttttccggatataactctcacctctgttatacgaagtcaagttctggctcctcagctttctgcaagaagtgtgagccaatatcttcttttaaatgaaaataatatccagaattatatttaagctcttctgaagacagcagctggaagaattgaaattgtcttataaaatatgttacctgagaaaaatatgcaaattattctatttcattgtaagtcccatttcatatttctataattttttccattctccttttgtttttttcttgagtggaaaaaatcccttaaagtggaaaggtacatataaggttaatgaattgcagaaaggacattggcagctgcagctcttctgaattgtagtcagtcagtgcagccttgcattcttctaaacaaaatcctgcttccgtgatttcgcctgctatgtatcactttatttccttcatattccttctgtgaagaaatgttgagcaaccaagagaaagacttcagaagaaaaaaagatctttttaatgatgcagactaagaaggaaatgacatctctcctgtatgtcagcctcttggatgtaacacgctgctgagctgccttagctgtgattataaactacacggtatctctatctgactgatgtggcaacctgagaaaatcatgttctaggcttcataatgaagacaatatgca

SEQ ID NO: 65222 - DNA, 774 bp, Homo sapiens
gtggaccgggagcctctgggcggccgacaatgggaaggcccctgacctgggagtctgggggccatcactgtggcagccccatgccctctgggaaggtcctctgctctctgggtggggtccgtgggactgtgttatgagcaggcccctgatggcgggtggggtcctgtccctccgttcctacccagccacgggtggcagttctgtcttcctcctgcatcagccgacagccccttcccaggagctctgagtccgcctgctgctccggggccgctggggtgaggacggggtgaagaggcgcggccctgtctataccagcaccgccactgcccactggggcccacatcccgcccactgggaccgacmtcccgcccactggggcccacatcccgcccactggggcccacatcccgcccactggggcccacatcccacccacggcggccagggacagacgtccttcctgtgtcttgtgtcccttcaccactaccagcccggcacgtcctttgcccattctcactccgacactgacctgagatggggctgccccacacccgggcacacacccgggcacgcacctgggaaggcctggatcctgttggctgggaagaagtgggcaggtgggctgtggagtgggcagtgctgtttgcattgctgctgatcagaggtgcctcctgctgctgtgtgaggaggccgggcctccccggagtctctacgaggtgctctcagagagattcgaggggccccgggcctctggcttctgtgtggggtgatgtg

SEQ ID NO: 65223 - DNA, 774 bp, Homo sapiens
gtggaccgggagcctctgggcggccgacaatgggaaggcccctgacctgggagtctgggggccatcactgtggcagccccatgccctctgggaaggtcctctgctctctgggtggggtccgtgggactgtgttatgagcaggcccctgatggcgggtggggtcctgtccctccgttcctacccagccacgggtggcagttctgtcttcctcctgcatcagccgacagccccttcccaggagctctgagtccgcctgctgctccggggccgctggggtgaggacggggtgaagaggcgcggccctgtctataccagcaccgccactgcccactggggcccacatcccgcccactgggaccgacawcccgcccactggggcccacatcccgcccactggggcccacatcccgcccactggggcccacatcccacccacggcggccagggacagacgtccttcctgtgtcttgtgtcccttcaccactaccagcccggcacgtcctttgcccattctcactccgacactgacctgagatggggctgccccacacccgggcacacacccgggcacgcacctgggaaggcctggatcctgttggctgggaagaagtgggcaggtgggctgtggagtgggcagtgctgtttgcattgctgctgatcagaggtgcctcctgctgctgtgtgaggaggccgggcctccccggagtctctacgaggtgctctcagagagattcgaggggccccgggcctctggcttctgtgtggggtgatgtg

SEQ ID NO: 65224 - DNA, 774 bp, Homo sapiens
gtggaccgggagcctctgggcggccgacaatgggaaggcccctgacctgggagtctgggggccatcactgtggcagccccatgccctctgggaaggtcctctgctctctgggtggggtccgtgggactgtgttatgagcaggcccctgatggcgggtggggtcctgtccctccgttcctacccagccacgggtggcagttctgtcttcctcctgcatcagccgacagccccttcccaggagctctgagtccgcctgctgctccggggccgctggggtgaggacggggtgaagaggcgcggccctgtctataccagcaccgccactgcccactggggcccacatcccgcccactgggaccgacatcycgcccactggggcccacatcccgcccactggggcccacatcccgcccactggggcccacatcccacccacggcggccagggacagacgtccttcctgtgtcttgtgtcccttcaccactaccagcccggcacgtcctttgcccattctcactccgacactgacctgagatggggctgccccacacccgggcacacacccgggcacgcacctgggaaggcctggatcctgttggctgggaagaagtgggcaggtgggctgtggagtgggcagtgctgtttgcattgctgctgatcagaggtgcctcctgctgctgtgtgaggaggccgggcctccccggagtctctacgaggtgctctcagagagattcgaggggccccgggcctctggcttctgtgtggggtgatgtg

SEQ ID NO: 65225 - DNA, 774 bp, Homo sapiens
gtggaccgggagcctctgggcggccgacaatgggaaggcccctgacctgggagtctgggggccatcactgtggcagccccatgccctctgggaaggtcctctgctctctgggtggggtccgtgggactgtgttatgagcaggcccctgatggcgggtggggtcctgtccctccgttcctacccagccacgggtggcagttctgtcttcctcctgcatcagccgacagccccttcccaggagctctgagtccgcctgctgctccggggccgctggggtgaggacggggtgaagaggcgcggccctgtctataccagcaccgccactgcccactggggcccacatcccgcccactgggaccgacatcccgcccrctggggcccacatcccgcccactggggcccacatcccgcccactggggcccacatcccacccacggcggccagggacagacgtccttcctgtgtcttgtgtcccttcaccactaccagcccggcacgtcctttgcccattctcactccgacactgacctgagatggggctgccccacacccgggcacacacccgggcacgcacctgggaaggcctggatcctgttggctgggaagaagtgggcaggtgggctgtggagtgggcagtgctgtttgcattgctgctgatcagaggtgcctcctgctgctgtgtgaggaggccgggcctccccggagtctctacgaggtgctctcagagagattcgaggggccccgggcctctggcttctgtgtggggtgatgtg

SEQ ID NO: 65226 - DNA, 672 bp, Homo sapiens
tgggcaaggtgaaagatgatgggggtttccaagtcctgttcagcaaacatttactgagtaacttttaagtatacatgggcccttgaatgacagtcttagtctgggggttggaattcaaacactctaaactataaataaatgataaaamcattccagagcatacaccaacataatgtggacttccaggaattttttttttatcaaccccgttcatgatattacctggaagcagagtcctcaaattgaagcctaggtctgccccacctatcttggtcaccttggagaacttgctcatcatcttggaacgacttgcctttaaagatgtatgtgcctaactgatctccaaggtctcctgcaaatttataattcagttccctctagtgcaatgaattaaataattatccacttcagttcttgcccaacagaatttctgtgtaggcttggtggtcatttgcagaggggctcattgtatcaaccagtgtggaggaaaggagccaggtcctcggggggtccctcctggccccatttgcccatttgacagccagccctttggtcaaacaggactgtcagcatctgcagtaaataatttttttgttttttttttttttgagatggagtcttgctctgtcaccaggctggagtgcagtggcacagtctcagttcactgcaacc

SEQ ID NO: 65227 - DNA, 1034 bp, Homo sapiens
cagggagaaagagacctgggccttgggggcgacccacccaatcacctgggaacaacaacaggtcctgattctttttcttcttcttgttctttttttttgaaacagagtttgagacagagccttgctctgtcacccaggctggagtgcaatggcatgatctcagctcactgtaacctctgcctcccgggttcaagcaactctcgtgccttagcctcccaagtagtgggactacaggcctgagccaccacacccagctaatttttgtatttttagtagagatggggttttaccatgttgtccaggttggtctcaaactcctggcctcaagtgatccacctgcctcggcctcccaaagtgctgggtttacaggtgtgagccaccatgtccagcccctgattcttactggaagcaagggggcacaaatggtacaaaatttttaaacagcagaatrtatcactattagctttataacttccccaactgctttcactctttgaaagttattatccttccagaggctcatgtactattctacgttctgctaatttttctatgaatttttaaacatatttgactttaattttcttttagttcacaggataggatgtgtatctgaaattaatttttctctaatgtgctatatctcaaaatcagctattaatcctcccccactgctttgtactgcctgttttactgtatattccattctgactcaaaattcagtctatttgcattagtttaacaaacacatgctgagtcccaccacgtgcggggcactattctgggtgctgaagatgcaacagtgaacagcttggctgtcacatctgtacttacagaggattctcgttggaggagacaagataaacaaggaaataaactatcatctatcacatggtgatcaatttcatgaagaaaaataaaacaaagaaggggaatagaaaattccagccaggtggtgaggtgcaacctaaagccaggtggttagggaaggccttaccaagaaggggacattgacaaagacccccagggatgat

SEQ ID NO: 65228 - DNA, 1034 bp, Homo sapiens
cagggagaaagagacctgggccttgggggcgacccacccaatcacctgggaacaacaacaggtcctgattctttttcttcttcttgttctttttttttgaaacagagtttgagacagagccttgctctgtcacccaggctggagtgcaatggcatgatctcagctcactgtaacctctgcctcccgggttcaagcaactctcgtgccttagcctcccaagtagtgggactacaggcctgagccaccacacccagctaatttttgtatttttagtagagatggggttttaccatgttgtccaggttggtctcaaactcctggcctcaagtgatccacctgcctcggcctcccaaagtgctgggtttacaggtgtgagccaccatgtccagcccctgattcttactggaagcaagggggcacaaatggtacaaaatttttaaacagcagaatgtatcactattagctttataacttccccaactgctttcactctttgaaagttattatccttccagaggctcatgtactattctacgttctgctaatttttctatgaatttttaaacatatttgactttaattttcttttagttcacaggataggatgtgtatctgaaattaatttttctctaatgtgctatatctcaaaatcagctattaatcctcccccactgctttgtactgcctgttttactgtatattccattctgactcaaaattcagtctatttgcattagtttaacaaacacatgctgagtcccaccacgtgcggggcactattctgggtgctgaagatgcaacagtgaacagcttggctgtcacatctgtacttacagaggattctcgttggaggagacaagataaacaaggaaataaactatcatctatcacatggtgatcaatttcatgaagraaaataaaacaaagaaggggaatagaaaattccagccaggtggtgaggtgcaacctaaagccaggtggttagggaaggccttaccaagaaggggacattgacaaagacccccagggatgat

SEQ ID NO: 65229 - DNA, 604 bp, Homo sapiens
cacaattagaagtgacaaagagggcattaccactgatcccacaggaaaaaatatcagakactactatgaacacctctatgcacacaaactaaaaaatctagaagaaatggataatttcctagacacatacaacctcccaagactgaaccaggaggaaactgaatccctgaacaaaccaataatgagttccaaaattgaatcagtaataaaaagcttaccaaccaaaacaaagtctgggaccagacgaatttacagctgaattctaccagatgtacaaagaaaagctgataccattcctactgaaactattctaaaaaactgagaaggagtgatatggtttatctctgtgacctcaaccaaatctcatctcaaactgtaatccccataatccccacatgatgctaaccttatagaatgaggtgggaggagtcccttcttgtattagtccattgtcacactgctatagacatacatgaggctaggtaatttataaaggaaggggtttaatttactcacagttctgcatggcttgggaggcctcaggaaacttgcaatcatggcaggaggggaagcagtcaccttcttcacaaggctgcaggagaga

SEQ ID NO: 65230 - DNA, 634 bp, Homo sapiens
gggttttcaccgaggacgacatgctgaagccacagccacgaacgattttacctccaggctgggcagcatgggtcaccgtgaccgcccgggggtggggccgcagcagggactccgggcgccaggaacgaggccaccagggcctctcccaggcaaagcgtagaagcagacgctaaaatattaagaaaaggaaacacatcacccgttttgaacatttaatgtcctcaaaggtttcaaccaccaatttaaaatcactttgaaaatgcaattgggccgggcayggtggctcacacctgtaatcccagcactttgggaggccgaggcaggtggatcaccttaggtcaggagttcgagaccaccctggccaacatgacgaaaccccgtctctactaaaaatataaaaactagcagggcatggtggccggcgcctgtaatcccagctactcgggaggctgaggcagaagaattgcttgaacccaggagacggaggttgcagtgagccgacatgataccactgcactccagcctcagtgacagagtgagactctgtctcaagaaaagaaaaaaagaaaatgcaatcgttcactgtccaaagatttttagcaattgaatcccgtttttctctgcgcgtgttggc

SEQ ID NO: 65231 - DNA, 916 bp, Homo sapiens
gcatattaatgaatttctatccacatgacgtggagtcagttaggaatcagttaggacgccctcgctgtgtgggagactgatgggtccaggcgctgtgcaaaccccgcctccaaagtgcatccttggctcactgggaccttccgggttgtgctgctcttgcttcacagcctctctgggtctccctgccgtctgctgacctcggggcagggtctacccaggctgagcggcccatgggctgtgggattcctttcctctgccttcaggtcctggatgatgtagaaggcaggaaggaaagcagtcatggctagctctgtcctgcccccttcggggtcccccccggcccacaggctcctccttgtcccccagccagcctcagtctgggtctgggctcccgctggggaggagggtgagacctgccggcccaaaggagctgaagtttcccaaggggcgttgaggacagcagggaagtgtggggtgtgaactgaggccccagagaagggtctgtgccaaggccccatgggtggggaggaagaaggaagcgtccccacctggagacccagcctgcaggccactcggccacctgcgcagaagtaggggagcagcagccgctcatgcccctgcagtttgtcctcatcagcaggtggggaaactgaggccggggagttctccaggccaaggtcactcacgggcaagttcccgcagcctttggaccctccatacacgtcagggccgctcatgctttcctgggcccttcactggtttggaggaagcttcctgttgcccagagcgcactgcctgtctctgagtgtatgtgtctcagtggygtccatgtgtatttttctctgtgtgtatctgtgtgagtctgtgtgtgtggtgtgtttgtgtctgagtgtgtggtgttagcgtgtctcagtgg

SEQ ID NO: 65232 - DNA, 1286 bp, Homo sapiens
agttgtcgtgcaggtgtttcaccccccgcagcagctggatcatcagggtcttcacctcccctgggagggagggaggctcccatgtggacccggccgccccaagcccagggcactcagggtggcccgctcgcctcggcagcaacagaggcttctcagggctttccctgtggatgcagctggccctccctgcagcactgtcaccgcgggggtgaccaggacactgcccccacttgtacgcagacaggaccccggggcgcggctgtacctggcaggaagggctgtttcatggtctccatcaggctcttgaggtcgtgctccacgtagttcatcacgatgtagatcttgtccatgttgctgcccaccacaatctcctgcagggcacggctctgtgggtgctgggcacctccaggcccccacccacccctgcacccgggcgcagatgctgagggacagtaaggacctccggtgccacccgggaggcaaatacttgcttctgtgtggtctgtgaagggctccactaagtgcaggagagtgtaggaagcacccggccccaggacagcacggggccctgtcggaaaagccttccacccggggccaggcgtggtggggccatgctcactctaacggtgacaatgttgggatgctgggccttgaggatggtgttgatctccctcagggacgtgatcgggaagccctccttctccttctccatcttcagccgctttagagccacaatttcatctgtgaagaaaatacagacggcactgagaggcattctcaaagtcacggtaccaacagtggactcgttcagtgaggaccgcaggcagtgcccaaagcgccagcatttcacggaggggggtctcgttctaggtgggggcacgtgggcaccaggagaacgccccagctgaggtctsggcaacacccacggcttcccactcaacacaccacagacactcacagccacctacagccacctgggatcccagcggccacgccgactccacatcgacttccccaacagagccggcctcacctgggatcccagtggccgactcccaacagagttcccggctcacacacctgcttgggtgggacgctgggaacgcaaacctgcacaccagccccggcacagaccactccacgcgctgggcctcggccctgtggggcaggccgcctgctactgcaagggagtggcaaagccccagggccaggctgacctctggcttctagaggtgctgaggggtccaacctccagtagctgctcaggtgaagcgggcccaggtgca

SEQ ID NO: 65233 - DNA, 1263 bp, Homo sapiens
agtgcaatggcacgatcttggctcactgcaacctccgcctctggggttcaaacaattctcctgcctcagcctcctgagtagctgagattacaggcacccaccatcacacccagctaatttttgtatttttggtagagacagggtttcatcatgttggccaggctggtctcgaactcctggccttgtgatccgccatctgcagcctcccaaagtgctgggattagaggcctgagctaccgcagccggtcttctattagtttttgaggaaagcagaaaaaaagaaatggaaacccagggaaagtcacgtgacaaaacatcttcgcagcgcagtgagcacacacctggcctgtcctccacacacaggtcagcggttttatagaagcggctgaagcaggtgtagtagcccacgcctatattctcgacactacaggaggctgagtgggaaggattgcttgagccgaggagttcaagaccagcctgggcaacaaagcgagagcccagctcaacaaaaaaatagccaggcatggtggcacgtgcctgtggttccagccacatgggaggctgaggtggatcacttgagcccaggaagtcgaggctgcagtgagccaagatcatgccactgtactccagcctgggtgacagacagagcaagactgtctcaaaaaaataaaaaggttacttgtgggttaaaaagcctcacttcggtccatcatcatggcagacttttttgagtaggtagaagttaatgagtcagaattattgctctgtttctgaacgattttatcttcaggaggggctatttttgtatttcccaggtgagaagccaaatggaaarccagtgaagtgaccatgggtgccaaaggcctaaagagcaggcagggaaatgagactcgggaccactggagccccatgctgcctctgacaagccctggagctctgggtctcaaaggctggctggcaacaggctgcaccgggcatgggaatccgccggctgcgagattgggggtaaagagctcagacatggtcagaagcctctgcctaacacacggctccagtagccactcctcaggcctcctgcgccctcgggggtgcgtgacacaggaggatgagttgagctggctggtggccccagtgtgccgtactactgtcccttggggagagtgggacagggtgggcgcctgacacacaccacgcgccccagaaacattcagtgtggacgtttcctttttcagcaaggacggcgcccaggtaaacgccacgtaa

SEQ ID NO: 65234 - DNA, 278 bp, Homo sapiens
tatacttgcatctaaggtggataacttctccccttaggggagaatggctggaagttatccaccttagatgcaagtataaaacagaccaatatcgaagaataactcccatcttttggaaaacttgtctaatgcctctttgcacctttaaccttcttaacaccccgaattaagctaagtcattcatccattagttgtatgcacagcctgttgtgcagtcgtctatgtttttacttcttggtattctctgagtaagaggaaacstctgtgaccttccactg

SEQ ID NO: 65235 - DNA, 397 bp, Homo sapiens
ggggtaagaatgtgattctgccatcccacttaatttggggcacccaacctcccagcgacacacagagttggaaatggcccttttcagtgagaatctaggttgttccttttctgagaatcatcagctccactgaatctctagagggatcgggctccatgctgatgaccctcagcaagaatacaaaccataacagtgattgttctatgactcaatttcttcatctatgaagtaaagatacgaatagtatctatgtctagcattgggtaatgaatgaatggcaattccttttataaagcacataacacaatggctarcaaatggcaaaccatcatcataatagttttaattataaatatagctaagatttaggaagcctgtactataaaagtgagatcca

SEQ ID NO: 65236 - DNA, 397 bp, Homo sapiens
ggggtaagaatgtgattctgccatcccacttaatttggggcacccaacctcccagcgacacacagagttggaaatggcccttttcagtgagaatctaggttgttccttttctgagaatcatcagctccactgaatctctagagggatcgggctccatgctgatgaccctcagcaagaatacaaaccataacagtgattgttctatgactcaatttcttcatctatgaagtaaagatacgaatagtatctatgtctagcattgggtaatgaatgaatggcaattccttttataaagcacataacacaatggctaacamatggcaaaccatcatcataatagttttaattataaatatagctaagatttaggaagcctgtactataaaagtgagatcca

SEQ ID NO: 65237 - DNA, 947 bp, Homo sapiens
acataacgcattgagtgtcatgcctggcccgtaagagattcttactggtgtcatttatttaagctattagccacttcgtgaatgtttactgaatgagtaaagcagaatgcaggggcattgctgctggtgtagccccaatgtaattagttgtaaactgaggatgtgaaaaaggaaaggaaaggaaaagaaaagggaaatcggtcataccaataaagaccaactgagatccataattcacaaatgacttggagacatcgattgtgtccaatcagtcatcaggtcagtcggtcaccagatcattatatgagtagctctactcattcctacagttgcccacactggttgggacctcaacatttctcatctggacttttgcagtgatttcctaattgctctcccttcctccagacctgtgcccatcaatttccttcattctctctattgctaatacagggttctttctattgtgtctcttctgctaaaaatatctcaggaactccccattgttttcacatttaagccagactcctttgcaggtagtaaataagyctttgtctttcagccttctgtctcttcaaatctctttgtgcacactctactccaggcataaaaagccttttccaacatagttttctaaaaaatgcttgggctttgcactgtctgtttgcttgatctaggattgaatatttgtcccacctgtggggtgacactgggcaagttgtattagattcttgtgcctcattagcctcaacatagttttaatagagtttttataacagggttttaatagtaatgcttatttcataaggttacagtgaagataaatgagataaatgagttattataggcagtgagctcagtctaatgtcttgtacataattgtgcattataaatcttatctatttcattatccatcacagaagtattgttgttgccacatgttactt

SEQ ID NO: 65238 - DNA, 734 bp, Homo sapiens
agagagtggggaagaaagaaagaagaaagctaggaaaggaagaaggggagaattcaagaaggaggagaagagaggagaacttcaccctcaagcattagtgatgcacttgtgtgtactttaaatcaactgagtagcaacctgtgttattttcatctactttgtatgtttagtcatctttaaattttattttgaactcaattcagacttacagaaaagttgcaaaaatgatacagtttccctcatggagcttctactaatgccatcattgtacataaccatagtatgatgatcagaatcaagaaattaacactggtacrgtactattaactaaattgacttctatatttgaatttcactaagttttcttctactgtcctttcagttccaggatgctatccaggatgttaccttgggattggttgttacttccccttagtcttctgcaatctgtaagagtttctcaatctttcctcctcttccacagccttcacccttttaaagatcattgactggttgtttcaagtgttccttaacttggagttaacttaaattgaagttaatttaaataaatttgaacaggttttttattgcatggctgaaatacacaaatcatttttactttttcctaatttggatttgggcagcattttctagtcattgagctaaagtcatgcatctttggcaagaatatcacagagatgtgtgggcccttctcagtgtatcatatcatggga

SEQ ID NO: 65239 - DNA, 613 bp, Homo sapiens
tgtttttgctattgcaagtctaatttttaaaaagtcatttgttaaactccagtgttattcctccaaaaatattttctagttttgaatgactagmacaataaaagggtgggaggtgattttacaactggaaaaataactcaacatgaataaaaggctgcctttgtaaatctgtcgttctgataatagaacagagcagcttaatgatagccagttatacttactgaaacatgaaaagttaaatatcattgtgttactagattatttgttacaaatatgagtataaatataaatgcaatggcagcactgcattcaggtggtggtgtatggtgttgggtggctgcccagataacctacatcaacaattctcaatcccagctatgtaatataatcaaggcactcctaaaatatgtatcggtacctgaacatcacccttcggagattctgatccaattgatctccagtgaaggagagtattcatacattttaaactcacagtttttttatgaaaagacttatgggttttttggttatcttaaaaatgagaaaataattaacatagagatctttttatctccgaaaatatgatcgtgggtagtagagtcactttgaagac

SEQ ID NO: 65240 - DNA, 613 bp, Homo sapiens
tgtttttgctattgcaagtctaatttttaaaaagtcatttgttaaactccagtgttattcctccaaaaatattttctagttttgaatgactagcacaataaaagggtgggaggtgattttacaactggaaaaataactcaacatgaataaaaggctgcctttgtaaatctgtcgttctgataatagaacagagcagcttaatgatagccagttatacttactgaaayatgaaaagttaaatatcattgtgttactagattatttgttacaaatatgagtataaatataaatgcaatggcagcactgcattcaggtggtggtgtatggtgttgggtggctgcccagataacctacatcaacaattctcaatcccagctatgtaatataatcaaggcactcctaaaatatgtatcggtacctgaacatcacccttcggagattctgatccaattgatctccagtgaaggagagtattcatacattttaaactcacagtttttttatgaaaagacttatgggttttttggttatcttaaaaatgagaaaataattaacatagagatctttttatctccgaaaatatgatcgtgggtagtagagtcactttgaagac

SEQ ID NO: 65241 - DNA, 974 bp, Homo sapiens
tactggaaaaataaatctgaaaaaaaggagctaaaatatcttctacaaattcaagtctaagtaaagtgccactgagtggcaacagagaggggcaccatcaatgtaaaacatgacatgctcatattttgtttattaaaaactctcttttgtctttttctatattgtaagctttaaacttgcatctccgtccccctcttagtgatcactgagattccagcacctgtccttgaaactataaattctactcactgttggtgaagtaaatttcaacaaggagaaaatgttccccgctcccatgcagtttgtgaggaaagcaggtaatattcaggttgataaaactattcttttgaagattcatgctaacaaagaagttttgtaaaatacccagacttcaaagtttgttgctctgccctgtgaagttaaccttaaccttcttgaggtctgtaattccacttggttgtcctatttattatatttgccatattttatcttttctcaaagataaaaaaccagatggcaatcactggatcttcccactcctcccataaaaacagaacaaacaagtatgatgaccccagaggtttcttatctaaaccaacattggacacatttaaattaataatgagtattaagaaaatattgatacattattattttataaatatttcttctactgtcctccatcctaccctgactctgtgaagaaaatgtactttgttcaagacttcagataaatctgcattcccatccttgttctcaggagctgcatgagcttggraaggttaacacctctcttggaacttccatttttgtatctatatctgtacttactgcccacgttgggtttaggacagagcctgacacaaagtagttgcttttgtcatcttccctctcttcctgctaccctcaatttttattctcatctctttgctttcttctttgttcctatggtgcttagcacaaggctgaatgca

SEQ ID NO: 65242 - DNA, 1239 bp, Homo sapiens
atgttacagatgaataaactgaggcacagaggggcaaactcacatgcccagggctgccctggtacaaattcaggcagtgagactctagtctgtgcccttcactcccccaccccaccctgccccaccagtgcccagtgcctgggggttccagccttagtagtatagcatttgaaggattcatgactctaagatccccaaattccatgaccctaacactctgggattttcagattcattcctagaggctacgagtccccaattctctaggcttcatgatgcttttcttcgatgaggctaggatttgaggatcgctaaggcaccaaaggtctggagcttgcagggatgcaggtgtgtggggtgggggtagggatctgccctctccccagcgctgagctgccctgggaccctgccccttgcccagcctgcccttacccggatcttgatttctggattctccaggtagaggtccctctcagccagcaggtagctgttgataactggctccacgaggagggcccgcaccttgatgaggttggactccgtaaggcagtcacggtatttctcatagaggatgcaaagaggaacgctcttctctgcagaaggggagaaaggagggtgctcatgatgcagaatcacccctcccaactctcttgcaactccaagaggcacagagaggggaaggaatgtgcttggggtcacacagcgggggaatggctgggcggatccctgaactccccactgtggctccagggttcccagcgaggagctggagagtggacactgagcagcgggtagaggacgcacttggactcccacgggccttggttctaatcctgcctttgcctcttctaatgggtgaccccgcgtgagccactccacctcccaggtcctcratgtttggatctgcgtggcacaggcactcctaaggctgtgggaggatgagctgagcgagtgtcccggaagagcctggtgcgctcgggactcagggtgtgtgagccgcgggcccttcatcctggggaggatcagagccgacatctgcttgctgcaccaggcactgcacttcccacggcgggctcctacttcacctacatgacaaccctaaaaggcttgtacgtgtattaccacccaacttacagatgagaaaactgagtctccagcaggtgaaataacgttgtcctaggtcacacagctgatatgtactgtgcaggcatctggactaataatccagatcttagagtc

SEQ ID NO: 65243 - DNA, 553 bp, Homo sapiens
aactgttgacacttgttctggccagtttgaacttgtttctgcccctcaactgccagagcacataaggcccctacgaaactaaaggctggctttatccctcagtcacctttaccaaacagaaactttgtaagtgccacttgaygtccctatgtgcctctccctgccactctactgagcctcctatgcctcacttcctttttccttcagcactgtgcatctgccctgaaggacggaaaaagtaccatctagggagaccacagtggtgagttttaagctcatttctgccttcagcttcctatgtgaccaaaggcaattcatttcatgtctctggcccttctgtaggctccagtgcagattatcttcagccactttttgggacttgggatttcttctctaagcctccagcttcatagcatagcattttttcccccaaagttcccctctcttttcaatctagaatattagtatatgctcaaagatcatttgcttgaaattcactaccttcacctgtgaggagagtagtcgtatctgtttttattggtagagttccagg

SEQ ID NO: 65244 - DNA, 2452 bp, Homo sapiens
tgcatgttaataaatctgtatgcaatttctcctattaatctgccttctatatgttgattttccagcaaacctccagagggcaaaggggaagctttcccttggcccctatacctgtctccttttttattgctgagtgttattccattgtagaaatatactacaatttatttgttcggtcacctgttaatggacatttgggttgtttccggttttacgttactacaaatcaagctgctataaacatattgtacaagacattatatggacacatgctattatttttcttgagtgaatatctagaagtgaactgtctggatcatatggtagtgtgtgtttaacttttaagaaacagggcaggtctttaaaaatgtttatagtgacttcacattcagaagcctctgtcatttagggttgtgtttcattaactttttattgtttttaaatcccaagatagaaaattataccaacagtcaagagaaattcatgaactctgatcatttatattagtaaacataatgtacatataaataaactggcacaaagtacatattgcagtcattttcaaatgatactttgaaattagttaattctagtttaagatactttgtaagtaattatatgtttcaaggattctcttccttctcagaagctacttcagtgattaaaaagcttaaaaggttgatgtctatgttttatatttccaaaaatctcagaatacaaccacaggttctgaaacttcatggtattgaggatccttttctttgagttgggagccacttaagggtcttctcattattttggaggattcaaccagatctttttaattgtctggtggcaaataacaggtggcaactctggctagctttttaaaggaaaatgtattgtcagggtgtggtccagctccyaggatgaagaaagttgaagaactgggtttgaaagaggtgagacccagggaatcagagtgccttctccaggagcatctccacagcctcccagggctacaacactcaaggaattcagctgcagcagtttctttcctccttgcatctctcaactcaagtttcaaagtctgagaatgaagcaacctctgcaccaacatcagaacatgagctatgcacgtggatgcaccaggatagcaaaaggaagggtctagcaaaagaagtcttcaaacttgccattaactattagcatgcctgtgcaagcaattgggtgtgccatcccaccaagactgcacagagtggaggagagttcatcacccccaggaaactgaaactgtcagaaaaggcaaatgaatgctgctctgcctaaaggctgacaaccccttatataggcaagtggtgttagaagagatgcattctattctcttcaagttcaatcagatcttaaaacccactttagctttctatctaatggttatcaagaaaaatgtgttctttctgcttgaccttcacttcttcaaacagaaaacaaaaccacagtgtctgagggagctaaatagagctcagatacacatgagaaatcctggcttatcattttaatggaagactgaccctgtgcaggccagcattgacagtagcaccagactattggctgttgtacagagtcctgactcaagcagcaggtaccttatttgcaattaaaacccttgactgagaagaataaccttccactttcagcaaaccgcaggtagcttctattctgcagcatgtgggactgcactaagacttgtgagaattgcacaatgttgatggcatgtggaatgttgtgcaatagcacaagttctcatatgctaggagagagtttaggtttgagacccctgagaactgggaatggatgagatgactgttaaatatataatcctatgatgtttaaagacaaaaagataaggtaagaacatgtttctgtcctacgagataactttgttgctcctagttacagaaactcttaactgcactttgttcagtctgaggaaagacttgaataaataaaaatagctagcagtagaaggaatgtccttgtgcacagttgtataaagttttaacattagcttgcaccttttcagacaacattttctaagtatttgaaaaactaagtttagacttacagaaaagttgcaaatatacaaagagagctcccgaatatcctttacccagatttccttaaggctaacatcttatgtaatttggtacaactatcaaagtcaagaaattaacatcaatgcagtactattaactaatctacagatgttatttgaattctgcctgttttcccactaatgtccttattgtggtccaggatctaatccaggattccacattgcaattagttattgcgtctgcttggtctcttctaatctatgacagtttttctttttctctcatggcctgggaacttttgaagtatacaaatcagttgttttgtggaacactctttaatttggttttgtctgata

SEQ ID NO: 65245 - DNA, 428 bp, Homo sapiens
gtatgactcattttgatcccttgattaacgtggtgttggtgaggttcctgcactgtcgttcctgtttccctgtgctaaaatgttttaaaaagatactttgtgactatgcaaataccctgcttctcatcatacttttacccattaattttatcacccatcaaagattcttgcttctcaataattgtcacggtggcgtttacttgaaagtagttttctatttttatcacttctacgttttctatgttcatcactggaattcaactgtgaggcagaatttagcaagamttttctaaatgtctatgctgtgagggcaccgggtcaggggaccagccttccttctgttcttctagggggtcagtgctggtcagacaagctctgtctggctgtttgatcccccccacagcagctgctgagggaggaggagagga

SEQ ID NO: 65246 - DNA, 654 bp, Homo sapiens
gccagagaggggaaggtaccaggttgcgtcctttcaggccccgcgttgttacaggacactcgctgggggccctgtgcccttgccggcggcaggttgcagccaccgcggcccaatgtcaccttcactcacagtctgagttcttgtccgcctgtcacgccctcaccaccytccccttccagccaccaccctttccgttccgctcgggccttcccagaagcgtcctgtgactctgggagaggtgacacctcactaaggggccgaccccatggagtaacgcgcccggccccgatgcgtatcaggcctcccctacatctgggggcgttggccgcgagattcccattgacacctttgtttcgtgtgcttttaaattcaggttaaatgttgcaataatctgatgcagaagactcagcttctcaagggagagggagggggcggagcggaataaatagtaacttatttaagaaatgcacttggattcctgccatcagtcaggggcggggaagggagtaccatccgcagatgggtgcagcaggcacttggccagcaggacacaggagactagcagaaggaagaggccggggaggaagaagccagccaggagggggagcctggggtacccagactctgagccccctgatgctgtgatgtggcggc

SEQ ID NO: 65247 - DNA, 654 bp, Homo sapiens
gccagagaggggaaggtaccaggttgcgtcctttcaggccccgcgttgttacaggacactcgctgggggccctgtgcccttgccggcggcaggttgcagccaccgcggcccaatgtcaccttcactcacagtctgagttcttgtccgcctgtcacgccctcaccaccttccccttccagccaccaccctttccgttccgctcgggccttcccagaagcgtcctgtgactctgggagaggtgacacctcactaaggggccgaccccatggagtaacgcgcccggccccgatgcgwatcaggcctcccctacatctgggggcgttggccgcgagattcccattgacacctttgtttcgtgtgcttttaaattcaggttaaatgttgcaataatctgatgcagaagactcagcttctcaagggagagggagggggcggagcggaataaatagtaacttatttaagaaatgcacttggattcctgccatcagtcaggggcggggaagggagtaccatccgcagatgggtgcagcaggcacttggccagcaggacacaggagactagcagaaggaagaggccggggaggaagaagccagccaggagggggagcctggggtacccagactctgagccccctgatgctgtgatgtggcggc

SEQ ID NO: 65248 - DNA, 653 bp, Homo sapiens
tggggtaggggctcgtgatgggcagccctggggctcccggtgaccattctctgtcttgacccggttgcagggacctggctgtcctttataatcaactgagttgcccgagtggctctgtgtgacccgaatgctggatgcatcgtgtggggagaagccagcctcggggaccagggctgcccaggaggccccgtcccacggtgactggctgtgccttgagggctaggacctcacactgtggcaggtgtcctcagcacacctggaccccttctctcccagtgacatccacaaccagaaacacagcgatgcacaccagtgatttccatgcactttaatgaggtccagcactcaggaggattagcgcccaccaccagctgcctgggcaggggagggccggagggcccrgtgcaggcgtcaggcttaggacagggaagggggctcaggatggggaagggtcctcaggacaggggaaggggctcagaagagagcagggggcttaggacaggaaggggcactcaggacggggcagggaaggtgtggggggcagtcgccacctgggtaggaagcagtggtgttttggacaggaggggctggctctccagtgacccaggtggacaccccaggcctgactcacggctttttggggacatagtggt

SEQ ID NO: 65249 - DNA, 2884 bp, Homo sapiens
gtgttgtgagtgtgtaggagtgttagcatgtgtgtgtgaacatgtgtgagcgtgtgtgtgatgatgtgtaagcgtgaatgtgtgggtgtgtaggtgtgtgtgttgtcagtgtatgtgtgggagtgttagcatgtgcgtgagcgtgtgtgtgtgctgtgagcatgtgagtgtgaatatgtatgggtatgggtgtgtatgtgcatgtgtgtgtgagagcgtgtatgtgttgtgagcatatgtatgggtgtgtgtgagcatgtgtgtatgtgtgagcatgtgtgttgtcagcatgtgtgagcgtgaatgtgtgtgggcgtgtacgtatgagtgtgagcatgtgtgtgtgaactcgcgtgtgtgagagcatgtgtgttgtgagcatgtgtgagcgtatgtgtgtgcacaagcatgtttgtgagcatgggtgtggactgtgtgcaacagtgtgtgtcagctggaggaggggctgggggaagactacacgggcccctctctccaagcccaaggatttgtacacagctcttggcacagcccagcaactgagatgccagcctggcagggagcccccgargaaacgtgggctgctacagaagtcgtgccaaggatccacagcgaccaagggctccaatccatttctgtcactctgaaagccagttggaggctgtgtcacaaagcaccaggcaaccaggcagaaggaggaggcagccccctccgcctccccgcagcccggggcggttctgcccggcccgggttgctcacaaagcctgcgcttctggcccagggtctgctcctcccagccgagcacagtcagcagcccggagtagccctggaccagagttgctgagggatggcaggaacatccacaacccacagccggcccctttcacaactgaggtctgatagcgaatcattaaaaacaaaacaaattaaaacaaaagcaatcgtaattgtaggagctgctgtccccgagcagctgtgaagcccaggcctttccgcgtttctttctttcattcacatctcatttttcctctcaactgcgctgtacatcagggagacttttccatggttttaaaatgacgaaaccgaggctctgggggcgagggggttgtaagccacaaatccaagatggcacaactggcaagtggcaaagcccatctcaaggccggggttctcctggcacccggtgcacacaggacatggttcttgtccccattgcccgtggggccacctgcctccctcacgcagccgctcatcctcgcggtgagaggcatcttcctccttgagtgcagtcagggcccaggagccaccagcagctgggaaacagacactaaccagggaggggaaggggcttatctcaagcccccatcttgtcccccatcctaggggagagttggagagctgtcagcatcgccgtatgcaaacgaaggcgatgaatcgagcctggagtcagctttgattcctgagcccctccccccacaacagccttgcatttgggggccaggagactcgggggatcctgccccgcctgcctgagggacaactgtggagctcggccaccaggcttctcgggacagctgtcggaccagcattcctgcggcgctgatcggccttcctgttgcatagtgggttggggggagcaagtcatggctggccaaggcgggtcccatgggaatcctgggtcagggatatcagtgctgctcagatggtgcggaaggattatgatgtgaagcaggcaaccccccacggggagaaccggagcccatcagcctccctcccttaccccgaatctactcatgtgccaaagcgacaaattcgtgcgactgtatttggcaggaatgtttcaggggttctgtaagcatctgattctagcttcactttaaaaatatatttttaaaattattttgaaaactgtagtaaaaataacagacactctcgaatacattctctacccaatttgaacatgggcacggccccatcataacttgggcttctggttcactgaagagtattccagggatataaggtgagcagtttcaaagactcgctgccatttgcagctacttaattgcatgctccaggattttctgaacgtgaataatcaaagccagttagaagcgcagcctcacatccatgagtgtaactgatatccattacatcattttctatcatggagaacagcttctttttttctcattggtttactttatttatatttatttatttattttgaaacagagtctcgctgtgtcacccaggctggagtgcagtggcacaatctcggctcactgcaacctccgtctcccgtgttcaagcaattctcctgcctcagtctcctgagggattacaggcgctgccaccacgcccagctaatttttgtgtttttaatagagacaggatttcaccatgttggtcaggctggtcttgaactcctgacctcgtgatccacccaccttggcctcccaaagtgctgggattacaggtgtgagctactacacctggatttactttatttatttatttatttatttattgagagtgagtctcgctgtgtcacccgggctggagtgcagtggcgccatctcggctcacttcaatctccaccttctaggttcaaacgattctcctgccttagcctcccgagtagctgggattacaggcacgcaccaccacacccagctaattcttgtatttttagtagagacggggtttcactatgttggccaggctggtctcgaactcctgacctcaggtgatccacccaccttgacctcccaaagtgctgggattacaggtgtgagcaccatgcctggcttgagccactgcgcccggcggtttgctttaaaataagtaaatattagtcctggctacttgggaggctgaggca

SEQ ID NO: 65250 - DNA, 2884 bp, Homo sapiens
gtgttgtgagtgtgtaggagtgttagcatgtgtgtgtgaacatgtgtgagcgtgtgtgtgatgatgtgtaagcgtgaatgtgtgggtgtgtaggtgtgtgtgttgtcagtgtatgtgtgggagtgttagcatgtgcgtgagcgtgtgtgtgtgctgtgagcatgtgagtgtgaatatgtatgggtatgggtgtgtatgtgcatgtgtgtgtgagagcgtgtatgtgttgtgagcatatgtatgggtgtgtgtgagcatgtgtgtatgtgtgagcatgtgtgttgtcagcatgtgtgagcgtgaatgtgtgtgggcgtgtacgtatgagtgtgagcatgtgtgtgtgaactcgcgtgtgtgagagcatgtgtgttgtgagcatgtgtgagcgtatgtgtgtgcacaagcatgtttgtgagcatgggtgtggactgtgtgcaacagtgtgtgtcagctggaggaggggctgggggaagactacacgggcccctctctccaagcccaaggatttgtacacagctcttggcacagcccagcaactgagatgccagcctggcagggagcccccgaggaaacgtgggctgctacagaagtcgtgccaaggatccacagcgaccaagggctccaatccatttctgtcactctgaaagccagttggaggctgtgtcacaaagcaccaggcaaccaggcagaaggaggaggcagccccctccgcctccccgcagcccggggcggttctgcccggcccgggttgctcacaaagcctgcgcttctggcccagggtctgctcctcccagccgagcacagtcagcagcccggagtagccctggaccagagttgctgagggatggcaggaacatccacaacccacagccggcccctttcacaactgaggtctgatagcgaatcattaaaaacaaaacaaattaaaacaaaagcaatcgtaattgtaggagctgctgtccccgagcagctgtgaagcccaggcctttccgcgtttctttctttcattcacatctcatttttcctctcaactgcgctgtacatcagggagacttttccatggttttaaaatgacgaaaccgaggctctgggggcgagggggttgtaagccacaaatccaagatggcacaactggcaagtggcaaagcccatctcaaggccggggttctcctggcacccggtgcacacaggacatggttcttgtccccattgcccgtggggccacctgcctccctcacgcagccgctcatcctcgcggtgagaggcatcttcctccttgagtgcagtcagggcccaggagccaccagcagctgggaaacagacactaaccagggaggggaaggggcttatctcaagcccccatcttgtcccccatcctaggggagagttggagagctgtcagcatcgccgtatgcaaacgaaggcgatgaatcgagcctggagtcagctttgattcctgagcccctccccccacaacagccttgcatttgggggccaggagactcgggggatcctgccccgcctgcctgagggacaactgtggagctcggccaccaggcttctcgggacagctgtcggaccagcattcctgcggcgctgatcggccttcctgttgcatagtgggttggggggagcaagtcatggctggccaaggcgggtcccatgggaatcctgggtcagggatatcagtgctgctcagatggtgcggaaggattatgatgtgaagcagrcaaccccccacggggagaaccggagcccatcagcctccctcccttaccccgaatctactcatgtgccaaagcgacaaattcgtgcgactgtatttggcaggaatgtttcaggggttctgtaagcatctgattctagcttcactttaaaaatatatttttaaaattattttgaaaactgtagtaaaaataacagacactctcgaatacattctctacccaatttgaacatgggcacggccccatcataacttgggcttctggttcactgaagagtattccagggatataaggtgagcagtttcaaagactcgctgccatttgcagctacttaattgcatgctccaggattttctgaacgtgaataatcaaagccagttagaagcgcagcctcacatccatgagtgtaactgatatccattacatcattttctatcatggagaacagcttctttttttctcattggtttactttatttatatttatttatttattttgaaacagagtctcgctgtgtcacccaggctggagtgcagtggcacaatctcggctcactgcaacctccgtctcccgtgttcaagcaattctcctgcctcagtctcctgagggattacaggcgctgccaccacgcccagctaatttttgtgtttttaatagagacaggatttcaccatgttggtcaggctggtcttgaactcctgacctcgtgatccacccaccttggcctcccaaagtgctgggattacaggtgtgagctactacacctggatttactttatttatttatttatttatttattgagagtgagtctcgctgtgtcacccgggctggagtgcagtggcgccatctcggctcacttcaatctccaccttctaggttcaaacgattctcctgccttagcctcccgagtagctgggattacaggcacgcaccaccacacccagctaattcttgtatttttagtagagacggggtttcactatgttggccaggctggtctcgaactcctgacctcaggtgatccacccaccttgacctcccaaagtgctgggattacaggtgtgagcaccatgcctggcttgagccactgcgcccggcggtttgctttaaaataagtaaatattagtcctggctacttgggaggctgaggca

SEQ ID NO: 65251 - DNA, 2884 bp, Homo sapiens
gtgttgtgagtgtgtaggagtgttagcatgtgtgtgtgaacatgtgtgagcgtgtgtgtgatgatgtgtaagcgtgaatgtgtgggtgtgtaggtgtgtgtgttgtcagtgtatgtgtgggagtgttagcatgtgcgtgagcgtgtgtgtgtgctgtgagcatgtgagtgtgaatatgtatgggtatgggtgtgtatgtgcatgtgtgtgtgagagcgtgtatgtgttgtgagcatatgtatgggtgtgtgtgagcatgtgtgtatgtgtgagcatgtgtgttgtcagcatgtgtgagcgtgaatgtgtgtgggcgtgtacgtatgagtgtgagcatgtgtgtgtgaactcgcgtgtgtgagagcatgtgtgttgtgagcatgtgtgagcgtatgtgtgtgcacaagcatgtttgtgagcatgggtgtggactgtgtgcaacagtgtgtgtcagctggaggaggggctgggggaagactacacgggcccctctctccaagcccaaggatttgtacacagctcttggcacagcccagcaactgagatgccagcctggcagggagcccccgaggaaacgtgggctgctacagaagtcgtgccaaggatccacagcgaccaagggctccaatccatttctgtcactctgaaagccagttggaggctgtgtcacaaagcaccaggcaaccaggcagaaggaggaggcagccccctccgcctccccgcagcccggggcggttctgcccggcccgggttgctcacaaagcctgcgcttctggcccagggtctgctcctcccagccgagcacagtcagcagcccggagtagccctggaccagagttgctgagggatggcaggaacatccacaacccacagccggcccctttcacaactgaggtctgatagcgaatcattaaaaacaaaacaaattaaaacaaaagcaatcgtaattgtaggagctgctgtccccgagcagctgtgaagcccaggcctttccgcgtttctttctttcattcacatctcatttttcctctcaactgcgctgtacatcagggagacttttccatggttttaaaatgacgaaaccgaggctctgggggcgagggggttgtaagccacaaatccaagatggcacaactggcaagtggcaaagcccatctcaaggccggggttctcctggcacccggtgcacacaggacatggttcttgtccccattgcccgtggggccacctgcctccctcacgcagccgctcatcctcgcggtgagaggcatcttcctccttgagtgcagtcagggcccaggagccaccagcagctgggaaacagacactaaccagggaggggaaggggcttatctcaagcccccatcttgtcccccatcctaggggagagttggagagctgtcagcatcgccgtatgcaaacgaaggcgatgaatcgagcctggagtcagctttgattcctgagcccctccccccacaacagccttgcatttgggggccaggagactcgggggatcctgccccgcctgcctgagggacaactgtggagctcggccaccaggcttctcgggacagctgtcggaccagcattcctgcggcgctgatcggccttcctgttgcatagtgggttggggggagcaagtcatggctggccaaggcgggtcccatgggaatcctgggtcagggatatcagtgctgctcagatggtgcggaaggattatgatgtgaagcaggcaaccccccacggggagaaccggagcccatcagcctccctcccttaccccgaatctactcatgtgccaaagcgacaaattcgtgcgactgtatttggcaggaatgtttcaggggttctgtaagcatctgattctagcttcactttaaaaatatatttttaaaattattttgaaaactgtagtaaaaataacagacactctcgaatacattctctacccaatttgaacatgggcacggccccatcataacttgggcttctggttcactgaagagtattccagggatataaggtgagcagtttcaaagactcgctgccatttgcagctacttaattgcatgctccaggattttctgaacgtgaataatcaaagccagttagaagcgcagcctcacatccatgagtgtaactgatatccattacatcattttctatcatggagaacagcttctttttttctcattggtttactttatttatatttatttatttattttgaaacagagtctcgctgtgtcacccaggctggagtgcagtggcacaatctcggctcactgcaacctccgtctcccgtgttcaagcaattctcctgcctcagtctcctgagggattacaggcgctgccaccacgcccagctaatttttgtgtttttaatagagacaggatttcaccatgttggtcaggctggtcttgaactcctgacctcgtgatccacccaccttggcctcccaaagtgctgggattacaggtgtgagctactacacctggatttactttatttatttatttatttatttattgagagtgagtctcgctgtgtcacccgggctggagtgcagtggcgccatctcggctcacttcaatctccaccttctaggttcaaacgattctcctgccttagcctcccragtagctgggattacaggcacgcaccaccacacccagctaattcttgtatttttagtagagacggggtttcactatgttggccaggctggtctcgaactcctgacctcaggtgatccacccaccttgacctcccaaagtgctgggattacaggtgtgagcaccatgcctggcttgagccactgcgcccggcggtttgctttaaaataagtaaatattagtcctggctacttgggaggctgaggca

SEQ ID NO: 65252 - DNA, 1595 bp, Homo sapiens
aaaaaggatgagttgagtttatgtccttttcaaggacatggatgaaggtggaaaccatcattctcagcaaaatatcacaaggacagaaaaccaaacactgcatgttctcgctcataagtgggagttgaacaatgagaacacatggacacagggaggggaatatcatacactggggcctgttagggggttgggggctaggggagggatagcatcaggagaaatacctaatgtaaatgatgagttgatgggtgcagcacaccaacatggcacatgtatacctatgtaacaaacctgcacactgtgcacatataccctggaacttaaagtataattttaaaaaagtttatgattaatataatgaattgctaatatgattcatgacattcaataaatagttgagttaatgaattgttcaaaaatagttatttaactaatagttgtgtctggtgtatttctaaaataataatatttgttcaaaaaaaaaaaaagagccgggcgcggtggctcacgcctgcaatctcagcactttgggagactgaggctgaccgatcacaaggtctagagtttgagaccagcctggccaacatggtgaagccccgtctgtactaaaaatacaaaaaaattagccaggcatggtgatgcacgcctgtaatcccagctactcgggaggctgaggcaggagaatcgcttgaacccgggaggcggaggttgcagtgagcccagatcgtgccactccattccagcctgggcaaaagagcgaaactccgtctcaaaaaaaaaaaaaaaaaaaaaaaggaagaaagaaagaaagatgttagctgagctatgctccctccaaatcctctaggggaggatccctttttgccttttctagcttctgrtagccccaggcattccttggcttgtggcaggacgactccgatctccgcttccgtctctacgtggccatctgccctcgtgtgtgtctccgccttcacatggtattttctcttataaagatatcgtcatactggattacccctattgaccttaatttgattatagttgcaaagctcttatttccaaataaggtcacattcacagatattgagagttaggatttctatgtatctttttgggggacataatttaacgaataatgagaagcattttcaattagagagttatatgttattctttaatagcattcttaaccagacttcaaggactgagctaaaactcttaagaagtcagtacaaatagaagacctttagaaagcattggtttggtatacttttattgtacagttataggcttataacactgtcttggggctgtgaggaaagtacaagcgaggttagagggcattttctctcctacagactggaacctggtggaacctgactgcacgacgtgttctcagcagtgaaccaggcccccctgcccttgcctggaacaggaagacagcaggaaaccaggctttgagaggagagaaggaggccaagaggactgtccctaggtatcttggaggtaagtcagtccacagcaaagactgtgaggaacattccctttctacctgcttcaaaatttccctcccacaaatccctatttcattt

SEQ ID NO: 65253 - DNA, 1595 bp, Homo sapiens
aaaaaggatgagttgagtttatgtccttttcaaggacatggatgaaggtggaaaccatcattctcagcaaaatatcacaaggacagaaaaccaaacactgcatgttctcgctcataagtgggagttgaacaatgagaacacatggacacagggaggggaatatcatacactggggcctgttagggggttgggggctaggggagggatagcatcaggagaaatacctaatgtaaatgatgagttgatgggtgcagcacaccaacatggcacatgtatacctatgtaacaaacctgcacactgtgcacatataccctggaacttaaagtataattttaaaaaagtttatgattaatataatgaattgctaatatgattcatgacattcaataaatagttgagttaatgaattgttcaaaaatagttatttaactaatagttgtgtctggtgtatttctaaaataataatatttgttcaaaaaaaaaaaaagagccgggcgcggtggctcacgcctgcaatctcagcactttgggagactgaggctgaccgatcacaaggtctagagtttgagaccagcctggccaacatggtgaagccccgtctgtactaaaaatacaaaaaaattagccaggcatggtgatgcacgcctgtaatcccagctactcgggaggctgaggcaggagaatcgcttgaacccgggaggcggaggttgcagtgagcccagatcgtgccactccattccagcctgggcaaaagagcgaaactccgtctcaaaaaaaaaaaaaaaaaaaaaaaggaagaaagaaagaaagatgttagctgagctatgctccctccaaatcctctaggggaggatccctttttgccttttctagcttctgatagccccaggcattccttggcttgtggcaggacgactccgatctccgcttccgtctctacgtggccatctgccctcgtgtgtgtctccrccttcacatggtattttctcttataaagatatcgtcatactggattacccctattgaccttaatttgattatagttgcaaagctcttatttccaaataaggtcacattcacagatattgagagttaggatttctatgtatctttttgggggacataatttaacgaataatgagaagcattttcaattagagagttatatgttattctttaatagcattcttaaccagacttcaaggactgagctaaaactcttaagaagtcagtacaaatagaagacctttagaaagcattggtttggtatacttttattgtacagttataggcttataacactgtcttggggctgtgaggaaagtacaagcgaggttagagggcattttctctcctacagactggaacctggtggaacctgactgcacgacgtgttctcagcagtgaaccaggcccccctgcccttgcctggaacaggaagacagcaggaaaccaggctttgagaggagagaaggaggccaagaggactgtccctaggtatcttggaggtaagtcagtccacagcaaagactgtgaggaacattccctttctacctgcttcaaaatttccctcccacaaatccctatttcattt

SEQ ID NO: 65254 - DNA, 1595 bp, Homo sapiens
aaaaaggatgagttgagtttatgtccttttcaaggacatggatgaaggtggaaaccatcattctcagcaaaatatcacaaggacagaaaaccaaacactgcatgttctcgctcataagtgggagttgaacaatgagaacacatggacacagggaggggaatatcatacactggggcctgttagggggttgggggctaggggagggatagcatcaggagaaatacctaatgtaaatgatgagttgatgggtgcagcacaccaacatggcacatgtatacctatgtaacaaacctgcacactgtgcacatataccctggaacttaaagtataattttaaaaaagtttatgattaatataatgaattgctaatatgattcatgacattcaataaatagttgagttaatgaattgttcaaaaatagttatttaactaatagttgtgtctggtgtatttctaaaataataatatttgttcaaaaaaaaaaaaagagccgggcgcggtggctcacgcctgcaatctcagcactttgggagactgaggctgaccgatcacaaggtctagagtttgagaccagcctggccaacatggtgaagccccgtctgtactaaaaatacaaaaaaattagccaggcatggtgatgcacgcctgtaatcccagctactcgggaggctgaggcaggagaatcgcttgaacccgggaggcggaggttgcagtgagcccagatcgtgccactccattccagcctgggcaaaagagcgaaactccgtctcaaaaaaaaaaaaaaaaaaaaaaaggaagaaagaaagaaagatgttagctgagctatgctccctccaaatcctctaggggaggatccctttttgccttttctagcttctgatagccccaggcattccttggcttgtggcaggacgactccgatctccgcttccgtctctacgtggccatctgccctcgtgtgtgtctccgccttcacatggtattttctcttataaagatatcgtcatactggattacccctattgaccttaatttgattatagttgcaaagytcttatttccaaataaggtcacattcacagatattgagagttaggatttctatgtatctttttgggggacataatttaacgaataatgagaagcattttcaattagagagttatatgttattctttaatagcattcttaaccagacttcaaggactgagctaaaactcttaagaagtcagtacaaatagaagacctttagaaagcattggtttggtatacttttattgtacagttataggcttataacactgtcttggggctgtgaggaaagtacaagcgaggttagagggcattttctctcctacagactggaacctggtggaacctgactgcacgacgtgttctcagcagtgaaccaggcccccctgcccttgcctggaacaggaagacagcaggaaaccaggctttgagaggagagaaggaggccaagaggactgtccctaggtatcttggaggtaagtcagtccacagcaaagactgtgaggaacattccctttctacctgcttcaaaatttccctcccacaaatccctatttcattt

SEQ ID NO: 65255 - DNA, 1595 bp, Homo sapiens
aaaaaggatgagttgagtttatgtccttttcaaggacatggatgaaggtggaaaccatcattctcagcaaaatatcacaaggacagaaaaccaaacactgcatgttctcgctcataagtgggagttgaacaatgagaacacatggacacagggaggggaatatcatacactggggcctgttagggggttgggggctaggggagggatagcatcaggagaaatacctaatgtaaatgatgagttgatgggtgcagcacaccaacatggcacatgtatacctatgtaacaaacctgcacactgtgcacatataccctggaacttaaagtataattttaaaaaagtttatgattaatataatgaattgctaatatgattcatgacattcaataaatagttgagttaatgaattgttcaaaaatagttatttaactaatagttgtgtctggtgtatttctaaaataataatatttgttcaaaaaaaaaaaaagagccgggcgcggtggctcacgcctgcaatctcagcactttgggagactgaggctgaccgatcacaaggtctagagtttgagaccagcctggccaacatggtgaagccccgtctgtactaaaaatacaaaaaaattagccaggcatggtgatgcacgcctgtaatcccagctactcgggaggctgaggcaggagaatcgcttgaacccgggaggcggaggttgcagtgagcccagatcgtgccactccattccagcctgggcaaaagagcgaaactccgtctcaaaaaaaaaaaaaaaaaaaaaaaggaagaaagaaagaaagatgttagctgagctatgctccctccaaatcctctaggggaggatccctttttgccttttctagcttctgatagccccaggcattccttggcttgtggcaggacgactccgatctccgcttccgtctctacgtggccatctgccctcgtgtgtgtctccgccttcacatggtattttctcttataaagatatcgtcatactggattacccctattgaccttaatttgattatagttgcaaagctcttatttccaaataaggtcacattcacagatattgagagttaggatttctatgtatctttttgggggacataatttaacgaataatgagaagcattttcaattagagagttatatgttattctttaatagcattcttaaccagacttcaaggactgagctaaaactcttaagaagtcagtacaaatagaagacctttagaaagcattggtttggtatacttttattgtacagttayaggcttataacactgtcttggggctgtgaggaaagtacaagcgaggttagagggcattttctctcctacagactggaacctggtggaacctgactgcacgacgtgttctcagcagtgaaccaggcccccctgcccttgcctggaacaggaagacagcaggaaaccaggctttgagaggagagaaggaggccaagaggactgtccctaggtatcttggaggtaagtcagtccacagcaaagactgtgaggaacattccctttctacctgcttcaaaatttccctcccacaaatccctatttcattt

SEQ ID NO: 65256 - DNA, 3047 bp, Homo sapiens
aaaaaaagataaaagcaccacacacctattacagactacttagatattagaaagaagtgaaaatgccgaaatatatcacccttagttctaccagccaaagataataatttttaaaatcgcattttacaaagttaagttgtgtgaccaagctttatttttaagaaagcaaaactaaggaagcactctccttaattgtgttgaaatgagttttattcattgtggaaagccaagtggaaagaataattttcagtcttttgatcacttaagttagccatgattccaaaaagaaaacctgcttttccacaaacttacaacaagtgccagttgcctccttcttgtcttggatttcgatgtccccagaagctatattttctgtcttcagcgtgttagcaagagtgtcaggggttatgaagtaataagctgaactgttccccaaattctcacagtttactacccatgagcttcctgagaaagtcaactaaagtgagttcagtctttggagtcatttaaacacaaagggctcttccaactgcacagtgagaaactcaacaatagctgttgtcttcaagtgtccacagagctcagctgtcaaggactggttggttaagaaacacatctcagggcacattaactggagtgtgtttgctttggaactaagactattttagaaataaattgaggatccagatgtaatgaaagaagcagggacaagactctctttttttgtgaacagcacttgtaacttgttaccctgcatttcgatgctatcacaatgcagtttgagttgaacggcctgcatctggtattgcttaagtaatatcagtgtttcccactggctagccttgtagggcaagacaatccctctcctgaaagttcacccacataatgtcaagaaaacagcccctaatgatttatttaaagtcatgtcggccaggcacggtggctcacgcctgtaatttcagcactttgggaggctgaggctagtggatcacaaggtcaagagatcgagaccatcctggccaacatggtgaaaccccgtctctactaaaaatacaaaaattagccaggcatggtgacatgtgcctgtagtcccagctwcttgggaggctgaggcaggagaatcgcttgaacctgggaggcgaaggttgcagtgagccaagattgtgccactgcactccagcctggcaacagagcgagactccatctcaaaataaataaattaaaaaaaataatgaagtcaagtcagcagaggattttgtatattccagaacttcgggataaatgcatcacagtggctatgcagaatattgaaggctgtcagaattacaacgaatttgtaattgaggcctttaccttcgtgttgtatgtcttctgatgggggaaggaaggcgagcatcaattcataagctatggcagagcccacatcacagatgtcacagaacactttgctaaaaatgcttccattcaccaagagagaattctcatgtaaaccatggactttcggtgatgatgatgtgtcagtgtaggctcatcaattgcaatgaatgtaccagtttagtgggatgttgataatgacagagtctgtgcatgaatgggggtaggcacagagggtctatgggaagtctctgtaccttccgctcaattttaactttgaactttaaactgctctaaaacataaagtctatttttttttttttagatggagtctcgctctgtcactcaggctggaatgcagtggtgtgatctcggctcactgcaacttccgcctcctgggttcaagtctgtctcagcctcccaagtagctgggactacaggcgcccaccaccatgcctggctaattttttgtatttttagtagagaccgggtttcactgtgttagccaggatggtctcgatctcctgacctcgtgatctgcccatctcggcctcccaaagtgttgggattacaggcgtgagtcacagcacttagccataaagtctatttaaaaaaacacaatcgtttttattttttggagaaaccattcccagggtgagaagagtcaactgccagagctgtggcactttgggcccataccatgcaagcagagcctgagtgtgtgtttgggtctgctctggacattgagtcattaaagagtggagttttttttaaagatcagaaagaaaaaataaagagagaaactcatctgaaaggggtttttttcttttcttttctctctcttttttttttttttttttttgacagagtcttgctctgtcacctgggctggagtgcagtggcacaatcttggctcactgcaacctcaacctcccgggttcaagtgattctcctgcctcagcctcccaaatagctgggattacaggtgcccgccaccacacctggctaattttttttttttttttttttttttttttttttttttttgtatttttagtagagacaggcttttgccatgttggccacgctgttcttgaactcctgacctcaggtgatccgcccaccttggcctttcaaaatgctgggattacaggcatgagccaccgcacccggcctgaaagtctttgttttcattaagcatgggaaccattgatttgtgaaggtttccagttaaaagtgacatgagagaaatgatgcattttcgtgatggttcctttgagatcattattttctgaagatttaattcattattttcaatgtggtacatacgggtggggataaaaaggagaaaggaatatagttgaaggctgtgtgatctgccatgtgccatgtgatcctccctgcaaaaccacaaatctccagtaaaatctgtaaagaaaaaaaaaatggtcagatgtctgcctcaagtagatttattaaaggaattggagaaggggctaagttttgtcttctgggtgtctctgggtataacagggacgacccctgagggtttataagagtgaaggcaaaagagagcatgaaagagaatatgactgccggagggaaaataattctattcatgctggctttcttaactgcaatggtcaattttagaaatattgttacaaccagga

SEQ ID NO: 65257 - DNA, 3047 bp, Homo sapiens
aaaaaaagataaaagcaccacacacctattacagactacttagatattagaaagaagtgaaaatgccgaaatatatcacccttagttctaccagccaaagataataatttttaaaatcgcattttacaaagttaagttgtgtgaccaagctttatttttaagaaagcaaaactaaggaagcactctccttaattgtgttgaaatgagttttattcattgtggaaagccaagtggaaagaataattttcagtcttttgatcacttaagttagccatgattccaaaaagaaaacctgcttttccacaaacttacaacaagtgccagttgcctccttcttgtcttggatttcgatgtccccagaagctatattttctgtcttcagcgtgttagcaagagtgtcaggggttatgaagtaataagctgaactgttccccaaattctcacagtttactacccatgagcttcctgagaaagtcaactaaagtgagttcagtctttggagtcatttaaacacaaagggctcttccaactgcacagtgagaaactcaacaatagctgttgtcttcaagtgtccacagagctcagctgtcaaggactggttggttaagaaacacatctcagggcacattaactggagtgtgtttgctttggaactaagactattttagaaataaattgaggatccagatgtaatgaaagaagcagggacaagactctctttttttgtgaacagcacttgtaacttgttaccctgcatttcgatgctatcacaatgcagtttgagttgaacggcctgcatctggtattgcttaagtaatatcagtgtttcccactggctagccttgtagggcaagacaatccctctcctgaaagttcacccacataatgtcaagaaaacagcccctaatgatttatttaaagtcatgtcggccaggcacggtggctcacgcctgtaatttcagcactttgggaggctgaggctagtggatcacaaggtcaagagatcgagaccatcctggccaacatggtgaaaccccgtctctactaaaaatacaaaaattagccaggcatggtgacatgtgcctgtagtcccagctacttgggaggctgaggcaggagaatcgcttgaacctgggaggcgaaggttgcagtgagccaagattgtgccactgcactccagcctggcaacagagcgagactccatctcaaaataaataaattaaaaaaaataatgaagtcaagtcagcagaggattttgtatattccagaacttcgggataaatgcatcacagtggctatgcagaatattgaaggctgtcagaattacaacgaatttgtaattgaggcctttaccttcgtgttgtatgtcttctgatgggggaaggaaggcgagcatcaattcataagctatggcagagcccacatcacagatgtcacagaacactttgctaaaaatgcttccattcaccaagagagaattctcatgtaaaccatggactttcggtgatgatgatgtgtcagtgtaggctcatcaattgcaatgaatgtaccagtttagtgggatgttgataatgacagagtctgtgcatgaatgggggtaggcacagagggtctatgggaagtctctgtaccttccgctcaattttaactttgaactttaaactgctctaaaacataaagtctatttttttttttttagatggagtctcgctctgtcactcaggctggaatgcagtggtgtgatctcggctcactgcaacttccgcctcctgggttcaagtctgtctcagcctcccaagtagctgggactacaggcgcccaccaccatgcctggctaattttttgtatttttagtagagaccgggtttcactgtgttagccaggatggtctcgatctcctgacctcgtgatctgcccatctcggcctcccaaagtgttgggattacaggcgtgagtcacagcacttagccataaagtctatttaaaaaaacacaatcgtttttattttttggagaaaccattcccagggtgagaagagtcaactgccagagctgtggcactttgggcccataccatgcaagcagagcctgagtgtgtgtttgggtctgctctggacattgagtcattaaagagtggagttttttttaaagatcagaaagaaaaaataaagagagaaactcatctgaaaggggtttttttcttttcttttctctctcttttttttttttttttttttgacagagtcttgctctgtcacctgggctggagtgcagtggcacaatcttggctcactgcaacctcaacctcccgggttcaagtgattctcctgcctcagcctcccaaatagctgggattacaggtgcccgccaccacacctggctaattttttttttttttttttttttttttttttttttttttgkatttttagtagagacaggcttttgccatgttggccacgctgttcttgaactcctgacctcaggtgatccgcccaccttggcctttcaaaatgctgggattacaggcatgagccaccgcacccggcctgaaagtctttgttttcattaagcatgggaaccattgatttgtgaaggtttccagttaaaagtgacatgagagaaatgatgcattttcgtgatggttcctttgagatcattattttctgaagatttaattcattattttcaatgtggtacatacgggtggggataaaaaggagaaaggaatatagttgaaggctgtgtgatctgccatgtgccatgtgatcctccctgcaaaaccacaaatctccagtaaaatctgtaaagaaaaaaaaaatggtcagatgtctgcctcaagtagatttattaaaggaattggagaaggggctaagttttgtcttctgggtgtctctgggtataacagggacgacccctgagggtttataagagtgaaggcaaaagagagcatgaaagagaatatgactgccggagggaaaataattctattcatgctggctttcttaactgcaatggtcaattttagaaatattgttacaaccagga

SEQ ID NO: 65258 - DNA, 594 bp, Homo sapiens
ttacaatgttaaccatattcacaacggttgaagaaatatagcacgtgtcatattcatttgacatttatcaaatgaataaatttattaatttcttgagcaagaaatgaggtgaacactacttttttttggcgtactgcttggatgttttcaaatcatggcacaaggttgaggttgtggggaactcaggtacagcccagtggatttgcagagttgagaaaaaggagctggaagtctagcaaagctagggaggccagggtttacagggcaaatgctgcagaagagatgctacggcaaaagagaatggtctgcagtacatctcccacaagtattcagatgaatattagccatttatttaatgaaattacctgaggctgaggaataatcaaccaatatgatttgaaggagtagcacctggaggccatgtattgttgggaatagtaactgtttctaacagctagagtgaaaaactttatattccaaggagaattggataatgtattargaagggtcttgcctcaatagtgaagaaaaattggcttttgactaaataccactctgggcctgcctaacaaaccataaaagcaaaatataaga

SEQ ID NO: 65259 - DNA, 1425 bp, Homo sapiens
caaaagagaaaaacctaaacagaaagctacttctaaaagtaaaaaatctgtgaaaagtgccaatgttaagaaagcagatagcagcaccaccaagaagaatcaaaacagttccaaaaaaggtatgttagaaataacattaatcagcaactttaaagatatagcatatattaatatgttgtacatagtatttaagtgtgtgggagaaacaggtaaactgcagagaacattgcggggagaagtaatacaggttgaatatcccttatctgaaatgcttgggacaggaagtgattcagattttgcaatatatatatakagagagagagacagagagagagatatcttggggatgggacccagtctaaacatgaaattcattcatgtttcatattcatcttaaatagcctgaaggtagtttaatattttaactaaataaattatttattgcagtggtgccgttacagctcactgtagccttgaactgctggactcaagcgagtctcctatcttggccccccagagcactgggtttacaggcttggaccactgcccttggcctgaaaccaagttttgactgcgacccgtcacacgaggtcgggtatggaattacctcctggtggtgtcatgttggtgctctgaaaagctggattttggaacatttcaggttttggatttttggattagggatgcctaacctgtataccagttttttatagtttttgatttttcaaattgactaaaatttgtatgcatgttttataggtaactgtagagtagtgatttataatttttttgatccagtacccctttgagaatctgttgaaagcttaaaattcatctcagcctttgttaaatgttaatttactatgtaagaaaaattattattattatattacttttagaaagtgagtctgaggatagttcagatgatgaacctttaattaaaaagttgaagaaaccccctacagatgaagagttaaaggaaacaataaagaaattactggccagtgctaacttggaagaagtcacaatgaaacagatttgcaaaaaggtaattagacaaatgtttagattattttgcttttgctagaaaaattctttcacttatctctgaatttgaagctaaatacttacgtgcattcacttattgaagaaagatttattgaactactatatgccagatctccttacaggtgctgggataccacttaaaatagtcaaagtctctgtcctaatagagttattttataaacaacattaaaatgaataaagttagagtgaataaaattaaagtgacacattccaaaccacataggaaactttttctgatctgtaggttgtttctattgatgtatccttagtttatgttagtttaaagaagcagaatctcatgaaccgtcttattctcttcttagtgtgataaatgag

SEQ ID NO: 65260 - DNA, 1267 bp, Homo sapiens
tgcataaatacatactttatccctagcaactctgcctatacaaaacataaacagccacaaaacctcttttagatcaaattagcaaatacaaagtacctacaatggtatcaatctgtacagttcaacagccagtagccacgtcagtactgagcacttgcaatgtggctagtctgaactcagacgtactgtaagtataaaattcacactggatttcaaaaattaagtatggaaagatttaagactcaaaaaaattaaaaaaaaattttttttagagacagggtctcactttgtcaccaggctggagtgcagtggtacaatcatagctcactgcagccttgaaatcctgggctcaagggatcctcttgcctcagccttcagagaagaggagaccacatctacgcactatcatgcctggaaaatttttaattttttgtagagaaggggtcttgctatgttgcccaggctagtctcaaactcctagcctcaagyaaccttcccacctgggcctcccaaagcactgggattataggcatgagaccatgtctgcctgattaacactttttatatactgttacctgtattactaaaattaatttcacctatttcttttcactttttaaaacgtggctattttacaatttataactacagatatcactcacattgtagcttacattgtatttccaccagttagcactaatctggacacttcagccgtactgcaacttctggttcaacgggcatatcagtcttcttggaaggcaagttaccatcactgccaacttaggcaaggatgtagtttatgactattccagtgtgtctgttcaaggtatgaggattttaaccggatactcaaaggcaatccaacccatggcaagattatcacaagaagatacacactcatgaagttgttgaaagcttaccaaggaaaatgactacagatttttaaggaattcaaagatccccttaggccaatacatccttttctggataacttatctttcaaagagttactatcaaatagtatgcccttggattttatgccatttgccatttgaaaacattaaatgtatttgtctaagtattatttcctctatttttcacaaaagccctgagagatagttagggacagttattatatacgttgttacaacacagcctgagagttgtgtttcaggaggggacctatacatgactgcagctgattctgtgtttaaactccacttccaaatttcccagtattctatcttaatcagaaaaacagaca

SEQ ID NO: 65261 - DNA, 1267 bp, Homo sapiens
tgcataaatacatactttatccctagcaactctgcctatacaaaacataaacagccacaaaacctcttttagatcaaattagcaaatacaaagtacctacaatggtatcaatctgtacagttcaacagccagtagccacgtcagtactgagcacttgcaatgtggctagtctgaactcagacgtactgtaagtataaaattcacactggatttcaaaaattaagtatggaaagatttaagactcaaaaaaattaaaaaaaaattttttttagagacagggtctcactttgtcaccaggctggagtgcagtggtacaatcatagctcactgcagccttgaaatcctgggctcaagggatcctcttgcctcagccttcagagaagaggagaccacatctacgcactatcatgcctggaaaatttttaattttttgtagagaaggggtcttgctatgttgcccaggctagtctcaaactcctagcctcaagtaaccttcccacctgggcctcccaaagcactgggattataggcatgagaccatgtctgcctgattaacactttttatatactgttacctgtattactaaaattaatttcacctatttcttttcactttttaaaacgtggctattttacaatttataactacagatatcactcacattgtagcttacattgtatttccaccagwtagcactaatctggacacttcagccgtactgcaacttctggttcaacgggcatatcagtcttcttggaaggcaagttaccatcactgccaacttaggcaaggatgtagtttatgactattccagtgtgtctgttcaaggtatgaggattttaaccggatactcaaaggcaatccaacccatggcaagattatcacaagaagatacacactcatgaagttgttgaaagcttaccaaggaaaatgactacagatttttaaggaattcaaagatccccttaggccaatacatccttttctggataacttatctttcaaagagttactatcaaatagtatgcccttggattttatgccatttgccatttgaaaacattaaatgtatttgtctaagtattatttcctctatttttcacaaaagccctgagagatagttagggacagttattatatacgttgttacaacacagcctgagagttgtgtttcaggaggggacctatacatgactgcagctgattctgtgtttaaactccacttccaaatttcccagtattctatcttaatcagaaaaacagaca

SEQ ID NO: 65262 - DNA, 1267 bp, Homo sapiens
tgcataaatacatactttatccctagcaactctgcctatacaaaacataaacagccacaaaacctcttttagatcaaattagcaaatacaaagtacctacaatggtatcaatctgtacagttcaacagccagtagccacgtcagtactgagcacttgcaatgtggctagtctgaactcagacgtactgtaagtataaaattcacactggatttcaaaaattaagtatggaaagatttaagactcaaaaaaattaaaaaaaaattttttttagagacagggtctcactttgtcaccaggctggagtgcagtggtacaatcatagctcactgcagccttgaaatcctgggctcaagggatcctcttgcctcagccttcagagaagaggagaccacatctacgcactatcatgcctggaaaatttttaattttttgtagagaaggggtcttgctatgttgcccaggctagtctcaaactcctagcctcaagtaaccttcccacctgggcctcccaaagcactgggattataggcatgagaccatgtctgcctgattaacactttttatatactgttacctgtattactaaaattaatttcacctatttcttttcactttttaaaacgtggctattttacaatttataactacagatatcactcacattgtagcttacattgtatttccaccagttagcactaatctggacacttcarccgtactgcaacttctggttcaacgggcatatcagtcttcttggaaggcaagttaccatcactgccaacttaggcaaggatgtagtttatgactattccagtgtgtctgttcaaggtatgaggattttaaccggatactcaaaggcaatccaacccatggcaagattatcacaagaagatacacactcatgaagttgttgaaagcttaccaaggaaaatgactacagatttttaaggaattcaaagatccccttaggccaatacatccttttctggataacttatctttcaaagagttactatcaaatagtatgcccttggattttatgccatttgccatttgaaaacattaaatgtatttgtctaagtattatttcctctatttttcacaaaagccctgagagatagttagggacagttattatatacgttgttacaacacagcctgagagttgtgtttcaggaggggacctatacatgactgcagctgattctgtgtttaaactccacttccaaatttcccagtattctatcttaatcagaaaaacagaca

SEQ ID NO: 65263 - DNA, 1249 bp, Homo sapiens
aaccaaaagcataagcaagagcagacaaagttaattatactaaggatacatcattttatccttactacctcttgcagtgtctggcatatagtaggagctcaatggatgtccaytgaatgctgaaaagaagtgaaaggtagtagcctcacatctgtgtcctaaagaaggagactaacattttcatacaataccaaaatagatatattcattaaaaatgaaaatagatattcattacagtgtctctgagttaaaaagatggtatagttaaacattctgggctaagcctgtgtgtgtgtgtatgtgctaaaaatatgtttctttaaaggctaatcagccaaggatcgttggggacaaaatcagattcattggcttgatgcattgaaagagtacctgtggaatgccatgtgagcacagaaaggaggaagtgtcttttgtaaagatttggcttcctattaaaggattccagggagagtcttggaatcagagctgggatccagttggttgctgtttctgaggcagattgagagaaagggggattaatgagggattgggtgctgtcaggaggtgaagggagtttagcaattgggtatccccagttatggatgggaatagtaaagcaaaggtagaaagtagtagtcattcaaaaatggaacacaaggagttgtgttgttttgtacctgctgcgtgacttcagaggaaacaacattgcctgttaattttgcttctgactttgtcctctcagcctgatcattgatcattggcagtactaacttttccaagtccaagctgattttcactctttgagtcctggacaggtttttactctttagtttttatttatttatttatttatttatttatttatttatttatttatttatttattttgagacggagtcttgctctgtcgcccaggctggagtgcagtggcacgatctcggctcactgcaacctccgcctcctggattcaagcgattctcctgcctcagcctctcaagtagctggaactacaggcgcgggccaccactcccggttaattttttgtatttttagtagagacgggggtttcaccgtgttagccagaatggtctcgatctcctgacctcgtgatccgcccgcctcggcctgccaaagtgctaggattacaggcgtgagccaccgcacccagctggtttttactctttaaatgtgcattatcttatttgattcccagaatcatcctatatgaatgctattatcttcattttat

SEQ ID NO: 65264 - DNA, 1249 bp, Homo sapiens
aaccaaaagcataagcaagagcagacaaagttaattatactaaggatacatcattttatccttactacctcttgcagtgtctggcatatagtaggagctcaatggatgtccactgaatgctgaaaagaagtgaaaggtagtagcctcacatctgtgtcctaaagaaggagactaacattttcatacaataccaaaatagatatattcattaaaaatgaaaatagatattcattacagtgtctctgagttaaaaagatggtatagttaaacattctgggctaagcctgtgtgtgtgtgtatgtgctaaaaatatgtttctttaaaggctaatcagccaaggatcgttggggacaaaatcagattcattggcttgatgcattgaaagagtacctgtggaatgccatgtgagcasagaaaggaggaagtgtcttttgtaaagatttggcttcctattaaaggattccagggagagtcttggaatcagagctgggatccagttggttgctgtttctgaggcagattgagagaaagggggattaatgagggattgggtgctgtcaggaggtgaagggagtttagcaattgggtatccccagttatggatgggaatagtaaagcaaaggtagaaagtagtagtcattcaaaaatggaacacaaggagttgtgttgttttgtacctgctgcgtgacttcagaggaaacaacattgcctgttaattttgcttctgactttgtcctctcagcctgatcattgatcattggcagtactaacttttccaagtccaagctgattttcactctttgagtcctggacaggtttttactctttagtttttatttatttatttatttatttatttatttatttatttatttatttatttattttgagacggagtcttgctctgtcgcccaggctggagtgcagtggcacgatctcggctcactgcaacctccgcctcctggattcaagcgattctcctgcctcagcctctcaagtagctggaactacaggcgcgggccaccactcccggttaattttttgtatttttagtagagacgggggtttcaccgtgttagccagaatggtctcgatctcctgacctcgtgatccgcccgcctcggcctgccaaagtgctaggattacaggcgtgagccaccgcacccagctggtttttactctttaaatgtgcattatcttatttgattcccagaatcatcctatatgaatgctattatcttcattttat

SEQ ID NO: 65265 - DNA, 662 bp, Homo sapiens
accgtcatattaaatgtgtgtttacttgcctggctgagttttacgttccctcaactgtcttagaagcttatgaaaagcatgccatggcatattttctaaaacatagtacctttttttttttcttcaaacaagaaaacaacactcacagtagcctgtggctgccagtggatttcagagctcaagcctaaagaaagttaaaaaccataggctcagcatagaggtcaacatttgcttatttttctccaaaacacattagttccagggagttttggataaccaggagactgggagacttgggccaggagaatagaatagctttgaacaaagataggaggctaagcatatcccgactagatactgcaacttctcatytctccttccacttattccaaccaggcagtgacaacagtaacaagttatttttatccattgcagcagtggcactctaaggaaagaaaatgattgtcatattgttgaatccatactgcaaatatgtgaaagggggtgtgctccagaaagagagagcaagcccaatagtttggaaagggatataactagtagtgatgagagatgtttggcaaagttggggctgacatcagtcattataccacagagcgaatatgcagattctgaaaatgcacagctctccagttactcagatc

SEQ ID NO: 65266 - DNA, 727 bp, Homo sapiens
gccctagccagttgtttctgtttacagccctgtctgtgattgatccagctctggaaaagcccatttatcatgaggaaccaaagcttcatggcctactgtctattttgttgctttattccctagcactaaatgggacttcaggacctcccacttgttccagtacccaatgacatgcctatatttccacactcagtttgcccttcccttcagcccctctagctctcagccttmctgggaccttaaataagtcacgcagctcctttcaccaactcttttcttgttctcgttacttctgggctcttctgcctttctatctcgtctccttctctcagcagctcactgtcctttccaatttcagctgaaatcagattccttctcccttgcctttgctttcccacctcccatggcctctcttatcatttattatttaactcagtcaccatattatgtatgcacaagagccatttctgaacatggtcggcatgaaaaaaataggacccaaagcagaagcaaacacctcttccctatcagtctcacagctccattgtcatcctgctccagtcctgagcaaggtccagcgaaacagccagatctggccaacacaccctcaagcccaattaacttcttaggttggacacagggaaaatttccagatggctttttacagatatccttcaatttatgtaagagatgccttcctggaagtggatgtttgaatgaaattcca

SEQ ID NO: 65267 - DNA, 727 bp, Homo sapiens
gccctagccagttgtttctgtttacagccctgtctgtgattgatccagctctggaaaagcccatttatcatgaggaaccaaagcttcatggcctactgtctattttgttgctttattccctagcactaaatgggacttcaggacctcccacttgttccagtacccaatgacatgcctatatttccacactcagtttgcccttcccttcagcccctctagctctcagccttcctgggaccttaaataagtcacgcagctcctttcaccaactcttttcttgttctcgttacttctgggctcttctgcctttmtatctcgtctccttctctcagcagctcactgtcctttccaatttcagctgaaatcagattccttctcccttgcctttgctttcccacctcccatggcctctcttatcatttattatttaactcagtcaccatattatgtatgcacaagagccatttctgaacatggtcggcatgaaaaaaataggacccaaagcagaagcaaacacctcttccctatcagtctcacagctccattgtcatcctgctccagtcctgagcaaggtccagcgaaacagccagatctggccaacacaccctcaagcccaattaacttcttaggttggacacagggaaaatttccagatggctttttacagatatccttcaatttatgtaagagatgccttcctggaagtggatgtttgaatgaaattcca

SEQ ID NO: 65268 - DNA, 727 bp, Homo sapiens
gccctagccagttgtttctgtttacagccctgtctgtgattgatccagctctggaaaagcccatttatcatgaggaaccaaagcttcatggcctactgtctattttgttgctttattccctagcactaaatgggacttcaggacctcccacttgttccagtacccaatgacatgcctatatttccacactcagtttgcccttcccttcagcccctctagctctcagccttcctgggaccttaaataagtcacgcagctcctttcaccaactcttttcttgttctcgttacttctgggctcttctgcctttctatctcgtctccttctctcagcagctcactgtcctttccaatttcagctgaaatcagattccttctcccttgcctttgctttcccacctmccatggcctctcttatcatttattatttaactcagtcaccatattatgtatgcacaagagccatttctgaacatggtcggcatgaaaaaaataggacccaaagcagaagcaaacacctcttccctatcagtctcacagctccattgtcatcctgctccagtcctgagcaaggtccagcgaaacagccagatctggccaacacaccctcaagcccaattaacttcttaggttggacacagggaaaatttccagatggctttttacagatatccttcaatttatgtaagagatgccttcctggaagtggatgtttgaatgaaattcca

SEQ ID NO: 65269 - DNA, 660 bp, Homo sapiens
cagcaagacaagaagaaataattgaaaaatactgactactggatttcaaagatggaagactggtgatctaaatatgcagcagaaggttgggatggaagtcctactagagtgggtcagagagagaaatggcagtgaaaatgtgcaggaaataaaggcaaaccttttggagcacttgtactacaatgagaaacagggaaatggcctggtagctaaaggaagatatgtggtagaggaagtggggaggtttgggtggtttcaaatggatcatcctttagrctattgggaaaatttaactagaaaagaaaatgactattgacacagaagagaagggctagttaatacacaaagtaatggaaaaagatgggatccagactgcaagaggaggcctgtggactccacatggacacttcgcccataataagaggaggaaaggcagaatataggtacatatacgggtaggagggtagacatagtgggaagacatttagggaatttctgtctgattgtttcagatgcagcacttcaacagagagaggaaggataaaggatcactcaaagatatttccaaaaattttgccttaagtaatcagcagaatggtggcccaataacaaatcatgatcatcatcactatcatcaccaatttatagcatttaatttag

SEQ ID NO: 65270 - DNA, 1605 bp, Homo sapiens
ctgtgctcaattctaatcatgtcataaaatattctgccaatctaaatatacacatttttgcaaagtagtgaggagggtagagatattagtttccttgaaatactctaaacttaaaaataagaataaattccaaagaaataattttggatgtcaccctccttttaaaaatgtaagaatgtgatttaaagtttattccattaaataattttcttcaaagatttccaaaattccaacagatagtcttgggtacacagccaacgtaactaggtaaccaaaaccaagtgtgtatttttaatgtccactgtggaatcttctagttgttgttggcaggctttatagctctatgcaattaaatttcaagaaaattaataaatctctgtcattctatgtataactaatatagaaactagtttgctacttaacccaactattagtcaagtggtttatatgcttttactgattgcttagattacttcattaataagttccattaatatatgtaaaattacacctgagctaagtgctatgaaagaactacactgctatgggaggtgaagggcaagcagttgggagtttttctaagagacaagggaatactaaagaaagcacaatgcctaagaggaattcctccaatatgccatgcatcaggaaaagatataccatatccacaaagccaaaagagagagaataagcrgaagcaagctgaaaaacatattggaatggtagacgaggttatctgcacagctcgtgggtcttacaaaggactcaaaaacatttctacttcaaattaaagaaaactacattaactataaatgagatttagcctaaatctaatcctctctcatataggaaaggtaaacagtggatagataaatatagagcaacatcatccagtttcctatatttcccttgagctaagcacataaatgaaaaacattgcctacctttgacaaataatctctgcagatagaactaggtccttaaattcacagaatttaattaaactttggtaaactgccttattccctgaattaggttacacttaaacttatactaagcttatttcaaaaggagaatgtacaactttctaaggtaacttaaaccatctttagtaaatcttacttcccaacataaatctctagtaattgtgcttttcatactcaaagagaggcgatcaatagctaacctcatttcctctcttgctgtcctgctacattttttccatagtacttaacaccatctgatgttgtgtgtgtgcatttattacctatttctccccagtagaatgtgagcttcaaaatgacaaggttggggggttgttttttgctttttttttttctgttttgttcattgctatatatccttagcctagaagagtgccaggaatacagtaaacacccagcaaatataggtatatgactgagtgaggaacagaataaataagcaaacaaatcaataattactgagttcaaccagttatcaccaaccgagaactctaatagtagaaacaggcctacattcacatgcacaaacttatctttaaaatcatagatgttagatgcgtcagtgaccaattctttgaagaatttaatataccaataacat

SEQ ID NO: 65271 - DNA, 1605 bp, Homo sapiens
ctgtgctcaattctaatcatgtcataaaatattctgccaatctaaatatacacatttttgcaaagtagtgaggagggtagagatattagtttccttgaaatactctaaacttaaaaataagaataaattccaaagaaataattttggatgtcaccctccttttaaaaatgtaagaatgtgatttaaagtttattccattaaataattttcttcaaagatttccaaaattccaacagatagtcttgggtacacagccaacgtaactaggtaaccaaaaccaagtgtgtatttttaatgtccactgtggaatcttctagttgttgttggcaggctttatagctctatgcaattaaatttcaagaaaattaataaatctctgtcattctatgtataactaatatagaaactagtttgctacttaacccaactattagtcaagtggtttatatgcttttactgattgcttagattacttcattaataagttccattaatatatgtaaaattacacctgagctaagtgctatgaaagaactacactgctatgggaggtgaagggcaagcagttgggagtttttctaagagacaagggaatactaaagaaagcacaatgcctaagaggaattcctccaatatgccatgcatcaggaaaagatataccatatccacaaagccaaaagagagagaataagcagaagcaagctgaaaaacatattggaatggtagacgaggttatctgcacagctcgtgggtcttacaaaggactcaaaaacatttctacttcaaattaaagaaaactacattaactataaatgagatttagcctaaatctaatcctctctcatataggaaaggtaaacagtggatagataaatatagagcaacatcatccagtttcctatatttcccttgagctaagcacataaatgaaaaacattgcctacctttgacaaataatctctgcagatagaactaggtccttaaattcacagaatttaattaaactttggtaaactgccttattccctgaattaggttacacttaaacttatactaagcttatttcaaaaggagaatgtacaactttctaaggtaacttaaaccatctttagtaaatcttacttcccaacataaatctctagtaattgtgcttttcatactcaaagagaggcgatcaatagctaacctcatttcctctcttgctgtcctgctacattttttccatagtacttaacaccatctgatgttgtgtgtgtgcatttattacctatttctccccartagaatgtgagcttcaaaatgacaaggttggggggttgttttttgctttttttttttctgttttgttcattgctatatatccttagcctagaagagtgccaggaatacagtaaacacccagcaaatataggtatatgactgagtgaggaacagaataaataagcaaacaaatcaataattactgagttcaaccagttatcaccaaccgagaactctaatagtagaaacaggcctacattcacatgcacaaacttatctttaaaatcatagatgttagatgcgtcagtgaccaattctttgaagaatttaatataccaataacat

SEQ ID NO: 65272 - DNA, 1605 bp, Homo sapiens
ctgtgctcaattctaatcatgtcataaaatattctgccaatctaaatatacacatttttgcaaagtagtgaggagggtagagatattagtttccttgaaatactctaaacttaaaaataagaataaattccaaagaaataattttggatgtcaccctccttttaaaaatgtaagaatgtgatttaaagtttattccattaaataattttcttcaaagatttccaaaattccaacagatagtcttgggtacacagccaacgtaactaggtaaccaaaaccaagtgtgtatttttaatgtccactgtggaatcttctagttgttgttggcaggctttatagctctatgcaattaaatttcaagaaaattaataaatctctgtcattctatgtataactaatatagaaactagtttgctacttaacccaactattagtcaagtggtttatatgcttttactgattgcttagattacttcattaataagttccattaatatatgtaaaattacacctgagctaagtgctatgaaagaactacactgctatgggaggtgaagggcaagcagttgggagtttttctaagagacaagggaatactaaagaaagcacaatgcctaagaggaattcctccaatatgccatgcatcaggaaaagatataccatatccacaaagccaaaagagagagaataagcagaagcaagctgaaaaacatattggaatggtagacgaggttatctgcacagctcgtgggtcttacaaaggactcaaaaacatttctacttcaaattaaagaaaactacattaactataaatgagatttagcctaaatctaatcctctctcatataggaaaggtaaacagtggatagataaatatagagcaacatcatccagtttcctatatttcccttgagctaagcacataaatgaaaaacattgcctacctttgacaaataatctctgcagatagaactaggtccttaaattcacagaatttaattaaactttggtaaactgccttattccctgaattaggttacacttaaacttatactaagcttatttcaaaaggagaatgtacaactttctaaggtaacttaaaccatctttagtaaatcttacttcccaacataaatctctagtaattgtgcttttcatactcaaagagaggcgatcaatagctaacctcatttcctctcttgctgtcctgctacattttttccatagtacttaacaccatctgatgttgtgtgtgtgcatttattacctatttctccccagtagaatgtgagcttcaaaatgacaaggttggggggttgttttttgctttttttttttctgttttgttcattgctatatatccttagcctagaagagtgccaggaatacagtaaacacccagcaaatataggtatatgactgagtgaggaacagaataaataagcaaacaaatcaataattactgagttcaaccagttatcaccaaccgagaactctaatagtagaaacagscctacattcacatgcacaaacttatctttaaaatcatagatgttagatgcgtcagtgaccaattctttgaagaatttaatataccaataacat

SEQ ID NO: 65273 - DNA, 1064 bp, Homo sapiens
aacttttgatgttacttcatatccttttatcttttttggtgaaagctgtattcttttcttaacctttttatttacatctaaacctaaaagaatatcaaatcccctttcatcacgagctgccactggaattcgtgttggacagacagattctataaagcaaaagcaataaaagttggttaatcatggactattcaaacaataaaagaaaaatcaagggagaaatactagacaatatagtattctatcattagaattataaaatctacatatgtatacaaatgtatagtatataaatgtatatgaatacattttctgagaaaatgtagaagtattttacacatttaagagtgagatcttaatatgcttttttctctaaaaaataagggataaaagtaaaacaaaaatataaatatttgttaatgtattgtctttagcaaaaaattgagacaatagcaatatgagacaatataacacctatggaaaagaaaaacaatggaacaggatttatsattctcatccaggatttcctattaactagtcatacaactttggataatgcttttaatttatttaattcaaaaatgaacactaaaattcttttcttgcattcttagcatttaaggggtaaaaagtattttctgttcttgattttctttccagttcaagcagcttatatttctatagctcaaatatcattagtctgtctctctggaaaaaacttaacctgggtcccatctattcatgaaagttcttcagacggacatattatctcatctataattatatattaatcatacttataaagaatattttcttaagaataatcattagcattacatagtcagctatataggtaataagtatgatatactttagctgaagtatacaatgactgaaaaaatttactaaagatgattaatagcagactttaacaagcagagggaaaagaatcagcaaactcaataattggtcatttgaaattatccagttagagaaacaaaaagaaaaaggaagagaaagagtgaagaaagcctaagagatttaagcaacaccatcaagcatac

SEQ ID NO: 65274 - DNA, 862 bp, Homo sapiens
tttgatgtccttaattatttttgtttaaattgcatggactaaggtttactttttgtgctgtaaagtttcataggttttgacaatgccttgtgccatgtatttgccaatacatactaagatagtttgagctatttaattttatattattatattgtattattttatgttatttactagtacaatgcattgtcaaaaccyataaagtaaggttttgaaatagtccaaactattttcaattatttaatatttgactttttttttttgtcttttgagacagggtctcactctttcacccaggctggagtgcagtggcttgatcacagttcactgcagccttgatttcctgagctcaagcaatccttccacctcagcctcccaaataactaggaccacagatgcacaccaacacaccgaactaattaaacaatttttttgtagagatgaggtctcattatatcacccaggttggtctcaaactcctgggctcaagtgatcctcctgccttggcttcccaaagtgctgggattacaggcatgagccactgtgcccagccttgaccactttttttggaccggcaattttgagtggttcaatccaatataagttgaaatttaagccaatctattatttacatgcagttacatgaaatagctaaaacttttgagtaagtattgttatcataaagatatctcataatcttaactacatagttatatatatatattttttctcctgcctcagcctcctgagtagttgggattataggcacgcactgccacaccaagctaatttttgtatttttagtagagatgggatttcaccatgtcggccaggatggtctccatctcctgacctcatgatc

SEQ ID NO: 65275 - DNA, 873 bp, Homo sapiens
tttgcttctttggtatcgtgtagcacattcagtacaagtgatgtcctccgctctcaataagtgcttcctaaagaactcacatttcacccattcagaaccttgcatggtgtagtagctgaagttactacttcaaggactccttctctttatcttgggtagagaggaacaatgtgaactcagcaaagggatcatgaaaacagattttctcttatgttacttgtagaaagcttttagatttatcattgaaaattgcgaattttgaaccatatccattttgacttaattgtattttaaaacagtggttctcaaaaaagtgtggttccgggaccaacatcatcagcatcgtgggaacttgttagaaacacaaatccttgggcctcaccactgaactaatgacttagaacaggggttggactggggaattctgtgttttaacaagtcctccaggtgattctgacgcatgccagtttgagaatcacttttttaaaccaatgtttaagtccaatctaacctacttaactattaacagtctacctggctatctacctgtggtagtgtagtatgtaacagcccacagcacacatgctcaattccaagcctatctgctctcckcaatcagtatattcctcctgcaatttatcatggtatgaaaggcccagtgatacacatatttggtcattttcaaatagtgcctgccagcatagtggctcacaccagtcatcccagcactttggtagggtgaggcgagatgatcatttgagctcaggagtttgagaacagcccggacaacatggcgaaaccccatttctacaaaaaaaaaaaaaaaattagccagcggtagtggcgtgctacttgggaggctgaggtgggagg

SEQ ID NO: 65276 - DNA, 873 bp, Homo sapiens
tttgcttctttggtatcgtgtagcacattcagtacaagtgatgtcctccgctctcaataagtgcttcctaaagaactcacatttcacccattcagaaccttgcatggtgtagtagctgaagttactacttcaaggactccttctctttatcttgggtagagaggaacaatgtgaactcagcaaagggatcatgaaaacagattttctcttatgttacttgtagaaagcttttagatttatcattgaaaattgcgaattttgaaccatatccattttgacttaattgtattttaaaacagtggttctcaaaaaagtgtggttccgggaccaacatcatcagcatcgtgggaacttgttagaaacacaaatccttgggcctcaccactgaactaatgacttagaacaggggttggactggggaattctgtgttttaacaagtcctccaggtgattctgacgcatgccagtttgagaatcacttttttaaaccaatgtttaagtccaatctaacctacttaactattaacagtctacctggctatctacctgtggtagtgtagtatgtaacagcccacagcacacatgctcaattccaagcctatctgctctccgcaatcagtatattcctcctgcaatttatcatggtatgaaaggcccagtgatacacatatttggtcattttcaaatagtgcctgccagcatagtggctcacaccagtcatcccagcactttggtagggtgaggcgagatgatcayttgagctcaggagtttgagaacagcccggacaacatggcgaaaccccatttctacaaaaaaaaaaaaaaaattagccagcggtagtggcgtgctacttgggaggctgaggtgggagg

SEQ ID NO: 65277 - DNA, 1541 bp, Homo sapiens
tgggtataggcttttattcttttaatgtgctgccatagcctgcctactaatctttttgttaagtgttgtccagtaatactcacagtaaatttgtctatagttttagtgtgtgtgtgcatgtccttgttgggctttgacatcaaggtcatagtagcttcaggtttggaaataaggccccactaagatgataggagtctatgttcattcctttttaacgaatctccttctttctggctagagagtagtctccagattctgcaagacagtgtgaaatggcaccacatggtaagtgatattctataaggatatcaacgtaactgaattctcttggaaaaaataactttttactgtttccattacaaggatgttacaagtaatgtttaaaatacatgtgttgggggagaaaggggaaaaaaaggcaatttggttaaaaattgtttttacctgtatgtccctgcagcgtcatttcttcttcattctctcatgctcctgaaaatgaccttcagcactaatttaaaaggatgaaactttttacccatcctactatttatcccacccatcctccatcaactgactggtctctaggatagtctcctcactcatattttcccttccatcatcactgtggaaacccttcccatcaaagtgaagcccttctacctagtctctgattgaatgatattatttccttatttgagagccattctagtttgtgtctttccttttccatttatcttattttctaggccttttgcagatttcttgtctttgatctcttgagagcagagattgtgattattcatctttgtgttctctgcagtgtgtagcacagtattgtcttagtggatattcatccagtcatttttcaaaattgttttaaaattctgaacctctaatagaccctaccatcattttaatccacatccaaattaacacagaagaaacaggggagggctaccataagaaaatatgtaatcttctacctttacaaaagaaatgcttcagcgtggatattaaaacttttatagattttgttcataatccataggtcgaagtcgctgataattaaagcaaaacattgatatcatttggtggacaaattgatttttccagccaggacatgaggagagttgttaataaaaccatattctattaaacagggtcatttaatcctttcccatttgtatagtccatagagtcagaaagatgcagtttagaattacactcactcaatcactcattcatttattcaacaaatatttattgagaatctactatgcattaaatattatgctatctttttgagaaacaaagtagaataaaactcaaatactagccccaaattgcttatagtccaatgggagagattttwaaaaattcagtagttagaaactgttataagctatgaagaagttacaatattcaggaaatgatagaagtatatttggagggacattcaaatatgactttgggccagagaagatttgagctggactttgaaagatgagtagaatgcctagatgaaagtgaagtacattcca

SEQ ID NO: 65278 - DNA, 690 bp, Homo sapiens
catcatatgctgtagtgtaaagcttgtagagaagggggcattggtgtctttttgttgttgttgacactttatcactccttataactgacacaaaccctgagaagagaaacaggaaggaaactccctgttcttaccatgatgcttttgttcaaaatagctgaaaacagcagagctgacggaaaccaatttgagtgtgacagctgatttgagaaagaatgaattaagagattcaggctcttctgctatgttgaaatcatttttactgaaagattagctgtttggaacagggattgactttgtctctctgaaagtaggcatgaagagttcggttagaggaaccgttacagatggaggagaaacttgaggaaaggtctttcctgtagtgtgactacagtattaacattcccagattatatgaaagagaaaggaagcttcattaaatgaaacattggaatcaggaagactccggcttggctccctgagcattctaacttgttctgagcctagtctcgacagaagtagcctgacacaagtggctcagatcaagggtccatattacgggcagagtaaaaataggtcccagtttcattagacttctcatacatttaaggaaaaaaagatttgttgccataggaacagaccagttgttktctgtcttgtgggattttaggagctggggagataggagga

SEQ ID NO: 65279 - DNA, 754 bp, Homo sapiens
gtaaaaccccatctcttctaaaaatacaaaaattagccaagcgtagtagtggtgggtgcctgtaatcttagctactcaggaggctgaggcagaagaatcacttgaacctaggaggtggaggttgcagtgagctgagatcgcgccactccactccatcttgrgcaagagagcaagattctgtctcaaaaaaaaaaagaaaaagaaaaaaaattaatgtcacacagatttcttagagagtttaaacaatagataggttgtatttcaatttaacagtaaaacaaaatgttttaagagactacaaaagtctatcctactggatattggaaacctttttctttactacttttctatactaatgactttattaaagaaagatgttttggttaagcctaatctcttcaactcaatcactgttctagttattaaggctttactgtacggttatataggcaagtaaattccaaaatggtgtagaattgtatgtatgctttaatataaaagagatgtaaaacaccaagaagccagaaattcatcttctggttcttttttttgttttgttttttgtttttttgagacagggtctcgctctgtcacccaggctggagtgcagtggcatgatctcagctcactgcagcctcaaactacaggactcaggcaatcctcccttctcagcctcccaagtagctgagactacaggtgtgtgccaccacacctggctaattttttttttaatttcttgtacaaatgggatccc

SEQ ID NO: 65280 - DNA, 754 bp, Homo sapiens
gtaaaaccccatctcttctaaaaatacaaaaattagccaagcgtagtagtggtgggtgcctgtaatcttagctactcaggaggctgaggcagaagaatcacttgaacctaggaggtggaggttgcagtgagctgagatcgcgccactccactccatcttgagcaagagagcaagattctgtctcaaaaaaaaaaagaaaaagaaaaaaaattaatgtcacacagatttcttagagagtttaaacaatagataggttgtatttcaatttaacagtaaaacaaaatgttttaagagactacaaaagtctatcctactggatattggaaacctttttctttactacttttctatactaatgactttattaaagaaagatgttttggttaagcctaatctcttcaactcaatcactgttctagttattaaggctttactgtacggttatataggcaagtaaattccaaaatggtgtagaattgtatgtatgctttaatataaaagagatgtaaaacaccaagaagccagaaattcatcttctggttcttttttttgttttgttttttgtttttttgagacagggtctcgctctgtcacccaggctggagtgcagtggcatgatctcagctcactgcagcctcaaactacaggactcargcaatcctcccttctcagcctcccaagtagctgagactacaggtgtgtgccaccacacctggctaattttttttttaatttcttgtacaaatgggatccc

SEQ ID NO: 65281 - DNA, 2993 bp, Homo sapiens
atccaggggttcccaacctcagattcaaccaaccaaggattgaaaagatagtttttgccggatgaggaactgcagatacggaaggctgactgtatttcatttcaacaggggtctcgattatcctcctcattgaatggtaatatgttacctgttttggcaaagtttggagtaaacttctgtctccacctccctgtattgcagctgtcagcatggtgaagagcctgcaaggcgtgttgatgtgtgctgcctagggctgcctaacacaaaccaaacaaacatcccttctcaggatgggagaagagctttttatgagaccttcttctgtcttcctcttgcccgtctctgcctttgcccccataagcaagtgacagttgtgyagtgtttagccactacgtatttctcatatctgtcttcatggtggagcttctgatactcctatcttagggacacacctttgattagaagaagtaatattagcctctaaaattttttgaactttaaaatcaagaccttacttgggataacgctggtttcctcctctgttgaaattgtttatctcttggactcagaaactatttagcctttctgtggcacacagtggatttcaaaacatttggtattatcagatttctaagcaaggatgtgatgtaattattttactaccaaatgaggattcttttgagagaagcagccacttaacgtgagagtaattgcttgaatatgaagtggtgtgtaggaattgagtgagaactgagatcttgacttgcacgtatgctgtagataaaacctactatgaatttgctggtgcagggccacagaaaaaactagtcatgagaattgccagaattgtcagaaatgtgttttgagatgatttatattcattattctaactcttcacaataacattttgcttattttgcaattggaatttgtggaggtccaagaagtcaagatggtaattaatttgcccaggacagctggtaggtgcatcagctcagagcagcgggtggtggggaacttgtcttagacattcacgatgcaggtcatgacactggactataaagctgtagctctaggggtctgtattctgtgctctgtaacttgacatgatctgggacccaaagttaaataactaatcaagagaagtcaggtgcttttttgttaaacacggaactccagtattcctctgaagcttaaggagagagtaagtaacatggtattgggcttgttccctgtccttaacacaagaattcttggaattgccggattacatattcttctcccctgagaggacacccagtgcaagcatggctcacatgcctaaggtctgtgttagatagatcatatcatggatccagcataattaagtagagatgcattttcttggtttaagttaccttaggggaaaaaaagaataaaattcttcaggttcaaccttggagttcttcttctttttttttttttgaggcgaggtcttgctctgttgccgggctggagcacaggggcgcaatctcgactcaccgcaacctcctcctcccaggttcaagcaattctcctgcctcagcctcccgagtagctgggactacaggcgagtgccaccatgcccagctaatttttgtatttttagtagagacggggtttcaccatgttggccaggatggtctggagctcttgacctcatgatccacccgcctcggcctcccaaagtgctgggattacaggcgtgagccaccatgttcagcctggagttctttcctgattctatgaggctgtgagtagtggttcttaaccaggaatgttatcaccaccacctcaggggaggtgcacatttcttgatatggggggtcggggttgggggcaccagggatgccccatgtcctgtaattactgtccacagtgtccacacaggaagataccggttgtatcagagacttggtctaggattcacaggtttttcttccagttggatttaatgagcttctctctgtcctaagacccaaatgctgtggggtttgccaacattacaaggtaggcatttcacagaacggaattctggcaggccatcttcatgcagtgaattgctgtcattggtaggtggtgctttttattgcccccatctccagcagagatcttataaattccctttgcctgaaatcagcatggttgatctcccacctaaccagatttagagtgctttgttttctttaacatactttcccagagaactcgggagttttaatacttttaaaaacaactataactttttataaagtagggaatacttgactgaagtgttgtgtgttaaaacatactgcatgcatccgtggtgtctttagttatggggaatgttagtagatgtgactcagagagggttccttgaggaactcattttagaaaatgcagtgatttcctccttagtggttcagaatgcacattaaagagtctttaaattctaagtaaatctgcttaactctgtctgcgtcagagtttcccaagctaacctggagcacagaacacttctgagataatgcgtggtatgttggtgttgatacacgcagtatactcatgctctcagagaccggtttgataaatgccgatctttgagaatttagaggcctaatttgtagacaacattcctgataaaatgagttcacctgtagtggccagtcctttggggtttccataagcaatgtgagatacattattttctaataagacatccaacaatttgaatattaatgttcaatggaattaattttgcatgctaaaagccaactgatgattttagtggatctctcttaacaatcattctttctcatgtctaaagatgagtttgggttatttctcctgaaattatggttaactaactttcatgaattttactgaaaatgatgagaaacagaaaaatctgggatttgtagacagtggcgagaaactctctgtctagtatttatacccctcaccaagcagcactcctgggccctcaagctctg

SEQ ID NO: 65282 - DNA, 2993 bp, Homo sapiens
atccaggggttcccaacctcagattcaaccaaccaaggattgaaaagatagtttttgccggatgaggaactgcagatacggaaggctgactgtatttcatttcaacaggggtctcgattatcctcctcattgaatggtaatatgttacctgttttggcaaagtttggagtaaacttctgtctccacctccctgtattgcagctgtcagcatggtgaagagcctgcaaggcgtgttgatgtgtgctgcctagggctgcctaacacaaaccaaacaaacatcccttctcaggatgggagaagagctttttatgagaccttcttctgtcttcctcttgcccgtctctgcctttgcccccataagcaagtgacagttgtgtagtgtttagccactacgtatttctcatatctgtcttcatggtggagcttctgatactcctrtcttagggacacacctttgattagaagaagtaatattagcctctaaaattttttgaactttaaaatcaagaccttacttgggataacgctggtttcctcctctgttgaaattgtttatctcttggactcagaaactatttagcctttctgtggcacacagtggatttcaaaacatttggtattatcagatttctaagcaaggatgtgatgtaattattttactaccaaatgaggattcttttgagagaagcagccacttaacgtgagagtaattgcttgaatatgaagtggtgtgtaggaattgagtgagaactgagatcttgacttgcacgtatgctgtagataaaacctactatgaatttgctggtgcagggccacagaaaaaactagtcatgagaattgccagaattgtcagaaatgtgttttgagatgatttatattcattattctaactcttcacaataacattttgcttattttgcaattggaatttgtggaggtccaagaagtcaagatggtaattaatttgcccaggacagctggtaggtgcatcagctcagagcagcgggtggtggggaacttgtcttagacattcacgatgcaggtcatgacactggactataaagctgtagctctaggggtctgtattctgtgctctgtaacttgacatgatctgggacccaaagttaaataactaatcaagagaagtcaggtgcttttttgttaaacacggaactccagtattcctctgaagcttaaggagagagtaagtaacatggtattgggcttgttccctgtccttaacacaagaattcttggaattgccggattacatattcttctcccctgagaggacacccagtgcaagcatggctcacatgcctaaggtctgtgttagatagatcatatcatggatccagcataattaagtagagatgcattttcttggtttaagttaccttaggggaaaaaaagaataaaattcttcaggttcaaccttggagttcttcttctttttttttttttgaggcgaggtcttgctctgttgccgggctggagcacaggggcgcaatctcgactcaccgcaacctcctcctcccaggttcaagcaattctcctgcctcagcctcccgagtagctgggactacaggcgagtgccaccatgcccagctaatttttgtatttttagtagagacggggtttcaccatgttggccaggatggtctggagctcttgacctcatgatccacccgcctcggcctcccaaagtgctgggattacaggcgtgagccaccatgttcagcctggagttctttcctgattctatgaggctgtgagtagtggttcttaaccaggaatgttatcaccaccacctcaggggaggtgcacatttcttgatatggggggtcggggttgggggcaccagggatgccccatgtcctgtaattactgtccacagtgtccacacaggaagataccggttgtatcagagacttggtctaggattcacaggtttttcttccagttggatttaatgagcttctctctgtcctaagacccaaatgctgtggggtttgccaacattacaaggtaggcatttcacagaacggaattctggcaggccatcttcatgcagtgaattgctgtcattggtaggtggtgctttttattgcccccatctccagcagagatcttataaattccctttgcctgaaatcagcatggttgatctcccacctaaccagatttagagtgctttgttttctttaacatactttcccagagaactcgggagttttaatacttttaaaaacaactataactttttataaagtagggaatacttgactgaagtgttgtgtgttaaaacatactgcatgcatccgtggtgtctttagttatggggaatgttagtagatgtgactcagagagggttccttgaggaactcattttagaaaatgcagtgatttcctccttagtggttcagaatgcacattaaagagtctttaaattctaagtaaatctgcttaactctgtctgcgtcagagtttcccaagctaacctggagcacagaacacttctgagataatgcgtggtatgttggtgttgatacacgcagtatactcatgctctcagagaccggtttgataaatgccgatctttgagaatttagaggcctaatttgtagacaacattcctgataaaatgagttcacctgtagtggccagtcctttggggtttccataagcaatgtgagatacattattttctaataagacatccaacaatttgaatattaatgttcaatggaattaattttgcatgctaaaagccaactgatgattttagtggatctctcttaacaatcattctttctcatgtctaaagatgagtttgggttatttctcctgaaattatggttaactaactttcatgaattttactgaaaatgatgagaaacagaaaaatctgggatttgtagacagtggcgagaaactctctgtctagtatttatacccctcaccaagcagcactcctgggccctcaagctctg

SEQ ID NO: 65283 - DNA, 2993 bp, Homo sapiens
atccaggggttcccaacctcagattcaaccaaccaaggattgaaaagatagtttttgccggatgaggaactgcagatacggaaggctgactgtatttcatttcaacaggggtctcgattatcctcctcattgaatggtaatatgttacctgttttggcaaagtttggagtaaacttctgtctccacctccctgtattgcagctgtcagcatggtgaagagcctgcaaggcgtgttgatgtgtgctgcctagggctgcctaacacaaaccaaacaaacatcccttctcaggatgggagaagagctttttatgagaccttcttctgtcttcctcttgcccgtctctgcctttgcccccataagcaagtgacagttgtgtagtgtttagccactacgtatttctcatatctgtcttcatggtggagcttctgatactcctatcttagggacacacctttgattagaagaagtaatattagcctctaaaattttttgaactttaaaatcaagaccttacttgggataacgctggtttcctcctctgttgaaattgtttatctcttggactcagaaactatttagcctttctgtggcacacagtggatttcaaaacatttggtattatcagatttctaagcaaggatgtgatgtaattattttactaccaaatgaggattcttttgagagaagcagccacttaacgtgagagtaattgcttgaatatgaagtggtgtgtaggaattgagtgagaactgagatcttgacttgcacgtatgctgtagataaaacctactatgaatttgctggtgcagggccacagaaaaaactagtcatgagaattgccagaattgtcagaaatgtgttttgagatgatttatattcattattctaactcttcacaataacattttgcttattttgcaattggaatttgtggaggtccaagaagtcaagatggtaattaatttgcccaggacagctggtaggtgcatcagctcagagcagcgggtggtggggaacttgtcttagacattcacgatgcaggtcatgacactggactataaagctgtagctctaggggtctgtattctgtgctctgtaacttgacatgatctgggacccaaagttaaataactaatcaagagaagtcaggtgcttttttgttaaacacggaactccagtattcctctgaagcttaaggagagagtaagtaacatggtattgggcttgttccctgtccttaacacaagaattcttggaattgccggattacatattcttctcccctgagaggacacccagtgcaascatggctcacatgcctaaggtctgtgttagatagatcatatcatggatccagcataattaagtagagatgcattttcttggtttaagttaccttaggggaaaaaaagaataaaattcttcaggttcaaccttggagttcttcttctttttttttttttgaggcgaggtcttgctctgttgccgggctggagcacaggggcgcaatctcgactcaccgcaacctcctcctcccaggttcaagcaattctcctgcctcagcctcccgagtagctgggactacaggcgagtgccaccatgcccagctaatttttgtatttttagtagagacggggtttcaccatgttggccaggatggtctggagctcttgacctcatgatccacccgcctcggcctcccaaagtgctgggattacaggcgtgagccaccatgttcagcctggagttctttcctgattctatgaggctgtgagtagtggttcttaaccaggaatgttatcaccaccacctcaggggaggtgcacatttcttgatatggggggtcggggttgggggcaccagggatgccccatgtcctgtaattactgtccacagtgtccacacaggaagataccggttgtatcagagacttggtctaggattcacaggtttttcttccagttggatttaatgagcttctctctgtcctaagacccaaatgctgtggggtttgccaacattacaaggtaggcatttcacagaacggaattctggcaggccatcttcatgcagtgaattgctgtcattggtaggtggtgctttttattgcccccatctccagcagagatcttataaattccctttgcctgaaatcagcatggttgatctcccacctaaccagatttagagtgctttgttttctttaacatactttcccagagaactcgggagttttaatacttttaaaaacaactataactttttataaagtagggaatacttgactgaagtgttgtgtgttaaaacatactgcatgcatccgtggtgtctttagttatggggaatgttagtagatgtgactcagagagggttccttgaggaactcattttagaaaatgcagtgatttcctccttagtggttcagaatgcacattaaagagtctttaaattctaagtaaatctgcttaactctgtctgcgtcagagtttcccaagctaacctggagcacagaacacttctgagataatgcgtggtatgttggtgttgatacacgcagtatactcatgctctcagagaccggtttgataaatgccgatctttgagaatttagaggcctaatttgtagacaacattcctgataaaatgagttcacctgtagtggccagtcctttggggtttccataagcaatgtgagatacattattttctaataagacatccaacaatttgaatattaatgttcaatggaattaattttgcatgctaaaagccaactgatgattttagtggatctctcttaacaatcattctttctcatgtctaaagatgagtttgggttatttctcctgaaattatggttaactaactttcatgaattttactgaaaatgatgagaaacagaaaaatctgggatttgtagacagtggcgagaaactctctgtctagtatttatacccctcaccaagcagcactcctgggccctcaagctctg

SEQ ID NO: 65284 - DNA, 2993 bp, Homo sapiens
atccaggggttcccaacctcagattcaaccaaccaaggattgaaaagatagtttttgccggatgaggaactgcagatacggaaggctgactgtatttcatttcaacaggggtctcgattatcctcctcattgaatggtaatatgttacctgttttggcaaagtttggagtaaacttctgtctccacctccctgtattgcagctgtcagcatggtgaagagcctgcaaggcgtgttgatgtgtgctgcctagggctgcctaacacaaaccaaacaaacatcccttctcaggatgggagaagagctttttatgagaccttcttctgtcttcctcttgcccgtctctgcctttgcccccataagcaagtgacagttgtgtagtgtttagccactacgtatttctcatatctgtcttcatggtggagcttctgatactcctatcttagggacacacctttgattagaagaagtaatattagcctctaaaattttttgaactttaaaatcaagaccttacttgggataacgctggtttcctcctctgttgaaattgtttatctcttggactcagaaactatttagcctttctgtggcacacagtggatttcaaaacatttggtattatcagatttctaagcaaggatgtgatgtaattattttactaccaaatgaggattcttttgagagaagcagccacttaacgtgagagtaattgcttgaatatgaagtggtgtgtaggaattgagtgagaactgagatcttgacttgcacgtatgctgtagataaaacctactatgaatttgctggtgcagggccacagaaaaaactagtcatgagaattgccagaattgtcagaaatgtgttttgagatgatttatattcattattctaactcttcacaataacattttgcttattttgcaattggaatttgtggaggtccaagaagtcaagatggtaattaatttgcccaggacagctggtaggtgcatcagctcagagcagcgggtggtggggaacttgtcttagacattcacgatgcaggtcatgacactggactataaagctgtagctctaggggtctgtattctgtgctctgtaacttgacatgatctgggacccaaagttaaataactaatcaagagaagtcaggtgcttttttgttaaacacggaactccagtattcctctgaagcttaaggagagagtaagtaacatggtattgggcttgttccctgtccttaacacaagaattcttggaattgccggattacatattcttctcccctgagaggacacccagtgcaagcatggctcacatgcctaaggtctgtgttagatagatcatatcatggatccagcataattaagtagagatgcattttcttggtttaagttaccttaggggaaaaaaagaataaaattcttcaggttcaaccttggagttcttcttctttttttttttttgagrcgaggtcttgctctgttgccgggctggagcacaggggcgcaatctcgactcaccgcaacctcctcctcccaggttcaagcaattctcctgcctcagcctcccgagtagctgggactacaggcgagtgccaccatgcccagctaatttttgtatttttagtagagacggggtttcaccatgttggccaggatggtctggagctcttgacctcatgatccacccgcctcggcctcccaaagtgctgggattacaggcgtgagccaccatgttcagcctggagttctttcctgattctatgaggctgtgagtagtggttcttaaccaggaatgttatcaccaccacctcaggggaggtgcacatttcttgatatggggggtcggggttgggggcaccagggatgccccatgtcctgtaattactgtccacagtgtccacacaggaagataccggttgtatcagagacttggtctaggattcacaggtttttcttccagttggatttaatgagcttctctctgtcctaagacccaaatgctgtggggtttgccaacattacaaggtaggcatttcacagaacggaattctggcaggccatcttcatgcagtgaattgctgtcattggtaggtggtgctttttattgcccccatctccagcagagatcttataaattccctttgcctgaaatcagcatggttgatctcccacctaaccagatttagagtgctttgttttctttaacatactttcccagagaactcgggagttttaatacttttaaaaacaactataactttttataaagtagggaatacttgactgaagtgttgtgtgttaaaacatactgcatgcatccgtggtgtctttagttatggggaatgttagtagatgtgactcagagagggttccttgaggaactcattttagaaaatgcagtgatttcctccttagtggttcagaatgcacattaaagagtctttaaattctaagtaaatctgcttaactctgtctgcgtcagagtttcccaagctaacctggagcacagaacacttctgagataatgcgtggtatgttggtgttgatacacgcagtatactcatgctctcagagaccggtttgataaatgccgatctttgagaatttagaggcctaatttgtagacaacattcctgataaaatgagttcacctgtagtggccagtcctttggggtttccataagcaatgtgagatacattattttctaataagacatccaacaatttgaatattaatgttcaatggaattaattttgcatgctaaaagccaactgatgattttagtggatctctcttaacaatcattctttctcatgtctaaagatgagtttgggttatttctcctgaaattatggttaactaactttcatgaattttactgaaaatgatgagaaacagaaaaatctgggatttgtagacagtggcgagaaactctctgtctagtatttatacccctcaccaagcagcactcctgggccctcaagctctg

SEQ ID NO: 65285 - DNA, 2993 bp, Homo sapiens
atccaggggttcccaacctcagattcaaccaaccaaggattgaaaagatagtttttgccggatgaggaactgcagatacggaaggctgactgtatttcatttcaacaggggtctcgattatcctcctcattgaatggtaatatgttacctgttttggcaaagtttggagtaaacttctgtctccacctccctgtattgcagctgtcagcatggtgaagagcctgcaaggcgtgttgatgtgtgctgcctagggctgcctaacacaaaccaaacaaacatcccttctcaggatgggagaagagctttttatgagaccttcttctgtcttcctcttgcccgtctctgcctttgcccccataagcaagtgacagttgtgtagtgtttagccactacgtatttctcatatctgtcttcatggtggagcttctgatactcctatcttagggacacacctttgattagaagaagtaatattagcctctaaaattttttgaactttaaaatcaagaccttacttgggataacgctggtttcctcctctgttgaaattgtttatctcttggactcagaaactatttagcctttctgtggcacacagtggatttcaaaacatttggtattatcagatttctaagcaaggatgtgatgtaattattttactaccaaatgaggattcttttgagagaagcagccacttaacgtgagagtaattgcttgaatatgaagtggtgtgtaggaattgagtgagaactgagatcttgacttgcacgtatgctgtagataaaacctactatgaatttgctggtgcagggccacagaaaaaactagtcatgagaattgccagaattgtcagaaatgtgttttgagatgatttatattcattattctaactcttcacaataacattttgcttattttgcaattggaatttgtggaggtccaagaagtcaagatggtaattaatttgcccaggacagctggtaggtgcatcagctcagagcagcgggtggtggggaacttgtcttagacattcacgatgcaggtcatgacactggactataaagctgtagctctaggggtctgtattctgtgctctgtaacttgacatgatctgggacccaaagttaaataactaatcaagagaagtcaggtgcttttttgttaaacacggaactccagtattcctctgaagcttaaggagagagtaagtaacatggtattgggcttgttccctgtccttaacacaagaattcttggaattgccggattacatattcttctcccctgagaggacacccagtgcaagcatggctcacatgcctaaggtctgtgttagatagatcatatcatggatccagcataattaagtagagatgcattttcttggtttaagttaccttaggggaaaaaaagaataaaattcttcaggttcaaccttggagttcttcttctttttttttttttgaggcgaggtcttgctctgttgccgggctggagcacaggggcgcaatctcgactcaccgcaacctcctcctcccagsttcaagcaattctcctgcctcagcctcccgagtagctgggactacaggcgagtgccaccatgcccagctaatttttgtatttttagtagagacggggtttcaccatgttggccaggatggtctggagctcttgacctcatgatccacccgcctcggcctcccaaagtgctgggattacaggcgtgagccaccatgttcagcctggagttctttcctgattctatgaggctgtgagtagtggttcttaaccaggaatgttatcaccaccacctcaggggaggtgcacatttcttgatatggggggtcggggttgggggcaccagggatgccccatgtcctgtaattactgtccacagtgtccacacaggaagataccggttgtatcagagacttggtctaggattcacaggtttttcttccagttggatttaatgagcttctctctgtcctaagacccaaatgctgtggggtttgccaacattacaaggtaggcatttcacagaacggaattctggcaggccatcttcatgcagtgaattgctgtcattggtaggtggtgctttttattgcccccatctccagcagagatcttataaattccctttgcctgaaatcagcatggttgatctcccacctaaccagatttagagtgctttgttttctttaacatactttcccagagaactcgggagttttaatacttttaaaaacaactataactttttataaagtagggaatacttgactgaagtgttgtgtgttaaaacatactgcatgcatccgtggtgtctttagttatggggaatgttagtagatgtgactcagagagggttccttgaggaactcattttagaaaatgcagtgatttcctccttagtggttcagaatgcacattaaagagtctttaaattctaagtaaatctgcttaactctgtctgcgtcagagtttcccaagctaacctggagcacagaacacttctgagataatgcgtggtatgttggtgttgatacacgcagtatactcatgctctcagagaccggtttgataaatgccgatctttgagaatttagaggcctaatttgtagacaacattcctgataaaatgagttcacctgtagtggccagtcctttggggtttccataagcaatgtgagatacattattttctaataagacatccaacaatttgaatattaatgttcaatggaattaattttgcatgctaaaagccaactgatgattttagtggatctctcttaacaatcattctttctcatgtctaaagatgagtttgggttatttctcctgaaattatggttaactaactttcatgaattttactgaaaatgatgagaaacagaaaaatctgggatttgtagacagtggcgagaaactctctgtctagtatttatacccctcaccaagcagcactcctgggccctcaagctctg

SEQ ID NO: 65286 - DNA, 1046 bp, Homo sapiens
tcctcgctaggaaaccagcacttgtgaaggagcgcagttttgtttactaaataactttttccttttcgcctgtctaaaaatgcaatgtcagttaatcccttcgttaacccctcagagtaaagttgggggactgggagaaaactcagttccgttgtatggcggtgtcgtggaatgaggctccccgggactggtaaactttcaggcaaggactcaaccttgtatatttcaactggcccgaaaccgcgggcctgtgtgtacatagaattgctagcatttcccctccattccgcaagcaccttaacaacaaaaagtcatatagctcgagcagaatttatccaattcatttattcatccacaactattgactgcstacttcgatttagaaacagtgctagtaccagggaacaaaacacacatagtttctacccaattaaatgatttttttcagttcgccagtactgaagattgaggtttgtttttacaagtctgacacttttctatcagtttggttaatctcattaaaactaagaggaaagcctaaagagaggaaggtgtctcctttgaacgtttcactttaatgaactagttcacgtactgggaggatgaagtggtgaggatatttctgttttaaaattttcttctcttccctcattgagatacgagggggagggcgttttattcacctgggtatgactaggtccccgcacctattacatatttaatttatgcgtgctgaaagaatggacttggaaatgtaggtgcgcgttacatttatctctttgtttctacgctgcctggacgaattaccgtatttcctgtcccaggagctcccaaaacctttggggaaggagcgcacttcgggaggcgcgtacaggtgggcctgtttgtccctttccacctgcataatgggggcccacaaggcgctgtccccatgccccgagaggcgtgtctcggcacagcaaagtccacctgcgctggtccgcggagccccgcccagctaggtgagctagggggcggggcgcgggggcgcggtgacgcgtgacgcc

SEQ ID NO: 65287 - DNA, 682 bp, Homo sapiens
tgaaggcagcgttgaggccttggtgagcacagttgtgagagaagaggtagaaaccaaatcgtagcagtggaaaaacaaatgaagcttgaagaacagaaggtgttttaaagaaagctgtctgttgggaagtgaaggaaggtgacgttcctacaaaaagagaagtacaccataacgttggtgagagttgtttgctcttttattttatttttgtttttaatcgtgggatactagcacatctctaaacttcatattcccactgttctctgttctctcttcaactctgttacagaaaacgatacatctggtccttttttttttttttttttttttttttttttgagacggagtctcactctgtctcccaggctggagtgcagtggtgtgatctcggctcactgcagccttcacctcccaggttcaagtgattmtcatgcctcagcctggtactataggtgtgcaccagcacgcccagctgattttttgtatttttagtagagacacggtttcaccatgttggccaggctggtctcgaactcatgatctctggtgatctgcctgccttggcctcccaaagtgctgggattacaggcgtgagccaccatgcccagcccatctgataccctttagaaatggacacacgagtcagaaggtgttattggattctccttgttaacttattgca

SEQ ID NO: 65288 - DNA, 558 bp, Homo sapiens
ttttagattctctgactcttgtagaaaattaaatgcaaatttttatttggcactgactgtaggaatgaatgtgtgtcaaatgaactaaatcagataacattaagaagtatttagcaaaaggcttggaactagcataaatattatttcactttctagctgcacacatatagacctggccaaaaattaaaattcattacattcagtgaaaccatatgtatctggtttataaaacttattatccaaggcataattaatcaagcatattaaattaacagacagatatttgttgagctcatactgtgcaagaggctctgtgttggatgctgtatcacatgttccatctgaaaaaacagtggataacttctkttcactggcttagatttctggaactatgtggatattttacttaggtggtaataataatgaatgagagcccttgattaaatgttgtgctcgaaggtatgtgaatcattggccatccatgtatcaaacaaaacatattcctgctttatatattttgcccagaaatatattgataatactgtttatccatttcaa

SEQ ID NO: 65289 - DNA, 1660 bp, Homo sapiens
ccactgataaaggatataatttttttctatttataaccttttggatataaacaacaaaatcacatactttcactgacactatcttacaaccagaacataaatgagttctaggatgaaatggattctataaccatcaaagtagaaaattagaaagaatttgagtcctttgtgataccactgagctgctaacacaacccactccaaaacttgcccaactccaagacttcctgctacgtgagatgatgacttagcgttcctgcctccataagcaaggatttctgttgcttgcagcctaaagcatcctacctgatactcttcattctctttcactgtgggttaaaaattcaacaagccactttggatttgggaggtatgaatctttcaccaactcagacaacaactaaaatccctcttcagccttctcaaaacctaatgcttctcaaccctgtaagctttcatcataagtgccctcctttgtccctttaatcagtcacagttctcttctgtatcacgcaaggttccaggtccttccccaggatgctgaattccagacatggatgcattatctagcacggtttggatactgccaaactttataagaatttcctccaatctgtcgcatatgtatactaatgctatggccagatttcaggggctacagagtttagcaataatgtgactgtgtctgaaacggaaaaagtcaacatatctacaaatgggtgccacttaaatttgagtggctcatgtcgaaatggagacagtcaggtgctgtggaaagcatagcaagcgactgtggctgtaacagaatggtgggtatttcaggggtgactgcctaggaaaagaagagcccaagagtcagacatggtcactgtgtatcaacactctctctttctgaacaaccagcatctagagtggagaagggcaatgggggaggctctctggtcctctgatgtcctttgaatgtcccaatggcatttcttagggcctttgcatgtcctgctccctctgcctctgaccttcccatagctagctcctctccattctcaagtctcagaccaatgtcttcccagagaaggctttcctgatcacccccaatgtccatttgtctatcacatcaccctcatttaccatgatcatggactgactttcttgcttaggtactgccgtccccataccacttctctctatctgaaagcttttgcatatttgcttgttgtctatccaatcccccaaatttaagctttgaaagtggagaccttgactgttttctctgaatgtttccccagcacttagaccagtgcctggccaagtaggcgcttaaaaaatatttgtggractaaggaattggatgataaaatgagaactcctgggcctaggtcagccccagcctccaaaaatgttgtcagtaccccgtgtctgtgtcctctgctccctcctgtacactggccccagtgtcttccattgtacatgagcttcacctagaaaccagaggagtgatgatgtggccatgcacagttccaagtgtgtatccttaatgctcataatcccagagggaaaagagtgagcctctctctcattgcctttactaacaatcccagggaaacactctatgtgacagagggtgaccctgtgcctagacttggccaagtactgtggccag

SEQ ID NO: 65290 - DNA, 651 bp, Homo sapiens
tgatgcctactctttgtaaataaattttttaaaccacacagttttaattatatattagcagcagtagtagttgttgtttttaagactacgtttttctccaaacgcttgtagatacaagatcagctttgctttttttggccggaacactagttctactacaattgaagcaaaatagtcttttattatagaaatcagatcactcccctgtgtttccagtagctaactccactttgtagagaatgctatccgaagtatccatccctctttcaattgtttaatttttctctcttttaaatgcttacaaaataagtcacatttaccaacggctgcacaccgtctaccacatctgttagagatcatgaggaagtggcaagagtcctttcttccaccactctcggtgtgagagactggccgtcgctcctcacgagcagcytatccaaaaacggattcactactcaaggaacaggaaggggacaggcttcaggcagcccaggccctacctactggttaccaccccttcccaggagctgagcctggaccatccatgggaagagctgtgcccacggccaccagagttgagaccagggcttcccagccacaattcctcctttcagaacccaagagacagctcctcacaactctgcaactcta

SEQ ID NO: 65291 - DNA, 472 bp, Homo sapiens
aacctttgagttaagagctagatagtaaacatgtaggttttgcaggccatatggtctccttagcaactactcagttccacagttatagtttgaaagcagctaaagacaatacctaaaggaatggtatgtttgtgttttactttatttacagacattgaaccttgaacttttcaccagtaacaaaatattcttctgtttttttccaggcattaaaaaatgtaaaaactattcttagcttgagggaggagcagaaaacacaaaagtaagagagaagggaatggatttgtccttctagtagtagtttgctactcccactgattgattctgtgctagaatctggagaggagcctattgaaaggattaatgggccrcattctcttgagtgcctgttataccttggcagttaagttaaataccctccagaaaagcattaacttattttgagcattatggagttttgttttgttttgaa

SEQ ID NO: 65292 - DNA, 1280 bp, Homo sapiens
agttgttagaagtggggacagggctggccaacaaatgacctgcagaaaagacagcaacagaggacagaatcccagtgcagtggggggatagctatgccagcagcccatccagagatgtttatagctcctgaaagcaactgctgtgcatgcgtgtgtgggtggggggggggggtaagtcagggaaaacaggctgctttacctctgttaaatgcccttgaaagcatctccatggttataagtgagacaaccagagaggaaggggcaaatgaatacacagtgagcagcccagcaggcctccatgaaaccctgaagctaccccacaggcctcttatagcagcatctccctgggtctattcacagaataccagttccttagaaaactgtgggtgaaattaaaagctccgtggatcaaaaagcttgaaaaacatcaggttamgcaaagttaaacaggtttctttagtatcttgttcagtattctgaagtgaattgtgggccaccaaaagagggggcgccatatgcagaagcctcccaaccctgttgaccaggaagcacggctcatgttgagctactcaccaaatgagctagtgctctatgggatgcattgctctgttttgtttttttttctttctttctttttttgtaaagatgcagtctcactctattgcccaggctggtctcaaactcctgggttcaagccatctgcccacctcagcctcccaaagtgctgagaatacaggtgtgagccgccactcccagctgtttgctcctgagaataacaaacaatggaatcttaggaagatgatgttacccttaaaagagaaagcagtttccgattaaggatcactggagctaagtatcagtggctcggtacaataatggctcatctaccctgtgggatatcttaacactcacaggggagttgttgaaattctttgcatctgctgagtttgaggtggaaactgtagatttacatcatttcagccacgttctacataaatgaatctcagagaaaagatctggccatccctctaccatgggccacttaagaggagagagacagtgacccagcaaattcagttgactgggctgggaacttcaaatggtggatttggtagtttaaactgagatttatcatttgaaagtagagacaacagatgaaaacctatcagcgtggtatttggcatatagtcaatgcacatcaaatgttgacagaatgaaaaatgaattgcagttcagaagaatttttttcttgctatttcaaagaactaatttctgatcac

SEQ ID NO: 65293 - DNA, 531 bp, Homo sapiens
ttgctggggacgtggagacccatgtaagtactttcctcccctgttctcagtagagagtttaaacttaccagcccagcctctgacaacgctaacagcctgaggagatctttatttatttatttagtttttactctggctaggcagatggtggctaaaacattcatttacccatttattcatttaattgttcctgcaaggcctatggatagagtattgtccagcactgctctggaarctaggagcatggggatgaacaagataggctacatcctgttctcacagaacttccactttagtctgggaaacagatgatatatacaaatatataaatgaattcaggtagttttaagtacgaaaagaataagaaagcagagtcatgatttagagtgctggaaacagggctattgcttgagataggaaggtgtatctgaggtgacactgagcagagatctgatggagagaggtagtgagctgtggagtgatgtggggaagacagttccagacagagggaacagcaagagcgaaggctca

SEQ ID NO: 65294 - DNA, 738 bp, Homo sapiens
agaggagatactggtataggaagggcctctcctgcccctattccttttcttaggcagggaggagggagagggaaacaggtcagcckccagcagcaaactgacaacctcttcttggatggcgggaaactccttggcagccagagcccctaagtgttatgtgtcccctgaaagattcagcttcatactctggctgaccccaggaagctacctctgaaaagcatgctcccctttgaaccctgctatgatgttccccgaaaacctgtggctcctcaatcttaactacccgccaaggctcacaactccagaacatgaggcacatgcagcattcacctactgcgtcttcagagaagcagcagttgggaggacagcctttgccatttctttaatttttttattattcatttatttatttattctgagacggagtctcactctgtcgcccaggctgaagtgcagtggcgtgatctcagctcactgcaacctctgcctctagggtccaagcgattctcctgccttagcctccagagtagctgggactatagacacacaccaccacaccccgctaatttttgtaattttagtagagaccaggtttcaccatattggtcaggctggtctggaactcctgacctcaggggacccacctgccttggcctcccaaagtactgggattacaggagtgaaccaccacacccggctctgccctttctttgacccctcccagactggaccatcttg

SEQ ID NO: 65295 - DNA, 738 bp, Homo sapiens
agaggagatactggtataggaagggcctctcctgcccctattccttttcttaggcagggaggagggagagggaaacaggtcagccgccagcagcaaactgacaacctcttcttggatggcgggaaactccttggcagccagagcccctaagtgttatgtgtcccctgaaagattcagcttcatactctggctgaccccaggaagctacctctgaaaagcatgctcccctttgaaccctgctatgatgttccccgaaaacctgtggctcctcaatcttaactacccgccaaggctcacaactccagaacatgaggcacatgcagcattcacctactgcgtcttcagagaagcagcagttgggaggacagcctttgccatttctttaatttttttattattcatttatttatttattctgagacggagtctcactctgtcgcccaggctgaagtgcagtggcgtgatctcrgctcactgcaacctctgcctctagggtccaagcgattctcctgccttagcctccagagtagctgggactatagacacacaccaccacaccccgctaatttttgtaattttagtagagaccaggtttcaccatattggtcaggctggtctggaactcctgacctcaggggacccacctgccttggcctcccaaagtactgggattacaggagtgaaccaccacacccggctctgccctttctttgacccctcccagactggaccatcttg

SEQ ID NO: 65296 - DNA, 738 bp, Homo sapiens
agaggagatactggtataggaagggcctctcctgcccctattccttttcttaggcagggaggagggagagggaaacaggtcagccgccagcagcaaactgacaacctcttcttggatggcgggaaactccttggcagccagagcccctaagtgttatgtgtcccctgaaagattcagcttcatactctggctgaccccaggaagctacctctgaaaagcatgctcccctttgaaccctgctatgatgttccccgaaaacctgtggctcctcaatcttaactacccgccaaggctcacaactccagaacatgaggcacatgcagcattcacctactgcgtcttcagagaagcagcagttgggaggacagcctttgccatttctttaatttttttattattcatttatttatttattctgagacggagtctcactctgtcgcccaggctgaagtgcagtggcgtgatctcagctcactgcaacctctgcctctagggtccaagcgattctcctgccttagcctccagagtagctgggactatagrcacacaccaccacaccccgctaatttttgtaattttagtagagaccaggtttcaccatattggtcaggctggtctggaactcctgacctcaggggacccacctgccttggcctcccaaagtactgggattacaggagtgaaccaccacacccggctctgccctttctttgacccctcccagactggaccatcttg

SEQ ID NO: 65297 - DNA, 632 bp, Homo sapiens
agagaaacagccactgcatgtatagttggaaaaaaaaaaaaaaaaaaggaggaaagctgcaaatactgggaaggcagaatggagaaaaacaagagggagaaaactggaaggttaggtaaaactgtgttccgtcctaggagayacacgatgtgtaagtcctagaaggctagggttgggcaagatcttcagtaaccatctattccagccaggctaggactgtctagccaggatggctgtcacacctgaaagtgttccagggtaaggttttcaggatggggtcctgcctattcttcaaacgcctgttacgttattgcttgttcttaaaattaagtcctatagtatttccagtcatggtgtgtccactttcatttaagcctcttcattttcattttctgtgggtttatgtaataactgggccatccacttctcatacacctttatttctagtgattgaaatcccaggccttgtagtcaaaaagatctgaatcttgataattgctctttctttagtagctctgatcttggtgacgttaccttgcttctttcaggcacacctaactctcataataatgcaaataattatggcattcagcacaggactattgtgagaaataaatgagatagcgtatagg

SEQ ID NO: 65298 - DNA, 632 bp, Homo sapiens
agagaaacagccactgcatgtatagttggaaaaaaaaaaaaaaaaaaggaggaaagctgcaaatactgggaaggcagaatggagaaaaacaagagggagaaaactggaaggttaggtaaaactgtgttccgtcctaggagatacacgatgtgtaagtcctagaaggctagggttgggcaagatcttcagtaaccatctattccagccaggctaggactgtctagccaggatggctgtcacacctgaaagtsttccagggtaaggttttcaggatggggtcctgcctattcttcaaacgcctgttacgttattgcttgttcttaaaattaagtcctatagtatttccagtcatggtgtgtccactttcatttaagcctcttcattttcattttctgtgggtttatgtaataactgggccatccacttctcatacacctttatttctagtgattgaaatcccaggccttgtagtcaaaaagatctgaatcttgataattgctctttctttagtagctctgatcttggtgacgttaccttgcttctttcaggcacacctaactctcataataatgcaaataattatggcattcagcacaggactattgtgagaaataaatgagatagcgtatagg

SEQ ID NO: 65299 - DNA, 803 bp, Homo sapiens
tggaggccaggaactcaagaccagcctggacaacatagtgaggctctgtctctacagaacaattaaaagaattagtagggcatggtggcatgcctgtagtcctagctacatgggaggctgagttgggakgatcacttgagcccagtagtgagaggttatagtgagctatgcaaccactgaacttcaacctgggcaacagagtgaaaccctgtccccccgaccccagccccccaaaaaaaacctaaggtcttccaagttcccttaacagtttcagtctttacaaaggctgagaagaaaaggaaaagggaatcaccttctctgctcatcatcagtcctacatgtcattctgggcctcggccacaccaccaaaatataagatgcctaaacaatccatgaaaaaatcacactacagctggcatagaggatttgatgctccctggtgagggtagtgtgagggattttttttctgatcttcttttcaaagggggattaacgctgatgcttttaagcaattgacatgcacttagagatgtgggtatctagcacaatttacaagggaattgagcaagttcttggttgtttcagtaccataaacgcttgtttgtctagggaccttgtcctccttatttacctctttctaggcaggccctatttctagaaagtcagcctttttgcttctcctaccaaaacttaccctaaggctaaaaggcccaagaacacagggctttagtttgtgaatttagcctcattgaatcataaaagttgagcagaagaaaaattattaaaccctgtcattgatcgac

SEQ ID NO: 65300 - DNA, 530 bp, Homo sapiens
gaaagaagagaaaattgtaaagaatatgaaggaaaacgtgctgaacttaaagtcaagcaaactggaagctaaaactgcctttaattttttgcatattcaggcacagcccttccctttctcaatctcggttttcttttcttataaaactagaacctttgtaacattgcctttctttggttcttgaggctatcacattagggaaagaagactctccaaactgaaaagatgaaagaaagagggagggagaaacggaaaagacaggagaaaggtggtgaatgaaatcagaatattggaaatatagtaaagctgaatattcccctgaaactttcactcctgcatagtgtctaagggggaaaagacatgggatcacttgcaagtgtggccactttatgagcctacctacaggsgaatggaaagtctaataacctgagggaggacactatttctgggaagacttttgggaaattgatggattattgaaactttagactgacttgaataattgttattgttctttagctttacctcaa
